United States Patent Application Publication US 2026/0103690 A1 - sequence listing, part 16

SEQ ID NO: 64751 - protein, 343 aa, unidentified
MTVYVGMDVHRKRSQVAIVDDAGVQQRNRNLANDPAKLIPVLGALPPGTPVAFEAAYGWGWLVDLLEELELEPHLVHPSRCKAIASARLKNDKVDAATLAQLLRADLLPEAWIAPQATRDLRALLRHRASLVRMGTACKNRVHAVLADRGIPDHSSLWTGPGRAWLADLELPATPRAVIQDCCGLLDALATPIARLEREIAGLAKPDPRVQALMVLPGVGRLTAMTLVAEIGDITRFPTARKLCAWAGLTPQVRNSDRKVRHGHITKQGSPWVRGILQEAAQTAKRHPMFANAYGQLARRRGTHIATTAIARRLLARSFHILTQLETAPAPEKASTGRARVSA

SEQ ID NO: 64752 - protein, 345 aa, unidentified
MPVAEVDTFAGIDVSAHELSAALRRGQGHDKPAMTKFPNHSSGHKALVAYLLRGGGRVRVCLEASGNYSLDLALTLQAHRQVEISVINPRRARRFAESLGERSKTDPVDARVLCEYAARMPWVQWQPPSPVALHLRALTRAIADLGVIHTQQNNRAYAAAASQALPVLVVKEMQRHKKYLEQRMTRLRREAVRLIACDPELDRRFRLMLTTIGIAETSALQILGELAVLPDMLDARQWVAFSGLDPRLFKSGKSVEKRPRISRSGSRHLRRALYMPALVALRRDPYLRVFYQNLLARGKARLQAVVAVMRKLLHALFAMFRSNQPYDGSKLCAVDLTVHAIAACA

SEQ ID NO: 64753 - protein, 429 aa, unidentified
MICAAVERCAGIDVGKTLLAVCRMSGPLEGEARVEKQRFGTIRSELEKLRDWLKEGGITHVVMESTGSYWKPVFNVLEGSVKVYLANPQEVKTRKGHKTDDKDGWWLAHLLRHAMIHPSFIPPRPIRELRDLTRRRKRLLSNATAEKNRIQKILEDANVKLGNVLSDVFGMSGQLMLEALLKGDTAPGQIALLAQGSAKKKIPEILAALEGHQMSDHHRRMIRYSLEHLKFLEEQLQQMDRDIAEQIRAAGLEEQWRRLQTVPGIQDRSAANVLAETGADMQQFPTPKHLSSWAGLCPGNNRSAGKNKSSRTTGGNPWLRGTLTESAWAAAATKNCFLKDKFWRLTSKSGGKKPPALIAVAHNILNLVYQVLSTGQPYQERGAPPLQENQRQRMIRHHFHRLGKLGIAIPRYVADSFEPKSKTCMPRTQ

SEQ ID NO: 64754 - protein, 435 aa, unidentified
MEDVTDEPLYRDRVCGIDIGKAELYATIRVPSDKNPARRASETRLFATTRRGVLALADWLRAWQVPAVVMEATSDYWKGPFYRLEAEGFECVLADAKQVRHLPGRPKRDASDSAWLAACFERGSVRPCFVPDPEFRIIRLHTRYRRDLTEERTREKNRVEKLLESAAIKLSSVVTDLHGVTGRDIMDHLIAGERNPKVLAQLARARARRKITELEHALDGAEFFTAEHAALLTAMLARIDQLTAQIGELTTVIERLLAPYEEQLQQAGSMPGWGRRSAEDAVAETGVDMSKFPTGPHLVSWAGRSPLDHQSGKRTGRARHKKGNKYMGAVTGETAVAAGKTATREGARYRRLARKRGKAKAQVALGNTQLKVYHKLLSNPGLRYHDLGPDYYERQAAIRRKIACHVREIETLGLEVTLARIPEPDPDGPATTQAA

SEQ ID NO: 64755 - protein, 354 aa, unidentified
MKRTTKHVALDVHQATTVASVREESGRVIARSVLPTDAAPILEFFHGMRGTIHVAFEEGTQAQWLHDLLAPRVDRVIVCDRRGEARHGNKGDQRDADGLSEQLWRGGLRAVYHGGGAGAELKELTRSYQNLVQDATRVMLRLKALFRARGIRTPGQRVYHPAGRAAWLARLAERGARLRAEALYAELDVLRALRPPAKAAMVAAARRDPAWAVLQSIPFMGPVRGAQLLATMQTPWRFRTKRNLWAYAGLAVVTRSSADYVLVAGQPVRRRRAPLTRGLNRNHNRMLKDVFKGAATAATARPGPLQDFYHGLLTRGMREELARVTLTRKLAAVTLRLWKTGERYDPTKLTMSAR

SEQ ID NO: 64756 - protein, 388 aa, unidentified
MFKTVERPDAPAAIRMDIGAIFVSLELSRSTWLLTSVSPGAAEKMSQHATPAGDLRQLFECLAELKRKALARTGKTYPIIVIQEAGLDGFWIHRALEREGIESHVVDAASIAVPRRRRRAKTDRIDGKTLLRTLMAFKRGEPRVCAMAKPPSVEEEDRRRLGRERKTLIAERVEHVNRIKGLLFTQGAIDYQPLRRDRRARLEALRTGIGDPLPARLKDLISRELDRLELLLAQIKAVEAERDALLAEQSRQAPAAAAMLLAFKGIGPEFATVLWLEGLFRSFANRRQVAAYAGLAPTPWRSGSIAREQGASKAGNPRLRATLIELAWLWRRHQPKSALTLWFEDRVKANGGRVKKALLVALARKLLVALWKYVTTGLVIEGAVMTTA

SEQ ID NO: 64757 - protein, 342 aa, unidentified
MEHYAGIDVSLEWSRVCVVDSSGRIIREAKVASEPEALVGFFGQLGLPVVRIGLEAGPLSQWLYAGLAKAGFEAVLLETRHVKAALSAMIVKTDRKDARGIAQLLRMGWFRPVHCKSPAAQEVRALLVGRKLLQAKLRDVELSIRGILRGFGLKVGEVSKGQFAARVKELVAGHEMLETVIGAMLQARDGLQIEFMRLHRRMLAIVRGDAVCRRLMTAPGVGALVAVTFKTAVDDPERFRTAKAVGAHFGLTPKRYQSGETDVSGGISKVGDAMVRTALYEAANAMLTRTVRISALKRWALEVARRRGMKRAKVALARKLAGVLHRMWANGTDFRWGKEAAA

SEQ ID NO: 64758 - protein, 353 aa, unidentified
MPRSTNLSVAAMGIDIGKNSFHVVGLDQRGAIVVRQRWTRSQIRARLANMPPCLIGMEACVGAHHLSRRLHSLGHDARLMPAKYVKPYRKGQKNDFRDAEAIAEAVQRPTMKFVATKTADQLDLQALHRVRARLVSQRTGIINQIRAFLLERGIAVRQGLRFLRAQLPEVLGKRTDVLSDRMVHVIEDRAADWRRLDERIQGLSGEIQIVASQDPGCKRLMTVPGIGPIISSAMVAAIGSGAVFSNGRDFGAWLGLVPRQISTGDRTILGKVSKQGNRYLRVLFVQAAWVVLIKPQTWERYGLKQWITAAKRRLHPNVLAIALANKLARIAWAVLSKDCDFKCEKTDETPRCA

SEQ ID NO: 64759 - protein, 344 aa, unidentified
MTYYTGLDVSLRSVSVCIIDDTGSVCHETKVAAEVDQVVACLRAFSQDIASVGFEAGALTQYLTYGLQAAGFEVVCMEARQVAAALSAMRNKTDRNDARGIAQILRTGWYSRVHVKSIESHQVRVLLSSRRAVLAKCVDLENEIRGLLKVFGVRLSSHVPHGAYDEAVRPLVEACPILARALVPLLEARHVLYRTYLKLDNEVKAIVRADPVCQRLMTVPGVGAITALTFKAAVDDPARFRSSRTVAAHFGLTPRRFQSGETDNVGHISKAGDPEVRSALYVAAHALVTRSNRWCSLKAWGVRLAKTRGRRRAVIAVARKLAVILHRMWIDDTQFQWGSRGVIA

SEQ ID NO: 64760 - protein, 345 aa, unidentified
MPIVGGLDIHRKQITFDYLDTETGQVCRGQISPADREHLRAWLARFAGRDDVAFAVEGCTGWRYVAEELAAAGATAHLAEPADTAFARGRKRHAKTDKTDCRHLRMLLAEGRLPECWIPPGHILEARALLELYHDLRAEHTAWVQRIHAVLFHHGAPALGEGTLRTEPGVAALRAVTADWLSPAGQLQVATALEILEALETRQHELRHQLTDAARHLAGAKVLAARLYGVGPVTALAITCWLAGKDRFSSSRQAVRFAGLDVTVWSSDRKGPPGRLSRQGPPVLRWAVYEAGKTHARSSAPDYRYYAQVKDRCNGKRAALSEARKILRQACHILTELGDDALAAI

SEQ ID NO: 64761 - protein, 338 aa, unidentified
MATYAGIDLHSNNIYLGVIDRNNERLFNKRLPNKLDIIKKALLPYKKALIGVAVESTFNWYWLVDGLQDAGYKMHLANPSAIKQYEGIKHRDDKSDAFWLAQMLMLGILPEGYIYPKDQRSTRDLLRRRLLYVQQRTAHILSVKSMASRSLGETISTRQIKKLKPQEAHTLFTQEHLKLACRHALATIDFLSSQVKSIEKEIMKHVKLKPEFASLLTMPGIGDILGLTIMLEVGDIHRFKRAGNYASYCRCVKSENISNEKKKGSGNRKNGNKYLAWAYVEAAHFAIRFHPKAKRFYDRKASRTNNTVARKALANKMARASYYIMRDQVAYDESKMFP

SEQ ID NO: 64762 - protein, 311 aa, unidentified
MTDDTIGIDISKATLDIYRLSDGKMTSFSNCCVGFKALALFCKETAVIRIVYEATGAYHSGLERALGAHFPLVKVNPLQARRFAQARGVRAKTDAVDAKMLAVMGDAFALEPSKPISETQYILKELRAFRSGLITDRTRILSRQKTQTLPMTRRQSKARLIQTEKQIVEIDAEIARLIQSSEVMARSMKILRSIPGIGAVCAAAILIEMPEIGGMDRKQVASLTGVAPMTRQSGQWRGKSFIQGGRKVVRDALYMPALVAMRFNPDLKTKYQAMIKAGKPPKVAITALMRKLIELANALIKANRTWVNKTA

SEQ ID NO: 64763 - protein, 345 aa, unidentified
MPIVGGLDIHRKQITFDYLDTVTGEVRRGQIAPADRGHLAGWLAGRFTGQDAHFAVEGCTGWRYVAEELAAAGTEPHVAEPADTAALRGRKRHAKTDRTDSRHLRQLLADGRLPECWIPPAHVLECRALLELYHDLRVEHTAWVQRMHAALFHQGAPQLGEGGLRTAEGLAALQAIAAAQLSPAGQLQVAVGLDKLAALDRHLDVLRRRLLAAARQLAGAKELHARLYGVGPITALALVCWLGGAGRFSSARKAVRFAGLDVTVWSSDRKGPPGRLSRQGPEVLRWCVYEAGKTHSRGCAPDYRYYAAVKDRIDGKRAAISEARKIIRQAVHILAELGDGALAPA

SEQ ID NO: 64764 - protein, 355 aa, unidentified
MDNKKYIGLDVHQATISVAVRDSAGKLVMESILETKASTILDFIRGLGGNLSVTFEEGTSAAWLYDLLKPHVAHLIVCDPRKNALLKVGNKNDRIDPRKLTDLLRAGLLWPVYHGESGVRTLQELARTYLTVTKDLTRVMNRLKGVYRSWAIPCAGQTVYAPRHRSAWLEKLVQPGVRRRAEQLYQQLDKLVEIGREARQELLRESRKHPAREFLSQIPRLGPIRVALLIALLQTPHRFRTKRQLWAYCGLALQTRSSGEYRYTGGQLQHSKRPPAIRGLNVNHNHDLKSLFKSTATQASGANDPWGDFYQNLLARGMKPAMARLTLARKMAAIVLRLWKKGEHFNPEPLKRKSA

SEQ ID NO: 64765 - protein, 400 aa, unidentified
MNPVVGLDVAKGESEAQAFLDKDKPFGKSFKIKHITEDLDTFISFLKEIERKTGVRPAVILESTGHYHTPIIQCLEESQYLYILVNPIISHQAKKTSLRKVKTDAFDAYQLCILYYKEEFEPYKKRGLRLLNLRTLSRQYEAVTNLYIQAKLQFHTILDQVFPEYRGVFGDLFSRVSLQVLKEFPTSEDVLRIGEAKILERIVEMRIKRSAGWARERAAKLIDSAKRNPFQQGVYQSQLFSLDMYITMLLQYQEHLSSIEAEIDVLAEEIEECKIIQSIPGIGGKIAATIISEIGEIDRFNHPKKLVAYAGIDPSVHSSGKFTATINHITKRGSSRLRHALYMAVLCGIRSSRNKKLKEYYDRKRNEGKPSKVAMIACVNKLLHWIYAMLKRNEQFLDFA

SEQ ID NO: 64766 - protein, 359 aa, unidentified
MKYIGCDFHPSFQQIAVLDLETGELVERRLEHGNGEAKAFYESLSGRVVVGLEASGNTYWLERLLAGLGHELWMGDAAQIRKQDSRKQKHDRRDARLILKLMEENRFPRIWMPTVAERDLRQLLIHRRHLVRMRARIKNQLQHIALNQGVQKQGKLWSKAGLELLRKLELEPWTRQRRDTLLEMLEQFDIRIQPLDDAVKQAAETQPRAQRLQTHPGVGPVISLATVLTMGEVSRFPDSRSWVSYLGLNPSEDSSGVRRRLGGISKQGNPFLRYLLVEGAASAAKGDQDLGRMYARLKARRHHGVAKIAVARKLAVRLYWMERTGKRYPEVVRMQGSQSHLVADGMAVRLNRPPASPQP

SEQ ID NO: 64767 - protein, 433 aa, unidentified
MKIKYEDRLKQKLAAITTDTLVVGVDIAKHYQWARFVDFRGMEHDHAIRFKNNKDGFKEILARIREICKRESFKKVVIGMEPTGHYWKTFANWMEKQEGITVVLVNPYATKRAKELDDNSQTKSDKKDALTIAKLVKDGRYFELYMPHDIYAELRVLSTTRTGLNKRKNSLKNTITAVLDEFFPEFVEVFKHPLKGKASRHILKTCPFPKFIMELGEDGVTAEIKKAVKKTVGRKKAGQLVEAAKNSIGVDYGEEAAKFKLRLMIEELELLEEQTEELEEKMASALDQTGYAEYLLSIKGIGVVTLAACLGELGDPARFDNPRQMSRMAGYNLVEDSSGTNKSGTKISKRGRKNLRSILYQMALTMVATNEEMKMLYRYLKNREKAPLRKMQALVVVSKKILTILHTLAKKKENYDPDKVFGHVRKAQLKAAA

SEQ ID NO: 64768 - protein, 408 aa, unidentified
MNAVGIDVSKGKSMVAALRPMGEVALLPQEFLHTEIGLEQMAYAIIALGEDTRVVMEATGRYHEPVAAALYEYGIYVCVLNPLFIKQSGGGSIRKVKTDKADAMKIAKYGLDNWVDLREYTPMGTVRQQLKLCSRQYNLYMKTVVSLQNNLISLADKTFPGVNELFSSPERADGHQKWVDFVMTFWHCDCVCRVSEKAFTERYQKWCKRKGYHFSAEKALDVYAGSCGHFTTLPKNDNTKLLITTAAQQLLAGKMTLAALRAEMTRLAKQLPEYDTVRAMYGVGETTAAQLMAEIGDVRRFPRRSSIVGFAGVDPAVDQSGKHEAKSTPTTKRGSPHLRKTLYQIVCTYLKRSPVDEPVYQFLDKKRSEGKPYFVYMTAAQNKFLRIYYARVKECLEAFDARQAIPQD

SEQ ID NO: 64769 - protein, 337 aa, unidentified
MTRYVGVDLHRRRSVIVVLEADGTELWTTGIDNDPLTLGLEIEKAGPAPEVVLEATWGWYWAADVITEAGGRVHLAHPLGIAGFENRRVKNDRVDARLLADLLRMGRLPEAWIAPGSIRQQRELVRYRRKLSQLRAGLKSQVHAVLGKEGLLPPLNYLWGPGGKTWLDETEMGEAYETRVRSLRRLIKTYDTEITKLDARIASEFKGHPGYEAIQVIHGVGPVFGAIFTAELGDVTRFHSAKHVCSWAGLTPRHRESDTKIHRGAITKQGPPLVRWAAIEAVSKNHGDDPVKDLYRRVAERRGRNKGRVAAARKILTLVYYGLRDHEIRSLAPPEAA

SEQ ID NO: 64770 - protein, 406 aa, unidentified
MRCVIAFDVSRKSSTMAAYNEQGDCEFEGRLIHSKTGFSNLSKIIKDLSEKNNYTLEFVFEATGVYSAALERFLRENNLVYYSLNPLLAHLNTQSLRRNKTDISDAHQLAKNHFKNDYLQTYREDSYYEQMRTMSRRYDEIMKEKIQYKNRLHASLQLSFPDFDTAFINKSKLYYNLVQVFPHPNLILKRSKTVIKNRIKKCTKKNYSLKKLEERAILLIEIAKDSFPAVDETDYSCELVRDYAKKILEMEEEQDEIIQRMTEMSKDRKEYRILRSFPGIKDKLACRIIAELGDLTRFKNNKQLNAYAGIDIVRYQSGNMEYKDRINKRGNSRLRGILYFMIVSMLSAKGKQINHLVDYYYKLKKQPYNKHHKVAVVACMNKFLKVAFHLIQNDLLYDYEKASSQQ

SEQ ID NO: 64771 - protein, 343 aa, unidentified
MEYYAGIDVSLKESSVCVVDAAGKVVREVKIASEPEALVRYFDELDLAVSRIGLEAGPLSQWLHAGLMAAGRDAVLLETRHVKAALSAMTVKTDRKDARGIAQLLRMGWYRPVHAKSAPCKDTRALLAGRKLLQGKLLDVELSIRGILRGYGLKVGEVSRGRFEARIRELTAGHAILETVIGAMLAARMALWNEFTRLHREMLKIARADRVCRRLMSAPGVGALVALTYRSAVDDPSRFAKSGAIGAYFGLTPKKYQSGETDRDGGVSKVGDGMVRTALFEAAHIMLTRAVRFSSLKRWALAVAQRRGMKRAKVALARKLGVVLHRMWVEATEFRWSNAVPAA

SEQ ID NO: 64772 - protein, 350 aa, unidentified
MDITVVGIDLGKSVFHLHGIDARGKEVFRKRLSRSRLADFVAQLPQCLIAMEACGGSHYWGRRFREFGHEVRLIAPQYVKPYVKTNKNDMADAAAIAEAATRGHMSWVEIKSEHAQAVLSVHRVIARRKRARTALINELRGILLEFGIALPKGVQGMKKRLWELRHPVRACDLSIPEPIIPVVDNLLEKLTVLEAAIAQSEQKIEAHVRDDEQCQRLMTIPGIGKANASALVATVGNAAAFDNARQFAAWLGLVPRQQGTGGVTRLMGISKRGDPYLRYLLVHAARACILHVTRKKVRPENMLADWIDGLVNAKHPNVAALAVANKLARMVYAMLRDGTEYAPAVKQAAV

SEQ ID NO: 64773 - protein, 438 aa, unidentified
MRRSKNKTTKKVHFESLPLIHPNAAGIDVGSKEHLVAVPPDRDPQPVRTFEAFTPELHELAAWLKRCGIETVALESTGIYWLSLYEVLEQYGFEIRVVNARHVKNVPGRSKSDVLDCQWIRKLHSFGLLNGSFRPEAQVRKLRTYMRLKDNLVVEGTQAIHHMQKALFEMNVQLSNVISDITGESGLRIIEAILAGERDPEQLAAFCSTRIKAPRQTVAKSLHGNWDEALLFCLKTALDTYRFSQNKIQDCDQCIERQLATFEIKTPLPTSKQTLQTQLHQVCGVDLTKIPGIKEQTAQIIISEVGLDMSRWNTEKQFSSFLGLCPNNLITGGKIIRRSTRKVYNRAADALRLCAQSLTHSKSALGAKYRRLRARLGAPKAIVAMAHHLARLVYRMLRYGQNYVEKGIHQYELKFRLQRIKWLKKEARSLNMQLVAAQ

SEQ ID NO: 64774 - protein, 395 aa, unidentified
MYSLFVGIDVSKDSFSVAALDEKSKNVFSMNPLMNAEGFADLLKMLSSHHKDFSTVVVALESTGPYHLNLYSFLLSKGITTIIVNPLIIANFNRLSLRKTKTDKKDAFTIARYLFLNRDSICNLTSSQVTTDLRDLARERESILKMVASMKNDIRRILQSTFPELEQIADVLCVTMLSFLKGFPSARLINQATSREVAEGFSQKGSGRRISMPYTRIIELAKSSVATTSPSKELILPGKIETLFHLTKRADEITKMLVELCRSIRQAEFGILTSIKGIAAKTAAPFLAELGDHQNFQSYKKMLAFSGLDPTTHQSGKFEGMSMISRRGNRHLRKVIYNMTFCVVRYSGPFRDYFFRRKQEGLPFKKAIMATAHKLVRAIFAMLKSGTCYRATEVV

SEQ ID NO: 64775 - protein, 322 aa, unidentified
MSQPGSLCVDIDVSKAILDNAASSAIEQFSVGNDSDGFDAIIAELRMYAIALVLMKATGGLETAIVCALQAEGFELAVVNPRQARDFARAMGYLAKTDSIDARVLSQMAEVLNRHPERERFIRALPDTECQVLTAMVVRRRQLITMLVAERNRLHPAHPLNRKSINIIIKALEDELARLDADMNSHIHSHFKELAKRLSSIKGVGTMTAAALLAEVPEQGNLSRREISVLVGMVPVNRDSGTMRGRRTIFGGRAGVRTALYMAALVATRFNPVIKVFYMRLLAAGKPKKVALVTCIRKLLTILNAMLRKNEEWNESYHHVAP

SEQ ID NO: 64776 - protein, 404 aa, unidentified
MEEIIKNACGVDVHKKEIVATIMCEKTKQETMSYGTTTKELSEFSKWLSSNNITHVAMESTGPYWKPVYNILEDDFKIILGNARHIKNVPGRKTDVKDSQWICKLLKNGLIQSSLILPKNFRGLKDLSRYRRKLVQTKTAEKNRILKILEDANIKLSNVICDVFGKTGRSILNFLLLDKKTQLPKLHRKLKSSREQIIDSIDGNMTSAHRFLIQKSLKHIEQLEISILEIELEMDNLMNNHIEDLGLLRSVCGVGQTASRDILASIGPDINVFPSKHHIASWAGLCPGNNESAGKRYSGKIGHGDPNLKATLTECAWAAVRTKNTYFAAKFRQLAARRGSKRALIAIAHKILINCYHVLKSREKFRELGEDFLLSKKKDKLKKSYVQKLTNLGFNVQVSPRALQ

SEQ ID NO: 64777 - protein, 400 aa, unidentified
MLSIGIDVSKGKSTVCGMKPGGEIVYTPFEVQHTREGMSELVSLLHNSGEEVRAVLESTGSYHCPVVAALLENGIFVSVVNSLRMKRFCSQSIRKVKTDRIDAMQIALYGLAYWQELQPTRLPEDTYRELQLLARQYYQMTSMLIKAKVDFNALCDQVLPGMQELMSDHAGRHKLSDFVLRYHHTTHILEMGETRFRKDYCKWAEKKGYRNCERMAVLIFATAQNGIPVLPNAPSTQIVITEAIRVLHTVEASRDAILTQMQALAKTLPEYSLVREMPCIGDTLAPRLIAEIGDVRRFHSKRALIAYAGIDAPPYQSGKFCANNRHISKRGNRYLRKTGYEVMQSYVMHKPANDPIFTFIEKKRGEGKSGKLAMVAGLNKFLRVYYGKVTELYRSLPAIE

SEQ ID NO: 64778 - protein, 416 aa, unidentified
MKKHSNSPRKSEPTSKRAKSRGPAQLDPEEVLAELVRKLREKLDPKGVAASTREEHQGRGLRPNLDRLTVGVDLGDRWSQYCILDLEGETLAEGQLRTTQQDIAEFFQALNAARVVVEVGTHSAWVREVICSCGHEVLVANPRSMERSKGRKRKNDRIDANKLARLGRVDPQSLHPMQHRSAEVRQDLVMLRARDALVAARTELINATRGLVKSMGTRLAKCSSPSFAQKVEETVPAEIREALLPVVHMTAALSDCIKGYDEKIEKLASEKYGHTALLRQVKGVGPITSLAYVLTLENPKRFVKSRDVGPYLGLVPQQEDSGDSQPQLGINKAGDTMVRRLLVGSAQYILGPFGPDTDLRRYGLRLCERGGKNAKKRAAVAVARKLAVLLHRLWVTGEVYEPLRHGISATVQAAAA

SEQ ID NO: 64779 - protein, 351 aa, unidentified
MSHKSTPSTSSTIGIDIGKNSFHLVGLDQRGAIVLQQKVSRAQLERRLVNVPNCLIGMEACSGAHHIGRQLAALGHDVRLIPAQYVKPFLKGHKNDYRDAEAIAEAVQRPTMRFVAIKTPEQMDLLALHRVRSRLVSQRTGVINQIRGFLIERGITVRQGVVPLRKALPDILSSQTGPLSPRMIGLLTDLAQDWRRLDERIASVSAEIEALAEQDNSCQRLMTVPGVGPIISSAVVAAIGNGVGFKQGRDFAAWLGLVPKQESTGDRTILGKISKRGNKYLRTLFVQAAHVVLVRRPSAAMRGLWPWIEQASKRLHRNVLAIALANKLARIAWAVLARGHDYQPRIAPHAV

SEQ ID NO: 64780 - protein, 489 aa, unidentified
MTHSSTPAQSTQKRRSPKNPPALPQATSEPQISSADPRAALGRFVGLDVHKKQITYCILDRDGATIREGEIVLTRERLADFASRVLQPGDHVALESTTNCWAVVDVLQQHGLHVVVSNPMATKAIAQSKIKTDKVDAKVLAQLLRCDFLPTVWQPDTATRLRRQLSGRRGSLVGQRTQLQNRIHSVLAMRLIIPPAGLALFGAHGLAWLKTLSKDTIDADGLMMIESDLRLLEPVQLEIDKFDQRLADLAWEDERVKLLMTIPGVSIVVAQAVVAAFGDITRFKSGDAAASYLGLTPSTRQSATSVYHGPITKHGNSTARCMLIQAAQQYSRQAGPLGHFFQRIKRRKCHNVAVVATARKLAVIAWRILTTGEPYRYAQPAATATKLASLRIAATGEKRRGGSPRGVKATAKLPGGGKTIRSLDDTYQNEGLPPRSPLPPRELRHLANTNTLQFAEKISGSQVIPRKPKASDQTHKNTSRQPEISQSEE

SEQ ID NO: 64781 - protein, 339 aa, unidentified
MQLYAGLDLHSSNTYIGIMDKEFKRIFNKRVVNKLPVILDTLKPFQDQLKGIVVESTFNWYWLIDGLMDVGYDCLHLANPSAMKQYEGIKHTDDQHDAFFLAQMLILGILPQGYIYPKEDRPVRDLARKRLFLVRHKTAHILSLQSLIARCCGKRVSANEIRKFTVEDLQQLLQQEYIVLSAQANLDTIVFLKQQILQMEKAIKNKVKLSKQFQQLLTVPGIGLILAMTIMLEVGDIGRFHQVGNFASYSRCVSSQRLSDGKKKGQGNRKNGNRYLSWAFTEAAHLSRRYNEDFRSYYNRKVAQANTSLATKALSNKLARICYYIMRDQVPFRTELLSH

SEQ ID NO: 64782 - protein, 359 aa, unidentified
MSEHTFIGLDVHARSVAAGLLDAATGEVRSCSAPARSAELVPWLRAQGESISVAYEAGPTGFGLARACAAAQIPCLVAAPSRIARAPGERVKTDRRDALRLAKLLRLEELTAVRVPSLMEEGARDLVRAREDARGDLMRARHRLSKLLLRQGLVWEASAWTQAHERWLATQSFEERGLQIAYGEAVAAVASVRGRRDALDAAILEEAAKEPWARTVGRLSCLRGVSTLTAFGLAAEIGDWERFDGRSIGAYLGLVPSESSSGERRRQGAITKTGNGHARRLLVEAAWHQRRPSSHPSRELVRRREGQPALVRVRAEAAGRRLHQRWRRFDARGKRSTVAAVAVARELAGWCWSLATMDA

SEQ ID NO: 64783 - protein, 355 aa, unidentified
MDSKKYIGMDVHKESISIAVMNGAGKIVMECVVETKASMILQFINGLRGDLQVTFEEGTSAAWLYDLLKPYVTKLVVCDPRKNASMREGNQSDKIDARRLAELLRLNHLNPVYHGEHGLRSLKELVRSYLTVTKDLARVMSRVKAIYRSWAIPCTGKQVYAPRHRAEWLGKIGEPGVRRRAEFYYQQLDALRTVRQEVRRELLAEGKKHKAWKRLCQIPSIGPIRSAVLLGILQTPHRFRAKRQLWTYSGLGIETQSSADHRSVNGQLERAKKQISIRGLNRNCNHDLKNLFKGAAIVASSKPGPFQEFYTALLAKGIRPDMARLTLARKIATIVLIVWKRGACFDAQHLKPQTA

SEQ ID NO: 64784 - protein, 361 aa, unidentified
MKSQRTSIGLDVHARSVVACGLDGETGELFERRLTPDHQEILGWIRSLPGPVAATYEAGPTGFGLARFLLAQGVECVVAAPSMLQHPSGDRVKTDARDARHLARLLHLGEIVAVAVPSVETEAARDLVRAREDVRGDLMSARHRVSKLLLRQGIVYYGGKAWTGTHDVWLRGQRFDAPGLQLAYDTAYDTVLAAVDRRNRLDTAIAEMAAAGPYTQVVARLGCLRGVSTLTGFGLAVEIGDWNRLDGRRIGAYLGLVPTESSSGGTRAQGGITKTGNGHARRLLIEAAWHHRAPYRPGVGLRRRWDAASPAARARGQAANRRLHTRWQNFDARKKRPVVANAAIARELAGWCWSLAVLENN

SEQ ID NO: 64785 - protein, 344 aa, unidentified
MDQISRIGMDTSKHVFQLHGVNAAEVPVLRKKMRRKEMVAFFKKLAPTVIAIEACGASHHLARLLQSFGHTVKLIAPQLVKPYVKRGKNDAADAEALCEEMSRPTMRFVPVKTTEQQAALMLVGVRDRLIRNRTQLANTIRGYAAEFGEIAAKGMAHLVPLLERIQADESLPVLARELFAIQAKEYVESQTQIDEVEAKLTAWHRADECSRRLAKIPSVGPIGAVLLRMKTPDPAQFRSGRQFAAWIGLTPKDHSTAGKVRLGVITRAGDEGLRSVLVVGATSVIQHAMRSGKASPWLVALLKRKPPKLAAVALANKTARIAWKMMLTGEAYSAKSAATPAGAV

SEQ ID NO: 64786 - protein, 338 aa, unidentified
MNIARIGIDLAKQVFQIHGVDRTEKVLVRRQLRRSQMLDYFSKLTPCLIGMEACGSAHYWARELGKLGHEVRLMAPQFVKPYVKSGKNDANDAEAICEAVGRPSMRFVAIKTAEQQVIQAEHRIRARLIKSRTALSNEIRGLLAEFGIVVETSIGRLRKALPELLEDSGNGLPGSFRVLLAGLGEELRALDNSITSFDARIVQAVREDDRIKRLLEVEGIGPITASALVAAVGNGTQFNSGRDMSAWLGLTPRQYSSGGKNRLGGISKRGDKYMRMLLIHGARAALNAAKNKEDGRSRWVKSLATRRNKNIATVALANKNARIAWSILSRGESYRKAA

SEQ ID NO: 64787 - protein, 339 aa, unidentified
MIACGFDVHRAQITFDLVDHETGELRRGRITPATRERLRVWLAAVETVRLVVAVEGTTGWRFVAEEVEAAGARVVLAEPGETRALRGPKRRAKTDRADARWLRELLERGELPTSWIPPAHLLELRCRVRLRQTLADERRAWLQRVHAQLFHHGLPVGGELAKPRQRDWLRTVELSPAGRAVVDTALATVDFLDSQLAVLDRELRSYARTHPATRALGRLYGVGDLTAVAIYAAVGDARRFSSARKVIRLAGLDVTVHESDRKRQPGRISRQGPPMLRWAAYEAGLAACRGGSPDHADYLALRERLGHKTACLTVSRRVLRRAYHALVAVGDAALEPAPS

SEQ ID NO: 64788 - protein, 336 aa, unidentified
MIVGCDFHPSFQQVAVLDTESGELQEHKLMHATGEAEQFYRRLVAPSLVGMESVGNSQWFVLLIERLGHEIWIGDAAQIRASYMRKQKTDKRDAAHILKLLAEGRFPRIRVPDAEMRDQRQLLIHRHKLVQIRTRVKNELQHLMMNRGVQKKYKLWSVRGRAELEQLPLQQWAGRRREDLLSLLKMLDQQIEHMDQAVAVAAQQNDRARLLMTQPGVGPVTALAFVLTIGDVKRFARSKQVASYLGLIPRESSSGGKQRMGAISKQGNRLLRVLLVEAANSAVRFDPEFRKEYAHRCHQKHRAVAKVAAARKLAVRLYWMLRTQTPYPKVVTSRAA

SEQ ID NO: 64789 - protein, 518 aa, unidentified
MARPRYSKKPRGFLVQKPLGQFTDRVQAVGPEHFGVVAIDCAKARSKFLLCDFYGNVLIEPTPVEHTQSELRAACERVRSAMGVHALTDIVVAIERTGTYHRPVQDAFRRAHFETRLVHPFASKQFRQPADPDNKTDDADLGGIFRAAVNGFGLLQPLWPDVYLQLQQLSRQRRDLVCKTTILRCQIKETLHQLMPGYAELFRDHFFDTPVALPLARVTGSAQAVLDAGLNGLRQRVPQGLHYRMATLARILDWAGTAAPSQNPWQLLREQLDHLADDFLQKAKEIRGLEQRLAHLLVMTPYVQLLALPGICVVSSGELAAEMGPIEHYADGNRITGRAGLCPSRHQSDQVDSHGPLRRRANRRLRAALLRIADNLIRHNHHYRARAERWQRQNKDPRWIRVKVSKSFSRLVFVMLTGRCLVQHPACQPRHSICDKLLGFHCERQTDIQCALADIERLSAQLSGRTQQEERQMLQNQLDDPRCRRHRGPQAIGKIIPLVLARLGIRIVQSQIEGEDPN

SEQ ID NO: 64790 - protein, 389 aa, unidentified
MIYVGIDVAAEKHACCILTESGKVLKQFTFSNDMPGFEKFHKALLTPSETKIGLESTGVYGNNLAEFLRRNGYETHIFNPLLVKKSIQATTLRKTKTDKSDAKHIAQYTKEHSQPNPKISYHTSELKSLSRGRFSLVRERSKVKTQAKGLLVQLFPEFSQIFSDIFGAAASAVLRQLPSARMIAQCPVGVLTDLLRTASHGRLGKVKAELLIDLAEHSVGIQSMALELQMQMLLQQIDLFTIQINRYEAAIKSEMETIQSPITTIPGIGCVLGAAILSEIGDIRRFTTPAKLQAYAGVDPSVGESGTSVSTPGRMVKHGSHYLRWALCQAARCVSLYDPIFAVYMKAKRDEGKHYCVACSHVAKKLTRVIYSILKNNTVYSLTYSQIGA

SEQ ID NO: 64791 - protein, 379 aa, unidentified
MERIIYIGMDVHSTSYSLCALEPVFGQENKFFFETKVAAEPSNIIKYLDDIESCFANDECTFVTGYEAGCLGFSLYNYLKGRGIDCKILAPTKMSEEKGGKKVKTDKRDARTIAQNLAYGTYSAVFVPGEEDLAVRDYIRMRNDHKAAVKRIKQQINALCMRHGYIYQRTKWTAEHLKYIKGLTLSPLYREILQEYLATMEQLNNKIKAFDVRIEELSQTKRYKDNVGKLACFTGITRSRALAIIAEIGDFRRFLKPLNFAAYVGLVPGEKSSGKKQKRIAITKAGNSHIRKELIEAAQSICRGLPGYKSRALLARQQGNDTTVINYADKASARLRRRYYKLGRCGKKHNVAVTAVARELSCFICGMMNGLTEVQIKKA

SEQ ID NO: 64792 - protein, 360 aa, unidentified
MTGTMTWAAMDVHARSTYAASMDVITGELSRQRFDTGAVEPVVAWLASLPGPVRCCYEAGPTGFGLYRAATAAGVDCRVIAPSKTPRPSGDRHKSDRRDTDLLLRQLMAGALTTVVVPSPTFEAARDLARTREQVRVDLMRCRHRLSKLLLRHGRVWDRSTWTKVHREWLGSQTFAHQNTELAFIDNLAACDGLTARRAALDERLSGVTLDPEFWPTVRRLRAFRGIDTLSALILALEVADFTRFQRAVQLGSWLGLVPSREQSGESDRHGSITKTGSKYARRILVEAAWHYARPPRIGKTLYERQEGLPDHVLQIARRAQTRLYRVHRRMRERKKPGNVITVACARELACFLWAAATAP

SEQ ID NO: 64793 - protein, 367 aa, unidentified
MLKQSHYKIGCDAHKHYSLFAVLDHRGKCIERTRVNHEAGAIRAFLSRFPGGTAVALETVGNWYWIVDEIEQAGCVPLLAHAQMAKKMMGHVHKTDKLDAQGLAILQHLGSLPTVWIAPAETRDERELPRTRMALSKMRTALKNRMHSTLAKYALCLDTQSDIYAPKWRSQLLDLLQRLPPETERCVRQELELLDQVQEQIRRLEARILERVQITPTIQLIQSVPGPAKILSIVIDREVGSIDRFPSPHHFASYSGLVPKVLASGGKTHYGKMIKAANNYLKWAFIEAANVIVRQQHHPNWRQKYVVALFERTRQRKGHAVAVGAVARYLAEATYWVLKKGEPYREPVPWHPVGRSAISPKQGQART

SEQ ID NO: 64794 - protein, 478 aa, unidentified
MDERRIIGLDLGIASEHTARVLNGEGKVVAKRRAVPTTESLSALESAALEGASPETVLEVVMEPTGPAWLPIAVFFISRGHRVFRVPSAKAHDMRRYFSRHAKSNSIDADALAKLAIIDPEGLRLLVLDDADGAALDRRVRACDRLTQEASLHKRRIKDLVRQLLPMTPLTGDLGLADLAVLERWADPHDLVNAGKTRLTRVIVTASHGQQKAERAEEWLAAARSALELYGEHPSVAFADLAAEVATEVRLLKAINVELALHEQPREQRYRSVDPEQLARSLPGIKTIGGPALVATMGRAARFPSAAHFRSFTGLAPKASETANTDRKGQAMSKAGNSLLRTTLIRAADHARKEDPQLARIYYVQMTERGKTHLAAECVVAAHLAERAWLVMRRGTPYLRRDIDGGVVTLQEAKAIIAEHSTVSEDVRRRQRSNKGGKAPQKVLEEHLKPHAKGVGRTRRPSPSTTPARSEIAVKRTA

SEQ ID NO: 64795 - protein, 367 aa, unidentified
MMGWMAPLRHLSAKLLSDRISSEWEPSMGEVTTIGLDLAKHVFQVHGVDAEGATVLRKQLRRAQVLAFFSRLPPCLVGLEACATAHYWGRELRALGHEVRLMPAQYVKAYVKRNKHDAADAEAICEAVGRPTMRFVPVKTADQQAAVLLHRGRERLVRQRTGLVNALRGHLAEFGVIAPQGLRNVGKLIAIVRDERDARLPDLARQVLQVLAAQIEQLEAAVAAIEKQLMAWHKSNPVSQRLASVPGIGPIIATALAATVVEPSGFRSGREFAAWLGLVPRQNSTGGKHRLGGISKRGNQYLRRLLINGASANLLRSKATNADPWVIGLRRRRPPLVVAVALANKTARIAWAVMHRHENYQRVAAAA

SEQ ID NO: 64796 - protein, 341 aa, unidentified
MNHYAGIDVSLKDSSVCVADANGKIVRESTVASEPEALITWFSELGFAVTRIGLEAGPLSQWLYAAMQKAGLAVELLETRHVRDAFKAMPVKTDRKDAQGIAQLMRLGWFRPVHCKSIEAQETRAILSARKLVQSKLHDVEMSLRGTLRGFGLKVGKTTPNRFAARIKELVERHPTLQIIATSLLAVHAALLREFKVFEKQIRIMARDDERARLLMSTPGVGVLVALTYVSAIDDPGRFTSSKRAGAHFGLTPKKYQSGETDITGRISKIGDKGVRTALYEAAHIILTKPVKGSALKSWAARLAKRAGMNKAKVALARKLAVIMHRMLVDKTPFNPAAAAA

SEQ ID NO: 64797 - protein, 359 aa, unidentified
MDERYVGLDDHMESCTFGVLGPSGKRLKSMVVETNGRALVDAVRSISGRIHLCMEEGARSAWIHELLAPHVEEIIVTVPKERKGKSKDDLRDAFARAEEIRIGAVETRVYKAPKYLAALQSAARAYGIAVRDSVRVKNRLKAVFRSRGIRVDRDVYDPTARGEWLKDLPGAHRPLAEWIGEELDALLPLREKAEAWLLKEAKTHPIIRKLETAPGIGPIRAAQVVAIGANPHRFRTKHQFWSYCGFGIVTHSSSDWTHDKNGRWVRAEVQQIRGLTRKRQPVLKAVFNGAATTVIGQLPDNPLHVNYQRMLTAGTKPNLAKLTLARQVAAIVLSMWKHEEVYDPKRLKGVTDQTSTAPE

SEQ ID NO: 64798 - protein, 380 aa, unidentified
MRKYSVRGGNGKALVAKDGKIYVGLDVHKKTVSVAVAQGGVIVGTWTTPMDVAGVVAALSAWAGQVALIVYEAGPTGYGLARALRRAGLPVAVVAPGKTPRPANRGAKSDRLDCGELAVLAEKGLLRAVAVPTEQEEADRQVVRLRHELTNKQRRVKQQIKSLLLQYGLAEPPGLKDWTKEGVAALRTCALGQQLRLVLDTLLGELDQLLALRAQVDQALARQARERRLAAGVRRLDGHPGVGPLTAMTFATEVYRPRRFANGRQLSSYVGLAPRVVQSGETRRGGPLIPAGRGRLRALLVEAAWRWVATDPAAAATYGRLRRNTGRGQKAIIGMARRLAVHLWVMLCRRQDYRPATAGPSDTVLARSGRTSENERNGSK

SEQ ID NO: 64799 - protein, 394 aa, unidentified
MQHFIGIDNSSLDHKVRVIDEKDNLKLSFTVNNTFDGFKQLDDKIQYLGSIFIGFELPHGPLVDYLHLKGYNLYSLNPLKIKRYKETLKVSGNKNDDIDALAIAEYLRNNISYSRELTYNSSEIEKLKNLSIIHTRLTQDHARHLNKLHFAIRQYYPLQEHLFGDFGCTVQLKMIIKYPKYDNLKGATNEELNDFLKANKYRRQIYIDRVISKIRNHNQLISNDVEYAYQFEASCLCNIILTLNEELKRIEHEMNYITDSHRMGLVFKSLPGAGNVLACKLLALFGDNKDRFNDYNGVQCLFGTAPQNYQSGMYHKVIMRKACNKSARAILYKFAFSSLQFSDWARCYYDNQRAKGKTHSVAVRALSNKWIKIIYKLWKDEILYCEDKKIASSA

SEQ ID NO: 64800 - protein, 360 aa, unidentified
MRGKVNENAFNGQTFYVGIDYHKKSWKVTILNDQYEHKTMSQNPEPEVLANYLKRNFPGGHYKAVYEAGFSGFNACRKLRELGIDCIVIHPADVPTNQKEKLQKTDKADSRKLARSLRNSEFEAIHIPQRKLEADRAIVRQRFKQVKDIARTKNRVKSLLLQFRIDIPERFTSAQTRHWSKAFTNWLKALPIEEESLKLTLGNYLRIGEMQRSELLIINKQIRQLSKTKDYRDNCRLLLSIPGVGLMTAITLLMELGDITRFKKLDELCNYVGLVPSMYGSGEKMQTGKLIRRGRKALKIMLIEASWQAIRKDPALMLKFNELVKTMQKNKAIIRIARKMLNRIRYVLVHQEEYELGVTK

SEQ ID NO: 64801 - protein, 330 aa, unidentified
MRKGMEAGIDVSKDVLDVALRRDDGSLETARFDNEPAGHRILVRWLTKRSRPVRVVLESTGTYSLDVALALHQARGVAVMVANPRAIKQFAGALMQRSKTDLTAAAALREYAARMPFVEWQPPAGEVLTLRGIARRIAALVVERTRERNRLHALQATGERVAVVVNDIEVNIRHLDRRIELLTAEAVALIREHAELHRTFELLTSVPGIATHSAVQLLPELLVLPEDMTVRQWVAHAGLDPRAFQSGTSVDKPARISKVGNAHIRRVLFMPALVAVQHDLHVKAFFDKLVARGKKPIQAYVAVMRKLLHAIYGMFATQTTFVPEKFHAAA

SEQ ID NO: 64802 - protein, 338 aa, unidentified
MTITLMGIDLAKNVFQLHGVDAGGNAVLKKRVRRDGLLAELAAVPACRIGIEACTGAFWWQRQFEALGHAVKVIAPQYVKPFLKHQKNDRNDAEAICTALMQPNMKFVPSKNEEQQDIQALHRARRRLVNHRTALVCQMRGLLLDRGVTIPLTLGRARQRIPELLEDRSNGLTDMTREIIADLFEFMLQLDARIKAFDKRIDQVFRANPECQRIARICGVGSKTATAVVAAVGDGKEFKNGRHMAAWMGLVPRQHSSGDKRLLMGISKRGDKHLRTLLIHGARSVVRVSQGRTDAFSRWVNSIRERRGMNRAIVAVANKNARIIWAMLRRNEEFRAHT

SEQ ID NO: 64803 - protein, 342 aa, unidentified
MKIMTGIDLHSNNAVCGLMDQSGRRVLHKKLPCDLSTILRVLEPYKARIAQVAVESTYNWYWLVDGLEDHGYPVVLANPARMKQYDGLKHTDDVSDAYFLCDLMRLGILPTSHLYNRQSRPVRDLLRRRMLLVQLRTSLILSFKSLNERTLGERVPLARVKAMSIEQAQARFTAPADQLLSGEQVGLMGQLQESIAKIEKHILATAGEWKTFQRVQDVPGIGRILGLTIALETGEPQRFASAGNFASYCRCVKSLRQSNSKKKGENNRKCGNRYLAWAFVEAAHFACRHDERCRRFYERKKQQTNPVVATKALACKLAKASWHVMHADVPYDPQRVFGGGTA

SEQ ID NO: 64804 - protein, 339 aa, unidentified
MTVKTVGLDLAKDVFQVHGISENGRVIFNRAIKRAKLLAFFETLPPCVVGMEACGSSHHWGRQLRKLGHDVKLMPASYVKPYVKRGKNDAVDAEAICEAVRRPTMRFVEIKTEDQQAILSIHRTRDLAVRQRTQLANMIRSLLREFGHILPIGIEAVTAFAKRHHDGDHPDMPDIANGMLGIQCYQFIGLNERISGYSKMIEQHAMLNADARRLMRMPGIGPVTASAIVATIGDAHQFRTGRDLAAWLGLTPLNKSSGGKERLGNITKQGDRYIRKLLVVGMTSRAVMAKRSPEKVDLWTAKIIADKPFRLATVAMANKAARAVWAMLTKKQEYRQPAF

SEQ ID NO: 64805 - protein, 328 aa, unidentified
MDQISVGIDVSKAALVIGVYPTGERWTSETTAAAIDGLVGRLRMLSPTIVVVEATGGYERAVVAACAAAGLPMAVVNPRQVRAFAQALGRTAKTDALDADVLAEFGARVQPPVRPISDAETQMLAALVARRRQLVEMIGMERNRLEQAPPTGKITRDLRHHIRWLERRVDDVDDEIGTAIQTSPVWRVQDDVLRSVPGIGPTTARTLLAELPELGRLDRRAIAALVGVAPFNCDSGQQRGQRHIWGGRASVRKAIYMATLSATQHNPVLRTFYRRLCDAGKPAKVALVATMRKLLTIVNAMMKHQSRWNSEVASTPASLAGSARAATV

SEQ ID NO: 64806 - protein, 339 aa, unidentified
MVIIGCDFHPRFQQIASVDEATGEYGERRLSHPEEAERFYRGLAGKQVRVGAEATGNFRWFRRLLEELGHEFLLGDAAAIRAACVRRQKTDKRDARHILDLLVKGTFPRVWQPSAAEDELRQLLLHRCRMVRMATRIKNQLDALAKNEGMLAARGRKGRKAVAELPLAGWYAVRRQDLLDVLELLERRVLALDEAVRVAAEQNASAALLMTHPGVGPVVSLAYVLTLGDWRRFPRGKQVGSYLGLIPVEESSGQRRRLGHVSKQGNSMVRWLLVQAAIHAQRQDASWHRQYVRLSMSRHHGVAKLAIAHKLAVRMYWMLRSGQNYQQVRERGSHAGQSV

SEQ ID NO: 64807 - protein, 341 aa, unidentified
MSIITVGIDLAKNVFAVHGVDDNGKSVLVKPKVSREHLLPLIAQLPPCLIGMEACSGAHHWARQFRQHGHTVKLMAPKFVTPYRMSGKRGKNDAADAAAICEAVTRPNMRFVPVKEEHQQVILVLHRTRNGFVEERTATYNRLRGLISEFGIVCPQKIANLRRALMDHLENLPGYVNQCVGDLLAHADSLDLRIAEYDRIIAKAARDDARSKRLMTLPGVGPNTASAMLATIGTGHDFKNGRQVAAWIGLTPGQYSSGGTARLGRITKAGDKYLRSLLVMGAKAVLSGLGDKQDRFSRWARTLVERRGYWKAVVAIAAKNARLAWAVLKFGEDFRLRSATV

SEQ ID NO: 64808 - protein, 428 aa, unidentified
MGRSIGLDVHREFCEVAVSDGGPARSAGRVGTSAEQLQLLALSLEAGDRVVLEATGNALAIARILAPHCAEVLLAHPKRLRAISHAKVKTDKLDARVLAELLAANLIPAVWIPDEQTRRLRRQISRRRALVKRCTAMKNEISAVLIRNLKRRPEATDVFGRTGREWLHRLELPLDERETVDACLRQLDFVTRELSMIDTQIAEAAIRSAQMRRLMTIPGVDATTAATVIAAIGDVTRFPSSRHLVGYLGLHPKVRQSGSSPAHHGRTSKEGPAAARHVLVEAAWITTRSPGPLRAFGQRVAARRGKHIAAVAVARKLATLAWHMLTHEQDYAFQRPTLTRRKLRRLELMTGAPRVKPGPNHTPIRTTGAAQIEWQLAEQAEIAYRRLIADWQATGPKEGAGATPGRASQRPSKGKAARQATRPQTPAL

SEQ ID NO: 64809 - protein, 430 aa, unidentified
MKSNTQNAKIEAITEKTLVLGIDVGSETHYARAFDYRGVEYSKKPFKFSNTEAGFVTFKAWVLDIKEKHGKDKVIPGMEPTGHYWFNLGKFLQDNEMKPVLVNPHHVKKSKELDDNHPTKNDRKDPKVIAGLVREGRYMIPYLPDGVYADLRTASNIRFQLQAELTRIQNRINRWFNIYFPEYKTVYGKPDAKSGILILKEAPLPEDILTLGIDGVNQIWRDAKLRAVGKARAKTLIEAAEHSVGSKEGAVSARMEIRMLLEDYESRNMRLQEVMGLIEELVNQIPMAEKLLEIKGVGIKTVSGFLAEVGDIRRFNDPKELQKLAGLALVENSSGKHKGKTTISRRGRKRLRYLLFEVAMSLVAKNPEFRELHNYYTTRRLNPLKKMQSLMAIAAKLLRVFYAILTKGVGYDPKKMVNDIRRPAAYAQAA

SEQ ID NO: 64810 - protein, 359 aa, unidentified
MPTVAEVVDAVIGGDTHVDTTSLCLCSPAGAVLGELTFDNDVQGFEEAVSWVLSSVPSQRFMVGLEGTSSYGAGLCRALQAQNLTVVEIERPSRGERGRRGKSDAGDAKLAAHKLLATDAELVAQPRTTGDGPRESLRILTIDREQLAVQCTRVTNRLLAMLLTGDAADHQLRRKGLTVQHLHQIAGRRGPRNETEDQAIRRLLLRRLAKEILELNVLLRDNEKQLRSIVKAIAPQLLARFGVGPVTAAQLIVSYSHHGRCRDEAAFASLAGVAPVPASSGRVVRYRLNRGGDRRLNRAFHYIVMTRMRSQERTRAFVQARKNGKSDRELRRILKRYIAREMFKILQTIDALKPVPIAA

SEQ ID NO: 64811 - protein, 338 aa, unidentified
MIVIGVDVHKHSVTAVAVDDAGRMLDERTVRVGTEELLAWASALDEERLWAIEDCRLLTPWLERLLLGVGEQLVRVSPKLTVPERRAGRTRGKSDPIDALAVARAALREPDLPRPQPGEHVHREIKLLVDHRDDLVDERRRTQQRLRWHLHELDPTLMVPLRRLDRASHLERVGRWLARREQGVQVRIARELVNRCRSLTRQISELDQDLEQCTTVVAPTLLELPGCGAVTAAKLLAEIGPISRFKTDAQLARHSGVAPLEASSGKSQRHRLDRGGNRQLNAALYRIAITQSRYHPAARAYLERKQAEGKSKREAIRCLKRLLARTVFNTLKASPALT

SEQ ID NO: 64812 - protein, 312 aa, unidentified
MNTQNTNPIHYIAIDVSKASLQVQDDKRAFAVENTSSGHRKLLDHLKGCSKPLVVYEASGGYERELAAFLRKSAIPQAMLNPARVRDFARSEGVRAKTDPIDTRMILAFAKSKALEAIDPPSEESLKLAALLDRRDHLVEQMAREKNRLQNSEAIIHRSIQRMMKILQKEIAVIDKAISQLVDSDELLKSRSQTMQSVKGVGKVTAWTLLAYLTEMDHLDRNKLVALAGLAPFNRDSGKMSGRRSIQGGRAKVRKCLYMAAHTAASCNPVIAAYVQGLRDRGKPYKCAIVAAMRKLLIHLQCLIKKSQLAPC

SEQ ID NO: 64813 - protein, 409 aa, unidentified
MEVVYSRCCGLDIHKDLVVACRITPGERGRPTKEVDSFGATTDEILRLGDWLAEVGCTHVAMESTGVYWKPIWNLLEGSFELLLVNAQHVKTVPGRKTDVQDSEWLADLLRHGLLRASFVPDREQRELRELTRYRASLVRERTAEVNRLQKTLEGANIKLGSVATDIMGKSGRQMLEQLVAGQTDPAALADLAKGKLRTKIPTLERALVGRFGAHQRFLVRQQLAHIDYLGEGITRLSAEIAERVRPFEDALTRLDEIPGVGRTTAEVIVAELGTDMSRFPTDAHAASWAALCPGHHESAGKRQSGKIRKGNRSLRVALVEAAHAAGKTHHTYLSAHYHRLAARRGKKKAAIAVAHSILIIAYHLLKDGTTYDDLGADFFDRRNQDALEHRLVRRLEALGNKVTIERVA

SEQ ID NO: 64814 - protein, 309 aa, unidentified
MFVGIDVSKARLDVAVRPTGETFDVSNTPQGIAHLVDRLQALRPELVVLEATGGFEQPAVLALAERRLPVVVVNARQIRDFARATGRLAKTDKIDAAVLAQFADAVRPQLRALPDPEQRSLDALVARRVQLVEMVTAERNRLQHTRNAAVRVNIHAHLAFLERQLDQMERELLRAIETSSALKMRFDLMVTVPGVGKVTAATLLGDLPELGTLGNREIAALVGVGPMNRDSGQIRGRRSTWGGRSSVRRVLYMAVVSAIRCNPVIRSMYERLRSAGKPAKVAIVACMRKLLVMLNAMLRSGTPWMRQAA

SEQ ID NO: 64815 - protein, 366 aa, unidentified
MKKISTVAKNGNEIFKEHKLTIGLDLGDRSTHYCILNEAGEVLLEHSLPTTPKGIHQVFNGIPRSRIALETGAHSPWVSRQLTQLGHEVIVAHARNVRLIGESSRKDDQLDARTLARLARIDPSLLGPVQHRSAKAQIHLTVIRARAGLVGARTALVNAARGLTKSYGERLRKCGTQQMNREMAKGLSQELRDALEPLLREVESLNERIREYDRRIEQLAKEVYPEVSLLKQVKGVGTLIALTYVLTVDDPHRFRRSRDLGCFLGLRPGRRNSGMSEPQLHISKEGDRYLRTMLVQGAHYILGPFGQDSDLRRWGLRLAERGGKNAKKRAIVAVARKLAVLLHKLWVSGEVYEPLRNNHKVVSAVA

SEQ ID NO: 64816 - protein, 369 aa, unidentified
MPHVTSIGLDVHARSVAAAAFNPFTGEVVHRDFGTDAAEIAEWALVFEEPRAGYESGPTGFHMARELRALGLDCAVAAVSKMQRPAADARRKNDRRDAEFIARMLATHNIVEVPLPDAAVEAARDLDRALDDATAEYRRARQRLNMFLIRLGHVWDERNADGARKGSWTRAHWRWISGIRLEGPQRDVLEYYVTAARCAESDRRQLEKEVLALARTDRWRPAVEALSCIKGIDTPTAFRLAAEAGSFTRFRTAPAFASWCGLIPSERSSGETERRGGITKTGNRLARTALVESAWHYLTCTPRPKAPAPGADVPAAIRARADDCTARLCRRREALAAAGKSPCKANAAVARELACWVWEIGRRAEGTLG

SEQ ID NO: 64817 - protein, 422 aa, unidentified
MTQQQNTSILRVMHAVCCGLDVHKELINACLITTDENGQEEIEFIVFQTFTDDLCRLRDWLLDHNCPIVAMESTGIYWRPVHNILEGLFEVILVNARHFKNLPGKKTDMSDCQWICGLMRVGLLKGSFIPQKYVRQWRDLTRYRRSKTQDLGDVKRQVHKLFESANIKIDSVVSQLFGCSGRNLMKLFLEKRRELTLEDVKKCLKGTLKSKAEELYRAVQGFFEEHHRWLLEKMLAHADHLEHLINDIQVRLRGLLEAHEDVLEGLMEIPGISFISAYGIISETGPTLSSFPNTASLCSWAGVCPGNNESAGKRHSGRSPVRRGNLKTILIEVAWAAIRAKGSYFRAKFFSLRSRLGPKKAIMAIAHRILKAIYHVIKLGEKFKDLGEDYLSDLHKKSKINYLIRQAGKFGYMLTPCPIIEK

SEQ ID NO: 64818 - protein, 347 aa, unidentified
MAYFTGIDVSLRSVSICVVDDKGTVCREAKVAAQVETIAQWLHEFSGDVRSVGLEAGALSQYLTYGLQAAGFEVICLEARQVKNTLASMRNKTDRNDARGIAQILRTGWYSKVHIKSMHSHRVRALLASRKAILKKCVDLENELRGLLRVFGIRLASRVGHGAFDVQVRETFAHDEMLSCALTPLLDARTVLYKTYLKLDNAIKALVKADPLCTRLMSIPGVGPVTALTFKAAVDDPARFKSSRNVAAHFGLTPKRYQSGEIDNPGHISRAGDSDVRSALYVAAHSLLTRNAQWCSLKAWGMRLAKTRGHRRAVIAVARKLAVILHRMWVDGTEFRWGKAPAQPAAA

SEQ ID NO: 64819 - protein, 363 aa, unidentified
MSTVTTRSEEPARTLHLAFDLGNRVWKLAFATSVAHAPRLRTMAARDLAQLDTEIAAAKARFGLAPDAPVVSCDEAGRDGFWLHRALAARGLTSHVVDPASITENRRARRAKSDRLDATALARLLVRHHGGERGVWSVLHVPSVEEEDRRHLHRELFTLTRQRTRQVNRIKGLLALHGIVLAKPRGLPARQPELCDWCGAPLPPALAARVTREWTRLRAIQRDVVALRAARRAMLARPEAATDPLLRQVEQLRALRGIGEVSAWLYATEFFSWRAFRNRRQVAGLAGLTPTMRSSGDLEREQGISKAGNARVRGLAVELAWSWRGAGCGGSRRARSRAGTARASRPAAGGGGGSGSSRSPASC

SEQ ID NO: 64820 - protein, 424 aa, unidentified
MAGVVIGIDPHKGSHTAVALDVHEKQLGRLRVRASSRQVDGLLEWASGWPRRRWAIEGARGLGQLLAQQLIASGERVLDVPPKLAARVRLLDSGQINKNDPNDARSVAVAALRAHELPELAAEDQAMVMRVWARRYHDLARLRTQVVCRLHAVVCELVPGGVRKYLRASQATDVLDRIVADSPVAQAKLELARELVADLERIDAQRREAKGRTARAVAATRTSINDVYGVGPIVAGTVLGYVRDIRRFPTRDRFASYNGTAPIEVSSGDRKIYRLSRRGNRQLNHAIHMAAISQIRHHDSGGRAYYEKKIAEGMTGKTALRALKRKISDALYARMIDDARRLAAKDPGGHTGNDSASSAAGSHPETPALRKSHSRATANSKTGTGQRPLRLRPAPDRRRTSRRAAGVQVEPRLGPHRGRRQDRP

SEQ ID NO: 64821 - protein, 395 aa, unidentified
MFIVGIDVAKRNHEVTVVTSEGQVVCRAFHIANTCTGYNHMMERVRKLTSLKGQFIFAMESTAHYWLALYTRLKKEGYQVIVLNPIQTHAMREMLIRKTKTDARDSFVIAEVVRFGRYAVSDVPQEKLLALKELCRNRSYLMDLAGDLKRKIIALLDRVFPEYETQFETIFCKSSLAVLTKYPTPQKLANAHLSKLTEILWTSSNGHFGEWKAREMRELARNSFGVEDCEGVYATLILVLLEQIRTLQEKCGMLETQIEGLLQQFPTMLTTIPGIGPILAAIILSEIGDISRFSSADKLAAYIGVDPSVNQSGEFVGTHVHMSKRGSPYLRRAVWMASVVAVQRDPMFKAYYEKKAAEGLRYMNIIGHVTKKMTAVIYAIMRDNKAYTPIMPSAA

SEQ ID NO: 64822 - protein, 412 aa, unidentified
MDVMYPRCCGLDVHKKTVAACLIISTEGPEPVKEIRTFRTMTADLLALADWLQEAGCTHVAMESTGVYWRPVYNLLEGQCELLVVNAQHIKTVPGRKTDVKDAAWIAELLRHGLLRGSFIPSKPQRQLRELTRYRSTLVQDHARTLNRLQAVLEDANLKLASVVTDIYGVSARAMLAAILSGERDVETLADLARGRLRAKRAQLKEALEGRVTAHHSFLLTEHLSTLEYLDEAIARVSGEIDQRLTAEQEAIALLDTIPGVGQRAAEILIAEIGTDMGRFPSAKHLASWAGMCPGNHERGGKRLSGKTRKGNRWLRQILVEIAQVASKTKNTYLAAQYKRLAARRGKKRALIAVGHTVLIIAYTLLTRRQPYQDLGAVYFDQREQQRVERRLVQRLERLGYEVSLQPRALAS

SEQ ID NO: 64823 - protein, 426 aa, unidentified
MKYTQNEKILQIKETTLIVGIDVGSEKHFARAFNFRGVEYGKLLIFDNNAEGFAKLEEWAGKITGSKGFTEVMLGMEPTGHYWFNLAENTKKSGMRIVLVNPHHVKKSKELDDNNPTKNDRKDPKTIAMLVKDGRYMEPYIPEGLYKELRSAMDSRWRLVKELSAVKNRISRWICIHYPEFTKVFCDWEGKAALLILNECPTPKKVVEKGIEGIMSIWKKHKIRAVGIKRAVRLLESAKTSIGTSEGLVSAGNELSMLLEDYESKMRQLERTMALIEDLAMQIPGFEKMLEIKGVGLVTAAGFLAEVGDIFRFSHPKQIQKLSGLSLKENSSGKHKGQTTICKRGRKRLRYYLTFGIMPLLSKNEEFRALHQYYTTRKERPLKKMQSLIALSNKLIRVFYTILTKGIAYDPQKMMSDIKRPEVKAA

SEQ ID NO: 64824 - protein, 391 aa, unidentified
MFLLGIDIAKLNHVASCIDSSTNEIVFSNFKFKNDFIGFSALLDKIKTFDTKNLIIGLESTSHYGENLINFLFKQHFKVALINPLQTSHLRKANIRDAKNDNLDSLNIAKSLIFAKLNFISEKNINCFSLKKLTRFRSSLIKQRSKAKIQLTSLLDLLFPELQYLFKSKIHSKAIYSLLKKYPSTEEIAALKDDEISNLLYASSKGHFKKEKSIELKSLAKTTVGIKDTSISLHVIQLIELIELYDKQIKDIVTKIADTVDKLDTKLLSVPGISIIACAIILGETNNFNNFSDSTKLLAFAGLDPKIRQSGNFNASSCRMSKKGSPYLRYALIFTAWNIVRHSEKFNKYYCLKRSQGKSHYNSLGHVAHKLVRVIFTLIKKNIVYQEENLE

SEQ ID NO: 64825 - protein, 409 aa, unidentified
MDIIIARCAGLDVHKKTVMACIRLQGPTGAMTQEIRTFGTMTRDLERLRTWLQTCGVTHVAMEATGVLWKPVWHVLEPEFELLLVNPRDLKRVPGRKTDVKDATWIAQLLQCGLLRGSFVPPREIRELRDLTRARATLEQQTVDVANRIHKLLEDANIKLSSVATDILGTSGRAMLQALAHGETDPIRLADLAQRRLRAKIPALQEALHGTMTAHHRFLLKQLLTQLAFLEGQIAEFDARVAEGTVPFGEAIAHLDTIPGFDRRGAENLVAEIGVDMTPFPTAPHLASWAAICPGQHVSAGRSHGATIRKGNRWLRRTLGQAAWSARNKKHSYPAAQFRRLAARRGKKRAIVAVGHSLLVAAFYILRDGLDYADLGATHFDRLRPDQLTRMLVKRLERLGHKVTLEAAA

SEQ ID NO: 64826 - protein, 375 aa, unidentified
MKEKVRFLGLDVHAETIAVAIAEPGGEVRSLGTIANREESIRKLVKKLGSVEQLRACYEAGPTGYVLYWQLAELGVKCDVIAPTLVPVKAGDRVKTDRRDAEKLARSYRSDDLTAVWVPDESSEALRDLVRAREAAKQDQLRARHRLSKFLLRSGQRPAPGVKTWTQIYMAWIRQIRFVQMAQEWTRLDYLHEVEHMGERVARLEQAITEAVKLAPPGLQEVIKGLQALRGIAHISAVTIAAELGEFSRFEGARQLMGYSGIVPSEDSSGERTQRGSITKTGNAHLRRIAVEAAWSYRLRPCVGPALRKRQEGVAEEIKEIAWKAQHRLHKRYCRLAATRKDQRKIITALGRELLGFIWAIGIKAEAAARPPRSA

SEQ ID NO: 64827 - protein, 388 aa, unidentified
MLPNIPHPSPEQTVAVRPDLTLYASLELSRATWLVTCLLPERDRISKYATPGGDGNALLGLLERMRARGQQLTDRTVQIVVIQEAGLDGFWVHRLLEANGIESHVVDPASIAVPRRRRRAKTDAIDGETLLRTLLAWKRGEPRVCAMVVPPTPEEEDRRRICRERAILLQERIRHTNRIKGLLAGQGITGFNPLHKDRRHLLHAARTGDGRPLPPQLKAEILREIELIELLLRQIADVEAAREALAGPKTTTFPSPVVLLKQLKGIGPEIASVLYFEGLFRSFGNRRQLAAYAGLAPTPWRSGTVDQEQGISKAGNPRLRSTMIEFAWLWQRHQPASALSRWFHSRVGKERGRIRRISIVALARKLLIAVWRYVTQGEVPEGAVLKAA

SEQ ID NO: 64828 - protein, 385 aa, unidentified
MQSISTIGLDIAKSVFQVHGVDAAGQVVVRRQLRRHHVLAFFQKLPPCLVGIEACASSHHWSRELQALGHTVRLMPPAYVKPYVKRQKNDATDAEAICEAVTRPNMRFVPTKTVEQQSCLVLHRARHLFIRQQTAVINSIRAYLAEFGIVAPVGRRGVEQLLEVVADPADCRLPEVARACLAALGSQLRALKAQILEFDRRIIAWHRSDATSQRLDAVPGVGPALATALVASVADAKAFRSGRDFSAWVGLVPKQSSSGGKDKLGSISKQGDRYLRSLFTAGALAVMRYAKIHGTGHRPWLTALLARRPTKVAAIALANKLARMAWAMMARKPGTNATRNPPLLRRERDHSRSSGCDVTVGRANSTNAAPGRSGDQDNPLGPQHL

SEQ ID NO: 64829 - protein, 341 aa, unidentified
MEQVNTIGLDIAKHVFQVHGADAAGHALFRKRVTRAKLLGFLAAQPACVVAMEACAGAHYWGREIGKLGHRVRLIAPAYVKPFVKRQKNDAADAEAICEAAQRPSMRFVPVKTEEQQANGIVFRARDLLVRQRTQCVNALRGHLFEYGYVFPQGITHVATLVALVEDPQSSLPESARVVLKLLVNTFTALDGQIAALDAEINQRSKTDPTARRLMTIPGVGPIVSTAITALVPIAEDFRAGRDFAARLGLTPLQKSTGGKQKLGAVSKRGERTIRRLLIIGASAVVQQASRRRAPKGSWLAQMLARKPKMLVTVALANKMARIVWALLVKGGVYRAPAVGA

SEQ ID NO: 64830 - protein, 311 aa, unidentified
MTKQVVGIDVGKEKLDVGLTGQKRVQTWDNDEAGRAELSEWVVEQAPQLVVVEASGGYEAAIVSELVDCGLAVALVNPTRVRAFARAEGLLAKTDKIDARLIARFGATMKPQARARREEAQVELNEMVTRRRQLVLILTAEKNRLQTASPAMQAHIASHIAWLQAEIEALEQQISQAIKANPEWTETAKRVESVPGVGFITAATLVADLPELGQLNRQKIAALVGLAPFNHDSGKQRGKRRIFGGRTSVRSVLYMATLSAIRHNPIIKSFYQRLLAKGKLKKVALTACMRKLLVILNAMVKNGQDWSPSMA

SEQ ID NO: 64831 - protein, 338 aa, unidentified
MKKYSGIDLHSNNSVVVVIDETDRVLHARRLPNELGGVLAALEPHREELVGVVVESTYNWYWLVDGLQAAGYRVHLANPAAMKRYEGLKHSGDDTDAVHLAHLLRLGILPTGYICPPAERALRDLARRRLQLVRQRTMNVLAVENVQARETGARLSSNAIKRLEPQAVERLGLREEVALGVQANVAVLGALNQEIAKLENEVAQRVRLRPEYKLLNTVPGIAQILATTIMLETGSIGRFAQVGNFASYSRCVDSVRISNGKKKGEGNVRNGNKYLAWAFVEAANFARRYCAEAQRFYERKRAASNAIVASKALAHKLARACYWILKTGQPFDVKRCFG

SEQ ID NO: 64832 - protein, 374 aa, unidentified
MKHSEVFVSFDTSKLRNAIAIAEGDRAGEVRFLGEIENTPAATTKLVRKLEAKYERITFCYEAGPTGYELQRHIHGLGHQCIVAAPSLIPKKPGDRVKTNRRDAVSLVKLLRAGELTGVWVPDPRHEAMRDLTRAREAAVIDLRAKRQRVSALLLRQGRSYPADKKTWTKVHMNWLASQRFEQPELGVVFEEMMFAIHQAQERIERLEQALRTAVPEWSLAEVVTAFMAFRGIDLVSATCLLAELGDLTRFPTAPEVMGYVGLGCSEGSTGDRIKRGGITKSGNRRARRTLVECAWSYQHPPRVGIAKQAKVAAAPAKVREIAWKAQCRLNRRYRVLLRRGKLKTVAITAVARELAGFLWAAARELSSPERVAK

SEQ ID NO: 64833 - protein, 339 aa, unidentified
MNLHCAVDLHGNNGYYGIVDETGKRVFKQRIPNVLPEVLAALEPYRERLTAGIVVESTYNWYWLVDGLQENGYETRLANPAAVGQYNGLKNTDDETDAFFLAELSRLGILPVGHIYPKKERPMRDLLRRRLLLVRQKTAHTLSFQNLIARERGERIGSNNIQKLHPHEVNQFFEDPRLVLMGQTNIEMIRFLAKQIRSIESAVLCEVKLRPEYEKLLTVPGIGKILGLTDMLETGDINRFRKVGNYSSYCRMVKSSRSSNDKKKGENNRKNGNRYLNWTYIEAANFIRRYCPEAKAWHQRKCKRSKPVVATKALASKICKACYFIMKDQVDFDVKLIFG

SEQ ID NO: 64834 - protein, 364 aa, unidentified
MKRKVYVGMDVHKETIQIAILPSNTKALVKEQQIKHEEGQIKKFIQKLKSEGTEIHCCYEAGVTGYPLYRYLKTLGVNCIIAAPGKIPRQSSDKIKTDKRDAIKLARLLRSGELESIHVPSEEDEAVRDYLRSRDSLRLDLGRNRQRLMKFLLRKGITYSTTKYWTASHYKWLNNLHFENEILQATFNDYYSRVRVQKENLKAMDQKIREIAESEPYREKVGILRCFRGVDYLTAMFLLSEVNDFKRFKTAGSFMSFLGLVPGEYSSGSKRKQTSITKTGSPRLRRILVEAAWQHRFPGTGSKVVAARRVGQSALVVSLAEKASLRLHKKFKSMQLRGKTPQVMITAVSRELSGFLWAAMNLVA

SEQ ID NO: 64835 - protein, 338 aa, unidentified
MKLYGAIDLHSNNAICGAIDSYDHVKLRKKLPCDLDTILDSFLPYKQDIVGIAVESTFNWYWLVDGLMDAGYRVHLVNTSAVKQYEGLKYTDDNTDTFWLAHLLRLGILPSGYIYPKELRPVRDLLRKRTQLVELRTTNILSIQNLWIRNTGIRLTSNSIKRLTREQIGQRFDDSNLVLAIDSNRLVMQALDKQIKRLEETVVKQSKLDPRYRYLLSVDGVGKILALTIMLETGDISRFEKVGNFASYCRCVGSTKLSNGKKKGAGNTKNGNKYLSWSFVEAANFAIRFYEPARRYYQRKMAKTKRVVAIKALAHKLARASYYVMRDQVPFDPAKVYS

SEQ ID NO: 64836 - protein, 327 aa, unidentified
MRQADGTIIQESTITATRDALNEWMRQLPQPWIAGMEATLFTGWIYDHLVSGDAMVKVAHPAMLQAIAAGKKKNDRVDARKIADLLRCDYFPECHMAPREIRDRRRVLRYRNLLVRQAVQMKNKVSGLLMEAGVPYNQQKVHQKKYFAELLQKQTKEMPPSMPELLRLSRSTVEALTGMQRQLIRALERDALLAARVERLASIPGVGRVVALTWALEMGDISRFASVKKAVSYCGLCGAEKSSGGRTERTPISKQRNKHLQTILVEAAKLAPRWSTELALVYERAKQKGNRNRATLAVARKLVAYLMAVDREERPFDTQLTVAGNAA

SEQ ID NO: 64837 - protein, 349 aa, unidentified
MIVIGVDAHKSTHTLVAVDDIGRQVGQRTVKATTEGHLSAIEWAAQWQRVQFALEDCRHVTRRLESDLLRRGHAVVRVKTQLMALHRRSARQPGKSDPIDAHAVAMAALREENLPIAQLDEPTREVKLLSDHRRNLVCERTKLINRLRWHLHELDPELVIPVRGIRRYCVMDELAERLTAFTGVVAQIARELLDRCRQLTEQVNNLERQIRDRVRRIAPALLAIPGCGVLSAAVIIGETADARRFHSKDAYAKFNGTAPIPVWSAHERVRLNRGGNRAVNSALHAIATTQVARGGPGEDYVAKQQAAGKTKREAVRLLRRRVSDRVLQVLRTAESPIENRSQGPLSVAA

SEQ ID NO: 64838 - protein, 302 aa, unidentified
MRVLLKQTVGIDVAQNELVVSLGRMDEQLSIEVYAYKVFANTKKGYSALVSWVNKQTSTSIEIRYVMEATGVYHESLAYYLYNVKKQVSIVLPNKISNYSRTLDIKTITDKSASQAIARFGLERQLEVWEPPLKIYNDLKQLCREREQLIQERTMLKNQLHADHTSETSNASSVKRTKKRISIIDLQEKEIREEIAVLIKGDHVLADKMTIVSSIPGIGSLTAVTIIAETNGFELIKNKRQLVSYAGLDVKEKTSGTSVKSKPRISKRGNRYLRKVMHFPALAAIRTDGGFREIFLRLVSKH

SEQ ID NO: 64839 - protein, 331 aa, unidentified
MKTKEIIGIDVSKLLIDACIHTKQIVFQFENSNEGFKKMMQWISSNTPFLSQEMMFVFENTGMYSHQLSLFLTKEKQSFFVASGLEIKRSIGIARGKDDQIDAKRIALYGYRLKEELNPSKLPENRILRLKSLLSLRTKLNKQRAGFKASLKEQKAIYSNKDYKIIFDIQRKMIANLSKQIDTINTAMQAIINDSNELKETYKLVTSVKGIGMQTAIMMIVFTDNFSKFENWRKFASYCGIAPFPYQSGTSIKGRTKVSHLANKKLKAIINMCAISAIQHNPEMKLYYQKRVLEGKSKMSTVNIIRNKLIARVFAVVKRKTPYVDILKYAA

SEQ ID NO: 64840 - protein, 391 aa, unidentified
MIYVGSDVAKDKHDCFITNSDGEVLFKSFTISNNREGFENLFQRIESVSDDLTKVKVGLEATGHYSYNLLGFLLDKGLTTYVINPLHTNLYRKSLSLRKTKTDKVDSRTIATMMMSDMNLKSYSDTSYHNEELKSLTRYRFDKVKERAKLKSSVSRLVCILFPELEKLVPTLHMASVYALLSEFPSADAVANAHLTRLSNLLIESSKGRYSKDIAVMFREAARSSIGSHMPAKSLELKHTIKLIRELDAEIEEIENEIKSIMDEIHSPILTLPGISYRMGAMIIAEVGDFSRFDSPDKILAYAGMSPSTYQSGQLDNCYSHMEKRGSRYLRYALYNATKYVCHWDESFATYLAKKRAEGKHYNVALSHATKKLVRTIYAMEKSGQPYQSAS

SEQ ID NO: 64841 - protein, 414 aa, unidentified
MAEEETISWFAGVDWGSERHQVCLLDARGATVGEREFPHSGEGLAELGDWLLSMASAAGTVAVAIEVPHGPVVDVLIDRGFVVYAINPKQLDRLRDRFSVAGAKDDRRDAYVQADSLRTDRRLFRRLQVADPRLIELRAWSRLAEELGAERVRLSNRMRHQLWRYYPQMQKLTKDLAAPWFLELWAIASTPAKAGRLRKSTVERLLKQHRIRRMDAETVLRILREPAIKVAEGVAEAASIHIRSLVARLGIVNRELREAERKLDELCTAVSEIEQTSGESLQRRDVAILRSMPGIGRINLGTLLSEASGPLSRRDYEGLRTLSGAAPVTKRSGKSLIVVRRYAAHVRLRNTVYHWARVATQRDPRCRARYTALRKRGHSHGRALRSVADRLLALACVLLQRQTLFDPHFGRPTT

SEQ ID NO: 64842 - protein, 396 aa, unidentified
MTATRKEHSTEQTKGRVLYLAFELGWNEWKLAFATGPADNPRLRSIGGRNTEAVLQEIAKAKRRFGLAADAVVQSCYEAGRDGFWLHRFLESQGIANQVVDSSSIEVKRRGRRRKTDRLDAGKLLSMLMRWHQGEKDVWSIVQVPSVADEDRRQLHRDLLELKAERTQHTNRIKGLLAGCGLAAPPVDARFPEVVAELRCWDGQAVPPELQQRLSREHERWQLVDRQIKDLENERARRIRNSQDKVVSKVRQLLRLRGIGANSAWMYVMEFFGWRRIRNRKQLAALAGLTPTPYQSGDRDREQGISKAGNRRLRTMAVEIAWCWLQYQPGGALSQWYQKRFAKGSSRQRRIGIVALARKLLVALWRFLETGEVPAGAKTVTWKKGLLIGPQEVALT

SEQ ID NO: 64843 - protein, 438 aa, unidentified
MHKKTIKVCLIMRDANGQRQKEFRTYGSTTEEILKLSDWLKEQGCTHVAMEGTGVYWKPVYTLLEGSFELLVVNAQHIKAVPGRKTDTKDAEWIADLLHHGLLKASFIPSAPQRELRDLTRYRVRLTEERAREVNRVQKTLEDTNLKLGDVVSDVMGKASRLILSAIASGQTDPVQLAGIALGRVRADEQALVAALTGHVDDHHRFLLQEHLTQIEHLEGAIERVTKELARRFTSPPPPEDPHPEHGDVELGEGALASGPLVLPSSGDPAALNWEEAMILLCSIPGISERSAYAILAEIGIKMQQFPTAGHLASWAGVCPGNHESAGKRLSGKTRKGNPWLRRILIQVAHAASRQKNCYLAAQYRRIAARRGAKRAAMAVAHRMLVIIYHLLSEGTTYQERGETFFEERDRDATERRLVNQLHRLGYQVELQPIAQAG

SEQ ID NO: 64844 - protein, 393 aa, unidentified
MSMYFIGIDISKYKHDCCIISAADQKVVSKVTIKNNKAGFNELLTIIHSLANPADIRIGFESTAHYALNLELFLENSLLTFMEVNPVLISEYKKSKTLRRTKTDSVDCESIARWLMTVEYKPHSKGFYHAYSLKSLTRLRDKLIRQRSFYLVKITNVLDHTFPEFKPFFNERLSKTALYLLENYGSAGKMARMNSASYEKLRSLSRGKFSPQQFLRLKELAANTVGVNNSIFDVELNSLLSLYKSLVKEINTIEKEINKLIEEVHPHYMSVPGIGPLSAAVIYSEYGDISNFTNPGQMLAFAGIEPGINESGTESHGGKMVKRGSSQLRYTLINCCLPLIRFDMTFATYYAKKRGEGKPHRVAITHVAKKLLESSMHWRGKISTLMHRNFVNL

SEQ ID NO: 64845 - protein, 324 aa, unidentified
MIDGILGIDVSKNTLDASMSSCNKVRAKSFANSPDGWRHLLDWLIGQKIRRVHACLESTGLYSLGIACKLNEAGHVVSIVNPAQIRDFARTKLGRNKTDAVDASHIREYCELFKPPPWSPPSHAHRQLGELQTIRAGIVAGLTEWKNRKNSGMIDVVAQSLADATISHFTSQLGAVEKAIAQAIDNDTDLRRKRDLLLSISGVGETLASVVLAELPGPDVLRSSAEAVAYTGLNPRRHQSGTSIDRLTRISKIGNAVLRAALYMPAMSAMRYNPAIVALVTRLKARGRLNPKQIVVAAMRKLLVLCFGVLKTGKPFDPALAMGC

SEQ ID NO: 64846 - protein, 352 aa, unidentified
MQRFIGIDAHGQSCTLCVMGPSGRRLGHYVVETNGKTLVEQIRSIAGERHVCMEEGTQSEWLHEILQPHAKRIVVTQPLRRAGNKSDEIDGWALADLLRRDAVERSVFKSPQTLTPLRQAARGYLVMQQDLVRAKCRLHALYRSRGVMPTSAIYEPEQRDAWMRKLPPAHRPLAQLLGAQLDSLTQVHHAAQTRLLEEAKRVAITRRLATAPGIGPIRAALLVAIVVTPARFRTTRQFWSYSGLAIVTRSSSDYVRQDGRWVRKPVAQCRGLNRNRQPLLKAIFKGAATTVIRQMPNQPLHQDYQRMIGESAIKPNLARLTVARRIAAVTLAMWKHQEDYDPSKQRRAPLSQ

SEQ ID NO: 64847 - protein, 343 aa, unidentified
MARFVGLDVSQKLTSICVVDETGRRLWRGQCSTDPDQLEQMVKGHAGEDARVGLETGPMTPWLVHALRHRGLDVVCLDARHASAALKMQMNKTDQNDAEGLAQIMRTGWYRPVHVKSLDAHRARALLGARAQLVGMTTRLSNQIRGVLKTFGLLPGTMRGLSFDCRVESLLADRDDLAPIVRPMLVAWRQLREQIAEFDKQVRALTKKDPTCRLLMSVPGIGVVSVLAYVSTVEDPARFARSRSVGAHMGLTPRQYQSGEVDRSGRISKCGDTLARTLLYEAAVVILARIKRASGLKDWAQAIARRSGWGKARVALARKLSVILHSIWRSGEPFRWPEQPASA

SEQ ID NO: 64848 - protein, 364 aa, unidentified
MKKLVVVAAPGQEGLEGRRRPDTGQDIWIGVDVSRTKWVYTVRWGGQEQRKLSTAGELHHLQTLAAGYPGYKVHVIYEACGFGYEIAWWCQEQGIDVVVVAPSTIEQAPGSRVKTDRLDAGKLARDGEQRRLKGVRIPTRGQHAHRQLSRSDTQALKDKQRAQARVRSLMQEQGRIGPPPAAGWAAYLRWCTKQELPDTVAQCIKELLQLREAALASVKRLRAALHQLSTQAPYAPVVRGLAAQAGVGAFTAVRLVLELGDMHRFPTAGSFPRYLGLTPSEYSTGLTERRGHLTKCGPRFIRAWLIQCAWVSVRLGGDARLRAVFERLAPKIGKKRAIVAVARRLALRLRARWIEVLTTQAVAA

SEQ ID NO: 64849 - protein, 383 aa, unidentified
MKRYYIGVDWGDRLHQVCVCDEQGNKAKEIQVAETAQDLAEMGRWLDEKRVEGCELWAAIEKPTGRVVDFLLDHGVAVYPVNPKAVDRVRDRYRMSDSKSDLFDAYVLAEFVRTDQAHLKVLQPSSEQAQELKLLCRDYRRMVRHKTRLLNQLITTLKEYYPRALEVFGDIDTEVALDFLTQYRTPAHLSALKRRAFHRFATQQHHLSKERCEELWNKLIPAQLPVPEHVIRAKAQLTEVLIDQLRAAIKAVKTYEHKVERFFASSPVALIAKTLPGAKSGTVVATIWAELGDATGRWESFHHLQAQAGVVPVTKASGKSRVVHFRFACNKELRYALYWFAFNSLNRSQWAKTYYRKQRAKGHHHPQALRALGAKWLKIIFVM

SEQ ID NO: 64850 - protein, 397 aa, unidentified
MYIVGIDIAKRKHEAAVIDGEGTVIIKPFSFTNNCSGYNRLLAMLTKAKLPLDEVSFAMEATGHYWLALFTRLQKEGFRVQVINPVQTNSIRSFYIRQAKTDPRDALLIAEVIRFGHFSESTLHPENIYELRELCRGRHAIVSMQADVKRKVVALLDQVFPEYETAFANMFGDTSMAILQTCPTPKELSEMRLEELCHLIEVSSHKRFRMAKAQELQELARNSFGFAMAGDVFSTMIRLYAKHLDFLKQQVREMDRKIAEIMETLDTPITTITGIGPTLGAYILSEIGDISRFSSAAKLAAYAGIDPTMRQSGEYNGVRNRMSKRGSPYLRHAIWLAASSAVLHDPALKLYFQKKRDEGKPYMASVGHACRKMVSIIYAVMRDNKAYTPCIPNEISV

SEQ ID NO: 64851 - protein, 351 aa, unidentified
MMIIGVDYHPGFQQIAFLVEETGECGERRLNHSDGEAEKFYRDLKARGTSVRVGMETTGFSRWFERLLAELGFEVWIGDAAEIKTRRAKKQKTDRQDAQLLLKLLLEERFPRIWVPSSENRDLRQLLWHRHRLVQMRTRVLNQLRALAMNENRCWKGKLWSEQVRAELEKLPLAFWASRRRQGLLELLDRMNPTIEELTAAAALEAKKRPEALRLMTHPGVGPLTALAFVLIIGTPERFGCAKQICNYLGLIPSEDSSGGRQRLGHLTKQGSSLLRFLLVEAAQAAVRCNADWRRRYRHLAMRRQRNIAKVAMGRRLGARLYWMWRNGREYSPSLEFGSHTGELGTGNGGQ

SEQ ID NO: 64852 - protein, 329 aa, unidentified
MEKKGKRYIGLDVHKHYLVALGVDDNLEVVLPVRRVEFSYLESWMKKNLTKQDEVVLEMTTNTWQLYDELIQHVGKVTVVHPPHVALITRSQVMNDKIAASILARLLAKGLLVGIWVPPQEIRELRGLVAQRRKMTRLATQAKNRLHAVIQRHHLKPPEGNPFSKANNAWWEKLSLGKLEKMNLQSDLETLQFAEQQEVRIEKEMTGIAAEDAEIGRLLHMSGFGVVTAVTVYAAIGDIRRFLEPKKLVGYAGLGARVHDSGMTTRTGKITKAGRRDLRVALVEAAHVVANTHPHWKAELARLEPRLGRNKAIVATPAPTAGAVLPANC

SEQ ID NO: 64853 - protein, 341 aa, unidentified
MKNLFIGVDFSKEKVDVAIIFADGLTETAARVFNEFKTTVSGYKQLVKWVEQNSYGIDSSLWLFCGENTGDYSKGLCNFLYGKGYDMWLENAKSIKDASGLRRLKSDRADASMIAEYAMRNYDKAIMYEPLSESLAQLRELFLYRQMVVRHRCSFQVRRGEKRLTMEKSPIKTMISQSGRHIVSELNKEVEKIDKRIAELIKSDEELTEVFTIVTSVPGIGTQNAVCLMVYTDNFRRFNYDSRKIACYYGIAPFGKDSGTSVHSDPHVHYMANRQIKAMLTQAALAAVNFNSIMARYYMRLVERGKKKQVALNNVKNKLVHLITAMVRNRQLFSPEYKISA

SEQ ID NO: 64854 - protein, 389 aa, unidentified
MIDCYNQKLGEITFPNRPADFPKLVIKVKKCNTDAKEVVYGLENAYGYGRPLAVWLIDKGYFVKDVNTAISHRQAKHRGAMYRKSDSDDAEAIALATLNMLDKLPDACPNDAYWSLGQLVHRRDNIMKQRTRLVNQLHEQLCIAYPSYKQFFNDISRPTALYFWEHYPSRKYLKGKSVEDLRTELVPVSHNRCSTKNCEKILDAVASDKVKNNAYQDARDMVTLSIVSDLQHYDSQLAEVDKMLEQMYKMLGCTLTTIPGVNVITAVKILAEIGDIKRFGNANKLAQFAGIAPLHLSSSGKGKDVATKQGNRRLQATIYFLAIQMVQVSSKGTPRNSVVRAYYEKRKAEGKTSQQALICISRRLISIIYGMLKHGTEYRMPVVESAGEK

SEQ ID NO: 64855 - protein, 371 aa, unidentified
MRNVRFVGLDVHAESIAVAVAEPDGEVRSLGQIANEPEAVRRLIKKLGAARRLQAAYEAGPTGYVLQRQLSALGVRCEVIAPSLIPVKSGDRVKTDKRDAMKLARCLRAGDLTPVWVPDEAHEALRDLVRARLSAKRDQLRARQRLNKLLLRHGHRVAVGTTAWGSEHMRRLGYLRFENLALQEVERAGERLVRLEQALERVVAATPAAQRALIEALQSLRGVAKVTAITLVAEIGTFTRFAHARQLMGYSGAVPSEHSSGPRTRRGHITKCGNAHVRRVLIEAAWAYRHRPAVGPTLRRRQEAQSEAVKAIAWQAQHRLHARYRHLRARGKVHQQVVTAIGRELLGFIWAIAQQTERQHPQVQPLRQPAA

SEQ ID NO: 64856 - protein, 448 aa, unidentified
MGKVKVKNEKVRMIASIPVINFHVAGIDVHDSEMFVAYPVNSESIQVKTFGTFTSDLKLIVETLKDAKVTSVAMESTGVYWVTLFLLLQEEGFEVYLVNSQQTKNVAGRKEDDHDALWIHQLHSCGLLKASFQPDKMTRALREMVRHRKNLVETTTDYINRMQKALELMNIKLHTVISDIDGKSGRKIIEAILAGERDPEVLADLRDVRIKASREVIIKSLEGYWLNEHLFSLKQCYQLYSTHRELINECDKEIEKQLIEQIASTNGGEIPEIPQISRKVSTKNKIPYNLTSILNEILGVDITRVTGLSELSVLTIMSEVGTDMSKWKTQHHFTSWINVVPNTKMSGGKIISSRVKKKKNNVGQVFRIAANSLYKSQTPLGDYYRRIKASSGASKAVVATARKLAIIYYIMVSRKQEYNPIALEEYQRKYKEMKINNLKKKLAQLEAA

SEQ ID NO: 64857 - protein, 409 aa, unidentified
MQPILKSCCGIDVHKSMIKVSIAKGHLDKPPKFFTRTFSTMTSDLLKLKDWLRENEVEAVAMESTGVYWKPIFNILEDEFRIVLANPQYLKKVPGKKSDVKDCEWIASLLRCGLIPASFIPPKVIRELRELNRTRRKLVGMMASEKNRIQKVLEDANIKLASVVSKIDGVSSIDMIQALLKQDKLSKEEIAAMARGKLKRKVDKLVEALNGRMTDHHRFLLRLHLNDIAFLADQVEEIDRQIQKCMIPFRKEEALILTIPGVNKTSASAIISEIGTNMSQFPTEAHLASWAGMSPGNNESAGVKKSGKIRKGDRYLKAILTEVAWAASRTKNSAFSAIYNNIAKRRGKKRALIAVGHRILVAVYRALKSGEPFVDEGAEAVYQRNSKARQQSAIRLLEQSGYAVTKAPA

SEQ ID NO: 64858 - protein, 404 aa, unidentified
MSVHLAPVTSSTIVVAVDVGKTSAVLSASDSARQRVFGPVEFAMTRSGLVGVVRRVGAVIPPCAQVKVGIEAAGHYHRPVLDYRWPAGWEVLEFNPAHVAEQRRVQGRRRVKTDAIDLEAITELVLAGRGQPITEREVGIGELAAWATHRSRRVATRTATKNQLLGQLDRAFPGLTRALPDVLGTKIGRLVAAEFADPARLSVLGVSRLIRFAAVRDIQLRRPVAERLVAAAADALPTRDGVVARQVLATDLGLLRDLDTQIENAECELAALLPASPYATLTSVPGWGVVRVSNYAAALGDPDRWPGPRQIYRASGLSPMQYESAGKRRDGTISREGSVALRRAVMDLGIGLWLSDPSAKTYAAELKARGKPGGIIGCALAHRATRIAYALVRDHATYNSSRWA

SEQ ID NO: 64859 - protein, 358 aa, unidentified
MVNEKLYHGEKTTKSYQGGALMEVYAGLDLHSTNTYVAMIDGENKVLYKQRHRNDVPAILSALDPFKKDIQGVVVESTYNWYWLVDALMEAGYLVHLANVSAIKQYEGLKQVDDRRSSLWLANLLRLNILPTGYIYPKEERPTRDLLRKRLQLVRNRTSHVVSVKNILARNLGVRMKSNDIKKLRASEVRALFPDKEMRLMIMSSVGLIQHCQEEIDAIEKLIAKKVKIRKEFAKLLTVPGVGEILGLTIMLEVGHIDRFPTVGDYSSYCRCIRSIRTSNGKVTGYGNSKNGNKYLAWAYVEAANSARRWHEAIRNFYERKRAKTNKIVAIKTVSHKLARASYYVMRDAVDYDQTRFA

SEQ ID NO: 64860 - protein, 369 aa, unidentified
MLRPRQQAKLARGAEDEEHAMSPKLNYGIAVIGIDIGKNSFHVVGVDRRGAIVLRQKWSRGQVATRLATMPPCLIGMEACVGAHHLSRKLSSLGHDARLMPAKYVRPYSRGQKNDFRDAEVIAEAVQRPTMKFVATKTAEQLDLQALHRVRERLVSQRTGIINQIRAFLLERGVAVRQGLRFLRAELPRILAMPCDVLSPRMVRVLEDLACDWRRLDERIEGLSSEIEVLARQDAGCERLMSVPGIGPIVSSAMVAAIGGGDAFSKGRDFAAWLGLVPKQISTGDRTILGKISKRGNRYLRVLFVQAAWVVLIKPKSWDRHGLKPWLEAAKKRLHHNVLAIALANKLARIAWSVPARGRAFEASKIQVA

SEQ ID NO: 64861 - protein, 393 aa, unidentified
MICIGIDVAKDKHDCFILSSEGEILSDVFTIRNNREGFENLLQRIQSCTQKSDKIMVGLEATGHYSYNILGFLLDHGLATCVINPLHTNLYRKSLSLRKTKTDRIDAKTIATMLMSDVDLKSYTDTAYHNEELKSLTRYRFNKIQERAKLKQSVARLVNILFPELEKLVPTLHMASVYALLKEFPGAQQIATAHLTHLKNILTEASKGRYNKDKALEIRDTARSSIGSIMPAKSLELRHTVQLISELDTEIDEIESAIEEIMNSIQSTITTIPGIGLRMGAMILAEVGDFSNFDSPDKILAYAGLSPSTYESGKLSLAGTYSHMEKRGSRYLRYALFNATKFVCKWDSIFAAYLAKKRSEGKHYNVAISHAAKKLVRVIYALQKSGKPYITAT

SEQ ID NO: 64862 - protein, 351 aa, unidentified
MIAINTDIIIANIGVDIGKNAFHICAMNAKGTIVLRERLTRAALPKRLANIPPCLIGMEACAGAHHIGRKLASLGHDVRLMPAKYVKPFLKGHKNDYRDAEAIAEAVQRPTMRFVPFKSDEQLDLQALHRVRSRLVGQRTAVINQIRAFLLEHGLPVCQGPGALRQALPSILAQRTDTLSSRIIHLIEGLIDDWRRFDQRIADVTSEIEQLAKQSENCKGLMSVPGIGSITASAMVAAIGDGSAFSRGRDFAAWLGLVPKQISTGDRTILGGISRRGNSYLRTLFIQGARSVLQRFEGWEKKSFGRWLIAASKRLHKNVLAVALANKLARIAWSVLYHARGYDAAPMPKAA

SEQ ID NO: 64863 - protein, 425 aa, unidentified
MKKIDYLSTLFVGIDIGSRLNVISALNFEQDFLIRMVPIPNAQYGAEQMEQMIAQVLEQHHEFRSLIIGLESTGFYGVHIANYLSTCERLAPFSTKVYCLNPKEVAKYKESFNSLDKNDGIDSFVIADFARVGRIRIQPWRGAQYLALQRLTRHRLHITECIAREKTYMLNNIFLKFSEFAMLDKDEHPFSNKYGATAEAVLTDYLSTEAIVNASVNELIAFISSKSRGRISDPEQTTYLLQKAANDSYRLDKCLYEPLTVSIGCSFNCINAFEKELKAIDDAILRTVKGLNPTEYQILNSVPGIGKVYASGILAEIGTIKCFKNNDALAKYCGIVWKENQSGNFEAEDTPMNKAGNRYLRYYIIEAAGSVIRHCPEYKAFYEKKFAEVRTHQHKRALALTSRKLIRMLFGLLDKSQLYSVEKSR

SEQ ID NO: 64864 - protein, 392 aa, unidentified
MLLEHPCNEPTAIHTQLGAIFVSLELSRSTWLITSISPGKGEKMSRHSVPAGNIAALLARFAELKRKAAMRTGQDYPIITIQEAGLDGFWIHRVLQGEGIESHVVDAASIAAPRRQRRAKTDKIDGESLLRVLLAYKRGEPRVCAMVIAPSPEEEDRRRIGRERQTLIAERIEHVNRIKGLLFSQGISNYAPLRRDRRTRLATMRTGDGRELPAHMKAQIERELDRLELLLTHIEAIEAARDALLAEAAKPEHKAAAATPVAMLMALKGIGEEFAAVLWLEAFCRTFSNRRQVAAYAGLAATPWRSGSIRHEQGVSKAGNPRLRKTMVQLAWLWVRHQPQSALTRWFEERTRNGGGRKTAIVALARKLLVALWKYVSAGVVIEGAVMKGAAA

SEQ ID NO: 64865 - protein, 340 aa, unidentified
MDQVSVVGLDLAKSVFQVHGVNAQGEVVLRRRLTRGQLLKLFEKLPPCLIGMEACASAHHWARELAGLGHEVKLMPAQYVKPYVKRGKNDAADAEAICEAVTRPTMRFVGVKSPDQQATMMLHRVRKILTRQRTQISNALRAHMAEFGIAAAVGRGGLDRLIAVIADQDDARLPDEARACLAVLCTQLEMVKDQILDNDRRILADARKTEAGRRLMKIPGIGPLLASAIVACVPDPATFSNGRSLSAWIGLTPRQNSSGGKERLGSITKAGNTYLRELLVVGAMAVVRRAMQGSAKRPWMTQLLARKKPKVAAVALANKNARIIWAMMATGEPYRELAAA

SEQ ID NO: 64866 - protein, 367 aa, unidentified
MPMLEGKVDAVIGVDTHRDAHTAAILDPNGGLVAQLEIPSSQAGYARLLGLVAEHVPGRRCWALEGSGCYGAGLASFLADQGEWVVEVDRPKRPRGRNGAKSDPLDAIRAGREALSREHLASPRQRGHREALRVLQLTRAGAVKVSADARRHLKALLVTAPEPLRQALRRGTWLVRARGCAALQADPAAPVEDRATVRALRLTAERALSAHAEAEQLEKELRALVKAMAPVLLVQPGVGPITAAQVLVSWSHSGRLRSEAAFAMLAGVAPIEASSGRVVRHRLNRSGDRQLNRALHTIVMIRQRYHQPTKRYVARRTGQGKSEREIRRCLTRAVARQLYRLLEREATVAAVASPHRTTPSTTATALF

SEQ ID NO: 64867 - protein, 343 aa, unidentified
MQVTTIGLDLAKHWFQVHGVDASGAVAIRKKLRRSEVLGFFQSLPPCLVGMEACATAHYWARELTKLGHTVKIMPPAYVKAYVKRNKNDAADAEAICEAVGRPSMRFVPVKDAEQQSVLMLHRVRNLLVRQRTMLVNALRAHMAEFGIIAPQGLRHVELLTKQVAHEQERVPELARSILQLIVDQLRDTMARVREIETRLAQWHRQSKVSQSIATVPGVGIMGASAIAATVADPSLFRSGREFAAWLGMTPRQNSSGGKERLGRTSKRGDKYIRSLLIAGAVAVLRHARNRPTRDGVWVRAMMERKPTKVAAVALANKTARIVWAVMMRGDGYRAKQVLGQPA

SEQ ID NO: 64868 - protein, 397 aa, unidentified
MSTLFVGVDVSKDDASAQGLDREGKKLFYLEFSMDGEGFSRFLDRVKAHCGNLSEVTVAMESTGCYHINLFSFLSSEGIPCVVINPLLISNFARLSLRKTKTDKKDALSIAQFLLAHKDSLSRVAFSQNSQDLKDLARERESLTVMISGLKNDIRRLLKMSFPELEHRSKIFTETMLHVLIKFPSARALTAAKPKEIAKALIHVEGKRKRVLIRAEEIIQMAKASVATDSAAKELILSEKISTLFYLEEKRKKITGVLVKTCQSMRVEDLEIITSIDGIKQINGSTFLAEVGEMNHFKSHKHVIAFAGLDPSIHQSGQYEGISRISKRGNRHLRRVIFLMTTCVVRSNNIFRQYFLKRKAEGLPPKKAILATAHKLLRVLFAMLTTKSYFRKEVVEV

SEQ ID NO: 64869 - protein, 331 aa, unidentified
MELVEAIKKAKEKFGLSPEAGVVSCYEAGRDGFWLHRYLVSLRIENQVVDSSSIETNRRKRRAKTDRIDGVKLLTMLMRYWGGERGLWSVVRVPSVEDEEARHLHRELASLQKERTRHRNRIRGLLVAQGLRLEPNDDFLKRLEKLTLWDGAPLPLEIKGELEREYQRLSLVEAQRRALEKTRKSRLRQADTASLQRVVQLMGLRAIGPNCAWLLVMEFFAWRGFRNRRQLGACAGLTGTPYDSGGSKRDQGISKAGNRRVRTMMIEIAWLWLRYQPNSKLSRWFRERFAGGGARMRRVGIVALARRLLVALWRYSEDGVVPEGAVLKAAG

SEQ ID NO: 64870 - protein, 354 aa, unidentified
MLIIGCDYHPGFQQIAFVDTGTGELQERRLGHGQEAEAFYRELKQRGASVRVGMEASGQARWFERLLAELQFELWIGDAAQIRAKRVRKQKTDRQDAQHILDLLLENRFPRIWVPSWENRDLRQLLWHRHRMVQTRTRLMNQLQAVALNEGVRRKKGLWREAGRKQLETLALAPWASRRRRDLLEMLDRLTPRIAELTEAVEQEAEKYPAARRLVTHPGVGPLTALAFVLIIWEVDRVRCGNQVASYLGLVPAEDSSGEHRRLGHISKQGNTLLRFLLVEAAQVTIRSDAEWRRKYFHLALRRGRKIAKVAMARRLAVRLYWMWRKEWDYEQWKKFGPHAGQPGTGVGVQSNTE

SEQ ID NO: 64871 - protein, 460 aa, unidentified
MNRKQRREVIRKIQSEDLTLEVVHPVAAGIDIGNEAHYVAVPPTRDSQPVRRFGCTTTELKAMSAWLKQCRIGTVAMQSTGVYWIAVFDILEEAGFEVYLVNARDTKNLPGRKSDVQESQWLMKLHTYGLLRNSFRPSQEIRRMRTYWRQRNDLVRAAGRHIQRMQKALTQMNIQLANVLSDISGMTGQAIIKAILAGERDPHQLAAFRNSRVQASQEEIARSLEGNWQEDLLFVLKQEQDGYEFCQQQMAECDRQLEQYLQQREDRTQGASLPEEKRKVRLQKKKRTNKPQFDLRAELFRMTGTDLTQIDCVDVRTATTILSEAGWDMSKWKDENHFVSWLRLCPDNKISGDRIIGKGRLATNNRATIALKMAASTLRRSNTYLGAQFRRLRTKLGAPVAIKAMAAKLARLIYRMLRYGMQYIDQGAEFYQEQHRQLQIKYLKRKAAQLGFQIIGAPAA

SEQ ID NO: 64872 - protein, 344 aa, unidentified
MEYFAGLDVSLRSCAICIVDNKGKVLFERELACEVGDIAECLAGFPHPIERVGFEAGTMSQHLFFGLQAMGFDVVCMEARQVNAALSAMRNKTDKNDARGIAQVLRTGWFSPVHMKSREAHGQRALLSSRKALLNKTIDLANEVRGLLKIFGLRLPKSVSHGSFDDIVRPMVKIDDVLSHALLPLLDARVALYQHYLELDRRVKRAASQDGVCMRMMTVPGVGPIAALTFKAAVDDPSRFKSSRTVAAHFGLTPRRYQSGEVDNPGRISRAGDRDVRATLYSAANAMLMRTMAGSQLKSWGMRLMRTKGRRRAVVAVARKLAVLLHRMWIDGTEFCLEGVEGTA

SEQ ID NO: 64873 - protein, 326 aa, unidentified
MASVIGIDVSAKSLDVVVRKAGKNSQSTVYANSHSGHNELTSKLKKLNPDLIVMEATGVYHFAIAERLFDEGLPVSVINPKQSYHFAKTLLQRSKTDAIDAGLIAEYGQRMEPRKWCAPSWARREFREVARQLNRLTAELTAAKNRLHALKVGAQSDFLIADEQDAIELHERRIERIRKYASQCITSDDELTVQLNNLTQGKGIGEITAVAVLGELCVLEKSLKAPQIARYAGLDVRENQSGSSLARPGRLSKAGNTYLRAALYMPALSAGKHDGPSQVFIERLKNRGKKPIQAQCALMRKMLTGIWACMKNNEPYDSTKLFDLDA

SEQ ID NO: 64874 - protein, 319 aa, unidentified
MSKRVLGIDAAKKKLDVALMFDGKVLLKKFDNMPKGFKLLAGWLASLHIEQVHACLEATGPYSEAVAEFLHESGHRVSVVNPFRIKSFANSDLQRNKTDEADARTIAAFCLAKDPDDWQPVAPEIKQLRDLTRRIEALERMLGVEKNRLEMAPAATRPSIDRMIDNLSKEIDAVQRLIKDHINKHPDLKQQSELLQTIPGIGEKTARLLLGEIEFRGFDSARALAAHAGVTPRRFQSGSSLNRTQLSKLGNGRIRKALYFPAIVAVKCNEVIKLFAQRLSRNGKTPMQIVCASMRKLLHIAFGVIKHSRPFDPDLAFHI

SEQ ID NO: 64875 - protein, 378 aa, unidentified
MDVIYPRCAGLDVHAETIVACALWEEDGHIQKDIQTFSTFSKGLGDLLEWLEEHGVTHVAMESTGVYWKPVFAFLEGYVDLTLANPQRIKNVPGRKTDVSDAEWIAKLLRHGLIEKSFVPPADIRELRDFTRLRKKWVGQLSSEKNRIQKVLESSNVKLGSVLSDLFGVSGRNILARLLEKGYVDKDELDQCLRGRLKTKKQAVYDSLLGTLTEHELRLLRLLWKHVEELEQLIEEVDQHIDRLLEPYREEVDLLMTMPGIKKQTAAVIIAEMGTDMSVFETPERVASWTGLSPGNHESAGKRKSTRTTKGNPHLRSALCEAAWSAARSKTHPLSRKFWSLAARCGKKKALIATARRMLVIIFCMISRKESFRQPQLI

SEQ ID NO: 64876 - protein, 349 aa, unidentified
MAKLRDRVDFVVGVDTHKATHTAAVVNPQGAELATTTLPADTHGYRRLREFAQEHAQGRRVWAVEGSGSFGSGLTTHLLAKGEWVVEVDRPRRPARRTGAKSDELDATRAAREALSRNHLAQPRRRGEREALRVLVRTRHGAVQARSRAICHLKSLVVTAHERLRDTFRRLDTTALVNRCARLRTSIRHSPEHRATVTALRATARRVLHLEAEANDLESQIEMLVLEMAAPLLAEPGIGVLTAAEILCAWSHPGRLRSEAAFAALGGVAPIVASSGQVTRHRLNRGGDRRLNCALHTIVLSRLGHHEETQEYAARRTLEGKSRKEIRRCLKRYLARRIYRLLEGLPDAA

SEQ ID NO: 64877 - protein, 346 aa, unidentified
MLYVGLDLSRRRLDFDVLLPDGGRLERGAVPPDVDGLASLVQRLDDANEPVCAAIESMSGARFVHDQLELAGWDVRIADAFKVKGLAPLACKTDKIDSWALAELGRLSLVPEIWLPDPTVRAERERARFRLHLVRHRTALKNRVHSTLITHGVPNPTSDLFGTSGRELLARLSLPEPWRSTTQASLALIDLLDAEISGIERELRALGVEHRYIPFLITCPGIAWVLAFTITSELGDISRFPTPTKFVGYTGLCPKVDQSGERDWRGPLRKNGPNYLRWALVEAAHTALRYPCYQPTLARQTARHGRKRGRKIAAIEVGRKLAEAIWYMLSRNQPFAPAGAKQVLTA

SEQ ID NO: 64878 - protein, 410 aa, unidentified
MEAIVRACCGLDVHQATVVACLLVGDPDKKPRREVRTFGTMTCDLIQMREWLTAEGCTHVGMESTGVYWMPVYAMLEGHFELVVGNATHIKNVPGRKTDVKDSEWIADLLRHGLIRRSFVPPKPLRELRDLLRYRRKLVEAQTAERNRLLKLLETANIKLASVASDVFGVSGRAMLRALLGGTATPDEMAQLARGSLRKKIASLSAALDGRVEEHHRFLLGVQLDRMEQVEASITKVDARIDEKLLPYATQHQRLTEIPGVDRIGAAVIIAELGVDMSVFPTPQHAAAWAGVCPGNNESAGKRKGQPGRKGNVHLTTALVQAAMGAGRKSGSYLKEKFWRLKARRGPKRAALAIAHKILIAAYHMLRNDCPYKDLGLAYLDTFSVTVVKATLVKRLERLGYRVSLETLTA

SEQ ID NO: 64879 - protein, 433 aa, unidentified
MLKLNYMSTLFVGIDVSSKTNAVYAMDFEENKYISSSFGNNQPGADKLVNMIAECMHKHKNLDTVLIVLESTSVYSVHISNFLSTSVVLMPYKPYVFCVNPKATSNYRKSYIGMEKTDPTDAYLIADFGRVGRTKKLEPWRGGQFIALKRLTRHRMHLSECITREKTYMVSNLYLKFSELQLLEGDDKPFGSLYGATSSAVLTEFLSPQEIIDMPEEELLTFLAGKSRNRISDLSKTSELLRKAARDSYRLDKCMYEPLNVSLASSFNCIHAYQKEIKLIEQAIEKCINGMNPNALVILQSIPGIGPIWASGILSEIGDITVFHSSDALAKYAGLYWPKGDSGDFTSEDNKMSKAGSPYLRYYLGEAANSVRKHIPEYADFYARKYAEVTKHQHKRALALTSRKFVRLVFGLLAKNQLYTGEKLDAEYNIKSN

SEQ ID NO: 64880 - protein, 337 aa, unidentified
MEQQQQYVGIDLHRRRSVIVRRNEAGQTLETVRIDNDPIALAAELAKAGEHPEVILEATYGWYWAANVIQECGANVHLAHPLGNNWGNRRVKNDERDATDLVDLLRMGRLAEAWIAPPPLRELRELIRYRGKLVHLRTNLKSQVHAVLAKEGVRVPMSDLFGVGGQVLLDKVPLAAAYRVRVDSLRDLIDSVNREIAMLEEQAAPYFAGDLGYHAVQTIPGVGPVLAAIFVAEIGDVSRFTSARHLCSWAGLTPTHKESDVTVHRGHITKQGSRLVRWAAVEGVVRQRTDSPIRRHHRNVGDRRGTKIGRVAAARKLLILVYYGLRDGEIRCLAETG

SEQ ID NO: 64881 - protein, 343 aa, unidentified
MQTITTIGLDIAKSVFQVHGIDAGGQVVIRRQLKRRHVLTFFEKLPPCLVGIEACASSHHWSRELQALGHTVRLMPPAYVKPYVKRQKNDMADAEAICEAVTRANMRFVPTKTPDQQSGLMLHRTRHMFVRQQTAVINSIRAHLAEFGIVAPVGRKGVTELLHVVADPNDKRVPEVARACLTALGTQLLALKEQILEFDRMILAWHRSNQTSKRLHYIPGVGPMLATALVASVADPRTFRSGRNFSAWIGLVPKQHSSGGKERLGSISKQGDRYLRSMFVAGALAVIRYAKIHGTGHRPWLTALLGRRPTKVAAIALANKIARMAWAMMAKGERYKQPAALAR

SEQ ID NO: 64882 - protein, 359 aa, unidentified
MEQKRFVGIDLGKRTFEIKFITSNGSVTGTNGKTCPSGRKELYKKLLPTDRIAIEVCSLGMVMAKEIIQQVGAEVVLLNPSQIALIYRSVKKNDKEDALKLARLVQKFTNEELPKVELPTEHEENLRQILTELRQLKNDRTKEINRVHAIFVECGITEIKKSNLATHKNRSECIRILKGIFLSQAERSLRKLELIEAQILEVEELLDKEIDGDKSIGTLITVPGVGKQLASSFVAFLGDGSRYPNVSSIGAATGLVPRLDMSSTSLRLGHITKKGNSNLRSLLILAAWSHVRAKNGGALKEKYLYMTIAQSKSKKVAIVAIARKIAELMYSLLKNNTQYEKRAPVSIKKLATEALVVAS

SEQ ID NO: 64883 - protein, 339 aa, unidentified
MNSSVIGLDIAKNIFHVYTMSEAGKPIRKVLKRSQVLEYFANYRLSLIGIEACGGAHYWARELKKLGHDVKIMNAKYVKAFVKGNKNDFNDAEAIFDAVTRPNLREVTVKTLEQQDIQLVHCVREELKKQRNAVVNQIRGLLSERGIVIGKGINQVRKRLPEILEDGENDLSVLSRACFAEHYARLNTLDEEIKAQDRRISQLCNSHEQSKRFADVPGIGPLTATLVMADVGTGKGYHNGRMYAASLGLVPGQHSSGGKAVLLGISKRGNRYIRTLLIHGARAVLQHIGGKTDTLSLWLKALVERRGMNVAAVALANKNARILWALATKAEDYRPARVA

SEQ ID NO: 64884 - protein, 398 aa, unidentified
MTESSDYESVQVFIGVDVGKDTHHAVAINRSGKRLFDKALPNDENKLRSLISDLKQHGQILLVVDQPATIGALPVAVARSEGVLVGYLPGLAMRRIADLHAGEAKTDARDAAIIAEAARTLPHALRTLKLADEQIAELSMLCGFDDDLAAQTTQASNRIRGLLTQIHPALERVLGPRLDHPAVLDLLQRYPSPEKLASLGEKKLAAQLCKLAPRLGKRFAADIAQALAEQTVVVPGTNAAAVVLPRLALQLITLRKQRDEVALAVEQRVLAHPLYPVLTSMPGVGVRTAARLLTEVACRAFASAAHLAAYAGLAPVTRRSGSSIRGEHPSRRGNKALKRALFLSAFAALRDPLSRAYYTRKMSQGKRHNQALIALARRRCDVLFAMMRDGTFYTPQAS

SEQ ID NO: 64885 - protein, 384 aa, unidentified
MKVACGLDVHKDSVFCCILCANGEKIQHKFGVLTEELVTLRDLMVSEGVEECAMESTSIYWIPIWRVLEGSVKLHLVNPYFIKQLPGKKSDVNDAEWIATCLSKELIASSFVPDDKIQRLRQYDRRIFDLNVSISRNLVKLDQCIQRCNIRISNYISTTDSKGYRSIVKLISQGVTDAEVLVKELHGRTINRHGRETLVKALTGVVSETDIDIIKQLVEEIELQQRHKDEAQEKMTALCMEWFPQEVENLQTIPGVKERSATSIIAEIGTDMTHFQTPKKLVSWVGLRPRNEESAGKIKARGITHGNRFVRKTMIECSWGAARMKDSFFAEFSYRQCIERRKNKMKVQVAIARKILVAVWYVLSQGTQYIKPTDHYTAAHMTAV

SEQ ID NO: 64886 - protein, 345 aa, unidentified
MNIRKVVSPTTNGNGPFVEDYDHFVALDWSQSVMAVAHTGRRSKEPTVFERQANVKDLKQYLSSLKGRTVLTFEETTTAHWLFVELREVVDRIIVCDPWKNRLLCHGPKTDKIDARKLCLLLRGGFLTEVFHSTDALYELRCLVSAYDDLVRSGVRLLNQRHAIERGHAETRKNVSFILEHLTKSIDAYRQTKEQYEAKFLHFCRRHSTARHLLAVEGLGTIGVVKILAIVVDARRFSTRGQYLSYCGLVRNEKLSGGRSYGRRKPRFSHPLKAVYKTAAMAALNGKPNPVREYYEHLLARGIAEHNARHTVARYIARISYGMLKNGTRYEPYRWRSNTETRNVA

SEQ ID NO: 64887 - protein, 360 aa, unidentified
MATMTWVGLDVHARSIEAAALDARSGELTRRRFGGEAPPVVSWLQGLAAPVSACYEAGPTGYGLYRAAREVDVAMEVVAPSKTPRGRGDRVKTDRKDAELLVRLLSAGALAPISVPAPAFEAARDLSRAREQVRGDLLRARQRISKLLLRYGRVWDPSKSTWTQAHRRWLEGQRFPAESTALAYHDGLGAIDALAARKAALDEELGRLAADPLFWPTVARLRCFRGLDTLGALIVHLEVHDWSRFRRPTELAAWLGLVPSLEQSGQSSQSGSITKTGSAYARRILVEAAKHAGKQPRISVELGRRQEGQPAEVRAIAWRAQRRLYRLARRLRTRGKPANVIAVAVARELAGFLWAAALTE

SEQ ID NO: 64888 - protein, 473 aa, unidentified
MPPDLSLTVSTMIAVTGSRAGEGVDETLYDASVRAWRPAESARETQRGGAPGTEPRLGKVATVHVRWGIALRGIDWATEAHRVVVLDADRRSLHDRTVRHEGVALETFAHWLAQDVAAGVASDVAVALEVPRGAVVDTLLARGFHVFALNPKQLDRFRDRYTVAGAKDDRRDAQVLASALATDQPAFRRLEPEDPLIVELRELSRLEDDLRQELGRLTNRLREQLHRYFPQLLQLVPAANEPWLGALLERAPTPSAAQHLPRATLRTLLTRHRIRRVDAETVRTLLRTPALAVAPGTVQAARRHLAVLWPRLRLVHQQQAECATLIDGLLERLAESQEHRDVPILRSVVGVGRVVAATMLAEASRLLAARDYHGLRAQAGVAPVTRQSGRRTLVAMRHACNPRLRHAAYHWGQSAARHDPVSRAHYAQLRARGHSHARALRGIVDRLLRVLIAMLTAGTLYDPTRRRVVADAA

SEQ ID NO: 64889 - protein, 410 aa, unidentified
MEAIVERVAGVDVGQASVAATVLLGKAHERPCKETRTFRTLTRDLLQMREWFAALGVTHVGMEGTGIYWVPVYEVLEDGFEIIVGNARHIRNVPGRKTDVKDSEWLADLARHGLIAKSYVPPRPLRELRDLLRYRRKLVETRTAERNRLLKLLETANIKLASVASNVFGVSGMLMLRALVETQDDPRQIAALAKGQLRRKADDLALALEGRLSAHHRFLLRLQIRRLDLLGADIATVEDSIHRALAPYQREHTLLQQIPGVDWVIAAVIVAEMGTDMAVFRSVKHLAAWAGVCPGNNESGGRRRRAPVRKGNPHLQTALVEAASAAARKKQSYLSDKFFRLKARRGYKRAAMAIAHKILVAVYHMLRDHTDYKDLGDKYLDVLNRRHTTNNLVRRLERLGYQVDIKPKAA

SEQ ID NO: 64890 - protein, 404 aa, unidentified
MSVQTAPVTSSTIVVAVDVGKTSAMFSVTDAARHRLVGPSEFAMNRSGLAAAAARAIAAVPELSGVKVGVEAAGHYHRPVLDYRWPPGWEVLELNPAHVAEQRRVQGRRRVKTDVIDLEAITDLVLAGHGSPVPDHNKVIGEMSAWASHRHRRVATRTATKNQLLGQLDRAFPGLTLAIPDVLGTRIGRLVAAEFADPARLSALGVNRLIRFAATRDLQLRRPVAERLVSAARDALPTRDAVIARQILAADLNLLADLDDQIRSAETALTALLPRSPYATLTTVPGWGVVRVSNYAAALGDPARWPGPRQIYRAAGLSPMQYESAHKRRDGTISREGSVALRRALIDLGIGLWLTEPMAKTYAHRLKARGKHGGVVACALAHRATRIAYALMRDHTDYDGTRWT

SEQ ID NO: 64891 - protein, 337 aa, unidentified
MEVRIGDYPVCIGLDVHKKYSYAAVVDELGEVKEEVRIENTKQSLEQFASKYQGAEAVIEATGNYRFIYDILENYMDVKLAHPYKARVIAEARIKNDRLDAKMLAHLLRANLIAESYVPPKEVRELRDLTRTRKALIEDRTRIKNRVHAILARNGIMDYPNPFTKKGREYLEKIDLPEIDRKLLEINLSIIDKINEEIKEIDKIIQEKAKEDNDAILLTTIPGISYYSALLIKAEIGDVNRFPNKFKLISYAGLCPSIRQSGNKEIKGRITKQGSRMLRWILIQCANIAIKHDEYLRSFYLRIKRRRGHNIAIVATARKMLVCIYFMLKRGEVYNPR

SEQ ID NO: 64892 - protein, 343 aa, unidentified
MSTITLGLDLGDRWSRYAVLDADAHLVDEGRVATTREAMQDFFSALPTARVILEVGTHSPWVSRVVAACGHEVIVANPRRVRLISAAVRKNDRIDAVTLARLGRADPALLSPIRHRGETAQADLGQLRARDALVRTRTLLINHVQGTVKAMGYRVPSCTARTFALRARTALPPALAPALASVVETIAHLTEQIAAADRAIALLARERYPETARLRQIAGVGPITARCFVLTLEDPSRFAESRSVGAYLGLCPRESQSGARSPQLRITKAGDPMLRRLLVTSAHYVLGPFGPDTDLRRWGLGLVSRGGANAKKRAVVAVARKLATLLHHFWVTDVVYQPLRQAA

SEQ ID NO: 64893 - protein, 343 aa, unidentified
MYIGLDVHKKLSYYSMVDGEGTEVKRGRFPTTCEGLDEFASKLPEGAKVAIEASTSGIFAYERLDEGGIEVHLAHPVYVKPFAKKHVKTDKVDARVLAQLLRMAYLPESYVPGKEIRDQRVLIRHHASLVRLRTSIKNRIHALLAIEGIQTSEFSDLFGKKGMEFLKGVKLREVRRKALDNYLDVLKALEERIEEMEDILKEKTKITDEAKWLMSIPGIGYHNALLILSELGEIERFSNPKSMVSYSGLAPKVEQSGDYRRYGHINKHSNGFLRWAFIQSARAAVRSSKPNRFQRIYNKIKARRGEKVAIVATARHMAESVYWVLTRKEYYKENRAIRASYFS

SEQ ID NO: 64894 - protein, 334 aa, unidentified
MKQVNDIGVDVDSEKLVCAMQRAGERRPLATFANTAAGHKRFIRWVSKGARAARVCLEATGIYSLQFALALHEARNVEVMVVNPRAIKDFARACMQRAKTDAVDAGGILEYLERIPFIAWQPPAPEILQLQAINRRIVQLQTELTREKNRCHASEFAGASGDAIANDIEVNIRHLERRIERMHDSGIHLVRSVSSLATKLAHLISTKGIGEASAMRLLAELLVLPDDLAAPQWVAHAGLDPRPYESGTSVHRPRRITKVGNRYLRAALYMPAVVAIQHEPNVKAFYNKLVAAGKKPLQAVVAVMRKLLHAIWGMLKHDQDFDGNKFFKLAEKTA

SEQ ID NO: 64895 - protein, 343 aa, unidentified
MSEITVIGLDLAKHVFQVHGADPDGRPVLRKRLRRGQVLQFFASLSPCLIGMEACAGSHYWGRELRALGHEVRLIPPQYVKPYVKTNKNDATDAEAISEALTRPTMRFTAVKSAEQQSVLMLHRTRELLVRQRTMLVNALRGHCGEFGIVAAQGLSCAGDLIKRIEDPADTALPDLARQALQCLTSQIRAIQEQIALIEKKLLAWHSSCEASRRLAEIPGVGLITATAVVASVGNATQFRSARQFAAWLGLVPQQHSSGGKERLGHISKRGDGYIRRLLVHGARAHLSWSRRKKQIRSAWLTGLLARRPTNVVLLAMANKTARIAWAMLSRGERYQEMIAAAA

SEQ ID NO: 64896 - protein, 340 aa, unidentified
MGNVTVIGLDIAKHVFQIHGVDESGAIVVRRQLRRAEMLPYFGNLAPCLIGIEACATAHYWGRELGAFGHEVRLMPPQYVKPYVKRNKTDAADAEAICEAVVRPSMRFVGIKSTDQQAILVLHRGRDLLVRQRTMLSNAVRGHLAEFGVIEKQGMAGTMRLVAVIADAGDARVPDLARQVLASMAGQLRDVMTRIEALKCAMMAWHKQNPISQLLADIPGIGPVTATAIAATVADASVFTSGRQFSAWLGLVPRQHSTGGKQRLGGISKRGDGYLRRLLVTGATAALERSKSTRARPWVQAMLKRHPKKKVAVALANKMARTAWAIMNTGEVYRAPKAAA

SEQ ID NO: 64897 - protein, 315 aa, unidentified
MNKEIFVGIDVSKSQLDVGVRPSGKDDRNEFENSEDGITRLVEYLKAIRPELIVLEATGGLETAAVGALAAEKLPVVVINPRQARDFAKATGKLAKSDTIDAHVLAHFGEALRPEIRPLKDAETQELTALMARRRQIVGMLTAEKNRLTSAPKWTKKNIKAHISWLETNLNQVNKDLQGHLRKSPVWRETDDICQSIPGVGPVTSLTLIAELPELGKVNRKEIAALAGIAPLNRDSGISRGRRVVWGGRAAVRTILYMATLTAIRFNPVISEFYQRLIGAGKKHKVAMTACMRKLLTILNVMVRDRVQWRHDTAK

SEQ ID NO: 64898 - protein, 357 aa, unidentified
MEVVFPRCAGLDVHRDTVAAAVRVQSSKGPAKVEVRTFTTTGGLLGPLADWLAENKVTIVGMESTGVDWKPVFHMLEDRFECWLLNAAHVRNVPGRKTDVADAVWLADLVAHGLVRASFVPPKPFRDLRDLTRARRTVVEEKTREVQRLEKLMQDAGVKLTSVASQLLGVSGRAILEKMIAGERNPEYRAELARGRLRGKIPALTEALAGTFRSGHHGFLAAQLLARIDLCDEQIAELDQRIEVMIAPFVETVDRVTTIPGVGRVTAIVLLAEVGIDMSRFPTAGQLASWAGICPGNHTSGGKRLSGRTRHGNKWLRTSLTEAAWAAARSKNTYLIDAAKHLVEIHSIRHRRDVYHL

SEQ ID NO: 64899 - protein, 317 aa, unidentified
MIHLGIDIAKLKFDVALLAQGKFKTKVFANDSAGISACLKWLGTHADGPVHTCLEATGSYGEALACALHDAGHTVSVINPARTKAYAQSLGLRQKTDAVDAKMLARFVQTQEPAVWTPPPAELRALQALLRRLDALVEMRTQEKNRLGVAEPTVSASIAQHLDYLQSQIDALKAQIENHIDQHPGLKQQQDLLDSIPGIGAATSAWLIGELNLTRFDSARQAAAFVGLTPRKDDSGTSVRGRPRLSKQGNSLLRKLLYFPALTAMTHNPLVRALCLRLKAKGKHNMAIIAAAMRKLIHSACGVLKSGKPFDPTLADT

SEQ ID NO: 64900 - protein, 357 aa, unidentified
MKKTHYKKAYLGFDVSGKTIEIFGRTAESDEGVSIQITNSKAAIKKFIEALPCPEKTVIAMETGTDSPWMSDYLSSFGCEVIVAHARDLALIWGSPAKCDRRDAEMLVRLACFDQKLLHPVKHQDIEKRDDLCVIKARDTLVRVKITLISTVRNLMRSHGTDVSTLTPENFSQLAPKLLPDELRPALEGLLIQICYIRQEIKKYDRIIAKLCNKYPETKKIRQRKGVGPITALAFLLVIGDPQRFSSAERLAAYLGLVPKRDQSGEVDRQLGITKQGNTFVRRYLIQGANYILGHFGEDCDLKRYGERIAARGGKIAKKKATVAVARKLSGLIYMLWKNDVVYDPNYKQNQRQSKTA

SEQ ID NO: 64901 - protein, 423 aa, unidentified
MISAVLERCAGIDVGKKWISVCVLTGPANGDAQAETRKFQTTNQCLERLAEWLVECGCTHVVMESTGEYWRPIYNVLEEATEMEIILANSQQVKGLRGHKTDPEDAHWLAHLLRHGLIRPSYIPPLEVRQLRDLTRRRKQLVRNEAQERNRIQKILEDANVKLGNVLTDIFGLSGQLMIDKLLEGNATPAEIAELAQRSARKKIPQIRASLEGHRMNALHRRLIDMSLDHMAFLEEQISTLDHAIVQHIQAHGLEKPYQLLQTIPGVKEEAAASLLAEFGPDIQVFGSAKKISSWAGVAPGNNESAGKKKRAPALRGNPWARSTLTESAWSASRKKESEFQNAYQRWKPRLGHKRAIVAVAHCLAETVFEVLSTGQPYSGPGASPMPDSQAAKLIRHHTRRIKTLRKRLKPPPQRPQPQLATP

SEQ ID NO: 64902 - protein, 297 aa, unidentified
MENLSYGGIDVSKDRLDVVVLPEGWFFSVSNDTAGWAELVARLRPLAVCAIGLEPSGGYERGINPNKLRQFARARGVLAKNDRLDARLIAEYVAIMPTRVVQRDDAVERLAEIVTMRRQLCDEHVAVENQVGHLEDVMLRRLSKRRLIRLEADIRLLDKRLTEMVATNAAFAQLYELLTSMPGVGPVLAFTLIALLPELGKMSRKQIAALVGLAPYDFDSGKLKGHRSIYGGRMPIRNVLYMAALSASRYNPALRTFANRLADANKKSKVVIVAVMRKLVEAANLVLKRQQPWVRHA

SEQ ID NO: 64903 - protein, 364 aa, unidentified
MSDGICFAGLDVHARKTAGAAIRLGSGEVWKAQLAGSPAAAIAWLQTLPGPVRAVYEAGPTGFGLARASRAAGLEVMVCAPGAIPRQPGDRIKTDVRDALKLARLHAAGQLRAVTVPSVELEALRDLVRAREDLRGDLMAARHRISKLLLRRGLVYDGPGHPWASKHHAAWLSAIDVGEPLGRVVLGEYLACHEVLLARRDRLDGLIAEHAHEPQWAALVGRLRCLRGIDTLTAVGLIAEIGDFSAFAHPKQLASFLGLVPAESSSGEKRRQGSITKAGSSHARRLLIEAAWHYRRRPAVSLALRRRQHGQPPAAIEAAWRGQLRLSARWAHLDARRAKRRTTVAVAVARELACFVWEIARQPD

SEQ ID NO: 64904 - protein, 326 aa, unidentified
MEQELHFIGIDVSKAKLDVDVLRPDGRHRSKKFANTLKGHNELLHWLNSHNVAPAHICMEATSTYMEDVAAHLSDAGFTVSIINPALGKAFAQSEGLRSKTDAVDARMLAEFCRQKRPAVWEAPHPVERALRALVLRHQSLTDMRTQELNRLETAREVQRPSIDAHLLWLHAEIKRIEKQIKDLTDDDPDMKHRRKLLESIPGIGEKTSAVLLAYVGLKDRFSQARQFAAFAGLTPRQHESGSSVRGMSRMSKSGHVSLRRALYMPAMVAISKTEWGRAFRDRLAGNGKKGKVIIGAMMRKLAHVPYGVLKSGEPFDASRHGVITA

SEQ ID NO: 64905 - protein, 348 aa, unidentified
MKILALDLGKSKTCGCILETLTGEQRFRTVATTAAALTRLLQRERPTDLVLEVCTLAGWVHDLGVGAGVRVHVANPNHEAWRWRNVKRKTDRLDAAKLADLLAARQLPTVHVPSQTVREHRALIRYRGQLVARRCRIKNTIHSLLLRQGLRHVSGPGGWTQTSRAKLSELSRPWEQVDADSLWRGALWEDLQALERLDEQIQRVESRLNEIGRADERIQRLQTIPCVGPRMAEMLVAVIDDPHRFRSGKEVGSYVGLVPRQYQSGAMDRSGRISKQGHRALRSLLVEVSWLALRYNPQLRQVYERLCRGTRSRRKIAIVAVARKLLIIAWAMLRDKTCWQPSRLQSAA

SEQ ID NO: 64906 - protein, 355 aa, unidentified
MNSVRYLGMDVHRDTISVAVLDESGRLMMESVLRTRAAAVLDFLHGIRGTLHVTLEEGTYSAWLYDLLARRVAKLVVCNPRKNALLKSGSKSDAIDARKLAELLRAGLLSAVYHGESSGLELQHVTRSYTLLTEDTTRVMGRLKAVFRGQAVSCAGKKLYGKRHREEYLTQLGAGGLRKRAEYLYQELDALQQLRREVRRELLVECRKHGAAQWLQSVPFLGPIRAALLLGRVQTPHRFRTKRQFWSYCGLAIETRDSGEYRVVNGQVERKRKPALIRGLNWNHNHEMKNLFKAAATTASVREGVFREFYQGLLAKGMRPEMARLTLARKIAAITLKIWKKGEPFHVEHLKQQAA

SEQ ID NO: 64907 - protein, 448 aa, unidentified
MEKKNVKMEMINLQAAGIDVGSRSHFVAIGQGDDDIREYGVYNEDLKLLTQWLLDSQIKTVAMESTGTYWQSLFATLQAAGLEVILCNGKFTKNIKGKKTDVKDARWIQKLHTIGLLTGSFLPDESTEQLRTYCRHRTNLLEQAADTTRKMQKYLRLLNLRLDVVVKDVCGLTGLSIIKSICNGESNAEKLASLRNGNCKKSEQEIAKALQSNGRRDYLFALKHEYHLYVNFQDKMKECDAEIEKMLNEQINTSNEKKQHFIDKKIHKRINKNTPKNIDINLLSYQYFEGVDLLAIEGVSHSTVLTLMSEVGNGLTKFPTGKQFASWLRLAPNNKISGGRVLSNKVPKGSNRLKIALRNAANAIGNLKDTTLSNFFKRIAFRKGRVSAISATARKLAIIIWNMVVNKVPYINETAYEFLDQKRKRKVKEMKKLIHKFDITTSDLGLQL

SEQ ID NO: 64908 - protein, 458 aa, unidentified
MRKRKAYAVTRSLDGLPQLTPDAAGLDMGAEEIWGWVPAGRDPQPVRAFGTFTPDLHALAQWLTQCGVKTVARESTGVYWIPLYEVLEARGFEVSLINARHLQHVPGRKSDGQDCQWMQRLHSYGLLTASCRPAEDLRIVRAYLRQRAMRLEYRAAHIQHLQKALQQMNGQLTQVVSDITGTTGLQIIRAMVAGARDPQGLAQLRHGRCHASVAEIAKALSGQYGAEHVFALQQALALYDCYPQHVQECDAYIEQHYAAIKPVYAEDTSPPPLGPEPKPKAHAKNAPSFDVRACLYRILGVDLTAVNGLEARTAQTILSEIGTDMSKWPSEKHCASWLGLAPHNDISGGKVLRSKPLKVRNRAAQALRLAAQTLGRTDTALGGYYRRLRARQGPKQALTATAHKLARIVYHLLKHREPYQPLSRETYEHQLRHRELGRLKRKAAQLGFTLLPQATACA

SEQ ID NO: 64909 - protein, 347 aa, unidentified
MNHIGIDLGGRESQICMRSPQSDILKELRVSTPSLGEHFTAWSKSCIVMETCAEAFALADQALSAGHVVKVVPGTLVRALGVGARGVKTDRKDAQALSLASCRVDLASVHVRSSQSRQLQSRLGMRRNTIESRTKIINGVRGHLRTNLVRVRSGSPATFPARVREALEQRGIPLESWLQRQLELIEFLSKDIAQADKELKQFAQAHPQAALLMTVPGVGPITSLQFVATVDDIGRFRNAHNLESYLGLTPGQRSSSDKVRMRGVTKAGPSQARLALVQAAWCVLRTQSDSPIGRWAMEIAGRRGKQIAAVAVARKLAGILYAMWKHGQPYEPARAAKSIAARQELRM

SEQ ID NO: 64910 - protein, 333 aa, unidentified
MIYFVGIDVSKSTLDIAVVNSGALIKEEQISNEKASLRGFLKTLKESFNLSLERIVVCMEHTGIYNYRALEVLHNSGINVCLEPALQIKQSQGMTRGKDDKVDARRIALYAYKNREQLVFWKPQREVLQKLQILLTTRERLIKVKKQLQVPLQESASFIHPSIIKSIKTPTLSIIKTITKELKELDLKIRNTVKMDEKIVKQYQYATSVPGVGPIIALNVIIRTGEFQRIKEAKQFACYSGVAPFKHQSGSSIRGRTRVSKLANMTMKTLFSLGATSAIQYSPEIRQYYQRKLAEGKKPLSVINAVRNKLITRIFACVNQERKYEKNYQYTLA

SEQ ID NO: 64911 - protein, 315 aa, unidentified
MSDMPCFVGIDVAKAQLDIALRPSGERWSVPNDTNGVTTLVDRMQTLQPTLIVLEATGGLERLVTSALATAGLPVVVVNPRQARDFARATGQLAKTDALDARALAHFADVIRPTPRPLPDAQTQELRGLLGRRQQLIVMRTAEQNRLAGASGRLNQDIEAHIAWLNARIATLDDDLETMLRASPLWRENDDLLQSVPGIGPVCARTFLLELPELGTLTRQQIAALVGVAPLNCDSGTLRGRRTIWGGRAHVRTVLYMGTLVATRFNPQIKAFYQRLLAAGKIKKVALTACMHKLVTILNAMLKHRTSWKAQEVQN

SEQ ID NO: 64912 - protein, 416 aa, unidentified
MKIVRPICCGMDVHKNIIVATIGITNKKTRITEYIQETFSTLNPDLLNLKQWLINHKCFDACMESTGKYWIPVFNILEDEINIYLTHPKYVKAIKGKKTDKKDSKWICDLFKHDLIKFSFIPPKEIRALREISRYRYKLVGMRSSERNRYQNCMTVSNIGIGSVFSDPFGKSAQAIMKEVLESDIIEDEKILKCIHRSCKNKDKILDSIKHCNIETDQRFKMNESMTHMEELQVHIDNCEIEMMKRAAPMFDQFMHITQLPGISTLSAILIISEIGVDMKQFESDKQLTCWAGLAPANNESANKKKSVRISKAGQYLKPLLVQCALGAIKDKEGYFGIKYSRIKKRRGHKKAIIAIARMMLVSIYHMILTGETFNPSDYESFRNPKPPIKQQVLTEESAIEFLKKSGFDVSKLAKP

SEQ ID NO: 64913 - protein, 357 aa, unidentified
MTIVCGIDAHDKELVCRTWRSDAIEETRRFHNTDTGRGSLWGYLRKLRTDISAARVVVGYEACGLGYTIYDEASDAGFTCHVLATIKMAKSPIDGKRKTDEYDAGKLCEVLRAHELAGLTLPAVWVPDRQLRDDRELVRRRFDVKSDSTRIKNKIHGLLKRQSVKRPEGIKTLWTKEYMRWLQNLELRSGTRAHLKSLIHEHASLNENVKTLDREVEELAATPRYQLQFEALTSIIGVGTLTAMVFLTEMGDLDRFSNRRKLKSYVGLAPTSHESGEIKDRKGHIARTGSSRLRAVLNQAAWVRINLDNGEQSWFKHYVESHAGGKRKGAVACMGRLVQVMWHRALEAQRDYEQRSA

SEQ ID NO: 64914 - protein, 435 aa, unidentified
MEEVTDEPLYRDRVCGIDIGKAQMAATIRVPSDSNPARRASETRSFGTTRREVLALADWLRCWQVPAVVMEATSDYRKGPFCRLEAGGFECVLADARQVKNLPGRPKRDPSDSRWLAACFERGAVRPCFVATPEFRIIRLHTRYRRDLTEERTREKQRTEKLLESAGIKLSSVISRLHLVTGRDIMDHLIAGERNPKVLAQLARTAARRKIAELEEALEGAEFFTAEHAALLAMMLARIDRLTAGIDELTTVIERLLAPYEEQLQQAESMPGWQRRAAQDALAETGVDMTRFPTGAHLASWAGRTPVDHQSGTRKGRAKAKKGNRYLAGITGETAVAAGRTQTREGVRHRRLARRRGTAKACVATGNTQLKVYHKLLSSPGTRYQDLGPDYYERQASIRRQIAHHVGKLGALGFEVTLCRIPEPDPDPAGQTQAA

SEQ ID NO: 64915 - protein, 332 aa, unidentified
MNAVSTLGIDLAKNTFSVHGVDADGAVTVRRTISRAKLGELVARLPPCLIGMEACSGAHEWARRFSEAGHTVKLMAPKFVTPYRKSGKNDGNDAEAICEAVSRPNMRFVPIKSVQQQSDLSLHRVRQGFVEERTATLNRVRGLIAEFGYVVPLGTERLRREVRDLLEHLPVRVASCVRDLLEHAERLHSKTLEYEREIQSTLKHNELARRAHTRPGIGPITASALVATVGNGHDFKNGRQFAAWLGLVPRQYSTGGKSRLGHITKRGDPYLRTLLVMGARSVLQRAYREADPLSRWALALQQRRGYHRACVAIAAKNARVAWALLAKGATAA

SEQ ID NO: 64916 - protein, 388 aa, unidentified
MQVAADRTDASTAIQTDLPAIFVSLELSRSTWLITSLSPGAGEKMSKHSIRAGDVAGLLVRLAQLKEKARGRTGRDFPIIAIQEAGLDGFWIHRVLQSEGIESHVVDAASILTSRRRRRAKTDGIDGETLVRTLLAYKRGEPRVCAMVKAPTPEEEDRRRICRERKTLVGERVEHVNRIKGLLFAQGVSDYEPLKRNRRARLEELKTGDGRALPAHLKAQISRELDRLELVLPQLKAVEAERDALLKPVSEGCPAPAAMLAQLKGMGPEFTAILWSEGLFRSFSNRRQLAAYAGLAPTPWQSGSVAHEQGVSKAGNPRLRTTMIQLAWLWLRHQPTSALSVWFQERVQSNGGKMRKTTIVALARKLLVALWKYSTSGVVIEGAAMKTI

SEQ ID NO: 64917 - protein, 321 aa, unidentified
MQKDLLYCAIDVSKDRLDVDGAALALPAQLGNDHGSFRQLIKAAKKYPGPVQFVFEATGPYHLGLALALWEAQIPLSVLNPARVRYYAKAQGKAKTDPLDKQVIGDFARSFRPPPTPAPDPVRRELTELLQRRDGLISTRAAEQNRLGQCRHKIIKGQIRRLMAQLAEQIGQIDGLMKKLVNSSEELKAKVKALCQVKGVGHLTAVTLLITLPELGTLGRNRIVRLVGLAPLNDDSGTQKNKRYIQGGRARPRCALYMPALSASRHNPVLKEVYERLLKAGKLKKVALTALMRKLLICLNALLRKLADQHPSPQGLCLAKP

SEQ ID NO: 64918 - protein, 368 aa, unidentified
MEHDITAYVGLDVHKDSIAVAVAAPGRAAPRFVGTTGPRLAELTKALSHLGKPAQLHVAYEAGPCGYTLARELISRGYRCEVIAVAKTPRKPGERIKTDRRDALSLARYLRAGELTPVTIPDACDQALRDLSRAREDAVRARLKARQQLKAMLLRHGLRYEGKTSWTQAHERYLGQVSFEYPAQDIAYAEYRTAVRDANDRVERLTQALRKQTDGWRFAPVVNALMALKGIDFVTAATLVAELGDLTRFAHPKELMSYLGLVPSEYSTGESRSQGKITRAGNSHVRRVLIESAWSYRYSPLMSRDRVVRCEAQPKAVRDLAWQAQLRLCSRYRRLTARGLHQNKICVAIARELAAFVWDLARHVPLER

SEQ ID NO: 64919 - protein, 419 aa, unidentified
MAFKIFRKNCSGLDVHKTWIFACIGFTDANGRTEYKEKRFSSFSRGLRDLAAWLASYNCTDVCMESTGKYWIPVFNVLEKTCNVVLAHPKYTKPQKGNKTDRKDAKWICDLFMCDMIRPSFIPPAEIRHLRDLVRYRFKLTNMLTGEKNRAQNCLTVSNLKLDDVFSDVFGKSSRSITEYILAHPGETFDVTPFVDKRCKTPIEEIQAAVDGAISPEQAIKLRQCLDHIDELEKHKAEMEREILRVSDPYFDALNLIRTVPGFDKNLFTAIQILSEIGGDMSVFPTDQHLVSWAGCCPRNDQSNFKIKSTRISRAGSYLKPVLVQVANALIKSKKHPEITERYRRIKSHRGHKKAIIAICRMLLTAIWHILTDLKPYTAEGYLAPRPVKEEKILTTSQALSLLKLRGYVIKDALPAAAS

SEQ ID NO: 64920 - protein, 351 aa, unidentified
MEEYIAFDSHKRYTWVEREAVQGGKVRQYRVEHAPGAIRQALAGCSPGTAVAIEATANWYWIVDEIEQAGLTPKLVHPRKAKLMMGLMNKTDQLDAHGMNRLQRNGTLPTVWIPPGRLRELRELTRTRVVLVAQRTRWKNRLTATLAKYAASTSTASDAYGEKARPELKARIERLPGQACWASQQMLQQIDGLKKQVEQFEQRLKELIQVTPDMQLLMSLPGVGVILAATAALEIGDIHRFPSAEHLAAYAGTTPRVHASGGMVRYGRTRPDVNHYLKWAFAEAGNSIAVNHARCAERHVSQLYRRLRERKGHSKAIGAVARHLAEATFHVLHRQQAYQDPTLRPGRTREV

SEQ ID NO: 64921 - protein, 407 aa, unidentified
MRVFVGDDWAEDHHDVELMDSAGRVLAKRRLPEGVAGMARLHELIGQHLGVDAEDAEVVIGIETDRGPWVAALAAAGYVVFAVNPLQASRYRERHGVSGAKSDTGDAHMLTDMVRTDSHQLRAVAGDSPDAGAVKVVARTHKTLIWERTRQVQRLRHQLREYFPAALAAFEDLDAPDALELLAKAPDPARAARLTRAQVSAALKRARRRDITGKATAILTALRSGQLGQPPAVTAAYAVTARSLIAVITTLNEQVKALQGQVEADFGRHPDAEIYLSQPGLGPILGARVLGEFGDDPDRYASGKARKNYAATSPITRASGKKKVVAARFIRNDRLTDALMAQAFTALSASPGARALYDAERARGAGHNPALRKVANRLVGILHGCLKTRTLYDEATAWPHHENKLAA

SEQ ID NO: 64922 - protein, 353 aa, unidentified
MVYTPHDYDIFIGIDVDQKSFSFTVKNHDTMNNAYKIPASPENLYQHIRNRYNNKRVICAYEVGVTGYYLHDYLTSKSIRCLMVPPPSIPKASNDRIKNNRLDSERISQHLKNGDMMPIRVPDYDCRELRQLLRSREEYVNMRRVTKQRIKSLLLFAHLHILLKDTNQYWSYLHIKRLKELPCSPATRQRLDLLLKDLDYARSQTVVILKELKKLSEQNASLTRNIHYLRSIPGIGFITAITILASIGDPGQLRNPRELSAFAGLVPSEYSTGERISRGRITHLGNPVLRSLLVEAAWANIGKDERLRQFYDRIRAKHHPQVGARKAIVAVARKLTLIIYRVLKEQREYRTHI

SEQ ID NO: 64923 - protein, 350 aa, unidentified
MNVNHYIGFDVHKKSISYCVKTADGTILEEGKLPAKRAILRAWARKRTEPWHGAVEATLFSGWIYDTLKPFAAELQMGHPAMMQAIGASKKKNDQLDARKIADLVRCHLLPVCYVAPAELRELRRRLRYRNLVVAQAVQMKNKMSGLLMEVGAEYNKQQLHGAKYFTELLEGLEEVPESVKDLLRLSRGALETFQTTQQQLLARLEQHPRLAERVKRLKSIPGVGQVTALTWALEVAEPQRFGSIARAVSYCGFTSALDSSAGQEHRGPISKQRNAHLQTALVEAAKLAPRWNPQLAAVHEQEVQRGDRNRATLAVARKLVAYLLAVDKSGKPFQIRTPATAEQEVGTAA

SEQ ID NO: 64924 - protein, 438 aa, unidentified
MGSYAGVDWASEKHDVLIEDELGEELFAGSFAHDEAGLRSLCRALVRHDVQLVAIERPDGLLVERLLDAGLRVLALHPNQVAATRARFRAAGGKSDRFDAFVLCELARTDSHRFRVLEPDSDQTKALRALTRAREDLVQARTTLSNQLRAELERFWPGPIGLFSALDSPISLAFLKRYPSPKDARSLAAKRMQAFLASQHYSGGKQPSELVAKLRCAPDGRAGEQETDARRTIVLSLLAALLPIVAQIKTLERQITTALREHPDGEIFRSLLKGPDSVVTAATMLGEIGDCRARYPSGDALAGDAGQGAVAVESGKRKVACFRWACNKRLRDAFCTLADSTRHWHPWAQALYADALTRGHDHPRATRSVGRAWCRVVWRCWQDRTPYDPARHRALQQRLTVIIPATAGPVLDHLATARMAAGLLATNPADSPKVSASQ

SEQ ID NO: 64925 - protein, 300 aa, unidentified
MNNDTTLFIGLDTHKSFTQAALLKDNRGETPISYGRIDTSKSALIKLAQKIQSQFPKATIHFIYEAEPCGYWIYRLLTSLGYHCYIVAPSLIPKKPGDRVKTDKRDAAKLARLFRADELSTIYVPEAEDEAIRDLSRARETAMKDLKDAKLQLKGFFLRNNINTVVKDNWSKKHLRWLTELVLPHHSQQIVLQEMIQIISERMQRLQRLDNELIHQVKNWRYYPVVKAIQAMRGIRLLVALGTIAELGDLRRFDHPRKLMSYLGLVPSENSSGQKRRQGSITKCGNSRARRLLIEGAHLL

SEQ ID NO: 64926 - protein, 379 aa, unidentified
MGAKPSIITALGNVSFRGASPKRPYVRSVKVARPRSKLKTGVALEWPEPSPKLKRGRTMEEYSEVFVGLDTSKLKISVAVADGERNGEVRFFGEISAEPASVASMVAKLAKRGAKLHFCYEAGPTGYDLHRQITGLGHDCEIVAPSLIPRRPGDRVKTNRRDAVSLARLHRAGELTSVWVPDAGHEAVRDLVRAREAANDALKKARQHLQAFLLRHGRIYRGRTPWTRAHIRWLTTQAFTHPAHHIVLAEYIQAIEDADVRLERLTKQVAATTATWSMAPVVEAYQAMRGVAFLTAVTFVVEIGDVRRFETAPQLMAYLGLVPSESSTGERRCLDLPLPGPREPRHPGACGWPAKVSPRDRLESPDPPLCALSQAYLGG

SEQ ID NO: 64927 - protein, 412 aa, unidentified
MQALIERCCGLDVHQETVVACLLIGTAGARARKQVRTFRTVRRELEALRDWLTAAGVTHVGMESTGVYWRPVYAVLEGHVELIVGNARHIRNVPGRKTDVKDAEWIADLVRHGLIAKSFVPPPPLRELRELLRYRRKLIEAQAAERNRLLRLLETANIKLASVMSDVFGVSGRAMLKALIAGSAAPEEIAALARGQLRRKRAGLIEALTGGLEEHHRFLLAMQLGRIEAIEADVATLDARIGERLLPYDAEMALLMTIPGVNWLVAAVVIAEIGTDMSVFLSVHHLAAWAGVCPGSYESAGKQKSGRARKGNVHLRTILVGAAISAARTKGSYLRDKFHRLKARRGALRAALAIAHKIVVAAYHMLARGVAYRDLGEAYLDQIGERRTVANLKRRLERLGYHVALKPRAEAA

SEQ ID NO: 64928 - protein, 425 aa, unidentified
MCSRQVRPGGCERTFTMDLVFPHSSGLDVHKRFVVACVYTPAGEYRTEHFETTTSALRDLVAWLQTMGVTHVAMESTGVYWKPVYNILHPHFEVWVVNARHLAQVPGRKTDESDAQWITRLMRYGLLSPSFIPEEWQRDLRDLTRYRTRLLQEQSRTANRLQQILEDANIKLGSVVSDIQGVSARAMLEALISGEKEASEMAQLAQKRLRQKIPQLVEALSGQVRAHHRYMLQEILEHLDELNRRIANLDAHIRELTAPYASILERLDAIPGVGQRTAEIVLAEIGSQVDKWPTPGHLASWACLCPGNRQSGGKRGSGKRRKGHKWLVSALIEAAWAASRSKNTYLSAQFHRIRARRGGKRAAVAVAHSIVRVIYHLLQDPEAVFVELGGDYFLKKNKEQERRRAVKRLEMLGYQVELTAAPVAS

SEQ ID NO: 64929 - protein, 439 aa, unidentified
MNTINRSTGTANAKEQTGRGTSGLDVINPHAAGLDLHKEIITACAPVIVGDTRHPVRTFGTYTHALRDLATWLKKQGTTTVAMEATGVFWFPVIEILRAEGLEVLLVNAREVRSVKGRPKTDKLDCEWIRRLHAWGLLRGSFIPDTETGALKSLWRHRMNMEQEDARAIQRMQKAFQIMNIRLDMAVTDIVGETGIRIIEAILAGERDPHELAKLRDPRVAKSEREIATALEGNFKAEQLFIIRENLAHHRFLQGRIAETDNLMATRMATMEKKASASELPAATKPDRSNHGEALTREHLYELLGVDLTQIDGVGVLTASSFLVNAGRDMSPWATEKHFAAWLGLSPNVKQSAGKTRSGPTRQTASALAHALRMSALTISRVDSWLGAYCRRLKGRIGAPKAITATAHKLAIIFYLAVKEGGVGRRQLHLPIGDNYIYP

SEQ ID NO: 64930 - protein, 361 aa, unidentified
MKRSHFIGIDVHCQFCEVAVVNSGGTVVHRDGCETTIPTLLQVIEQVRRPRALVIEEGPLAGWLWRGLHQAVERMVVCQPRRNRLICDEGDTDDPIDAEKLAQLLRGGFIKEVHQVESLERAVFKQQVALYHFRVRQRVRESLRLTWLLRQHGVMVREKAYVASADRPALLARLPDDATLRETVQLLWLGYDELVQQEEAWHRRLVEQAQQVEEVQRFEALPGFGWIRAATFYAYVDTPWRFRSKSALWKYLGIGLKREHSGKGPEHVGVPFLVHRPLKYAILGAALSAVVQGKNPFADLYGRWIKQGLSLRLARRNVARALSATLWGMWKNGSAYRPDWVGVPAAAVRGDSGVSVRTVAD

SEQ ID NO: 64931 - protein, 351 aa, unidentified
MIIIGVDYHPSFQQIAFADKDTGEYGERQLNHSEGEAEKFYRDLKLKAAKVRVGMEATGHARWFERLLAELGFELWIGDPAQIKAKRVRKQKTDREDARLLLKLVLEDRFPRIWVPDPENRDLRQLLWHRHRLVQMRTRIMNQLQSLAMNEGKRWKSKLWSGPGRADFEKLPLAPWANRRRTELLELLDRMNPTIAELTAAVEQEANKRPEVQRLMTHPGVGPLTALAYVLIIGTPTRFQCGKQIGSYIGIIPSEDSSAGKQRLGHISKQGNSLLRFLLVEAAQATVRLDPDWRRRYLHLAFRREPRIAKVAMARKLGVRLFWMWRKGWSYQQVLEFGSHAGQLVTGHGVK

SEQ ID NO: 64932 - protein, 344 aa, unidentified
MANLNQFCDFTKLIGIDIAKSVFQIYSCDTQTGEITNVQIKRDKVLESLANCGKCLIGMGACGSSQYWARKLQALGHTVRLMDPKLVKPFVRHNKSDKADAEGVYHALVSGVRAVAVKTETERDIQTLLTMRALLVKQRTARINHVRGLLAEYGHVMPKSVDQFDKKVDECINSLEGDAVQLVIDMLRDTIKSIRDEHDRIKTLQREISRLANQTRNAKHFLTVPGIGETIMAYMCVLLADPTQFSSGRQFAAYLGLVPMHTGSGGKTVTTKIPGRCDKALRALLVQGAHAVARSKYRTDWVKNILAKKPKKVAMVAIANRMARQCWAVASKGQDWRRMPVTAA

SEQ ID NO: 64933 - protein, 350 aa, unidentified
MLIFAIDLGQSKSVFCTLDTETGEYHFGGFSTRPERVRKLLRQHNPQLVVVEVCPLAAMVHDLAAELGLRTIVADPTQDAWQWKNVKRKTDQDDALKLARLAALNQLNAVYMPSLTMRQWRRLVETREALVAEQTRCKNRIRALLLTVDRRLAPGKKGWAQKSLTQIRELTRPLADCSPDELWRGILLLELDRLEVIAAQLQAYHAKLEAWEKTDRRVQLVASMPGIGTVTAAALVAILDNPHRFRSRRQVAAYGGLTPRRYQSGQMDRQGRISKRGNATLRHLLNQAAWAAVRYSPWFRAFFLRVGGRSKARRKQAIVALMHKILVTAWAIMRDERPYHASALPTAAAA

SEQ ID NO: 64934 - protein, 406 aa, unidentified
MTVVMIGVDPHKGSHTAVAIGSDEEPLGKLRVRASVTQAQRLVTWAADWPERTWAVEGAGGLGHLLAQQLVAAGERVLDVQPKLGSRVRLLATGASNKNDPNDALSVAIAALRSRTQRPVTADDHDVVLRVWSRRHRDLGRAKNQVACRLHAVLCELVPGGVPEEITAAQATRILERSTPSGAAGQARRELAAELLDDMRGLDTRIRESKKKLAVAVRASGTTLTDLFGVGPVVAATVIGDTGDVNRFPSRDHFASYNGTAPIEVSSGNRKINRLSLRGNRRINHAIHMAAITQIRHAHSDGRAYYDRKLAEGKTHKEALRCLKRRISDALYARLCADARQAAETPVAGPGGQPGNDSDSSAAGSHPVNRLFGQATPEPSLTLRPAATPAKRTSPTPTPKKTRRSP

SEQ ID NO: 64935 - protein, 368 aa, unidentified
MSEIIRIGVDTSKSVFQLHGVDAAERPVLRKKLRRRDFLKFFAQLPPTKVGLEACGGSHYWGRELMALRHEPKLLPTQHVRPYVRRNKNDKKDADAVCEAMSRPRMTFVRVKSAEEQAAQMLMTTRQRLIDYRTQLINTIRGHAAEFGLTAAKGPARVEPLLVRIAEDATVPELARELFAIHDEEYGRLKVELRAIEAKLKTWHRQNEVSRRLAEVDAIGPIGGCLLAIKVADPKAFRCGRDFAAWTGLTPKDHSTAGKMRLGVITRAGDEALRRTLVLGATSVIKQVRNGKANPSPWLRDLVARKPPKLAAVALANKVARIAWKLMVSGERYDAARAGIVSPRPSVAPCSRRQGRCAPPSAVAFGQP

SEQ ID NO: 64936 - protein, 330 aa, unidentified
MADKLIVGIDVSKDWLDLCASNAAGVERIANTRQAVAAWLERVAPGLIACEPTGGYERTLIAAARERAIPFVRVHPNDVVAFRKSRGIKAKTDAIDARLIAAFVCDKLARAELRTSLIGDERLRALAARRRQLVDALPAERCRLDAAALPAVRASLEAVIAVLRQSLETLEAELAEAIAAHPPTAELAKLLQTIFGIGPVAAITLIADLPELGLLSAKQIAALVGLAPHTKRSGKTRYRETTGHGRPGVRRVLFTLQCRSCRRAPSLALQTPEIVSPGVAAPQPAHRADRMPSKLPIGQVGSRPQPRPARWRAAPALRRPDRWATPDFPA

SEQ ID NO: 64937 - protein, 344 aa, unidentified
MTTIQLKHTGPEAKPTLFAGIDVGAEELILVIRKNGKPLNPQKFANTPADRTRLINKLVKLPGIIVCLEATGVYHFDLSIALHDAGVSLMVINPKASHNFAKVLMKNSKTDTVDANTLAEYAERMDFVAWTRPSDETLALRSFARRINALTGQKAAAKNHLHALTATSETPKAVLKDAKLAITQLEKRIDSLTALALIFIAKHSELERILTLLIGIKGIGQTSAIALMGELLLLPLGLSHREWVKFAGLDPRAFDSGKSVHKKTRLSKAGNARIRSALYMPALSAKQHDPHVKAYFQHLVDNGKKPLQAVCAVMRKLLHAIHGMLKKNEPFDNTRFYAIPASAE

SEQ ID NO: 64938 - protein, 318 aa, unidentified
MYVGLDVHKKYCYYAMVDGRGTVVKKDRFRTTVEELEEFASALPQGDQVAIEASASGCFVYEQLDERGIAVHLAHPTMVRPFAKKHVKTDKVDAIVLAQLLRMDYLPESYVPDEAMRDLRTVVRHRAGLVRIRTSLKNRVHALLTMEGVQPPAVSDLFGKKGREFLETVKIRESRRLVLDNYLKVLDELNERITGVEQFLEEKAESTEEVAWLRTIPGIGLHNAVLILSELGEVSRFSRPQGLVCYAGLAPKVAQSGDQVRYGHINRQSNGFLRWAFVQSAWSAVLSSTPNRFQRIYQKVKARRGAKIAIVATARHLA

SEQ ID NO: 64939 - protein, 339 aa, unidentified
MARSIGVDLHRNQFTVCVIAENGREYLSEYRLEQLARFVTKLRATDEVAVEVTGNTRLFYDAVAPHVAKVVVVNPTQFRVIRDSVKKTDPHDARTLAFYLSKDMLPEVRMKDKLHAQLASLTQTRDTLVKQRTALKNKVNNLLSAHGINLRKEALSGDSGLEKVLAMKFDAIVMTELRVIVGQIRACNASIAELEKTIKTEGPKLPGHENLKSIKGIGDLGATVLLSVIGDIEDFAHPGKLAAYFGIVPRVRNSNETERSGRITKRGAKLARTTLVQCSLIAMRYSPYLAKFYHKIQARRGTGKAIIALAKKFLGVIYNTLKNNWIFEDFPNFVLAKAS

SEQ ID NO: 64940 - protein, 370 aa, unidentified
MGNRSMFIGLDVHKETIDVSIAEGDRHGEVRHYGVIASDLEPLDKVVRALRAPNRRLHFVYEAGPCGFGIHRHLTSRGEDCVVVSPSMIPKRSGDRVKTDRRDSQMLARLHRAGELHAIYIPEATDEAMRDLVRAREDAVVVGTQAKYRLKAFLLRQGRRYPGREGWTLPYRRWLTDLSFPNAAQHMALQEYRDTIDETETRIGRLTEQLRQLAPTWRWAPVVAALQALRGVSFVTAVALVAELGDLTRFGHPRELMAYLGLVPSEYSSGPSVRRGGITKAGNPHVRRLLAEAAWAYQGIPRIGRQHAYRQEALPKVVCDIAWKAQLRLTTRFRRLVARGKAKPKVATAIARELTGFIWAIAREVSPTPR

SEQ ID NO: 64941 - protein, 384 aa, unidentified
MSYGPRVGHGLAVRVLVPNPRVSFPWESQSPVGHGVLFRTVARAALPASQGRNLIVNHALVVSSSPLPSSTTMVGVDVAKATLDVFWRPAMRLKVVNSPAGRAGLLRRLQAVDVDRVVVESTGGYERDLLSELLEAAVPVAQVNPRIVRDFARSYNLLAKTDRIDAAVLAAFGQVVQPEPRPLQDEQARALRDLVARRRQLLDMRKAEKTRLQGPISPPVQAGLQRHLAWLDAEIASADDDIDRMIRQSPAWRADEELIRSVPGAGPVLARTLIAEMPELGRLNSRQIAALVGVAPFNRDSGKMRGTRSVWGGRAQVRSVLYMATVCAVRHNPPLKAAYERLRQAGKPPKLALTACMRRLIVTINAMLKSRSTWDPDLTANTAA

SEQ ID NO: 64942 - protein, 481 aa, unidentified
MALRTTEAHENDIQRQPVNEAGKTLELDSDVSVWPGTRSEPINGRWQQQPASVTKKFVRPSPASRAKEARMNPQSIVAGIDVHKRILVVVLLHRSAPDRDHATARFGTTHVERQKLVEFLRFHQVSHVAMESTAQYWRPVWMDLEDEFPLTLAQARSTHAPRGRKQDLSDARRIARRLLSGDLTASYVPGPEQREWRLLSRTRVGMLESVVRLRNQIEVLLEQAQIKLSSVVSDVLGLSGRRILHALLEGIHDPVQLAALAHHRIRTSKEDLADALCGRLTPSQRLVLKLYLEQIEQIERHMAEVEKALAQAEAEHQDAIERLCEMPGVSVRSAQHIVAEIGPRAEAFASSGKLASWVGVCPGRNESAGVSTSNRSPKGNRMMRRILSQIAWATIASKGSEGQRRYRKWVGRLGPQKAAWAVAHYQLRVMWNILHQGVRFLQPDTANLDQKSLLHRAKRVLADLKRLGYAVTITPPAVPGV

SEQ ID NO: 64943 - protein, 408 aa, unidentified
MESQIIFGIDVSSKSSTVCVVNDRIKQGESFRISNDSFGYQKLYEQLNQYLITPLVVFEATGVYSLSLQAFLEDYHIKYLKLNPLKAKKLMDNNLRHNKTDKVDAYRLALIQFNAPQKLRDPQPREYHELQNASRYYEELTRSIVTTKNQLHRNLQSTFPQIEEILSHPSGRIYWALVSLFPHAGYVLEKNETQVTQMLNSISGIGQQRARYLTTRLYAFAREAYPYDSKDSIIVRAIQRNISNLFSLQQERDYVINYMEKLAKAVNARALSIYLSIPGVARIAAVRLVAELGDLRRFSTSAQIDAFVGIDPGRYQSGEKDSSLGITKHGNHIARKILYRVITQMETVKATQPCHITDYYDKKKRSSNRQGYKKIAIASVHKLIRTMFALIKHDQLYDYNIATENKRL

SEQ ID NO: 64944 - protein, 414 aa, unidentified
MESVYPCMAGIDVHKKMLAVVIRRQCGEQADYQKRKFGTTHAEIQHLEAWLRAQGVSEVVMESTAQYWRPVWYGLEPLFRLHLTHPLKTRAPRGRKSDFRDAQRLADRWCSGDLEESFIPGAEQRSWRWLTRTRVQLKKKLGVIHSHIEGLLEQGGIKLAAVVSDLFGASGWAMLEHIAQGVTDVEVLVKEARGVLRNKDAQLREALVGHLDPVYRLLLRQHMEQVRLLRRQVEEINHAVAEAMQEHLTALHRLTKIPGVDVYAAQELLAEIGPKAAAFASAEQFASWVGVCPGSQESAGVNYSHRSAKGNRYLRRLLCQIAWAAIHTKDTFFAGLFARLKPRVEGKGAAWAVAHRIARIVWLLLHQQVEYQEKGPAVPNERTLVRKFKRMLKEFGRLGLDVRALIDQQLPLHA

SEQ ID NO: 64945 - protein, 354 aa, unidentified
MLFILGFIENLINKINKKMEYKVFVGIDISKATIDVALRSKSLKEPLHEQFENNISGYRKMLAWIKKQTGIQGKDLLFCMEHTGVYVLPLSCFLTEKQLPFCLENPYHIKHSMGLQRGKNDKADAKMIARYAYMHHEEIRLTEFPGTILIKLQNLLAHRERLIKSRKMYIVAPKELSEFSGKEVSSFISDESKEIVDLLDSKIKKTEAEIESLITQDEKIKKNFELARSVKGVGLIIASYMLVYTQNYTTITEARCFASYSGVAPFGERSGSSINKSPHVSHLANKRMKSLLNNGAWVAVKYDQELKTYYKRKIEEGKHERVVINAVRNKLLGRIFASVKRGSPYVELYQYSNN

SEQ ID NO: 64946 - protein, 387 aa, unidentified
MPQPNDLSRSLVALDQDSTIIAVVEMSQSSWLVAGMLPGIERQPRKKLEPSAERLLGLLHRWRDEAVKAGRKITRIALAFEAGRDGFWLARWLRAHGVEAHVIHPSSVAVSREHRRAKTDRLDTELLKRGFLGWLRGERGHCTMARIPTIAEEDAKRPNRERECLVRERTRIVNRMKGTLARLGIRNFKPTLRKAAERVTTLHTPEGSALPPNVSAELQRNMARLGFVVSQIKEIEAARQKRLEQEPETEPHAMVRHLARVVGLGVETADILVNEVLSRPMRDRKAVARYAGLTGSPDESGAKRREQGLAKAGNARVRRGMIQLAWRFLRFQKESALALWYRARTADSRVGTRKTMIVALARKLLIALWRFVTTGETLEGVVLRPAG

SEQ ID NO: 64947 - protein, 322 aa, unidentified
MMFVGIDISKLSFDVAVLIDGRYQSRHFNNTPSGFSQLSKWVSSFKHPTYFCLEATGIYGLALAKHLVQVNQHVIVANPIQTHAFAKMEMSRNKTDKADAMSIARYCQHLFNQGAIEGKLFTPRPPAFERVQFLVTRLDQLSKLKSQENNRLDVSLDKTAARSIKAMLTCIDKQITAIKKEIAAIVKQDKQLTTQVDLLNSINGIADKTAWALLAYIGDISLFDNAKQISSYAGLNPSIAQSGTSINRSSLSKMGCARLRKALYMPALVAVRFNPVMQAFYEKLLAKGKPKKVALVAVMRKLLVLAYGVLKSGKPFDVNYQN

SEQ ID NO: 64948 - protein, 315 aa, unidentified
MAMPVSVTKPIVGVDVAKNELMIYHAELDLLEEIPNNKAAIQKWLKALSGPVAIAIESTNIYHLEFADLAYEAGCTIYMVGGYELSHYRKGVNVRAKTDALDARLLARYLKNEGDDLHPWTPPSPLYRQLLSLFRRRAALVQARVGLVQSWANEPLLKAAFAEQVKSMQQLETLVEKMINDHLKEAGLLGQLKRCRKVEGIGFLTGARLLTAFQRGDFRNADAFIAFLGMDLRVSKSGQKDGRRSLTKRGDPEARRLLHNAAMSASRTPAWKGFYEEQRARGFSTTQALVILARKLARVVFALLKGQSEYQPKAG

SEQ ID NO: 64949 - protein, 385 aa, unidentified
MTQFARPTSAAADYDSTIIGALELSEKKWVLAVQLPGVKRHSRHVVEARGDELAAFVERLKARCAVAGHNIKRVILTHEAGRDGFWLARFLVRRGVEVHVMQPSSLPVDRRARRAKTDVIDVEMLLRTLMAWLRGEPRVCSMVPIPNEADEEARRAHREREELTGERRSIVNKIDGILATLGVKGFRALRRDRRDQLTSLRQPDGEPVPQMARARIERLLDRLELVLKLIDEVEATRDAVLKKVAPADDAERMIRSLANLRSIGPDFATLLVREAFVREFRNRRAVGGYVGLGGTPFSSGGSEREQGIGKDGNRRLRAAMVELAWMWLRWQPDSALSNWFRARVGQTGGRLKKIMIVALARKLLVALWRYVKDGVIPEGAKMKTA

SEQ ID NO: 64950 - protein, 348 aa, unidentified
MDRYIGIDVHATSCTVAVVGPSGRRLGSQVVETNGGALIQVLRATPKPRHLCFEEGTQSAWLFEILSPHVDELVVIQQKSRGEGQKNDERDAFALAESLRLGTYECSVFKAPRRFTRLRALAHTYEMMRGDVVRTKNRLKSIYRSRGITTVGKRVYGPDRGEWLKLLPPPSRTAAELLYRQLDGVAELKAEAAEELVAESHLHPISGILETTPGLGAIRVAQLLPAVVTPQRFRTARQFWSYCGLGIVMRSSSDWTRPKGTWVYAPVTKTRDLNRRSNRRLKEIFKSAAVTVIKKPDHPLRQHYDRLLEAGTKPPNAKLTIARKIAAISLAIWKNQEAYDPNRHRAET

SEQ ID NO: 64951 - protein, 323 aa, unidentified
MIKKDFNIVIGADIAKKKFDVACLLEGKFKHKVFTNDAAGFASFVAWYLSLCGDISPLICMEATGAYSLPLADYLVNHGFSVSLVNPAKIHAFAKSELSRAKTDKADAKLIARYALKMQPRLWIPPPANIRELQALVRRVEHLLEMIQMEQNRLETADASTHLSITNVLNTLQTELKSTRKAINDHIDNNPDLKQRSDLLETIPGIGEACIAHLLLALSEHHGFTHAKQVAAFAGLAPVLRESGQWRGNTHISKTGDSALRKVLYMPALCAKRYNPVIQVFWDRLQSNGKNGKAITCAAMRKLIHIAFGVIKSGKPFDPNYAS

SEQ ID NO: 64952 - protein, 336 aa, unidentified
MFQLGIDVSKNTLDLCLLREGVKGRVKTRRLKNDVNAASSVITWLGKQQCAPADVHIIMEATGVYHEPLAYGLYKAGAKVSLANPHRSREFARGMDILTKNDQIDAYMLACYGALKEPEPWVPPPESIRYLSALLRRRDALVTDRSREKNRLEKCRATDIPPVIAESIENVLRNLSAEIERLDELLLTHLNQHPELKKDFDLLTSIKSVGFQLGLNMLVILRGHRFDTAGQLAAFLGVVPVEKSSGTSIRGKPKLSKNGPPEIRAKLYLASMCGLRFNPVMKAMYEQLCLSGKAKMCAIGALMRKLVHLCYGVLKTQKPFDAEHLSSDAPSACKAA

SEQ ID NO: 64953 - protein, 403 aa, unidentified
MNNVAGIDVSKGKSMVSVLRPFGEVVAKPFSVGHTGSELKELADYLKSLDGETRVVMEHTGRYYEPVARFLHEEGVFVSAVNPKLIKDYGNNTLRKVKTDKADARKIARYGLDNWAELRQHTPMDTIRMQLKTLNRQQSLYTKTKTMMKNNLIALLDQTYPGVNALFDSPVREDGSQKWVDFATAFWHVDCVRNMSLTAFAERYRKWCKRHGYNFSQSKAVEVHAGAQDLIAMLPRDALTKTMVRQAIDALNAVSASLERLKAEMRTLAAQLPEYPVVMAMHGVGDSLGPQLMAELGDVTRFTHRNAITAFAGVDPGADQSGTHEAKSTRVSKSGPPELRRALFLVMDCLLKTQPQDDPVYRFMDKKRAEGKPYLVYMTAGANKFLRIYYGRVKEYLASLEEN

SEQ ID NO: 64954 - protein, 373 aa, unidentified
MSAAKCQLNEAELKLLKEKQSRGVTVVGIDLAARVIQVCYLQKNGTLYNKPKTREEFIKFLEEPPFTGKILAGIEACGSCNFWARKIKALGHDCKVMPAFQIKAFLSLDTKTDKVDALAILRAVMSVSIKEIGIRDEKNQVLMQLLTVREQLMKQKVQIQNARRAVLYELGEVCALGENAIDKCAQKLLVSLEESKSEALSEFRSCDEVAKANLNNVNTQLNTIEKHLTDFAKNDPVCQNLITIPGIALLSAAVLRIVMGDPNDYPSSRHFAAFVGFAPKVTGSGGKVSVGGTRKSGNRILKRVLYMCAIVRYGQTKKHDPERTSKVATLIDNEDVSNKRIVCSIANRMARVAWTLAKHGEKFDGKKCRLLEL

SEQ ID NO: 64955 - protein, 337 aa, unidentified
MGLYCGIDLHSNNHVLTVIDEGDRRVYERRLPNDLAITKAALEPYRGELVAVAVESTFNWYWLVDSLMEAGYAVRLVNTAAVRQCEGLKHSDDEHDAFWLAHLMRLGILPTGYIYPKSERGLRDLARQRMRLVQHRSSLITSVQNQVWRSTAVRLRSDTIKGRGKQPWPEISDPDLALSIKAGRAAIDTLTVQIERLEKLILKRVDRSPQFRMLKTVTGIGPILAMTIALEVGDIGRFTSVGEFASYCRCVDSQRLSNGKKKGEANRKCGNRYLAWAFMEAAHFAIRNLPAAKRFYERKRRQRHALLAVKALAHKLARACFYVLRDQVPFAPERLFT

SEQ ID NO: 64956 - protein, 346 aa, unidentified
MKITTVGVDLAKDVFQVHGVDAAGKTAVSKRLRRSQMAEYFARLEPCLIGMEACGSGHYWARKLMGYGHTVKLMSPQFVKPYVKTNKNDARDAEAICEAVGRPNMRFVPIKTISQQAVLAVHRARAGLVKARTAQANQIRGLLAEFGIIIPKGIAHISERMPDILEDGENELPGAMRHLLKRLTEQLKQLGEKVSELEREIQLWHRENETSCKLEKVRGIGPITASALVATVNDARCFKNGRQMAAWVGIVPRQNSTGGKQVLLGISKRGDSYLRTLLIQGAHAVIRHVERKTGETDNWLKELIARRGKNKAAVALANKNARIAWALLRYPERTYEVDYKSAKAAA

SEQ ID NO: 64957 - protein, 428 aa, unidentified
MDFTQNKRIAQINEQTLIIGVDVAKRKHVARAIDDRGRDLVKRLVFTNSYQGFSELIDWAKNLSEEHGRPNLMIGMEPTGHYWLNLAYYLKAQAVSVVVVNPMKVKRFKEMDDDSPTKNDTKDAKVIAQIMRDGRYHEPTLPEDVYAELREGMKLYDIIQEDVASIKAQMQNALDRYFPEFLTVFKDWTGKAALHLLDKGYLPEDIRKTSEEALLSEVKQAATRAVGIKRVQALKEAAENSIGLKVGLSMARQEIRYLLDQYRMLEERLIALEAQLEELVLHLPGADQMLAIKGVSVITVAGFYAEVGDLSNYQDPRQIIKLAGLNLKMNQSGLFKGQTTITKRGRKRLRNLLYQVARPLSLHNEGFKQLHQYYRYRSNNPLSGKQSFIALSRKLIKIFFTIGTRQCAFSEERMLRDIPMISNKQKVA

SEQ ID NO: 64958 - protein, 385 aa, unidentified
MVYIGIDIAKFKHFASVVSSDGEVIVKPFPFENSRQGFMELVEEIENFQDCLIGLESTGHYAENLIYFLYERGYRIGVINPIQTDALRDSNIRKTKTDKIDTKLIVQCLMLKKYSLVNSQDINIIKLRRLSRFKLETIGQQTRIKTQLTACLDIVFPELSSFFKGNLHLKVSYALLEKYPSAKAIAHCRIDGLTNLLYDNSRGHYNQDKALQLKELAKQSIGLDNPAIELQIQCLIKQLRLYQKQIKDIDLAIMTLMELLNSPILTIPGVGYTLGAMIISEIGDIKRFSNPSKLLAFAGLDPVVKQSGDFQASSMKISKRGSTYLRYAIYRVAFLIIYNNETFHNYYISKRAQGKTHRVALGHVCNKLVRVIFKILTDETPFNLS

SEQ ID NO: 64959 - protein, 350 aa, unidentified
MIIIGCDFHPSFQQIAMLDTETGATEEHKLMHTSGEAESFYRKLASPAVVGIETIGNDQWFVQLLQKLGHEVRVGDAAQIRASYVRKQKTDRRDAKHILQLLVEGRFPRIWIPDAGMRDHRQLLIHRHKLVQIRTRVKNELQHLMLNQGMQKKQKLWSTEGRAALASLPLEPWTDRRRKDLLNLLAMLDAQLESLDDAVTRVAKEYPGVPLLMSQPGVGAVTALAFVLTLGDVHRFPRGKQVASYLGLVPREHSSGGKQRMCGISKQGNRLLRFLLVEAANIAVRFDPELRKKYLHRCHQKHFTVAKVATARKLAVRMYWMLRTQTPYPQVLSSRVASNVFWSAQASPTG

SEQ ID NO: 64960 - protein, 338 aa, unidentified
MRYVGLDVHWRQSTICVLDGRGRKLSTQTIRGGWSKVLEELGKTKKPFAICFEASSGYGYLFEQLSTIARRVVVAHPGQLRLIFRSKRKNDRVDAEKLAKLLFLDEVPPVHVPSVEVRSWRSMIEHRRKLVAEQTRTKNGIRSLLRSQGIEAPRGLWTRRGLTWLAAVKLATDLDALQRDIMRERLESIASMIQRVERVLNRKGTAHPGVQLLRTIPGVGPRTGEAVVAYIDRPDRFHSNKAIGCYFGLIPKQDASGRSNRLGHITREGPSVVRSLLVEAAWQGIRHCPQIREVYERIMRDDKQRKKIALVATAHYLLRAMLAMLQTGEVWRYSAEAA

SEQ ID NO: 64961 - protein, 318 aa, unidentified
MGGVNAAIEVGKQQLVVQLGSQGEQFSGANEPRAIKRIAKRLLQAGCERVLIEGGSYQSVLIAGLRAAELPVVIVNPRRVREFARSIGQLAKTDKIDARILALYGEQTQPPLRELPDEQSQALRALWVRREQLIEMLVMEKNRLEHTAEKAKAVRHNLCSHIDYLRKQVKQADNDLDREVRNSALWDKYEMLNSVPGVGPVLSVALLSDLPELGRLNRGEIAALAGVAPFNCDSGTLRGQRRIDGGRSRLRRVLYIATVAAVRCNPVLKLFYLRLRAAGKPPKVALVAVARKLLTILNAMLKTKTAWRPPCPARPELT

SEQ ID NO: 64962 - protein, 408 aa, unidentified
MDLTPMHKRVIALDVHQAKITACAVVEHDDGRVEVTKRDFGAFKRDRRALAQWALEMAPEVVVMESTGVYWKSPFAALEAVGLIAWVVNARHVKAVPGRKTDMADAQWLATLARAGLLRASFIPPVQMRQLRLVARQRQKLVGMCSAEKNRLHKVLVDAGIRINVLVADIHGQSARAMVKALIEGQPMHEVLNHKGGLRASRQELCEALSTEQFSAVHRFVAQEIVQHIEQIGQRIARMDQYLLQGLQPWQPQLRLLQTLPGIDEQGAAMLLVEIGADMSVFGSAERLASWVGICPGNNESAGKRKTGRIRKGNAWVRRLLCEFAQAAARTRCALKAKFDALTIRRGHKKSVVALAHKMLRTIYAMLSNASHYQDKEVDYEALNVQRNAPRWIKMLRKHGFIATPAAA

SEQ ID NO: 64963 - protein, 315 aa, unidentified
MSGPAVCVGIDVSKATLDLALRPTGERWTIANDEAAIQALVHDLRPRAPSLMVLEATGGFEHAVVAALAAAGLPVVVANPRQVRDFARATGQLAKTDAIDAQVLALFAERVRPEPRPLPDAAAQALDALLTRRRQLLDMLVAEKNRLGFARPVVRRGITQHIRWLERRLGDVDHELGQMIEQSPVWRAKDDLLQSVPGVGPVLSRTLLGELPELGQLNRKQIAALVGVAPLARDSGTLRGKRLVWGGRAPIRTVLYMSALVAARHNPVLRAFYLRLRAAGKPAKVALTACMRKLLTILNAMVRSNTHWQHVHAAG

SEQ ID NO: 64964 - protein, 436 aa, unidentified
MSKEGIPRIHAHAAGIDIGTENLHVSIDGETVKVFSTFTESIIELVKYLQDQLIETVAMEATGVLWIPLYDMIESAGIEVYLVNGSHVSNIPAQKSDYKDSRWLQKVHSYGLVRASFVPKEEIRELRTYVRQRENMIESSSQNILRMQRAFELMNIKLHNVISDIKGKSGMQIIEAILSGERDINKLLKLCDKSIIKTKGEQVKLSLRGNYKKEYIFLLKQSYEIYQFFQTQINMCDKEIEILLNKITDSLPKPPESLPSVSRHNQPDIEDFHLKMVQMTNGRNATVLPGLSDKTILKLVSELGTDLSNWPTEQHFTSWLGLSPRKKQSGKMSRTKRISVKTIAGQIFRTSAYSIANSKYIALKGFYNRIKSKHGYKVAIKATARKIAVFFYRFMVKGLDYVEKGLKEYEEKYKQIILKNISKKIKDFGYKLVEIA

SEQ ID NO: 64965 - protein, 425 aa, unidentified
MSSAGHVHGYVERLEKRVLFVGDDWAEDHHDVEAQDGSGRRLGTARLMEGVEGIAKLHALIARHGGEDLEPEQVVVGIETDRGPWVQALLAAGYRVYAVNPRQAARFKERYATSGAKSDKGDAHALADMVRIERDQLRPIAGDSEQAQAVKVVARAHQALIWERTRTFQRLRNTLREYFPGALAAYAGLELTSTDALELLVEAPTPEQAARLTKQQITAVLARHRRRNRDQRAAAIQATLREPQLDVAAPVADAYAAAATAHARLLIALNEQINALEGQVKAHFLARPDAEIYLSMPGIGEITGARVLAEFGDDPTRYASAKARKNYAGTSPITRASGKVHTVQARFVRNNRLADALQRQAFCALQNSPGARRYYDKQRARDLDYNPALRQLGNRLVGILHGCLKSRTLYNETTAWAHHANSAAA

SEQ ID NO: 64966 - protein, 401 aa, unidentified
MNMNELNYLNLKVCGIDPHKRFFKAVIVDMNTLNTLYEANFTNSRSGAQALVAKLREYKCNSVVIENSNNFSTALYHYLKREKFDVVSVNPANVPAKRKKSDRVDAKWIAITYTKGLVNEDYVPPEEIQYLRDLTRVRRKLVNIRTILKNKVHAQLTRGELHLSKIYSDIFGKKGRSVIRAIIESESSIEELDDRVREIIDDAFMSLINKKLVSILMELIEELDKRIKSLDMAIATYVYKHASIREKVERIMTIPGIGLITAAIIVAEVGDFKRFPDKKSISSWAGVVPMTRESAGVQRGYRITKRGSPYLRHALHEVANGIKLRKEPKELYAFYLRVRHRSGKYKAITALAHKVLVVIWGMMTTGSDFNMVSSAKRTYEKKRRLLAAMAEAGKKELEVMT

SEQ ID NO: 64967 - protein, 371 aa, unidentified
MNKFIKYVGLDVHKETIAVSVAESNGGEVRYLGDIANTPEALDKQVKQLRKGGADLSFCYEAGPCGYGIHRQLTDLGWDCQVVAPSLIPKKAGDRVKTDRRDSMMLARLHRAGELTAVWVPDNAQEALRDLTRAREDMKHLQRQAKQRLLAFLLRHGKRYDGKSNWTLAHYRWMEAVKFDHPVQQIVFQEYVDTVKALTKRVAAFDKQIESAAAESVFWPVIEGLMALRGVNLLTATTIVAEIGDLRRFASAPQLMAYLGVVPSEHSSGGTQSRGGITKTGNGHVRRVLVEAAWTYRHPARKTTVLQKRAERTSDAVQEIAWKAQTRLCGRYKLFEARGKLKVQACTAIARELTGFIWAIGQALPQPAASV

SEQ ID NO: 64968 - protein, 392 aa, unidentified
MVVSVGIDVSKDKHDCFIVSSEDEVLADVFTIPNNMDGFRFLLQRIQDYTHAQDKIKVGLEATGHYSYNLLGFLLDNGLTTYVLNPLRTNLYRKSLSLRKTKTDRVDARTIASMLLSDVGLKPYTDTAYHNEELKSLTRYRFDKVKERAKLKSSIARLVCILFPELEKLVPTLHMVSVYALLEEFPGAKQIAAAHLTRLKALLETTSKGRYKRDMALEIRGAARNSIGFPMPAKSLELQHTIRHIRELDNEIAEIEEQIQAIMDELNSPITTIPGLGFRMAAMILAEVGDFTRFDSPDKLLAYAGMSPSTYQSGQLKNCYPHMEKRGSRYLRYAIYNATKYVCHWDPAFADYLAKKRAEGKHYNIAISHAAKKLVRLIFAMEKSMQPYCSAS

SEQ ID NO: 64969 - protein, 356 aa, unidentified
MELHTLGIDLGKVVFHAVGLNERGDVVTRKKCSRTQLLRFTANLKVDLIGMESCGGAHFLGRSLREQGHEVRLIPAQYVKPFVKTNKNDYIDAEAIAEAVSRPTMRFVPIKSDDQLDLQSLHRVRERWVMRRTAVVNQIRSVLLERGIILRKGRKFVDQELPGILENAELRLSGALRMLLAQLRIELGQLAQRITEMDRIMQLTAIEHEGCRRMQAIPGVGPVTATAIVAAIGSGCAFGKGRDFAAWIGLVPRQYSTGGKQKLLGISKRGNPYLRTLFVQGARAVLQKRMHQSPGLRCWLERLTSRKHGNVAVVALANKLARMAWAVLAKNEPYQPYALVRAGQLRGGIQREFSEA

SEQ ID NO: 64970 - protein, 371 aa, unidentified
MKNHKYIGLDVHKATIAVSIADGEGGDVRFFGEIENNPIAIAKLIKQLSKADEKLSLCYEAGGCGYVIFRQLRELNQDCIVVAPSLIPRKAGDRVKTDRRDSLNLARLHRAGELTPVWVPDELHEALRDLTRGREDIKNMEKRSKQVLLAFLLRHGRTFTEKSTWTKAHFSWLETVKFTHPAQQIMFQEYVDIIKMHKTKLESMDKQILTYAHASTSWPVIEALMSLRGINLLAATTIVAEIGDLRRFATAPQMMSFLGLVPSEKSSGGSIKKGNITKTGNSHVRRLLVEASWTYRHNARKTAHIQRKAKHTTDEVQEISWSAQKRLCQRYRELGDRGKLKVQVCTAIARELTGYIWAIGQVMYPRLPLIN

SEQ ID NO: 64971 - protein, 338 aa, unidentified
MVLFPLRGTRTIKHGVKNMNIKKKLIVGIDVSKDTFNAHCCGKDVKHPNNAKGWKNLVKDFPAATTYAMEATGNYSYRISCFLKSQGFAVFILNPLRVKNHRLSNGIRAKSDSIDPLQIADYAFQKQGILKPFEPLHPKLERAKRIVTLLRQLSKMERAAGNVKHAFSLVARNGDRLHASMSNMSDLAKEEQKSLKKELYEIISEFYPKEFMLIQTIKGVSKKTAAVFLVQCNGLADFINHKQLSSWIGIAPSTEESGTSVKGSGKIKKAGCSYLRKMLYGCVASSVRYNNVCREMYIKLRSKGRTHKKAAVAVMHKIVKIVFGIVKSGLPCRNLSPV

SEQ ID NO: 64972 - protein, 337 aa, unidentified
METPIKQTAGIDCGIQELVVSFGLLLIDGNFICKLTKVFANTNKGFKQLMQWIAEVSSKETTVLYVMEATGVYHEKLAYYLFANNCRVSIVLPNKVNAFAKTCTSKKQDDQQASKVLAEFGCVKQLEEWQPPHPIFAALKQLTREKNQLHAEQTKAITTSASIKRMKARCRLIEKQIDEVEKEITHLADQDKVIKEKIDKVCTIPGVGLQTVVTVIAETNGFNLVRNRKQLVSYAGFDIIQKQSGTSVRRRAHISKSGNPHLRHCLYFPSFSAVRHNKPMQNLYTRIFEKQGIKMKGYVAVQRKILMLIYTLWKNNETYNPIKFLEQPVEAALTELD

SEQ ID NO: 64973 - protein, 424 aa, unidentified
MSEVRSAPPGSPQFAAFVGIDWADQKHMWCLQAAGSEQRESGELEHTPEAVEAWVGQLCQRFATGPIAVAIEQSRGALVFMLSKYESLHLFPVPSQMSASMRQALYPSGAKDDPRDADLLLDLLVQHGNKLRRLSPDSEATRRVQNLVEERRKLVEEKTAQSNRLTNHLKIYFPQILDWFELDTELVRGLLERWPSLEELQQVPPSRLRAFFRKYHGRNQEGIEKQIHQAIPAIRDRAVIQAKSTVVKVIARVLQTLTQGIHDLDRQIEEAAAAHPDFFLFDSLPGAGAVMAPRLLAAFGSQRERFGSAREVQSFSGIAPVTERSGKMKWVHFRWACPKFLRQSFHEWAGHSIAYSAWACAYYQQQRKRGKGHHAAVRALAFKWIRVVFRCWKDGVAYDENKYLVALAQRGSPLSAVLAQGKTL

SEQ ID NO: 64974 - protein, 356 aa, unidentified
MTNVKTNFTGQTIYVGLDVHKRSWNAGLYLNDHYLRNVHQPPSPQALSKFLQTNYPGADYVCAYEGGKFGYWIQRQLSSKGIQCIVVNPADIPSTHKDEVSKTDTRDARAIAMALQCGQLRGIYIPTPQQEADRSLVRHRKKIWRDLVRCKNRIKGFLDYTGVELPDKFSNSNWSRNFLQWLSTIKFEYASSRTTLDYMIREAELLRKELLNISNDIRKLMRSATYKKLYYLLRSITGIGPLTAALLITEIGDMKRFDSFYQLNSFIGLLPSEHSSGEKELKGRLTIRRHRQLRSDLVECAWTAKRTDPALSLFYLDQLKRGKEPKLIIVKIARKLLSRIRYVWLTEKAYEKGVVK

SEQ ID NO: 64975 - protein, 458 aa, unidentified
MQEGGGENSTKKEIEGLPIVRRNVAGIDLGSERHWVCAPAAGGNGREVADFGATTPELIRMAKWLQARGVESVAMESTGVYWIAPHEVLEATGLEILLVDTRQLARVPGRNKKSDPTDCEWIQRLHSCGLLRGSFRPVEEVCMLRTLVRDKANLVAESGDWLRRMQKSLDQMNVRVHRAVSDIDGVTGMAILRAIADGERDARKLAKLRNKSCRKSEKEIAEQLSGHWREDHLFSLRQSLKMYDSIQQRLADYDLEILARLAAIQREELRQQPPPPVKNPQKAKNIKKRGEEPMREALFRMSGVDLTGIDAIGVETVQVVLSEYGPDLSRFPTEKEFVSHVTLAPHRPMSGGKPVKKKKRNSASTRVAAALRMAALSIRNSATALGAYYRKMSHRKGGDIAVFATARKLATLIYRLLRWGQPYVDEGAEAFEKRYQEIRLKNLKAKAKELGYELVAQN

SEQ ID NO: 64976 - protein, 408 aa, unidentified
MQVLYPRCAGLDVHKDTIVACVRCVSPPMHQEVRSFGSTTTELLELADWLGEHDCSHVAMEATGVYWKPVWHVLEDEFELVLANAAHIRNVPGRKTDVNDAMWIADLLAHGLIRSSFVPPQAIQQLRDLTRTRKQLVREVSQHSLRIQKVLEDANLKLGSVLSDVLGKSGRAMLDAIVAGQTDPEQLAALAQGTARHKTAELREALRGRITEHHRTMLRLHLQVIDALQRTLAELDAAVGKALAPIRQRARLLTTMPGVSDLTASVLVAEIGVDMTRFPSAGHLVSWAGLCPRSDESAGKRRSTRVRKSGTWIKTTLVTAAWAAVRVKTSYLRAQFLRIKARRGAKKAILAVAASMLTAAFHMLRDGTEYNDLGSEHFDRQDRSKTIRRLLKRLQDLGCDVPELAHAM

SEQ ID NO: 64977 - protein, 359 aa, unidentified
MQRQVRQLDFSGQNIYVGLDTHRKQITVTILGENISHKTYSQPPDPGVLVHYLKKNFPGANYHAAYEAGFSGFWLQESLQEQGINCIIANAADVPTKDKERKQKRDPMDSRKIARSLRNGELEAIYIPGKRNQHDRALVRTRFKVVGNLTRCKNRIKSLLYFLGIEFPINFAQSGTHWSKLFMNWLEQLDLGEHSGNVTLKTLLEEAEFLRKLLLKINRAIRELSRTPLYAKRVNLLMSVPGIGCLVAMVILTELEDIHRFKSLDNLCSYVGLIPNVAGSDEKERIGDITKRSNKFLRGMLVESSWMAVRKDPALTLKYNELCGRMKPNKAIIRIARKLLNRIRYILMHEQEYQLAIVA

SEQ ID NO: 64978 - protein, 359 aa, unidentified
MTTMKSPTILAIDLAKAKSLFCWHDVVKGTHQIRQIPSTPKAFHDALLQQPVERVIIEVCDMAGWIKDLCEGLAIPLQIANGNTEGWRWRNVKKKTDKEDALKLISLSLTNQLPTVVLPDRPTRQWKSLILYRQKLIERRTRIKNKIHAILVSEGRAMRGGRRAWSEPSLAAVSKLARPLADCAIDELWRGQLHMELAALDDLDHAVGQLDQRLDALGQADARVIRLETIPGVGPRLSELVVAVIDDPKRFKNVRQVSAYVGLVPRRYQSGAMDRSGRISKAGCAKLRKLLMEIAWGMLVHNAHGRSVFQRISKGQKTRRKQAAVALARRVLGWCWAMLRDGTDWRDPAGGAAPSPVAT

SEQ ID NO: 64979 - protein, 321 aa, unidentified
MMAQNDLVVVGIDVAKDKMDACIRAFALRQTCPSTAQGHRKLIAWLRKHKVNKAVMEASGGYERDWARVLRQAGIEVRIVDPKRVRSFALSAGRLAKNDAIDAEMIAWFAETFSEAPSQTHDAAHEELLALVKARKGLLDLKTRLQSQNEHAAPGPVQKAHARVLKSLAAETAKLEAAISAKIKATPDFAERAEIIESVPGFAETTSANLIAGMPELGQVSNKIAPALLGAAPYDDDSGHRRGERHIKGGRRWVRNAIYMPCLGAATQNNPVLKAFYQRLIAKGKEPKVALVACMRKLIVILNTLIARRQKWDPSRYALSR

SEQ ID NO: 64980 - protein, 335 aa, unidentified
MKILFIGIDISKEKLNLCFRTASEIICEEEIENSSIAIKKLLRKDLRVLETTFEDVLVCAEYTGRYIYPLTCACQDLGVMLWIEDPTRIKNSFGVTRGKNDAVDARRIAEYAFRFNDKAVAYSMKDKDIESLKNLLSDRDLLLADRKKYEAQLNDQKKYMSAEDYKHKSKRWKKIISAIKEQLDAIESEMQAIVDGNEHISHQAELLKSIPGVGDKLAVNMIVITEGFTRFTDARQFNCYAGLAPFQYTSGKSIYSKAKVSQKANKHIKSLLHLCALVVATHSSSGEYKEYYERRKAEGKHSMCILNIIRAKIVARIFSVIRRDTPYTKDYSYAR

SEQ ID NO: 64981 - protein, 413 aa, unidentified
MKKVRFLGLDVHAETIAVAIAEPDGEVRSLGIIPNREEPIRKLVKKLGPAEQLQACYEAGPTGYVLYWQLTALGLKCEVVAPTLVPVKAGDRVKTDRRDATKLARSYRAGDLTAVWVPNEEHEALRDLVRAREVAKQDQLRARNRLSKFLLRHGRRAPAGIKAWTQKFQEWIKEQVHFEQPAQEYTLLDYLHEVEHVADRIRRLEQAIAEAVKLAPPQMQEVIQSLQALRGIAQISAVTLVAELGEISRFEGARQLMGYSGAVPSEASSGKRIQRGAITKTGNAHLRRIAIEAAWAYRHRPAIGLALRKRQEGLSEEVKEIAWKAQHRLHKRCRAGSGRAARGTENPHGFLCDRPYGRTRVSSVRQLPTDHDYAARPANIRLINRRKSDLDRYPLYPSKGEQVMKTNINTSPG

SEQ ID NO: 64982 - protein, 324 aa, unidentified
MSKINLSEPSNGFLGIDVSKAKLDCALLTGERCRNKSFPNTEAGIAALIAWAGRPEQACLEATNVYWEAVAEALSRAGLTLSVVNPALIKAHAQSLGLRIKTDAVDARTIAHFAREKRPPAWVAPAASQQALRALVLRHHNLSQMHSEELLRSQTAREAVRSSLQAHLTWLEAELKRVEREIATLIDGDDDLKRRRDLLRSIPGVGERTSAVVLSFLTQISGIAQARQFAAFAGLTAAIRQSGSSLNAKARMSKTGHTLLRRALYMPAMTTLYRTDWGQLFFSRLQANHKAPKMIIGAMMRKLAQVIFGVLKSGKPFDPSLHSA

SEQ ID NO: 64983 - protein, 420 aa, unidentified
MKYALGPRPGVPSAGLAAGIDWASADHAVCVVDAAGVAVCRFSVEHTAAGLRDLVQRLARAGVAEVAIERGNGPVVDALLVAGLTVVVISPRQVKNLRSRYGSAGNKDDRFDAYVLADVLRTDRARLRPLIPDTPATVALRQACRARKDLVVHRVAVGNQLRAHLLVSFPAAAGLFCKLESAISLAFLARFDCQERADWLSEKRLAGWLKAAGYSGRTNPAELYQRLTSAPRGATGGQGTISTQVTRALAAVLASLNTQIKALEASIAAQLASHADGHIFTSLPRSGTIRAARLLTEIGDCRARFPDPQALICLAGAAPSTRQSGKHKAVTFRWAASKQLRDAVCDFADGSRHANAWATKIYTDAIARGKDHPHAVRILARAWLYVIWHCWHNGTAYDPARHRALQRLLAAQHTAADQAA

SEQ ID NO: 64984 - protein, 406 aa, unidentified
MRRVIGIDIHRTFGEVVFWEDGRLRRAGRIDMTRTALEGFGKRLLASDEVVIEATANSMGVSRVLAPFVARVIIANPLQVKAIAQAHVKTDKIDAGTLASLHAAGYLPQIWTPDVGTECKRRSAARRYQIVRHRTRLKNEVHSILHAHLIPKCPHADLFNTRGRAWLAAQPLPEDERAAIDRHVRELDRLAEDLAVLDRQIAQDAVDDPAVNRLMTITGVNLTVAAGIVAAIGDIGRFNSPQKLVSYFGLNPRVRQSGLGAAHHSRISKIGRSHARAMLVEAAWAAAKARGPLRAFFVRIRARRGHQIAAVAVARKLTVLCWHLLTKGEDYQWARPALVANKTRAMQLLAGHPQQKGSRRGPNIKALRDREMLLAAQAERSYERFVAQWKPRRPKAGARAPQLGKT

SEQ ID NO: 64985 - protein, 355 aa, unidentified
MNSEKYIGLDVHQATVSVAVLDSAGKLVMESILETKAATILEFLAGLRGTLSVTFEEGTWAAWLYDLLKPHVAKLVVCNPRKNALLKDGNKSDRIDAHKLAELLYLNKLSSVYHGETGVRMLRELARSYLTIVKDLTRVMCRLKAVYRSWAIPCAGRDVYYTRHRTEWLGKIKEAGVRRRAERLYQQLDMLQYLRQQARRELLAESRKHAITVKLRQIPSLGPIRSALAVALIQTPHRFRTKRQLWAYSGLALETRTSAEYCYVKGGLRRSKKQISIRGLNKDHNHDLKGLFKGAATRASVLPGPFQDFYQRSLAKGIKPTMARLTLARKIAAITLTLWKKGENFDADKLKSQAA

SEQ ID NO: 64986 - protein, 342 aa, unidentified
MGKLTRIGMDTSKSVFQLHGVDDGEQPALKRKLRRQDLNKFFGSLPRLRVGLEACGASHHWARELQALGHEVVLIPPQYTKPYVDRGKNDAADAEAICEAMSRPKVQRRFVPPKTLDQQALQMLMGVRNGLVKRRTQVCNAIRGHAAEFGLVSPKGLYRVEELLARIEQSQEMPELARQMFKMLAGQYRHAEAQIREIETTLMARHRDNEVSQRLAAIPSVGPIGAMAMAAKIGDARRFRSGRDFAAFIGLTPKDHTTAGRKRLGGITRAGDEMLRTYLICGATAVIRQLKSGRGNNSLWLKELVARKPEKLAAVALANKTARIAWKLMISGERYCTKYAEA

SEQ ID NO: 64987 - protein, 338 aa, unidentified
MVVIGIDPHKGSHTAVAIDEDETKLDEVRVRADRRQLEALRSWASAFPKRSWAIESANGLGALLSQQLVGAGEEVFDVPPTLSSRVRVLASGKSQKNDPNDAFSVAIAALRSSRLRVVMVEDHIAVLRLLWNRHKNLTSLHTQAVCRLHALLAGMVPGGLPRRLSADRASALLSGSRARTAVEKARKAQAHELIGDVRRLDAQLKASKRTIVEALSSVPTGLGELSGVGPVATCIILAHTGDIRRFASQDDYASYNGTAPIDASSGPRKRHRLNPRGNRQLNHAMHIIAFSQLSHPGPGRDYYERKVAEGKSQKEAVRSLKRQISNVVYRQLVADSQR

SEQ ID NO: 64988 - protein, 404 aa, unidentified
MNNVTENTKVIYVGIDVHKDTNSFCAYDSREDKLFAEHKSSSKFENTLHYLKNLQKSVGQDAVFLIGYEAGPTGYGLCRKLQKEDFACVIIAPSTIAKAPGQKVKTDRMDARLLAKTLAFKTYSPVCLPSEKLEAIKEYTRVRTAKITMLKKAKQNLLSFLLRMGLPYPQSGHYWTQAHMAWLRTMNFADKWLQESFEEYHAEVITLMDKVQRIEAKILELCKDDEVREKIDALVCISGISYVSAISIVAEIGDFSRFSKAKSFVSFIGLCPGEDSSGNRVRHTAITKAGNSRVRSLLVECAGSLRMHSVVTAKSVRVKERQKNASAAIVSYADKCTLRLRKRMLYLSQKGLPYNLVTTAGARELACFVWGMMNFVDNRKTALNKIDEGELSDIQKTVEEFIAQ

SEQ ID NO: 64989 - protein, 343 aa, unidentified
MDHFAGLDVSVKETSICIVDDAGKIVREVKVASEPEALLAVLKNLAYHFKRIGLEAGPLSQWLYSVLAEAGLPVICVETRHMRAMLKAQINKTDRNDARGIAQMMRAGLYRPVHVKTLRSQKLRMLLTHRKLLQSKAIAIENDLRATLRNFGLKVGMIGTVKFETRIRELVENLPDLAVLVEPLLIVRRVVREQLGILHRRLLAIVRDDEVCRRLMTTPGVGPVVALTYRATVDVPARFRKSKAVGAVFGLTCAKYQSGEVDRNGRISRCGDEMMRMMLYEAAQSMLVRSTKWSWLKAWAMKIARHRGMKKAIVALARRLAVIMHRIWVDGTEFRWTREVAAA

SEQ ID NO: 64990 - protein, 377 aa, unidentified
MSKLRFVGLDVHAETIAVAVAETAGEIRSLGVIPNRLESVRKLIQKLGPVQNLRACYEAGPTGYVLYWQLTQMGVACEVIAPSLIPTKAGDRVKTDRRDAEKLVRCYRVGELTPVWVPDADHEALRDLVRAREAAKKDQLRHRHRLGKFLLRHGKRPTDAGKAWTQKYLNWIRIHVHFEQPALEAALQHYREEVDHIAERLAQLEQAIDEAVKQAPPEIRAVIEALQALRGVAQTTAATVVAELGSLSRFASPSQLMGYSGLVSREHTSGNRVQRGAITKSGNAHLRRVLVEAAWAYRHRPNVQGQVLKRQKSLALSEEAKQIAWKAQQRLHKRFTRLMARDKQNNVVAIAIARELLGFMWAIAVHTEAQHKQAKAA

SEQ ID NO: 64991 - protein, 343 aa, unidentified
MSRHLVSGGDIRGLLAHFAELQRKAEVRTGQSFRAISIQEAGLDGFWIHRVLEREGIESYVVDPASIAVSRRRRRAKTDRIDGEALVRALLAYNRGEPRVCAMLRVPTPEEEDRRRLVRERKALTNERIRHVNRIKGLLFSQGVSGYEPLKGDRRKCLDALVTGDGRPLPPALKAQISRELDRLELLIQQIKDVEEARDAMLVAADVPTPALLLSLKGIGPEFAAVLWSEGLSRKFDNRRQVAAYAGLVPTPWQSGQINCEQGVSKSGNPRLRSTLVQVAWLWVRHQPNSALSQWFRARVTQNGGRYKKTAIIALARKLLVALWKYVNAGVVIDGALLTKPSA

SEQ ID NO: 64992 - protein, 406 aa, unidentified
MNRLPPSGWLSQGLPLDRRPAAVWLNRGLVPSIGISKSACRPWLFHRSNTEWSTAMIIGVDPHKLSHTATAVDPATNTTVASLRVDASLAGYRELLRWAKQFDDRRWAVEGARGLGRHLAQWLVARDERVVDVPSTATARVRELSRGSRRKTDVIDAAAAACVAALQGDAAPVVVEDHTTVFAMLEERRANLAAQRVRVANQLHAVLRDLVAGGAELAITAKSASAVLRSVRPASVCERARKELAQDLVRDLRAVDASLADIEKRMSDALDDHGTRLREVDGVGAVTAVRLIGRTGPASRFPTAHAFATYVGAAPIEVASGERTRHRLSRRGDRQLNSAIHLVAVTQVRMPNSRGRQYFDSKIAEGKTRNEAMRCLKRRLANHLWRLMIADEQRAAADIQDHEIAA

SEQ ID NO: 64993 - protein, 379 aa, unidentified
MRHVCGLDVHKDSVFVCILNEKGVVFQEKFGVLTPELERMVGVIMEHGVTEVGMESTSVYWMPVWRVIDPYVEQKLVNPYFIRQLPGKKSDVKDAEWIATCILKGLVRGSYVPEERIQRLRQYDRRIFDLNDDIVHKLTRLDAALQRCNIRLSNYVSTTDCKSYGDVVDAIACGETSPDALLRCVHGRIVNRHGADVIRSALTGVVTPVDVDVIRQLSEEIELARRHRDECQRRMDGLCSEWFPEQYANLQTIPGVKARSATAIIAELGTDMSSFEDAAHLVSWAGLRPRNDESAGRIKARGITHGNRYLRKTLIECAWGASRTRGCFYSRFSHHQTVVRRKSRMKVQVAIARKMLSAIWFILHDGVTYRDFEGDANAA

SEQ ID NO: 64994 - protein, 478 aa, unidentified
MIKSVGIDLAGAGEHKVRCLDEEGQLCDGFGFESTPEGLAKLEERVFRDRSNPVIVFEPTGLAWFMVAVYLRARHPDCHLVRTQARNVVALRKYLRRSSKSDRIDALTLAKMPFVDIERLNDVYLPPAKINAILRLSRQRQRLEGDIAGRKKRILGIIDGYLPGVRQPFSNLWSPQGREFLRTCLNPLAVVRDGEKVLHRLLARVRARGKKETNESHWVYLACQKVATVYEMSRSSGAVDDDFFTDLQDEIDRELRLMEIEEAESDAIAQRIEILYRELHPSNNLRTIPGVGELTAPVFLAVVGDPGRFRSQSAFANYNGVVPDSRQSSGTEAKGLRMTKAGPSIMRWALYQASQIGRRYDPQLASIYYREMVHNGKNHKQAMGAVMSHIGARILAVLQDNRPYELRDNKGNPITWEEARKLVLANYQVPEEIKQARRRRTTESNSAKLKRKRREMVAHSTHEAAEAPQPVATTASPG

SEQ ID NO: 64995 - protein, 433 aa, unidentified
MTTSLFAGREALRNVDVAIGAVDGRVEHDRRTHVIETGGIDVFLGLDVGKGEHHATAVTPAGKKAFDKRLPNTEPKLRELFAKLQAKHGTVLVVVDQPASIGALPLAVARDMGCQVAYLPGLTMRRIADLYPGEAKTDARDAFIIADAARAMPHTLRSVDLEDETIAELEMIVGFDDDLTGEATRVANRLHGLLAQIHPSLERVLGPRLQHPAVLALLERFGSPAQIRKAGRRRLVTLLRPKAPRMAERLVEDIFTALDEQTVVVPGTEAAALIVPSLAASLQAVLDQRKLLAGRIEELLEAHPLSQVLISMPGVGIRTGARILIEVGDGSSFPSAAHLAAYAGLAPATRNSGSSIRGEQPSRRGNKQLKRAFFLSAFAALGDPASRAYYDKKIAQGKHHTQALLCLARRRADVLFAMLRDGTFYEPQPARSA

SEQ ID NO: 64996 - protein, 379 aa, unidentified
MMRFYNQPHRFYCGVDLHARTMYLCILDQAGAVVLHQEVSAEPTAFLEAIAPFRDGLAVACECLFCWYWLADLCQAENIAFVLGHALYMKAIHGGKSADDRIDSQKIAQLLRGGNLPIAYVYPKGLRETRDLLRRRMYLVHKRAEVVAHVVNTNSQYNLPSFGKKLIYARNRQALKITDRFADASVRKSIELNLRLLDALDDLLGDVELYLERTVKLDDADTFYRLRSIPGVGKILALVFLYEIHDIHRFASEGMFLSYARLIRPRKTSAGKVKGGGGAKIGNAHLKWAFSEAACLLARESDQAKRFLARQQKKHGKPKALGILAARLGRAVYQMLRQKKAFDPKRFWNGEPGVTPAQLHKAAVQRPRRAKGSSCVLEA

SEQ ID NO: 64997 - protein, 424 aa, unidentified
MKVTYQTCCGVDVHKSFLVATIVKTTGGIEPSYQKKRFSTFNNSILEFKKWLLENECRDVCMESTGKYWVPVFNLLEDEINVTIANPKWVKAVKGNKDDTKDSKWIGDLFRLGLVRGSYIPCKKIRILREYTRYRYKLVSCRSSEKNRYQNALTVCNVALDSVVSDIFGKSSTSIIDYLLEQSDNSINHEEIASKLLRRLKAKEDAVIESIEGYQMTDAQKYRMRLVRAHMDYITAEINDVDKQIESLISSDPDYEKAIQLLTTIPGVKHDSAITIISEIGIDMSQFCNSKRLCCWAGLTPGSNESAGKKKSVKITRAGVYLKPALVQCAHAAVKSDKSPYYKKKYESLVKRRGKKRAIIAIARMILTAIYQMLSTGEIWNPSDLYKIDMPANLLERQKAKAIKQAKKLLQREGIIPPDVPVAS

SEQ ID NO: 64998 - protein, 430 aa, unidentified
MKSNTQNAKIEAITEKTLVLGIDVGSEMHYARAFDYRGIEYSKKPFKFSNTEAGFVTFKEWILNLKERHEKDKVVPGMEPTGHYWFNLGKFLQDNEMKPVLVNPHHVKKSKELGDNNPTKNDRKDPKVIAGLVREGRYMIPYLPDGVYADLRTASNIRFQLQAELTRIQNRISRWFNIYFPEYKTVYGKPDAKSGMLILKAAPLPEDILTLGIDGVNQIWRDEKLRAVGKARAKTLIEAAEHSVGSKEGAVSARMEIRMLLEDYESRNTRLQEVMVLIEELVRKIPMTEKLLEIKGVGIRTVSGFLAEVGDISRFNNPKELQKLAGLALVENSLGKHKGETTISRRGRKRLIYLLFEVAMSLVSKNQEFRELHNYYTTRRLNPLKKMQSLMAIAAKLIRVFYAMLTKGVDYDPKKMVSDIKKPAVYLQAA

SEQ ID NO: 64999 - protein, 342 aa, unidentified
MWYVGLDVHLDATAVSIRNHRGVVTKRVVVPTNRAALRGAVRGIRGRTRVVCESGPLAAWIRDTFESRFRQVIVCDRRRTRLSTSGAKTDRIDADKLSELCRRDDFHVVHMPSGDAAVLRRFALHYSRMLMERARVIQRLRSLFFERGIRVASPRSAPQRVPLGRLPYAARFVARAYLRQLATLTELVCEARSTLLELAATRPGFALLQTIPYIGEIRAAQIVAIAGAPTRFRSVRAFWAYGGLGVVQRLSAEHRVENGRAVREERARGIKLRVGQPLLKQVIRDVALHASLGHGAFQAVFEHHVARGKTAAVARVALARKIAAIILAVWRSGMPYVEPQRK

SEQ ID NO: 65000 - protein, 350 aa, unidentified
MCSLPVFVGLDYHDASVRVCVLDTDGRELANADRCNDWKAIAEFADRFGRPVRAAIESCCGAADLAEELVSCAGWSVDLAHPGYVQRMKQNPDKTDYQDAQLVADLERIGYLPRVWLAPQHIRELRQVVRYRLQLTEQRRATKLRVRALLREQRCRAPQGVNAWTKAWDHWLRHSAELSAEGRWVANQHLQELACLATRIRQVEKRLERLTANDVEVQRLQQQVGIGPVTAWTIRAEIGHFDRFRTGKQLARFCGLSPRNASSGQRQADAGLIRAANPALRAVLIEAAHRLVNYDRYWQKFAQRLRAAGKPGSVVAAAVANRWIRRLYHEMKTPSGELAVAVRSARSEDS

SEQ ID NO: 65001 - protein, 430 aa, unidentified
MEEVTDEPLYRDRVCGIDIGKAGMAATIRVPSDRDPARRASETRLFATTRQGVLALADWLCCWQVPAVVMEATSDYWKPVFYRLEAEGFECVLADARQVKNLPGRPKRDTTDSQWLTCCFERGSVFPCFVATPEFRIIRLHTRRRRDLTDERTREKQRAEKLLEDAAIKVSSVLTDLHGVTGREIMDRLIAGQRDPKVLAECARTRARRKIPQLREALEGAEFFTAHHARLLQSILNRIDTITAEIDELSAVIEDLLAPYEEQLQQAESQPGWGRRSAQDVIAETGVDMTRFPTGGHLASWAGKTPLDKQSGARKGQRRHKRGNKYISAVLGETAVAAGKTQTREGARHRKISRKRGKAKAVVATGNTQMKVFHALLSRPGTRYQDLGPDYYERRRDHNRHVSRLVGELGNLGYEVTLCRKPEPQDTPAA

SEQ ID NO: 65002 - protein, 413 aa, unidentified
MGPERRSAVAKDSTERPKRSTASNEKREDLPAGQGRKKPVRPRAAKAGETPGSELTIGLDLGDRSSHYCVLDTAGVVIDEGSLSTTREGLRRLAAGPKAVIAMEVGTHSPWVSRLLTEHGHEVLVANARKLRMIYANRNKHDKVDARMLARVARMDRTLLAAIEHRPQQFAQDLAIVRSRDVLVRCRTQLISHVRGAVKSSGTRLKSCESECFARKAPDQLPDGIRQAMSPVLVTIELLTQQIRDLEAKVDELGETTYPETKLLRQVTGVGPLIALVFVLTIQDPRRFDRSRDVGPYVGLVPARSQSGRSDPQLRITKEGDMLLRCLLVQGAHYILGPFGPDCDLRRFGLALAERGGGNARKRAVVAVARKLAVLLHRLWQSGEVYEPLRREMAVTASEANPGVPANQGTRAA

SEQ ID NO: 65003 - protein, 338 aa, unidentified
MEKFSGIDLHSNNAVVVVSDETDQVVYEQRHANDLAGILAALEPYRSELVGVVVESTYNWYWLVDGLMEAGYVVHLANTAAIKKYEGLKYSGDEADAAYLAKLLRLGLLPEGYIYPREARGARDLCRKRMQLVQYRTAQVLLIENILAAQTGTRLTSTKVQRLTDEQIAALGFAPDVTLALQANAIVMRTLQQQIAVLEERLAERVQLNADFALLKSVPGIGQVLASTIMLETGTVARFAKVGNFSSYCRCVRSVRISNGKKKGEGNAKNGNHYLSWAFVEAAHFALRNCPQAKSFYERKKRQRNGAVATKALAHKLARACYHILREHRPYELTRCFA

SEQ ID NO: 65004 - protein, 343 aa, unidentified
MKLIRVGVDLAKNVFQVHGIDRSEKPMWRRKLSRANWLETLLETIEPGCLIGMEACGGAHHWARRLQGHGFKVRLIAPQFVKPYVKSNKNDANDAEAICEAMSRPNMRFVSVKTVEQQDIQAVHRVRFELSNQRKAKANQIRGLVAEYGLVAPKELLQLRSAIPGWLEDAENGLTDRFRRLLNGLWHDMLALDQRMTELNREIAQIAATDPVAKRLQQLRGVGPMIATAMVATFGDVKHFANGRQMAASLGLTPRQNSSGGKERLLGISKRGDSYLRTLLIHGARSALRTAKDKDDRLSRWVTRIAQNRHHNVAAVALANKTSRIAWAMMKKGTEYQPNLAAQ

SEQ ID NO: 65005 - protein, 368 aa, unidentified
MNEVTTRHLGLDVHKATITVALADPGAAPVLYGTIANEPGAVRKLVGQLKRGFKLVAAYEAGPTGYGLHRQLTELGVECVVIAPALIPRRAGDRVKTDSRDAITLARLLRSGDLTPVWVPSQEDEALRDLVRARFDAKDDLRRAQHRLSKFLLRQGIQPPVGMTTWSARFQSWLNTLKLERPGSQLVLEDYRATERAARDRIRRLEADLKSCAEKSPRLDLVLALQVLRGIAFLSAVTIVAEVGDFRRFADAPRFMSFTGLTASEYSSGQSRRQGGITHAGNRYLRHILVQAAHNARYTPTLDGTVKRRLRGVPADLVELSLRAQTRLHRRYRHLDRRIGRAKAVTAVARELAGFVWAVGQRMEATAA

SEQ ID NO: 65006 - protein, 603 aa, unidentified
MAQTVCIVLRAADRERLAAIVSDRNRQHKHIERARVVLASAEPARPVQQVAEAVGVSRPMVWRWQQRFAEEGPDGLLRDKTRKPGKAPIPAKTVERVVALTCGKPPGETTHWTGRAMAKAVGISLRSVQRIWEAHRLQPHRVRSFKRSRDPQFTDKLVDVVGLYLDPPEHAVVLSIDEKRFYAGGRRPEVGKLGCCHFSLRRYPMQRTVPLCYPRSAARRHDTSLFVALEFSKSIWLLAVSAPGRDRISKYRVPSGDIAALLSLLTRLRTEAERRCSEVVKIISIYEAGLDGFWPHRALEAADVESHVVDAASIAVNRRSRRAKTDRIDVETLLRTLMGWARGELRICSMVRPPSPEEEDARRLTREREALVTERVRHVNRIKGLLSTQGVVGFEPIRKDRRKRLEELCRWDGQPLPARLKKELLRELDRLELVMSQLAALETERDRILQASQTACQVVTQRPTAQPASTVAGTHLLRLRGIGPEIASVLSLEAFYRSFANRREVAAYSGLAPSPWKSGGIDIEQGISKAGNARLRRTTIQLAWLWLRHQPGSSLSRWFHQRVGDQRGKIRRIAIVAVARKLLVALWHYVTQGLVPAGAELKA

SEQ ID NO: 65007 - protein, 433 aa, unidentified
MNTPHPYDLVVGLDRSDTKADLHLIDTRTDQRQSQIIDTAPEALWEWLLQMRQLHPHARVALCLEQPAVHLIAFLEAYEWITLFPINPITLQKFREAFVTSRAKDDAKDAWYLAELLLTHHHRLQPWAPEDSQTRAVQQRVFHRRAVVDERTGLTNRLIAMLKQYFPQALVLCGDELWRPLATRFLLKWSSLQAVQQAKTATLKQFYYLNGSRSAKLLEKRLALVQKAVPVTAETALIESFEMRVQLICRELQLVVQTIARYDKQIAQAYAAHPDREIYASLPGAGAVLGPRLLASLGSQRERFATAADLQHYTGVAPVTKRSGGSCYIHRRYLCPKFHRQSFHEYAKESILWSRWAAAYYLQQRTKGSSHHTAVRALAYKWQRVIWRCWQERTAYREETYEAALRKSGSPIVALFDRVELGKSPWKNPAKKT

SEQ ID NO: 65008 - protein, 324 aa, unidentified
MKNESESFALFVGVDVSKSQLDVFLPDSKTRLKIDNSTDAIVRELVKVLKHKSRVLVVMEATGGYESTLVRVLGERQIAVAVVNPRQVRDFAKGIGRDAKTDAIDAEVIATFGQVVKPTPLAAKSEAEEKIAALVTRRAQLLDLINQESNRLLQTGDHEVRDYIRQTLESLKKQLKVLDSRLEKCVAADTVNARKVEILNSVQGVGAVTISTILADLPELGKLNREQIAKLVGVAPINRDSGTWKGQRFVMGGRMHVRRVLYMATLVATRRNERIRAHYQHLLARGKAKKLALVACMRKLLTILNTLIKNDVLWRDEKIVPGQP

SEQ ID NO: 65009 - protein, 376 aa, unidentified
MQKFCVGIDVDKKTLKVCLLSQKSDQKRILGSRTFVNGSTGFDDLLCWISSKVDDQKIHYVMEATGVYHEYLAHYLHEQDQCIHIVLPLKSKRYLQSLGIRSKTDQIDAKGLAMMGLEQTLDVWQPRSKQLLQLRSLTRQIEILQEHRTAFKNQLEGAKYSSVMHTSVIKSLEQMITQVGKQIIKLEKQIERLIQSDPFLKKKYQIVTSIKGVGIMSFAVVVSETNGFTLFKNQRQLVCYAGYDVLENQSGQRVGKTRISKKGNTHIRRILHLAAWSVVKNKTSPFHQLFDRVYERTNVKMKGYVAVQRKVLVMIYTLWKKDQQFDPNFATSGSHETKSLCSVDPKGAKKIVPTEDGTTLDELPYNQSTEALCSVA

SEQ ID NO: 65010 - protein, 342 aa, unidentified
MQVTTIGLDIAKNVFQVHGIDAAEKVVVRKQLRRRQVLEFFKALPACLVGIEACATAHYWARELTRLGHRVRLMPAKDVKAYVKRNKNDAADAEAICEAARRPTVRFVQIKSTEQQGRLMLHRARDLLMRQRTQVINAMRAHLAELGIVAAQGRDGIKELLKIIASEADARLPVDAHTSLVVLAAELQAMQTLIGSIEKRIMVQHRLSEASKRLKSIPGIGLIGATAIAATVPDPKVFGSGRDFAAWIGLVPREDSTGGKQKLGPISKRGDRYLRRILVVGACAVLRYARHKPEKYPWLTKLLERKPFKVVAVALANKMARIAWALLAKGDTYRVPALAAAT

SEQ ID NO: 65011 - protein, 344 aa, unidentified
MQEITTIGLDIAKSVFQVHGIDASGEGVARRQLRRRQVLPFFRKLPACVIGIEACATSHYWAREIAKLGHEVKLMPPRYVKPYVKRNKNDAADAEAICEAVTRPNMRFVPIKSPEQQSVLMLHRTRQLFVRQRTALINAIRAHLAEFGIVAGIGRNGVEKLLELIAEGEDERIPPAAHECLMALAAQLAMVKRQILEADRRVLAWHRTSELSRRLEAIPGVGPLIATALVASVPDPNVFRSGRDLSAWIGLVPKQNSTGGKDRLGSISKAGNRYLRQLLVVGALSVIRRAKQLGYTRHPWLVRLMERRSVKIAAVALANKIARIAWAMMARNESYRTPLPTTTA

SEQ ID NO: 65012 - protein, 437 aa, unidentified
MQEVEGEPLFCERAAGIDIGKQSVAVTIRVPSESREGGRQQETREFGTTRRQLLALADWLRCWGVEKAGMEATSDYWKPVFFLLEREGLECLLYQASQVKALPGRPKTDRLDSAWLAAITERGSLAASFVPPEEIRRLRTHTRYRRKLVQMRTAQKERCEKLLEDAHLKLSSVISDIHGVSGRAMLRAVIAGERRPKVLAEMARGVMRRKTARLEEALDCSFFTAEHAFILEMMLDSIDQLTAQVAVLDERIAVLCEPYERQIAQLDAIPGFGVTAAQDLIAEIGVDMGAFPTAGHLASWARVAPRARESGKRKGKTATGRGNPYAGGTLGETATSAGRTQTFLGAKYRRLCRHMPKKKAQGAIMRAQLVIAHALLSDPQAEYRDLGPGYYEQRADTRRQARSHVHAIERLGYKVTIEPLNPEADPETGELITRTAS

SEQ ID NO: 65013 - protein, 336 aa, unidentified
MNKRSVLYVGIDVHEKESQLAVLEKEGSLVLEKRMPTKEISSFLSSLPGEKQVAMESLGFIYPIHEKLSSLKDCTISVSNPGKLRLISGAPTKNDRNDAVILGDLLRTNYLPLAHMRDEETREKLIVIGERVRYGMRRGELKQSIRWMLKRKGIAEAKNLFSPDGRKKLRELRLHEVDHALAELDLIDSFIEELDPQIADLASKDEGATLLDTIPGIAPYTALYLSSVLDDIDRFPDSKHACAYLGLVPWLDETADTTHLGHITKRGDKYLRKNLIECARAGIRKDQNLKNFYTRVKRKRGDKRAIIAVARKLVSYAYWVLKRKITYEELSPCAGA

SEQ ID NO: 65014 - protein, 371 aa, unidentified
MKSILYVGMDVHKENYTLCSYSFEKDELMYKQTVAPDYKMILKYLEQLRSHTEDEIEFVCGYEAGCLGYTLYHQLTNHGIKCVILAPTTMGITNTGHIKTDKRDAGNIARCLAFRTYSAVHVPTPQDESVKEYIRMRDDQKKALKIIKQQILALVLRHGHRFEEGKNYWTQKHVKWLKSLDLGGILQESLEEYLVTYEYLTDKIDRFDKRIEELAENERYQSNVKKLSCFIGVKTHTALSALVEIGDFKRFAKAEQMAAFLGLVPGEDSSGGKQKRGSITKAGNSHVRRLLVEAAQSYTRGTVGHKSVDLKRRQTGHEPQIIAYADRANERLRRKFYRMTLKNGTKRNVAATAVARELACFMWGMMTDHVA

SEQ ID NO: 65015 - protein, 342 aa, unidentified
MTQFKYFVGIDIASSTFTASVGTMPWQVVLKPQEFENTEDGFQAWLDWLTQHQILLHRTVICMEATGVYGEGLAYFAFAKGYQVAVQPPLEVKRAFKPNIRKTDAVDSLQIAEYAGRYADKLTFWQPRNDVLEQIKVLLATREQFVVQNAAHKNSLKAIQRKPVKTPFAEQTHLEMIEFFKKQIHAIDSEIRRLIESDPTFKQMLVLLLSVPGVGLLLAAYMILLTQVSLNYKQLNSFLGIAPNEHSSGSSVHGHPTSRHFGPSAIRKLLYLAALSVSTHRKQFRSYFLSRTQEGKPARVVLNNIENKLVKIICAVLRTNSPYHPDYASVQPLILKNALTAS

SEQ ID NO: 65016 - protein, 361 aa, unidentified
MTGTMTWVGLDVHARSTHAAAVDVLTGELRRARFGPGVEEVVSWLAGLSGPVRAVYEAGPTGFGLYRAARVAGIGIAVVAPSKTPRASGDRVKTDRKDAERLARLAMAGELSSVAVPDEFIEAARHLTRTREHARQDVLRARHRVSKLLLMHGRVYPGVTTWNREHRRWLAGQAFELAPTELAYVDLLAAVDGLVVRKDALDERLSRLAADERLWPTVARLRAFRGLDTLSALAIHLELGGDWQRFGSPRRLFAWLGLTPSLEQSGQSSVQGAITKTGSVYARRLLVEAAWHYARPPRIGVALDNRQTGQPDHILQIAWRAQHRLYRQHQRLRERGKPHNVTTIAVARELAGFLWAAATSP

SEQ ID NO: 65017 - protein, 355 aa, unidentified
MEGTKYIGMDVHKDSISIAVLNSSGKLVMESIIETKAITILEFVHGLRGSLHLTFEEGTWAAWLYDLLKPHVTKLVVCDPRRNGYLKQGSKSDRIDARKLAELLYSNMLRPVYHGEHGVRSLKELARSYLTITKDQARVMTRVKAVYRSWAIPCAGKQVYGQRHRLEWLGKIQEPGVRRRAEFYYAELDALRSLRLVVRSELLLESKKHNVSTLLSQIPSIGPIRAALLIALLQTPDRFRTKRQLWAYSGLAIETHDSAENQYVNGQLQRSRKQTSIRGLNQNHNPDLKNLFKSASAVAAVKTGPFQKFYAALIGKGIKPEMARLTLARKIAAITLIVWKRGVSFDARYLNPQTA

SEQ ID NO: 65018 - protein, 344 aa, unidentified
MSQISIIGLDIAKHVFQAHGVDASGRAVLRKKISRAKLLPFFAAQPHCRVVLEACGGAHHWARELIKLGHHVQLIAPAYVKPFVKRQKNDAADAEAICEAAQRPSMRFVPVKSEAQQAAAMVFRGRDLLVRQRTQISNALRSHMAEYGWIAPKGLAHLDKLAALIADPSAVPEGVRAVCMVLLDSLAVLDRQIALLDREIARRARDDEVARRLMTIPGVGPITATAITALAPPPGTFAKGRDFAAWVGLTPRQHSTGGKQRLGAISKMGERTLRRLLIIGSSAVVLAASKRGAPKGSWLEQMLARKPRMLVTVALANKTARIVWAVLTSNEDYRTPAVAASLRV

SEQ ID NO: 65019 - protein, 425 aa, unidentified
MDRRNDSGQFAAFVGIDWADAKHDVCLKAADSEKVEHKVLAHKPEAIEQWAGALKKRFGKKPIAVCLELTRGPLVYALQKYDFLVIFPVNPATLAKYRQAWYPSKAKDDPRDARLALEVLTRHRDKLNALKPQSAEMRTLQRLVEDRRSVVNDRVSITNRITNAVKNYFPQVLKCFDETASDVFCDFLQRWPTVKEARRARKSTLEAFYLKHNSRSREKIESRIKEIKNAVPLTEDDGVIVPNKLFALSLITQLRPVLRAIENYDIEIGRVCKKLNDYAIFDSFPAAGPVFAPRLLAAFGEDRDRYANAGEIQRYSGVAPVTEASGNKHWVHWRYMCPKFLRQTFVEWAALTIPRSFWAEAYYRQQIAKGSSHNRAVRALAFKWIRILYRCWITRTRYDESTYLKALQARGSTLLNSIAESTTQG

SEQ ID NO: 65020 - protein, 379 aa, unidentified
MKTVCGLDVHKDSVFVCILLPDGGKNEQKFGVTTPELLLLRGMLLENGVIEVAMESTSIYWIPIWRILEDSFDLKLVNPYFIKQLPGRKSDIKDAQWIATVLQKELIKGSFVPDQIIACLRQYGRRVFKLVRQKVRVEQSIDRQLQRCNIRISNYISTIDSKAMQKIMDKLIEGIIDPEQLVKCVHTRTKNKHGIETIKASLTGRIEQVDIDMLCQFKEEQLLINKQIEETLARMSAICRDNFPEQMQILQAIPGIKERSAMMILSEIGSDLKKFLSSSALVGWAGLKPRNDESAGKIKSRKTTHGNKYLRVYLVQAAWASVRTQSSRFNFKYNLFLSRKMKKQKALIAIARKLLVVIWNIISKNEQYRPYTNAVRALA

SEQ ID NO: 65021 - protein, 401 aa, unidentified
MNAVGIDVSKGKSMVAILRPYGEIVSSPFEIKHTSSNIQSLIAQIRSIEGESRIVMEHTGRYYEPLARELSLAGLFVTAVNPKLIKDFGAHSLRKVKSDKADSVKIARYTLDSWTELKQYSLMDELRNQLKTMNRQFGFYMKHKTAMKNNLIGILDQTYPGVNTYFDSPAREDGSQKWVDFATTYWHVDCVRKLSLNAFVDHYQKWCKRRKYNFSKDKAEEIYGAAKELVPILPKDDLTKLIVKQSIEQLNTASRTVEELRTLMNDTAAKLPEYPVVMGMKGVGPSLGPQLMAEIGDVTRFTHKGAITAFAGVDPGVNESGTYEQKSVPTSKRGSSSLRKTLFQVMDCLIKTKPQDDPVYAFIDKKRAQGKPYYVYMTAGANKFLRIYYGRVKEYLMSLPE

SEQ ID NO: 65022 - protein, 402 aa, unidentified
MPLAVGIDVAKQLHWACLVDMATGKQLNSHKVENTPEAIEALITEIHGLVQDNGPVTVGIDVLGGIAGLLTAMLLDAGLRVVHTPGLLVNRSRRATRGGERKSDPADAKVIADQVRLRAGTDELRTMEALAEPDAVLRLLVGRRRELVTDQTRRLSRLRDLLTATHPGLERQVDVTTKTGLWLLTRYVTPTEIRDAGPDSMTAHLTAAGGLGKARIQALVAGVVDAAQAQRVAVPGEATAARLVRELAQEAMAVRDRLARLDTEITEALDDHPDGALIRSLPGMGVVLTAEFLAEAGGLHRFPTPDALASAAGLAPVLQQSGKMHYLRRSHAGNKALKRVFYQSAFCAIQRDPLSKAFYRRKRAEGKRHHQALIALARRRVNVLHAMLRTRTEFRPEHRAAA

SEQ ID NO: 65023 - protein, 426 aa, unidentified
MLFVGVDWAEDHHECCVLAEDGAVLAKRRVADSVVGISELHELVAEHAADEEEIVVGIETDRGLLVNALVAAGYQLYAINPMAAARYRERHAVSGAKSDAGDAKMLADLVRTDRHNHRPIAGDSELAEAVKLLARAHQSAIWGRQRQVNALRSALREYYPGALVAFGTDLSSRDALAVLEIAPTPELGRQLSRSKIAAALRRGGRTRNLERRAAAIQAALRAEHLEAPATLTMTSGTIARSAVALIKAFNAEIDALEHALSEHFDKHPDAKVVRSQPGLGTVLGARVLGEFGDDRTRFASAKSRKNYAATSPITKASGRSFVVLARHAKNRRLADACDQWAFCALTHSPGARAYYDKLRRRGKSHRPALRQLGNRLYDKLRRRGKGHRQALRQLGNRLVGILHHCLEHGELYDESRAWPPSIAAAA

SEQ ID NO: 65024 - protein, 341 aa, unidentified
MPIVTIGIDLAKNVFAIHGVDEAGKAMLIKPRVPRDQLVTLIAQLPACLIGMEACSGAHHWARVFQQHGHTVKLMAPNLVAPYRMSGKRGKNDAADAAAICEAVTRPSMRFVPLKDEHQQATLCLHRTRQGFVEERTATYNRLRGLLSEFGVVLPQSPEKLRRHITEHLDTLPGWAKHSISDLLDHAGNIEDRLIEYDRAIAGIARDDARSKRLMQLRGIGPTTASALLASIGAGHDFRNGRQVAAWIGLTPGQYSSGGKARLGSITKAGDAYLRGLLVNGARAVIASLGEKQDRFSRWVRALVERRGYWRAAIAIAAKNARLAWASLKYGDDFKLQPVAD

SEQ ID NO: 65025 - protein, 371 aa, unidentified
MFHVGLDIHTKRISICALDEKGQVVHRSQVRSIQDLLRVLTDLPDRFQVCYEASCGYGHFHELLRPLATRVVVAHPGQLRLIFRSRNKNDRNDAERLAKLLYLGEAPAVHVPSADVRTWRELINCRSQVIAKRTRAKNAARALLRGAGVTPPKHPGLWTKEGLAWLRRLELPTASQQLRRDLLLEEMETLLRQVQRIERQLTQQAQRTPAVVRLRSIPGVGLRTAEAVAAFIDDPHRFPNAKAVGSYFGLVPCQDQSGDRNRLGHITRQGAPVVRQLVAEAAWQARRRSPTVRAYFERAQRDDPQRKKIALVATAHYLVRVMWALLKRGTDWQENPALAKAPASASCGGPAAERGEGEREKERGERMSESA

SEQ ID NO: 65026 - protein, 288 aa, unidentified
MADCTTWVGIDDSANKINIAILHGQEIEPREELVFVNDSTGLGRLAKKLKTIRGEVRCVYEAGVNGYYLQRFLSNHGIFCDVAAPSLTPRRSGKRVKTDKLDAKALGRLFRAGELTSISIPKKEQESLRDLVRGREDALEDQQRARHRLARFLMRRGLKYPAGKNWSCGHLKWIKGIRFEDERDQMVLDEYRFALEEQTERLNKFQIKIEELGSQAPYQKRVHYLMALKGVQVLTAMTIIAEALDLRRFSDAPAFMAAIGVVPSEDSSGDMQRGEALQKPGTVTSEGS

SEQ ID NO: 65027 - protein, 346 aa, unidentified
MDVYIGLDVSLASTAICAVSAQGKIVKETTAASEPETLVATLRAMPGEVIALGLEAGPLSQWLYRFLNDAGIATVLMETRQVQGALKAMPIKTDRRDAEGIARLLQMGWFRSVHCKSMSAQEMRALLSARKAVQQATINLELSIRGVLRNFGLKMGRVAKGRFEARVRELAEGNPMLEAAANPILAARRALRQELAGLEKVLRNHAKEDPVCRTLMTMPGVGTLVALTVKAAIDDPERFRSSKDIGPWVGLTPRREQSGERDIVGQVSRAGDVGLRTALYQAATVMLHRGRKTWLTAWALNVAKRRGKKRATVALARRIGVVLHRMWKDGTAFRFTREDAAEAAAA

SEQ ID NO: 65028 - protein, 343 aa, unidentified
MKISRVGIDLAKNVFQLHGADAHGKAIWKRRLSREKWIAGLCKTVPAGCEVGMEACAGAHHWARVLTKHGFQVKLIPPQFVTPYVKSNKNDANDAEAICEAMSRPSMRYVKVKSVEQQDIQAIHRVRSELMGHRTAKANQIRGLVAEYGLVAPQQISSLRKVLPRWLEDADNGLTARFRALLTGLWDDLAHLDNRIADLNDEIEEIAKSDPMAKRLQQLRGVGPLVATALIATVGNGDQFSKGRQMAASIGLTPRQFSSGRKERLLGISKRGDAYLRSILVHGARSTIAHARHKDDRLSVWMTDLAKRRHPNIAAVALANKTARMAWAMMRNESDYDPEIAAA

SEQ ID NO: 65029 - protein, 401 aa, unidentified
MVSDFKKGRYNLMKIFVGIDIAKLNHFAAAISSDGEIILEPFKFTNDADGFQLLVSKLESFDKNSLIIGLESTAHYGDNLVRYLVTELYQVCVLNPIKTCQMRKNNVRKTKTDKVDTYVIAKTLMMQDNLRFVSFFDLDMMDLKALGRFRQKTIKQRTRLKIQLTTYVDQVFPEIQYFFKSGLHQNAVYALLKEAPSPKEIASMHMTHLANLLKVNSHGHFTKEQAKELRVLAQKSVGANDSAISIQITQTIQQIELLDSQLEKIEAEMTDIMKFNDSVIMTIPGIGYINGGMILGEIGDIHRFSNPNKLLAFAGLDPSVYQSGNFQAKTTRMSKRGSRVLRYALVNAAWNVVRNNATFKAYYDAKRAEGRSHYNALGHCAGKLVRVIWKMLTDEVEFNLE

SEQ ID NO: 65030 - protein, 318 aa, unidentified
MNTKMKQSINVGVDTGKTQLDIHIRPLEIFFSVENTDKGIKEALRVIKKYNPERIIIEATGRLEMPFVLACVEAKLPIVRANPVHIKRFAGAIGRRAKNDRLDAELIAHYGEAIKPELTIIKAKNIRLMSDLVIRRNQLLSMQTMEKNRMQILPKTLHSTIKPMLTAMKNQITKLEEKLVKLIEDSPEYQAKNTILQSVPGIGNIAAASIISNVPELGYITNKQAASLIGVAPITRESGRYKGKRVIQGGRSQVRTVLYMAMMSAMQCNPVFKATYTRLVEAGKPKKVAIIACVRKMVVILNSMLRDGVMWDENTAKN

SEQ ID NO: 65031 - protein, 397 aa, unidentified
MMIYAGIDVAKYEHHLSIIDDQGTVLLADLEFLNNREGFLTAQATLDNARTADGQVQVGLENTGHYGYNLISYLRQHKFQVFAYNPLLIKKYIQANTLRHTKTDPQDALEIAKKLRSDTTKVSFEADADIIELKSDTRYLEGLKRKRVKTKLAFTNVLDQEFPELAPNLGPVSAKYSQWLLALLKRYPSTDKLAHGRINTMTNIITKYSMKQHGEEMAIKVRELARETIGQASDSLSFQLLQLIDALQFETQQIKEADQKIHKIMNRIKTPLLSIPGVGETLAAIILAEIRNVNYFQSPNQILAFAGAEPSIIRSGEMQGNYGHMVKHGSTQLRWALFQAARLCAMYSPTMRAYYQKKRSEGKPYLVALSHVVKKLVRIIYHILKYNDPWSETVIRD

SEQ ID NO: 65032 - protein, 352 aa, unidentified
MAKFDFDDLMSVGVDIGKDVFHLVGFDRNGQLVLRKKIKRMALIATFEGLPKCVVGMEACLSAHFVSRTLRKMGFEPRIIPAIYVKPFNKGQKNDYNDAEAIAEAALRPNLKTVSEKTQEQLDLQALHRVRSRLVSRRTATMNQIRAFLIEQGITVRKSVAALRTSLQAILDNRSDEISLRMRKLILGLQQDWIWTDKRIEMTTSEIKSVSESEASCQRLMTIPGIGPIISTAVVAAVGTGEAYDRGRDFAAWLGLVPRQHSTGGRTILGRITKRGSRYLRMLFVQAAQVIMMRPKNWPKFSFGAWLESAATRMQHNKLGVALANKLARIAWSVLNSGRDFDWKEKELATAI

SEQ ID NO: 65033 - protein, 391 aa, unidentified
MAPVMIGIDPHKGSHTAVAIGADEEPLRQVRVRASAAQAQKLVAWAADWPERTWAVEGARGLGYLLAQQLVAAGERVLDIQPKLGARVRLLATGASGKNDPNDARSVAIAALRSTTAAEVAAAGHAAVLKVWSKRHRDLGRARNQLACRLHAVLCDLAPGGFSKEITAGQASGLLQRIRPSGAAAQARYDLASEFVEDLRRLDTQLRDTRRKLTAAVKESGTSLTEIFGVGPVIAATVIGATGQVSRFASRDRFAAYNGTAPIEVSSGNRRACRLSRRGNRRVNHAIHMAAVTQIRNKHSQGRAYFDRKLAEGKTRKEALRCLKRRISDAIYARLQDDARRTRQARTLTAREGNRGTTLTPARPAHTPITGSSDKPLPGLTPLYDPGQSPA

SEQ ID NO: 65034 - protein, 358 aa, unidentified
MSNLKYSVGIDVSKKDFHCCLSVIDTQQAVKVKASHRFSNSSVGFRLFFEWIKRGSKEELPVFCVMEATGVYHEQLAWFIHGKELPVSILLPNKAKKYLQANGAKSKNDKIDARGLAQIGAEKRLELWVPPSRYLYDLRCCTRQHQSLNETHTAINNQLEAIRHSQFQNREIIKQLEKTLKLLQSQIVEMEKAIDKIIKSDKVLNSHYKNITAIKGLGLLCFGVIVAETNGFTLFKDAASLISYAGYDVVENQSGSHVGRTKISKKGNSRIRRILHMPALCAVREDQPQFRDLFERVYKRTGIKMKGYVAVQKKLLVMAYHLWKNKQAYNPLFNCQEKIIAPENSGATHDKVPQGSFH

SEQ ID NO: 65035 - protein, 354 aa, unidentified
MNTTQVFEKRKIAVAIGIDLAKDHCDVVAYNADNKICFTKANWAYPHLMEWLANAQPAVVLMESCKGCHVRARDIADLGHDTRLVKGADVKALRNVCQKNDIRDADYIARLLYVPGTKFVFVKNQRQQSLQFLQNEYKSIQELRIQVGNQIHAGLEEFGCPGPKSKKFIQSRMMAHLEKNAEPIPEEVMSSFLRRREMWLNLFEQEEEAKKRMEEIAKTDDDAQRIMTVPGVGAQTAVGMLVHIGGDIGRFKNSGQFAASIGLVPKQNSTGGNTTLNGITKCGPKRLRANLVQCGQVILMHADKLKGNFGDWVRKLRDSGKKRGVIVCAIAAKIARIVYRLMKDKVDYTPVPSR

SEQ ID NO: 65036 - protein, 381 aa, unidentified
MNAVGIDVSKSKSVVAIMRPFGEIVSTPFEIKHTASDIHSLIELINSVEGESRIVMEHTGRYYEVLAHQLLEANLFVSAINPKLIKDFDNDSLRKVKSDKADAVKIARYALDKWQNLKQYNVMNELRNQLKTMNRQFGFYMKHKTAMKNNLIGILDQTYPGVNTYFDSPARSDGSQKWVDFASTYWHVDCVRKMSLNAFIDHYQNWCKRKKYNFSQSKAEEIYGKAKELVPVLPKDDITKLIIKQAVDQLNSASITVESLRTLMNETASKLPEYPVVMAMKGVGTSLGPQLMAEIGDVSRFTHKGAITAFAGVDPGVNESGSYEQKSVPTSKRGSSDLRKTLFQVMDVLIKTHPQDDPVYQFLDKKRAQKKPVLCLYDCRC

SEQ ID NO: 65037 - protein, 414 aa, unidentified
MELLHERCAGLDIGKKDLKACVRTPSPSGKRSRRQEIRTFATTTNALLELRDWLVEQKVTLVVLEATGDYWRGAFYLMEDCLNVILVNAAHAKGLPGRKTDVSDAAWLCQLGECGLLKASFVPPEPIRQLRDLTRYRSTLAAERTREAQRLEKELEDAGIKLSSVATDILGVSGRAMLTALIDGERDVHVLAEMAKARMRPKIPQLVQALTGNFAEHHAFLCRLHLQRIDQLSAAILELSRRIEDVMGPFARQLEQLVTLPGVGQTTAEVIIAETGGDMSRFRTTGHLASWAGVCPGHHESAGKRTSGKTRHGNRWLGATLGTAAMAASRTKDTTYLGARYHRLVPRLGKKKAIVAVEHSILTAVWHMLTHDVDYHDLGGDYFTRRDPDRAMKRIIRQANTLGFTIRFDPIHAA

SEQ ID NO: 65038 - protein, 318 aa, unidentified
MNYVGIDISKEKFDVAISENESYKHYVFTNDTIGFKQLIKLLNKSKHWCIMEASGPYYQKLAMFLHANEIELSVVNPLVIRRFCQMRLMKAKTDKKDAIMIAEYGKTEQPKAWIADQAHHLELKQMQAFLDQLDKSRTNYIRQLEAFSQSPNMHKAVKKGLSKMIKTVEAQIQEIEDKMEEIIRQYHNEMFEQIKSIPGVGKKTSLLLVVISAGFTKFENAKQLCSYVGLSPRIFESGSSVKGKVKICKMGMSKVRAKLYVCSWSAIKYNKACKDLYTRIVEKGKPKQVALIAVANKLLKQAFVLATRKEFYRETSFC

SEQ ID NO: 65039 - protein, 411 aa, unidentified
MNVVHERCWGLDVQQQTVVACVLVTAPDGQVTKPLRTCTTMTADLLALSDWLARFEVAEVALESTGIYWRPVFNLLEDGRRITLVNAQHLKRVPGRKTDIKDAEWLADLLRHGLLRASFIPPKPIRDLRDLTRYRATLLGQRTQEVNHLHKVLETANIKLAAVASSVVGVSGREMLAAILAGEEDPAVRAELARGRLRAKLPALRQALVGRVQPQHRLLIERILAHIDFLEESVSQVQDEIEQHLPAEATALDLLQTIPGGGATTAATIIAEIGTDMSRFPSAKHLASWAGMCPGNKQSAGKRLGGKITSGNSWLRAALGEIAWAISHTTGTYLAAQYHRLARRRGKYKAAVAVAHSVLVIIYHVLRDRQPYTELGADYFDKLDATRVARYHVARLTQLGYEVTLTPAKVA

SEQ ID NO: 65040 - protein, 347 aa, unidentified
MKFYTKQHTHYCGIDLHARMLYVCILDSQGETVVHKNIKANPEALLRLITPYQDNIVIGVECMFSWYWVADLCREKGITFILGHALYMRAIHGGKAKNDKIDSHKIATLMRGGMFPEAYVYPSEMRGTRDLMRRRMHLMRKRSELLAHVHNTNSQYNLPEIKKNLRYAFNREGVADRFNDPSVSKSIDLDLNLIDFYDKQLSKVEWHIQQHAVDCDQHSLILLRTVPGIGKILSLVILYEIHTIERFPSVQNFASYSRLIKCKRESAGKSYGTAGAKIGNAYLKWAFSEAAVLFLRKNPDAQEWLKKKTNQHNKARALTILAHKIGRAVYFMLKRHTIFNQEKFLNI

SEQ ID NO: 65041 - protein, 377 aa, unidentified
MEDDITLFIGLDVHKDSIAVAAADTGRSAPRFIGTCAPNMKELGKTLAHLGTPSHALLAYEAGPTGFALARELAAHGWRCQVIAVSKTPRRPGERIKTDRRDALSLAGYLRSGELTPVTIPDARDEAVRDLSRAREDAVRARLKARQQLKAMLLRHGKPYTGKTSWGPTHDKFLSRIAFEHPAQQIAWAEYRSAVLEADQRVDRITQALREQVLHWRLGKVVQALMCFKGIDFVAAVTLVSELGDLHRFEHPKQLMAYLGLVPSEFSSGASRSQGSITKTGNSHVRRMLVQAAWCYRYSARMSRPVTERQQGQPRSVCEVAWRAQLRLCTRYRRLSARGMHANKICVAVARELAAFLWEAGRLVDYPAREEKALTSK

SEQ ID NO: 65042 - protein, 331 aa, unidentified
MKKKDVIGIDVSKLTIDAYLKLAQAHAVFSNDTKGFKQLVKWIRKHTDCKTEELLICFETTGLYSLQLASFLSQSNIDFVMENPIQIKRSMGLVRGKDDHVDSKRIAEYAYMRKEKLKLTQLPSEELIKMQNLLAIRERMIRQKAGYQASLGEYKRVLVQQQQKDFFLLLINMINALKKQIRKADETLIEIIHSSSKLLSIYTLLTSIKGIGVILAANIMVTTICFTKFNDSRKYACYCGTAPFKYSSGTSINGRTKVSQMANKKMKALFNLAALSAIQHDPELKLYFDNRMANGANGMSTINIIRNKIIHRVFAVVKRGTPYVVMAKYAA

SEQ ID NO: 65043 - protein, 470 aa, unidentified
MAARKDKADGAGVPGHGGDGAEVAEELTQVVAYAAAIDVAKGSGMVCTRVPGSRPDRRRQKVWQVGATCGQVTALMDHLRAEGIQRLVLESTSDYWRIWHYLAEAAGLEVWLVNARDVKHLPGRGKSDTADCVWHCKLNERGMLRRSFVPPQAVRDLRALTRTRSRLAQDQARHQARVEKILEDALLKISVVISDLFGASGRRFLDALVAGERSPAALAALGDPRLKATRKELEEALTGRFRDIHATEIALHLRLIDAINAEITALDEQIGQQLAAVPGTAPACTGCGLAGGGHTPDCDDLGILLLGLADRLDEVTGIGAVNGRAIIAELGTDPSQFPTPGHAAGWARLTPRSRQSGETARPGRTGKGNRYIRGALGQAVMTAAKTDTRLGAMYRRIARKRGKQKAIVAVARVICEIAWILICDPSARYQELGPDYYTPRSPARQTQARIREIERLNPGKKVILADDDAA

SEQ ID NO: 65044 - protein, 412 aa, unidentified
MQDILTCAMGLDIHRDVIVACLAKGELGTDPEIEIRSFSTLIPEMRKLRDWVLEAECRYVAMESTGIYWQPIYEMLEPCFDGQISILVVNARHMKNVPGRKTDMRDAQWIATLLRAGLLKGSFIPDKTFRELRHLTRYRKSIVRDITAQKNRIDKFLQSSGFRFTAFLSDAFGASGRNIIRHLMEYGNISREALDRCLKTQTRKRIDEILIALNGSLSEHQRGFLRMIFGHLEALEQHRHTVEDAITKEITKHEEALSLLCSIPGIDVTAAAAIIAEIGTDMSAFPDSQHICSWAGLSPGNNESAGKRKSDHINKGNPYLKSMLCEVGWVISGKRSLYLSGWYWRIKQRKGAKRATIALARKLLALIYTMLKTGSPYNEDCFEIRRKQSERKRASRMVNELQKLGYFVVAPG

SEQ ID NO: 65045 - protein, 355 aa, unidentified
MNSEKYIGLDVHQATISVAVMDSRGKVVMESILETKASTILEFFAGLRGTLSVTFEEGTWAAWLYDLLKPHVAKVVVCNPRKNALLKDGNKSDRIDARKLAELLRLDNLKPVYHGETGVRMLRELARSYLTIVKDLTRVMNRLKALYRSWAIPCAGRDVYYTRHRTEWLGKIREAGVRRRAEQLYQQLDMLQHLRQQARRELLAESRKHPIIAKLRKIPSLGPIRSALAVALIQTPHRFRTKRQLWAYSGLALETRTSGEHRYVRGQLRRSKKQVSIRGLNKDHNHDLKGLFKAAATRASVQPGPFQDFYQRSLAKGIKPTMVRLTLARKIAAITLTLWKKGENFDAEKLKSQAA

SEQ ID NO: 65046 - protein, 447 aa, unidentified
MDTLVERCAGLDIGKADLKACVRTPGKNARRVREIRTFATTTVGLLQLRDWLTGHQVTVVGMEATGDYWKPVYYLLEDTFEVQLLNARHMRNVPGRKTDVADSAWIAQLIEHGLVRPSFVPPPPIRRLRDLTRYRTAVVQERTREIQRLEKVLEDAGIKLSTVASHTLGKSSRAMIEALIAGERDPQVLADLALARMRNKIPQLRQALLGRFTDHHAFVCRTMLERIDTAENTINKLTERIEQEIAPFHQTVTRLMTIPGVSARIAQILVAETGADMTRFATAAHLASWAGMCPGHHESAGKHHGGATRKGDSWLRGALGEAATAAARTKNTYLQARYRRIAARRGTKRAVVAVGHTILTSAWHMITAEIDYADLGADYYQRHQDRRAATIRLVGKLTQLGYRVTLDDAATVATLTEPIFVSDPRRLPPTYVTGGRCVVPPVTARDV

SEQ ID NO: 65047 - protein, 349 aa, unidentified
MLTDEVDYVVGVDTHRDQHTLAVVASPTGAVVAQCSIATSGRGYAQALRIAQDYAAAARVWAVEGAGHYGAGLARYLSGHGEIVLEAGRSPRDERRLRGKDDGLDAIRAARAALGSDQLALPRAGQRREALRLLLLARRGAVDVRRQALVQLRSVIVTAPERLRRELRVLPQQRLIERCSRLRRSASRAPDELAATLVLRTLARRVQAATAEAAELEAEIAAHVRALAAPLLDEPGVGPIVAAQLIVAWSHSGRIRSEAAFARLAGAAPIPASSGQTTRHRLSRGGDRQLNRALHTVILHRRLHDPVTKDYSARRVAEGKTRRDAVRLLKRYLARHLYRLLQNQEPLMA

SEQ ID NO: 65048 - protein, 414 aa, unidentified
MERVYERCAALDVHKAQVTACVHVPDRQGKRAELCAEFSTMTAELLALRDWLKGLGVTHVAMEATGVYWKPVYYLLEDDFELLLVNAQHVKNVPGRKTDVQDAQWLCQLLEHGLVRSSYVPPKPIRELRDLTRYRKSLVWERAREANRLHKVLEDANIKLDCVASRPFGASGKAMLKELCEGNNDPVALADLAKGKLRAKLPALHQALEGRFRDHHALLVGHLLAHIEYLDQTIAELSEEIEERMRPFEHKRELLCTIPGVAERTAEVIIAELGPDMERFPTHRHAASWAAICPGHHESAGKRHSGRTRKGDSWLRTALIEAAQSAAGRTKDTYLNSQYLRVKRRRGHKKAIVAVAHSILVAAYYILRDQVTYEELGGDYFVRREDQDRLTRRLVRQLERLGQHVTLEPALEAR

SEQ ID NO: 65049 - protein, 354 aa, unidentified
MEIYIGLDVHALSTTCAWVGPTGKRLGLTVVDTTAEDLRTAIAAIEGTKHVCFEEGTASAWVYEVLSPQVAEAVCCQPKKRGGSKSDANDAWRLAEELRRGALERIVFKAVREMAALRDAVRGHRLLNQDVARVKNRVKSIYRSRGIAAQSDDVFEPTRRAAWVAQLSPPYRELAELLGQELDALVPLRARAERRLLEESKPYAAIDRLSTIPGIGPIRAAYITAIVVTPHRFRSKRQFWSYCGLAVVTTSSGDWRRVRGNWVRANPAKPRGLNTNRNPWLKEIFKAAALSATKLRADHPLRIDYEAMIMRGMRENLARLTLARRLAATALALWKKQEVYDYSKRHRPPTSRAA

SEQ ID NO: 65050 - protein, 405 aa, unidentified
MYMTPQACREAGVAYPAYRLFVGFDVGKTFHVAHARLAGGGRVLTLRVGNDEAAVDSFLARCLERSGCDASEALVVVDQRRNIGTVVIRRARAAGMEVAYITGKREKKARELFPGVAKNDRKDAEVIAAAADGMPEALLPVPREDDGLEGARRLRSQLAFATKQATQCRNRVRAALVESNVAFERALDLSRPWALDVLERIGGPWQVLDAGRARLRRVAAGARPAELDALWDSLSGATRPTEEQVRSEAVTFPMLARRIRALDADADELSALVAEEVGDDETYECLLTVPGVGAATAAQLVASVSIESFRGSDRLASYCGLAPRDTQSGTTISSVSASPEGNRCLKNLLIFSCLSLVRGDSEFGRYYRACRARGMRHTPALKATARKRLKVIYAVMRDRRPYVPA

SEQ ID NO: 65051 - protein, 343 aa, unidentified
MESIYYIGLDVHKKSIAYCIKTVTGQIVCQGMVKAERRALRKWLVDLPGSWVGAMEATMFTGWIYDFLKPYAVELKVAHPAMLKAITAAKKKNDRADAEKLADLLQVNLLPECTMMSEELRELRRILRYRNLIVRTASKMKNKISGLLMEVGAVYDKRKLHGKRYFGQLLERVEDVPESVKDLLKLSRSSMELFEAVQKKLLKILREDSLISKRVELLRSISGVGEVMALTWVLEIGDPKRFSNSGQAISYCGLCSAQHESAGKEQRGPISKKRNKYLQSMLIEAANLAPYWNPQLAILYEKELTRGNRNRATLSVARKLVIYMLAVDRRGEPFMTEKESLVA

SEQ ID NO: 65052 - protein, 391 aa, unidentified
MIYIGIDVAKDKHDCFILSSEGEVLVDVFTIPNTMDGFNCLLQRIQDCTTPQDKMKVGLEATGHYSYNLLGFLLDNGLATYVLNPLRTNLYRKSLSLRKTKTDRVDARTIASMLLSDAGLKPYTDTAYHNEELKSLTRYRFDKVKERAKLKSSISRLVCILFPELEKLVPSLHIASVYALLTEFPGAKQIAAAHLTRLKALLETASKGHYKRDMALEIRDAARNSIGSWMPAKSLELQHTIRLIRELDDEIVEIEEQIHAIMDALNSPITTIPGLGFRMAAMIFAEVGDFTRFDSPDKLLAYAGMSPSTYQSGQLKNCYPHMEKRGSRYLRYALYNATKYVCHWDPTFAAYLAKKRAEGKHYNVALSHAAKKLVRLIFAMEKSRRPYCLAA

SEQ ID NO: 65053 - protein, 382 aa, unidentified
MTQAASRRKHSVGIERLYVAFELGWTSWKLGFCTRVDDKAWVATIDARDIGALKKTIVKARVRFGASPTCPIVSCYEAGRDGFWLDRLLKQMGVTNVVVDSASIQVSRRARRVKTDRLDAEALLKMLVRHVSGEPKVWHVVHVPTPEQEDARHLQREIRTLTKEQTRIVNRARGLLASQGVAVKMGRRGLIGSLESLRIWDGSPLPAGMKLRIEQELSRHTVVHEQLLALEAERNRGIREGADATAAISRRLMELKAIGPATAETLTREVFFRRFKNRRQLGSYSGLTPSPYQSGEMSHESGISRAGNRHFRGISVDLAWDWLRYQPQSALARWYQRRFGSGGPRMRKIGIVALARKLLIALWRYAQTGILPEGARRKALAV

SEQ ID NO: 65054 - protein, 431 aa, unidentified
MNDQEQIIAWIGVDWADEGHQVWEYNVGTGGKQNYSVQHSGESLHEWLIQLRNRYGGKRVAVVLEQARGSLIYALMSTDFLAIYPVNPQSLAKYRKALYPSGAKSDPADAELLGEMVRQNPEHFRAWMPGDAQTRTLQLLTEGRRKLVEDMTALTNQLTSVLKTYYPQALEWAGYLGSEQACAFLEKWPTLMELQKSRPFRIREFYQKYGRPSREVLNERVNQIQKGQPLTLDGAVVMASVMMVQAVVAQIRPLRLAIENYDQEIERLFQQHPDRVVFESFPGAGKVLAPRLLAAFGADRDRFQTALEVQEFSGIAPVTERSGKTIWIHRRLACPKFMLQTFHEFANCSWKFSAWSKLYYQQQRTRGNDHHAAIRALAYKWIRIMFRCWKDRTPYNDSLYVKSLTKRGSHLAEGLNKPVPDSTAEILSTVS

SEQ ID NO: 65055 - protein, 320 aa, unidentified
MTSNERFVGIDVSKGTLDVAIRPDGTHRSVPNTDEGFDQLVTLLRPLGPVLVVAEATGGYQKRVVAALSLAGLPVAVVNPARTREFAKALGRLAKTDAVDAQVLAEFAERVRPLARPLPDAQAQQMQELLARRGQLVGMRTMERNRLGTATSRTVRRSIEAHLAWLDEQIDAAEKELDAAVESSDVWRAKDELLQSIRGIGPGVARTLLFELPELGTLSREQIAALAGVAPVNRDSGRWRGRRFIVGGRAVVRSAVYMATHAARKWNPVLRAFADRLKAAGKPAKVVLIAVARKLLVIANAILRDRKPWRDVTTNAVAAA

SEQ ID NO: 65056 - protein, 387 aa, unidentified
MQKPHDNSKASPAAFMQDNTLIAVIELGLSNWLVAGLIPGVSREPLKKLEPNPEDLLKLLHGWRDEAIKAGRPITRIAVAYETGRDSFWLARWLRERGIDAHVIHATSVAVSREHRRAKTDRLDTAMLKRGFLGWLRGERGHCTVAIVPTMEEEDAKRPHREREGLVHEQTRVVNRMKSALIQFGVRNFNPKLRKASVKLETVRTPEGKSLPPNTIAALRRDMERLRIIKEQIKAIEQARLQQFAQKPEALANRMIYLLVRIYGLGLETADLLVHELLSRTLRDRKAVARYAGLTGSPDESGSKRREKGLSRSGNARVRKIMIQLAWRMVKFQPDSALVQWFKQRTENAKRSRKPMIVALARKLIIALWRYANDGVIPAGFRLHSAA

SEQ ID NO: 65057 - protein, 355 aa, unidentified
MKNQAIQYLALDVHQATVVATVRDEQGAIRMRATVPTEAGAILGLVRSAGPRVHIAFEEGTQAQWLHDLLVPHAERVVVCNVRGRSETSNKSDRIDADALSEMLRVGSVKSVYHGASSVLTLKELVRCYLNLVDDSTRVMLRIKALFRARGILTPGTSVYRASERAKWLAKIESRGARMRAESLLRQLDALLDLRPKAKAARIAEARRQPGWKVLRSIPFFGPVRVALMLAIMATPFRFRTKRQLWPYIGLAVVTRSSADQEFVKGKLRRSRRAPLTRGLNRNHNPTLKNVFKGAANAAAAKPGPLKDFYDACVGRGVREELAKVTLARKISSIALRLWKKGELWNPDKLTTQTI

SEQ ID NO: 65058 - protein, 405 aa, unidentified
MLETIVKRVAGLDVHKMVIVATVLLTQENGKTLTETRKFGTFRKHRRQLARWLTRCGIELVVMESTGIFWKSIFETLETAAIKTYVVNARFVKNVPGRKTDVIDSEWLATLARAGLLKPSFIPPKDLRELRLIGRHRMKLQGMLAGEKNRLHKILDDAGIRLGGVVSDINGVSAREMVAGLIENKPVEELVQCARGRLKSKVEELHDSLSESISERHRFLLQKIHAHISILESEIQEMDNYLFEAMTPYQEQWGILQTLPGVDKFSSAMLLIEIGTDMEQFGSPGRLASWAGMCPGNNESAGKRKSGRARKGNRSVRRVLCEVANAARKTNSQFKGKYQSLVIRRGHKRTIIALGHKVLRVIYSMLKNNQPYWDPGIDYEALTVKRNAPRWLRALNKYGYLPAEA

SEQ ID NO: 65059 - protein, 423 aa, unidentified
MKKRIYRRMPVNDFQPNSITHADLGGKLVFAIDVAKVDMVAAIAAADGRVLQTLCWKAPEENLRVLAILRHFRLAGIPVEAVMEPSGTYGDVLRHQLEQDAFPVFMVSGKRTHDAMEIFDGVPSLHDAKAAAIIARLHADGLSTRLRDEGPDRRQLRAALSIMDLHQERYLQLVHRLESWLARHWPELPMLIELTSSSLMALLARIGGPADVAAAPDKATKLLRGISHRLIADDKIAAVIASAHASVGVPLVGLERDALMAIADDAYRAHRAFASAKTKVEALAATTPAAALAPVVGHTTAAAVFAEVGDARSYSCTRAFLKAMGLNLKEKSSGTIHGQIKITKRGPSRVRQYLWLAAFRWIQKDPIANAWYQRKKQRDGGRASRAAVALMRKLAKALYHVGRGATFDSSKLFDVRRLQLSEG

SEQ ID NO: 65060 - protein, 387 aa, unidentified
MEVRMENTPPAGTNNDPVRCFVAIELSKSSWVLGFQTLLAKQTSRYQVKACDAKALLELIERVRSRVVRELGRPVEVMSCYEAGYDGFWLHRVLEAHGVHNHVLDPASLQVNRRARRPKTDRIDADRMVRALIRHLRGEPEACSVLRVPSPEQEDARRLHRERDRLIAERVAHVNRVKGLCATQGIYDYEPLRRDRLKRLDNLRTGDGRALAPRLKAEIVREIKRLEVVLEMIATVEAERDAILKEKKSTHLNADKIKMLAKLKAIGAEFSTTLVGEVFYREFANRRQLGSYVGLASSPFCSGSLDRDQGISKAGNPKARTMMIELAWTWLRYQPESALSRWFRERVGNLKGRPRRIAIVAMARKLLVALWRYLQTGVVPIGAELKA

SEQ ID NO: 65061 - protein, 437 aa, unidentified
MAMRVEIEAEPAAVEGRERCAGLDVHRSTIVVCVTSPVGGGRLKKVWNEFPTTSAGLVRLAEWLAELEVSHVAMEATGVYWMPVYAALEKAGVFDLTLVNAHHAKALRKRKTDIKDAQWLAYLVRHDLVNKSFVLAQPFRDLRELTRYRRKLVEAQASERRRLIKLLESADIKLAGVISDIFGVSGRAILCALIAGGQSPFDMAKLARGQLRRKRPQIIDAVSVEVSEHRRAILAMQLARVEAAEADIAKIDEMIAHHLEPYQEFVERLVSIAGIDWIIAAIVIAEIGTDLSSFPTVQHFAAWIGVCPGNNESAGKRKPIGARKGNPYLVTALCNAATSAARTRGSFFKATYHRIKSHRGGGRAALAVAHKIAIAIYYMFTRKTSFRDLGEHHHEARHAQRSVNRYLRGLKRLGYTVILQPQTAPTPQQTQAIANPA

SEQ ID NO: 65062 - protein, 418 aa, unidentified
MRVLFIGDDWAEDHHDIEIVDADGRRLARARLPEGLEGITRLHALVAEHAPSSWTEQPDDQAAGQVVVGIETDRGPWVTALRAAGYQVFAINPLSAARYRQRHSTSGAKSDAADAHLLAEIVRLDRDHHRPIAGDSDLADAVKLLARAHQTATWERTRHVLRLRSTLREFFPAAVELFEDLAAADALALLERAPDPGRAARLTRAQVTAALKTARRHHVEAKADTLMAALRRPTLRQSSILEGAYAAIVVAEVKIIRALNEQISALGTVVGEHFGRHPTADIYHSQPGLGTVLAARTLGEFGDDTGRFSDARGRKNYSGQSPITRASGKKTVVLARFATNRRLGVALHLQAYSALTSSPGARAYYDSLRARNIGHHAALRQLANRLVGILHGCLKTGTNYNEDTAWAHRRADTDAIAA

SEQ ID NO: 65063 - protein, 417 aa, unidentified
MNAVVHCIAGIDIHKKMLAVVVREQIGEDITYTKRVFGTTKIEIEHLAGWLQHHHTSEVVMESTAQYWRPVWNGLEDHFQLHLTHPLKTRAPRGRKRDFRDAQRLADRWHSKDLEESFIPAAEQREWRWITRARVQLKRKMAVVRNHVEGLLEQGGIKLSSVATDVFGVSGWAILEKIAAGQTDVDILIAEARGRLSKKRAELKEALAGRLGPNHRLLLRQFMAQIQLLRNQVEELNQALAEAMKEHVAALVRLTKIPGIDLYAAQELLSEIGPGATAFASASQFASWIGVCPGSQESAGVNYSPRSAKGNRYLRRILCQIAWAAVHTKDTFFGCLFYRLKPRIEGKGAAWAVAHRIAKVVWLVLHNDVEYEEKGPALPDPRKQARKFKRLVRELNLQGMDVRALIDLELAAVNAIG

SEQ ID NO: 65064 - protein, 366 aa, unidentified
MFEGITFIGLDVHKRSIAVAVRRPGTVAVHEERLPHEPGAVARWARRWKRTSGGKLVCAYEAGACGYALQRQLEGLGIECRVVAPSLVPRKPGERIKTDRRDARKLAEYLQGGHLTAVRSPTPAEEAARDLCRAREDAKQDRMRCRHRLAKFLLRRGQSYPTGRKPWTLAHHTWLQGLSFESPAAQVVFDDYRLAVAQLDARIEALDRQIEIVAQEPLYRSAVGALRCFRGIDTRTALGLVSELHGIERFGRPRALMAFVGLVPSEASSGERQRRGAITKAGNGHARKLLIEAAWHARHKPALPAALRQRRQRQSPEIIAMADVAQQRLHRRFWRLVQRGKPSTVAATAVARELTGFVWAALHAVH

SEQ ID NO: 65065 - protein, 350 aa, unidentified
MTKINSHHSDANIIYMGIDVHEATYNISLFNQGEEIFSQHCNATYDAIRKIVKRFRSFSFCAVYEAGAFGYGLYDQLKKDGVNIIVTPPSKVLRSQDDTVKTDKRDARKLAQHLSAGLLKAVCVPSMQIRQDRELLRTRDQLVDQRRRIYQQIQSKLRYHNLPLRSKGTITILNKTVLFQMPLSVPMRIAFSELINLYDFYSQRLRFLRNEIIKLSESKPYATAVSLLQSIPGVGLFASLAWLLELPAMQHFQSDDKLASFLGLTPTESSSGRKRRLGSISKTGNPKIRWLLIQCSWILIGKDPVMQQCFSRIKRRRGSQCAIVAVARKLSARMRAVLIHQTPYAIGTIS

SEQ ID NO: 65066 - protein, 344 aa, unidentified
MDQYVALDISLREVSVCVLDATGTVAFEGRSPSDPRCLAALIRSKAPRAVKVGLETGSTSTWLAHALLAEGLPVVCMDARHAHAALSIRPTKTDRSDARGLAEMVRVGWYRAVAVKSLEAHERRALLAARHRLVVMRVDLDGQIRGLLKTFGLIVGPGNSDAFLRRAEALAEGHPVLSPLVTCLSEVRRHVAAQISALDKQIGRIVRNDTTLRRFVTVPGVGPITALAFLSTIDDPSRFRRARDVGPYLGLTPRRHQSGEIDRTGRISKCGDGFTRKCLYEAATVLLTKVQRWSPLKAWGVRLAQRIGAKKARVAIARKLAVILRCIWSDGTQFWWTKQETAMA

SEQ ID NO: 65067 - protein, 337 aa, unidentified
MLYVGIDVAKNKHDVTALNVPGKTVLKPLTFSNNKAGFELLDLSFRQLNQDCLIALEDTGHYAFNLLNFLHEQGYKVYTYTPLLIKEFAKSLSLRKTKTDKKDAHGIALKLLSDPNREQFQHDNRQVELKILARHIHRLKRKQSDWKVQYTRCLDIIRCLDIIFPELDKIVGKHSEYTYQLLTCYPNPQKRLEAGFDKLIEIKRLTASKIQDILSVAPHSIGTTSPAREFEIIENIKHYKRLIDKAEKCVNDLMAEFNSVITTVTGIGNRLGAVILAEIQNIHAFDNPAQLQAFAGLDSSIYQSGQIDLAGRMVKRGSPHLRLAQLATAKAQVVYLE

SEQ ID NO: 65068 - protein, 376 aa, unidentified
MKKNNTCPKSSKRKKTGRKTRSKTRKESFTIGMDLGDKTSHYYVTDCDGEMVRESTVATTKKGMQQRFSCLPRCRIAIEVGTHSPWVSRLLSSLGHEVIVANARQVKLISASTRKSDRLDAQTLARLARLDPELLRPIRHRSEKAQGDLMQVRVRAALVDTRTGLVNTARGMAKAMGERLPACDADQMGVEKMQGLPAMLVEALRPLLETVEVLTKQIKASDQKLEQLAGSDYPETELLRQVSGVGSLISLTFVLTIEDPNRFRKSRDVGCYVGLRPRRSESGESRPQLGISKEGDVYLRKLLVQGAHCILSHKSPDTDLKRWGLKLAGKGNKNAKKRALVAVARKLAILLHHLWVNGEVYEPLRNSKPLEAKAAA

SEQ ID NO: 65069 - protein, 345 aa, unidentified
MELHTIGIDLGKTVFHLVGLNQRGEVVVRKKFSRKQLLHFTANLQVELIGMEACGGSHFLGRALREQGHEVRLMPAQYVKPYVKTNKSDYIDAEAIAEAVERPKMRFVPIKSDDQLDLQSLHRVRERWVMRRTAVINQIRGLLLERGITLRQGRRHVDEALPGILEDASAKLSGAVRLLLAQLKLELDHLQMRIDEADAVIQKIAGENEACRRLVVIPGIGPVTATAIIAAIGNGAAFKKGRGFSAWLGIVPGEYTTGGKQKLLGISKRGNSYLRRLFVQGARAVLQQRAKQSSGLSTWLAQLTTRVHSNVAAVALANKLARMAWAVLAKNEPYRPPMLAAAATT

SEQ ID NO: 65070 - protein, 386 aa, unidentified
MQASTVATPTAGHIGTIFVAIELSQRSWRVALHSPDKDKISHHKLEGGDHAELLALVGRVRERAARALGGVPAVASCYEAGYDGFWLHRLLLAAGITNYVFDPASIAVDQRARRVKTDRIDGERMLRTLMAYLRGEPRVVRIVRVPAAEQEDARRGSRERDRLIKEQTAHTNRIKALLRLRGMAVGNPRRRDWLSWLATQRDWQGQAVPPRMLSEIRHEHARLMLVRDRLDALAQEAAAAEPMPAEAEMTRRSELLRRLKCLGPAFATTLTSEVFYKDFRNRREVGSYFGLTPSPWRSGGIDRDQGISKAGNPRARCAAIELAWLWLRHQPDSKLTLEYRKRTLDAGKRIKRVAIVALARKLMVALWRYLTTGLVPEGAALKAVKI

SEQ ID NO: 65071 - protein, 355 aa, unidentified
MDSKKYIGMDVHKESISIAVMNGTGKIVMECVIETKASMILQFIDGLRGDVHVTFEEGTSAAWLYDLLKPHVTKLVVCDPRKNASMREGNQSDKIDARRLAELLRLNHLNPVYHGEHGLRSLKELVRSYLTITKDLVRVMTRVKVIYRSWAIPCTGKQVYAPRHRAEWLGKIGEPGVRRRAEFYYQQLDALRTVRQEVRRELLAEGKKHQAWKRLCQIPSIGPIRSAVLLGILQTPHRFRTKRQLWTYSGFGIETQSSADHRSVNGQLERVKKQSSIRGLNRNCNHDLKNLFKGAAIVASSKPGPFQEFYTALLTKGIRPEMARLTLARKIATIALIVWKRGVCFDAQHLKPQTA

SEQ ID NO: 65072 - protein, 358 aa, unidentified
MEAQGKKIDFTGQNIYAGFDAHLKDWKVTIMAEDIVYKTFTQPPKPDILYKYLTEHFPGGTYHTAYEAGFCGYWIHNKLVSFGIKSIVVNPADIPTTDKERVQKEDKRDSRKIARSLSSGDLTPIYIPSIKTQRDRSLLRTRAMLVKDLARYKNRIKSFLYFYGISIDDSFKKSQSHWSNRFMSWLENIDMGEESGKEALHILISECKNLRASILKVTKQVRRLSQTETYGEQVILLRSIPGIGLLTAMTILTELETINRFKNIDKMCGYIGLVPSTKSSGEKERTGDITPRGHNVLRSAIIESSWTAIRNDPSLIRSYLSYIKRMDSNKAIIKIAKKLLSRIRFVLTNNKPYICSII

SEQ ID NO: 65073 - protein, 365 aa, unidentified
MKDEKRRYVGIDLGKREYTMAIISEKGKMSIHKGKTTDQGRAALYRLLEKSDKIALEAGNMAFRMAREIEQRAGSEVRVLNSAKLPFIWDAPTKTDKEDAMKLARLVEERRDEKLPIVPLPSEQEMERRELIANYGREMKGRTRVINTLHSLFWKQGHTDVVRKHLATVEKARQAIKVLTGQIREDAEWQIKHFELYEQRINELKAKIKGEAKKDEAMQQLQTIAGVGPVVAYAYVAHVGDGSRFTKGAQVSNYLGFVPRLDYSGTIQRNGHITKRGNAYLRGLVVQAAWMMVRSKKGGALREMYIYKTSEKGHSKKKTIVSVGRRMAELMYSVLRNKTGYEPRPWKGVRDKTAASVLAEQAMCA

SEQ ID NO: 65074 - protein, 442 aa, unidentified
MRDHSEAFIGIDTSKLRNAIAIAEGGRGGEVRYFGEIDSADAATRKLVSKLAVKYRSLTFCYEAGPTGYGLYRLIRSLGHECVVAAPSLIPKKPGVRVKTNRRDAVELAKLSRAGELTAVWVPDERHEAMRDLSRARQAAKKHLTSKRQQILSLMLRLGRHYPGKKTWGTAHMNWLTQQKLEHREQRIALEELLEGMRQEAERVERLEQAIREAVPEWSLAEVATALQAMRGIDLVAAVTVLAEIGDLSRFQSPRELMGYLGLVPSESSTGDKVKRGGITKAGNGRARRILVEAAWSYRHPARVSREKQPKVAAAPRRVREIAWKAQMRLCGRFRSLTRKGKLPSIVATAIARELSAFIWAINREVMAPGEGLEIRNVPIARSVTPCSPPSRRGLATADEVAGAPRRPALTAAARGVPAAARVGTKKRASRSNKETGLETLD

SEQ ID NO: 65075 - protein, 340 aa, unidentified
MEHIVGIDLHSDNGYYGIIEPDGKRVFKKRLPNDLPTVLSTLEPYEETITCIVVESTYNWYWLVDGLMDNGYNNRVQLANPAGFKPYEGLKHGDDKTDAFFLTELKRLGILPVGYIYPKEERPVRDLLRRRMMLVQQRTSHILSFQSLITRQTGTKMSCNNIKGLQEDYIEELLDEDYLILAGQTNISVVHFLTEKIRRLERAVLKRIKLRPAYERLLTVPGIGKILGLTIMLESGDIGRFVGAGNYTSYCRCVKSKRMSNNKKKGEGNRKNGNKYLEWAYVEAANFARRFCPEAKRYYQRKMAKTNQIVATKALASKISKACYFIMRDQEVFKTEKLFG

SEQ ID NO: 65076 - protein, 394 aa, unidentified
MRFAGIDIAAETHVVALVDEHGALLVTPTPFAEDAAGYQTLRTRLGDPEDLLVALEATGHYWQNLFAVLAAEGFAVALLNPMRTRRFAGEDLARAKTDAIDALGIARFAAQKRPAVTRLPAAATQELRELVRLRDRLRQEFGDRVRQLHRLVDLGFPEFTRVIPDLKGRLATALLAAYPTARAFAGVSVARLAAVRYDGVHRVGAALARALLAAATVSVGQHHGPAYQRQVRYLCEDLELLRRRIDALEEDMATTLQAHEVATLLTTITGIGVQTAARLVGELGDPARFRSAAALAAYVGVVPGTRESGKRRLTHARLAPTGHARLRAALWMPTLVAVRTNPWLRAYYARLRARGKLPKVALIAALHKLLFAVYSVAKHRRPFVPHLTVQGVEA

SEQ ID NO: 65077 - protein, 416 aa, unidentified
MNTVPTPTSYRVLIGLDWGDAQHAVSLLPPEGPIERSTLQQDPADLDRWFKELRARFPDTQIAVAVETSKGPLVYALLTQSFFTIYPIHPATSARFRTAFRPSGAKDDAPDADVLLDLLRGHRDKLAPLTFDDTATRRLAGLVEARRKMVDRRTGSVNALKHLLKSYFPLALKVGGEDLYAPLMLDLLTRWPDLASLKAARPGVLKQFFYKHNVRRPGQVEKRLEQIKEALPLTTDEAVISVAVSEVQALVDELNVIQKHIGKFEDQIAQAFKAHPDSNLFRDLPGAGPALAPRLLVAFGSDRSRFPDPQSLQKYSGIAPVREKSGSRSWTHWRWHAPKFLRQTFHEWAGQTVVWSQWAKEFYAAQKQAGKRHHAILRALAFKWQRILWKCWKNRTPYKEEIYLAARLKQLQAAKA

SEQ ID NO: 65078 - protein, 379 aa, unidentified
MPSENTVYISIELSVSSWLVAARLPGTEKPRLHRLEGGDAAALLKTISDLRLKASAKLGSTAEVACCFEAGRDGFWLHRLLTAHGISAYILEPTSILVNRRARRAKTDRLDAEGMLRVLATWLAGDRQVCSMVRVPTPAEEDAKRPHREREQLVHDKLRIENRIEALLFTQGIRKRPSLRSWERDVAALRTGDGRALPPLLRAELDRLRRRLVVALELIRELEDNRTQAMKEVDVADKMIGKITALQRIRGIGENFAAVLAREVFYRSFDNRRQLASYVGITPMPYQSGGMDRDRSISRAGNPRARTTMIQLAWLWLRYQPDSALANWFRERVGTLQGRTRRIAIVAMARKLLIALWRYVETGVVPDGVMFRPNSVAVA

SEQ ID NO: 65079 - protein, 354 aa, unidentified
MNIIAFDSHKHYTLARVEKENGQKIVEQKINHRHGNIYSFLTDFEKGTKVAVETIGNWYWIIDEIEQADMEPRLVHARKAKLMLGSINKTDKLDVRGLNLLQRTGTLPTVWIPPAEIRDKRELARTRMVFANQRTRLKNRIHSVIDKYGYQDRFEGITDIFGSRGRIILNDCVKVLPQQTAYTTRLLLVGLDTVCQRIKSIEERMKIVFKTNEDIELLMSMPGIGFILAVVISLEAGDISRFASAQKFAGYCGTVPRVHSSGDKVRYGALRTDCNHYLKWAYSEAGNSVAVNREIHSQRHVSKLYNRIRYRKGHCKAVGAVGRHLAEATYWILSKRERYIERGFVEAGISAVTS

SEQ ID NO: 65080 - protein, 332 aa, unidentified
MMAQNELVVVGIDVAKDKVDACIRSLSQRQTFPSTAEGRRALIRWLRKHKVGKAAMEASGGYERDWAKLLREARIEVRIVDPKRVRSFAQSAGRLAKNDAIDAEMIAWFAETFTDAPGQAYDAEREKLVQIVNARQALLDVQTSLQNRSEHSAPDVVQKTQARLLKRIALEVAKLEAAITAMIKAAPRFAELAEIIESVPGLGKVTSAALIAAMPELGQVSNNIATALLGVAPYDDDSGQRRGDRHIKGGRRKVRNLFYMACLGAATRHNPVLKAFYDRLIAKGKEPKVALTACMRKLICILNTMIARREKWDTTRYKMSDPARLPPSACTA

SEQ ID NO: 65081 - protein, 425 aa, unidentified
MQIVYRRCGGMDVHKKSVVVCLMLIEESTGEERKQRRTFGTTTRALLELAAWLKLWGVEVVAMESTGVYWKPVWNVLEEELGADCKLMLVNARHYKQVPGRKTDQKDAEWLAELVQHGLVKASFVPPKATRQLRDQVRARASLMEDHTAVANRLQKLLEEANIKLSSVASNVLGVSGRRMLKELAKGNRNAAELAELAVRRLREKIPQLREALEGRMSAHQQQMLGDYLQQLEFLEQQVEQLDRRTEEHLKASGQIADLELLDTIPGVNYVVAAEILAELGPDVEKQFPTAGHVSSWAGMCPGNHISAGKRYSGRTNKGNVWLRRALCQAAWAASKSNKTYLAVQYKRWQARRGKKRAIVALAHQILVIAYTMLKTGTPYRELKPEECKSQASRPRNPQAVVRRNVQQLNALGYQVTLTSATPPS

SEQ ID NO: 65082 - protein, 423 aa, unidentified
MTKKSEVRIAGFDCAEEVHQVVLLDVEGKVEREMEIINRRDHMEEGLAELLLLLPEGTKLVVVLESRRSHGKIVSEVADQLGCEVWVVNSMALNHYRSVEGQPHKTDPWDAFLAARMAYDEKLACRVAEEKTQEERVLTRLTRFHEQVIKTRTQHIARLRANLLELAPEVLHSSWKGPKPNSKAIVYLLQRWPAFEGMEKARLGTIEKILHKCRYGSKAPGIAKSLRDMARRIGIVGAERAAIAMEINHLINQIATCDRLLHDLKAQIGEKVEAHEIGLKLLEVPGVGVITAGVVIGELLPIARHANEGQCATYAGLTPLSRQTGKGKNKRRIARGVNKRVLRALYTSAVAAIKVSAIDNAYFEKKIRDYSGHPKPTVAAFIALARKRHQVIYRLMTTTESYDKEKLITSHLARVEMARAVAA

SEQ ID NO: 65083 - protein, 345 aa, unidentified
MKYYIGLDAHSTTSTFAVVDENGQCILRETVKTSEQSLVHVINKIQGERHMTFEESTISQWLFLQLKDKVDHLLICNPTYVAKKQGAKTDFRDALHLAQELRTNHLQPVFHDTSHWMEIRTTVSGYLDIVEEIVRFKNRLKAVFRAEAIQTDENSFYKNNSRVKELKNPSAKFVAEKLFNQIEFLESEKDKYKEVFERNRKKYRPIRNLMTIPGISIIRANIIAAIVCQPARFENKHRFWGYCMLVRHIQESGGKIYGNKRFFGRRELRNVFIGAAENVMRLDGELRDRYDALRAKGVDHKDAKLNLARQIASISLCLLDNVRKRASPKGLPTRPLCVMRFRSWK

SEQ ID NO: 65084 - protein, 417 aa, unidentified
MRIVRPICCGADIHKDLIVATIAATNQDGITEYIQSSFSSQNFDLVRLKAWLIEHHCFEIAMESTGKYWIPVFNVLEGEIKVFVVHPKYTKAIKGKKTDKKDSKWIADLFKHDLLKFSFIPPKEIRELRELSRYRIKLIAMRSSERNRYQNSMTISNIGLASILSDPFGKSSRAVMKEVMLSSSVTEEKISKLLERNAKKKVKEVLQSLVGSHIESDQRLKMNIASQHMDQIDSHVRRLETEMAIRCIPYATLINLLLDIPGISYLSAMTIIAEIGTDMSVFETSKQLSCWAGLAPANNESASKKKSVRISKAGSYLKPLLVQCALAAINSKSNPYYRIKYNRIKKRRGHKKAIIAIARMILVNIYHILSTGEVYSPCDMEQIINPKPVKKVMTIQNAIEFLQSQGFDTSKLISSSS

SEQ ID NO: 65085 - protein, 371 aa, unidentified
MKKDSKCRPNPKPSKQARRLGPTTIGMDLGDKTSRYCQLDKDGQVIQEGSVATTKKGMLQVFGAMKHCRIAIEVGTHSPWLSRLLDRLGHEVIVANARQVKLISQSSRKDDRLDAQTLARLARVDPQLLRPIRHRSEKAQQDLMLIRVRAGLVEARTSLVNTARGLVKALGERLPKCDSDQMKVARLEGMPASWRTSLEPLLKQVESLTETIQALDVKLEQIARTEYPETELLRQISGVGVLIALTFILTVEDRDRFQKSRDVGCYVGLRPKRSQSGESDPQLRITKEGDLYLRKMLVQGAHCILGQRGPDTDLKRWGLKLAARGGKNAKKRAIVAVARKLAILLHRLWVTGEVYEPLRHSQARQRSQKVA

SEQ ID NO: 65086 - protein, 394 aa, unidentified
MKLVGIDVGKNSHHFCVMDKETGEFNVTPSSFPNNKEGFDFLINSLKPYSKKSILIGMEDTGHYHVALLKFLLSNGYTVALINPKTTDLTRKMEGGITKNDKLDTITICDVLDTPERKKQYRITKVDRFDLYEQRQLTRHHHNLKEELNVYCNRLQKSIDLVFPEFNTLFSSKYSIVYMNLLKTFGSAEAIASTDIRTIRKCFEIKGRGNRISLTPEKLKECAKNSIGISSEVETIQIKHLVSQITLIKEQIAEIDKKIEEFSITNNSPILSIPGISHFSGTSILAELGDIGNYSKPSQIIKFAGVAPYHYESSQYNAQHTGITKKGSKYLRKTLYQIILPVINNNPVFKKYYLLKISQGKGHRCAQGHCIRKLLRIIYHLLETGQSFDPALLR

SEQ ID NO: 65087 - protein, 415 aa, unidentified
MEIVYPRVAGIDVGKKIVAVAVRTPGDRPGQRHQQLRKFKTFYPVLREMVGWLVAQGVTQVAMEATGVYWKPVFHALCEAEQLEVLLVNARHVKNVPGRKTDAKDAEWLAELCEVGLLRGSFIPPKEIAAVRELTRYRKKLIEARTSELQRLCKVLEDGGVKLDSVASSITTVSARAMVEALIAGERDARVLADLARGVMRKKLPDLAMALAGRFGAHHALLARMHLEHIDQLSGMIERLDGEIDQVVAPFAEQVGLLRTIPGIGERTAQVLIGEVGVDMSRFPTAGHLASWAGLCPGNNESAGKHHRGKTRKGNREVREALVEAAWAAGRTGTYLGARFRRLHRRFGKQGGSKAAVAIAHNLLVIVWFVLHDRAGYRDLGADYFTRHDNPDAKKRRLIRELQVLGYTVDLTPAA

SEQ ID NO: 65088 - protein, 419 aa, unidentified
MSRSVGRAIGLDVHRDFCEVAICEEGVVRSAGRIETSPDALELFARSLGGDDRVALEVTGGAWEIARVLEPHVQRVVVVSPDDTGIRQARAKTDRLDARTLARLLWAGELDAVWMPDERCRVMRRRLARREQLVRSRSRAKNEIHAVLMRRLKGKPPVSDLFGVKGRKWLRELALPVEEAETVEGALRHIEFLDQEIAAVERLIAREALGSADACRLLTVPGVNVICAASFLAAIGDIRRFRTSRQLVAYLGLDPRVRQSGSEPARSGRISKRGSASARWALVEAAWSVVRQPGPLHAFYERIRARRGHGKAVVASARKLAVLFWCLLTRGEDYAHQQPSLTAKKLRLLEIRAGAPTLKGTKTGLFATRERMRHAERELAQQAEASYTRMVSDWQAARPEKAKPVGRAEVGASVTPGRA

SEQ ID NO: 65089 - protein, 368 aa, unidentified
MDEGITAYVGLDAHAESTAIGVAQADRTAPRFVGTVGAKFEELTRALGRLGKPEVLQIVYEAGPCGFTLARQLRQAGYQCEVVAPSRIPRRAADRIKTDRRDALLLAGLARAAQLTYVSVPDERDEAMRDLSRARIDAVRARLKARQQLKALLLRHDRRYSGKSSWTAAHERYLSTMSFAHRAQEIAFAEYRRAVSEAQARVELLTQGLTGELEHWRMCPLVRALMTLRGVDSVSAITLVAELGELKRFAHPRELMGYLGLVPSEHSSGKSRSLGAITKTGNTHARRLLIEAAWNYRFPARISAPLQRRQEGQATQIRDIAWRAQVRLSHRYRRLNARGLQYNKICVAIARELAGFIWSIGQHVSISS

SEQ ID NO: 65090 - protein, 377 aa, unidentified
MHSENIAAYIGLDVHKETLAVAIAAPERLSEVRYYGTINNEAQAVRRLFQKLQGLYGNILSCYEAGPCGFGLYHQLTAMNIKCQVIAPSRIPKSPTDRIKNDHRDAISLARLLRAGELTPVWIPDLTHEAMRDLIRARAAAKRDSRVARQRILSMLLRTDKRYAGKHWTGKHRTWLANQSFSQPSQQIAFQHYCQSLEQIEDRILQLDQEISRLLPEWSLCNLVCQLQALKGVGQLIAITLVAELGDFSRFSNPKQLMAFLGLVPGEYSSGNSIRPRGITKVGNSELRRLLYEAAWSYRTPAKVGAWLIYYRPDSVTQYSKDIAWKAQQRLCSRYRTLTAKGKKSQVAITAVARELTGFMWDIALAAQSSFSQQKQN

SEQ ID NO: 65091 - protein, 378 aa, unidentified
MPETPITVLSARPAGACQLPVGFLGAAGKSMTPQKQPVTAGVDTHGATHHAAVVDQVGRHLGDHEFPATASGYRHLMTWAKSFGEVQCVGVEGTGTFGAALTRVLLSHGLKVVEVDRPDRKLRRYRGKSDPTDAYAAALAALSGRATATPKARTGVVESIRALRVVRRSAVKARTQTVNQIKALMITAPEQLRDQLRELSLSRLIHTCARFRPGSDLTDPSVATKTALRTLARRHEALSVEISEADKALAGLVGSAAPQLLELPGVGVEVAGQLLVTAGDNPDRLRSEGAFAQLCGVAPLPASSGRTDRHRLNRGGDRGANNALYTIVLSRLRHDEATRDYAQRRRSQGLSSREIIRCLKRYVAREIHRHLVATLDTP

SEQ ID NO: 65092 - protein, 429 aa, unidentified
MELYLSVGIDVGSVFSFLSIVNPQGIAVGKPFKIHHHDVSSLEKAVGLIKKAEELYSMESRTFLESTGCYHFPLFCYLIESGFRVFVINPLTTHSIKNMGIRKVKNDKVDSLAIARLGLTPGLKLSVMPVGLVLELRCLTRKYYELVDQRTVHTNQLRSSLSQAFPQFLPLFSNIAGKTAMMVLREYPTPKHLLRAHRKVLIAKLARTSRKGEKRCEVLYDRLMAAARAALVFGVSLDSLFFNVREELDSIEHFSGRMDRVVARMEQLVQENESVRFIQQVRLLESIPGVGFLSALTIMCEIGDFDVFQKPKQLVAYFGLDPAVKESGLFKATQVHISKRGSRVARRAVFSVALSSVSRKNNGDARNPVLREYYLKKIQSKPKMTALGAIMHKLCNVIFAVLRDHKPFVLRTPEEHSLDYQASRFAISA

SEQ ID NO: 65093 - protein, 318 aa, unidentified
MNSHCKTESTEPVQYVPLDVSKRRLDYGLQPGRLAAVTNTREGIATLIQRLAGHPRAQVVCEATGGYERALLAALGEAKIAVSRVPPGRVRAFARAEGLRAKTDRIDVELLRRYAVAMQPRVEILPGPEVEVLRELLEHRRQLDEQRVLFSNRCETAGPTLLGLLEGQRAHLERSLQEVEARIRDHIGTHEPLRTKSERLQQLQGCGPVLAATLLAYLPELGRLEDKQVAGLVGVAPHAHDSGERTGPRHAHGGRIAVRNVLYMAAVSAAHHNPVLAPFYQRLLAEGKPAKVAIVAVMRKMIVTLNHLLRDPNFTLAN

SEQ ID NO: 65094 - protein, 421 aa, unidentified
MKTYILRETQTVEPQKSNPHSPPPRPEPGLTALVDIICGPPVPPPPPLAGRVLFIGLDVHNDSIAVSLAPSDSTEVRRYGIIGGEHDDVLKLAKKLQAAHPGTLLKFCYEAGPRGFALCRCLRAHGLDCIMVCPSKVPRKPGERVKTDRRDADQLARLYRAGELTGIYVPEPEDEAMRDLIRARFQVGKAQHRARQQLKMYLLRHNLRYGGQTPWNAAHLRYLAQIKMPFPVQQIVFQEMLDVITEATVRLERYDQEIERAVPGWRWEPVVRAVMALRGMALLHAATLVAELGDFNRFDHPGQLMGYLGLVPSEHTTGTDRQQGGITKMGNGPARRALVEAAWQYRAPARISPHLKKRQEGLPKAITDIAWEAQRRLHHRYNHLTRVGKKKSQVAVTAVARELSGFVWAIARQVKPHPAKP

SEQ ID NO: 65095 - protein, 393 aa, unidentified
MICVGIDVAKDKHDCFILSSEGEVLADVFTISNNAEGFDTLLQTIHRCARPEDRIKVGLEATGHYSYNILGFLLDKGLHTFVINPLHTNLYRKSLSLRKTKTDRVDARTIAAMLMSDVDLKSYTDTAYHNEELKSLTRYRFDKVKERAKLKQSVSRLVTILFPELEKLVPTLHMASVYALLSEFPGAKQIARAHLTHLKALLNDASKGRYGRDMATELRDAARCSVGSVMPAKSLELQHTIRLIRELNTEIEDIESAIQTIMEEMQSPITTIPGIGFRMGAMILAEIGDFSRFDSPDKILAYAGMSPSTYQSGQLSLSGTYSHMEKRGSKYLRYALYNATKYVCLWDSTFEAYLAKKRAEGKHYNVALSHAAKKLVRLIYAMEKSRQPYNSVA

SEQ ID NO: 65096 - protein, 421 aa, unidentified
MTPPNEVVWAGIDTHTDTHTIALLDERGRPLGAETFTADPDGYDRLIGMLPGPGRVAAVGVEGTNSFGAALARRLTAAGYEVREVLRPRRSVRRRDGKSDPLDAVAAARSVMTGDGTSLPKSSDGWVEALRHLNAQRSQLVSAMTAIPDSTNGLLVTAPEPIRERYRGLRSETRMNRLAECRPAGGLVERSVLAALKSAAKAWKALKRQAGLLEERMRLILEEHARPLLDMYCAGAVIAATLAIVAGDNPERIRSEAAFAKLCGVCPIPASSGRTNRHRLNKGGNRQGNMALHRIAIVRLRYHKPTRDYMAKKTREGKGKLEIIRCVKRFIAREAYRALISIRNGEVGRGTPAERGAKLRELRVSRNITQQQIGEALCVPSSRISEIERGARDLPELEQRAIQWIHSTTNPKQHTQTLDNV

SEQ ID NO: 65097 - protein, 325 aa, unidentified
MQAVTTIGLDIAKSVFQVHGIDAEGKVLIRRQLKRRYVLAFFQKLSPCLVGIEACATSHHWSRELKALGHNVRLMPPAYVKPYVKRQKNDATDAEAICEAVTRANMRFVETKTPEQQSCLMLHRTRQLFIRQQTSVINAIRAHLAEFGIVAPVGRKGVEHLLAIGTDGSDQRVPEVTQACLAALGAQLRMLKAQILEFDRRILAWHRSNETSRRLDAIPGIGPALATALVASVADAKAFRSGRNFSAWIGLVPKQHSSGGKDKLGSISKQGDRYLRSLFTAGALAVIRYAKIHGTQHRPWLTALLARMSASGDKADIPDRLADVR

SEQ ID NO: 65098 - protein, 363 aa, unidentified
MQTIYIGVDFHARQQTICYLTTETGELVTRELKHQDKEAVRAFYAAFRGQVIVGLEASGYSPWFERLLEELGYEVWLGHATEIRRRARWRQKNDRRDAELILDLMLHNEFPRLHRPAIQSREVMRMLRYRHKLIKIRTMSKNSLQALALQAGVAKRSCLFTREGKQELEAALMSPAMQWQREHWLQLLQPLDQQVLEAMAWLKAQSKDDVCIARLRTHPGIGLLSALCLVHTLQPVARFRNTRKVAAYAGFDPVERSSAEHKRFLGISKAGSRLLRHLMVEAANIAVRKDEDLKRFYQRVAARRGRPKAKVAVARKLLIRAYIMLRDEIDYAEFRRRAVAARLARLRHRPNVPAVVIGQPAST

SEQ ID NO: 65099 - protein, 343 aa, unidentified
MTQRQPVVEVFAGLDVSAREIKVARVQGQDQNPTLATFANHASGHQALLAFLLEKTERVRVCLEASGNYSLDLALSLHAQRQVEVSVINPRRARKFAESLGERSKSDPVDARALCQYAARMPWESWKPPSATALRLRAIPRAMESLGVMHTQESNRGHALASSQALPALVLRERQRHQRYLENRMKQLRREARRLIARDAELDRRYRLMLTVPGIGETSALQILGELVVLSDTADARQWVAFAGLDPCIFTSGSSVEKRPRISRGGSRHLRRALYMPALVALRREPHLKRFYERLLSRGKARLQAVVALMRKLLHALFAMFRANQPYDGSKLCPSELITKAAA

SEQ ID NO: 65100 - protein, 428 aa, unidentified
MKVQYERVAGIDVHKDMVKVAIRSPGDKRWTRKTEIVEFRTFYGVLQHMARELRRRGVTHVVLEASGIYTEPVYYALAEQDFTEVAVINPAHAKALKGHKTDAKDCARLAELFECGLLRGSCIPAPELKEVRDLTRYRTKTVQARTSEIQRLGKALESAGIKLGSVASDITGKSATAMIEALIDGERRGQVLADLAIGRMRTAGKLADLSQALAGRFTEHHALLCRLHRDRIAVLDAAVADLDQRIAGKAARWQREADLLTTVPGFGDVVAWAWLGEIGPAPHQWFPDHEKLACWVTLCPGNNISARKRKHGRTGDAGTYIKPMLVQAAWAAIRVRGRLQARYSRLVRRFGGDKNPGAKKKAITAIAHTLLKIAYQVLRAGQPYQEPGADFYTRRESPQQRQAFLQRQLQKLHPGCTITITISPPEAA

SEQ ID NO: 65101 - protein, 341 aa, unidentified
MEQATTIGLDIAKHVFQLHGAGAAGHVLFRKRITRVKLLSFLAAQPRCVVAMEACAGAHYWAREIAKLGHHVRLIAPAYVKPFIKRQKNDAADAEAICEAAQRPNMRFVPVKSEEQQANGIVFRARDLLVRQRTQCVNALRGHLMEYGYVFPKGIPHVETLVALVENPQSSLPDSVRVILKLLVDTFTALEAQIAVLDAEINQRSKSDPTARRLMTIPGVGPITSTAITALVPAAEGFPAGRDFAAWLGLTPLQKSTGGKQKLGAVSKRGERTIRRLLIIGASAVVQQASRRGAPRGSWLAQMLARKPKMLVTVALANKMARIIWALLVKGGTYRTPAVAA

SEQ ID NO: 65102 - protein, 422 aa, unidentified
MEGTESNYQWYVGIDWGAERYEVCVLDRQAQVVARRSIAHSGTGIAEFVDWLVKLCEGKPERVAISIETPRGAMVESLVERTFAVFAINPKQVDRFRDRYTVAGAKDDSRDAFVLGDSLRTDEHCFHRVGLDEAAILRMRELSRLEENLQQESNRLSNQLWEQLHRYYPQMLALSKAADEPWLWELIEWAPRPVEAGKLELARVQQLLGSHRIRRIRAEQVLEALKKEPLRLAPGAEEAASEHALLLLPRLRLAHEQRTQVAKRIQRMLREMSAAEPTEKADKREHSDVKILLSLPGVGRVVPATVLAEASGPLRERDYHRLRNYGGIAPVTRQSGKKKVVSMRYGCNMRLRNALYHWARTSVQKDAAAKKHYAALRQAGHSHGRATRGVADRWLAVLMAMLKAGTLYDPERRGKGQATKVS

SEQ ID NO: 65103 - protein, 331 aa, unidentified
MDHCAIDLGGRKSQVCVRSPDGRLLFEGPYDTRSLPEFLQLLPRSRVIVETAAEAFRIADAAKQAGHEVRVVPATLVRSLGVGARKTKTDRRDARALSEVSCRIDLPSVHIPSARSREWKAICGMHDALMTARTKLINNLRGWLRGRGLRIGRGNADTFAERMLKVESIPDYVRCQVEALAALTQKIRGSEKRIGTLAKDELCQRLMTVPGIGPSSAVRFVAAIDEIARFESAHKVESYLGLVPGESSSSERQQRLSITKAGPSSVRWVLDQAAWSLQVRCRDPAARPLQLWAAEIARRRGPRIATIALARKLAGILYALWRDGTTYQRRT

SEQ ID NO: 65104 - protein, 461 aa, unidentified
MRRKIKRKAKAKTTLPEGLETINLNAAGIDIGATEHYVAVPPGGSSETVRSFGSYTAALYEMARWLKECGITSVAMESTGSYWIAPYQVLEASGFEVILVNSRHVKNLPGRKSDVLDCQWLQKLHTHGLLSGSFRPVNKVCVLRSYLRHRENLVHAASAHIQHMQKALTEMNLSLHHVLSDLTGLSAMMIIRAILTGERDPWKLAGMKDRRVKKSQEQIARCLEGDYRDEHLFALAQALELYEFYQAKIAQCDLQIEKQLHTFKAQVDPKKNPLPENPKKKSLKAQSNFELKTHLYAICGTDLTRIDGIDVMSAQSLISEIGLDMNRWKSEKHFTSWLNLCPSNRISGGKPLTRQPRKGHNRAADILRLCAQSAIKSSSAIGAFGRRLKARLDAPTAVKAVAHKLARIVYRMLKYGKQYRDAGERYYQEKYRDHLLRRLQKQAAAFGFQLTPQQPILDPVS

SEQ ID NO: 65105 - protein, 428 aa, unidentified
MIETNDRLDLFNGIRNSIRGSEKHLLVGLDVAKNTHHAFFGTPNGRTLRKNLVFDNSKQGFEILRELARDLQNQHGLVEVVYGLEPTASYHKPLAEYLIRQGEHVVYVSNVAVAKNRQLLDGRWDKNDKKDAANVADLVGQGRCLYYDVPEEKLRELKSLLSFRIRLKKQEHAMRMRLRNNVFAQYFPELDRHLRAGQPDDLILSIAEHCLDPQEIARMEFPSFLKLITRRKIRIEQEKRLREIWEAAKGTAGCQAHEAARWEAKSLVGQLKAIREIVKENEQRMHAVARQFPEYSCLLSIPGFGPIVSAMVLGAIGDATRFGNHMQILRLAGLDLSASRSGQSSNSAKPVISKQGKAALRYALVQAAMVAAAKNPTVRGYFSNLLKGREFERGINLKMKVKLAAKLLVTAWTLMKRKENFNPSCFNG

SEQ ID NO: 65106 - protein, 422 aa, unidentified
MLEETQDTEEIIARVAALDIGKAELVCCVRVPSAQGSGKRRQEVRTYPTMTRSLLVLADRLGELGVTRVVMEATSDYWKSPFYLLEAHGFEVWLVNAKDVKHLPGRPKTDKLDAVWLCKVAERQMLRPSFVPPPPIRRLRDLTRYRADLVAARTAEKNRVEKLLEDAQIKLSVVASDIFGVSGRAMLAALIAGERDPKVLAQLARRRLRAKLSQLEEAFHGRFSDHHAFLLDTMLGRIDQASADIAVLEAHIEAEIAPFQAAADRLDEITGVGRAAAQVLIAELGTDMGRFPTAGHLVSWARFAPGVKESAGKKKGKATTGHGNPYLARVLGEAAAAAGKTNTFLGERYRRIARRRGAKKAIVAVGRSILIIIWHLLSDPDAHFHDLGPGFYDTRIDTDRRKRNHVRQLEALGYTVTLQPAA

SEQ ID NO: 65107 - protein, 339 aa, unidentified
MTIVMGLDQHRAQITAEWLDAVTGELSRGRIVPADRAGVRKFLARFGGQQLEVALEATTGWRFVVEELRAVGAGVHLAEPAETSALRGSKQRAKNDRADARHLRELLMTGRLPECWIAPDHLLDLRARVRLRHTLVDERGEWQQRMQAVLYHHGLPKRAGLLTSENRTWLQQLALPAAGREQITVALAMIDALEVRIAPLDRELRCYARRQPGCRALQAAHYGIGALTSVVILAELGDCSRFSSSREVVRYGGLDITVHASDRRRAPGHLSRQGPPALRWALYEAAQAARRPGSPDRAYYQQAAERLGGNRACLALARKLLKRSYHTLRELGDEALAPA

SEQ ID NO: 65108 - protein, 338 aa, unidentified
MLSRARIYKEGNPTVQTNSNAKSWVGIDVSKDWVDIVVLLEERRVMQRRCQRSPQELEQLAQELLPYAPQGVVLEATGGLETAVITSLAAAGLAVMRINPKRVRDFARAHGLLAKTDALDAYALALFGARMQPAVRAFPEAERQQLAAWLMRQQQLILQRAGERTRLHQVSEPKLRKSLERVIDFLGKELARLEQQLQGWIQKSATWKQQETLLRTAPGVGPKTALVLLAQLPELGQLNRHQIASLAGLAPFACDSGHWRGRRRIRAGRSGVRAALYMASWTVVRTPGSLKLFYHRLVATGKPKQLALIAVARKLLLALNEMVRSNTPWRSAAEPISA

SEQ ID NO: 65109 - protein, 343 aa, unidentified
MPHYVGLDVSQKTTAICVVDEQGKRLWRGVCATDPGPISARISQHAGVDAKVGIETGSMTPWLVHGLRAAGLDVACLDARRVKAALQMQLNKTDENDAEGLAQIMRTGWYRAVHVKSLDAHRARALLGARAQLVGMTTRLSNMIRGVLKTFGLLPGAGRGLRFDRKVEALLEGAPEIALVVRPLLATWRQLRQQIAVFDKAVLQQVRADPICRLLMTVPGIGALSSLMYVSTVENPSRFSRSRAVGAHLGLTPRRYQSGETDRSGHISRCGDGLARTLMYEAATVILHRVKRSLHLKDWAEAIERRSGSGKARVALARKLSVILHSVWRSGEPFRWAAPAMAA

SEQ ID NO: 65110 - protein, 398 aa, unidentified
MTKKNTLKSLPTDTEFRVVGLDLAKSDVSVAAIPVDDNTPSLVDRMTYADLLDWAGKISPTLFAMEPCNGYSLLCLQLENLGHEIKVISGWTVSMWINTHLSGQKTDLNDAIALARLAVSDAELTPIRHKSITEIRIQTVQAVRQQLMSQRSKSIVSFKALAQQWGIPCAAGHRNLKKLRESIEAKVDLITRPVANAMLFLLDAVKSLDRQIGQLNQTLQELVMSDERGRLLQSVLGVGTQISARVITVVGNIERFNSPRSLVAYVGVAPRNFITGHKNLTKKKHGNCPDLSHKGQGKISRRGDKLLRSLFIQGAACLYMQFCKDQLPECQLKRWILKQLASQKPYGKLIVSLAAKLIRIVWAVLTYGEKFNIQKAGMTRSMWSEMALETPLNKEVPA

SEQ ID NO: 65111 - protein, 370 aa, unidentified
MLDTTTFVGLDVHARSIKAVSLDVMTGEVRCATFGYDAGAVAEWVRSVDPKARCVYESGVTGFDLQKRLSGLGVDCVVGAVSKMIKPSADRRRKNDRNDAEFLARMLSVGNVVEVWVPDDECEAARDLTRALEDARDDLSRAKQRLSKFLLRHGLAFDERTPTGRRKGNWTRAHWSWIESIRFAEGADNDALAYYVDAVRRAAEEKARLEGLVEAEARKPRWRRRVDSLRCLKGVDTATAADLVFEAGEFSRFGNARSFAAWVGLTPSEHSSGESDRRGAITKAGNKHLRKALVEAAWHYLTCSGRPKDLAKGQAPDRGARRHAAKGVRRLVERRGALLARGVHNNKANVATARELACWVWAVGLMAEEA

SEQ ID NO: 65112 - protein, 349 aa, unidentified
MFIIGCDFHSRFQQIAMLDPTTGEVLERRLEHENEEAKKFYASLPGPARVGMEATFNAQWFERMLQEHHHELWIGDAAEIRAAMVRKQKTDPRDALHILDLLLTNRFPRIWVPSPAERDLRQMLRHRHKLVRFRTSVKNQLHALAMTQGLCRRKKLRGRVGRKELESLVLDPWASRRREDLLKLLDQLDPWMDNLDEAVIQAADGFPQAVCLMEQAGVGSVRALAFVLTIGPVSRFANSKKVVSYLGLNPSEDSSAGRQRLGAISKQGNSMMRYLLIEAAQGASRLDPELRRDYQRLKFRRGSAVAKVAIARKLTVRLYWKLRAAQPVPSAHMQGSPGTPVVGESLSPN

SEQ ID NO: 65113 - protein, 339 aa, unidentified
MKLNAAIDLHSNNSVLVILDEKDRVVHEGRHPNDLKVILAQLSPYREDVQAVAVESTYNWYWLVDGLMEAGYDVKLVNTVAVKTYDGLKYTSDEHDAKHLTHLLNLGILPTGYIYPKEDRAVRDLLRKRSQLVRHRTAHILSVKNLTSRNRGNGMTMEKVYKLDDKGVAGICGGDASLALAMQSNLVVLRCFEDQVRVIERAVLKQARLKPQFKKLLTVDGIGEILGMTIMYEAGDMKRFEKVGHFASYSRCVTSSRWSNGKKKGTGNRKNGNKYLGWAFVEAAHHAVRYNERIRKFYQRKKARTNGIVALKAIAHKLARACYHVIKEQAVFEETKAFA

SEQ ID NO: 65114 - protein, 360 aa, unidentified
MAKARTLVGLDVHAAKVAAAVLDAETGELQFVGMEMDVDRVAGFCAALPGPVRAAYEAGPTGYGLARELSRRRVECVVAAPSKIPRGSGERIKTDRRDAELLVRLLLAGKLHAVRVPGDAEEALRDLVRAREAVRQDLMRCRHRLGKLLLRRGIRFDEGEAWTERHRRWLDQVVLEWPAAQVALLDAKGAIDVLAHRRATLEREIITILPGSPWSMQIGRLRCLRGIDTLTAVGLCAEVGDFERFARPGQLMSYIGLVPSEATTGQQRRLGSITKTGSGHARRLLVEAAWHYRKAPRIGKTLTERQHDQPPAAVAIAWSAQRRLYRVWTRMQERNKRRTLIATAAARELAGFCWAICQIE

SEQ ID NO: 65115 - protein, 393 aa, unidentified
MCSVKYVGMAVHKATAVIVVLNALGHFQKQVIIKTKAEAIREFIKSEGGTLHVIFEEGTQSAWLYELIKPSVAEVSVCDVRRHKSGRKGNHADAIDAEQLANLLRLGAVTSVYKGDTRQRQLKELARAYENLVSDATRARNRLKAIYRARGIDCDGQDVYRPAQREKWLEKLTESAARFRAQGLLIELETIQKLRQEARVELIRQSKQHPDYQLLIKTPSFGPLRVAQLLAWVGTPHRFRTKRQFWPYCGLAVMTHSTAQYNIVNERVEKRRKATATRGLNRNHCPTLKRVFKGAAVRALSCEPFKAYYQERLEKGIRPEMARLSLARKLAATVLAIWQRREVFDPTKVASILRLNPDQECHGCQVKTKLRCAIAGAICTTGRGRVSRGLSWL

SEQ ID NO: 65116 - protein, 389 aa, unidentified
MKIFVGIDIAKLNHFAAAISSDGEILIEPFKFTNDADGFQLLVSKLESFDKNSIIIGLESTAHYGDNLVRYLVAEFYQVCVLNPIKTCQMRKNNVRKTKTDKVDTFVIAKTLMMQDDLRFITFFDLDMMDLKALGRFRQKTIKQRTRLKIQLTTYVDQVFPEIQYFFKFGLHQNAVYALLKEAPSPKEIASMHMTHLANLLKVNSHGHFTKEQAKELRILAQKSVGANDSAISIQITQTIQQIELLDSQLEKIEAEMTDIMKFNDSVIMTIPGIGYINGGMILGEIGDIHRFSNPNKLLAFAGLDPSVYQSGNFQAKTTRMSKRGSRVLRYALVNAAWNVVRNNATFKAYYDAKRAEGRSHYNALGHCAGKLVRVIWKMLTDEVEFNLE

SEQ ID NO: 65117 - protein, 351 aa, unidentified
MRKIAYLAIDVHASNSVLGEMESDGHFRGNQSFTTSEKNIIDTLKAVKAKEKYLTIEEGPLTYWAAQVAAPYVTEVIPCDPIENALIYKSPHKKDKVDTKKLCRLLRLGELNRVYHPENDHRALFKAAAKHYIDLRYQLIALKQKIKAMYRHWGIIDVNGMSVYSPKGREEFLRLIKHIHIHNQLHRLYCLMDKTESMREQALKAMKRMGRKYPEIKEFIKIPGMGEVGAHLFDAHIQTPHRFPDKHKFWRYCRMGVTDRSSDGKPLGFKRLDRSGISELKAIAYRAWMVSMKGDNEVKRFYSESFRRTYSHVHARLNTQRKILAVMYGLWKRGEPYNPQLFLDSSQSGVV

SEQ ID NO: 65118 - protein, 354 aa, unidentified
MHQPEQAAEIIIGVDTHKDTHTAVALNALGARIGTITIPVSQNGYRQIEAWACSFGSVRAFGIECTGSYGAGLSRALQASGHRVLDINRADRSARRRHGKDDPLDAEAAARAVLSGQATTLAKSGTSSVEMIRHLKLARDSAVKARAQAMQMLKGLIVSAPAELREQLEGIRGKVTLVRHLAALRPGPMTSTTASAKVGLRALARRWLSLSKEIEGHDRELDALAAAHTPELITAPGIATGTAAEMLILVGDNPERIRSEAAFAKMCGACPVPASSGKTSRHRLNRGGNRQANAALHRVIVTRMRCHQPTIDYVIRRTAEGKTKAEIMRCLKRYVAREVFTHLCKPRRTASETA

SEQ ID NO: 65119 - protein, 447 aa, unidentified
MKQKKPNKRKSVKLPKHLQNLNPYAAGIDIGSKSHFVAVPEGTDDQPVREFSSFTDDLERLAQWLTACGVTTVAMESTGIYWIPVFEILESYGLEVRLVNARHVKNVPGRKSDVLDCQWLQQLHTYGLLRGAFRPVDQVCALRAYVRQRSTLVRSAASHTQRMQKALAQMNLQLHNVVSDITGVTGMRIIKAILAGERNPKVLSAMRDPRCKNTAETIARSLQGNYRQEHLFSLRQAVELYEFYQEKISDCDQQILAQLKDFEAPDNHDPDQKPPRTVGEALQRMSGVDLATINGIDTNTALKIIAEVGVDMSRWKTAKHFASWLGLCPGAKISGGKVLSSATKQVANKAAAALRMAAFALINSKSALGAYIRRQRARLGAAKAITATAHKLARLVYSMLKNGTAFVDVGQEYYEERYRTRVVQNLKRKAQDLGFELVAIQGTAPTT

SEQ ID NO: 65120 - protein, 353 aa, unidentified
MAVYIGVDLHVRTQTVCWVNTSDGEEHEVTLDHQRDDVRAFYSRFAAPALVGVEASGYSLWFHRLLEDLGHHLLVGDALAIRQFARRRQKNDRRDARLLLDLLCHEEFPAIHIPAPASREVLALLRYRHRLVRIRTMLRNGLQAVALSHRLRLGPKLFTVRGQQQFAALPLTGAFAIQRQHSLALLASLAEQVHAVEQALEARAQHDLRVARLRTHPGVGLLTALAVVHALEPVSRFDRARRVAAYCGLDPKERSSGDAQRFGHISKQGNRLLRFLLIEAAHNAIRGDDDLRRFYFRLEARKNSSVAIVAVARKLVLRLYRMLRDEIDYDQFRRRGRDARRAREFASPPPHSD

SEQ ID NO: 65121 - protein, 338 aa, unidentified
MTATTIGLDIAKQVFQVHGVDQQGKEVLCRRLRREQVAPFFANLSPCLVGLEACGGAHYWVRRLSRFGHTVRLMAPQFVKPYVKSNKNDRNDAEAICEAVSRPQMRFVPAKSVEQQDIQALHRVRSRLVSLRTQLANQVRGLLMEYGIVLPLHVGQVRRGLPEILEDGSNELTAFSRRLFASLYAELVELDGKIETIEEQVKAVYQASEPCQRVAAVEGIGPVTATALVAAMSDGKTFRNGRQFAAWLGLVPRQHSSGSKLRLFGISKRGDPYLRTLLIHGARSVVYRAGRKTDSRSRWIADKQRRLGTTKACVALANKNARIVWSLIAHQENYRRAA

SEQ ID NO: 65122 - protein, 477 aa, unidentified
MGKPTSVNIRGLRGEQRAKEIEGLDLSRVLILAIDPARDFPKALICDYFGMVLEKPFFFAVNSEGIFTLHQKLQHWVSCVKAVRVFVGIEIAGCYHDAIGKALDKYGYDVGLVNAYTTASNRKMMLDYSKTDDKDLLAIAQALINNNGVSSKRVTGFYEQLQVICRTRRQLVKEASAVKTQIRQLMSMVFREFQGLVSAETLTQQKVFGSFWGPKSRLIMSYFPLPSQILSLGETGLRELADFKGIRFSDREIELLLKAAKRDLMSSSDELTHFNGEQVKFRLTQLNFLENQIEALTFEMEKMLINTPAILLLSIKGINIVTAAEFISEVGSVFNFTYNRQLVKLAGINPVMSQSGGKKGKAFQISRQGNPALRYIVTLIGRNLCSKKCHNDYFIEYYERMIQRGKMPSQIYAAAGNKFLRTAFAMLKGHRLFHIPGYEQCTSNIIDKFSNKENKETARKTLALLTDIASEKTAVAL

SEQ ID NO: 65123 - protein, 425 aa, unidentified
MSEKIVVGIDVSKAFSDICILSPNNDIIKRLKISNDINGMKSLIYVLEKVEDEYEDRAVIIMEATAHYHQILANFFRKHNYEVIVINPIQSGALKNINIRKIKSDKTDAYNIALLYRIKNYNETITHSDTVNSIKKLCRQHKELTDEIVEHINRLIAFLDISFPDFKKVFTDLQGKTPLSLLEKHPTIQEVLSPENKQDIIQLIKENSHKSSSYAEAKYEKLVKAARKSIEVCIVNLSSAVLIQTTVRVIFSLQEALKAIDDEIKRLSLLDEKFHKEIVLLQSIPGVGEYTACVVLSELGDISNFSKPKELVAFFGLDPGVTQSGTYNRKNNKISKRGSPHVRSILHMLAKSNVYPNRNREYLNPVMRAYFEKKISEKPYKVVMCAIMRKMVQIIFAVLRNQKSFELRTPEEHQKLIREKSKLVA

SEQ ID NO: 65124 - protein, 325 aa, unidentified
MILGIDVAKEKVDVALFKDKQFIASGQFSNTLSGFKKLDKWLKHKDSDQVWACMEATGRYGDELATYLYHKAYQVSVVNPARIKKYAESQLQRNKTDKLDARIIADFCRTQEPLLWVPPAPQKRLLQEMGRRLEALIKEQTRERNRLKSGLQSEVVKSSILALLDFLSEQITQLEEQIQAHIDQHSDLKRDQELLITIKGIGKKTAYKILGELPDLNRFDNSGQVVAYASLSPQQHSSGSSVHKRTRLTSTGNQNIKTTLYFPALSAIRFNPIVKDLALRLESRGKEKMVIVGAAMRKLMQLIYGVLKSGQPFDPNYSANIQAAA

SEQ ID NO: 65125 - protein, 455 aa, unidentified
MNKVKAKKAKEKNVVEMPVVNPYSAGIDISDKEHVVAVPEGMATDRVRKFGTMTCDLTEILDWLEHCGIETVAMESTGVYWKPLFSMLIKEGFEVCLVNARHVKNVTGRKTDEGDAMWIQKLHSCGLLNSSYLPDDEQESLRTLVRYRRTLVQDSSRFINRMQKSLELMNIKFHTVIADITGKSGRRVIEAILKGEREGKNFLPFIDKRVKADRQTIVKSLQGNWRAEHLFTLGESYKMFLIYKDQIASCDQEIEKQLQQYEAIRNDGIIQTDQKPKMKPIQKRKDKNHPQFNLRGYLKTIHGVDVLNIYGLSETCGLELLAETGTDLSKWENDNHFVSWLNLCPNNKISGGKLISSTLLKKKSNPASQAFRQAANAVQKSNNWLGDYFRRMKAKGGQKYAIVATANKIARIYYKMVRYREEFNPVELELYQQKYKQAKISYLERKLSQLKSDAA

SEQ ID NO: 65126 - protein, 376 aa, unidentified
MKQFNDIYVGLDVHKDTIAVAIVRGLRSKPTYFGEIPNTPAAITKLLHQLSPDGEVLNFCYEAGPCGYEVYHQLTKLGQSCSVVAPSLIPRMPGVRIKTDRRDAMSLAKLHADGSLTAVWVPDKEQEGIRDLSRAREDFKQTETKARQRLGAFLLRNGKIFTGKSKWTVAHWRWMETLTFETPMQHIVMQEYVEALKEASRRLLGIEKQILLAVRGWSLEPVLNSLLAMRGVNTITAVTLLAELGDITRFDNPKQLMSYLGLVPSEYSSGSKRQQGSITKTGNGHVRRVLVEAAWNYRFPARKSRTIEMRAEKTSDRVQAIAWEGQKRLCGRYQKLLSLGKLKQKVCTAVAREMVGFVWAIACEASGRVHGSRATA

SEQ ID NO: 65127 - protein, 481 aa, unidentified
MAARKKNMTKDAAPGSPGAASQPGDDGAEVAEERVEVVTYAAAIDVARGFGMVCTRVPGSRPGRRRQAVWRAGATYDSVAALMDHLRCAGIQRLVLESTSDYWRIWYYLAEAAGLEVWLVNAKDTKHLPGRTKSDREDSVWLCKLNERGMLRRSFVPPQAVRDLRSLTRTRSRLAQDQVRHQNRVENILEDALLKISAVISDLFGTSGRRFLDALVAGERSPAALAALGDRRLRATPKQLAAALAGRFREVHAFEIATHLRLIDTINDEIARLDARIEQQLASIPGVAPACTACGLIGGGHAPGCASTDAAALGLVERLDEITGVGTRTAQVLIAELGTDMSVFPTAGHAAAWARLTPRTIQSGASSKPGRTGKGDPYLRGALGQCVMAAARTDTRLGEQYRRLARRRGKQKAIVAVSRVICEIAWLLISDRAARFTDLGAGHYSTHNPRRQTRSRIREIERLNPGMKVTLTPIDPAATDA

SEQ ID NO: 65128 - protein, 353 aa, unidentified
MLAELVDHVIGIDPDRDWITAAVVDANTTGVIATAKFAANNDGYDEAVEWADIHTAAGDRGWVVEGSGSYGRGLTAALSRAGEWVIEFDRPHQRPTKDGAKTDELDAVRAAREALGRRQLHTPRTHDGHREALRVHTVTRAGVVRARTAAINELKALVLTAPDELRSDLRGLTTPALIRHCAAFRTTPKRPIAEQCVRNTMRVVARRVQHFNDEIEVHDAAMKQLVDEAAPQLVAEPGVGYVTAAMFIIAWSHPGRCRSEAAYARLAGVAPLPANSGQSQDRHRLNRYGDRKLNRACHMVALVRMHHHEPTKAYIARRRTEGKTDREIRRCLKRYIARNVWRLLEHQSPKITP

SEQ ID NO: 65129 - protein, 416 aa, unidentified
MYFVGIDIAKSFHITSVIDENEKKVINKPFKIKNDAKGFDKLLTILDSISLDKKEFTIGLEATGIYGENLLEFLISKGYSVKLLNPFQTSRYREQITLKKVKNDEIDSLVIALLLKDGKFSSGYVTDDEYQSLRTLYRNRASIQADMKDVKKRILTQITVTFPEFESFIKPFTVSGLALLDKYPTAQHYKHSSVDRIMKLFRHIQGNNFTQDKALKLLELSKESIYSGKAKDARAIAIRSTIRLLRMYLSELDIIEAEILSLLDSSSTTTTIVNEVGEEVKKADNLIANLKTIPGVADKTIAALISECGDLTRFPTIPKFIGYLGLFPTENSSGNSKSIGHLSKRGSSLAKHALYMSAVSCLIHNTQLKQLYDTKRSQGKSKKEALVAVSRKIAVIIYSIVKYNVPYNPDRVFAKS

SEQ ID NO: 65130 - protein, 325 aa, unidentified
MKTMSGSSVMVGIDVASTHVDVAAIGAELPATLNHVGNDAEGHSALADGLARLNPELVLMEATGGYEAALACALQAAGLRVAVVNPRMARDFARAMQRLAKTDRIDAATLAEFAGVLARRPDCARFIRPLSEPEQQDLAALVTRRRQLVSMQLAERQRLRLARPVARPSIEALLAAIAHQLDDVEAEMARHVEQHHGQMAKLLQSVAGIGRVAAATLVAELPELGRLNRRQICALVGVAPYAHDSGASRGRRHISGGRFEVRRAIYMATLTATRHNAAIRAFYERLVAAGKLKKVALIACMRKLITHLNAIARDHLNAQARPTIA

SEQ ID NO: 65131 - protein, 312 aa, unidentified
MTSQTVLGIDVSKRILEVHLHGQADSGKFGNDPDGLASLVAYLKQIQPALIALEATGGYERRAAATLSQAGQPVAVVNPTRVRRFAEAMGVMAKTDKIDAGIIAWYASVAQPAPNGRLTPLEEQLGDLVERRRQLLVEVVAEKNRRSTCSEHVRQDIEEHIDWIEAHLERLEQQIRACIAQNPGWQVRAEIIDSVPGVGEVTASTMLAELPELGQLNRQQIAALVGVAPFNQDSGPKRGKRRIAGGRSGIRKALFMATLSATKHNTVIRTFYERLLTSGKLKMVALTACMRKLLVIINAMVRKGEKWRFTSA

SEQ ID NO: 65132 - protein, 410 aa, unidentified
MEVLYLRCCGLDVHKETVVACLRVVSGGKVDTNVRTFETTTAGLIALSEWLAEKGCTHIAMEATGIYWKPVWHILADGEFELILANAAHVKNVPGRKTDVTDAAWLAELLAHGLIRASFVPDTQTQELRTLLRTRKQLVREKASHILRVQKTLEDANIKLDSVITDVMGMSGRAMMEALIAGESDPGKLARLANYRLKTSQEKLREALRGRVTKHHRFLLRLHLNQIDDLEAALATIDRQVEAGIAPFRAAVEQLSSVPGIRDIGAQVIVSEIGTDMSRFPSEGHLISWAGLCPRNDESAGKRRSNRLRKGAPWLKTTLVQCAWSAVRKKGSYLQAQFLRLKARRGPKKAIMAVAASILTAIYHMLKDGTLYQDLGSNHFQNRSKGQQTNRLIKRLAELGYDVALTPRTS

SEQ ID NO: 65133 - protein, 479 aa, unidentified
MSKASQQILATGGCGPVAVSGNKAKQRKKPGQPDGPLFQPNAAGIDIGAREIFVAIPADRDDHPVRKCATFTVDLHQMAEWLVSCGVTTAAMESTGVYWIPVYDVLEKHGIQPCLVNPRNMKNVPGKRTDFHECQWIQHLHSMGLLHAAFRPGGEVCAVRSLMRHRNDLVEMTSQHIQHMQKALTQMNVQFQHVISDITGLTGLAILDAIVEGERDPAVLARLRDPRIKADEETIRKSLEGNWRAEHIFALRQRLSLYRSHCSLIADCDREIEKLVAAFEPKADPEEKPLPEDRKQKQRKRKRKGGNPDFDMRTEAYKLFGVDLTQIPGLMMLVIMLFSELGRDMSRWPDASHFVSWLGLCPDNDISGGKVLWRGARHTKNRAGTLFRMAAYSLHRDQSPIGDYLRRMKAKLGPAAATTATAHKIAIIFYTMVSRQVEYDPSIWAQRDAMREKRLEARLHKQAAQRGYKLVPLEEKAAA

SEQ ID NO: 65134 - protein, 343 aa, unidentified
MDHFAGLDVSVKDTSICIVDDTGRITREVKVASEPDALLAVLLNASHRFKRIGLEAGPLSQWLFSALAEAGLPVICVETRHMRAVLKAQINKTDRNDARGIAQMMRVGLYRPVHVKTLRSQKLRMLLTHRKLLQSKAIAVENDLRASLRNFGLKVGMVGTARFEARIKELVENVADLVVLVEPLLVVRRVLREQIGALHRRLLAIVRDDEVCRRLMTVPGVGPVVALTYRATVDVPARFRKSKSVGAVFGLTCSRDQSGERDRPGAISRCGDEMMRAMLYEAAQAMLLRSAKWSWLKAWAMQIARRRGMKRAIVALARRLAVIMHRIWADGTEFRWTREAAVA

SEQ ID NO: 65135 - protein, 414 aa, unidentified
MKRKKTKLQTMSEAPTVRKDAGGIDIGAESIYVAVDASISETPVRCFGSVTRELNRIADWLESCGIGTVAMESTGVYWIPLYQVLEARGIEVFLVNARHYRNAPGRKTDVCDAAWLQFLHAVGLVSGSFRPAGEICALRTILRHRSELVRSASQHIQRMQKSLDQMNVQIHRVLSDITGVSGLAIVDAILEGERNGIKLAALCNSKVHASEETIVKALEGDYRSEHLFTLGQSLTSYRHYQGLIGECDRQLLQLLEELEIKTDRQEPAPPPRKLFKKKEDEDLRQKYYRILGVDLTAIPSIGVGTVKTLISEVGPELSRFRDAGAFASWLMLCPNNTDHGRQGEVEPNAGWEQSIGGGVADGRGVAEPGEVVFGAVLPADEIPIGARISDYGGGTQTRSDHLHPDYEAGGVRCR

SEQ ID NO: 65136 - protein, 376 aa, unidentified
MNEKLRFLGLDVHAETIAVAVAEPNGEVRSLGMIANREDSIRKFMRKLGSPEHLRACYEAGPTGFVLYWQLTQLGVKCDVVAPSLVPKKPGDRVKTDRRDALKLARSHRSDDLTAVWVPDEGSEASRDLVRAREAAKQDQLRAKHRLTKFLLRTGQRPPLGVKAWTEKYVEWVQQVRYTHPAQEATLLDCLNEVQHMEERVKRLEQSIVEVIQLAPAPMQEVVRGLQALRGIAHISAVTIAVELGNITSRFESARDLMGYSGAFPSEDSTGKRIRRGGITKSGNAHLRRIVVESAWSYRHRPAIGARLRRRQEGLPAEITEIAWKAQNRLHKRYMTLMARGKEQRKTMTAIARELLGFIWAIGIKAEAACKQQMAA

SEQ ID NO: 65137 - protein, 350 aa, unidentified
MEQRSSVTIGLDVGDRHSQVCVLDITGMIVEESRIRTTRDGIDQYFTGRQAAAVTLEVGTHSPWVSRLLQDAGHEVIVANARKVRLIHGSSRKNDRLDAEKLARLTRYDARLLAPIRHRTAQSQADLAHVRARDALVRVRASLVVHVRGSVKSFGYRLPSGYTPAFPARARKHLPPELSGALEPVIASIESLNQRIKQMEKDLAELAARAYPRTPLLQQVAGVGLLTALTYQLVIDDPSRFQKSREVGPYLGLTPGERQSGDHNPKRRITKEGDPLLRRLLVQCAQYIVRSKTDSDLKRAADRIMSAGGHRSKAVTAVARKLAVLLHHLWITGEVYQPLYNQPNSKPAAV

SEQ ID NO: 65138 - protein, 371 aa, unidentified
MKKLAYVGVDYHIKTVVISVYLADEKEFHDTIRLNNETKMINKYMKKLSKKFDIRICYEASSSGYAFQRKMQALGYHCDVIAPSLIPRKPGDKRKNDIRDAKKLSKNYANDMLTIVHPPTEQEEAVRSLIRCRLALKNSEKRAKQQINSLLLAQGLRWNKSNWTNQHRQWLTKIEMSHNSSQMALQEYLALLDYLTSRLQHLDHQIEQIANSKLYAESVKKLKALKGIGALTAMVLITEITDFRRFPNPRALMAFLGLVPGENSSDDTGKDKNIPITKTGNHRCRTALIESVQHYVKKPYLSTAMKLQLSQVDAHSAVIAKKCMHRLHKRYWALVMKGKIRQKALTATAREFVGFIWALMQPSPAASIQAQ

SEQ ID NO: 65139 - protein, 416 aa, unidentified
MEVMFKCCAGLDVHKRIIVACALVSSAEGVQRHLKTWPTTLAGLEALAAWLTGLGVTHVAMESTGVYWKPVFNVLAPLFEVWIINASHLKQVPGRKTDVKDAEWIAQLMRLGLLKRSFIPEVAQRDLRDLTRYRTRLLGERASAANRLQKILEDANIKLASVASDVQGVSARAMLEALIQGETDAAVLADLALGRLRSKLPELEAALAGRIREHHRFMWRQLLHHLDTLNQELATLDVQIRVLTAPQAAIIERLDAIPGIDRRTAEVILAEIGPDVTLFPTAQHLASWACLCPGNNITGGKRRSGRTRRGQNWLRAALVEAAWGAARTKDCYFNAQFHRLRARRGDKRAAVAVAHSILIVVYHLLAKPEAVYQELGGDYFLKRNPEQEQRRAVRKLETLGFTVTLAPVPAAALASS

SEQ ID NO: 65140 - protein, 326 aa, unidentified
MAIIGIDVSKAKLDCLWLRDSVSLKVKSRVFPNTQGGYRALLAWLEKSTGEATGELHCVMEATGIYHEGLAYALHEAGAQVFVVNPARLRDYAKSLGTRTKTDKKDALVIAHYGTTQQPRLWQPEPSEVRRLKALIARLEAVKQDLQREVNRLEKAQITQASAEVLTSIETVHQQLDAERVRLDTLINEHIDQHPGLKQDRALLESIPGVGPVISQQMVALLSSRSFDAASQCAAFLGLVPVQHESGSSVRGRSRLSKSGNAQLRAKLYMAAIVAIRHNPDIKVQYERLLRHGKPRMSALCAAMRKLVHICFGVLKHQTPYLPQVT

SEQ ID NO: 65141 - protein, 327 aa, unidentified
METQVASQWVGIDVSKAKLDIALRPANKVLQVTNQESGWQELSEQLKKYKIELIIIESTGGMERGVAHKLQKEEFKVAVINPKRARDFAKASGRLAKTDKIDAEVLAHFGEALQPSPKPLASESQVALSDLVNRRSQLVEMLNSEQKRAHSVRSSTAKADIETNIQWLKQRIKGMDEQIDQLRQDNEESKKQYELLTSVPGVGRVTAVTLLSMLPELGELPLKKLSSLVGIAPMNCDSGQMRGKRRIIGGRARVRAVLYMSALVAIQHNPVIKAFYQKLLQAGKAKKVALIACAHKLLGFLHAIVKSQKPWRCPENIEIKEEKLQAC

SEQ ID NO: 65142 - protein, 354 aa, unidentified
MRERSVIEQVIGVDQGDRLSELCELNADGTVKSRERIRTTSAAYRKRFTGLLRTRVVIEVGPHSPWSSRLLSELGLEVVVANPRRVKAIAAAERKTDGVDAEMLARLGRADVKLLAPVVHGSAAMQRERALLRGRKGVVRCRTRLIQQVRSLLKALGEAPPSASTSAFVRRVREKGLSESFPGLAVMLEAIETLTAKIRELDHEVERACAERHPVTAQLRQVTGVGAHTALAFVTTLEDPTRFAKSREVGPFVGLVPRVRSSGESNPALGVPARSDALLRETLVQAAHYVLGPFGPDTTLRRFGLALAERHGRSGKKRAVIATARKLAVLLHRLWVTGEVYQPLDYGRAQTMAA

SEQ ID NO: 65143 - protein, 366 aa, unidentified
MKKISTVQAFKSEIFKEQKLTIGLDLGDLWSFYCVRDEAGQIVLEQKVPTTPEAMKQTFGKIPRSLIALETGTHSPWVSRLLTELGYEVIVAHAQKVQLITKSSRKDDRHDARTLSRLARIDPELLGPVRHRSAQAQIHLTVIRARAELVSARTALVNAARGLVKSYGQRLPKCGTYPVSGKLAEGLSAELRDVLEPLLKEVESLNERIKEYDERMEKIAKEVYPQVSLLKQVKGVGTQIALTYVLTIEDPYRFAKSREVGCFLGLRPGRRNSGKSEPQKGISKEGDRYLRTMMVQGAHYILGPFGEDSDLRRWGLKLAERGGKNAKKRAVVAVARKLAILLHRLWVSGEVYEPLRNSQKAMSAVA

SEQ ID NO: 65144 - protein, 402 aa, unidentified
MNSVGIDISKGRSTIAVMRPFGEIVISPFEVRHTDSELSELARRLKSLNGETRVVMEATGNYHAPVAKLLHDAGLYVSVVNAKLVHGYGNNDLRRVKTDRKDAIKLANYGLDRWLTLPRYVPEENTRLLLKNCYRQYRQYSKVQTVLKNNLISLLDMTFPNANRLFVSPARADGSEKWVDFVAEFWHCECVSERSLKSFVNKYWRWCRKYGYNFNEAKAHTIHAEASGHIGVMPKSETTKLLVEQAVSQLSATSAALAALKQEMQSLSSQLPEYPVVMGMFGVGPILGPQLIAEIGDVRRFYSKKALVAYAGIDAPPNDSGDVIGRHKSMSKVGASSLRRTLFLIMSAYLQNSPPNEPVYQFMDRKRSEGKPYRVYMMASANKFLRIYYATVKAYLETLEQF

SEQ ID NO: 65145 - protein, 359 aa, unidentified
MVYIGVDLHRKVSQVAAIQANGEVLWNRRIRSRPEEFAEIVGDLPASPVGVAFEATYGWGWFADLLADLGLPAHMSHPKATKAISAARVKNDAVDAETLAQLLRTNLLPEAWIAPPVCREARRLVRTRAALVRLRSRFKCQLLALLAEHGVQLPEVADPFGKEGRRFIQSVALAEQSQFCLTANLRVIDLLTTEVRELDRELVSFFKTDPRIRRLQAIPGIGFYTAAVVLAEVWDVQRFPRPELLCSWAGLTPTERSSAGHIRRGHISKQGSRLLRWALVEVATAAPRHEAHRRYFLKVLHNDRRRAKIARLALARRLLTLCYYALRDEGGCRAYPVATTATVAGRGRAPAESGLRVRP

SEQ ID NO: 65146 - protein, 427 aa, unidentified
MAGVVTARVNRGKKVMTEESFTWFAGVDWGSEKHHACIIDTRGTVVGERQFPHSGVGLAELGDWLLSIAGTTATVAVAIEVPHGPVVDSLIDRGFVVYAINPKQLDRLRDRFSVAGAKDDRRDAYVLGDGIRTDRRLFRRLHVADPRIVELRAWSRLTEELQEERVRLGNRVQQQLWRYYPQMQKITNDLAAPWFLALWAMAPTPGKARQLRKSTVEQILKKHRIRRIDADTVLRMLREPAIKVAEGVAEAASIHLRSLIARLHVVNRELRQAEQKLDQLCAGIGETEGAPGECLQRQDIMILKSVPGIGRINLAALVCEASGPLRSRDYPALRTLCGAAPVTKRSGKSQIVVMRYAAHARLRETVYHWARTATQHDAKSRCRYAALRQRGHSHGRALRGVADRLLGLTCVLLQRQTMFDPHFGQAG

SEQ ID NO: 65147 - protein, 409 aa, unidentified
MYKVAGIDVHKRVLVVVVADAAVEELQYECRRFGTTTSELHQLRQWLEERGVAEVVMESTAQYWKPVWMALEPQFRLHLAQAHSNRAPRGRKHDFGDAQRLVRRLLAAELMLSYVPDPEQRAWRTMTRSKVQLVRDRVRLQNQIEALLEETRIKLSSVVSDLLGVSGRRILHGIASGETDPAKLAALGHERLKCTPAQLQDALSGSVQPPHRQLLELFLERLELLDAHIGKINQSIAEGLRAHQEAVLRLAEVPGFGPDSAQQVIAEIGPRVLAFDSSAQLASWVGVCPGRAESAGQNHSARSAKGNPYLRRLLTQAAQAAVHKKGSRLHSLFHRLLPRLGYQKAIWAIAHRLCRLVWKILHDQVRFVESGEIQNPQNQKRRVQKMLQAFKNLGYSVQLTPLPLSGVTS

SEQ ID NO: 65148 - protein, 418 aa, unidentified
MSRVDSNAVLSVVHHHCCGLDIHKDKVSAAVITTHEDGTAEESISEFGTFTDDLYRLKDWVCEQGCHVVAMESTGVYWRPVHNVLEDSCQVILVNARHVKHLPGRKTDVSDSRWLAGLLRHGLLRGSFIPEKHVRQWRDLARLRKTFVESLADYKRRVHKLLECANIKIDSVASDLFGVTGRNLMDILVSGEEITLDAVLRCTRGRLKGKEEELFKSIRGFFTEHHRFQLESIRTLIESVEAQIRRVHERLGTLLSDRREKVGRLMDVPGISDVSAHAILSEIGDTMDQFETAASLASWAGLCPGNNESAGKRHSGRSPVKSGHVKTIMIEVAWGAIRKKGSYYREKYYSLRARKGARKAIVAVAHRILKAVFHVLKFDRPYHELGDAYLIQLNNKARLHSLHKQAARLGYTLVPAEG

SEQ ID NO: 65149 - protein, 400 aa, unidentified
MLSIGIDVSKGKSTVCGMKPGGEIVYAPFEVQHTREGMSELVSLLHNSGEEVRAVLESTGSYHCPVVAALLENGIFVSVVNSLRMKRFCSQSIRKVKTDRIDAMQIALYGLAYWQELQPTRLPEDTYRELQLLARQYYQMTSMLIKAKVDFNALCDQVLPGMQELMSDHAGRHKLSDFVLRYHHTTYILETGETRFRKDYCKWAEKKGYRNCERMAALIFATAQNGIPVLPNAPSTQIVITEAIRVLHTVEASRDAILTQMQALAKTLPEYSLVREMPCIGDTLAPRLIAEIGDVRRFHSKRALIAYAGIDAPPYQSGKFCANNRHISKRGNRYLRKTGYEVMQSYVMHKPANDPIFTFIEKKRGEGKSGKLAMVAGLNKFLRVYYGKVTELYRSLPAIE

SEQ ID NO: 65150 - protein, 346 aa, unidentified
MKHSVGLDVSVKETAICIVDEAGKVVREGKVATEPQAIIAFLSSAGVEYARIGLEAGPLSQWLVNGLSEAGLPVICVETRHMKAVLKAQQVNKSDRNDARGIAQMMRVGLYKPVHVKTLASQQARMLLTSRQLLRDKLQDMENELRGTLRNFGLKVGVVSPGHFEARIKELVAGQPPLEMIVVPLLTVRRVVREQLAKLDKMVLDQVRGDKLCRRLMTVPGVGPIVALTFRATVDQAQRFARSKTVGAHFGLAPRRFQSGERDYDGRVSKCGDAMMRTALYEAAQVLLTRTRTWSWLKAWGMQVARRRGAKKAIVALARRLAIVMHRMWVDGTEFLWRKEADTAAT

SEQ ID NO: 65151 - protein, 355 aa, unidentified
MSEVKFIGLDVHKTSITAAVLDENGKFLMQSVFVTQSAAILGFIAGVRGTLRVTFEEGTHAAWLYDLLRPRVSEVLVCNPRKNALLKSGSKSDRIDARKLAELFRGGMLSRVYHGHTSTLTVKELGRTYTTLTEDTTRVMARLKALYRGQAIASEGKKLYTRRRRQEWLDQLTHPGQRYRAQSLFEQFDQLQALRRKVRRDLILECRKHTATPILTSIPYLGPIRSAVLLARVQTPLRFRGKRQFWAYCGLGLETRTSGDHQVIAGELRRKKKPVFIRGLNLNHNPDLKNIFKSAATTASARPGPFGEFYENLLGKGMRPEMARLTLARKIAAITLVLWKKGERFDPEHLKTQAA

SEQ ID NO: 65152 - protein, 441 aa, unidentified
MEVTHTHCAGLDVHKKIVVACSLTQIAPGKLERSIRSFGTTTVELLALSDWLSSQKITQIAMESTGEYWKPIYNILESNLEVMVVNAQHLKNVPGRKTDVKDAEWIAELLRHGLLRGSFIPPLAQRDLRDLTRQRITLVRERARVVNRLQKVLEWANIKLGNVVTDITGVSARRMLQGIVEGQTNVQDLAALAKGSLSRKQEQLQQALQGQVRDHHRFLIQQHLTHLEFLEAQIAQFNQQIEQSIEVESIQNQPSLGEPPLKSVSVVADDVSLSSPLSWNKAIALVDTIPGVARNTAQLLMAEIGTDMSRFPSASHLAKWARLCPGNHESAGKRLSGKTGRSNPWLRTTLVQAANAAVRCRNSYLHAVYRRLAARRGRKKALIAVAHRILIALYHILTKHEPYRDLGVDYLSTKSQQQRSVQRLRSQARQLGYQVELTPLS

SEQ ID NO: 65153 - protein, 378 aa, unidentified
MRNVLYVGMDVHKETITIACASDGEEIRVVGTIANTSASLDAMVRKLVSGGKRPLFVYEAGAGGYVIYRHLRELGYTCMVAAPSLIPRKSGVRVRTDRRDAIMLTRLYRAGELTGITVPDADDEAMRDLYRARGDAKKMGKIIKQQLLGFLLRLGVVYGKTHWTKMHYRWLDGLSLPHPAQQLAFQEYLDAIRQSESRVARIEGMLHTCVQTWKRQEEVRRLQSLRGVSFITAVGLLAELGDVRRFKSARQLMAYAGLVPSEDTSGNSVRRGRITKTGNAHVRWMLIESAWSYRLKARKSRVLLQRLAQVDAKTAELSWKAQVRLCGRYQRLLHRGKPRGKIITCIARELAGFIWALAIMEPAAASAGLESGPLSAAA

SEQ ID NO: 65154 - protein, 421 aa, unidentified
METLIERAAGLDVHQATVVACVVIEQSGAKTKRETRTFGTVRKGLEQLRDWLEASGITHLAMEGTGVYWMPVYAVLEDLFDVAVVNARHIKKVPGRKTDVSDAAWLADLLRKGMLRKSFVPAKEIRPIRDVCRYRRMLVQSETAEKNRILKLLETVGIKLATFASDVFGTSGMAMLRAIAEGTSAAEAIAQLARGKLRSKLPQLQLALDTVVAEHHRMMLRDQLSRLDGTAEDIARYDRLLAEMVQPYMKDIELLCTITGIQRKAATEIFAEVGSNLESFPDDAHFASWAGMCPGHNESAGKKGRTRRRRGNPYLQSILVECALAATRKKGSYHKEKHHRLKARRGAMRALFATAHTLARAVYRVLVRKEPYRDLGAAYLDAKNGPAVARRLIDRLLALGYDQQTILQAFPNPRPAIQGPD

SEQ ID NO: 65155 - protein, 352 aa, unidentified
MSMLAEQVEVVIGVDTHKHTHTAAVVVATTGAAVDELTVPTDPDGFLALLDLAETHPGIRAWAIEGTSGYGAGLTRFLLAAGERVIELDRPQRAKRRGGAKSDPLDAVRAAREALGRDQLATPRARGERAALSVRLAARRSAVEGSTDAQRQLHALVVMAPEALRGRFRGKTTLQMVDVACRLRIDPRWDLETRTTAEVLRCLGRRSRTLGEEARLHEQAILEVVRSWRPDLLGQLGVGPIVAATVLCAWSHPGRCRNDGAFAMLGGVAPIPASSGMTTRHRLNRYGDRQLNRALHTVVLCRLRYDPDTKAYAEARTKEGKTPREIKRCLKRYVARQLYRQLENPPVALDNP

SEQ ID NO: 65156 - protein, 354 aa, unidentified
MPEVAEVFPCSQWAGQWQGAGRRACREFTWALEPAVVFGRPPPASRPHGIRIGKPVQVYVVRIAPRCHFLRRLGGRSEEGGQYMPRYLGLDLHRRYIHGCEWTPETRQERHFRFPNTRNGWSQFVATLDSSCWVAMEVTGNAFQAYDLLSPHAEKVLLANPIELKRLGSGRHTDRVDAARLAKMLALGTLPTIWVPPLEVREVRILLRYRERLKSTRARFLNQIRAALRRNGYDLPARANPKLHLTQEQLEVLPPAEKALILSACRQADALNDEIASIDGEIARRLQGTAEVELLLTMTGFGPIAAAAIWAYIGDPRRFQSPKQVARYAGLDPSVYQSGDLSYHGRVSKNGKCE

SEQ ID NO: 65157 - protein, 412 aa, unidentified
MEVLYACCCGIDVHAKMLVACLLTRGKKEVRTFSTMTEDLLHLLDWLSQEGCTHVAIESTGVYWRPVFNILEGAMDVILTNARDAKGYKARKTDVIDAEWLADLLRHGLLKPSFIPPRPIRELRELTRYRESLVREQTALANRVQKLIESANIKLGQVASDALGVSGKLMLRALAAGETDAEKMSHLAQTSLKRKQPQLQQALEGRLTQAQRWILGQLLDQYAQVEAALQRAEERIGQEVESSADPFVAEAVQLLDTIPGIGETVAQIIVAEIGVDMERFPTAHHLASWAGMCPGNNESAGKRKSGKTTKGSRYLRAALVQAAWAASHQKGTYLAAQYKRLVKRMGKKKALVAVGHSILVMAYHVLQTRTRYQDLGGDYFERRNVDKQRKRLIRQLEALGVKVTVEEIKEAA

SEQ ID NO: 65158 - protein, 363 aa, unidentified
MHESTTVAVGLDVHARSIRLAAVRADELLEEQTLPYDEEAVERALRRWPGVRCCYEAGPTGFGLHRHLVARGIDCAVVAPGLVPQRPGDRVKTDPRDARKLARLLAGGLLEPIHVPSRELEAARDLVRAREDARLDRMRDRHRLSKFCLRHGRGLPGLSWGVVRRTWLGEQRFEFAAQQQTFDTYVHALDLVDRRIEALERAIRETAEQGPWRALVARLRCLRGIDTLSALALAAEIGDFDRFQRAEELMAFVGLVPSEHSSGERRRQGSITKVGNSHVRRLLVESAWHARRRPKVGYELARRQRGQDALVVERAWRCQQRLYSRWQRMAARGKPPQKIVVACARELAGFVWAIATEQPLRSA

SEQ ID NO: 65159 - protein, 337 aa, unidentified
MKYSGIDLHSNNSVVVVTDDSDRVVFQRRLPNRLQEVLDALAPHRGELAGVVVESTYNWYWLVDGLQENGYRVYLANTAAIRQYDGLKHGGDVSDAAHLAQLLRLGILPTGYIMPKAERAARDLTRKRLQLVRCRTAQVLAVENLFARNTGARPSSNVVKRFAPEDIEGSGFNPDVTLAIQANVAVIRALNQEIERLERRLQERVRLRPDFAWLKSAPGIGETLATTIMLETGTVERFAKVGNFSSYSRCVDSARMSNGKKKGEGNVKNGNKYLAWAFIEAAHFAVRFCPEAKRFYERKRAKTNGIVAIKAVAHKLARACYHMLREHKPFELKRCFA

SEQ ID NO: 65160 - protein, 465 aa, unidentified
MAGREEREHSGSAESSKRRQLQGLPVVRRDVAGIDLGSEQHWVCAATLDRSGREVASFGATTAELIRMAEWLKARHVESVAMESTGVYWIAPHEVLEGQGLEVLLVDTRQLARVPGRDKKSDPTDCEWIQRLHSCGLLRGSFRPEEAVCMLRTLVRDKANLVAERSDWLRRMQKNLDQMNVRVHRAVSDIDGVTGMAILRAIAKGERDAQKLAQLRNARCSKTEQEIAEQLRGHWREDHVFSLQQALKMYDAVEERIAAYEQEILRKLSEMEQQEPHEPTPPLQNANKARAIKQRGQEAKRQALYRISGVDMTQIDAIGVETVEVVLSEYGPDLSRFPTEKQFVSHATLAPRVPRSGDKPVKKKKRNSASTRVAAALRMAALSLRHSQTALGAFYRKIARRRGGDIAVFATARKLATLIYRLLRWGQPYVDEGAAAYENRYRQQRIRSLAATAKDLGYQLTPVTA

SEQ ID NO: 65161 - protein, 407 aa, unidentified
MELMALHKRVIGLDVHQAQITACAILEEADGTTRIEQRQFGAFKRDRRALADWVAALCPDEVVMESTGIYWKSPYAALEAVGIRGQVVNARHVKNVPGRKTDVGDAQWLATLSRAGLLRGSFVPPARLRELRLISRQRQKLVGQLASEKNRLHKVLTDGGVRLGVVVSDLHGQSARAMVKAIIAGQPPHEVLGFASRRLKASREEIFDALQGELTDSHRFVLDELMHHVEEIEARIARFDARLLDGLKDERNALALLQTLPGVDLIGAAMLLVEIGTDMEAFGSADRLASWVGICPGNNESAGKRKSGRLRKGNLYVRRLLCEFAHAASRTKSVLQSKFQSLIVRRGHKRSVVALGHKILRTIFFMLKRREPYRDSATDYEALSVQRNAPRWIKALTRFGFIPAAEA

SEQ ID NO: 65162 - protein, 324 aa, unidentified
MIDGILGIDVSKNTLDASMSSRNKVRARSFANSSDGWRDLLDWLITQKIRRVHACMESTGRYSLGIACALYEAGHIVSIVNPAQIRDFARTKLGRNKTDGVDAAHIREYCELFKPRPWAPPSAAHRRLGELQTIRAGIVAGLTEWKNRKSSGMIDAVAQSLANVTISHFTSQLRAVDEAIAQTIDNDSGLRRKRDLLLSINGVGETLAGVVMAELPGPDELRSSAEVVAYAGLNPRQHQSGTSIDRATRISKIGNAVLRAALYMPAMSAMRYNPAIVALVGRLKSRGRLKPKQILVAAMRKLLVLCFGVLKTGKPFDPAIAMGC

SEQ ID NO: 65163 - protein, 361 aa, unidentified
MHATTVAVDLAKSVFQLAVADSSWRVTESHRLTRAQFERWFANREVALVIMEACGSAHHWARWLNSLGIEVRLLPAAYVRAYVRRNKTDAADARALLEAARAADIDPVRVKSVEQQALQGLHRIRSLWMSTRTARINALRGFCREFGLSIPQGARTGVEAISRALADPRSAVPALIRETMRLLIEEIRLLEQRIAQLEREFNEVARQSAACTQLMSVPGIGLLTATAMVAATGGDVTHFKDARHFASWFGLTPKEYSSGSTRKLGRISKRGDRYLRMLLTHGARAVLRAAALARNASRPLDGLRTWATEVQRRTNHNKAACALANKLARICYAVLRDHAAFGNPQTRPNKKLERTAFAIAA

SEQ ID NO: 65164 - protein, 282 aa, unidentified
MKGVVGIDISKAIFHVCFMLKLENKESKVLGSTSFDNTDSGAMELVKWVEKKNREDVSVNYVMEATGVYYENLAYFLYESGQEVAVILAMKMKNYMRSFNVKTKTDKVDSKVIAEYGIERNVEKWKPMSGNYRQIRDMARESMSIKKEITRAKNQLHALKYSKGLSEMMKQMKEEQIEFYKHQLQRLRVELLSIAKQDSDLYKKIKKLETIPGIGLETAIILVSETNGFQLIRNIRQLVSYAGLDVSHNESGMYKGKSKISKKESKNKASTIYAGNGSNKKQ

SEQ ID NO: 65165 - protein, 452 aa, unidentified
MEEPQEVQDEEYERVYQRVAAIDVAKASGVVCTRVPDESRPGRRRTKVWTVIATMNAVTELADHLRCHQIQVITLESTSDYWRIWWVVLEAAGLKVQLVNARSVKNVPGRAKTDKKDAVWLAKLTERGMLRPSFVPPPEIRRLREFTRLRADLVHERTRYWARLEKLLERALIKISAVASSLDTLSVRAMIEALIAGQRNPKALADLARGRLRIKRAQLAEALDGRFEPHHGELARIILDQIDALTAQIDQLTARITELIAATPAAQGIDADGTTGPDAGADPGAPVLPAVARLDEITGCGTVAAQAIIAEIGLDMTVFGTPGRLVSWARRCPQTRQSGTKTSAGKAGKGNPYLNGVLGEIAASAGRTDTFLGERYRRLARRRGKRKAVTAVARSVLVVIFHLLADPQARFRDLGPDYHDNRISRARKIANHVRQLQALGLTVTLTPAEEAA

SEQ ID NO: 65166 - protein, 346 aa, unidentified
MNYIGIDVHKSICTAVVMNDDEKVIDQIIDFGTNDEGYSFIIDHYSPEDSYILFENLTTAHRVYHFFKSRGYRVEGLHTGHGCVTEISKTDFKTDLEDATKLARMCKDHFTGRREYSLAHFADIDSMKAKELCRVMNDCSEQRDKLNLRIQAYMDMFDIHLPKGLKTVYSDKAMKYLRSLDHLALTIMIEDMASAMKHIDMAREGLESLFKDNEDVRNLMSIKGIAIQTAATIYTVIDGIERFGTPESLVSYFGLKITRHESGGDRDLHGHINKRGDPLVRKYLANVVAKHPIYYPDSDLARFYKRKKEVMPHWKAVTAAMRKLVCIIWAMLTRHQVYRFSSPVKA

SEQ ID NO: 65167 - protein, 375 aa, unidentified
MTTIARLGIDTSKSLFQLHGVNAREQAVLRKQVRRGQFLSFIAKLGPTEIGLEACGASHHWARQLQALGHVVVLLPPQHVKPYVGLNKNDKIDAAAICEAMSRPKIRERFVAVKSAEQSAAQMLLGTRDGLLRRRTQLSNTIRGHAAEFGLVTPKGLAHIEPLLERIAADQTVPALARELFATLGQEFTDLAPRIAQLDKKLKAFQRSNEMCRRLVEVPTIGPVIASSMVVKISDPAAFQSGRRLAAWLGLTPKDHSTAGKMRHGGITRAGDEGLRAALVSGATAYIQQVKRGRTRPSPWLAQLLKRKPEKLAAVALANKTARIAWKLMISGQRYDRARTEAREGLGAAQHGGCAPSPSLQPHSAHHGASAMTAA

SEQ ID NO: 65168 - protein, 345 aa, unidentified
MEIRTIGIDLGKTVFHLVGVNARGEVVVRKKCSRTQLLRFTSNLPACLIGMEACGGSHFLGRALREQGHDARLMPAQYVTPYVKTNKNDYIDAEACAEAVTRPRMRFVPIKSEDQLDLQSLHRVRERWMMRRTAVINQIRGMLLERGITIAKGRRHIEQSLPGILEDADNKLSGALRVLLSELRREMQYLHRQIEESNKLIDRIVGELEQCKHLVTVPGIGPITATATVAAIGNGAAFKRGRGFAAWIGAVPGERTTGGKQKLTGISRRGNKYLRKLFVQGAHAVLLHRTKQDPGLSMWLAKLVSRKPPQVATVALANKMARIAWAVLSKGEAYRPPLAAQAAAA

SEQ ID NO: 65169 - protein, 429 aa, unidentified
MDNVTERLDLFKQVRASVRGSEKYLLVGVDVAKNNHHAFFGTPNGRTLQKNLVFDNSITGFESLRSLARDLRNQHGLGEVVYGLEPTASYHKPLAEYLIRQEEHVVYVSNVAVAKNRALLDGRWDKNDKKDAANVADLVGQGRCLYYDVPDENLRALRSLIGFRIRMKKEEHALRMRLRNNVFAQYFPELDKLYIRAGQPDDVVLSIAQHCLDPKEIAGMEFEAFLKLITTRKIRIEQEKRLRELWLIAPLSAGCRVHDAAKWEAQSLVTQLKAVRETVKDTEQRMALAAQRFPEYECLLSIPGFGPIVSAMVLAAIGNPARFENRKQVLRLAGLDLSASRSGKNSDSATPVISKQGKAALRYALVQAASVASALTPDIRTYYSNLLKGRELERGIKLKMKVKLAAKLLVVAWTLMKRKEHFKASCFSG

SEQ ID NO: 65170 - protein, 379 aa, unidentified
MTTIARGNTEPELEITGGVDTHRDTHTAAAIDQAGRMLGHAVFPTTNAGYIALLAWLRSFGLVVLVGVEGTGAYGSGLTSYLTGQGVVVVEIDRPSRKTRRSAGKSDPIDAEAAARAAVGRVRTGTPKTRDGQVEALRNLRIARNSAVSQRAGCMRKIKALIVTAPQGVRERLRKLTNARLIQTCANLRPDTTQIGDPEQAVKTALRSLARRHLAAQEEIAELDTLITPLIEVINPELLQLSGVGPGVAGQLLVTAGQNPERIRSDGAFAMLCGVAPIPASSGQTHRHRLNRGGDRQANSALYTIVISRLRWDPRTHAYVAKRTADGLSKKDIIRCLKRLIAREIYYVLRQTKPTANQQTTATATRPPTMLACAARPAG

SEQ ID NO: 65171 - protein, 357 aa, unidentified
MLKYCLGVDVSSKELYVCLSVIDHLQKVSVKSSSKFLNNPNGFDSLAAWLIKHYKQKDIPLVVVMEATGVYYENAALFLHLKGYKVSVVLPNKAKKYLQATGLKSKNDRMDAQGLSRMGAEQSLELWLPKDEYFYQLRSLTRQQQSLQELKTNVNNQLHADQHGMYQNEVVISQLMLLIKTIEGQIKDIEAAIAAHLDKDKEIAKLVEGITLLKGVGALTVAIILAETNGFALFKNIPQLISFAGYDVVENQSGNHIGKTRISKKGNGHIRRCLHMPSLAVIRYQQSPFIQLFNRTLQRHGIKMKSYVAVQKKLLVLIYVMWKKKEAYQPTRNPDHSGEQEQMSSSLPSFEEAGAIA

SEQ ID NO: 65172 - protein, 325 aa, unidentified
MDIIGIDISKAKFDAALLLGERVKHAVFSNTEAGFGQLLAWLAKHRPDPAAPLHACMEATGNWGLELADFLHAQGIRVSIVNPARIKAYGESELARNKTDKLDAGLTARFCRAHVPPAWIPPLPCLRELRELVRRCDALKAARVQELNRQKSGFASPAVARSIADHLAWLNEQIEAVTATARQLIAADPALARNLALLRSIAGLGEISATVLLAELPNIADFTPKALAAFTGLSPQEHSSGTSVRRPSKTSRMGSERLRSTLYMCALSAKRSNKALAAFVGRMTAAGKPPKVILVAVARKLLVYAHAVIRTQKAFESSPDAPFSA

SEQ ID NO: 65173 - protein, 350 aa, unidentified
MNNESPVVAGMDVHKKMLAVVVAKVDGNRIEYLSERFGTTRQDLDQLAHWLHQQQVTEVAMESTAQYWMPVWLALEEQFTLYLAQPRSTAAPKGRKSDWADAQRIVRRLLAQDLTLSYVPGREQREWRTMTRTRVEMSAQQVRLRNQMEGLLEQAQIKLSSVLSDLLGVSGRRILREMVKGETNPACLASLADKAVKASEKTLQEALGGKLTATHRLLLKMYLEQWDLLASQIDQLNTRMAQALSQHQAAVHRLVEIPGVSLTAAQQIIAEVGPEARAFAAPQKLASWVGVCPGQHQSAGTEYSHRSPKGNRMMRRVLVQCAWASVKVKGSIFHQKFRALVPRLGPRQAI

SEQ ID NO: 65174 - protein, 364 aa, unidentified
MKDSTFWVGMDVHADSVVVSVFSAKGSEPVERFEVVPDGRGLARLVRRLKARGSKVRCVYEAGPCGYEPQRLLASRGLICEVAAPSLIPRRPGDRVKTDRRDADKLGRLYRAGELALVSVPDPKLEALRDLLRAREDAQEDLLRRRHRLSKFLLRHGHRYRDGQNWTQRHWVFIRSIRFQDAHAQAVLEEYVMAVEEQLEQIRRFDRHIEEASQRPEHAAKVDRFKVLRGVGTTTALTILSETGDLRRYPKAPQFMSATGLVPSEHSSGSQRRQGAITRTGNAHLRRVLVEAAWHYRHRPTPSPAIRRRRDGQPEPVLAIARRADSRLNRKFRRLTARGKRSTQAAVAVARELAGFVWAIGQIS

SEQ ID NO: 65175 - protein, 436 aa, unidentified
MEAENRLQVGIDVGKNKVDLALLAPNGKMLIKHRSFSNSSVGYGQVRELLLQVMQAQGFEGLDLAAEATSYYWLPLFWEIHQDPILAAYHPRQLLLNAAWVKWFKKSLSPDHKSDRSDPYYIGDHMRSLPDKHWWQFDPRWWSLRLQTRLHFHLSQSLSREKSYYQLVLFLNHSAYAQVQPFSDTFGVLSQNLLNHPERLAEVNESSSPDLAARLNEWSGYRLPNPFKTAEQLKQALAQSFSVPEDLQGPLQGMLQRMSLVVSTLQEQIKTLDAEITALVRHSYPEVAHLLSVPGLGLITASGIAAEIGDLHRFETQPKWDNRRNIYRPRSLREVEDAVAKYAGLWWPQNASGQFQAEDRHLSKRGDAYLRYYLVQAADHMRRGIPSYAHFYQLKFEQATKHQHKRALVLTARKALGLIVGLLHRHENYRPEEAST

SEQ ID NO: 65176 - protein, 347 aa, unidentified
MTTIEDARVITGGVDTRADMHVAAALDSIGGLLGVQEFPATAAGYASLLGWLRGFGTLAVAGVEGTGSYGAGLARHLAAAGVRVVEVDRPDRQDRARQGKSDPLDAVSAARAALSGRASGAPRGRDGAVEAIRALMVAKRSARQERIQAINQARALIMTGPEELRARFVRRSPAQLIEAIAALRPRPGDVPGYATRVALRELGRRAQFLDAQLDRLDELIGPLVTARAPGLLALHGVGPDTAAMLLVAAGDHPERLRSESSWAHLCGVAPIPASSGKTAGRYRLNRGGDRQANSALWRIVIVRMNSHPATRAYADRRSEEGLSKKEIIRCLKRYVAREVYRQLRNGA

SEQ ID NO: 65177 - protein, 352 aa, unidentified
MITLGVDAHKAVHVAIAVDEAGRELSEWRGPNTPDAWASLARWATAFGPDCWWGIEGAWGNGRGLAQYLVAQGSTVFEISPHWTTRLRRSNRRQGKSDRLDARAVARCVREEAPKLPLVHAEDDSVVLDLLSTEREAAIAEATRLRNQIHALLSQIDPEYERHLPSLTSAAGLRALVSYTAQDGTLIQQHRAACVRRLAERLQLATTQADDVAEQIRLLAAARYEPLTRLCGVNLLTAGMLAGMLGPGRRFESEAQLAAYAGTSPLEASSSGLTRHRLNRGGNRRLNSVIYRIALTQAHFHPGARAYLERRVSEGKTRREAHRCLRRYITRAVWRLWQECLQLPVAKNTEAA

SEQ ID NO: 65178 - protein, 432 aa, unidentified
MTATKSLMEEQVMESETPFAALIGIDWSDQKHDICLVETETGSHELSVIPHTPEALNEWARHLRARFGGEPVAVCLEQSRGSLIYALMKYDFLVLYPVNPQTLSRFREAFTPSRAKSDPTDAEFLVELLIHHRERLKAWTPDDEKTRTLQLLVEHRRRLIGDQTRISNRLTALLKGYFPQVLAWFPNIRTTMVCEFLLRWSSLDALKGVRRQTLEKFFREHNSLRKETVEKRIGAITSAVPLTTDKAVIKSSVVMVRALASKMQTTLAAVKEFDREIEELCQEHDDFALFASLPGAGEVYASRLLTAMGSNRERWQSADELLCFSGIAPVMERSGKSSWTRWRYFCPKFIRQAFVEYAGESVRHSEWAQAFYMSQKAKGKSHQAAVRALAYKWIRIIWKCWQTREKYDEARYVECLRKRGSKLVPESAGAAA

SEQ ID NO: 65179 - protein, 417 aa, unidentified
MGLKIVYPICCGIDVHKSFVVACIAATDDKGVTTYRRRRFSTFTRDLRLLAGWLAENNCRDVCMESTGKYWIPVYNMLESSCKVVLAHPKYVKAIRGKKTDARDAKWIADIFKHDLVSGSFIPPPQIRQLRDLMRYRSKLTGFCTGEKNRAQNCLTVSNIKLDDVFTDVFGKSASAITDQLLLHPDGNFDVIPFLNGRCKSSPEKVQAAVDGLICPEQTEKLKIIRAHMDSLALCKSNLESVILSIAEQFQPQIDLLLTVPGIKLFSAISIISEIGVDMSVFPTAKQLCSWAGLVPQNNESAGKKKTTRITHAGAYIKPLLVQCALTVCKSDKHPEIKSRYLALRKRRGHKKAIIAICRMLLTAIYAILKKSETYNPNLYRKVDLIPDNRAFSVQQAIAFVRRHGFLVADSAGVLAS

SEQ ID NO: 65180 - protein, 326 aa, unidentified
MIVLLNEQDKVIYRKRLSNDLPTILEQLAPYHTEIQGLVVESTYNWYWLADGLMEAAYRVHLANPAAMQQYSGLKYTDDDSDACWLAHLLRLGVLPQGYISPKAERAVRDLLRKRAHLVRQHTANVLSVQNILARNTGSRFSVKRIQELTKQELTTWLAEETQVLAVTSSLMVLDCLRHQIKMLEQTVHKRLHHTPSYEQLLTVQGIGTILAQTITLETGAISRFPSVGHYASYCRCVDSTKISNGKRKGTGNVKNGNPYLAWAYMEAAQFALRFQPAAQRFYQRKLAKSRNNVVLARKAVAHKLSRACYYMMRDLVPYEATKAFG

SEQ ID NO: 65181 - protein, 355 aa, unidentified
MALQSWSTTMEQYVGLDVSLKLTAICIVDRTGKIVREGVVTSDPETIAAFIKSHAPHVARVGLEAGATSTWLWTELNGMGLPVICIDARHAKAVLKIQINKSDRNDAVGIARIMQCGWYKEVRVKDLDSHATKALLVSRALLVKIKRDIENQIRGLLKNLGLVIGRAKMNVFAARAAELAEARPELVAAVEPLLKAREAVGRQIADLDRKVMRLARNDAQVRRFMTAPGVGPITALCFLATIDDPTRFKRSRSVGAYVGLTTRRYASGEIDWTGRISKCGDAMLRSYLYEAANVLLTRIAKWSTLKAWGIRIAKRSGLRKAKVAVARKLAVILHRMWIEGTEFKWSSKEAASQPA

SEQ ID NO: 65182 - protein, 412 aa, unidentified
MLKIVYPICCGIDVHKGFIVACIASTNGQGVTTYQSKRFSTFTNDLRRCAVWLAKNNCKDVCMESTGKYWIPVYNILEATCTIVLAHPKYVKAIRGKKTDKKDAKWIADIFKHDLVSGSFIPPTDIRQLRDLMRYHWKLTNFTTGEKNRAQNCLTVSNIKLDDVFSDVFGKAASAITTRLLVSSEPFDVTPYLTKNIKTPVEKIQAAVDGEMCAEQAEKLRIIRSHMDALELCKLNLQSLILTTAEKYLPQLNIVATAPGIQAFSAIGIISEIGVDMSVFPSSKHLCSWAGLTPQNNESAGKKKTTRISRAGAYIKPLLVQCALCAVRAKQFPEVRRRYLALKKRRGHKKAIIAIARMLLTAIYNMLKKNEPYDPELYRKADRPPTHREVSVEEAVYILQRQGYLVTAPPTA

SEQ ID NO: 65183 - protein, 307 aa, unidentified
MSQVYIGVDISKHWIDISHPVHGCARHAMDDLDGFAAQARAEQAIVIFEATGRHDRPLALALRTAGARFVRLTPTAPKDLARVLGIKAKSDRADAVLLRRYGELLQPAPQDAAPQDTAALREYIVRRRQLVSLRQIERTRAAEHMPAQVAASGARVIALLSDEIAAIDALIAAEIKRSEMLSRKARRLQTAPGVGPVTAATLLAELPELGQLNARKLAALAGLAPMDNDSGQRRGRRRIKGGRCTVRRALYSAGMHASRGAGALRPFRDTLVERGKPPKVAITAAARKLLTILNAMIRDQKDFSYTT

SEQ ID NO: 65184 - protein, 338 aa, unidentified
MQITTIGLDIAKNVFQVHGIDAAEKVVVRKQLRRSQVLEFFKALPPCLIGMEACATAHYWSRELTKLGHKVRVMPARDVKAYVKRNKNDAADAEAICEAVRRPTMRFVQVKSAEQQSQLMLHRTRDLLMRQRTQVINALRAHMAELGMTAPQGYAGLRQLLAIIAGSADERLPAEAHASLIVLAAELQAMQTLITSIEKRIIAHHRSDEASKRLRSIPGIGLVGATAIVATVTDPKAFRSGRDMAAWIGLVPRQDSTGGKQKLGPISKQGDRYLRRILVVGAHSVLKLAKQKPEKYPWLMQLLARKPFKVVAVALANKMARIAFAILRGKTIYREIPA

SEQ ID NO: 65185 - protein, 375 aa, unidentified
MEHHSEAFVALDTAKLRNAVAIADAGRNGEIRYLGEFDNTEVGTRKLVAQLASKHARLTFCYEAGPTGYGLHRLIKSLGHDCMVVAPSLIPSKPGDRVKTNRRDAVNLAKLLRAGELTAVWVPDERHEAMRDLVRARDAAAKDYRIKRQNVSSLLLRVGRHYPGKKTWGQAHTNWLTSLKLEHREQRIAFEEMLLAVRQVRERIERLEQAMREAVADWSLAPVVEAVQALRGIDMVGAVTFLAELGDLSRFENPRQLMAYLGLTPSERSTGESVKRGGITKAGNTRARRLLIEAAWSYRFPPRVSKDMQTRIGAAPRTAREIAWKAQMRLCGRFRILTRKGKRPTIVVTAIARELSAFIWAIGREVVGSHATANQ

SEQ ID NO: 65186 - protein, 324 aa, unidentified
MVQRKELNFEGQNIYIGIDVHLKTWHVSILTESGCLKKHSQQSSAQALFEHLKKHYPNGNYLSAYEAGFSGFSTYYSLLDFGIECLPVHAADIPTGQYESVMKTDAIDSTKIARALKSGLLRGIYIPKKEVLDDRNVMRLRITLKRQLSGYKSRVKHLLYNNGVIYPECFQNSKSHWSKRYLKWVHEDVQLLSESRNSLDLLLRQVELFRKSLLEITRLVRTLSRNGRYGEAYENIVSIPGIGMITGMCLLTEIGDIHRFRNERQFASYLGLVPTSHSSGEKTSHGEMTFRGNKRLGPLLVESALVAIRQDRALAAAYGEYCTR

SEQ ID NO: 65187 - protein, 377 aa, unidentified
MRNVRFVGLDVHAETIAVAVAELGGEVRSLGVIPNRTESVRRLVGKLGKPQQLRVCYEAGPTGYVLYWQLTELGVHCDVVAPTLVPVKAGDRVKTDRRDAEKLARCYRAGDLTAVWVPDAAHEALRDLVRARLAAKRDQLRARHRLGKFLLRQGRRAPEGTTAWTGKYLAWVKQQRFEQAAQEATLLDYLHEVEHVAERIVRLERSIDVAVHSMPGKQQAVIAGLQCLRGVAKISAVTLVSELGQLSRFGRARQLMGYAGMVSREHSSGTRIQRGPISKAGNAHLRRIVTEAAWSYRHRPNLGAALAARQSGQSEAVKEIAWRAQHRLHARYRALMVKGKIKQKVITALGRELLGFIWAIGCELERTTDPKEVRRAA

SEQ ID NO: 65188 - protein, 339 aa, unidentified
MKYTPVGVDIAKHLIQVHFIDEHTGEVIDKQLRRQDFLMFFCNQEPCLIGMEACRGSQHWGRELTKLGHKVRLLQAHFVKAFVMGNKNDVMDARAIWMAVQQPGKDIAVKTEEQQSVLVLHRSRRQLVKFRTMQINSLHGTLLEFGKTIHKGRAAMERELPEALERMKERLPPYLITVLENQYNRLNELDSLIEDIEKKLTSVARQNETCKRLLDIPGVGPLIATAAVATMREASAFKSGREFAAYVGLVPKQTGSGGKIRLLEISKRGNTYLRALFIHSARAAALLPKEPGPWITELKKRRPTSVAIVAMANKLARTVWAIAAHGSKYDKNHVSIRSY

SEQ ID NO: 65189 - protein, 353 aa, unidentified
MAPLPSPTAPLKNVVGIDIAKDNFVACFGHSTLSQQLHFGKETTFDNTASGFAALLNWVTKQRASDSPLWFVVEATGVYYEELAYFLADNNQLLSVLLPNKVKHFARSTELKSKTDQLDARLLCRLGLERALPAWQPPTPALRQLRALARERQVLVRQAAQLKTRTHAYQHSYQPDNRTLARLAAQQQLLVSQLKALDQDLADLLKAEPELARKLGHLTSIPGIGLTTAIVVVAETNGFVLVENERQLASYAGLDVVQHQSGLSARATRISRRGNVRLRTALYLPAVSSLRYNPQQIAFYARLRARQPSGKPGVIAVMRKLLVLCYSLWKNDCAYDPHYHPAHVAEKEVAPTT

SEQ ID NO: 65190 - protein, 341 aa, unidentified
MNAIYYIGLDIHKKVIAYCIKRIDGELVRQGIVAAERKALKKWLSELPGPWCGAMEATIFTGWVYDFLKPHALELKVAHPAMLKAITAAKKKNDSADAEKIADLLRVNLLPECHMMPEELRELRRVLRYRNMIVSTAVKMKNKMSGLLMEVGAIYDKKKLHGKRYFGALLERVEDVPESVKALLKMSRNGLEMFEGIQKKLVMALRKNNLIRERVQRLMSIPGVGELTALTWVLEIGEVSRFSSSRDVISYCGLCSGQHESAGKEQRGPISKKRNKHLQTKLIETAKLAPHWNEQLGQLHEKELARGNKNRATLVVARKLVGFMLAVDRRETDFELLKKAA

SEQ ID NO: 65191 - protein, 347 aa, unidentified
MDQQSLYVGLDVSLETTSICVIDDAGTIIWRGKCSSDPDTITVIVRRHAPGAVRVGLETGQLSNWLTLSLRRRGVPVVCIDARHAKAALSLQINKTDANDAFGLAQVVRTGWYREVAVKSMDAHTLRMLLVARSRLVSQRQATANTIRGLLKTFGLVVVRGSKGLFPVRVREQIAGNPALIAIIEPLLAVWYAIRDQVRMLDQQVLARARNDQVARRLMTIPGVGVVTALAYTAVIDDPARFRRSASVGAYLGLTPRRYQSGEIDATGHISKCGDSLLRGYLYEAAAVLLYRDGRTSVLKSWGLGLAKRIGMRRAKVAVARKLAAIMHRIWSDHSEYRWTATRPITA

SEQ ID NO: 65192 - protein, 386 aa, unidentified
MQASSVATPTVEHCGTIFIAIELSQRSWLVTLHSPGRDRISHHKLEGGDHAGLLALIDRERARASRTTAGVPAVASCYEAGYDGFWLHRLLLAAGITNYVFDPASIAVDQRARRVKTDRIDGEKMLRTLMAYLRGEPRVVRIVRVPAGEQEDARRASRERGRLIKEQTAHTSRIKALLRLLGMAVGNPRRRDWLSWLAAQRDWQGQAVPPRILSEIRHEHARLMLVREQLDALAQTSAQADPAPAAVQMRERSELLLRLKCLGPAFATTLTNEVFYKDFRNRREVASYFGLTPSPWQSGGIDRDQGISKAGNPRARCAAIELAWLWLRHQPDSKLTQEYRRRTLDAGKRIKRVAIVALARKLVVALWHYLMTGLVPQGAVLKAVKV

SEQ ID NO: 65193 - protein, 314 aa, unidentified
MAEEKVYAGIDVSKKWLDIAIQPNDRTWRVANDMDGITVLLRQMKEIGPERIVVEATGGYEARVVQELCMAHLPVSQVNPLRVRRYAEGMNWFAKTDNIDGKVLAYFGEKANPRLTVLPGEGEKRLAALLKRRKQVLDMLTAEKNRLENADPDIREYIQSIIATLKEQLAELDREIAHLTKSTPHLKQKKALLTSVPGIGEVTSAMLIAKLPELGVCNRKQIAALVGTAPFNNDSGNRRGRRKTKGGREDVRSVLYMATLTATWCNPVIKAHYENLIEAGKLPKVAIVACMRKLLVIVNAMLRTQTAWKVVPVS

SEQ ID NO: 65194 - protein, 340 aa, unidentified
MSIMTIGLDLAKSVFQAHGVDESGATVLVKRLHRMQMLPFFSKLSPCLIGVEACGTAHYWARTLAAMGHEVRLIAPSYVKAYVKRGKSDSLDAAAICEAVQRPTMRFVPVKTVEQQGILMTHRARSLLVRQRTMLANALRAHLAELGFVANPGIANLAKLAEQALADKDVLPSYARTALKILIRQIMTISGEIVVLDQQLITWHAESEASRRPAALPGLGVITATALAATVTDPDQFRSGRQFAAWLGLTPQQHSTGGKTRLGSISKQGDRYLRRLLVVGATAVIRHIKDKPTPMADWIRKLIEKKPFRLVSVALANKLARIAWVVLTRKENYRPYELAA

SEQ ID NO: 65195 - protein, 419 aa, unidentified
MSFKILKFKCCGLDVHKTWIYACIGITDSNNRTEYKQARFSSFTKGLNELCDWLAKYNCTDVCMESTGKYWIPVFNILEQHNLWVTLSHPKYTKPMKGNKTDRKDAKWICDLYMCGMVKPSFIPPADIRELRDLVRYRYKLTCMITGEKNRAQNCLTVSNLKLDDVFSDVFGKSSRSITEQILQHPGEKFDVAPFVHGRCKTPIEEIQAAVDGAISKEQAVKLRQCLDHIDELNKHISEIEQEILRLSDKYEAALNLIRTVPGFDKNPMTAVQILSEIGGDMSVFPTAKHLVSWAGCCPRNDQSNQKIKSTRISRAGSYFKPVLVQVANALIKSKKHLEFTNRYKRIKARRGHKKAIIAICRMILTAIWHILSDLKPYTPEGFLESHPVKEGKVLSSSQALNFFKQRGYIIKDEPLSVS

SEQ ID NO: 65196 - protein, 371 aa, unidentified
MAEGSATTQQSLHLATFAEKEEAGMNFYTAQHKHYCGIDLHARSMYVCILNQQGVVLLHRNLPCDAQRFLLVIQPFREDLVVAVECIYSWYWLADLCSKEGITFVLGHALYMRIIHGAKAKNDRVDSHKTAVLLRGGLMPRAYVYPAEMRATRDLMRRRLHFVRQRGSLLAHIQMTHHQYNLDSPGKRITYRSNREGLGEGFEDVSVRDSIAADLALIDHYEVVIGELELAVLRQARVHDPNAFRLLTTLPGIGRVLGLTILYEIHDIRRFPTVQDFASYSRLVKCEKTSAGKTLGTSGGKIGNAYLKWAFSEAAVLFVAKCAQGRTMLARLERKHRKSKALSILAHKLGRAVYFMLARNQAFDLERFTRS

SEQ ID NO: 65197 - protein, 340 aa, unidentified
MDEINIVGVDLAKQVFQIHGATADGRAVFRKKLSRPQFAKFMAALPPCIVAMEACGTAHYWGRELARLGHDIRLIPPVYVKPFVKRQKNDAADAEAIAEAAQRPNMRSVAVKSAAQQARAMLFRTRDMLVGQRTQLVNALRGHLAEHGIVLGKGIGNVERLARRLEEDGLPDLVRHLGRLYLDQIARLGAEIENLDKRIVAAAKENGVARRLQTMPGIGPVCAMAITAFAPDMREFRRGRDFAAWLGLVPRQHSSGGKQKLGRTSKVGQRDIRRLLIVGAMSIVHWRGRDGGRPGSWLARMLARKPRILVAIALANKMARMVWAMLVREEDYRDPTGAVC

SEQ ID NO: 65198 - protein, 321 aa, unidentified
MTPFYLGIDVSKAKLDCALRLPNGKFRCKVVANTAQGHADLVEWLARHGAADVHTCMEATGVYWENVAQFLSTRGFTVSVVNPAQIKAYGASRLARTKTDAVDARLIADFCAERRPPAWQPFSDDELALRAMVLRLDALQAMRTQESNRLEVSRDAVSQGIREHLDWLDQQIKSLAKEINDHIDANPGMKDKKALLDSIPGLGERTIAILLAFFGDPGRFGNSRQAAAFAGLDPRRHESGSSVKGKPRLSKVGHAFLRKALYMPAMVALYKTDWGKQFRDRLAASGKPAKLIIGAMMRKLLHVAFGVLKSEKKFDPALHNA

SEQ ID NO: 65199 - protein, 320 aa, unidentified
MLSFCGIDVSKDRLDVMVLPDEYSSSVPNDPAGWAILVEQLRGFSITAIGIEASGGYERGAVRSLQAAGMPVRQVNPFKLRQFAKASGVLAKNDPLDARMIASFVGIMPTRPAQRTMPAAEQLVEMLAVRRQLSAEKTAAENASRLLEDLMLQRLSRRRIARLAADIQLLDKRLVEIVATDATLAHRYRLLTSMPGVGPVLACTLIALLPELGGMSRKQVAALVGVAPYAFESGTLKGRRCIWGGRANVRQVLYMAAMSASNWNPVLKLFHDRLKGAGKLPKVVIVAVMRKMITTLNAMVRDDIAWADRLSGRHSVTTAR

SEQ ID NO: 65200 - protein, 376 aa, unidentified
MAQTDVQYPTIHLAIELSRSAWLVAARLPGVEKPSLHRIEGGDTAALLALAAALRARAAARLGTPVRVACCFEAGRDGFWLHRLLTAEGVAAYVLEPTSILVNRRARRAKTDRLDALGMLRVLAAYLGGDRQACSMVRVPTPEEEDAKRPHREREELVRERVRLENRIAALLATQGVRERPSLRSWERDLAALRTGDGRPLPPHLRAELDRLRRRLVLTLGLIREVEAERDAALAAGPRDAAGRKIAALCRLRGVGANFAAVLTREVFYRAFDNRRQLAGYVGLAPVPHQSGEADRDRRISRAGNARARTTLIQLAWLWLRYQPDSAPARWFRDRVGALRGRTRRIAIVAMARKLLIVLWRYAETGLVPEGVEVAA

SEQ ID NO: 65201 - protein, 439 aa, unidentified
MANCPHEDLPAAHIRMVPVVMSKELYKVCGADIHKRFLVATILSRDGTKHVRRFRTSPQDLLDFRVWVVENDCERVAVESTGRLWIPIHVALEGAVELIVANAYKIKHTPGKKTDVADSEWIAELCLNNMIEPSRIFPKVDRELRSLTRAREGYVRDLSREKNRVHQVLDSCSIKLSTVLSDIFGVTGLYILNGLVKEKSIDEIIKRLPVKRLRKKAPGIREAIMPKLDDTQIVLLRGSLELIADIRKRIEDLESEIKKRIATRANDMMIARSMPGIGFISAVTILAEIGNYLDFEKPEQLAAWAGIVPTLYQSADKNVLGNITKHGSKHLRWILVQVAHAIAHTKDSKLKRFFLRIQAKKGYNVAIVALARKVLCILHHLLVNQEMYIEEVGGIAKEPKTVELEEEDYSSAEISLEQMIGYLSKAGYEVTWKKSGVGG

SEQ ID NO: 65202 - protein, 343 aa, unidentified
MEHFGGLDVSVKETSVCIVDGTGGIVREVKVASEPEALLPVLTNPDYHFKRIGLEAGPLSQWLYSALAEVGLPVICVETRHMRAVLKAQINKTDRNDARGMAQMMRVGLYRPVHVKTLRSQKLRMLLTHRQLLQSKAIAIENELRGTLRNFGLKVGMVGAAKFEVRINELVANLPDLAVLVEPLLVVRRALREQIGVLHHRLLAIVRDDEVCRRLMTVPGVGPVVALTYRATVDVPARFRKSKSVGAVFGLTCSRDQSGERDRPGAISRCGDEMMRVMLYEAAQVMLTRTNRWSWLKAWAMKIARNRGKKKAIVALARRLAVIMHRIWVDSTEFRWTREIAAG

SEQ ID NO: 65203 - protein, 308 aa, unidentified
MNKDKVYCGVDVSKKYLDTFISGKTFRFENNNKGIAKMKKSALNAHFIFEASGGYERIAAWPLMNEGQNVSIVNPGRVREFAKSQGYLAKTDALDARVICEFAETKNPAVTVLPSKDQQRLTALVDRRKQLINNRTSETNRIDTAIDSYLIKSIKKHINYLNKEIHSIDEAIKKLISTSEEMSEKSKSIQEIKGLGPISAMSLLAYMPELGTLSRKQVAALVGVAPYNQDSGEKRGYRKISGGRKELRNILYMGAVSAIKSPGEMQRYFKRLVEENHRPKKVALIAVVRKLAIAANSAVKNPEFEACN

SEQ ID NO: 65204 - protein, 420 aa, unidentified
MKVVYQTCCGVDVHKSFLVATIIKTTSGVQPSYQKKRFSTFNNSILEFKKWLLDNSCRDVCMESTGKYWVPVFNLLEDELNVTIANPKWVKAVKGNKDDTKDSKWIGNLFRLGLVPGSYIPCKPIRILREFTRYRYKLTSCRSSEKNRFQNALTVCNVALDSVVSDIFGKSATSVIDYLLKQPDNSINHEEISSRLLRSLKKKSESVIESIEGYQMTDAQKYRMRLVHAHMDYITSMLADIDSMINSLVEPYENAVQLLCTIPGVDRSSAITVISEIGTDMTQFSNSKRLCCWAGLTPGNNESAGKKKSVRITRAGVYLKPALVQVAHAAVKSNKSPYYKAKYERIMKRRGKKRAIIAVARMILTAIYHMLSTGEAWNPTDLYKIDMPEPLKNKQKEKAVKQALKLLIAEGVIKESQLVS

SEQ ID NO: 65205 - protein, 400 aa, unidentified
MDKDRIVAGLDVHKDTIYLCVMDNTEAVIFAKVYGTLTPDLELMCSEMVSHGVTEAAMESTSTYWVPVWNALCESMSLKLVNPYFIKQLPGRKSDVKDAQWIAECLLKNLIRGSFVPDKTVQDMRKYNRRIFDLNEDLTYNSNKQDAALQRCGFRLSNYVSRVNGKSYQKCVRAIITGITDPEELVKLIHGKTLRKYGRNIIKDAVTGDFHQADICLLKQYAELIEVIERQIEECRNALIAMCQEHFPKQFKRLQSIPGVKERAASAIIAETGADMKPFEKATNLVGWCGLKPRNDISNNKVKSNRTTHGNRFLRQILIEISWVASRTRNCFFSNFSYVQCTQRHKNKMKIQVAIARKLLVAVWHMLTKDEDFIDVYLKRLEKQAEWQNDIQALESLLVG

SEQ ID NO: 65206 - protein, 323 aa, unidentified
MMSTQYNYAGIDIAKRNFVIAVSSLSKTKTETNNPKGIAHTIEYLKKHNVALVVMESTGGLEIPAAKAIHRSGIAVIIANPRQTHQFAQSQSLTKTDAKDAQMLAFFAQMTAQKEGWQTMLYQPPTEAEEVLEALVNRRNQLVDMRTAEKNRLHQVHETQVESVKQLIAHFDRLIDELDKQIDDHTHTHFDGKAKVAKQIKGIGSTTTATLMAMLPELGRLSHKRLASLVGIAPHPRESGETKFKSRCFGGRSAVRKALYMATVVATRFEPLIRDFYQRLLSKGKPYKVAVTACMRKLLTILNARMRDYFTENGTTENGIQTA

SEQ ID NO: 65207 - protein, 323 aa, unidentified
MKVVYPICCGVDVHKTFLVGTIISTTNGVQPHYQKKRFSTYNSDLHRFADWLHTNNCLDDCMESTGKYWVPVFNILEERGIRVTIANPKWVKAVKGNKDDTKDSKWIGDLFRLGLVLGSFIPSKKIRILREFTRYRYKLVSMKSSEKNCFQNAFTVCNVALDSVVSDMFGKSATAITDYLISEESFNPEYCVSLLQRSLKKKSDSVLESIEGYSITDEQKFRMRIVRSHLDYITDAIAQVDSAIDAMVAEFENTISLLRTIPGVDRNSAITIISEIGNDMSQFDSSKRLCCWAGLTPGNNESAGKKKSVRITRAGVYLKPALV

SEQ ID NO: 65208 - protein, 407 aa, unidentified
MICVGIDVSKRKSTVCFMAPGDKIIRRPFDVKHTKEELQPLVDEIRVQAKYDEIKVVMESTGVYHLSIAYFLQQNGIFVSVVNALKVANFNKAENFRHTKTDSIDSTNIARYGIAYWAKLPQFDLNGDKYFLLKRLCDAYLNFSEERSRILLQLQSQLEQTMPGIFDLFGGFDINSGKDKLLDFLERYCHIEDIIAKSEAEFVASYCGWAKEKGYRSNESKAATIYAQAKNGIPSIPNNPIVRETFMWYVGLLRRADETLMASLTRMEDIAKDLPEYELVGEMGGVGRVTRVALIAQIGDVRRFKNKHSLICFAGLTPSIHESGKFRASQNHIVKKGPARLRKVLYQVMMSLVMHKIPKDDAVYRFIKKKEAEGKYKKVAKVAGMAKFLRIYYGRVMHLYRDLGLAA

SEQ ID NO: 65209 - protein, 314 aa, unidentified
MKVLQEINVGVDTGKAQLDIFIRPIGEFFTVENNPSGIKEAIKRIKKHKPTRIVIEATGRLEMPFACAAAKAKMPIVVANSYRVHKFASSTGKLAKTDKLDAQMIAFYGEALQPRETQLKPENIQLISDLLARRSQLLEMRTMEKNRLSILPKTVSEPIKQHIKYINKAADKIEVKLDTLIEATPQWQQLMKILLSVKGVGKVLAYTLISELPELGQLNRKQIAALVGVAPMNRESGAYKGKRKIRGGRHRVRTTLFMAMMSAIQFNPKMKAIYTRLVEAGKPKKVALVACMRRMITILNVMVKNGAVWDDSLA

SEQ ID NO: 65210 - protein, 361 aa, unidentified
MQATMTCVGLDVHARSTHAAAIDVVTGELRRVRFGEGTEEVVSWLADLNAPVRAVYEAGPTGFGLARQATKAGVHVVVAAPSKTPRAKGDRVKTDRKDAELLARLLLAGQLKPVVVPPDWLEAIRHLARTREQVRRDLARARHRVSKLLLVEGRVYPGATTWNWAHHNWLASQQFDFEATQLAFVDRLAAVDGLLARRRSLDERLSRIATDERLWPTISRLRCFRGVDTLTALMLHLELGGDWGRFSSPRQLSSWLGLTPSLDQSGESKTHGSITKTGSSIARRLLVESAWQYSRRPRIGQTLLSRQDGQPDHILQIAWKAQHRLHRVHKRFNARGKPANVATVAIARELAGFLWAAATAP

SEQ ID NO: 65211 - protein, 402 aa, unidentified
MRRCIGLDVHREFAQVAIWEDGVVRQAGRIALTPEGLRDFAASLCASDEVAIEATGNTHAIARLLERHVGRVVVSNPQKTRAIAEAKVKTDKVDAAVLAGLLAADYLPAVWLPDEATFALRRQVARRAHIVRQRTRLKNQVQSILHRNLIPRCPAADLFGSKGRLWLAAQDLPPDEHQAVQALLRQLDFHGQELRIVDAELGRVALERAEVRRLLTIPGVDATVALAIVAAVGDFGRFSSPQRLVSYLGLNPRVRQSGGQPAQHGRITKQGRAHARGMLVEAAWVAAKTPGPLRAFYERVRARRGMQVAVVATARKLATLCWHLVVGEQDYAFARPSLTDKKLRALQLRAGLPPRRGQKGTAAAYSLKEVRRRERALTEQAEVAYRQLVAGWQPKRPASKPR

SEQ ID NO: 65212 - protein, 359 aa, unidentified
METQRKALSFKGQNIYIGIDVHLKSWSVTLMSQATQLKKFSQSPDPEALHAHLVRNYPEAEYYSVYEAGFCGFWIHYRLIGLGIHNIVVNPADVPTTTGEKLRKTDAIDSGKLARSLRAGELKGIYVPKSESLEIRSLIRLRDSITKDQTRQKNRIKSHLRYLGTEIPEEFSGPCSCWNKRFVVWLKGAETNTAYGRRTLDFLVRQYESLRGQRLEMLRAVRALSRTERFEKPLENLMTVPGIGQLTGMALLSEIDDIRRFKSADQLAAFIGMIPMCHSSGEHEGVGDITVRRSARLRSVLVEAAWVAVRQDPALSMAYGNYCKRMAPGKAIIKIARKLVNRIYFVMKRNQPYVNGVVA

SEQ ID NO: 65213 - protein, 343 aa, unidentified
MHITVLGIDLGKNSCSVVGLDETDRVVLRRRMRRDGVVRFAERLSPCTVAMEACCGAHHLGRELAYFGHAVRLMSPEYVRPYVKAHKNDDRDAEAIAEAATRPTMRFVEIKSEEQLDLQTLHRSRSRLVSERTALINQLRAILLERGIVVAQGRRKLEQRLAEMLADGEVLVISPRMRILIEDMRAQWRELDRRIAVFDEEFARHARENAAARRLATVPGIGVMNATALVAAVGNAETFARGRDLAAWLGLVPRQATTGGKPRLLGISKRGNTYLRTLLIHGARAAMPSLSKSATPLGEWLRGLLARCHPNTATVALANKLARIAWAVLRRECSFRMVPARAA

SEQ ID NO: 65214 - protein, 343 aa, unidentified
MKLSRVGVDLAKNVYQLHGVDRHGRTVWKRRLRRGQWLQVLTDTVEPSCEIGMEACTGAHHWARELQARGYTVRLIAPQFVKPFVKSNKNDANDAEAICEAMSRPHMRFVSVKTVEQQDIQATHRVREELKAHRNAKANQIRGLVAEYGLVAPKGILALRRTIPEWLEDAENGLTDNFRSLLHGVWNDLLTLEDRLKGLDKEIEKLARSFEVTKRLQQLRGVGPLVATALVATVGDGRQYAKGRQMASALGLTPRQNSSGDKYRLFGISKRGDVYLRTQMIHGARAVVSQAKHRDDPLSRWVTDIAKRRHPNVAAVALANKTARMAWAMLQNETNYDASLAVG

SEQ ID NO: 65215 - protein, 416 aa, unidentified
MNAVGIDVSSRKSTVAVLRPLGEVVCLPFDVTHDIAGLASLAEKLKALDGETRVVMEHTGRYYEAVAKALHEAGLFVCAVNPLLIKEYGANSLRRVKTDKADAVKIARYALDNWADLRDFTPMDAIRYDLKTLNRQFQLASKQRTASANNLIALLEQSFPGIRKCFDSPVRSDGTQKWVDFAHSFWHVDCVRKQPFPAFCERYRKWCKRHAYLFKQSNAEEVYALAKRAVVLTPKSKVVKVLVQEAANQLISISRSVEVYRAEMDRLAAMLPEYPVVMAMYGVGKSYGPQLMAEIGDVRRFERKQALVAFAGIDPMPNQSGDKNVRSNKSSKRGSPYLRKTLFNVIRTYLQCAPQDEPVFQFLNRKRAEGKPFYVYMLAAANKFLRRYYAKLRDYFASLNPLQPVDPIPTILKATL

SEQ ID NO: 65216 - protein, 400 aa, unidentified
MLSIGIDVSKGKSTVCGMKPGGEIVYTPFEVQHTREGMSELVSLLHNSGEEVRAVLESTGSYHCPVVAALLENGIFVSVVNSLRMKRFCSQSIRKVKTDRIDAMQIALYGLAYWQELQPTRLPEDTYRELQLLARQYYQMTSLLIKAKVDFNALCDQVLPGMQELMSDHAGRHKLSDFVLRYRHTTHILEMGETRFRKDYCKWAEKKGYRNRERMAALIFATAQNGIPVLPNAPSTQIVITEAIRVLHTVEASRDAILTQMQALAKTLPEYSLVREMPCIGDTLAPRLIAEIGDVRRFHSKRALIAYAGIDAPPYQSGKFCANNRHISKRGNRYLRKTGYEVMQSYVMHKPANDPIFTFIEKKRGEGKSGKLAMVAGLNKFLRVYYGKVTELYRSLPAIE

SEQ ID NO: 65217 - protein, 452 aa, unidentified
MAKKSNRRCDTLPILHPDAAGIDVGASELFVAVSADRDPHPVRSFPTFTRDLHALADWLVECGIRSVAMESTSVYWIPVYQILEARGLEVYLVNAQHVKNVPGRKTDVSDCQWLRYLHSVGLLRASFRPPGFICAIRSLWRHRASLIQMAAEHVLHMQKALDQMNLQIHRVLNDITGVSGLRILDAVLAGERGPLTLARLCHGGVKSSEDIIAKSLEGDYRPEHLFALRQSLAAFRYYQQLVLEADREIQLQLGELKTAATAQPTTPPRTKANPHYARHYEPKTFDLRGELYRVFGVDLTNVPGISALTAQTILCEIGTDVSRFRNASAFASWLGLCPERKISGGKVLFTKSRRVRSRVATALRMCAQSLHHAKDYLGEFFRRITRKLGRPQAITATAHKLARIVFHLLSTKEDYDESVFHKCEADTIRRAEYRLRRQAAQLGFQVIPAENI

SEQ ID NO: 65218 - protein, 510 aa, unidentified
MVLIPLGRLPTSPIPLLARGALSFHHIIRDPETPMVVPNQEPNKPSKPKKSTKRNKRRARSHRVPVPDSPLALPVVHPDAAGIDVHSDMHMVCVPPDRAADRVRHFGANTVDLQEIVTWLKECGVKTVALESTGVYWIPLFELLESEGFEVNLAEPGQLSRCGARPKTDVLDAQWIQRLHSYGLLRGSFRPPDSVLALRAYCRQRQMQVRYAAYHVQHMQKALEQMNVKLTEVVSNITGLTGMSIIRAILDGERDPVKLAKLRHERCDHTEEEIALALDGTWRPEHLFELRQAHELYQFHHRQITECDKQIEAELAKFANRAGEKTRSSKPRKRGRKSNDIRFDASRPLFQALGVDLTKIDGIDVGTVLVILAEIGVDISRFPTEKHFAGWLGLSPPQDQSNKTKKRRGHRKGTNRVTIALRLAARSVGRTMTPLGSFYRRIRSRIGGLGAVKATAHKLACLVYRMLRYGEEYVTQSMEEYEAKMKANMLNALKRKAAAMGFQLSPLPAQ

SEQ ID NO: 65219 - protein, 408 aa, unidentified
MDLTPIHKRVIALDVHQAKVTACAVVEHDDGRVEVTKRDFGAFKRDRRALAQWALEMAPEVVVMQSTGVYWKSPFAALQAVGLIAWVVNARHVKAVPGCKTDMADAQWLATLARAGLLRASFIPPVQMRQLRLVARQPQKLVGMCSAEKNRLHKVLVDAGIRINVLVADIHGQSARAMVKALIEGQPMHEVLNHKGRLRASRQELCEALSTEQFSAVHRFVAQEIVQHIEQIEQRIARMDQYLLQGLQPWQPQLRLLQTLPGIDEQGAAMLLVEIGADMSVFGSAERLASWVGICPGNNESAGKRKTGRIRKGNAWVRRLLCEFAQAAARTRCALKAKFDALSIRKGHKKSVVALAHKMLRTIYAMLSNASHYQDKEVDYEALNVQRNAPRWIKMLRKHGFIATPAAA

SEQ ID NO: 65220 - protein, 360 aa, unidentified
MFRRVPTQGSAWAGFDLSGMSPLGGGGTTPGIFQVHGVDSTGHVVIRRQLKRRAVLAFFQKLLPCLVGIEACASSHHWSRELQALGHTVRLMPPAYVKPYVKRQKNDMADAEAICEAVTRANMRFVPTKTPEQQSCLMLHRTRHLFIRQQTAVINSIRAHLAEYGIVAPVGRKGVTELLHVVADPSDKRVPKVARACLAALGNQLLTLKEQIMEFDRMIMVWHRSNETSKRLHYIPGVGPMLATALVASVADARTFRSGRNFSAWIGLVPKQHSSGGKDRLGSISKQGDRYLRSLLVAGALAVIRYAKIHGTKHRPWLTALLARRPTKVAAIALANKIARMAWAMMAKGERYKQPVALAA

SEQ ID NO: 65221 - protein, 339 aa, unidentified
MNLYAGLDLHSSNTYIGVLDQQFNRIFKKRVSNDLDLILKTLEPFRARLKGLVVESTYNWYWLVDGLMDAGYACVHLANPCAIKQYEGLKHSDDQHDAFFLAQLLILGILPQGYIYPKETRPVRDLVRKRLFLVQQKTAHILSLQSLLARCCCQRVSSNQLRKMTSHDLRQWLKEEHLVLSAQANLDNIVFLKQQIGRLEAAIQKQVKLSDAFNCLLTVPGIGKILAMTIMLEAGDIRRFATVGNFASYCRCVSTQRLSDGKSKGSGNRKNGNRYLSWAFTEAAQMARRFNSRFRSYYDRKAAQTNSILATRALSNKLARVCYYIMRDRVEFREELASH

SEQ ID NO: 65222 - protein, 444 aa, unidentified
MAMRKREDEVFPNAAGIDIGASSHWVAVPQHLAQAAGDEPVREVGAMTDDLNALARWLVKLGVDTVAVESTGVYWIPVFEVLEQHGLKVWLVDARQMKYVPGRKSDVQDCQWLQKLMSLGLLRAAWRPSAEVCVLRAVARQRETLITEQASWVQRMQKALVQMNIQLTEVITDVMGQTGQAIIRDIVAGQRDPKVLARHRHRRIKASEADIVKALTGNWREEHLFVLKQALGVYDDISRHLAECDAKLDALLDQRAAAKVDLGPTPRAGSKARAEHDIRQRLADWAGVDLTRINGLGVTIVMKLLTEIGPDLGRFATVKHFCSWLGLCPGTKISGGKVLSAGTRRSASRARQALKMAAQSLCRSESALGAFYRRLCARMDKPKANTATAHKLARMVYFMLTRGEAFVDQGQQRYEEQQRQRSVAALKRRAAALGFQLNPVGTVA

SEQ ID NO: 65223 - protein, 417 aa, unidentified
MDVLHDRCAALDVSKKDVKVCLRTPGARRNQRHTEVRTFATTTNALLAMRDWLVAEQVSLVVMEATSDYWRAPYYLVEDVLNVELINAKQAKAMPGRKTDVSDSVWLAQLAECGLLRASFVPPEPVRQLRDLTRYRSVLADERVREAARLEKELEDAGIKLSVFVSDILGVSARAMLEALVRGERNPQVLAELARGRMRPKIPDLIEAMIGRFSTHHAFLCRLHLDRIDQLERDMAKLSTRIEEVMTPSRDALTRLATIPGVSQRVAEVIIAETGGDMARFPTAAHLASWAGVCPGNHESGGRRKSGKTRKGNRWLRDALGTSALSATRSKGTYLGAQYARLVRRLGSKQKALVALQHSILTSVWHMLSANTDYHDLGSDYFLRRDPERERRRAIAALNKLGYTVTLNPIEPTQAAA

SEQ ID NO: 65224 - protein, 316 aa, unidentified
MTNTPNFVGIDVSKAQLDVALRPSDERDTLVYDAAGIDTLVARLRHVAPTLIVLEATGGWERPLVRASVAAALPVIVANPRHVRDCAKATGQLAKTDQLDAVVLARFAEAVRPTLRPQPDAATDALAALLARRRQLLDMLTAEKNRLSTAPTRVQRRIRAHVTWLTAELARLNEDLDAAIRQSPVWCEQEDLLQSTPGVGPVMSRTLRADLPELGTLNRKQIAALVGVAPLNRDSGTLRGKRQIWGGRAPVRAALYMATLVATKCNPVIRSFYLRLRGVGKAPKVALVACMRKLLTILNAMMKHRTPWRALVAQQA

SEQ ID NO: 65225 - protein, 340 aa, unidentified
MKHVAIDLGSRESQVCIREADGTILEESKQPTKRLVELVKKWDEPRRVILETCSEAFRIADAARAANHEVRVVPATLVRSLNVGARGIKTDRRDARALSEASCRIDLPSVHIPSAASRELKSISGAREELVESRTKLINNVRGWMRTQLWRLRSGGAESFHKRVRAHAEMLSTKLPEHVERMLQVIEVLTTQIRAADAQVQRFAKTDAVCVALQTVPGVGSITAVRFRAALDDVSRFNSAHAVESYLGLTPGENSSSERQRRTGITKAGSTAVRRMLVQAAWSAIRRAPNEPMVKWSMRISERRGKFIGVIALARKIVGIMFAIWRDGTIYQPSRSAAIA

SEQ ID NO: 65226 - protein, 424 aa, unidentified
MSKRKYHAESLDQVEIGGIFKKINSDKVIVAVDVAKEDFFASVAGEDGVVVKTIKWQHPTQTLLFLEFLQALGDPSRVEIAMEPSGGYGDSLRWQLYTRKYEVYRVSGKAVHDYREVNDCVPSSHDEKACALISELHARGRSKKWTFATDSQREFKARATQLNAYDKAYRQNVNRLHAVVCKHWPELAQIIDLRCATAQTLVHHYAAPQAVLQNSHKARDLMQRVGGHLLQKEKIDAVIDSAKETLGVPQLEAEREVVQNLAGQVLHYRQLKAKAEVKIRKLVKQTPPAKEMAHAIGKTTAAIIIGATGDPANYNSSAAFVKALGLNLRESSSGKHHGAHHITKRGSSLARKYLYLAVLRLIHRNPIVRAYYGKAVAARGGKQTMKVLIGIMRKLGASLYHVAQGNAFDASKLFDVRRLEPKAS

SEQ ID NO: 65227 - protein, 356 aa, unidentified
MKDYTQKTIYIGIDVHKKTYAVTAICDGIVVKKDTLAAYPEQLVRYIKKYFNGATVRTVYEAGFSGFSLHRYLLAQGIKNIVTHPASIKVSARDRVKTDKRDSLKMAKQLSNEELEGINVPSEKREQFRILTRTRDQLVDHRKRISNQIKSLLFTQGLIDPQDDKKVCKSWLKKIQQFEMSEEMKYSVDLLAQIWLDLDSKIKEVLKKLGEQAKKDSIDVIYRSVPGVGALSARILANELGDMSHFYNEKGLFSYTGLTPSEYSSGEHKCLGNISRQGKSLLRKILVQVAWSSLKKDKRLLEIFERISKKAGKKRAIVAIARKIAGCIRSCFKTGTLWCTNAPISNEFLNTKVEAC

SEQ ID NO: 65228 - protein, 522 aa, unidentified
MAPRKQKAAQVSPALPPQLATANLHAAGIDSGAEAHFVAVPPSDDPQPVRSCGAYTADLEALADWLATCGITTVALASTGVYWIPLLELLETRGFAVLLVDPQQVQKIRGRPKSDVYDCQWIQRLHTFGLLARAFRPADQVCGLRSYRRHRAMLLTYAGQHIQHMQKALTQMHIKLQHVVSDLTGVTGMAIIRAILAGERDPVTLARLRDYRCQHSEETLAKALYGQWREEPLFALAQAGALYEVYHQQMLEGDRQIEAHLSTCAEHSPDQAPPSPPTRKRNQPTFDVRGSLQRVTGVDLTTIEGIDDTTALIVISEVGLDMSRWPTVKHFTSWLGLCPHQQVSGGKVLSRRTKSSANRVATALRLGAACLHHRHSALGAFFHRMKARLGTPKAITATAHKLARLIYTMLKHGTTYVQRGMDDYEQQYRERAVQSLTRRAKAFGYTLVQTPVGTWELTLNHLTREQFLGRQWNEKSLFLWSKLCSHAKRRLALQPLYPVRELGILRRGLAILVLCRGDKPLL

SEQ ID NO: 65229 - protein, 370 aa, unidentified
MLNATTFIGLDVHARSIKAFGFNVITGEEFSSSFGYDHVAVSDWISSLPQPAKCVYESGVTGFDLQKKLTQDGIDCVIGAVSKMIKPAADKKKKNDRNDAKFLARMLSVGNITEVWIPDDECEAARDLVRALEDATEEVKRSKQLLSKFLLRHGLIFNECSPTGQRKKNWTLAYWRWIKEIHFKEKTDQKTFEYYIDRVKASLEEKKRLEDLVKELACLPRWKKRVDSIRCIKGIDIISAANLVFEADEFSRFKNARAFASWLGLTPSEYSSGESVIRGGITKAGNKHLRRILVESSWHYLYASPSAKDLAKGQSPDPLARKHANKGTRRLTERRRYLLERGVQKNKANIATARELAGWVWAVGKIVEDN

SEQ ID NO: 65230 - protein, 366 aa, unidentified
MKKISTVQVFGNEIFKEQQLTIGVDLGDRWSFYCVLDEAGKIILEQKVSTTPEAMKQTFSRMPQSRIALETGTHSPWASRLLRELEHEVIVAHAQKVQLITKSNRKDDRHDARTLARLARIDPELLGPVRHRSAKAQIHLTIIRARAELVSARTALVNAARGLVKSYGERLPKCGTQQVSRELAAALSTELRDVLEPLLKEIESLNERVKEYDERMEKIAKEVYPEVSLLQQVKGVGTQIALTYVLTIEDPHRFLKSREVGCFLGLQPGRRNSGESEPQKGISKAGDRYLRTMMVQGAHYILGPFGEDSDLRRGGRKLAERGGKNAKKRAVVAVARKLAILLHRLWVSGEVYEPLRNSQKAMPAVA

SEQ ID NO: 65231 - protein, 346 aa, unidentified
MHYIGMDCHITTLDFAVVNEAGRLVKANRVPTSVNGFMEFVKMVPPPRTIYMEEGTLAAWALETCVRFREKLVITDAKKNHWIGSSGQKGDSIDALKLAQLARGGYIKEIHHPVGQRRRFRELMIAYHDTVRSTTRIKNKIKARFRQNGIQCTGATVYSETHREEWKGKLPQEATLLLILDGLWRQLKQSEQTEEELLAVARAQAKQYPEIKLFKDIPGIGFIHAATISAMLETTYRFADKRKVWMYAGLGIMTRSSGGKIYSEKLSTDYNRLLKYTLKQAAEAAIQAKDNPFRRKYLDMTLLHGIAPHRAKLTIARDMLATMWAMWRKGEKYSPEIREKSSCKQG

SEQ ID NO: 65232 - protein, 393 aa, unidentified
MSESTPLFVGLDVHKDSIAIAHAQGHSADPPVFVGEIGTRDADLAKLLRRLQSKSADLVFAYEAGPCGYGLYRDLTRRGFPCQVVAPSLIPKKPGDKVKTDRRDATELARLLRSGDLTPVYVPTIDDEAIRDLCRARDAARLTLKNAKLRLKAFLLRLGRPSQGRADWNDAHRRYLAKVVCPTPTQQIVFQESLRAVDEQVDRVQRLADELRERAPAWRLYPVVQALQALRGVQFLVAITVVTELGDLTRFENPRQLGAFVGLVPSEDSSGPRRRLGAITKTGNGRARRALVEGAWAYRHPAKVSEHIQKRIDALPKPIQDLGWKAQVRLCKRFRRLVARGKHPNVSVTAIARELIAFMWAIAKEVPIKSPSSTRSRVGVGVRPRLSAQPSPA

SEQ ID NO: 65233 - protein, 321 aa, unidentified
MTEPHTVCVGIDISKAQLDVCVLPDGSRFSVARDDVGLAQLVKRLRGLPLQVIAMEATGGLERPVAIALYDAKLPVAIVNPRRVRDMARGLGADAKTDRIDAKMIARFAEITRLAEQAVPEATARQLDDFVARYRQLVGMRTQEKNRLQQNTDTKIARSIHRVIAVFDAEIARLERGIDTTIQSSPLWRDVSAVLEGQTGVGPVTSRTLIAELPELGRCSGKQITALVGVAPFACDSGKFKGKRVIQGGRASVRTALYMAAVSAKSHDPVLKAFYDQLRTRGKPFKLAIVAVMRKLVIRLNAILAQHYATLTEQGHAKTAA

SEQ ID NO: 65234 - protein, 430 aa, unidentified
MKSNTQNAKIEAITEKTLVLGIDVGSETHYARAFDYRGIEYSKKPFKFSNTEAGFVTFKEWILDLKERHEKDKVVPGMEPTGHYWFNLGKFLHDNEMKPVLVNPHHVKKSKELDDNNPTKNDRKDPKVIAGLVREGRYMIPYLPDGVYADLRTASNIRFQLQAELTRIQNRISRWFNIYFPEYKTVYGKPDAKSGILILKTAPLPEDILTLGIDGVNQIWRDAKLRAVGKARAKTLIEAAEHSVGSKEGAVSARMEIRMLLEDYESRNTRLQEVMVLIEELVRKIPMAEKLLEIKGVGIRTVSGFLAEVGDISRFNNPKELQKLAGLALVENSSGKHKGETTISRRGRKRLRYLLFEVAMSLVSKNPEFRELHNYYTTRRLNPLKKMQSLMAIAAKLIRVFYAMLTKGVDYDPKKMVSDIKRPAVYIQAA

SEQ ID NO: 65235 - protein, 379 aa, unidentified
MRIVCGLDVHKDSVYLCILSSTGEIVEKVFGVLTFQLAKMRDLMLKHHVMEVGMESTSVYWIPIWRVLEPHFKLKLVNPYFIKQLPGHKSDVKDAQWIAECMLKDLVRGSFVPPERIQQLRQYDRRIYDLDDEINRKLSKLDAVMQRCNIRLSNYVSNTDSKSYKEVVARISEGITDPKVLVEEIHGRIINSHGRKTIIAALTGVITQADSDMMRQIREEIDVAEKHKQECMDKMQEICEQEYTDQLRNLQTIPGVKLRTATSLIAEIGTDMSIFETANHLASWSGLKPRNDESNKVIKSKRITHGNRYLRRTIVECSWAASRTKGCFFSRFSYHQTQVRKKGKMKVQIAIARKLLVCAWHILSKNVIYQDSCACNVAK

SEQ ID NO: 65236 - protein, 347 aa, unidentified
MDQYVGLDVSQDETHVCVVDRDGNKLWEGHCPSTPEGIGETVQKHAPEAVKIGLESGHLSTWHWHGLNDMGLPAICIDAYHAHGVLRLQMNKTDKNDAHGIAQIMRCNWYKEVTIKSFENHESRALFRTRSNLVSMRTDVVNQIRGMLKTFGILIKGIAGVSFENRVQEIIDEGTAIAPPLQIQLDMLRMIKEKINDLDELVLDHAYACQKCRILMSIPGVGPMTAANFVLAVYDADRFKQSKSVGAYFGLTPRRRQSGDMDYNGRISKRGDRVIRHQLYEAANSILTRVKKPSSLQAWGLRIAKRSGMKKARIAVARKLAVIMHQMLQTGELFCFNPATGERAVYA

SEQ ID NO: 65237 - protein, 343 aa, unidentified
MIATLGIDLGKNSFHLVGQDERGAIVLRVKLSRSQLTQRLANIPPCLIGMEACAGAHHIGRQLQALGHDVRLIPAQYVKPFLKGHKNDYRDAEAIAEAVQRPTMSFVAIKTPEQMDLLALHRVRSRLVGQRTGVTNQIRGLLLERGITVRQGLAPLRQALPGILGSSADALSPRLVRLIADLIEDWRRLDERIAAVSAEIEALAAQDEHCQRLMSVPGVGPIISSAVVAAIGTGAGFRQGRDFGAWLGLVPKQESTGDRTILGRISKRGNKYLRTLFVQAAHIVLVRRPHGARLGLWPWIETAGRRLHRNMLVIALANKLARIAWAVLARGRTYQPRSASHAV

SEQ ID NO: 65238 - protein, 381 aa, unidentified
MGKLTRTNVGMDVCKRFIQVALLTPGGEWIEWQTRNESRAIAKMIGRIRREAGESEIRTCYEAGPTGYALQRVLRAAGLHCIVVAPSLIPRKPGERIKTDRRDARKLAQGLRNGDLTEVQPPTPEQESLRDLCRVREATQKDLECRRHRLSKFLLRRDRIYPGKVTWTRAHLTWIEQQRFTDEYATMTFDTLIRAVTEAQQMLADLDAKLEAAAQREPYATPVRHLRCFRSFDTVTALSVVAELYGFLRFESASGLMAYLGLVPSEHTTAGRHQRGEITKAGNGRVRRLLNQAAWNYRHVPRVSRALKARREGQPGWVVNVADKAMKRLHKRYWHLVNGGKPTPVAAIAVERELVGFVWDVLHRDAHEQLEREASTGKKAA

SEQ ID NO: 65239 - protein, 370 aa, unidentified
MRKSVLYVGLDVHKMSMEVAHAESGAYGEVRHYGRIGGDLEALDKVPRKLQAKGAELRFAYEAGPCGYQVYRHLTAQGYSCLVAAPALIPRRPGDRLKNDRRDALALVRLLRAGELTPVKVPDADDEAMRDLTRAREDAISVERRAKQRTAALLLRHGRRYPGKTTWGRGHWRWLAQQAMEHPAQQIVLQEYLDAVREASARVQRLTEQIRELIPQWRRAPFVAAYQALRGVSRIVAATLVAEVGDLSRFKNPKELMAYLGLVPSEHSSGASVRRGHITKTGNGHARRVLVEAAWAYRLRARVTRPLLKRQEGLPESVRQLAWKAQLRLCARYRRFQARGKHKNTVITAIARELAAFIWAIGQSVEPVTA

SEQ ID NO: 65240 - protein, 365 aa, unidentified
MNKYIWVGLDVHLDSITAATLEDDAQEPEVVSLSGDLMKVRRLFRRLSKKGSVRACYEASGSGFVLQRVLSRDGFHCEVIAPSLIPRKPGDRRKTDRLDAVMLGRLYRSGHLTPVHIPTEDQEALRRLLRLRYTYQVYSKATKLRIGGMLRNHGFVYREGKSYWTKIHRQWLTKLRLELEGPLQTALATELEHLEYIDTQRGALDAELERFAHAHPYRGKVEALCCLRGVKTLTALTLLCEVDDVHRFRSPRSLMAYFGLVPSERSSGDRERRGPITKAGNVHARRLLIEAAWNNRHRSGADLILKRRRQGQPPDVVAIAMKAQHRLYKKFWRLDERKHRHVAITAVARELTGFVWAILKAVPQN

SEQ ID NO: 65241 - protein, 369 aa, unidentified
MGHHTDVFVGIDVAKSRNAIAIADHERGGEVRYFGEVDASPDTMRRVVQRIADKHGRAHFCYEAGPTGYGLHRLITSMGHPCDVVAPSLIPRKPGDRVKTNRRDAVGLAKLLRAGELTPVWVPDEGHEAMRDLVRARAAAVEAQRVHRQQVSAFMLKHGRIFPRKKSWSMRYLRWLQEQRFEHPAHQIALQELVDAVRISKERVDRIEAAIEQFLPTWSLAPVVRALQALRGVDLIVAVTFATEIGDVRRFDSPRQLMGYLGLVPSERSTGDSVRRGGITKAGNSRVRHMLVESAWTYRHPPRVGAKKLYRLEQTTPKVREIAWKAQSRLTARYRTLSANGKKTTVVCAAIARELTGFMWAVAREVQPA

SEQ ID NO: 65242 - protein, 349 aa, unidentified
MRYIGVDLHKTNFVVCFLNQDESFRLETFPLSKAGISRFTSELSKEDAVAVEVTQNIYYFYDQIKTYVGRIVLVDTYRFAIIAASKKKTDKADALALARFLKLDHLPEVPVPSEKVRQLRHLLQARETMVGLRTKLKNMGHAALTRNGFALARSAFASAIGRERLRKRDDLSAADTAILQSALRQIAELDKEIAELEAEIVRLGKTLSGIKRLLQLHGLNLLSAISLLAEIGDIHLFETSKQLVAYSGLATSIRQSNQTTRQGHITKQGRKRLRTVAIRAVLSMVNRTNTPLMDFYSRKKREKGSGKAICATARKLLTIIFVMLKKELDYWYLEDRLYNRKLRQLNAAA

SEQ ID NO: 65243 - protein, 347 aa, unidentified
MLHAGLDLSRKKLDVCLLSDDGEHLDQLAVPPDVDSLRTLARRIEAVHREPVCAVIESMTGARLVHDTLEQEGWSVEIADAQKVKGLAPLACKTDKIDSMVLAVLSHRDLVPAIWLPDPRVREERELARFRLHLVKHKSALKCRIHSTLINFGRPCPVTDLFGVEGRELLARLEVPEPWRGNVSAALSLIDDLERQIDEIDKRLRAAHADHPYIPLLLSVPGIGWVLAFTIAAEIGQIERFPSPAKLTGYTGLCPRVNQSGDADRRGPLTKHGPTYLRWALLEATMHALKHPAYAKRYQRNKRRLGKQRGAKVAQIDIARRLAHAIWHMLTRNQEFAPRGAAFRLAA

SEQ ID NO: 65244 - protein, 330 aa, unidentified
MTPATSTTVASQTPPVFVGIDLAKAKFDLGTNLDSRITTFAYTPAGVTHAVQLVASVKPTIVVLEATGGLERKLAAALLDAGLPVAVVNPRHVRHFAIGLRISAKTDPIDTRVLVRYAEQAHPRLLEKRSENHTELEALVARRRQLIDGRTQEICRLEQVESKFARQSIRTLLQAIDRQIDRMDKQIDKLIKSDDDLSGKKQILQSVPGVGRVASSTLIALVPELGTIGHKQLSALIGVAPYNHDSGAFKGKRSIFGGRATVRSVLYMAALSARTNNPIIKAFADQLEERGKPFKVVIVACMRKLLTILNALVKRKQSWNPEKLNLATRL

SEQ ID NO: 65245 - protein, 368 aa, unidentified
MRYSIGIDAHKKTSQISVLDRDTGLFVFRKSIRSWPKRFEGELAPYLSEEILIEASTVSLWLAPFLRSLGHKVVVGDPNNPLMYASRPRHCKNDSKDADALAFALKNKHYSVVYEPNEEQRPIAELLGTRTSQIRRRTSNINRVRALYASRGVELANGDADTFWSRVKALPLGERVPAAEPLLDELAMLEDLIAASEKKVNALAANHPVARRLMTVPGVGPMVALAYYVKIGDPSRFGSARQVEAYLGLIPVIHASAKPGEGKRISKRGSSSLRGLLGNAAWSHVGSSDAKAQPLREWFLTAEQRMGSGKAITAVTRKLAGILFAMWRDGNDFELREAKATQAKPAPQTRVRARRYQLKSSRPLATGV

SEQ ID NO: 65246 - protein, 297 aa, unidentified
MAQVTTIGLDLAKRVFQVHGVDATGTVVVRRSLRRRQVLAFFAKLPSCLVGIEACATAHCWAREITKLGHDVRLIPPAYAKAYVRRNKNDPADAAAIWEAVSRPSMRFVAIKTEAQQAAAGIHKVRAMLVKQRTMLINTLRGLMAEFGIVVADGRQHVEELIAVLTDPAEARIAAPLHDGLMAIVDSLRSLEQRIERIEKQILGWGRSNPTCRHLTTIPGYGPILSSAMAAMVVEPTAFASARHFAASLGLVPRQDGTGGKVKLGPISKRGNGYLRRCWSMARCRCCAASAPRRIPG

SEQ ID NO: 65247 - protein, 432 aa, unidentified
MNESIPAASLEGVAAYIGIDWADQKHDVVLRSAAEPNKVEHRVIEHQPGALMEWIGQLQQRFGGHGQILVCLEQSRGALIYHLMGYGFLELYPVNPLQLARYRETFSPGGAKDDQPDAELLCELLYCHRDRLRAWKADSELTRKLAFFNEGRREAVDERTRLSNAIKSQLKVYFPLALELLNQDTSTALAADLLLRWPSLEALQKQIPHRLRKFFYAHNCRGESTMLERLELVQQAQALTQDSAVIEPATVRVQMLARQLKNLLPDIARYDQKIAELFAAHPDRFLFENLPGAGRVLAPRLLSALGSDPNRWESAQEIATLYGVAPVRRASGKKSGKKGEKKASVRFRQACPKFLRQSFHEFAGCSIRYCGWARAHYEAQRAQGKGHHVALRALAFKWIRILFACWKQRIPYDPQRYLQALQQRASPYANAC

SEQ ID NO: 65248 - protein, 426 aa, unidentified
MSEIGPQPEPEFAAFIGIDWADQKHIWSLQTAGSGKRETGELEHTPEAVESWVAHLYQRFAQCPIAVAVEQSRGALVFMLSKYEPLHLFPVPPQMASSMRQALYPSGAKDDPRDADLLLDLLLQHRNKLRRLSPDSEATRRVQNLVEERRKLVDEKTAQINRLTDHLKVYFPQMLEWFGRLDSNVVCALLERWPALEELRKAPPASLRAFFRKHRCRDREQIEHRMDAIRQAIPAIHDRAVIEAKSAAVRVIVRVVRVLGEGIEDLDGEIEEAAAAHPDFFIFNSLPGAGPVMAPRLLAAFGSQRDRYRNADELQSFSGIAPLTEASGKRKWVHFRWACPKFLRQSFHEWAGHSIAQSEWARAYYQQQRSKGNTHHEAVRALAFKWIRIVFRCWQDRIAYDENTYLAALVKRGSPLGTTVATAKTL

SEQ ID NO: 65249 - protein, 452 aa, unidentified
MDPGFLEHLRLLPRVVIGPGARFLEFLFTGPHADDATQEEEKMELLHRRCCGLDVHKETVVACLRLVSDGKVTTEVRTFQTTTADLLRLSEWLTANDCTHVAMEATGVYWKPVWHILDDGEFALVLANAAHVKNVPGRKTDVNDAMWLAELLAHGLIRASFVPDTQTQEMRNLLRTRKQLVREQSSHVLRVQKTLEDANIKLDSVLTDLMGKSGRAMIEALIAGETNPTKLAGLADRRVKASPDELREALRGRVTKHHRFLLRLHLNQIDALDAAMATVDAQVEANLGPFRTAVELIMSTPGIKNLGAHVIVSEIGIDMSRFPSDAHLISWAGICPRNDESAGKRRSNRLRKGAPWLKTTLVQCAWAAVKKKNSYLQAQFYRIKARRGPKKAIMAVAASILTAIYHMLKDGTMYQDLGCNHFDRRSTDQQKKRLVKRLADLGYAVELKPLAA

SEQ ID NO: 65250 - protein, 421 aa, unidentified
MDQVVERAGALDVHKEQVTACVRAPGERGGERREEVREFKATVRGLLALRDWLAERRVTHVAMEATGVYWRPVWHILDGEFELLLCNAAHVKNVPGRKTDVADAQWLCRLLECGLLRGSFVPPLAVRELRDLTRRRRTLVRERAQEANRLHKTLQDTGIKLDGVASDILGVSGRLMLDALIAGQSDPAVLAQLAKGRLRTKIPALTEALEGRFTAGHRLLIGGILRHIDFLTAEIDTLEEAITVQMAEHGDVPDRPFELAVQVACSLDGIQKRTAQALIGEFGTDMSRFPSDAHFASWAAQCPGNHQSAGKRRSGKTRKGPRWLDGALHDAAMGAIRVKDGHFARKYRRIRTRSGHKIAIGAIKHAILIALYHMLKNGEMYRPPTPNPDAERKHRERTTKRLLAQLERLGHSVTLTEGTPA

SEQ ID NO: 65251 - protein, 413 aa, unidentified
MAQEAFAWFAGVDWGSERHHACIVDAQGIIAGEREFPHSGAGLAELGDWLLLIAGEASAVAVAIEVPHGPVVDSLIDRGFALYAINPKQLDRLRDRFSVAGAKDDRRDAYVLADGVRTDRRLFRRLQVADPRLIELRAWSRLAEELQEERVRLTNRMHHQLWRYYPQMLKLADDLAAGWLLELWTLAPTPSKARRLRKSTIERLLKQHRIRRMDAETALGILKEPAIKVADGVAEAASIHLRSLIARLRVVNRELREAEHKLDEICAVIGETGAASGVCLQRQDIMILRSMPGIGRINLAALLSEGSGPLSSRDYPALRTLCGAAPVTRRSGKSHIVLMRYAVHVRLRNTVYHWARVASQHDPKCRARYGALRQRGHSHGRALRSVADRLLGLACVLLKRQTLFDPHFGQPTA

SEQ ID NO: 65252 - protein, 417 aa, unidentified
MTQYAAYLGIDWADKKHDLCLVEATSGKKTKQVLAHTPQAIAEYFSNLRCRYPGQQIAVGLEQSRGPLLFALLQYDFLVLYPLNPTTLAKYREAFTPSRAKDDPTDADYASELLMKHSERLKAWHPDDDQTRTLRYLVEHRRRLIGDRTRLSNRLTSLLKCYFPQVLGWFPELTTVLVCDFLLRWPAWERLQGVKRITLLNFFRAHHSVRADTLERRLAAIKASVPLTTDRAIIDSSVLMITALAAQMKTTIGAIKQFDEAITKLCVVHPDFPLFQSLPGAGEVYASRLLAMMGTQRDRWTTADELACLAGIAPVMERSGQSVWIRWRYFCPKFMRQSFHEYAGESVKHSFWARAYYEQQIAKGKSRQAAVRALAYKWIRIIWKCWQTRTPYSEVKYLEALRKKGPPLLSFAATKAA

SEQ ID NO: 65253 - protein, 340 aa, unidentified
MVYGAIDLHSRFRQIRIVTADGAVVRERRVVTSRSPLRNAFAAVGAVRIRVEASTESEWVAQVLEAAGYEVIVADPNSASMDGTRHRRIKTDTRDVAALSDACRLGVFRRAHRVAAAQRTLRQELAVRRQLVRRRTGLIAHLRARLRQDGFRLGSGSRTTVHERVARLERPASLRGSLTPLLETLAALTPIIATTTRRLTTTANADPVAVRLHTVPGVGPLVALTDRATVDVVTRFPSAGHVSSALGLVPREDSSGERRQRGHITKVGPSEARTMLIQAAWSCWRSRTARTTPLRQWADRLAARRGARIAVVALARRLSRILYAVWRDDTVFRVTPARAA

SEQ ID NO: 65254 - protein, 320 aa, unidentified
MAKHSIICAGIDTGKRELEVALEGGTQRLTVDNAAAGHAALSAWLKRQRVKRVGIEATGGYEGAVAAHLRGAGFTVVVLQPMQVRAYALFLLQRAKTDKIDAALIAACTAAVPTIHAPPDPRLAPLAEHLTVIEQLVEDAARLKTRRASPRSDSRIGDFWAAEIARTQALVRQELAALVAAIRRHPDLARRLALIASVAGVGEKTAVAILLRMPEIGRVTREQAAALAGLAPYDQESGEHTGEKHIEGGRTRLRKALYAAALPAAFRWNAALVALYKRITAKGTGHKAALIACARKLLATVNAVVARGTPWTKERAAAPS

SEQ ID NO: 65255 - protein, 348 aa, unidentified
MPELEEAPVAIVAGFDVHRAQITFDALDERTGEVSRGRIAAAPEAVRAWAGRFAGEEVHVAVEACTGWLFVCEALRECGVVAHLAEPVETSALRGKKRRAKTDREDARWLRTLLCEGRLPEAWIPPAHVREWRTRARLRKTLVDERTSWLQRVQATLFHHGIGGVPDKLLSAQGREFLAALELADAASERIEVALSMIEALDRQLAPIEQELRQLARRQTGCRALMAHYGIGELTAPTILCELGDVTRLSASRKAVRCAGLDIGVHRSDRRSRAGKLTRQGSPQLRWALYESAQAACRPTSPDRADYLALKARGLSHTRASLTIARKLARRCFHTLRELGPDALAPVT

SEQ ID NO: 65256 - protein, 328 aa, unidentified
MFYLGMDVAKAKLDCCLLLDEASGKRKTKVVKNTQSGIVDLLTWVAKQNISPEELHIVMEATGIYHEQAAMALADVGVMVSIINPAQVKDFGRGLAVRTKTDGVDSFVLARYGALLKPKAWVPPPLEARVLQALLVRREAIAQDLQRERNRQEKAGATDTPALIHKSLEESIGFLAKQLAQLQKDIDEHIDKHSNLQKDRALLQSIPAIGPQVGSNILSVMHNHDFGSAEQLAAYLGLVPVERQSGSSVLGRARMSKAGPARIRAVLYMAAVVGTRYNPHVKAVYERLLARGKSKMSSLGAAMRKLVHLCFGVLKTQQPYQYDYLKNA

SEQ ID NO: 65257 - protein, 391 aa, unidentified
MDKAWAGVDAGKEFHWAHVLDASGTELLSRKVENDEADLSTLIDEALSLAEDVIWAVDQPGGSAALLLALLWEQNQRVLYISGLTVDRSRNAYRGESKTDARDAHVIADQARMRPDLGELEAGEQQIGELQLLLARRRDLITDQSRTITRLRGMLLSLFPALERALDLNSKGPLTLLTHYQFPAQLRRAGHKRVAAYLKNRGVKGSNKVADKALAAAKAQSVTLPAQEVASRIVAELANDVLGFKVRIESIDEEIGQRFFARPEARILTSLPGMGPILGAEFLVAVGDIRAFESADRLAAYAGLVPVARDSGKRVGNNKRMRGGNKTLKRVFYQSAFASLRSAPESRVFYERKRAEGKKHTQALIALARRRVNVVWAMLRDGTAFESRSVA

SEQ ID NO: 65258 - protein, 344 aa, unidentified
MPIITVGIDLAKAVFAVHGVDEAGKATLVKPKVARDQLVPLIAQLPPCLIGMEACSGAHHWARVFAEHGHTVKLMAPKLVSPYRMSGKRGKNDAADAAAICEAVTRPSMRFVPVKDEHQQATLCLHRTRQGFIEERTSTYNRLRGLLSEFGVVLPQSPERLRKEIGSCLDSLPGWARRCMSELLEHTSHIEDRLVELDRAINQIAREDDRSRRLLQLRGVGSTTASALVASIGDGHDFRNGRQVAAWLGLTPGQYSSGGKQRLGSITKAGDAYLRSLLVLGARSVMANLGDKQDPLSRWIRNLMERRGYWRAAVAIAAKNARMAWAVLHYGDTFKPEQAEPTGA

SEQ ID NO: 65259 - protein, 456 aa, unidentified
MSRKRRSSKKTGTPVLHSLNPNAAGVDIGATKIYIAVPADRDAQPVRHFSTFTEDLHAAADWLKSCNIETVAMESTGVYWIPFFQILEARGLQVFLVNAHHVKNVPGRKSDVSDCQWLQYLHSVGLLRGSFRPEQEVCTVRSILRHRDGLVQMASSHVQHIQKALDQMNLQLHHVVSDITGMTGLAIIEAILAGERNPQTLAKLRDGRIKATESTIAKSLVGDYRREHLFTLGQSLAAYRHYQKLIGACDKEIEQYLETFESKADPPEDPKWKSQDGQNTRGGKPGFDLQSHLYRIFGVDLTQIPGVHTLTTQTLLAEIGPDLSRFANAAAFTSWLGLCPDNRISGGKILSVKTRKVKNRAATALRMAAQSLYRSQSYLGHYFRRMRAKLGAPKAITAAAHKLARVIYHMLTTRQAYDETICVQNELQNRQRLEARLRKQARDLGLEIIPAKTGAV

SEQ ID NO: 65260 - protein, 418 aa, unidentified
MTKKLDTTFIQIVHPVCCGLDVHKKKISACLITVDKNGKEQYEIKEFGTFTDDLVKMKNWLLDNECPVLAMESTGVYWRPVHNILEGFMEVILVNARHIKNVPGRKTDISDSKWLAGLLRHGLLKGSYIPPKEIRHWRELTRLRRTYTESLADFKRRVHKLFETANIKIDSVVSDLFGVTGLNLISLLCEGSELDLATIKKNTKPGLKKKVVELHRSIQGFFEDHHRFQLIGMMEVMTSLEKQINDITQRLDALTAGHQDILDRLDEVPGIDKKSAQSIVSEIGVTLDEFICTAALASWAGLCPGNNESAGKRKSGRASVRSHPFKTILIEVAWAAVRKKGSYYRAKYFKLKSRRGAKKAIVAIAHRISKAIFNIIKHGDHFMDLGEDYLTAQTKERAINNIKKRANQLGYELVPCAN

SEQ ID NO: 65261 - protein, 364 aa, unidentified
MEITTIGIDLAKSAFAVSGADSSGRVVVRRQLRRAQVLSFMRGLPQCTIGMEASGGAQYWARQLTALGHAVRLMSPALVMPYRKGNKTDRNDADAILEAVTRPSMRFVTVKSVAQQDLLALHRVRAQLVKSRTALCNQLRGLLRERGVVVRVGVAGLKRGLPAALADESSELSGELRELLGEMGQWLRTLEQRIASCEAQITRKFKHDERCARLAEVPGVGPLTATALVAAVGNAQRFKNGRELSAYLGLVPRQHSSGGKTVLLGITKRGDRYLRTLLIHGARSALRQCKDDARSDWARRIRAERGPNVAAVALANKNARVLWALLTRGDRYRSTRVATPAALHSSAPPAVKRARATRLRALKD

SEQ ID NO: 65262 - protein, 349 aa, unidentified
MKESIVTLSTTKNKWPDQYDHYIAVDWSQKNMAIARSSPKSKHVRTLDVPSDLRDLKDYLSNLKGSKILTIEECPAAQWLYVELLDYVDKILICDPYRNRLLSDGAKNDVLDAEKLCLLLRNGLLKEVYHTHNSLFELRKYVSAYLDIIQTGVRMKNQRSSIFRSEGKNFRKESVELDANSFIVGIIDRNIETYEQDKAEYKTLFNKIKRKNTILKNLCNVPGIEIISAVKILANVIDAHRFPKKGNYLAYCGLVKHKRVSGQKTYGLRKPRYNRVLKSVYKSAAWTSIIATSNPMKDYYEYLLEKGVEVHNARNALARHIAIITYGMLKSGEKYQPYKREKETKPILN

SEQ ID NO: 65263 - protein, 523 aa, unidentified
MSTTRTRKRSRSGPRQVLHKPAGVIHPRVQQVGPEHFGIVSVDCAKARSKWMLCDFYGNIRVAPTVVEHNRTALEAAVTQIRQARAQHAFHDLLVAVERTGRYHRPVQRACAAAGLEVRIVHPFATKQFRLPSDPGYKTDDTDLAAIHRAAVNGFALVEPARDETWKTLQLLIRHRRDLVFKNTAVCCPIREHRDAACPGLAACFDNLWDSATAWHLVGHFAAPQDLVAAGLDGLCRSLNDAGVRYQRRTLRRLLEWATIAAAPDLAATQHRRIALALNDDRMRKTQEIHGLERASAACLARTPYVLLLSFPGINVVSAADFAGAMGPIEHYAHARTITGRAGLRPCRYQSDQVDKANGPLVRHCNRKLRAAILGIADNLVCCNHHCHVLAHHWKVAGMDPRDIHSRVGQRFCRIAYHMVAGRQVFRHPCLQGRHYILDKLAAFHRTHDTPAPELLRDLQAAIEQLPRPEYQAEALPLHQELEKIQAGRRRGPQLLGDILPIVLARLGVGAVPSTASGEEHPH

SEQ ID NO: 65264 - protein, 421 aa, unidentified
MNSEKYIGLDVHQATISVAVMDCRGKVVMESILETKAATLLEFLAGLRGTLSVTFEEGTWAAWLYDLLKPHVQKLVVCNPRKTALLKHGNKNDRIDARKLADLLRLNDLEPVYHGETGVRRLRELARSYLTLVKDLTRVMNRLKAMYRSWAIPCAGRDVYYTRHRAEWLSKIREAGVRRRAEHLYQQLDMLQHLRQQARRELLAESRKHAITAKLRKIPSLGPIRAALAVALIQTPHRFRTKRQLWAYSGLALETRTSGEYCYVRGQLRRSKKQVSIRGLNKDHNHDLKGLFKAAATRASVQPGPFQDFYQRSLAKGIKPTMVRLTLARKIAAITLTLWKKGENFDVEKLGKSSRRVPRGLRGRHVVKEHQGKLRTSRGLPRPMRIGTAMASRISRQAAKSGCAREWGGWGRLSDDWTGTA

SEQ ID NO: 65265 - protein, 405 aa, unidentified
MIFVGIDWAEHHHDVCVLDREGRVLATTRIPDGVGGLAALHAVLADHADDPASVVAGIETDRGLLVSALVAAGYQVVGVNPLAASRYRERHTTSGAKSDPGDARVLADLVRTDRHHHRPVAGDSPTVEAVKVLARAHQALVWTRQRQVNQLRNALREYYPGALGAFGTDLASPDAVAVLAAAPTPTQGRALGVADLTKLLRAAGRQRNLAVRASQVRQALAAPQLAAPPVVAAAYGQVTAALVGVIAELTQQVTALEEDLTRAFEAHPDAEILRSLPGLGVVLGARVLAEFGDDPTRYGHPKARKAYAGTAPVTRASGTRQVVLARVARNKRLADACYRWAFSALTRSPGARAYYDQQRARGATHHQALRALANRLVGILHGCLRHRTSYDERKAWSHRTRPAAA

SEQ ID NO: 65266 - protein, 326 aa, unidentified
MQTILNNCCGLDVHKDSVIACLLKTRNLLALSSSQDDVIKEIRVFKTFLNDLTQLRNWLEAEGCCHVAMESTGVYWFPVYDALEGACDGKMELLVTNARHMRNVPGKKTDIKDAEWIATLLRAGLLRGSFIPPLNVRELRQLTRYRKNVVEDISTQKNRIEKTLQQAGFKLSTFLSDIFGVSGRNLIRVLIKNGKLAPGDVENETKRISEGKKNEIKLAINGLLSVRQRQFLQLQISMLDDLLSHLAAVEQSIAELSMPFMDEIDRLDTIPGIGVTAAAAIIAEIGVAMNKFPTAEHFCSWAGVTPGDNQSAGKKKVPESILETPT

SEQ ID NO: 65267 - protein, 320 aa, unidentified
MMAQNDLVVVGIDVAKDKVDVCIRAPSLRRTFASTVEGRRELASWVRRHKVGKAVMEASGGYERELAKALRDARIEVRIVDPKRVRDFARSAGRLAKNDAIDAEMIAWFAETFDEAPGQAYDAEREKLAQIVNARQGLLDLRTTLQNRGEHAGPEPVQKMHARLLKKIAAEVVKLEAVIAAMIKATPHFAELAEIIESVPGLARTTSAGLIAKMPELGQVGNKIAPALLGAAPYDDDSGRRQGERHIKGGRRKVRNLFYMACLGAATRHNPVLKAFYDRLIAKGKKPKVALVACMRKLIVILNIMIARRQKWDPNLHVLG

SEQ ID NO: 65268 - protein, 352 aa, unidentified
MKKIFIGIDFAKEKFDAAIIEACGLKEFGGRQHGTFPNDKKGYRQFIKWVKSNSGTSVDDEWLFCGEDTGSCSIGLSKWLYGKGLDIWIENAYSIRHSSGIQRVKTDKADASMIAEYAWRHQDKAMLFEPLSESLTQLREVFLYRHKLVQQRVAMEVRKKDKDASQEGSKALSFIKRKSKHLLDRIDKVIKECDDMIDRIIAEDPELAENYAIVTSIKGVARQNGACLLIYTNNFKRFDMDARKIACYYGVAPFGKESGSSVHSPAHTSHFANKLIKALLGQAAQIARIYNPEIREYYERLRAKGKKHPVAINNVKNKLLRIIVALVKKRVVYDPESYKFYRDRLNAQFVPS

SEQ ID NO: 65269 - protein, 480 aa, unidentified
MRLHDFAPLRLQRCSSNPLAKGMNMSNLRIKKKSKKFKAADLPVELKHVNLDAAGIDIGSDRHLVAVPAGRDDVTVREFGAFTPDLHALADWLEKCGVTTIAMESTGVYWIPLFEILEQRGFEVKLVDARKSKNVSGRKSDVLDCQWLQTLHTYGLLTGAFRPADEICVLRGYMRQKEMLVQSSSMHIQHMQKALQQMNLLLHNVVTDITGVTGMTILKAIIAGERDAKVLARHRDSRCRNSVQTIAKSLVGNYRQEHIFALTQAVELYEIYQAKINDCEVAIARFLTTQARQTEDEPPPSQKNIPPRQRIRAGVDLRSRLFKLTGVDLFSIPGLGADTLLTILAEVGFDMTPWKTEKHFASWLALCSGTKISGGKVLDRKTKRSTNRAAQAFRLAASSLARSNTALGAFYRRIRARIGAPQAVTATAHKIAITFYSLLKNRTTYVEIGQNAYELKFRERRFKAMQKQALAMGYQLIPAA

SEQ ID NO: 65270 - protein, 427 aa, unidentified
MRVLYDRVAAIDVHKDMVKVAVRVPGSKRGTRKTDVLEYRTFYGVLQAMARELRRRGVTHVVMEASGVYTEPVYYALTELDFTEVLVINPAHAKALKGHKTDAKDAVRLLDLYECGALLRGSYIPAPDLKEVRDLARYRMKTVQARASEIQRLQKTLETAGIKLDSVVSDITGMSSTAMIEALIDGERRGGVLADLALGRMRTAGKLADLSMALTGRFTDHHALMCRLHRDRISMFDDAIGDLDAKIAPLVARYAREAELLKTLPGFGEVVAAGWLGAIGPAPHRHFGTAERLASWVTVCPGNYISARKSRSGRTGDGGSHIKPLLVQAAWAAIRTPGRLQAKFHRLVRKFGGPKNKGARKRAIIAIAHALLKIAYAVLKTGKPYQEPGADFYTRRESAQAREEYLLRQLQKLNPGCVITITPAEAA

SEQ ID NO: 65271 - protein, 369 aa, unidentified
MLYLGIDQHGKQLTVDLGDEAGGMVLRRQVKTEFGALRAFLAEIEKLTGAEGGYMACLEICGFNDYLLEELQQHGCREIVLTQPVKRQRHKTDRRDARALRDLLWMHRHLLQSGKRLPGIRRVRLCSTEEAAQRQITSLRARLGKVRTQTINRMRRLLRKRNLQHDCPTQGIATQKARAWLRKLSLAEIDRLEMDILLQEWEAVEEHLRGVAAQIKKQQAASQAATIVASMPGMGSYSSLAVSSRIGDPHDFRRGTSLANFVGLAPGCNSTGDSQRVGSITKQGSTMVRFILGQVTMHVLRKDPWMKKWYTQIKRRRGSKIARVAVMRRLATILWSMLKHEMPYIPGGPEAFRKQLELREQLRLASEST

SEQ ID NO: 65272 - protein, 335 aa, unidentified
MDICYFIGVDVSKATLNWAVFDGKTILLQCQSENTEKGIKATLKLIRALPGFKAGQSVCCAEHTGIYNAHLLAYLHKLSFPLWLESSLQIKKAGGLQRGKTDAIDAARIAEYAFRFRDKMCLWQPPRPVLQKLAALSALRQRLLRIRQQLQQPLNEQQGFVEKSLQKQLAKNCQASLKAINADLESAEKQINKLIQDDDRLKELFGWITSVPGVGDAIAAEVLVATNEFKAINDPKKLACHSGVAPFEYRSGSSVRGKTRVSRHARLRLKSLFHLGAMSAIRMKGQLQDYYQRKIGEGKNKMLVLNAVRNKLIHRVCSVVNRQQKYDKNYTPALA

SEQ ID NO: 65273 - protein, 402 aa, unidentified
MNCVGIDVSKGKSMIAVMRPFGEVVISPFEVQHTASELSELAKLLKSLDGETRVVMESTGNYHAPVAWLLHDAGLYVSVVNAMLVHDYGNNSLRRAKTDKKDAVKLANYGLDHWLTLPRYVPEEDTRLLLKNCYRQYQQYSKVQTMLKNNLISLLDAIFPEVNRLFNSSPRADGSEKWVDFVSTFWHCQCVSTLSLKSFSARYLKWCRKHGYYFSQEKAFEIHSKAQSCIGVMPRNETTKLLVQQAIAQLKATSAALAALKQEMQSLAASLPEYPVVMEMFGVGSTLGPQLMAEIGDVRRFHSKKALVAFAGIDAPPCQSGQMDIHSRSISKRGSAALRRTLFLVMGIYLQSAPLDEPVYQFMDKKRSEGKPYKVYMMASANKFLRIYYASVTAYLNTLARI

SEQ ID NO: 65274 - protein, 344 aa, unidentified
MEKIIRIGMDTSKSVFQLHGVNEVEQPVVRRKLHRKEMVKFFSQLEPTVVGIEACGGSHHWARALGALGHTVKLMAPQLVKPYVKRGKNDAADAAALCEAMSRPTMRFVPVKSSEQQAALMLSGLRDGLVCRRTQLSNAIRGYATEFGLVAAKGLERIERLLARAQAADLPALAGELFGLLGRDYARLQEQVKEIEAKLMAWHRENEVSRRLAQAPGIGPIGATMLVMKTPDPHAFRSARDFAAWIGLTPKDHSTAGKVRLGGITRAGDEALRSVLVVGAMSVIRQARQGKGHRSPWLAGLLQRKPPKVAAVALANKMARVAWKMMATGECYDAGRSSPAPKTA

SEQ ID NO: 65275 - protein, 343 aa, unidentified
MQTITAIGLDIAKSVFQVHGVDADGQVVVRRQLKRRYVLAFFQKLPPCLVGIEACASAHHWARELQALGHTAKLMPPAYVKPYVKRHKNDAADAEAICEAVTRANMRFVATKTPEQQSCLTLHRARHLLMRQQTSVINAIRSHLAEFGIVAPVGRNGVEQLLGVVADSNDKRLPEVARACVAALGAQLRVLKVQILEFDRMIMAWHRSSEASKRLDQVPGVGPVLATALVASIADPKTFRSGRDFSAWIGLVPKQNSSGGKERLGNITKRGDRYLRSLFTTGALAVIRYAKIHGTRHRPWLTALLARRPTKVAAIALANKLARMAWAIMTKGERYKEPAALAA

SEQ ID NO: 65276 - protein, 452 aa, unidentified
MEEPQEVQDEEYERVWERVAAVDVAKASGVVCTRVPDEDRPGRRRTRVWTVTATVNAVTELADHLRCHQIEVVTLESTSDYWRIWWVVLEAAGLKVQLVNARSVKNVPGRAKTDKKDAVWLAKLTERGMLRPSFVPPPEIRRLREFTRLRADLVHERTRHWARLEKLLERALIKISAVASTLDTDSCRAMIEALIAGQRNPKAIADLAKGRLRPKRAALAEALEGRFEPHHSELARILLDQIDVLTEKIDQLSDRVTELIEQIPAAQGVDADGATGPGAGTGPGAPVLPAVARLDEITGCGVIAAQAVIAEIGLDMTVFGTPGRLVSWAKRCPQTRQSGTKTSTGKAGKGNPYLGGVLGEIAASAGRTDTFLGERYRRLARRRGKRKALVAVARSILVIIFHLLADPEARFCDLGPGYYDTHIDRQRKIRNHIRQLEALGLDVTTTPRHDAA

SEQ ID NO: 65277 - protein, 476 aa, unidentified
MNGKSKKAKNQVNQANIFEREELVKKADAIMKDLKAHTWHELETKGKFDKNAKLSFINDEMLIIGCDIGSEMHYARAIDTRGRELSRKAFAFSNTAEGFASVKAWMLELAAANDKKQIVLGLEPTGHYWFCLTAWLVANGISVVQVNPYAVKQTKELEDNSQLKDDRKDPKLIANLVKDGNYGMPYLPEKVYADMRILSMFRDQLTEYRIRCLNRLHRELTICFPEYKDALGKVDGAFATELLKAAPFPEDLKEIGTEGIREIWKRAKLRGRGYSRAGEILRYAEQSVGLKDGAGISKEAVKWFAEKILELDRKLSDVEAELSDRCRAVPAAENLLEIPGIGRNILSGILSEIGDISRFDDAKEIQKLSGLGLVACSSGKHKGETKISHRGRKRLRYWLFQAAKSAVVHAEEFRRLHEYYTTRRDNPLKKMQSLIVIACKLLRIIFTILRDGTKYDAARMLNDIRRIEKQAVPAVA

SEQ ID NO: 65278 - protein, 334 aa, unidentified
MENIALIGIDLGKNSFHVHCQDRHGKAVYRKKFTRPKLIEFLATCPATTIAMEACGGSHFMARKLSELGHTPKLISPQFVRPFVKTNKNDFVDAEAICEAASRPSMRFVQPKTESQQAMRALHRVRESFVQDKVKTTNQMHAFLLEFGISVPRGPTIISRLSTILEDNNLPLYLSQLLQRLQQHYHYLLEQIKDLEAQLKQKLNEDEVGQRLLTIPCVGTLTASTISTELGDGKHYASSRDFAAATGLVPRQYSTGGRTTLLGISKRGNKKIRTLLVQCARVFIQKLEHQKGKLADWVRELLCRKSNFVVTCALANKLARIAWALTTRQQTFAS

SEQ ID NO: 65279 - protein, 299 aa, unidentified
MSKTKTETNNPKGIAHTIEYLKKHKVALVVTESTGGLEIPAAKAIRRAGIAVIIANPRQTHQFAQSQPLTKTDAKDAKMPAFFAQMTAQKEDSQTMPYQPPTEAEEVLEALVNRRNQPADMRTAEKNRLHQVHETQVGSVKQLIAHFDRLIDELDKQIDNHTHTHFDGKDQVAEQIKGIGSITTATLMAMLPELGRLSHKRIAGLAGIAPHPREGGETKFKSRCFGGRSAVRKALYMATVAATRFEPLIRDFYQRLPSEGKPYKVAVTACMRKLLTISNARMRDYFAENDTAENGIRTA

SEQ ID NO: 65280 - protein, 482 aa, unidentified
MAKRKKSTFERLQSSSPNRQQRKKLQRQFDADSAELIVVHPNAAGIDVGNPSHFVSVPPERDQTPVREFGSWTADLRRMVEWLKACGITTVVMQSTGVYWIAIYDQLEQAGFEVYLVNARGTKNLPGRKSDVQECQWLRKLHTYGLLRKSFRPTEQIREVRTLWRLRGRVLEDSSRAVQHIQKALTTMNVQLANAISDVSGVTGMAIVRAIVQGQRDPHELAKLRDPHIQASEEEIAHSLEGNWQRDVLFELQQVVDAYDFHRQQLAIIDTELQKYMTALPTREPVGEVSADISKLSAKLRKKLKANRKSKDNRPAFDLGAELARLMGVDLRLIDGIDVMTIQTIYSEVGADLSNWPTEGSFASWLELAPRNNITGGKVIKKEKRPSNNRVTTALRNAAESLVRSDSYLGARYRHFTGRLVGLKGVKAMARYLACLVYRLLTKGPAWVDRGAAYYENKRRDRELVGLHRKAAAAGMKLVPIT

SEQ ID NO: 65281 - protein, 348 aa, unidentified
MNLKRIGLDTSKAVFTLHGVDHDERAVLRRNMRRAEMEAFFAKLPATHVALEACGGSHHWGRKLAAMGHTVQLIPPQYVKPFVRRGKNDRNDAEAISEAASRPDMPSVPVRSAEQQAQAIVLSARELLVRQRTQLVNAARGHAAEFGLVAAKGTSQVPALLEAVAAGEAVPDAAKQMLAFLGAQVAQLDGQITELERRMKQQHKANPVSQTLAEVPGIGPVSALSLALTIDPGRFTSGRHFAAWLGLVPKQHSTGGRQRLGGISRAGDERLRQLLVVGAMAVIRFAKPGSKTASAWLLALLERKPRKVAAVALANKMARIVWAMMATGEAYRGSKKVATLAAGAAAAA

SEQ ID NO: 65282 - protein, 368 aa, unidentified
MPRYYVGLDVHSKNSVFAIQDEAGRTLSQGSVSTTPEGLLGLRNRYALPPGTPVGLETGTVAFYVARMLSRMELAPIVIDAHEVRLKAHRPLQKSDRRDALEICEGLRRNSYRSIVHVPPESITTLRDSLSRRRHFVRLQTSEVNAVKRLLRAAGWERSSRPSLRTEAGWDRVLAALTIDPTLRAYVEQHRAVWSCARQQITALETLLVVQQQEFAAEVERLQTVPGVGPIVALTAIAVWSEVKRFPTAKHAASYVGLVPSTDQSGDRDAHGRITRHGSNELRAMLCEAAHHASRPTHPLHPYFVSLAVRRGYKMAVVSVAHRLGRILWSMLRHGSSFDVSKLGVEVGPFEKTSVRLYRLKRAAVAPA

SEQ ID NO: 65283 - protein, 456 aa, unidentified
MAKTKKKQANAKTPTSLPVLRANAAGIDIGATEMFVAVPADRAAENVRSFPTFTQDLYRLVQWLKDCGVETVAMESTGVFWIPLFQILEDAGFEVFLVNARHVRSVPGRKTDVQDCQWLQFLHSVGLLRASFRPAQDVCAIRSLLRHRKSLVEMAASHTQHMQKAMTQMNLHIHHVISDLTGKTGLAIIDAILSGERNPHTLATLRDSRIKASEEVIVKSLVGDYRSEHIFTLRQSLAAYRHYEKLVHDCESEINRSLEEFNGPESHDGGESSRRSEDCQTSSDGLLLRELKRAFGVDLSAVTGLSVATVQMLFGEIGSDFTKFSSASAFASWLTLCPNNDISGGKVLKSKTRKTKSRATTALRIAAYSLHHSKSFIGEFYRRMRAKLGAPKAITATAHKLARIIFHLVTSKQEFDESRLIADHTHHHQRQEAGLRRKAKALGYALVPLEPGLAPA

SEQ ID NO: 65284 - protein, 344 aa, unidentified
MSEVSMIGLDISKHVFHAHGVDGRGRAMFRKRISRGKLLDFFATQPSCTVALEACGGAHHWARQLAQLGHQVRLIPPAYVKPFVKRQKNDAIDAEAICEAAQRPSMRFVAVKSEEQQAAGMVFRTRDLLVRQRTQLINAIRGHLTEYGWVAPKGPSHVAMLADLIDEEEMASSLPGAARMMFRVMLDLLSGLSRKIADLDKEIARRAREDEVSRRLMTVPGIGPISATAIVALAPPAESFAKGRDFAAWLGLTPLQRSTGGKQKLGAISKMGERTLRRLLIIGSSAVVKQAGKRGAPRGSWLEQMLARKPRMLVTVALANKMARIVWALLVKQETYRAPVAARA

SEQ ID NO: 65285 - protein, 376 aa, unidentified
MGNAITHVGLDVHKSSISAALLASGSTQVVEWKLANEPGEVRRLVRRLKREGQGEVLCAYEAGPCGYELQRQMAKEGVQCLVVAPSLIPRKPGDRIKTDRRDARKLAELLRAGMLTEVCPPTPSEEAVRSLCRAREDARIDLMRARHRLSKMLLRRGLHFSQGKAWTDKHRAWLWSLVLDHPAEKAVLDDYLLAVDQVTERLKSLDRQLSDLAGQEPHRERVGWLRCFRGIDTVTALSIVAELYGVERFARPRSLMAYLGLVPSESSSGESQRRGGITKTGNRHLRRLLVEAAHHYRHQPAVGITLRRRREGQPAAVIALADRAQQRLYRRYTRLLLGRGVPVQKVVVACARELTGFVWATLRHHETGSAQSEAAS

SEQ ID NO: 65286 - protein, 358 aa, unidentified
MEIIGVDLHGRQQTIAMLDTETGELVEKTLEHQGEKVREFYSALPGPVPVGIEATGSMPWFLKLVEELKIDCQVGHPAKIRKAETRQQKHDRRDARLLLKLLAENRFPSIWMPSTEQRDLRTLLRHRHQWVGMRTRLQNTLQALALSHGLRRGHGLWSQAGQQALEALPLAPYTAQRRAALLRLYPRLQKAIDDLDQQVGEQARQRPQARRLTTHPGVGPLTALATEVFLGDPRRFADGKAVASYIGMIPSEHSSGGRRRLGALSKQGNALLRFLWCEAAMQAVRRDRELKRFYRRKLVQKGLGKARIAAARKLGIRLWIMLRDQIDYREFCRRVQLRQKSGAARAGMPAYNNGSALQ

SEQ ID NO: 65287 - protein, 420 aa, unidentified
MKVVYQTCCGVDVHKSFLVATIIKTTSGVQPSYQKKRFSTFNNSILEFKKWLLDNSCRDICMESTGKYWIPVFNLLEDEINVTIANPKWVKAVKGNKDDTKDSKWIGDLFRLGLVPGSYIPCKEIRILREFTRYRYKLTSCRSSEKNRFQNALTVCNVALDSVVSDIFGKSATSVIDYLLEQSDNSINHEEISSRLLRSLKKKSESVIESIEGYQMTDSQKYRMRLVHAHMDYITSTISDIDSMINSLVEPYDNAVKLLCTIPGVDRNSAITIISEIGTDMTQFSNSKRLCCWAGLTPGNNESAGKKKSVRITRAGVYLKPALVQVAHAAVKSDKSPYYKAKYERIMKRRGKKRAIIAIARMILTAAYQMLSTGEVWNPTDLYKIDMPEPLKEKQKEKAIKQAKKLLIAEGIIDESLLAS

SEQ ID NO: 65288 - protein, 421 aa, unidentified
MQKMILVTEKTLIVGIDIAKYTHWAQITDSRGNPLCKPIRINNCLDEFQAFVSQILSIKDVHGLTTIMIGFEPSGHYWRNLAFFLRDIENIMLVGVNPYHVRQLKELDDNSQTKSDKKDALVIARLIRDGRFFEVYMPDDEYGQLRILRKHREQLATMRKQTINLLHCVLDEYFPEYEKAGFEINTINSFIILRTCPFPSDWIAKSNQELRIAWKTVADASKIRISKAVACRLRNAAENSVGVKVNIDAARVKMNNLLDLLELLNKQISVVDAEMEKIIAELNITPFITSVPGVGNVIAASFIAETGDLNRFQDWKQIRKLAGLNLVEQSSGTHKGKTSISKRGRPGLRRTIYILGDKGMLVSHEMMTYYQYLRHRSSNQLHHDQAVLAVGLKLMRIIFHVVKYKELYDPQKALDLNACTV

SEQ ID NO: 65289 - protein, 343 aa, unidentified
MQSITTIGLDIAKSVFQVHGVDPDGHVVVRRQLKRRYVLAFFEKLAPCLIGIEACASSHHWSRQLQALGHDVRLMPPSYVKPYVKRQKNDGTDAEAICEAVSRANMRFVPTKTPEQQSGLVLHRTRHLCIRQQTSVINAIRAHCAEFGIVAPVGRRGIEELLNVIANANDEQVPEIARACLSALGDQLDRIKAQILAFDRMIGAWHRSCAASKRLDEIPGVGPALATALVASIADPRTFRSGRDFAAWIGLVPKQSSSGGKPRLGSISKQGDRYLRGLFTAGALAVIRYAKIHRIGHRPWLTALLARRPTKVAAIALANKIARMAWAMMARGERYREPAALAA

SEQ ID NO: 65290 - protein, 308 aa, unidentified
MNETPVCVGIDVAKATLEVAVRPSGAQWVSANDEAGIQTLLGQLRALAPTLVVLEATGGYEHAVAATLATAGMPVVIANPRQIRAFARATGQLAKTDAIDAQILALFAERVRPTPRPLPDDATQALEALLTRRRQVLEMLVAEKNRLGVARASVRRDISQHIRWLERRVADLDRELHAGVRASPVWRAQDDLLQSVPGVGPVLSYTLLAALPELGTLGRKQIAALVGVAPLARDSGAHRGRRTSWGGRAPVRTVLYMATLTATQWNPVLRHCYQRLRAAGKPHKVALIACMRRLLLILNAIVRTQTPW

SEQ ID NO: 65291 - protein, 354 aa, unidentified
MLIIGCDFHTRYQQIAMAREETGELLVERRLDHASGEAHAFYRSLQSSQEPVRVGIEATGPIHWFERLLADLGHELWIGDSAKIRASEVRKQKTDERDAALILDLLLAKRFPRIWVPTPAQRDLRQLLWHRHKLVSMRTMLGNQLHALAMSQGLCRKKKLFTKKGRVELVSLGLAPWASRRREELLKLLDQLELPIAELDRAVLEEAKRHADAVRLMTHPGIGPVTALAFVLAIGPITRFRRSKKIASYLGLNPSEESSGGRRRLGAISKQGNTMVRWLLIETVHHAVRQDPELRQDYQRLKFRRGHAVAKVAIARKLAVRMYWMLRSGADYARLVRRQGSPRGTLVGASPSLA

SEQ ID NO: 65292 - protein, 402 aa, unidentified
MNAVGIDVSKGKSMVVIMRPFGEVVASPFEVMHTDSELRELANSLRNLNGETKVVMECTGSYFYPIAYTLHEAGLFVSAVHAKIIHDYGNNTIRKVKTDKADSIKIANYALSHWMELPAYRPEEDTRFMLKAFSRQYTKYQKMKTMLKNNFIALTDHTFPGVKELFTSHPRKSDGHEKWMDFAFKFWHCECITSLSEKVFTDRYKKWCKNDGYHFSQTKAEDIYASACGHFFVMPKNETTKLLITQAIDQINAISENIAVVANEMKRLAEMLPEYSVVSEFFGVGDILGPQLMAEIGNVFRFRNKGSLVAFAGLEAPPYQSGKFDSQDRSISKKGSPHLRRTLFIVMQSYVIKAPVDEPVYQFIVKKRSEGKHYYSYMTAASAKFLRIYYARVKEYLNSLDE

SEQ ID NO: 65293 - protein, 354 aa, unidentified
MNKIKQLSFEGKVIYCGLDAHKTNWKINARMEGIEMATFSQDPDSSLLKNYFDKNYPKAELKVVYEAGFCGFEIQRSLTTLGIDCIVVNAADVPSSDKDRKRKDDKRDARKLSIELAKGNLRGIYIPDKHMQDARTLVRQRHRLVQDQTRCANRIKHLLLSNGIKTGEKSERWSLRFINKLQQLDCRSALLKASLQFAIEQYLQTRRILKEVTLAIRDLSRRDPFAKIQAVLQSIDGVGLLSGMVIQTEIGDINRFKRLDSLCDYAGFVPDIYSSNDKMVVHGISKRGNEFLRETIIESSWVLIRKDPAMLMKYNEYRSRMNANKAIVRIAKHLLSRIRFLWKNEQTYVRGITR

SEQ ID NO: 65294 - protein, 393 aa, unidentified
MFYVGLDIAAEKHDCCIMTEERQVLKQFVFRNDAEGFEFLKKTLTKLAPTEEIKIGLENTGVYGSNLVQFLRRNGYKTYTFNPLLINKSIQATTLRKTKTDKADAKFLAQYLTWDNSQPDHDVSYHISELKSLSRLRFSLVQQRSKCKTQAKGVLAQVFPELTQVFSDVFGTTARTILSLCPSAQHIAAYPVPQLADLLRTTSRGQLGLEKAELLHALAVHSVGNSSIALELQLQIYLEQITQLSFHICRCEAALRTILAQMDSPITTIPGIGTVLGATILGEIGDIFRFSSPAKLLSFAGLEPSITCSGKSVSAPGRMVKHGSHYLRWAFGQAARCIILRDQTFAAYASKKRAEGKHFNVVCSHVAKKLVRLVFALLKNHSSFIPNYSSLAA

SEQ ID NO: 65295 - protein, 349 aa, unidentified
MNITHYIGFDVHKKHINFCSKTADGEVYQEGRLIAQRSVLREWASQHREPWHGAMEATLFSGWIYDTLKPYAARLEMAHPAMLKAISTAKKKNDRIDARTIADMVRCNLLPTCYVATPQIRELRRLLRYRNLVIRESVRMQNKIAGLLMESGTPFVKEKLHGRKYFASLLESLEEVPDSVKDLLRLSRGAFEMFQASQKRLVQQLLAHPELGKRVERLASIRGVGEITALTWALEIGDPFRFSSSAKVMSYCGLTTALKSSADKQQRGPISKQRNPWLQTALIEAAKLAPRWNPQLAALHTRELGRGHRNRATLAVARKLAAYLLAVDKQAQPFQLRTLSPIVLTQETG

SEQ ID NO: 65296 - protein, 354 aa, unidentified
MSSRKTGQIAVIGIDIGKNSFHIVGLDKRGAIILRQKWSRSQVEARFANMPPCMIGMEACVGAHHLSRKLNRLGHDARLMPAKDVRAYSKGQKNDFRDAEAIAEAVQRPTMKFVATKTSEQLDLQALHRVRERLVSQRTGIINQIRAFLLERGIAVRQGQHFLRAELPRILGAPSAHLSPRMAQTIEDLAGDWRRLDGRIDGLSDDIEALARRDAGCARLMSVPGIGPIISSAMVAAIGAGEVFTKGRDFAAWLGLVPKQISTGDRTILGKISKRGNRYLRVLFVQAAWVVLVKPKIWERHGLKPWIEAAKKRLHHNVLAIALANKLARIAWSVLARGRNFEARTITAANAYST

SEQ ID NO: 65297 - protein, 324 aa, unidentified
MTDAVLGIDVSKNTFDTNLGAGTKARSKSFANSSVGWHHLIAWLGEHKIGQVHACLEATGRHGLGIALALHEAGHVVSIVNPAQIRDFARTKLGRNKTDQVDAVHIREYAELFKPRPWTPPSPAMRRLCELQTIRAGTVAGLTEWKNRRRSGIMDDLALSLAKTTIQHFTSQLEAVDQAIAETIDNDVELSAKRDLLVSVNGVGEALAGVVLAELPGPDILGSSAAVTAYAGLNPQQHQSGISVNRPVRISKIGNAALRTALYMPALSAMRYNPAVAALVDRLKAQGRLKGKQIVIAAMRKLLVLCLGVLKTGKEFDPAMAMGK

SEQ ID NO: 65298 - protein, 311 aa, unidentified
MDTIVVGIDVSKDRLDVHVRPGGDAFAVPRDGEGIAALAARLGPLQPRLIGLEATGGFETVVAAGLASAGLPVVVVNPAQVRAFGRALGRRAKTDPIDAAVIAHFVEATSPIARPLPSEEAQLLSDLVARRRQIVAMISAERQRERRAPARIRKSIARLIKALERELASLDGDIDDTVRASPAWREAEDLLASVPGVGKVVARTLVAELPELGSLDRRQIAALAGLAPFTRQSGQWRGRSFIGGGRAAPRAALYMAAMVAARFNPTLKQFRDRLVQAGKPKIVAIVATARKLLTILNAILREKTPWNPKSA

SEQ ID NO: 65299 - protein, 390 aa, unidentified
MLQKKQKPNQSYITKGAIIMKDTTKFVGLDVSKEKIAVAIAEEGREEPRYYGIIPHSPEAIRKLIKKIGEQHNLRVCYEAGPTGYPLYRILSSMGIHCDVIAPSLIPQRPGERIKTDRRDSIRLAHLYRAGELTSIHVPTPEDESLRDLVRCREDAKEDELRSKHRLSKFLLRNNIQPPSKMTKWTVKYRRWLDTLKFDSSKLQLVFQEYYHQIKELEQRIIRLEEEIRVQATESVHAPVIQVLQSLRGVALITATSLAAEIGSFERFETPRQLMAYIGLIPSEYSSGESRRQGKITKTGNRHVRRLLVEAAWSYRYQPSVKGELKRRQNGQSPTIQAISWRAQNRLHKKYYRLLSRGKESGKVVTAVARELAGFIWAITREIEKLPKSN

SEQ ID NO: 65300 - protein, 499 aa, unidentified
MVLGHVGDIGETVRTVIPFERVSITTYPNRRGIPNDMMEEGMTVRKRMALELAHPNAAGVDIGSASHFIAVSPDRDDEPVREFKTFTADLEQSADWLVRCGVDTVAMESTGVYWIPFYELLEARGFKVYLVNARHVKNVSGRKSDVLDCQWLQQLMSYGLLSGAFRPADEVCALRAVSRQRDMLLASQARHIQHMQKALTQMNVQLANVISDVVGETGQKIVRGIIAGERDGQVLAKMKNARIRASEEEIAKSLQGNWREEHLFVLKQAMALYDAYGAQLTECDAKLQSMLAALVVGDDGEPTKGRQIGRSKNAPRFDVRRYLFKLCGVDLTRINGINPTTALKVISEVGPDMSRFKSAKHFACWLGLCPGTKISGGKVLSGASKRTTNRAAQALRLAAAALHKSQSALGAYFRRLAARLDRAKAITATAHKLARLIYTLLTKGTEYTDKGQDYYEERYRQRVMHHLTKRAEKLGMQLVPLSVNPPEIIQSIMEINCVS

SEQ ID NO: 65301 - protein, 415 aa, unidentified
MKIVFPTCCGVDVHKRFLVATIITSPAGSLQPHYQKKRFSTFNSDLNRFADWLHENACLDVCMESTGKYWVPVFNILEKRGIRVVIANPKWVKAVKGNKDDTKDSKWIGDLFRIGLVKSSFIPDKNIRILREFTRYRYKLTSMKSSEKNRFQNAFTVCNVALDSVVSDMFGKSATAITNYLASNEPFDAEHCVSLLQRSLKKKADAVLESIEGYSITDEQKLRIGIIREHLDHIVGLIDKVDACINTLVSDYESQINLLCTIPGVRRDTAITIISEIGIDMSQFGSSKRLCCWAGLTPGNNESAGKKKSVRISRAGVYLKPALVEVAHAAVKDKANPYYALKYERIAKRRGKKRAIIAIARMILTAIYEMFSTGEIWNPVDLYKVDMPEHLKEKQLAKAVKQAIRFLEAQGLKVG

SEQ ID NO: 65302 - protein, 429 aa, unidentified
MNNTQNKKIEQVKETTMIVGIDVGSEKHYFRAFNWRGIELTRKPIAFSNSMEGFNSFYNTIVELMQKSELEEALVGIEPTGHYWFALGQFMGEKDIKFVMVNPHHVHKTKELDDNSPSKNDRKDPRVIAGLVRDGRYFYSYMPTGVYAELRNASNRRFVLVEEQTRAKNRLQKWIAVYFPEYKGIYTHIDAKGGMLVLKKAPTPEEIVRLGVEGIIKIWKDAKLRGNGHKKAMLILAAAMRSIGLKAGLTEARMEIQDLIEDYELQTKRLERVNDLIKELCQQIRYADKLLEIKGIGITTVAGFIAEVGDITRFDSTKELQKLAGLELVADSSGKHNGKTKISKRGRKRLRYLLFEAAISVVGKNEEFKEIHRYYITREKNPLKKMQSLIAVACKLIRVFHVILTKGVSYDASKMLEDIRHPGVQLKAA

SEQ ID NO: 65303 - protein, 378 aa, unidentified
MKTVLQSKDNATYPALYMAMELSNKKWKPGFSNGEKMRVKTIDAGDWGALHAEIERSKIKLNCAADCRVVSCYEAGRDGFWIHRALVAEGIESHVLDSASIEVSRRKKQVKTDRIDAAALLRLLMRYVNGETAALHPLRIPTVAEEDDRRLTRERERLLKERGAHSARIKSLLVAHGIRLARLSELPRLLPTAKAAVTGYALPADLKAELEREYERYDLVDRQVKTLEQLQRARAENADSAVMDMIQQMRSLKGVGWQSSWVLIMEFFSWRQFKNGKQVGACAGLTPTPYDSGDSTREQGISKAGNKRIRKLMVELAWLWLRYQPHSALTQWFEQRFGSGGKRMRRIGIVALARKLLVALWRYLEHGVLPEGAVLKVV

SEQ ID NO: 65304 - protein, 348 aa, unidentified
MVHFVGLDVSVKETSVCVVDDAGKVILEQKVPTEPADIIALLTSLGVSYGRIGIEAGPLSQWLVNALTAVELPVICVETRHMKALLTAQQINKTDRNDARGIAQMMRVGLFKPVHVKTLAAQEQRMLLTSRKLLQRKLLDVESDLRGTLRNFGLKVGVVSGGRYEARVRELVEDFPRLAAIAEPLLNVRRVMRQQFAVLHKMLLDTVRSDPVCRRLMTAPGVGAVVALTYRATVDQPQRFLHSRAVGAHVGLTPKRYQSGETDYDGRVSKSGDALLRTMLYEAAHSLLIHSGKWSWLKAWGVRVAQRRGMRRAIVAVARRLAVVLHRMWVDGSEFRWSENSAAVPTVA

SEQ ID NO: 65305 - protein, 394 aa, unidentified
MRFVGIDIAAETHVVAVVDESSALVVKPTPFGEDAAGYATLRALLGAPEDVLVAMEATGHYWQNLFAVLVAEGFAVALLNPMRTRRFAGEDLARAKTDAIDAVGIARFAAQKRPAVTRLPEAATQELRELVRLRDRLRQEFGDRTRQLHRLVDLGFPEFTRVIPDLKGRLATGLLAAYPTAAAFRGVSVLRLAALRADGTHRVGAALARALLEAARESVGQHHGPAYQLQVRYLCEDLELLRRRIEALEQDVATTLQTHEVGMLLTTITGIGVQTAARLVGELGDPARFRSAAALAAYVGVVPGTRESGKRRLTHARLAPTGHARLRAALWMPTLVAVRTNPWLRAYYARLRARGKLPKVALIAALHKLLFAVYSVAKHRRPFVPHLTVQGVEA

SEQ ID NO: 65306 - protein, 335 aa, unidentified
MQIYGIDLAKEKFDVSFFDLTSKKVSNKPSHKVVKNNFKSIGRFLETLPSDAVLVAEHTGVYGDTLLKCCMDSNVKIAFVGGYVIHRYRATPDRAKTDVLDCALLREFGERYPDKLKYRKFPEEALYELRQLARHREMLVEQRKQLMTADKSEDCRPIRSLAVKRSMDRIKEMLDTEIAETEKEMLKVINGHDSIHHNYEIVKSVNGVGLVTAVELLVKTDNFTKMTTARQYAAYAGTAPYEKSSGKMDKGAHISKIGNRRSKTLLYICAESARLHNKEIKLYYERRTLIDKKPRHYVLNAIANKLLRIIFTLVEKGEVYDVNYIRQDPRLVKHN

SEQ ID NO: 65307 - protein, 370 aa, unidentified
MVKLARTMNKCFHTELSSHEGTRCQFNGGKEVIKLGIDVHQHLYVVVEQVGGSNPKPPQRFRKEAFLHWAAKLNNQGKRVHAVYEACGFGFGLQRQLSALGIDCHVVCPQKLDEHNRRVKTDGLDAKALCLKLDRFVQGNGDALARVRVPSEQEEQQRAIHRQREQLVKARKRLEAQGRSLMVNHGIEPIQQWWKGRAFAKLQVPTWMQELLANSQLILLALEQKIKTLTLQLQNAAEPNQPCGFGALTSVVIDREIGDWQRFSNRRRIGSYTGLCPGEYSTGDTRLQTCVTKHGNPRLRAALVEAAWRLVRFQPNYKPVVKWRQTLCQGAPATKAARKKAIVAVARQLAVDLWRIRTGRVSAQELALIN

SEQ ID NO: 65308 - protein, 429 aa, unidentified
MRTESTPDARGPVFCGVDTHADSHWLCVLDWRGRKVLSRQFPADAAGYEALAGAIAAAGEPACVAMEGTSSYGAGLTRHLASLGMPVREALSPARMQRRRPGQGKCDEADAERAARAAMSGSKLGTPKSQDGWVDGVRCMLAARSGAVKARTSAINTARSLLTTAPEGLRSRFRGMGGTRLMEELPSVRSEGALGAALGALADLWAAARDAALDMERAIEASLEENCPALLAMYGCGPVSAAKLAVAAGDNPGRLRSEASFAAICGACPIPASSGKTVRHRLNRGGDRQANSALHEIARQRVMRDPETAEYAERARGRGKSDREVMRCLKRYVAREAYRALMHPHEVRKPEDASALVAARRAAKISQVRAASILGTSEKYISLLERGQRELKPIRRAYEAWGEAGLPLDWDRQAFEAERKMDSKKDLAI

SEQ ID NO: 65309 - protein, 330 aa, unidentified
MQTITTIGLDIAKSVFQVHGVDNDGKVVIRRQLKRRYVLAFFEKLPPCLVGIEACASSHHWSRELQALGHTVRLMPPAYVKPYVKRQKNDAADAEAICEAVTRTNMRFVPIKTPEQQSGLMLHRTRHLFIRQQTSVINAIRAHLAEFGVTAAVGRKGIEELLRVIADPSDKRVPDVVRACLAALGSQLLSLKKQILDFDRMIMAWHRSNQTSKRLNCIPGVGPLLATALVASVADPKTFRSGRNFSAWIGLVPKQHSSGGRDRLGSISKQGDRYLRSLFVAGALAVIRYAKIHGTKYRPWVAALLARRPNQSRRHRACQQARPNGLGNDG

SEQ ID NO: 65310 - protein, 312 aa, unidentified
MAMLSFCGIDVSKDRLDVVVLPEGWFFSVSNDTAGWAELVVRLRPLAVSAIGLEPSGGYERGIIRALLAAGLSVRRINPNKLRQFARARGVLAKNDRLDARLIAEYVAIMPTRVVQRDAAVERLAEIVTMRRQLCDEHVAAENQAAHLEDAMLRRLSKRRQMRLEADIRLLDKRLAEMVAANVALAQRYELLTSMPGVGPVLAFTLIALLPELGKMSRKQIAALVGLAPYDFDSGKLKGHRSIYGGRMPVRNVLYMAALSASRYSPALKTFHKRLAAADKKSKVIIVAVMRKMITTLNAMLRDSAAWQPRSA

SEQ ID NO: 65311 - protein, 348 aa, unidentified
MLIIGCDYHPGFQQIAFVDQETGECGERRLSHREEAEQFYRALLGQKVRVGMEASGHARWFERLLNELQFELWIGDAAEIRSKRVRKQKTDRQDAQLLLRLLIEDRFPRIWVPDAENRDLRQLLWHRHRLVQMRTRVMNQLHVVALNEGLRRKKALWRAAGRQELESIALAPWASRRRQDLLDLLDRLTPKIQQLTGALEEEVEKRPVTRRLATHPGVGPLTALAFELVIGTPERFHCGKQIASYVGLVPTEESSGDRRRLGHISKQGNVLLRFLLVEAAQVTVRSQPEWRNKFFHLAMRRGRKIAKVAMARKLAVHLYWMWRQGHDYGQLQKLGSHAGEPGNPDGGQ

SEQ ID NO: 65312 - protein, 341 aa, unidentified
MKIIGCDFHPSYQQIAMVDTETGELWEGRLEHEQGEARRFYQALQGQTVRVGIEAVGNSQWFEQMLAEMGHELWIGDAAQIRRLVVRQQKTDRRDAQHILELLRNGKFPRLWVPSQQMRDVRQLLRHRQKLVEIRTQVKNQLQHLALNQGVRRKRRLWSVQGRAVLEQLPLQGWTARRRSDLLAMLDRLQEQVGELDGAVRAEAEQRPEVRLLMTHPGVGPVVGLAYVLTIGPPTRFPRGKQVASYLGLIPSEHSSGGHQSFGPISKQGNTMMRTLLVEAAQTAARFDEELRRAYGRLKAKKHSAPAKVMVARKLAVRMYWMLRENKSYAQLYAQRPVARM

SEQ ID NO: 65313 - protein, 427 aa, unidentified
MFTAAFASLTKMNFNKLLSGNITKYQKEGFIMISVGIDVSKGKSTVCIMKPCGEILESPFDIGHTADELDSLISLIKSFDEETRVVMEDTGHYHLPVATYLSSHNIFVCCVNALRMKKFCSQSIRRAKTDKIDSIKIASFGITYWNELVKAYPSNVIYDELKFLARQYYQVTAMLVKSKVNFSNLLDQVMPKINDVLSNQGENHKLTEFVSRYIHFQNILDMGEMKFTSDYCKWAKKKGYRLNERKAAEILALAQNGIPTLPNSQSVKIAVSEAVKLIHSIEESRNTILAQMQDLCNTLPEYSVVKEMDCIGDTLAPRIIAEIGDVRRFKNKHSLIAYAGIDAPPYQSGAFHASERHISKRGNSYLRKTGYEIMQSLIKHKPADNAVYDFIQKKRSEGKCGKEAMIAGLNKFLRVYYGKVMEFYSEH

SEQ ID NO: 65314 - protein, 418 aa, unidentified
MGKPRSKVCGIDVHKKFLVATILDRRGEKRIKEVPNSLEHLLQLREWILEEQCEVVAFESTGEYWIPLYDILEGSVETIVANPYHIKWIPGKKTDTIDSEWIAELALNDLITPSRILPKEKRDIRALTRLREKLVNERTDHKNRVHKILDSACIRLAAFFSDLFGKTGLKILKYILSGVPPEEIIKKLPKRLQPHSDAILDTIRTQLSAQQVLQLQTSVTMIDLLNDRIKELEQTILNELHKERRKLQILMSIPGIGVIGATTLLAEIGDVTDFSSPDKLTKWAGITPRVYQSSNKLHTGSITKQGSKHLRWILVEIAHSCIRTKNTALRDFFDRIFSRSGYKKAIVALARKILKLVWHLLINDEMYQEKDIRPKSSRLPNPRDIGSISVSAALELLVKAGYHIVDGTDLSQKGNLGT

SEQ ID NO: 65315 - protein, 358 aa, unidentified
MQNKVKTISFQGQNIYTGIDVHLKSRKVTIMLDHSIYKTFSQDPKAGILYDYLQRNFPGGNYYSAYEAGFCGFSVHRELEKYGIKNIVANAADIPTTDKERKQKEDKRDSRKIAKSLRNHELEAIYIPDREMEELRSVVRYRKTLVKDIGRNKSRAKSFLHYYGIHIPTELDTASQHWSARFTSWLKSLETTTACGGFVLSEIINTTEHLRLRLLKVERQLREISKTGPLAKTIKLLRSIPGIGLIVSMTLITELGDVKRFSRLDNLCSFVGLVPTTKSSSDKEKTGNITPRSNKILRNSIVESAWVAIGHDPSLALRYNELCKRMKPSEAIIRIAKKLLNRINYVLKNEKEYVYSII

SEQ ID NO: 65316 - protein, 454 aa, unidentified
MQKQDSYDYYVGIDCAQNKHDFAMKNNQDKFLIKKGHFSNTLQGYEKFLNTVLSKCLNKDKILFGMEVTGIYGTNLYERLKSDGYHVVMISPDSVKNYRDYKRLNKTDKIDSACIAELLLNGDAQIVHVEKNGYTDLKAYIRRRNALKVTCTQETNRFLAKVCLYFPDLLKVFPSGRATLKAIFSIYPTPYSIIEADFDELVSVLQKASKNKFGVDKANELIHAARNSIVVRKSISDGELYNIHSLIDSIDSLESEIRNLEKIIDSKAEEFPAYHVLLTLTGCGKITAATIVAEIGDISRFHKASQIVSLAGLYGDNSKSGSSVNKRGKISKKGSRYLRHAIYMVAEFARRNNPIFKAYFTRKKNGDRTKHTLAVNAVANKLCKVIYSLMKNQSTYIIQYRDLAKLSESTQNEFFQNAETDFSAKTRRKKYLYEDEYGELHEFVFKSIKTALIE

SEQ ID NO: 65317 - protein, 374 aa, unidentified
MSEFIMVACDLHDKTMLLKIARGREAAETISQRNTAEGRARLINDLRVRAQAAGGARVIFAYEASGQGFGLHDELTAAGIECHVLAPTKIARSPQHRKQKTDEKDADQILQLLRGHVLAGNPLPNVWIPDVQTRDDRELVRARLDAAEKGVAVKTQIQCLLKRNRLTRPEHMKCAWTKKASGWLRMVTRDPAVGAGARATLASLLRQWEFLQQEIERLDEALENLASSPRYAAAVDELVKLQGVGLLTALVFLTEIGDLGRFTNRRQISAYLGLVPRSYESGAAEDRKGHITGQGSSRVRRVLCQAVWPRVCEGGADHAAYRRVAEKNPKHKKIAVVAAMRRLGVRMWHRAQAASHQSTPRCRGRRTEAPAPAI

SEQ ID NO: 65318 - protein, 341 aa, unidentified
MNYYVGIDVSLEASSLCVVDANGKIVREGKVASEPDALIAWLKGLKLELTRIGLEAGPLSQWLYAAMRQAGFAVELLETRHVCAALKTMPVKSDRNDARGIAQLMRLGWFRPVHCKSMAAQETRALLTARKLLQTKLHDLELSLRGILRGFGLKVGPTTPARFEERIRELVAGHPRLEVIVKSLLAARVALRREFDHFEKQVRDAARCDTRVRLLTSIPGVGAIVSLSFTAAIDDPARFKSSKRVGAYLGLTPTKYQSGETDIDGRISKIGDASVRAALYESAHIILTKPLKGCTALKSWAMKIAKRSGMKKAKVALARKLAVIMHRMLADGTSFRNAAAV

SEQ ID NO: 65319 - protein, 343 aa, unidentified
MKLSYVGVDLAKNVFQLHGIDRHGQAVWRRRLRRGQWLKVLLETAEPGCIIGMEACSSAHHWARQLQANGYAVRLVAPQFVKPFVKGNKNDRNDAEAICEAITRPHMRFVQPKTAEQQDIQAIHRVRCALMSQRNAKANQIRGLVAEYGIVAPPQMLSLRRVVPEWLEDAENGLSTCFRALLHDLWMDLQHLQERLAGLDRQIEQIAKDNPVTRRLQQLRGVGPMVATALVASVGDGSHFRKGRQMAAAIGLTPRQHSSGDKRRLLGISKRGDAYLRTLLIHGARAVVSQAKRRDDPLSLWVTSIAERSHTNVAAAALANKTVRIAWSMLRNTSDYNPALAVA

SEQ ID NO: 65320 - protein, 292 aa, unidentified
MESGPFVGIDVSQEYLDVAVCGQKRVLRVTNDEAGLQSLMRQLQEKEPELIVMEASGGYERRAASMLLAAGLPVAVVNPRQARDFARSLGQLAKTDAIDARVLARFAEVLKPAPSRLSEEAAEQLRELELRRRQVVEMIVAERNRLRTAPRTADRIQEHLRWLEDEVKRTEKQIEGVIQSDPGLEAKAAILQSVPGVGPAVAATLLGSLPELGLLNGKEIASLVGVAPLNWDSGKLRGKRAIWGGRAHVRSILYMAALVASRRNPVIRALYERLRAAGKPKKLALVASRSEA

SEQ ID NO: 65321 - protein, 421 aa, unidentified
MSKGRYRTVEVKQVDWAAWAIQASGGTVVLAVDVAKEDFVGRVDLRDGVHLGRVKWRHPEQTGELLAGIKGLAAVARVEAVMESSGTYGDALRWQLQCLGAQIFRASAKRVHDAAEVYDGVPSLHDAKAADIIAELHRQGHTQAWPEHDTARRALNAQLQMLYQCKTLYQQQSNRLEALLARHWPEALAILGLESATLHHLIADFGGPAQVHGLEGPARALMHKTGRHWLAEEKIEAVLRSAGTTLGLPCVLEERQLLRWQAKRLLETAAEVRRLEQLVEGAVAAAPLLTTMAPVVGPVTSAVLLAALGNPQDYPDPASYCKAFGLNLKERSSGKHKGHLKITKRGPSVARYYLYFAALRLIANEPIVARWFQTKTTRPGAMAGKQVVELMRRLAKALWHLAHGRAFQVARLFDQHAVASA

SEQ ID NO: 65322 - protein, 343 aa, unidentified
MQTIATIGLDIAKSVFQVHGVDAAGEVVIRRQLKRRYVWAFFQKLPSCLVGIEACASSHYWSRELQALGHTVRLMPPAYVKPYVKRQKNDMADAEAICEAVTRTNMRFVPTKTPEQQSALMLHRTRHLLIRQQTSVINAIRAHLAEFGITAPIGRRGIEELLRVVADPSDNRVPELVRACLAALGSQLLGLRKQILQFDRMILAWHRSNQTSKRLNCIPGVGPLLATALVASVADPKSFRSGRNFSAWIGLVPKQHSSGGRERLGSISKRGDRYLRGLFVAGALAVIRHAKLHGTNHRPWLTGLLARRPTKVAAIALANKLARMAWALMARGERYNYPVALRP

SEQ ID NO: 65323 - protein, 345 aa, unidentified
MKIKTIGIDLAKDVFQLHGVDEFGNMVLRKQVKRAQLAIFFSNLPVCLVGMEACSGAHYWARKLQSMGHTVRLMAPQFVKPYVKTNKSDAADAEAICEAVTRPNMRFVPVKNIEQQAVLALHTVRQGFIKARTAQANQIRGLLSEFGLIIPKGIGYIVSRVPDILEDATNELPGVFRNLMQRLFDHFKEISMQVKALDMEIQQWHRNNEASTRLAQIPGIGPISATALVASLSNAKNFDNGRQVAAWLGLVPRQHSTGGKTNLLGMSKRGDSYLRTLLIHGARSVIYRASLKKDNINSWVNSLVSRRNKNIAAVALANKNIRIVWALLAHDREFRPDYVSINSCA

SEQ ID NO: 65324 - protein, 347 aa, unidentified
MTIVEAARGVTGGVDTHLDVHVAAALDPLGGLLGTERFETNAAGYKALFAWLETFGDVTKIGVEGTGSYGSGLTRYLRRVGVEVIEVDRPNREERRRSGKSDPLDAVEAARAALGGRATGKPKSRDGAVEAIRVLVVAKRSARQARTKALIQMRHLGYTAPEQLRCRLKGLSVPALVAEGSLLRPTRSPDPVTAATKASLSSLAHRIQALDDELAELDERIEALLVATVPELLDLFGVGPDTAAALVMAAGDNPDRLHSEAAWAHLCGVAPVPKGSGKTNGKVKAHDGGDRQANSALWRIVMVRIAHDPETQLYFERRVKEGKTKPEIIRILKRYVAREVYRYLPRG

SEQ ID NO: 65325 - protein, 412 aa, unidentified
MSVVSDEVEYYVGLDWAAETHAVCVLDAAGKIVANFPVPHSAEGIAALITRLGRLGEPEHIPVGIERPNGRLVDLLLEAGHPVVPVSPNAIKTWREGEVLSGAKSDAGDAAVIAEYLRLRAHRLRVVPGYSPETKALRTVVRTRDDLVAMRVAAANQLAALLDAHWPGAKAIFADIASPIALAFLTRYPSAVSARSLGEKRLAAFLVKHGYCGRRPASELLTRLRHAPAGTLDDTLTEAVRDAVLAMVTVLTALVTALKDLDRSVTAHLGEHPDGPIFTSLPRSGQINAAQVLAEWGDVREAYDRPDAVAALAGCTPVTNQSGKHRAVHFRWACNKRFRRAITIYADNSRHASPWAAKIYNDARAAGKDHPHAIRVLARAWIRVIWRCWHDGVPYDPTQHGNATKINQPIAA

SEQ ID NO: 65326 - protein, 335 aa, unidentified
MQVYGIDLSKEKFDVNFIDAKGKEKKQEVKNAVASISRFLSSVSGDGILCAEHTGVYGDILVYLCNQMNISIALVPGYTIKHSLGLLKGKSDPLDSKRIREYGERFSDKLEYAEYAEENIAEIKQLYTLRNQLVKQRRALRTVDTGRGHLPMQSISVHNHIHAVFSSLDNEITSIEDEIEALIKANQDLNENYELAKSVFGIGPVIATDLLIKTGNFKTIDTHRKAASYAGVCPFPNTSGKMVGKSKTSPHADKKLKSLLYMGAKAVVKNNKEFRLYYQKKQLEGKPHYVIMNNVSNKLLRIVFSVVRNKTPYTSDHVCLDPREKNNNSSTKKVA

SEQ ID NO: 65327 - protein, 342 aa, unidentified
MDYYAGIDVSLECSSVAIVDATGKIVREGKVASDPAALIEWFASLGLKMVRIGLEAGPLSQWLYAAMKEAGLSVELLETRHVRNAFKTMAVKTDRKDARGIAELMRVGWFRPVHCKSMGAQETRVILNARTLVQSKLHDIEASLRGMLRGFGLKVGPTTANRFGGRIKELVSEHPTLQIVTESLLAVHEVLLREFKGFEKRVRIMARDDARAKLLMTTTGVGAVVSLTYASAIDDPGRFKKSKQVGAHFGLAQRKYQSGEIDITGRISKIGDKGVRTALYQSAHIILTKPVKASALKSWALRLAKRVGMKKAKVALARKLAVIMHRMLVDGTPFNIAAGAAA

SEQ ID NO: 65328 - protein, 379 aa, unidentified
MKKCIRYLGLDVHGREIMAAVVEEDGKERYLGVIPNRPESVRDLINRLGEKEQLRAVYEAGPTGYGLYWQLEGMGVSCEVAAPTLIPTKAGDRVKTNRRDALKLARYHRSGDLSYVWIPDEDLEALRDLIRAREAAKRDEKRARLRLKSFLLRHGLRAPQGARAWTTKYRAWLEAMTFERAALTGTYQDYLHEVHHHELRVRRLEAAIEEAVEQAPEQFREVVGALQSLRGVGKTTAIGVTAEVGSFSRFPHPQQLMGYSGTVPSERSTGDKHHRGAITKTGNSHLRRLVGESAWSYRHRPALRYVLKKRQEGQAAEVVEISWRAQVRLCGRFHRLVARGKTKQKVVTAVARELLGFMWAIGVEVERRRTNATAQEKLG

SEQ ID NO: 65329 - protein, 404 aa, unidentified
MVFVGIDWSEHHHDVCVMDVEGRLLATGRVPEGVEGLGRLHEMVAANAEEPSEVTVGIEIDRGLLVGALVASGYGVHAINPLSVDRYRDRHRTSGAKSDPGDARVLADLVRTDRHLHRRVAGDSELAEAIKVLARAHQGLIWSRQRHLNQLRSTLREFYPAALSAFGADLASADALAVLALASTPAAGRSLSAARIGAALKRAGRRRRVAERAAEIKAALASPQLQAPAVLSKAYGEVVRSAVAIVAQMTEQIEALARELEARFEEHPDAEILRSLPGLGLVLGARALAEFGDDPTRYADPKARKNYAGTSPITRASGRSRVALARFARNRRLADALEMWAFCSLSTSAGARRYYDAHRAKGQTHRRALRSLANRWVGILHGCLDHHVCYSEQIAWPTVGQAAA

SEQ ID NO: 65330 - protein, 354 aa, unidentified
MNQIIRIGMDTSKYIFQLHGVDASEQVVLRKRLGRSGMLSFFTKLAPTVIVIEACGAAHCLARELGKLGHTVKLIAPQLVKPYVERNKNDGRDAEGLCEASSRPRMRYVPVKTAEQQAALMLLGVRDQLVMRRTQLSNTIRGHAAEFGLIEAKGLDKLASLLAAIEQGDSVPVLARDLFAMLARQYAQVQVELKAIEARLLAWHRGNALSRRLAEIPGVGPVTAAALVMKAPDPHAFRSGRMFAAWLGLTPKDHSTAGKTRLGKITRAGDERLRQFLVVGATSVVKQATGKHHRGPRWLLELVKRKTPKLAAVALANKTARIAWKLMTTGESYDSARIDAQRDAQGDAQGAAAA

SEQ ID NO: 65331 - protein, 346 aa, unidentified
MNQIIRIGMDTSKHIFQLHGVDAAEQPVLRKRLRRRQVVAFFAKLPPTVIGIEACGAAHYWARELRKLGHEVKLIAPQHVKPYVKRNKNDGRDAEGTCEAMGRPTMRFVPVKTAEQQAALMLVGIRERLIARRTQLSNAIRGYAAEFGLVAAKGLDKIEPLLAWVAQDENVPTLARELFAMQGREYTQLQVELKAIEARLKAWHRANACSQRLTQIPGLGPIGATALVMKTPDPRAFPSGRHFAAWLGLTPKDHSTAGKTRLGKITRAGDEFLRSVLVAGATAVIQQVRRGRGHPSRWLLALLKRKPPKLAAVALANKIARIAWKLMTTGESYDGAPMPRVSAVAA

SEQ ID NO: 65332 - protein, 394 aa, unidentified
MIYAGVDIAKMDHVIGAVDERGAEMCRPMPFKNTEAGLERAVAWLEGLAESPSDVVVGMEATGHYWMACYSFLVARGYSVAVINPMQVKAVRKLKGLDKVKNDRVDAGLIAEALRIGQYDETRLATDEVASLRSLSRYLQSLRGMVAELKTQCICLMDAHFPEYAGIFSDMFGAGSRAVLSKSPLPFELARRRADSLARDIAEASRRGGRSAGYAAEIKAAARSSIGVRLGQEAASFQVKSLIRQIEFAESECAKVEARVRALLDEVEPLVLTIPGVSYATGAQIASEIGDVSRFRNAPALVSYAGLNSSVSQSGQFDSGGGPITKHGSPYLRRALWLAANRARQCDPGLRAFYEKKRAEGKPHRVAVTAVARKLCHIVFAVMRDQAPYDPERE

SEQ ID NO: 65333 - protein, 348 aa, unidentified
METIGLDLHKRESQLSIQAEDGTITERRIVTSRERFTAVLGHRPRARVLLEASTESEWVARHLEALGHEVIVADPNYAPMYATRTRRVKTDKRDARTLMDACGHGTYRRAHRLSDARRHLRAELAVRDALVRTRTRYVALAKALVRRDGLRVPSSTPEWVGARVQALDVSATLAAELEPLLTVLTPLNTTIAAADQRLTAVGQTDPVMALLMTAPGVGPVTASALVATIDDISRFPSAHQCEAYLGLVPGERSSGEQRRIGPITKAGNRRTRWLLVEAAWRILRAKDPESAALRAWTLRIAARRGKRIAVVALARRLAGIVYAMWRDGVPYDGRKIRMPHPGSVSPVG

SEQ ID NO: 65334 - protein, 347 aa, unidentified
MEHVGIDVHKNESQICHLTELGELLEQRIATRRDRFAALLGQTPRAPILIEASTESEWVARCLEDLGHEVILADPNYAPMYATRSRRVKTDRRDAQALMEACRLGAYRPAHRTSDAQCQVRAELAVRDALVRTRARFISLMRALLRREGLRVRTGMASSFPRRLAELTLPEPLGTAITPLLAVIETLNRELDAADARLAQHADDDSVVRQLQTVPNIGPVTALSFVATLDRVERFRGPHPAAAYLGLVPGERSSGEQQRRGPITKRGNSRTRWLLVEAAWGMIRHAHPDTAELRAWAARIAARRGRRIAAVALARRLAGILYAMWRDGTDYRPQRVRATTQETAMVS

SEQ ID NO: 65335 - protein, 413 aa, unidentified
MRLFAGDDWAEDHHDVELMDADGRRLAKARLPEGVAGLARLHAMIGGQLGEDADEDDAGQVAIGIETDRGPWVAALIAAGYTVFAINPLQASRYRERHGVSGAKSDAADAHVLADMVRTDSHQLRPVAGDSAQAAAVKVVTRTHKTLIWERTRCTQRLRHALRDYFPAALEAFEDLDAADTLELLAKAPDPASAARLTTAQISAALKRARRRDIATKAERIQAVLRAAHLGQPDIVAAAYAASVRALIAVLATLNEQVKTLQGQVEAYFGQHPDAEIIASQPGLGPVLGARVLAESGDDPGRYISAKARKNYAGTSPITRASGKKKTVMARYVHNDRLIDALMSQAFTALRTSPGARAYYDHQRARGAGHNPALRQLANRLTGILHGCLKTRTLYDEATAWPHYAATPEKTAA

SEQ ID NO: 65336 - protein, 404 aa, unidentified
MIFVGVDWAEAHHDVCVLDEAGAVLAKRRIADGLEGVRQLHALLADHAEDPGEIVVGIETDRGLLVGALVAAGYRLYAINPLAASRYRERHVTSRAKSDAGDAKVLADLVRTDRHNHRPVAGDSDQSSALQVLARLQQNLIWSRQRFVNQLRSSLREFYPAALAAFGTELAHPIALGVLQEAPTPAIGRTLSLSKLAAILRRAGRERNVEATALEIQAQLRAPQLAATPFVDAAYGKSVAATVRLLRELNAQLASVEAELGPTFEKHPDAEIYRSLPGLGVVLGARVLSEFGDDRTRYAHPKARKNYAGTSPITKASGTRHVVLARLARNRRLADACHQWAFCSLTSSAGARRYYRTLRLRGKTHHQALRALANRLVGILHGCLEHRHPYSEQVAWPSSVTAAA

SEQ ID NO: 65337 - protein, 408 aa, unidentified
MQVLYTRCAGLDVHKDTIVACVRCVSPPMHQEVRSFGATTTELLALADWLAEHGCTHVAMEATGVYWKPVWHVLEDEFELVLANAAHIKNVPGRKTDVNDAMWIADLLAHGLIRSSFVPPQAIQQLRDLTRTRKQLVREVSQHSLRIQKVLEDANLKLGSVLSDVLGKSGRAMLDAIVAGQTDPEQLAALAQGTARNKTTELREALRGRITEHHRTMLKLHLQVVDALERTLAELDTAVGKALAPIRQRARLLTTMPGVSDLTASVLVAEIGVDMTRFPSAGHLISWAGLCPRSDESAGKRRSTRVRKSGTWIKTTLVTAAWAAVRVKTSYLRAQFLRIKARRGAKKAILAVAASMLTAAFHMLRDGTEYNDLGSDHFDRHDKSKTIRPLLKRLQDLGCVVPELAHAT

SEQ ID NO: 65338 - protein, 364 aa, unidentified
MYDSTMTVAVGLDVHARSIRLAAVRADELLEERTLPYDEEQVERLLRRWPSVRCCYEAGPTGFGLYRHLVDRGVDCTVVAPGLVPQRPADRVKTDPRDARKLARLLAGGLLEPIHVPSPEHEAARDLVRAREDARLDRMRDRHRLSKFCLRHGRILPTSSWTVVRRKWLGEQRFEFVAEQLTFDTYVHALDLVDARIEQLERAIRETAEQEPWRQLVARLRCLRGIDTLTALALVAEIGDFNRFRSAAEFMAFVGLVPSEHSSGEKRRQGSITKVGNSHVRRLLVESAWHARRRPKVGYDLARRQRGQDAVVLERAWRCQQRLSQRWQRMAGRGKPQQQIVVACARELAGFVWAIATEQPLRTT

SEQ ID NO: 65339 - protein, 330 aa, unidentified
MAGTTAPRITVGVDTHLDVHVAHANDQLGCRVDTLSIPTTPTGYQDLLAWARGLGEPIAWGVEGTGSYGAALARFLAAHGQVVLEVNRPDRQARRGHGKSDPLDAEAAARAVQAGQATVTPKTGAGQVEMIRSLRVARQTAIRARTQAINAIKALLVTAPVELREQLRGLPATMLVPAAAALEPGAVTSPIAATMLALRTVAQRYQTLDAEITILTAELDRLVAAGDNPDRLHSEAAFSMLCGSSPIQASSGKTVRHRLNRGGNRQANAALYRVVLVRLRYHQPTKDYVVRRLAEGKSKQEIIRCLKRYVAREVFAVLQEMRQTNSTNAT

SEQ ID NO: 65340 - protein, 368 aa, unidentified
MGNEAKRFVGIDLSKRTYEAVAITVNPQTITRWNGKLDLRGRKCLLDKLHSGDTIALEAGTASFKIAKEIQSKQGVMVVVLNAANVAIIHASLKKTDKEDALKLARLIEKYSPEELPVVPIPTDQEMERRALVAHETRFRQDRVRLINRLHAVFLRAGFPDHTKRQLGIAASREKLIVSELDGFNLVEAMNLDHMIVEYEKIFEDLDKQINDTVVACGEDAEILLSIPGFGIKTTMAVLAYAGDMRRFENPSQLVNYIGFSPRLYASGDIERSGSITKRGNPQVRWLLIQSAWCMVQSKAANPLKDRFDAMLKRGKAKSVAIVALARKLLELVFILLTRREKYRFIDPSLYAIKLRRASFNLVGAGIG

SEQ ID NO: 65341 - protein, 418 aa, unidentified
MNEEGDTRSSRRYVALDIHKKYSVIGGVDREGRVVLHAVRVEHADLEGWLKKNLRASDHVVFESTTNAWHVYDLLEPLVERVVVANPAKVKPIAQARVKTDIRDTFILARLLAANLVPDVWVPPVHVREMRQLLSQRRQLVETHTQIVNRMHSVAHRHHLQHERGKRFNEKTTLWQKDKRLSRIEQFQLELEMENRAYIEKQISRIGKEVARMSHQKPWAESMTYLMQLSGFGVITAMTVLAAIGEIQRFGTPQHLGSYSGLTGGLDQSGTKLVQKGITKEGRKELRWAMVEVAQRAVKSDPHWTRKFQEMEKRMHRNQAIVAIARQLLELVWYVLTRRQPYRHFSPQRIAYKYLTWAWQMDDEARDGLTRQQFARYYLMRLGIGHDLTRIALDPKHPRKISSEAELLALRPELNHIE

SEQ ID NO: 65342 - protein, 403 aa, unidentified
MNSVGIDISKGRSTIAVMRPFGEVVISPFEVRHTDSELSELARQLKSLTGETRVVMEATGNYHAPVAKLLHDAGLYVSVINAKLVHGYGNNDLRRVKTDKKDAVKLANYGLDRWLTLPRYVPEEDTRLLLKNCYRQYRQYSKVQTVLKNNLISLLDTVFPNVNRLFSSPIRGDGSEKWVDFVAEFWHCRCVSEKSKKAFTNRYQHWCRKHGYNFSEAKAHTIHAEASGCIGVMPKSETTKLLVEQAVAQLRATSVALTALKREMLALAAQLPEHPVVMGMFGVGPTLGPQLIAEIGDVRRFYSKKALVAYAGLDAPPNDSGDVTGKHKSMSKIGASSLRRTLFLVMSVYLRNAPLDEPVYQFMDKKRAEGKPYRVYMMASANKFLRIYYATVKAYLESLEHTA

SEQ ID NO: 65343 - protein, 290 aa, unidentified
MKVFYLGVDVSKKKLDLCLRSNGKDILYDVIPNDLSSIKSWLTRTFEKFFLSEDSLVVCAEHTGQYTYPLVCATKSIGVYLCLEDAAKIKYCHGIPRGKNDKIDACRIAMYAERYNDCLQPYTASELIIQKLKNLSTERSMLVADRAKYQSQLKDQVDYMEHSIYIAKCNRVEGIINTFTDYIAQIDLEIKELINQAPVIAHQMDLLMSVDGVGERVALKMIMETDAFTSFTDPRKFCCHAGVVPFVYVSGSSQRSKNRVSNRADKSIKHLLHMAALSVSQVKNLSLIHI

SEQ ID NO: 65344 - protein, 369 aa, unidentified
MNKQYTLEATLVASAKELKDQKTPKAKRIAVGTDVHLRGYQAARKVDNAAIGAVANFRSEAELLLYVDKQSEQAEEVVVVYEAGPLGYGLYRKLTARGVKCLVCAPDSSQQQRKRRKNNQIDARTLTSNLFNYLNGNEAALQLVRVPTEAQEQARLASRQHDQLVEERKRLGAKGNALLLSQGFGSCKNWWRPKAFSRLEQLLPAWLFEMLQTWVDLLRALDEKIQRAKAALTKRCSGPRPKGAGANSLVQLESEVLDWDLYAKGRKVACLAGMVPSEWSTGDDQRRGSITKVGVPAIRRIITEMVWRIIQFQPQYPPVQKWQEVLRGSNRTLKKKAVVAIGRQLMVDLWRMKTGRVSAEELNLVMVGA

SEQ ID NO: 65345 - protein, 421 aa, unidentified
MGLERNYTRAAGIDLGKRMMAVCIRTPGQGREVDLEEFVYSTMTSQILALRDRLEAARVQVVAMEATGDYWRAVYWILSDTLPGVDVLLVNPAHVRVLKGRKTDRKDAAFLARQAAAGNLMGSFIPPPPVREVRDLTRRRTVLTSLRGSEIQRLEKTLEDTGIKISSVIAEINGVTGRRILEALAAGHRDPHELAALAHANIKASRQELVEALTGHFTDHHGYLVTDHLEEIDHYTVKIRALDARIADLLDTPDQQRDLRNLATIPGIDRTGAQIIVSELGHTMDAFPTPGHLSSWLGVAGGHNESAGVKRKAARGAGNAAMRRTLGIAAFVVMGHKGTYLNARYHRLRGHMDGRKAQVALMHDMAIAIWFILHDKVPYRELGADYFAKRDPAKIKRRIAALARSIGATVEINHTPTPTTT

SEQ ID NO: 65346 - protein, 354 aa, unidentified
MSQTPNTAIAVIGIDIGKNSFHVVGHDARGAIVLRQKWSRGQVEARLANIPPCLIGMEACVGAHHLSRKLASLGHDARLMPAKYVRPYSKGQKNDFNDAEAIAEAVQRPTMKFVATKTAEQLDLQALHRVRERLVSQRTGIINQIRAFMLERGIAVRQGIGFLRTELPTILATRTDALSPRMLRVIEELAGDWRRLDQRIDGLSGEIEALARQDQACSRLMTVPGIGPIISSAMVAAIGTGDVFSKGRDFGAWLGLVPKQISTGDRTILGKISRRGNRYLRVLFVQAAWVVLVRIKNWERYGLKSWIEAAKRRLHHNVLAIALANKLARIAWAVLAKGRAFELTRTDDAGVRPA

SEQ ID NO: 65347 - protein, 341 aa, unidentified
MTNFVGLDVSQKITSICVVDDAGRRVWRGQCASRPDDIERIVRKQAGRDVRIGIETGPMTPWLVHELRRFGLDPICLDARHARAALSLQLNKTDANDAEGLAHIMRTGWYRSVHVKSYVAHRARALLGARAQLVGMITRLSNHIRGVLKIFGLLPGGMRGLSFATRVEALLADRPDVIPIVSPMLAAWRQLRAQVTSFDKAVHAMVKNNPDCRLLMTVPGIGTLSVLAYVSAVEDPERFRRSRSVGAHLGLTPRQYQSGEVDRSGRISRCGDGLTRTLLYEAAVVILCRVKRSSPLKDWALAIAKRSGAGKARIALARKLSTILHSIWRSGVPFRWAEGSV

SEQ ID NO: 65348 - protein, 356 aa, unidentified
MDNFIFTGNDLHDKNMLLKIAHNKAAPDTRSYANDTDGQRRMIAELKQRAAEVGGARIILAYEASGLGYQLRDKLLIVGIECIVLAPSKMSPSPKQRCAKTDEKDAERILEILRGHFLAGNELPAVWVPDAQTRDDRELVRARLDAQDKSSQLKTQIITLLKRNGVRKPDDVGGNWTKKHRGWVLRMRDCHTPLMAGARLHLASLLRQLDALEKEVATLDEQLAALAQTPRYLPRVTKLQKLKAVGLLTALVFLTEMGDLNRFKNRRQVGSYVGLVPASFESGEASDRKGHITHQGPARVRYVLNQAVWNMIRFDPGEREVYERLVKKNPKKKKIAVVAVMRRLAVRLWHAGRSVA

SEQ ID NO: 65349 - protein, 403 aa, unidentified
MNAVGIDVSKGKSMVSIARPFGEIVAKPFNVPHTSTGMQDLLSRLATLQGDTRIIMEHTGRYYEPVAEKLSSAGFFVCAVNPKLICDYGNNTLRKVKTDKADSLKIARYGLDNWQDLRQHTGMDKKREQLKLMNRQFDFYMKQKTAAKNNLIALVDQTYPGANALFTSPARPDGSQKWVDFVASFWHADCVRKIGAKAFSERYHKWCLRNSYYFQPDKPEKILAASKELLPTLPKDAMTKLLVQQAVKQLNTISALVEQLRAEMNRLASELPEYPIVLAMGGVGPSLGPQIMAEIGDVTRFAHRGSLTAFAGVDPGVSQSGTFEAKSRHASKRGSAQLRKALFQVMSVLLKTAPQDDPVFLFMDKKRAEGKQYYVYMTAGMNKFLRIYYGRVKEYLASQAKPE

SEQ ID NO: 65350 - protein, 345 aa, unidentified
MIIGCDFHPSWQQVSWLDSETGETGEQKLVHAGGDAKVFYQQLVAPVLIGMEATGNSQWFVELVEDLGHEIWIGDAAQIRASYVRKQKTDKRDAAHILKLVVEGRFPRLWIPDREQRDLRQLVLHRHKLVEIRSRVKNELQHLALNKGMQKKGTLWSQAGQKMLRELPLKPWASCRREDLLGLLRMLNQQIDKLDDAVQKAAEENPQAKLLMTQPGVGPNTALAYVLTIGDVSRFQRGKQVASYLGLIPREESSGGRQKLGAISKQGNRMLRSLLVEAAQIAVRFDPGYRKQYRHRCHQKPKGVAKVAAARKLAVRLYWMLRSQTAYPEIVRIESSPRVALVGAS

SEQ ID NO: 65351 - protein, 385 aa, unidentified
MKEQTFVAREFEIFGGLDVDKKSIAVTFMSHQGILQSFSMPYRAENLLSYVGKHFEGKKVAFAYEAGPTGWGLYDRLTAGGHLCVVVAPSMIPKVPGQRVKTNRLDSQKLSEHLRGGQLKSVHVPTESYRQLRQLVQLRDTFVQDIVAMKLRIKAMLLFEGLEFPPAPAGSQWSLIVRGKLKKVSCSSAVRFKLDQLMESVESTEKRVIQTIKEIRRFYQQDPELSQAMKYLKSIPGIGEIVASHLLARVGDPQQIGNVRQLAGFIGLVPTERSTGDRVARGSITRSGDGRLRSKLIQAAWSAIRQDPELREFYRSVYQRHPRDRAARKAIVAVARKLTTRIYAVLKQQRSYVVRKIVHSAPLTQEQTSPQGTTRRRAEPGQSLS

SEQ ID NO: 65352 - protein, 363 aa, unidentified
MLRNRTSVGLDVHARSVVACGLDGQTGQLFERRLTPDRTEIFEWIRGLPGPVAVTYEAGPTGFGLARFLTGRGISCQVAAPSKLQRPPGDRVKTDVRDARHLARLLHLGEIVAVTVPSVEQEAARDLVRAREDVRRDLTSARHRLSKLLLRQGIVYYGGALWTGPHDRWLRAQRRGSVFDTAGLGTAFDIAYDTVLATTARRDRLDVAITQMAADSSYTTVAARLGCLRGVATLTAFGLAVEIGDWRRLTGRSIGAYLGLVPTESSSGASRHQGSITKTGNGHARRLLIEAAWHHRPPNRIGAELRRRQDAADPAARHRAQQANRRLHQRWVCFDARGKRTVIANTAVARELAGWCWSLAVLD

SEQ ID NO: 65353 - protein, 310 aa, unidentified
MRVHHNVCCGIDVHKKSVTACLMWGPADKEPQFEIRRFGTMTRDLQMLAEWLKQAGCEAATMESTGSYWKPVWNVLEGQIAKLILANAQHVRALPGEKTDRKDGKRLAELTRHGQVRPSYVPPRAILELRDLTRYRSKLLSAGSSERNRIQKVLEDANIKLGSVLSDLFGVSGQKMLQALIRQDTVDTAKVAQLAHWSLKPKMEAIQQALDGKLRDHHRFLIDASLQHMRFIEEQLMRLDEEIQRRLQPYQEQYALLQTIPGIKETGAARILSEIGPDMSPFPDGDHLSSWGGACPGKRKRGQEVSEQDP

SEQ ID NO: 65354 - protein, 405 aa, unidentified
MTVYIGIDWSSKKHDIVYLNEAGGIIAYQTIPHTPLGFEAFDDQRMKLGVEVDDCLVGIETEHNLFMDFLSSHQYRQIYVIPPTTIKDSRGRFGASKANTDRSDAHLIADMLRTDRARLHVWHADSLLTQQIAALASLEQFLTHTIIQTNNRLRNVLWRYYPNAASVFTGLDLQISLEFICAFPTPQAAAQLTFEQFKAFARSHHHSAPSKLPACFARLQKPQPEARQQTVLAFQSEAVRLARLSLQAVQDKAATIREIQDLFVEHPDYPIFSSLPGVGKILAPALLAKFGDDRLRFPTPQVLQSVAGTCPVTRQSGKHKYVSFRYACDHEFRWIVQQWAKCSIDDSVWAYTYFQSIRPHCDSLSHAYRRLANRWLEIAWRLWQDKVPYDEERHLRQHALRVKPI

SEQ ID NO: 65355 - protein, 273 aa, unidentified
MNQALMLVGVDVSKASVDVELRPSDERWRLARDDEGTRDLVARLRALGPTLIVVEASGGLELPLVAALAAVALPVVVVNPRKVGDFARATGQLARTDVLDAAVLAHLADVVRPALRPLRDAETQALTDLLARRHQLIAMLAAEQNRRGPASAAVLLRLEAHIAWLVDELRALDDELRQTLQRSPHWRERDELLRSVPGVGGQLSLTLMAHLPELGSLDRRQIAALVGVAPFNRDSGTLRGRRTIWGGRVRVRSALYISTLVATRSNPVIRDFC

SEQ ID NO: 65356 - protein, 332 aa, unidentified
MHRADLDTDTGQVQRGQISPADREHLRAWLARFHGRDDVAFAVEGCTGWRYVAEELAAAGITAHLAEPADTAFARGRKRHAKTDKTDCRHLRMLLAEGRLPECWIPPGHILECRALLETYHDLRAEHTAWVQRIHAVLFHQGAPPLGEGTLRTEQGLAALRAVSAAHLSPAGQLQVATALEVIDALETRLHAVRHQLLDAARHLAGAKVLAARLYGVGPVTALALTCWLAGEGRFSSSRKAVRFAGLDVTVWSSDRKGPPGRLSRQGPPVLRWAVYEAGKTHARSSAPDHRYYAQVKDRCNGKRAALSEARKILRQACHILTELGDDALSAA

SEQ ID NO: 65357 - protein, 347 aa, unidentified
MSEISIIGLDLAKQVFQIHGADPAGRCVLRKQLKRREVLQFFAKLRPCTVAMEACGTAHYWAREIGKLGHCTRLIPPAYVKPYVKRGKNDAIDAEAICEAAARPTMRFVPVKPMENQAIVMLHRSRDLVIKNRTMLVNALRAHLAEFGFVAGKGIWKLPDLVKIVSQAPEEALPELVRTTLSGLLDIIAAIGSQLDAIEKRLREWHKKDARSKRLDTVPGIGLIAATACRALVPDPKLFRNGRHFAAWIGIVPKLDGTGGKTRLGRISKAGDRYLRRLFVLGATSLLRSLENKSTRLALWVQALLARRTKRAVTVALANKLARIAWAVMTRDEAYKPLAAAQPAGCA

SEQ ID NO: 65358 - protein, 339 aa, unidentified
MRLYTGFDLHSTNSYVGIIDEDGKKIWKKKLRNDPNLILAALKKFKSDISGVVVESTYNWYWVVDLLIEEGYQVHLANPSRIQQYSGLKHADDEHDAFWLAEMLRLKILPEGYIYPKQQRPLRDLLRKRGHFVKLRTSLITSLQNILARNIGAKMNTNHLKALTKDWVAPLLAGNDDLSLAGKVSKDAIDTFSRQINAIESVVEKKLALRKPYEFLMSMPGVGRVLALTIMMETGPIDRFPKVGNYVSYCRKVPAARYSNEKKKSAGNRKNGNKYLSWAYAEAAEFARRFDPKARSYYDRKRMRTNAPIAYNALANKLSRAAYYIMRDGVLFMPEKMFT

SEQ ID NO: 65359 - protein, 355 aa, unidentified
MSQEKYIGMDVHQATISVAVMDAAGKLIMECLLETKASTIVEFIQGLQGTLSLTFEEGTSAAWLHDLLKPHVSRLVVCDPRKAALLKEGNKSDRIDARKLAELLRTNQLKPVYHEEHGIRGLKELGRSYLTITKDVTRVMNRIKALYRSWGIPCSGAGVYAPRHRAEWLAKLVEPGVRVRGEHLYQQLDSLQPLRLQARGELLRESHKHPAVKLLRQIPSIGPIRAVLLVALLQTPHRFRTKRQLWAYSGFAVETHDSGEYRCVRGKLQRNRERITVRGLNDNHNKDLKNLFKSAAISASTRPGPLRDFYVARVEKGMRPTMARLTLARKIATITLTMWKKGVDFDPQNLPRQAA

SEQ ID NO: 65360 - protein, 316 aa, unidentified
MGKMIIGVDVAKEWIDAAVAGDSRVRRIVNSERAIAAWLVQMGAGSIGLVAFEPTGGYERHLRRCLLRAKVASKQVHPNEVVAYRRRRGIKAKTDRIDARLLADFAVVELARREFEPVPQADEVLRELASRRRQLQALLHAETCRCDVADSAIVRKSLQAVIATLERSLATVDKAIADHIASSPHAETSRRLQTFCGVGPAISETLIADLPELGHLSGKKIAALCGLAPHTCDSGKQCGHASTGHGRPGVRKVLFNGARSAIQHNPVMKAFYRHLVDDNHRLGKVALTAVMRKMLVTLNAMIRDGSDWKHAAGPAA

SEQ ID NO: 65361 - protein, 310 aa, unidentified
MDAIFVGIDVSKDRLDVHVRPSGEAFAVTRDSKGLEELVDRLRTVSPALIAVEATGGFETIVAAALAGAALPLVVVNPAQVRHFAQALGKRAKTDPIDAEVIAKFIEAVKPAPRPVPDEQARLLAELVARRRQIIEMIVAERQREKRAENMRVRKSLTRTLRTLEKEMPELDGDIGALVRGSPAWREKEDLLVTFPGVSNTLARTFLAEVPELGSLNRREIASLAGVAPFTRQSGRWKGKSMIGGGRAPLRAALYMAALSAIRCNPTLKTFYQRLLSAGKPKMVGLIAVARKILTVLNAMVRDRKQWQPA

SEQ ID NO: 65362 - protein, 337 aa, unidentified
MSYLGVDLHTNSFTVCRRTKQGKNSIRTFQIGRIADFRKTLRKRDLLAVEATGNTAWFVSQIRDRIKKVTVVNPYQFEVIRRSVKKTDKNDAKTLALFLSKDMLPEARMKTKENAQLHSLATTRDKLVKQRTALINKIHNVLNSYGIKFKKESLGSEKGLKSVWAYEWDVIVGVELEVLIEQIRSLNKNIKTLDKEMGDHGQKLKGHKSLTSIKGIADRSATVLLTVIGDVNDFPDENKLAAYFGIVPRVSDSNETVRHGRITKHGSKLGRTTLVQCTLVAKRYSPYLKKYYERIKKHRGSGKAIIATARKFLGIIYNTLKNGWVFEDFPNFVLASS

SEQ ID NO: 65363 - protein, 338 aa, unidentified
MGKEHDMYYIGIDLHKQDLVMALEDEQGPVGRPRRLSCRDAALVAETVALWRPFRAVVEASASYRWLCDLLSPMGEVVLAHPLRLRAIATARAKTDRLDAALLARLLRANLIPASYVPPARYQTLRDLTRSRARLSCNATLAKNQVHALLARANVHSPFKTPFGVRGRRWLAGLDLGPGGNLARDELLRRLEHYGREVAVLDGHLEQLASEFPEASALDVLHGVGRYSALLIVAEIGEAGRFKNARQMGAYAGLTARVHQSGKTEHRGGISKQGSRWLRWILVQAAMKLVWKDEPLANFYTRVRKRAGRNVARVAVARKLAGICWVRLRAWQRAHAAA

SEQ ID NO: 65364 - protein, 459 aa, unidentified
MIQASNPQPRGTRRTSQPPRERFEGTLPKLHSHAAGIDIGASEHWVCIDPQLDPKPIRRFGAFTEDLDQLVAWLLERKITTVAMEATGIYWRSLYLKLSEAGIEALLVDPRQTRNPRGRKTDMQDCQWIWQLHAHGLLSGGFVPPEQMHGLRQIMRLRCKRVKEIGVTLVEMQRALSAMNLKLQHVVSDVGGKTGLAIVDAILAGTRDPLVLARERDYRCRASETTIAKAMTGTWREECLFELAQARKDYLHFQESIADCDKELAQRLETLVPKPTCEVALTAKRGTTRSEFAFNAAELATQMTGVDLTAIDGIGPSTMMQFLTEIGFDIKAWITNDRFCSWLGLCPNPKKSGGKTLGSMPTTANRAAQILRNAAMGLDGKKGPLAEFFAKIKRRRGRAVAITATAHRLARIIYAMLKNRSAFDRTKIVPVLTEQKKQRIIDRMLKRAASLGVPLVKAA

SEQ ID NO: 65365 - protein, 369 aa, unidentified
MKKDSTLYVGLDVHKDSIVAAYASSEGGDPVHLGAIGTRQCDIDALVRKLQSKGARLVFVYEAGPCGYWLYRYLTGKGLACLVVAPSLIPRKPGDRVKTDKRDALTLARLARSGDLTPVYVPQVADEAIRDLARAREDALGDLNDARFRLKALLLRHDIRYTGRANWGDEHRRWLARFVFPTPAQQIVFQEYVRTVTERTELLGRLEAALLEQAKTWRMYSVVEALQALRGVQFTVAIITVAELGDLTRFERPPKLMKYLGLTPSEYTSANRRRLGGITKAGNGHARRALVEAAKAYRHRAKVSEQIQARQQHLPRAICDIAWRAQVRLCGRYRKMLARGKHPNTIAAAVARELIGFMWAIAKEQPVAA

SEQ ID NO: 65366 - protein, 399 aa, unidentified
MASMVTGRACRQLKRDHGRAGPSVEVSAGSLAAGNHDAGSGRPVTKEADETMRRYTGQHRFYAGVDLHARSLFTHVLDDRGQTVFERDLPASPAAFLDAVRPFRDGLVVGAECMFAWYWLADLCEDHAIPFVLGHALYMKAIHGGKAKTDRIDAGKLAAMLRGGMFPMAYVYPRAERQTRDLLRRRSFFVRQRAQFIAHIQNTNSQFNLPLFPKKLTYAGNRSADLADRFTDPSTKLSVTGDLNLIAAYDEQIAALERHLIRHAKIDDPVTFGLLRSVPGIGPILGLVLLYEIDQIGRFPEAGNFLSYSRLVRCDHESAGKKKGSGGKKIGNAHLKWAFSEAACLMVRACPAVRAWKQRQERKRGKRKALAVLEAKIGRTVYHLWRKQVPFDAKRFLNG

SEQ ID NO: 65367 - protein, 348 aa, unidentified
MQDGITTVVGLDVGDRWSHHYAVELDSGVLVAEGRVCTTRKALGTLLDGLGRCRVALEVGTHSRWIRTLLADQGHEVLVANARELQFIWKSHNKQDRVDARKLALVARMDPRLLHPVRHRSAQAHNDLAVLRTRDQMVRTRSRLIVMVRGMVKSSGHRLPKCDSSVFALLMQDRLPGDLRPALEPVLRVIATLTTSIKECDCTIETIAATRYPETRVLMQVPGVGPLTSMAFVLVLEDPHRFAKSRQVPAAIGLVPRRDQSGETDKSLPISKAGDGLLRRLLVEAAQHILRDKGVDTDLRRWGMALAARGGGGVGKKRAVVAVARKLAVLLHRLWVTQAQYKPLRDAA

SEQ ID NO: 65368 - protein, 316 aa, unidentified
MVGIDVASTHVDVAALGAELPASLRQVSNDADGHSALAEGLARLKPHLVLMEATGGYEAALACGLQAAGLRVAVVNPRMARDFARAMQRLAKTDRIDAATLAEFAGVLARRPDAERFIRPLTDPEQQDLAALVTRRRQLVSMQLSERQRLRLARPVARPSIEALLEAIARQLDDVEAEMAQHVEQHHAQMARLLQSVAGIGRVAAATLIAELPELGRLNRRQICALVGVAPYANDSGASKGRRRIVGGRFEVRRALYMATLTATRHNDAIRAFYERLVAAGKLKKVALIACMRKLITHLNAIVRDHLNAQHHPSTA

SEQ ID NO: 65369 - protein, 341 aa, unidentified
MGEVSTIGLDLAKNVFQAHGADASGAVLFRKKLRRHQVLTFFAAQPSCTVAMEACGSSHHWAREIGRLGHQVRLIPPAYVKPFVKRQKNDTADAEAICEAAQRPTMRFVAPKSEQAQAAAIVFRARDLLVRQRTQIINALRGHLAEFGLIVAKGPAHVPHLLQAVEDEAEPIPELARPILRMLVETLHRLDEQIAGLDREVARRAKEDETARRLMTIPGVGPVTAVALAALAPPAETFRCGRDFAAWVGLTPLQRSTGGKQKLGATSKMGERTLRRLLIIGANSVLLQVARNGAPSGSWIARMVAHKPPMLVRVALANKMARIVWALLARGEVYRAPAAAA

SEQ ID NO: 65370 - protein, 517 aa, unidentified
MRLCPEAGPEKLHYNCNYKVRTMKTPVSSSAAKRRVRNVKKLQGQTRARSLPVPVKPLDELTPVHRRAAGIDVGSAENYVAIPAEGLAAGESSVRIFGVFSAEQDALVEWLQQHQVTTAAMEATGIYWVSLYDKLEAAGIEVYLVDPHGVKAVPGRKSDWLDCQWLQKLHTYGLLARAFRPDLPVRRLRTLTRQRTELVCCGVTHQHHMDKALVAMNLHLSLVLSDLVGDTGLRIIQAILDGQRDPQQLVQLRDERCKKSSIAEMEAALTGTYDEEQLFILRQSLEGWQFYQNQLQQCDQRIEQALAAIPKAAPAATKAPVLKPIPADAAAKATRRPKRPHKGNNAPTVDFSQALLRICGTDLMKVCGLNLLSVLMLIGEIGVDMSRWRSARAFCSWMGLCPGARISGGKVLSRRTRKVNNRAATILRLAAWAAGKTDTWIGRFYRRIKARRGAPKAVTATARKLACVIYHLLKYQEDFVLLNTEVYEAKAKMHRLSRLRKDAKSIGYDLVESQQVA

SEQ ID NO: 65371 - protein, 435 aa, unidentified
MEEVTDEPLYRDRVCGIDIGKAGLVATIRVPSEKDPARRAAGTRSFGTTKREVLALADWLRSWQVPAVVMEATGDYWKGPFYRLEAEGFECVLADAKQVKNLPGRPKRDPADSRWLAACFERGAVTACFVATPEFRVIRLHTRYRRDLTEERTREKQRAEKLLESAAIKLSSVLTDLHGVTGRDIMDHLIGGEWNPKVLAQLARAAARRKISQLEQALEGAEFFTAEHAALLAKVLERIDRLTADIGDLSQVIERLLAPHEEQLQQAESMPGWGRRAAQDTLAETGPDMSRFPSGAHLASWAGRTPLDHQSGKRAGRSTAKKGNRYLGAVTGETAVAAGRTQTREGARHRRLARRRGKAKACVATGNTQLKVYHKLLSSPGMRYQDLGPDYYERQRDARRQVAHHVGKLGALGFEVTLCRIPEPEPDPTGPAQAA

SEQ ID NO: 65372 - protein, 423 aa, unidentified
MEVMHERVAGLDVHKATIVGCVRLGAGRKVTRECRTFDTTTDGLRTLLAWLEECRCSHVAMEATGVYWMPVWKILGEGDFVLIVANAAHIKNVPGRKTDLNDAMWIADLLACGLIKPSFVPEQEMQELRSLLRTRKQLGREQTRHVQRIQKTLAEANVKLDSVLSDIMGASGRRIIEAMIAGVRDPRRLAALANTRIKATPKQLYDALHGRLTDHHRFLLTLHLRQWDSLDATIREIDQEVEARIVGMDKEVKAGEAPFRDLIGLVCTIPGVSTLSGTTILSEIGRDMSRFPTAGHLVAWAGLCPGQNESAGKRKPARLRKGAPWLKTMLVQCAWAAKRKKDSYYKAQFFRLQARRGPQKAICAVAASILTAIYHILKNGTEHHDLGADHFNRRSTESQTKRLVAQLTRLGFEVQLQPIAEAA

SEQ ID NO: 65373 - protein, 345 aa, unidentified
MTEAYDGRQVVGIDLHRRRSVIVRMTGDGRKLETVRITNSPAALRAVIARAGKNPRVVIEATYGWYWAVDVLQAAGAEVHLAHPLGVKAFSYRRVKNDERDAADLADLLRMGRLPEAWIAPPEIRELREISRYRHQLVKARTSLKDQVHGVLAKLGIPVTHSDIFGVHGQAWLDELPMPQPYAGKVASLRQLAGELSAEITLLDTVLSDLLAGHEGYAAIRQLPGIGPVLAAVIVAEIGDIRRFPGPGQLASWAGLTPRHYQSDTKVIRGHVTKQGSRMLRWAVTEAIQRQPAGSRPGQVKDAIIARRGKEARNIAKVAAARELLTLVYYGMRDGRIRRQAQPAA

SEQ ID NO: 65374 - protein, 411 aa, unidentified
MRLFAGDDWAEDHHDVEVMDEAGKVLAKRRLPEGVAGIAQLHELIGRQLGEDADEAEVIVGIETDRRPWVQALIAAGYSVFPVNPLQASRYRERHGVSRAKSDAGDAHMLADMVRTDSHQLRPAAGDSPQAQGIKVLARTHKTLIWERTRAVQRLRHQLREYFPAALEAFEDLDAPDALELLGKAAEPARAARLTRAQVSAALKRARRRNIPDKATAIMAALRSEQLSQPAALTAAYAATVRALISVITVLNEQVKALQGQVEENFVQHPDAEIYLSQPGMGAILGARVLAESGDDPHRYADARARRNYAATSPITRASGKKKVVAARFIHNDRLVDALNAQAFAALNASPGARALYDGLRARGTEHNDALRRLANKLVGILHGCLKTRTRYDEATAWGHQENLPQPSVAA

SEQ ID NO: 65375 - protein, 312 aa, unidentified
MTDITIGADISKDHIDLHRLPDGKRLRVTNDRKGFASVLKWMAGEVVARIVYEPTGTYHKAFERFMLVQGIALSKVNPRLARRFAEVTGSLAKTDREDAEMLARYGRLLNPRLLRKETAALNDLKELHVARLALIKDRTAASNRGKTFAQPLLKQQNAARLKQIETQLAQVDKAIMTLIEADETLKARFDIIVSIPGLSTVTAFALLIEMPELGDLEGKAAAALTGLAPRDRQSGRWTGRAFIAGGRAIVRRALYMPALVAIRFNPDLKAKYDQLIKAGKPPKVAITAIMRKLVVLANTLLRQNRKWQPKNA

SEQ ID NO: 65376 - protein, 327 aa, unidentified
MNASSTTAFLGLDVAKAKADVCLLRPDGQRFEDSFASTRQGHEGLLRWLEKHAPAASVRAGLESTGPYSRPWCDLLHTAGHLVSLLNPARPKAYAQACGLRNKTDQVDARLLAQFVAEQKTDRWTPPDPHREELKELTRRREDLLALRQSERNRLESARAQSIRDSLARTIKSLDKELARVESELEELVDRSASLRQDESLLCSIPGIGKVTARKILAELPDISRFENARKAAAYAGLSPRRHESGSSVRKRGRLSKVGNGGLRKALYLPAITAIKFNPVIKSFNERLRANGKAEKAIIGAAMRKLLHIVYGVLKHKTSFDPNYAVP

SEQ ID NO: 65377 - protein, 353 aa, unidentified
MKSDKYIGMDVHQETTVVAVVDCDGKVILETIVATEASAIVRLLNGLSGPLHVTLEETTQAAWLYEVLRACAGDVIVCDPRRNGLLTEGSKGDKPDARKLAELRRAGLVRVVYHGHDGTRKLKELVRGYETLSIDTERTMVRLKAVFRGRGIRTPGTAVYQAKQREQWLGLLNEEGARQRTTWLYAQLDHLRALRKEAKRTMLAESQQHRATALLKTIPQLGPIRSALIVATVDTPHRFRTKRQLWSYSGLGIVTHTSAEYEIQAERVVRRRKAVSTRGLNRNFNRRLKNVFVAAAIGGSHCEPYRKYLEGLTQKGMRAEMARLTLARKIAAVALSIWKKGETFDPKKLNWTT

SEQ ID NO: 65378 - protein, 351 aa, unidentified
MSQKTDTVVACTIGIDTGKNTLHLIGLDDRGAIVLREKLTRGRIAARLANVPQCLIGIEAGMATHCVARELIALGHDVKQVPPVYAKPFRQGHKNDFRDAHAIAEAVQRPSTRCVPVKTDDQLDLQALHRVRSRLISERTAVINQIRGFLLEHGIPVRQGLRFLRQQLPDILARRIDVLSSRIIRIIEDLSGDWRRLDERIEHVTEEIEELAHGTESCQQLMTIPGIGPIIASAMVAAVGSGTAFAKGRDFAAWLGLVPKQMSTGDRTILGRISKRGNRYLRTLFMLGARVILLRPANWAKHSFGPWLTAAAKRLHHNVLATALANKLARIAWTVLAQRRNYESRVIIDAA

SEQ ID NO: 65379 - protein, 349 aa, unidentified
MNYIGIDFHKHYSFITEMNESGIVQRQFKLANDRETLTQYITKLPAHTKIAIEATCNWYYFYELVENHDLDVSLAHPLKTKAIASARLMNDKVSSETLAHLLRADLLPTAYIPDQQTRDIREILRMHAFLTAQRTRLKNRVHAILMKNGLSCPYADIFGKTSLNWLKELNLRPCYQEAIASYTKLAKAFNEELNLLKHTIETLAYDHPYVSILDTHPGISYYSGLLIAVEIGDINRFPNAGKLCSYAGLVPTMHASGGKVRMGAITKQGSKWLRWILVECALHAVKKSTHYYNLYTRVAHKHGNGTARVAVARSMLRAIYTMLTLHQPYQERQLRSAPWGHNLTKGSEI

SEQ ID NO: 65380 - protein, 323 aa, unidentified
MGSSSSKGKAASEPDDLVRWLAATGLTIARVGLEAGPLSPWLHAGMREAGLPAICIETRRMKGATAAMAVKTDRNDARAIAHAMRVGWFTAVHVKMVESQELRLLLNNRRTLLEKRVAIDNEIRGTLKAFGLKLGAVTVAAFEARVLELLAKRSRLLAMVRPMLTARAALRQQGEVLHRMVLKAVRASAVCRRLLSVPGVGPIVALTYATGVDDPSRFIHSRDLGPHFGLTPRKYASGEIDRSGSITKAGDGAVREVLVQAALTLLTRVHRWSALKAWGVAVAKRRGLRRAIIAVARKLAIIMHRMWADTTTFNWTRETVTLA

SEQ ID NO: 65381 - protein, 347 aa, unidentified
MTLTIVDEARAITGGVDTHADTHMAAALDQIGGLLGVQEFAATPGGYARLLAWLGGFGAVQLVGIEGTGSYGAGLARHVAAAGIRVVEVDRSDRQDRRRAGKSDPLDAVSAARAALSGRASGAPRGRDGQVEAIRALMVAKRTARAQRTQTICQARALIITGPDGIRTRFTGQTPAGLVAELAALRPRPGSMVRYHTLLSLRELGRRAQFLDAQLGRLDELIVPLVTARAPGLLSLFGVGPDTAAMLLIAAGDHPNRLRSEAAWAHLCASAPIPASSGKVARHRLNPGGDRQANHALWRIVITRMGSHPPTRAYAARRSKEGLSKPEIIRCLKRYAARETYRYLRPR

SEQ ID NO: 65382 - protein, 423 aa, unidentified
MMKLKYSICCGLDVHKNVIVATIVTTNKDGISEYIQKSFSTINSDIQRFHDWLIENNCYHVCMESTGKYWIPIFNYLENDIDVCLTHPKYVKAIKGKKTDKKDSKWIADLYKFDLVRCSFIPPKNFRQLREIARYRFKLVCMKSSEKNRIQNCMTISNVGIASVLSDPFGKTATEIISYLLEHTADSMDEKAVRKLIKKGAKSKSDEIIEAIKGYTIETDQAKKLELARGHLEYLNDMITQTEVELYVRIKPYYEFVEFVSTMPGMTELSSTIVLAETGVDMNIFDDAKHLCSWCGLSPANNESAGKKKSVRIAKAGDYLKPMMVQCALAAIKSKKQPYFAIKYGRIKKRRGHKKAIIAIARMMMVCIYHMVSEKKPFTPTDYEELMNPQNHIERVVLNENNVFAYLESLGYDSSKLVKRNDN

SEQ ID NO: 65383 - protein, 406 aa, unidentified
MRLFIGDDWAEDHHDVEVMDAGGRVLAKKRLPEGAAGMARLHELIGIQLGEDAQDAEVLVGIETDRGPWVAALVAAGYVVFPVNPLQASRYRERRGVSGAKSDGADAHMLADMVRTDWHQLRPAAGDSAEAGAIKALARMHKTLIWDRTRQLQRLRHQLREYFPGALEAFDDLAAPDALELLAKAPDPARAARLTRAQVSAALKRARRRNIADKTTAIITALRSAQLGQPPALTAAYAAAVRSLIAVITALDEQVTVLQGQVEAHFGQHPDAEIYLSQPGLGSLLGARVLAEFGDDPHRYASSKARKNYAGTSPITRASGKKKTVMARYIRNDRLIDALMAQAFTALNASPGARAFYDQQRADGAGHNDALRRLANRLVGILHGCLKTRTLYNEAAAWSHRGKLAA

SEQ ID NO: 65384 - protein, 407 aa, unidentified
MPEQVVTTHVVGIDIGMELCTMSCLTMDKRQVIKATAFANTLQGFDWLFERLEGLGVAPKQILVGLEATSRYGENLLQALLKRGYQVCLLHPAQMHAFAQQRGLRAKTDQLDAVTIARALRSCEARFGYVPSEQVATYRELMRLQKQLSDDVVRYKNEIHALLVVLFPEFTQVKASPTRPTALAVLKRYPSAQAIAQTQVETLGKFLRELSPRHYGQPTAQALVRLAKASISSGVAVAARSSSLRILCDQLDHTQKNLEQLQREIDQLLKQDPKATGMLSVPEFGPTTVAVLRAELGDLNRFTRIDQVVAYVGLDLQIKQSGKWKGQTKLSKHGSGRVRRILYLAALRSIHLQTSPFGAYYQRLVARGMKKGMAVVAVMRKMLIVAVHLIQTEESYNPGKVAVPAGS

SEQ ID NO: 65385 - protein, 344 aa, unidentified
MPSIVGGLDIHRKQITFDYADLDTGEVKCGQVAPADRAHLRAWLARFDNPSGVAFAVEACTGWRYVTEKLRCAGIEAHLAEPADTATARGKKRRAKTDRADARLQRDLLAQGRLPECWIPPPHILECRARLQCYHDLRADHTAWIQRVHAVLFHQGAPAFHDLSRAAAPAELAALAREHLSPAGRLQVMLCLRMLEVTGGELDGLRRQLVTAARRLHGAQVLADQIYGVGPITALALTCWLGGAGRFSSARKAVRFTGLDVTVYSSDGKRSPGRLSRQGPPVLRWAVYEAGKTHARPAAPDHAYYAAVKDRKDGKRAALSEARKIVRQACHILSELGDDALATV

SEQ ID NO: 65386 - protein, 368 aa, unidentified
MSSIAAARGLSFLGLDVHRDTISVAVLGPGREEVPTVDRIANDEPSIRRLVGQFADPRRLRACYEAGPTGYELARLLHRMEVRCQVIAPALIPKAPGDKIKTDSRDCRRLARLHRAGELVAIRVPTIAEEAVRDLCRARADMLADRSRARLRLGGFLLRHGRIWRGGSTTWTFAHERWLLAQRFDDPALSTTYAHYRATLSARDAALEAIEADLATWYGKPPFEDAVARLAAYRGVTRLGALTLASEVADWRRFASAPQFMGFCGLVPSEYSSGSSTHRGRITKTGNSHLRAQLVESAWAYQYRAAATLELRRRQHGLPPEVIARAWKAQLRLCGRFRRLAARKHTRQVVVVAVARELAGFLWAEMTA

SEQ ID NO: 65387 - protein, 378 aa, unidentified
MNKLIRIGMDTSKSVFQLHGVDLAEEPILRKKVRRRQLLEFFGRLDPTKVGMEACGAAHHWARELKSLGHEPVLLPPQYVKPYVKRGKNDAADAEAICEAMSRPSMRVVPVKSVEQQAALMLVGMRDRLIRQRTQLSNSIRGYAAEFGVTAAKGLDKIEPLLARIATEAALPALAKDLFAAHGKEYGQLNVQIRKIEARLMAWHRDNELSRRLAEVPSIGPIGSSLLAMKVTDPHAFPSGRDFAAWIGLTPKDHSTAGKTRLGVITRAGDEALRSVLVVGATALIQQVRQGRGHPSPWLVELLKRKPPKLAAVALANKTARIAWKLMVSGERYNRAHTPARTVSREGRSATLCGGSAQRPSLTPRTASPEKGNAMINP

SEQ ID NO: 65388 - protein, 412 aa, unidentified
MDVVYRCCCGLDVHKDSVTACVLWAESGGKNRQEKRKFATFTRQLLELLEWLRQCGVTHVVMESTGIYWKPVWHVLEGHFELLLANAQHVKAIPGKKTDRRDAGWLAELLQHGLLRGSFVPPEPIRGLRDLTRYRVNLAQECNRIANRIQKVLEDANIKLASVATDPLGVSGRAMLKALVKGEQDVEKLAEMSRGLLRRKIPQLQLALEGRVTEHHRFLLRELLDHLEFVESKMGKLETEIAARLAPFQDQIKRLCEVPGINCVSAWGIISEIGLDMNQFPDAAQLASWAGLCPGNWESAGKRQSGRTRKGSPWLRRHLCQSAWGVSTKQNNYLSALFRRLAGRRGVKRATIAVAHALLVIAYHILKTQAHYHELGADHFDRLHPERLTRRLVKRLEGLGFQVTVTPVSVSA

SEQ ID NO: 65389 - protein, 457 aa, unidentified
MRKKNKRTKGIEEAHPFSGMSRIHPHAAGVDIGAIEIVACVPGDENTQIVKAFGNCTVDLQAFAQWMKSYHIKTVAMESTGVYWIPLFEELERQSFECLLISSRSLRRVAGRKSDISDAQWIQTLHTYGLLEGSFRPQGDLVALRTLLRHRSQLVEHRSPHIQHMQKALLQMNVQLSQAVTDVTGMTGLKIIRAILAGERDPQTLAALREPGCKKSAEEIGRALTGTWREEHLFTLKQSLMLYDFYTEQIQACDEEIERVYGTTRPELESGEVAPVTKRKRNSHSKNIPHHSEEIRKHLKRISGVDLSAVDGFGVSLAQTVIMEVGTDMSKFPDEKHFCSWLGLAPKHEISGGKVLKNNTLKTKNRAGQAFRMAAQSVKQAECVFGVFYRRLRARLGPAQATVATAHAIARVAYRMLKYRVEYEPLKINEYQRQYEAQQIKYLKKRAAKFGFQLLPT

SEQ ID NO: 65390 - protein, 368 aa, unidentified
MNTVKFIGMDVHKKTITIAIADEGRQNQPRLYGTIANDLGALDKFCRKMVSTSTQLHFVYEAGPCGYGIYRHLTQKGFACMVAAPSMIPKKSGDRIKNDHRDAAMLARLHRAGELTAVYVPDVQDEAMRDLSRARGDAVIVAKKAKQRLKAFLLRNRVICTGKSQWSKAYFNWLANIAMPHPAQQVALQEYIDAVHESLHRVDRLTDQIRKMAADWRLAPLVSALQAARGVSLVVAVTVLAELGDLSRFKKPSQLMAYLGLIPSEHSSGPNIKRGAITKTGNGHVRKALVEAAWAYRMQARVSRVLLKRQKDIPDQICRIAWKAQLRLCARFRRLAAKGKPKQKVVTAIARELCAFLWAMAKQVPSAA

SEQ ID NO: 65391 - protein, 345 aa, unidentified
MENTIVGVDLAKDVIQVCVFTNKKVRSNTEMTPTEFTDWLANSKSLTIVFEACGTSNFWKQKAISLGHDARLISPKLVSAVRQNQKTDKNDALAIVQATLLPDVIFISGKSVEQQQLQSIMRLRELCVKQKTAASNQLIALLSEFNIRVSNRNGGLRGVIEITLEDAENGLSIEFREALSTAWNQYLSIIESIRTYDSCLEKSLENHPDCKKLLKLEGVGILNAINLYIALGCSDLGVFRKGKDAAACIGLTPIQYSSGGTVKLGSIGKHVKNSMLRSLLITGAMAAVNQAVNREAKTKKGLWIKALADRRGKKCAAVALANKTVRTAYAILTQGTEYKAELIAA

SEQ ID NO: 65392 - protein, 421 aa, unidentified
MKKRIYKQIPVNSFLASSIDLDALAGKLVFAIDVAKVDMVAAIATGSGQVLSTISWKAPMQNAKIIEILVGFKALGLNVQTVLESTGTYGDVLRFALETAGIPVFRVSGKRTFDAREVFDGVPSLHDAKSAAILAKLHAEGLSSLWTADHGDRRQLTAAIAIMDLHQERYLQLVHRLESWLARHWPESTSIFEVTSAALLALLARIGPPADVAMQKKASFKLMKGMGHGLIKEDKIEMLIETAVSTVGVPCEGLERDALMAIACEAHKSIRAYKGAKLVVERLSVNTAANAMAPVVGKTTAAVVFAEAGDPRDFKSAGAFVKAIGLNLREKSSGTIKGRVSITKRGLNRVRQFLWLAANQWVQSDPLAAQWYARKKQRDGGFGSKAIVALMRKLAKALFHVARGATFDSRLLFDRDELKAT

SEQ ID NO: 65393 - protein, 409 aa, unidentified
MRIIGLDIHRAFAEAVAWDDGKLKRLGRVDMRRPLLEAFAKKLSKDDVVVVEATGNASSVAAVIAPHVKKVVIANPMQVRIIAHAKIKTDTIDASVLAQLYASGFLPEVWIPDEPTQALRRQVTRRNQIVRQRSRLKNIIQSILHSHLIPSCPHADLCGASGRAWLFHQVLPEDERLAVERHLREFDRLDEDLKVIERDLARSALGDEGVKRLMTIPGVDMVVALAIVAAIGDVGRFEQSQKLVSYLGLNPSVRQSGPGPAYHGRITKQGRGHARGMLVEAAWAAARAPGPLRAFFLRVRARRGQHVAAVATARKLAVLIWHLLSKGESYVWARPALHARKLRDLELKAGYKAARGQRGAAHAYNIKSHRDQERRWVEQAETAYARFVSGWNPRGPKRVRTGAATEVRR

SEQ ID NO: 65394 - protein, 348 aa, unidentified
MIVLGADMHKGSHSIAAVAGETGELLDDKRVRVGERGFAAGLDWARGLAGERVWALEDCRHVSGAFERFLLVRGERVVRVATRLMAGERRGGRERGKSDLIDALAVARAALREGVERLPIAELAGVELDIRLLVDHRERLVRTRTALNNDLLWHLHELWPEQTLPGSALLSNKWATRMARRLARAEQTARVRIARDELRQMRELSRTIDALETEIAELVAQVAPQLLTEPGFGPLTAAKLIGEIAGAQRFTSDAKLARAGGIAPIPVSSGKTYRHRLDRGGNRQINTAIHRVAVTRARCHPETRAYLERKRSEGKTNRDAIRCLKRHLARRLWHLLQTPQTQPSPSTI

SEQ ID NO: 65395 - protein, 410 aa, unidentified
MAYKVAGIDVHKKVLMVVVRDVSDPESESQQKRFGTTTSELRELSTWLREQGVQEAVMESTAQYWRPVWYELEPHMKLQLAQAFSNRAPRGRKHDFRDAERLIRRLVAGELTLSFVPEPQQRTWRTMTRMKVQLTEDKARLHSQLECLLEEMRIKLSSLISDLLGVSGYRILRALAGGETDPKRLAALADDRVRCTEEQLIDALTGSRQAVHQQLLALYLDRHQMLVGQIAKLDRMIAEALKAHQEVVARLALVPGLGADSAQQIIAEVGTDAGTFPSAAHLSAWVGTCPGQEETAENNHSSRSAKGNRYLRRILNQAAHAAVKKKGSHFQAVFRRLLPRLGYKAAVWAIAHRLSRLVWKMLHEGVAYVERGSEPDPRTKRRRARNLVRTLRKLGYEVKLTARNPTPVPS

SEQ ID NO: 65396 - protein, 283 aa, unidentified
MAEDPSSVIAVIGIDIGKNAFHVVGLEGRGAIVLRQKWSRGQVEARFANMPPCLIGMEACVGAHHLSRQLRALGHDARLMPAKYVRPYSKGQKNDFRDAEAIAEAVQRPTMKFVATKSADQLDLQALHRVRERLVRQRTGISNQIRAFLLERGVAVRQGLRVLRAELPGILARRCDVLSPRMVRLIEDLAGDWRRLDERIEGLSGEIDALARQDAGCERLMTVPGIGPIISSAMVAAIGAGDAFEKGRDFAAWLGLVPKQLSTGDRTILGKAVRCKRVSSSWR

SEQ ID NO: 65397 - protein, 356 aa, unidentified
MPVAPTYPNGSYGVVIAIDPHKASWTAVVVGSGLTPVAALRVEVNRAGYRQLLRFAAKWPQARWAIEGAAGLGAPLTERLRAEGIAVIDVPAKLARRVRLLSTGHGRKNDQADALSVGIAAWSAPALRTVEVDEAIAALRALTEHRDDLVRTRTQLVNRLHAMLVKLVPSGLPPGLTAESAAETLRRIRPRDPLGRTLRRLAVELVGELRRIDRRIAEATQALSDAVAASGTTLTRLLGVGDVVAAKLLARTGPISRFPSAAAFASFCGVAPIEVSSGDVVRHRLSRAGDRQLNYALHVMAMTQIRYDSPGQAYYQRKRAAGKSHKEALRCLKRRLADVVYRIMIRDTVSSLTLAA

SEQ ID NO: 65398 - protein, 352 aa, unidentified
MKSISESSKKVFVGIDVHQKTYSVCCIVEDVVVKKWRMEARPEKLLKLLRSYFIEHEVYTVYEAGFSGFGLHRCLEEGGFKSQVVHASAVEVSQRDRVKTDKRDALKLSTQLSVGRLHGIRIPTVEEEHQRELTRTRQQLVRHRSAIKNQIRSKFHYFGLLDPREHRELSMRMVRQVMSKVQAAELKLVVGALVEVWLSFNEQLKLLEKEIRKQAETDWREKVYRMLPGFGPLTSRTCSNELGDLRQFSNVKQLYSFTGLTPGEHSSGERIKREGITRQGSSRLRHVLVQAAWVAIGKDQGLRRDYERIARQAGKGGKLKAIVAIARKLIGRARALFRDETAYRTFCFVSVR

SEQ ID NO: 65399 - protein, 379 aa, unidentified
MPKRMQHVGLDVHAETIAVAVAEPDGSVRELGVIRNRPEAVRKLVAKLGPAAQLRVCYEAGPTGYPLYWQLTALGVHCDVIAPSLVPTKAGDRVKTDRKDAVRLARCYRAGDLTAIWVPDAATEALRDLVRAREVAKQDQLRARHRVSKFLLRHGCQRPEGLRAWTARHAQWLAGVSFDLPTLQVVFDDYRANLALLADRIARLERAIEAALPTLAPAQQALVGALAALRGIREVTAATVVSELGTLRRFASARQLMGYAGLVPREHSSGRGVHRGAITKTGNAHLRRVLVEAGWAYRHRPNLTSAALRQRQQAQPLPVVAIATRAQRRLCARYHRLTQLGKPPLAVATTVARELLGFIWAIGQLVEPLPAAVPAARCA

SEQ ID NO: 65400 - protein, 368 aa, unidentified
MKKNNTCQKSPKRSKTRQRSITIGMDLGDKTSHYCVLGSEGETVREGTVATTKKGMKQRFGSMPRCRIAIEVGTHSPWVSRLLSSFGHEVIVANARQVKLISASSRKNDRLDAQTLARLARMDPELLRPIRHRGEKAQGDLMQVRVRAALVDTRTSLVNTARGLAKAMGERLPKCDADQMGVAKMQGLPAELVEALRPLLETVDALTKQIKASDQKLEQLAVRDYPETEMLRQVSGVGSLISLTFVLTVEDPHRFRKSRDVGCYVGLRPKRSESGQSRPQLGISKEGDVYLRKLLVQGAHCILSHKSPDTDLKRWGLKLAGKGNKNAKKRALVAVARKLAILLHHLWVNGEVYEPLRNSRLLEATAVA

SEQ ID NO: 65401 - protein, 383 aa, unidentified
MLIDSEGAVALSCKVSNEEGDLLDLISSVLAIADGREVSWATDLSDGGAALLIALLDAHGQQVLYIPGRIVHHAAATYRGDGKTDAKDARIIADQARMRTDLLPVCTPDQVAIGLRLLTSHRLDVIHDRVRAINRLRATLMKYFPALERSFDYSKNKAALTLLSGYPTPQSLRRMGATRLTAWLKARGCRNSAGVALKALEAAKAQDTVLPSQPVASTLVTKLAERITAIDDDVTSIDARILEQLSLHPDAEILLSMPGFGPYLAATFLAQIGGNLTAFDSADKLASLAGLAPVPRDSGRISGNLHRPRRFNRRLLRTCYLAALSSLKNSPSSRTFYDRKRAEGKSHKQALIALARRRINVIWAMLRDHTPYVEPGRALPIAA

SEQ ID NO: 65402 - protein, 442 aa, unidentified
MSQQVQEPAQNSLRPTPASVQLAEGIIVGIDPGLDAHGMVAMLRSGCRRLKAHRIPNTIAGMQFLVQCLNDWKQQCGGNLLIGMEEASAFGEPLECYLHHAGFEIVIVSAFQVSRYREVAHIDANDDADAEAVARLLMVQPDLARTPSQQMMRRDPHGMDCRRLRQLARRHHRLTVHQTRTCNELHALLRSAWLCDYQSFFSEVQGVAALAFWQQYPTPAEAAQVDADALVTLLREASRKRLTPTTAQERARKIISTARLMVAAFGRQDPQRWSGWAVDIRQLASHLAAVAEQLQAIDREMKQLLKQVQEPLTSFKGLGTVIAGTIIGETLSIERFPTADRFARYNGTAPRESSSGRCVRHVKNWKCNPRLKRVFLQLALNAAKYHPESQRYLDQLKASGITQGAARIRLARRLSDLIYAMLKHNRRYDLEYHREHRRKKTA

SEQ ID NO: 65403 - protein, 387 aa, unidentified
MPQPNDLSRSLVALDQNSTIIAVVELSQSSWLVGGMLPGIERQPRKKLEPSPERLLALLHRWRDEAVKAGRTITRIALAFEAGRDGFWLARWLEARGVEAHVIHPSSVAVSREHRRAKTDRLDTELLKRGFLGWLRGERGHCSMVRVPTLAEEDAKRPNRERECLVKERTRLVNRMKGTLARLGIRNFRPTLRKAAEHLAALYTPEGSPLPPNVSAELERDIARLGVVIGQIKQIEVARQRRLEEQPKSRPHAMVRLLVRVVGIGTETADMLVNEVLSRPMRDRRAVARYAGLTGAPDESGAKRREQGLAKAGNARVRRGMIPLAWRFLRFQKDSALARWYQARTADRRAGTRKTMIVALARKLLIALWRFVTTGETLEGVVLRPAG

SEQ ID NO: 65404 - protein, 396 aa, unidentified
MISIGIDVSKRKSTVAIINVMGEILQTPFDIEHSQIGLQKLWDLIKDYPKDQVKFIMEATGIYHLGLLNELQKQGYFVHVANPLLIKKYFDAEIRKGKTDRKDALKLSRYGTEKWWLLKEHSKTDQIYLDLQFLSREYNSFLATKVKLKVQLSNLIERTFPGLEKILKGHYFELLLDFYELYPCASLVREMSEKKFSTKFIKMATKKGHRKGAQIAQSIYRLAHECVTFEPNDKVAALSVKHCVTLLRSTEEATTAIITQMNELAKKLPEYEVVKKMKGVGDKIAPRLIAEIGDVRRFKNAKSLIAYAGIDAPPYQSGQFEGTNRHISKRGSRSLRKCGYEVMMALKSSKPKEDNAVYEYMLQKEAEGKNKKLVKIAGLNKFLRIYYARVMELYQD

SEQ ID NO: 65405 - protein, 320 aa, unidentified
MSTTERFIGIDVSKDHLDVAVRPDGTHHRVPNTDDGLGQLVARLGPLGPTLIVLEATGGYQRRAVAALVLAGFPVAVVNPARARAFATALGLLAKTDAVDAQALAAFADRVRPAARSVPDAQAQQMQELLARRAQLVGMRTMERNRLGTALSPAVRRSIEAHIEWLSEQVGEAEEELDAAIEGSDVWRAKDELLQSIPGIGPGAARTLLFELPELGTLTREQVAALAGVAPMNRDSGRWSGKRFIVGGRVGVRAAVYMASHAARKWNPALKAFADRLGKAGKPPKVVLIAVARKLLVIANAVLRTQKPWCDTTAKLVAAA

SEQ ID NO: 65406 - protein, 386 aa, unidentified
MQRNDLSRSLVAFDQNSTLVAVVELSLNRWVVQGLVPGLSKQPLKALGPDASALLALVNRWQLEGTKGGGRIKRIVVAFEAGRDGFWLARWLRSRGIEVYVIHATSIPVSREHRRAKSDRLDTELLMRALLGWLRGERKHCQMVRIPTIEEEDARRPNREHQTLVGERTRNVCRIKSTLVLHGIRDFNPKRLKASERLETLRCPEGGSLPPNTLAELRREMAQLRLISGQLREIEKTREERLKRAPRQGTHPMVLLLAKILGIGIETADMLVHEILSRELRDERAVGRYAGLTGSPYDSGAKRREKGMSRAGNARVRRGMVQLAWRWIRFQKDSQLTQWYNKRTESARGDIRKTMIVALARKLLVSLWRYVTTGEVPVGAKLKATA

SEQ ID NO: 65407 - protein, 347 aa, unidentified
MNITTIGIDLAKLVFQVHAVNAHGKVVLKKQLKRNQMAEYFVNLKPCLIGMEACGSAHHWARKLQSYGHTVKLMPPQYVKPYVKTNKNDAADAQAICEAVARPNMHFVPIKTLEQQGILTIHRIRQGYVKARTAQANQIRGLLAEFGIEIPLGIGYITKRVPELIEDASNDLPGIVRIEIQELLEHFKHLEVRVNDCEKKIVCWHRKDDTSKKLEAIPGIGPITASALVASIGDAKHFKNARQVAAWIGLVPKQHSSGGKQTLLGISKRGDSYLRTLLIHGARAVIHHSVGKIKPTGTQSWVNQLAARKNKNIAAVALANKNARIVWALLNHDRDYQDNHKTLRVAA

SEQ ID NO: 65408 - protein, 354 aa, unidentified
MDIKYIGMDIHKETISIAVMNGEGRVVMESVIETKASTILQCIQGVHGDLHVTLEEGTWAAWLYDLLKPHVTKLVVCDPRKNALLKEGNKSDKIDARKLADLLRGGYLRPVYHGENGLRTLKELARSYLTISKDLTRVMNRVKALYRSWAIPCEGQQVYAPRHRAEWLNKIGEVGVRRRAEFFYQQLDALRALRQAVRQDLLAESRKHKAAKLLRQIPSIGPIRSALLIALIQTPHRFRTKRQLWTYSGLAIDTRDSAQYRYVGGQLQRSKKPQQIRGLNQNHNHDMKAIFKSAASAASSREGAFHDFYQGLLTKGMKPAMARLTLARKIAAITLVVWKKGAHFDAEQLKPQAA

SEQ ID NO: 65409 - protein, 337 aa, unidentified
MYYVGHDGHKDISVFCITTASGNVKETFEVPATPEGMDVLIEKMKGKKFKVLAEASTYTIDLHDHLVSKGVESYLAHPHTLKLITESCRKTDRNDSKTLASYLRLWDKHELDISISFVVDGDNRSLRELCRLRESVSEMKGSTMQQIKSHMRINGQYVEFEDLTTIKARKHIRENFCEDLCLMMLLDIYVVFEDKGKILDSEIERRFGDRNEVQLLATIPGVGITTAAQLMSMIVDVHRFPTADKMRSYFGMAPTVRDSGGSLKHGHITRRGDPMMRKILSRVVAQMIKNAPSDNLAVYRESHRSAMRPGMLMVACMNRLLDIIYAVLVRGTPYIHM

SEQ ID NO: 65410 - protein, 394 aa, unidentified
MIYAGVDIAKTDHVIGAVDERGTETCRPMPFKNTEAGLERAVAWLEGLAGSPSDVVVGMEATGHYWMACYSFLVARGYSVAVINPMQVKAVRKLKKLDKVKNDRIDAWLIAETLRIGQYDETRLATDEVASLRSLSRYLQSLRGMAAELKTQCVCLMDAHFPEYAGIFSDMFGAGSRAVLSKSPLPFELARRRADSLARDIAEASRRGGKSAGYAARIKAAARSSIGVRLGQEAASFQVKSLIRQIEFADSECAKVEARVRALLDEVEPLVLTIPGVSYATGAQIVSEIGDVSRFRNASALVSYAGLNSSVSQSGQFDSGGGPITKHGSPYLRRALWLAANRARQYDPGLRAFYDKKRAEGKPHRVAVTAVARKLCHIVFAVMRDQVPYDPGRE

SEQ ID NO: 65411 - protein, 424 aa, unidentified
MKVTFQTCCGVDVHKSFLVATIIKTTGGIEPSYQKRRFSTFNNSILEFKKWLLENECLYVCMESTGKYWIPVFNLLEDEINVTIANPKWVKAVKGNKDDTKDSKWIGDLFRLGLVRGSYIPCKKIRILREFTRYRYKLVSCRSSEKNRYQNALTVCNVALDSVVSDVFGKSSTSIIDYLLEQSGTSIDHEVIASKLLKRLKAKEDAVIESIEGYQMTDSQKYRMHLVRAHMDYITAAINDVDSEIESLIASDPDYENAVELLCTIPGVKYDSAITIISEIGIDMSQFCSSKRLCCWAGLTPGSNESAGKKKSVRITRAGVYLKPALVQCAHVAVKSDKSPYYKKKYESLVERRGKKRAIIAIARMILTAIFQMLTTGETWNPCDLYKIDMPEALLEKQKQKAIKQAQKLLIREGLLPPTEPIAS

SEQ ID NO: 65412 - protein, 570 aa, unidentified
MMNFLDKKTPRFYFLFVIIFVSFFMSSCERETNLSAKKGIIDVRNTEMKDGRICRLNGEWEFYFGELLEPSDFQNKNKILKKNYIHVPNSWTNQKKYDNYPEYGYATYRLIIMTNDTLKPVLIENKRIFTSCKIWLNGMLLQEIGKVSKTSSEYTPDLKLLLSEPLYLKKKNELIIQVANYVDRNAGIISSVRIGDYNSFYSHKINEFTESIKKFKKIEKKERGKISFALEGKNGYSNPFDRILLDQGFTLYNVDNFKLKRFREAFAGEWRDDERDSLMLSKMLKLKDYINSEKEKVFVKIEKPSLVTESLKLLSRHQQTLISEKVRLISRLGKKLLEVCPQILKLGKLKNKKIIAILAKYPDFSKYKRITLKSLLKIKGIGKIGAPFLLKRLNNIDYMPGLTDIYKTIILSYAQRILELQKEIEDIDKKLDEIGEKNKEVNHLKTIPGVATKLASRLIGEIGDINRFPSEKKLAVYCGVACVDNNSGKVTKTRAVYKANKICKKALITMAGCSIRFSPQCKTYYLKKRAEGKTHNHTLRCLARQLIKVIYKMLTEDREYVVRRELKKVA

SEQ ID NO: 65413 - protein, 404 aa, unidentified
MSETRDKGSFSGFLGIDISKGTFDGCCIDREGKVLFHVSLPMNRAGFEKLITQVCAISLPQGSILIGMESTACYHVSLFSFLMALGYSVSVINPLLISNFVKLQLRKTKTDKKDAAVIARFLLAHGASLPQTMADSHVADLRELSRQRESLLHQMTALKCDIKRVLSITFPELERTMGIFTRTTLRLLGRFPSARALAQANREELAPLLHHASRGRSTPVSVDTLLKLARSSVGTANPSREMILRQKASILVHLEEHLREMTNTLIELCQCALEQDVEILTSIRGIGDKTAATFLIEMGGEIQKFDTHNKLIAMAGLDPSVYQSGQYDGHSRITKRGNRHLRRVIWLMTIRVIQFNDLFKSYYRKRIEDGLAFKKAVLATAHKLIRIIFVLLTRRTMFCHQVTS

SEQ ID NO: 65414 - protein, 407 aa, unidentified
MDLLKTVFGIDVSSRKSNVCIMVNGQKVNDYAISNDMVGFNRLLGDLKQVTKPQIIFEATGVYSRRLQAFLDMHELRYVMMNPLEAKRKTKDDLHQNKTDKLDALYLAKLQSEHPQRLAYVQNKEYQELMANNRIYEQASHDLITNKNRLHKAVQLTFPEIEHLLANPRGKNYWSIALRFPHPDIVLETKEADIIDFLKGLTGIGKKRANDIAQSLIRLAKVACPAVKKNSAHIRGLKMAINNILSAEEECQTALQEMAKLAPKRDLEILTSIPGIGENTALRIISELGDIRRFNNPSQLNAFVGVDPQIYESGNLTAHLSISKRGTAIGRKVLYLAINQIQSAKKAGNPCHIADYYEKRKRSSETASHKKAAIASIHKLLRTIFALIKNDQLYSYDVAKHNQRLLS

SEQ ID NO: 65415 - protein, 444 aa, unidentified
MLRFVGCDVHKRTAVFTILLPDGKLLATHTIPVTRESLTAYAERELCSGDRLAMEATTNTWAVAGLLRPFVKEIVIGNPLKVRAIAEAKIKTDKVDSRVLAELLRCDYLPRVWQPDKETQRLRRLTHRRSALVSDRTRLKNRLHSILHHTLVPLPECDLFSKKGIAWLRQVPLAQEEALARESDLRLLEQTELEIAQMDELLVREAWQDDKVRLVMSIPGIDYTVAQTCLAAIGDVSRFENAKKLAAYLGLNPSTRQSGEHCYHGKITKQGNAHARWLLVQAAQHLGQYRGPLGQTMRKIVKRKNRSVAVVACARKLAVLLWHVLSSGEPFRYALPRSLEAKYSRLRVRATGQRRRGGVAKGTPRSPRYGHGRTRAVPSLPQVLADNGLPGVAPLRKGERVMLDRKRLDTFYQELQTASRIEANTPKPQVEDQEGDLNSELTQS

SEQ ID NO: 65416 - protein, 460 aa, unidentified
MRRKKLAGQSKESGPKKVDGKALEIVHPDAAGIDVGGSEHWVAIGPERDPEPVRRFGCFTADLREMALWLVDRGVKSVAMQSTGVYGMPVLEILEQHGLQVYLVNARHTKNVPGRKSDGQECQWLLKLHAFGLLNNSFQPTDEIRIARTLWRQRGNLVAEASSAIQRMQKALTEMNIQLSNVLSDLSGVSGMSILKAILDGERDPWTLAAIVQPGVKATPQDIARSLEGNWREEWLFVLRQQVELYRVYQEKIADCDVALREHLESFGSKIDVPAQPIGPRPKKKSSKNAPQFDLRTELYRITGIDWSQVNGMDVLTAQTVIAEAGADLSAFPSEKHFTSWLGLCPTNEQSGGRILNRRTRKVVNHAATAFRNSATTLLRSQSYLGATYRRLRTRLGAPKAITSMARKLACLFYRLIKHGQQYVVKGTQYYEAKYREQQIRAVSKRAQKLGLHVVVPNPA

SEQ ID NO: 65417 - protein, 351 aa, unidentified
MTIMAHERASITGGVDTHRDTHVAAALDQRGGQLGVETFPTTPAGHRGLLDWLESFGSVDRVGVEGTGTWGAGLTRHLLAAGVCVIEVDRPNRQRRRRTGKSDSLDAVAAARAAQSGDAAGLAKDRTGDVEAVRALRVARRSAQNARRTATNQLRSLIATAPVELREDLRDLTGAKLITTAARLRPGPSGDTTAATKTAMRALARRVGHLRGEVLELDQLLEPLVRQIAPSLLDLHAVGPDTAGALLVAAGENAGRLHSEAAFAHLCGVAPIEASSGLVTRRRLNRGGDRQANSALWRIVLIRMHTHEPTKTYVARRLAEGKSKREIMRSLKRYVAREIWPHLPNIRDTTT

SEQ ID NO: 65418 - protein, 387 aa, unidentified
MPQPNDLSRSLVALDQNSTIIAVVELSQSSWLVGGMLPGIERQPCKKLEPSPERLLAVLHRWRDEAVKADRIITRIALAFEAGRDGFWLARWLAARGVEAHVIHPSSVAVSREHRRAKTDRLDTELLKRGFLGWLRGERGHCSMVRVPTLAEEDAKRPNRERECLVKERTRLVNRIKGTLARLGIRNFKPTLRQATERLATVHTPEGTPVPPNALAEMQRYLARLRFVVGQIKQIEEARRQRLEEEPECGRHATVRLLARVVGIGIETADMLVNEVLSRPMRDRRAVARYAGLTGAPDESGAKRREQGLAKAGNARVRRGMIQLAWRFLRFQKNSALAQWYQARTADRRGATRKTMIVALARKLLIALWRFGTIGEPMDGVTLRPAS

SEQ ID NO: 65419 - protein, 389 aa, unidentified
MKIYVGIDIAKLNHFAAAISSDGEIIIEPFKFTNDADGFQLLVSKLESFDKNSLIIGLESTAHYGDNLVRYLVTELYQVCVLNPIKTCQMRKNNVRKTKTDKVDTYVIAKTLMIQDNLRFVSFFDLDMMDLKALGRFRQKTIKQRTRLKIQLTTYVDQVFPEIQYFFKSGLHQHAVYALLKEAPSPKEIASMHMTHLANLLKVNSHGHFTKEQAKELRVLAQKSVGANDSAISIQITQTIQQIELLDSQLEKIEAEMTDIMKFNDSVIMTIPGIGYINGGMILGEIGDIHRFSNPNKLLAFAGLDPSVYQSGNFQAKTTRMSKRGSRVLRYALVNAAWNVVRSNATFKAYYDAKRAEGRSHYNALGHCSGKLVRVIWKMLTDNVEFNLK

SEQ ID NO: 65420 - protein, 389 aa, unidentified
MNISNKNINKKKQTQPQGQSSAAPAATKAKTIKLGVDVHLALFVVTRIIDGSTPQPAQRFKPGPFLLWCARQLRQAEKVFTCYEAGPFGYTLHRKLEKMGITNYVVRPRDWDEYGRKVKTDQRDATALADCLDRYVNGNERAFCVVRVPSEEEEQKRSLSRQRESLQKEKQRLAAQGRSHALYYGHHLQGEGWQDDLWEKLVLPLPPIVVNLLEPLRRLIATITLELTARTRQVEAAAPAALPAGLGKLTSQILEREVADWERFHNRRQVASYTGLCPSEDPSSDRRFQGSINKHGHRRLRPVLIECAWRLTVFQPGYLAVKKWNSVLTDPKAGKPRRKKAIVALARTFAVDWWRVRTGRCQAEDLGLRLNPSTPPAAPPDDRDNPFPG

SEQ ID NO: 65421 - protein, 342 aa, unidentified
MYYIGLDVHKKTISYCVKDASGQVHQEGKIGATRIELDGWMRTLPRPRTIAMEATIFTGWIYDHLLPHAEQVKVAHPLMLRAIAAAKKKNDRIDAGKIADCLRCDFLPECHMAPTEIRDRRRTLRYRHLLVRQMVQMKNRISGLLMETGVSYNKQRLHKVRYFRELLATNEEVNESIRPLLQLSRETIVRLQKTEYALVSSLERDPVLADRIKRLRTVPGVGPITALTWALEMGDVSRFRSIRQAISYCGLCGDEKSSADKVMRTPLSKQRNKHIQRVLVEAAKLAPRQDHELARVYETEKQKGNTNRATLAVARKMVAYLLAVDRGAREFVSAEAYKTAVA

SEQ ID NO: 65422 - protein, 416 aa, unidentified
MNAVGIDVSSRKSTVAVLRPLGEVVCLPFDVTHDIAGLASLAEKLKAIDGETRVVMEHTGRYYEAVAKALHEAGFFVCAVNPLLIKEYGANSLRRVKTDKADAIKIARYALDNWADLRDFTPMDAIRYDLKTLNRQFQLASKQRTASANNLIALLEQSFPGIRKCFDSPVRSDGTQKWVDFAHSFWHVDCVRKQPFPAFCERYRKWCKRHAYFFKLRNAEKVYALAKRAVVLTPKSKVVKVLVQEAANQLISISRSVEVYRAEMDRLAAMLPEYPVVMAMYGVGKSYGPQLMAEIGDVRRFERKQALVAFAGIDPMPNQSGDKNVRSNKSSKRGSPYLRKTLFNVIRTYLQCAPQDEPVFQFLNRKRAEGKPFYVYMLAAANKFLRRYYAKLRDFFASLDTLQPVAPIPTILKATL

SEQ ID NO: 65423 - protein, 403 aa, unidentified
MTVTAIAPGTIIGGIDTHADTIHVAAIDPWGRQLGDQEFPTTPTGYSDALEFLSSHGQVIGLGIEGTSSYGVGITRAALAADLTVHEVLRPERAVRRREGKSDPIDAYQAAHAVLAGRATAAAKKADITALRALHNARRSAVKARAAAQVQIGQQLITSPVRLREKYRNLTSARLVQALGSCRPGNHADLEERLVLTALKSLAQRHHALTKEIAKLDAELTSLIEQTAPHLLHLHGVGNYTAAQMLITSGGNPDRLRTEASFAALCGTAPVPASSGKTTRHRLSRGGDRRANHALHTIALARMRNHPPTKAFVKRQRDQGRSTPEILRLLKRAIAREMFKQLTRPHQDLGVHDLRPARQAKNITIGAAAVALGLAPVTISRTERGQFVTPEVVSRYRAWLATA

SEQ ID NO: 65424 - protein, 392 aa, unidentified
MIFVGIDVASRKHDCCILGSDGGVLTSFQFTNDRSGFERFIAAVVEHCGKGGLTDTKIGLESTGHYSTNLTNYLLAKRLSVKIFNPLQVNLLRKAQSLRKTKTDKSDARFLAQLLFSDDSKPYSPPLYYIAELKTLTRSRHRLVAIRSKLKLSVNRLITVLFPELPGIVWSINQKSCYALLLEYPAAKSIAEAPLTRLTNLLSDNSHGRYGREKALEIRELAARSIGLDSRATGFELRQTIRLIQGLQEEIDELEAEIKAIMREVDSPILTIPGVGFILGAIIMAEIGNIENFSNPAKLLKFAGLEPAVYESGNYKATSTPMVKRGSKYLRWALLQAARLVAYRDKAFSAYANKKRNEGKHFYVAVSHVAKKLVRVLFYLLKSGEPFVPQLT

SEQ ID NO: 65425 - protein, 323 aa, unidentified
MQTPSVVLNIGADVAKNAIVVACSEGSFPVREITNQRTALLAFLNGLPAGSRIGVEATGSYHELFADAAHQLGFLVFLLNPKDTRHYAKAVGLRGKTDRVDAELIARMIAHEHTKLHAWIPPTPQQREIDRLLKRRATLIALREGVEMSLHELGGFAADLKALRTRFNQLIARIDLRVKALIDVSPDRKQNFTRLCTISGVGPVVGTALVNTLERVPVKSADAFVAFTGLDPRPDDSGQHRGKRRLSKRGPAELRRLLYLAAMSAIKTKTWRPLYEHYRAKGLSSTAALVILARRIARTAWSIYTHKTEFDPARLTNPVLRTH

SEQ ID NO: 65426 - protein, 334 aa, unidentified
METKYFIGLDVHKENTAYAVRDRKGNVLLEGEAASIYKDLCERLEPYLISAEIGLEASRSYYALYRGFLENKHNVRVANTLQLRQLIAKTDKLDARRLSEMLRLRSFPTSYIPDERIQRLRSLVQIRHSLMEEATRWNFRIQALLDREEVAMPSQKAFGKKWRAALMQHIGAQTSSELRHAYDHYLIVESRLEQVDQEMIGYAKKYWRSEHELIQSITGFGPLLSCYVIAEVLPIQRFASKKKLRRYAGVIPVPKESGGKKSRSRLPKGSSRGLLRWALVQAANTIGKTDTRLGKYYRKKAKQKKIKGIAKVAVASSLVDILYHVLTTNEPYTA

SEQ ID NO: 65427 - protein, 374 aa, unidentified
MSIQFVGQMDRPSTSLNSNRSRNGATLRACVITSPSREGHAHHKLSSYSYEEVFMEQYIGIDVAKEELSVFDGTNERIFQNRQGLSTFRAYLRKAFPDLCKVVLIFEATGPYSQYLIELCASHGIKAWVVNPKKSSHFAKALGNRSKTDPIDAKTLYTFSKVVDPKNILVPQIDHVREELSLYLSSYDFVIKTQTAIVNRIEALSHHPHTPKELLVLLRHDLARAERTEARLLARMEELIKADDDLSRDYENLLTIPGIGKICAITLLAFFRTYGETKRSEITALVGLDPTRKESGTAVNGRRKISKGGNKRVRKVLYFPTLSAIQHNSKIRTFYERLVANHKPKKLAVIASMRKLVLIAHAVYKNKTPYQEAA

SEQ ID NO: 65428 - protein, 384 aa, unidentified
MDQTTSTLSANTLHCALELSKNSWLLAIPFRDREQPSLYPIEGGNTDKLMAKLAAARDCWAKVNGALPAITLCYEVGHDAFWLARFLKARGIECLVIDPGSLQVNRRARRVKTDRVDVKMLLRTLIAWCRGERHVWSLVRIPSVDEEDLRRSHRERSRLVRERTAHINRIKGLLFTQGVRGINIKSQYKTLAVDQLVTGDGHRLPPRLVCEVAREIQRLAMVQEQIAKIERERDTAPTPCEATERKRRLLLRLKSIGPAISALLSREVYYRQFANRRQVGSFLGLTPSPYSSGEEERCQGISRAGSGHVRAIMIEAAWLWIRHQPKSALTRWFLERTAGQSTRMRKTLIVAVARKLAIALWRYVEHGLVPQGAILNPPTTGNAR

SEQ ID NO: 65429 - protein, 391 aa, unidentified
MNKIIYVGIDVHSSNFTLCSFEPGYGLTEDKIFGQVQFKEDFIKNTEKYISTLKKQRKDIDVVCGYEAGCLGYAPQRELSKRGIKCVILAPTTMAVQKGGKKVKNDYKDSIEIARCLSSGSYKPVYIPDTEDEDVRDYIRMRDDHNTALKHIKQQLNAFLLRHGFKFDGKTKWTLKHIEWIKKLSCTDKQREIINEYLATYETLSDKIDALDLRIEELSQTERYADTVKKLTCIKGIKTHTALSFVTEVGDFNRFKSAEKFAGYIGLTPGEKSSGDNERKTGITKAGNRHLRRLAVECAWSYMRGFVGQKSAELKKRQKNMPQEVVTYADKASTRCQRKYNRLTTKGKNSNKAVTAVARELCCFIWGMATSHYEGTTQPKDNSVLRESALD

SEQ ID NO: 65430 - protein, 343 aa, unidentified
MNYIGADVHISTIDFAVVGETGRVAKRHRIETSERGMVEFVKSIREPRQLIIEEGTLAGWIRDVMEIRGERVVVTDPKQNRWIGRAENKSDRIDAEKLAQLQRGGYTKEIEHLVGNRRRFRELVMYYHDTVKSVTRVKNKLKAKYRQNGIQCSGETVYDERHFPEWLEKLPQEETVRFQVEGLMQQLVFLEGQKSEILKRVKEIGKEAREISQFRKIAGIDWILACTISALVGDMHRFSSKCKFWKYVGLGIVQRGSGKSVSPSHLTGDYNRRLKWAFKTASWSAIASNDNPFRRQYLRLTMEKGIMEHRAVLTVARSIASTVYAIWKKGAAYDPVIREKIAA

SEQ ID NO: 65431 - protein, 326 aa, unidentified
MTKANELIFVGIDVSKETLEIALDDNAKTQTINNDEAGLKALLAELKTFGESVAVVLLEATGGLEQPAAAALCANGFSVMVVNPRQAHDFAKALGYLSKTDSTDARILSHFARTLHTSDKRERLLYKLPTPEQELLLAMVTRRSQLVTMRVAESNRLAGAHPSQHKSIKELVKLLDRQIGQIDDDADRHLKKHFKDKLALLKDLKGVGPGTQSMLMAALPELGTLNQREIAKLVGVAPLNCDSGKFKGKRTTWGGRANVRAALYMAALSATRYNPTIKAFYQRLLNAGKPKKVALTACMRKLLIIINAVIKSGQPWQASYTQPEKA

SEQ ID NO: 65432 - protein, 405 aa, unidentified
MPYILALDVSMGHSYSVLYKDDTCLFEDEIEHTQRGFHALLEEIQHLPERPLIVFEATGIYSRPVEKFFQDHHFSYCLLNPLEAKKQMEENTLRSWKTDKSDAHRLAQTHLKNQRQPKEVQSNFYLEMRDLARFYQEIEKKITRLRMDLHNCLQLTFPELEQFFSNRLPPYALTLIRLFPHPDFVLASTRTKIKNKLINETREKISANRAEQKADQIIHYAQCAYPAVEKDSIHCQKTIYYAELLQDLLEQKKALATQMIKKAEASPCFLLYQTFPGIGALTAALLLGELGDITRFKTHKQLNAFVGIDIRRYHSGKYTGQDRINKRGNPKARKIIFFTIRNMIRQQRAAPNHIVDYYYKLKKQPIPKKDKVATVACMNKLLKCMHAMVRAHTEYDYAYAVSVDH

SEQ ID NO: 65433 - protein, 389 aa, unidentified
MKIFVGIDIAKLNHFAAAISSDGEILIEPFKFTNDADGFQLLVSKLESFDKNSIIIGLESTAHYGDNLVRYLVAEFYQVCVLNPIKTCQMRKNNVRKTKTDKVDTFVIAKTLMMQDDLRFITFFDLDMMDLKALGRFRQKTIKQRTRLKIQLTTYVDQVFPEIQYFFKSGLHQHAVYALLKEAPSPKEIASMHMTHLANLLKVNSHGHFTKEQAKELRVLAQKSVGANDSAISIQITQTIQQIELLDSQLDKIEAEMTDIIRFNDSVIMTIPGIGYINGGMILGEIGDIHRFSNPNKLLAFAGLDPSVYQSGNFQAKTTRMSKRGSRVLRYALVNAAWNVVRNNATFEAYYNAKRAEGRSHYNALGHCAGKLVRVIWKMLTDEVDFNLE

SEQ ID NO: 65434 - protein, 338 aa, unidentified
MTIATVGIDLAKNVFAVHAVGKSGLVELKRPEVRRAKLLELVASWPPCLIGMETCSGAHHWAREFERLGHTVRLMAPKFVAPYRMAGTRGKNDANDAQAICEAVARPTMRFVPVKTIDQQAELFVHRARQGYIEERTALINRMRGLLSELGIVLPQKATAMRQGVREVLEDLPGWCNTVIGDLLGHLSRLDERIAEYDQHVQRAAKENERAQRLMKLAGVGPTTASALSATVGNGSDFKTSRQFSAWLGLVPGQHSSGGKARLGSITKAGDAYLRTLLILGARSMLMKAAAHSDPVSRWALKLKERRGFGRAVVAIAAKNARMCWAALRMGEAFKVPA

SEQ ID NO: 65435 - protein, 422 aa, unidentified
MQGNETELDLAAFVGLDWADQRHAVCLRAAEGKLSQHFSLEQTPETLHGWVSQLRVQFGGRKVAIAIEQSRGQVISALMTYDFLVLYPINPKALARYRQTFATSGSKDDPSDAELLLSLLLLHREKFRPWLPDDPQTRTLQMLVEHRRRVVQDRVRLTNRIKSLLKVYFPQALEWAGSLATLQACEFLERWPSLEKVKKAKASQFRNFYVKHGCRQIKIIEERIEQMRTAQALTQDPAVLTASMMMLQATVAPLRTVIQAVEQFDDQIALLFQQHPDHELYQSLPGAGAALEPRLLAAMGMDRARYGSAADIQQLSGTAPVTDRSGKKHFVYRRRACAKFMKQSFHEFAAHSVASSAWASAYYREHRDRGVSHHACVRALSFKWIRIIFRCWKDRKPYDERIYLESLRRRGSAYALALAPRE

SEQ ID NO: 65436 - protein, 425 aa, unidentified
MTTHQLTPLSGILVAVDVAKARNEVLIEIPSHRHRRRLTVLNTRAEHDRLVTLLSDLGQPATCGLEATGNYHRPIAWRLLQAGFDVRLVSSMALARTREALHNGWDKNDPKDAQVILHMLRIGATQRYHDPLAAGINDIQELSKTHEAISRAKTEVQHRILTHYVPLYFPEIERFRQSSRSDWFFAFLDRFPTPSDILASSKEAFVAAAWDVVGRKVSKERLLGDIYETARTSIALPIPTGAPAIAMFRLVIAEARSLIRQRDAIEAMADELLAGAADYQRLRQIPGVGPITAMTILAEAGDLRRFGHHRQFLKFCGLDLATQQSGTFRGQTRLSKFGNARLRRALWMAGQVAIRQKENSFRDKFERYIARDRDNPDLKRKALTAITAKMARVVHAVIKNGADYRPFVEGPVPGGRTPLSRAVRA

SEQ ID NO: 65437 - protein, 391 aa, unidentified
MDNAWAGIDAGKEFHWARVVGIEGETLLSRKVENDEADLRKLIGEVLPLAEEITWATDQPGGTAALLLALLWERNQKVIYIPSLTVDRARDTYRGESKTDAQDAYVIADQARMRGDLSELQANEGELAELQLLISRRRDLVTDRSRTITRLREALLALFPALERTLDLNNSSALTLVAHYQTPTALRRAGYKRVATYLKNRGIKRADTLAKKALAAAESQSAVLPAQDVASAIVAELAREALVLKQRIERVDEELKHRFFIRPEASILTSLPGMGPVLGAEFLVAAGDLSAFSSADQLAAYAGLVPAAHDSGKRAGNDHRMRGGNKVLKRAFYQSAFASLRTSPVSRAYYDRKRREGKRHTQAVIALARRRVNVLWAMLRDGTTYKAPSAA

SEQ ID NO: 65438 - protein, 346 aa, unidentified
MSEIIRIGVDTSKYIFQLHGVDAAEQPVLRKRLGRKQMLEFFARLPPTQIGMEACGAAHYWARELGKLGHEVKLMAPQHVKPYVKRNKNDGRDAEALCEAMSRPTMRFVPVKSAEQQAALMLVGVREQMVARRTQLGNMIRGYAAEFGITAAKGLDKIEPLVAEIAQDEDVPAMARDLFALQGREFVQLQAQLKVIEARLRAWHRGNADSRRLAQIPGIGPVGAPELIMKTPDPGAFTSARHFAAWIGLTPKDHSTAGKTRLGKITRAGDERLRSVLVAGATAVIKQARRGRGHPSPWLVALLKRKPPKLAAVALANKNARIAWKLMVTGENYDGARMHAASAAAA

SEQ ID NO: 65439 - protein, 462 aa, unidentified
MPQSRKTRKKFVPKVDWTSGLEAIYHHAAGIDVGSAQHYVAVPVGRDPQPVQTFGSFTSDLQRLAQWLRACRIETVVMQATGVYWVALYEVLDSYGFQVQVVNARYTKTLPGRKSDVQECQWLQKLHTFGLLNNSFRPPEQIRVLRCYLRQRENLVQQAGTCIQQMQKVLTEMNIQLANVISDLSGVTGMRILQAILEGERDPDQLVRLAAPGIRASRKELAQSLEGHWREELLFVRQTHDLYLTFLQNIRQCDGCIEDHLKTMEAKVDEVARPLPAARPKNRLPKRKHIPQFDLRAELYRVAGADLTLIDGINVQTAQVVISEVGVDMTRWPDEHHFSSWLGLAPHNDITGGKVIRRRTKKVLNRAARALRLAAQSLHHSHTALGAKYRRFRGRLSAPEAITAMAHGLARLVYRILRFGTEYHDKGMEHYERRYRETQIKWLQKQAAVLNMQLTPAQVVAR

SEQ ID NO: 65440 - protein, 384 aa, unidentified
MNKHSIIFLGLDTHKEFHEAAYCEEQRGATPVHHGRIPSSKVSLTKLIRQFESKYPGATLHVVYEAGPCGYWIYRLITSLGHCCYVVAPSLIPKKPGDKVKTDRRDALKLVKLLKSEDLTPIYVPEPEDEAVRDLSRAREVAMKDLKDAKYQLKALLLRNNINYAGTANWSKKHLRWLTELILPHPAQHIVLQEQLQTISERINRLERLDNELTLHVHKWRYYPVVKAIQAMRGVRLLVAVGMVAELGDLSRFDHPRKLMSYLGLVPSEHSSGGKRHQGAITKCGNGRARRMLIEGAHSYRYPANISTDIQIRQEGLPKDIVDIAWKAQLRLCRRYQRMSKSGKHYNLIIAAIAREMVAFIWAIAKEVVLSPINPKLRLSRVPA

SEQ ID NO: 65441 - protein, 404 aa, unidentified
MLFLPLISTRIFLSHRPVPNAKEGAETLESLLVDVLSAHHEFNHVIIGLESTGFYGVHIANYLSASGLLAPFGTEVYCLNPKEVAKYKESFNSLDKNDGIDSFVIADFARVGRISIKPWRGAQYLALQRLTRHRLHITECIAREKTYVLNNIFLKFSEFAMLKKEDHPFSNKYGATAEAILEQYVTNDDIIGASIEELVELIESKSRGRITDPEETAKILKAAANGSYRLDKVVAEPITLSISSSFNCIRAFEKELKAIEKAIEHTVQGLNPVEYQVLKSIPGIGHVYAAGILAEIGTIKAFTGNGALAKYCGIVWKENQSGNFRAEDTKMSKAGNRYLRYYVIEATGSVINNCPEYKDFYDKKFAETTTHQHKRALALTSRKFLRMLFGLLDKSQLYSLERSR

SEQ ID NO: 65442 - protein, 391 aa, unidentified
MSMYFVGIDISKYKHDCCIISAADQQIVSKFTITNDKDGFEQLLISLNSLSNSEDIKIGFESTAHYALNLELFLENANHSFMEVNPVLIKEYKKSTTLRRTKTDSVDCESIARWLMTVEYKPHSKGFYHAYSLKSLTRLRDRLIRQRSFYLVKITNVLDHTFPEFKPFFNERLSKTAIYLLENYGSAEKMAHMNSVSYDKLRCISRGKFSIQQFLRLKELAANTVGVNNSIFDIELNSLLTLYNSLCKEIKNLEAEITRLIEEVHPHYMSIPGIGPISAAVIYAEYGDISNFSNPSQMLAFAGIEPGINDSGTESHGGRMVKHGSSQLRYVLLNACLPLIRFDLTFATYYAKKRAEGKKHRVAITHVAKKLIRVIYALERQDVDFNAQKLR

SEQ ID NO: 65443 - protein, 448 aa, unidentified
MRACKVSRARKMKLPKHLQHINVSAAGIDVGCRSHFVAVPEGSCEQPVREFTSFTDDLHQMADWLLGCGVTTVAMESTGIYWIPVFEILESRGLEVRLVNARHVKNVPGRKSDVLDCQWLQQLHSYGLLEGAFRPSEQVCALRAYVRQRMNLVRYAGSHIQHMQKALAQMNLQLANVVSDISGVTGMRIIRAILAGERNPLALARLRDPRCKSNESSIARSLHGNFRSEHLFSLKQAVALYDFYQTQIAECDREILAQLASFDATDSSGSRPPASVDDALQRMSGVDLTGIDGIDTTSALKIIAEVGTDMSRWKSAKHFASWLGLCPGTKISGGKLLSAKSKPVANRAATTLRMAAFTLLRSKSALGAYLRRQRSRLGAPKAITATAHKMARLVYSMLKHGSAYVDLGQNYYEERYRDRAIKSLKRKAQTFGYLLVKEAETQPLPISP

SEQ ID NO: 65444 - protein, 319 aa, unidentified
MDNLSHGRVIGIDVSRDWLDLHCLPDGLQCRMPNGPEGHAAVSDLARDRDAVVCFESTGGQEWQLWETLEAEGVIARQVPPAQVKAFARSRGTRAKTDRIDAELIARFFAFRPDAGRRLPTEKLRSLRALTSKRAQIVEMRKRLLAQIRAHQKLGTAEMFDSVDSDLKARLDCLIKELEDRIGATLSGDVLLAETAGVLRSIPGIGPVASTMLIAEMPELGTITGEQAAALVGLAPVAQDSGTLRGKRTIAGGRRALRHVMFQAALVAAHHNPSMKAFADRLRKAGKPHKVIITAVARKLVNLANALCKSRQKWKPSTA

SEQ ID NO: 65445 - protein, 480 aa, unidentified
MNCRRLVGIDLGIASAHTVRVLDGEGNVVAKRKAWPTVESLGEVEVAALAGCPEGTRLEVIVEPTGPAWLPIAVFFTARGHVVHRVSSAKAHDLRRFLSRHTKTNGIDADTLARLPLFDPAGLQPLMLPGAERAALDRRVRATDRLTQQGALHKRRIKDLTRQLLPMTPLTGDLGVTDLAVLERYADPNALLKLGVKRLTALIEKTSKGHQGIDRARQWISAADASIELYGAHPAVAFTDLAAEIATEVRLLRAVQAELAAHAAERETAYRWVDPAGLARSLPGVADIGGPALVAAMGDPARFAKGKQFRSFTGLVPKASETGDTDRKGQAMSKAGSSLLRTTLVRAADTARKTDPQLARIYYVQMVERGKDHLGALCVVAANLAERFWAVMTRAMPYVICDTDGRAVEPDEAKTIIAEHWTVPPDVRARRRSKKTAGKAPQNIHSGSSKPHAQGASKRGDLPRPASSTTTVDHVNRRTA

SEQ ID NO: 65446 - protein, 399 aa, unidentified
MFVGWDWASTAHDVTVIDSAGELVHRMAIPHTEDGIARAVAKLADYGDPGELPVAIEATRGLVVDRLLGVGHPVIAVHPNAFHAVRPRWGAARAKNDPGDSFKLADYARTDIHRLPMLVPTLPETLELQALTRQRDCQLALRIAAVSQLAALLDQYWPGGKTIFAQLHSPIALDFLDRYPTPRAAASLTPARIEAFCRRRGYSGRRSGAELLDRLRSAPIAASRLGEPVVAQMIRGQVAVVRALQAGIDALDIVIAEKATAHPYAGLLADLPRIGTLNLAQIIGEVGPILERATSFDQLAAETGLAPVTRSSGKTHTVAFRYATNRRARQALHTWLDNSRRSSDWAAQRYAAARARGQRHPHALRTIGRAWLRIIWACWRTKTPYDPARDERAKQPTAA

SEQ ID NO: 65447 - protein, 411 aa, unidentified
MEVVYACCAGLDVHKATVVACVRVPGPRPGERRGETKTFATTTGGLAELGDWLRGHGVTEVAMESTGVYWRPVYAGLETRVRVMLVNARHVKMVPGRKTDVRDCEWLAQLLECGLLRASFVPPRAVRDLRDLTRLRKALIRERGHHVNRIEKTLELAQIKLGCVVTDLMGKTGRAILPALSTGIDDPDQLADYAQGLLRKKRAALREALAGRLTPHYAFLLQQHLALIDTLDAHIATLDARIDEAMRPFADAAALVQTMPGVAIRAAQAILAETGMDMVAFPTSAHFASWARLCPGNHESAGKRQPVSTGQGATWLRATRQESAWAAIRTKKSYYRALYHRLKGRGGAKKAVVAVQHAMLIALWHMLKHRVPHADLGADYFDRRNTERARRHHVRRLERLGYNVVLVESVA

SEQ ID NO: 65448 - protein, 345 aa, unidentified
MPIVGGLDIHRKQITFDYLDTVTGEVRRGQIAPADRQHVRAWLARFAGQDDVAFAVEGCAGWRYVAEELAAAGIAAHLGEPADTAALRGRKRHAKTDKTDSRHLRALLAEGRLPECWIPPAQILEYRALLETYHDLRRAHTAWVQRIHAVFFHQGAPPLSEGALRTEPGLAGLRAAAAAHLSTAGQQQVATALDMLAATEAQLGPLRHQLRDAARHLTGAKVLAERLYGVGPLTALALTCWLGGADRFSSSRKAVRFTGLDITVHSSDRKGPPGKLSRQGPPVLRWAVYEAGKTHARTTAPDHGYYTAVADRKNTKRAALSEARKIVRQACHILTELGDDALTVT

SEQ ID NO: 65449 - protein, 403 aa, unidentified
MTVTNLEPGTLVGGVDTHADTIHVAAVDSWGRQLGDQEFPTTPSGYRQALAFLTGRGEVVGIGIEGTSSYGVGITRAAGEAGIAVFEVVRPERAVRRREGKSDPLDAYQAAQAMLSGRATAAAKSADITALRALHNARRSAVKARAAAQVQIRHQLVTSPADLREKYRNLTAARLIQTLAACRPSVHPDLEERLVLTALKSLARRHQSLTREISELDTELTTMIERAAPHLLHLHGVGNTTAAQLLITAGGNPDRLRSEASFAALCGTAPVPASSGKTTRHRLSRGGDRRANNALHTIAMARLRNHPPTKAFVQRQRDRGRSTPEILRLLKRAIAREMFKQLTRPHEDLGVHDLRPTRQAKNITLAAAAHALGLATITISRTERGLHITPEVVNRYREWLNTA

SEQ ID NO: 65450 - protein, 356 aa, unidentified
MSYDVKYIGMDVHKEAIVIAVLNESGKLVMESVIETKASSILQFLHGLRGELHVTWEEGTWAAWLYDLLQPQVQHIVVCNPRRNALLKEGSKSDKVDARKLADLLRTGMLRPVYHGENGLRTLRELGRSYQTISKDLTRVMNRLKALYRGWGIPCAGTQVYAARCREEWLSKIPQAGVRRRAELLYQQLDGLQALRREVRPEFLAESRKHKAAKLLRQIPCIGPIRAARLIGLMQTPHRFRSKRQLWTYSGLGIETHDSAQYRFVRGQLQLSKKPQQIRGLNRNHNHEMKEIFKSAATRASCGRGPFYDFYAGLLAKGMKPEMARLTLARKIAAITLTLWKKEERFDVEQRKTQAA

SEQ ID NO: 65451 - protein, 339 aa, unidentified
MQLYAGIDLHSNNTFIRIIDGQDKTKFSKRLPNKMEQILTALAPYKKRLKTIAVESTFNWYWLVDGLIDNGYKVQLANPAAIKQYEGLKHTDDRYDAFLLAHLQRLGILPTGYIYPKQDRGVRDLLRRRTMFVQQRTTQILSLQSMIGRNLGVKMPGNEVRKLTPDDAKQLFDDPNLFLMAKCNIETMHFLKMVVKQIEKIVKQRAKLRKEYERLLTITGIGTILALTIMFEVGDIGRFKKVGHYSSYSRCVNSNRLSNGKKKGENNKKNGNRHLAWAYVEAANFMKRYCPLANAFYQRKTAKKNNSLAIKALSNKICRASYFVMRDQVAYDAQKLFCS

SEQ ID NO: 65452 - protein, 428 aa, unidentified
MSNSKPAAEQYAALIGMDWADEKHDVWLWDATTGESHHRVVDHTPEALAEWLRELQAQYPGRRVAVCLEQSRGALINALMGQAFLVLYPINPATLARYREAFSPSRAKDDPSDAKLLSEVLRLHRDKLCVWKPDDEQTRTLTLLNEERRKAVDLRTKLVLRLQATLKLYFPQAIEWVGDELSSPLACDWLVKWPTLEAIQKTRLQTIRTFYYAHNSRRPDLIEARLKAIADAKPLTQDAAVITAYRLTVQMLVRQLRPLHASIAEYDRQIAELFMQHPDAFIFDSLPGAGPTIGPRLLSAFGTDRDRYPEAKDVQTFAGIAPVIERSGKHCWTHWRWNCPKFLRQTFHEFAKSSIPYSAWAKAYYELQRKRGKGHNAAVRSLAFKWIRILHRCWKDRKPYNEALYLQTLTQRGSELANLLIAQLPQEA

SEQ ID NO: 65453 - protein, 337 aa, unidentified
MKDIIYDHYIAIDWSIINMAIARMTKKSNKITVIDVPSDIVELKVYLKNLKGTKILTIEETTTAQWLYTELKEYVDKILICDPLRNRLLSEGPKTDKIDASKLVQLLKANLVKEVYHSTDKFLYLRRVISGYEDLVKAGVRLKNQRYSLLRACGKKGDKDKSSKLESQGDQFVLECLDRQIEAYTKEKKGYEEEFKGLVRKYPEIKQQKSLPGIGDINAVKIVSRIVSPYRFINNGHYLSYAGLIKLDRISGGRSYGKKTPRFCRQLKSVYKSGVLAAIGGNNPINDYYEYLIEKKGYPEYNARHKACRRLAILSLGVFKSGKKYQPYRRNHVEAIN

SEQ ID NO: 65454 - protein, 355 aa, unidentified
MSVYVGIDVHRKRSQVAVVGEDGKVQLNRNVVNGQEPMLRLIGALPAGTAVAFEAAYGWGWLVNLLEDYGFEPHMVHPLRCKAIASARLKNDKVDAAILAQLLRADLLPEAWIAPPQVRQLRALLRHRASLVRLGTQLRNRIHAVAADHGYDRAASYWTGPGRGWLAELDLPPASRQIVTDCLAFIDALAPVVARLDGELRRRANADPQARVLMTLPGIGPFTALVLLAEIGDITRFASARKLASWAGLTPTVRGSDLTVRHGHISKQGSAWLRWVLNQAAQTAKRSPEFAATYAAITRRRGKKIATIAIARKLLTRAYHLLAAAQAAQASAATGNAPADQGNGRQTPGTLDPAA

SEQ ID NO: 65455 - protein, 449 aa, unidentified
MRIRRPKPQQTDSRPSVNPHAAGLDIGSDEIWVCVPDDRDAQPVRCFGTFTPDLLALAEWLATCRIETVAMESTGVYWIPVYELLEARGFCVSLVNAHHLKHVPGRKSDVKDCQWIQYLHTCGLLSGSFRPDAEMCALRAYLRHRATLLDYRAGHVQHMQKALQQMNIQLTQVLTDITGTTGLAIIRAIVAGERDPVHLARFRDPRCASSAEDIAKALTGHYQPEHVFALKQALALYDTYTTQVRECDTEIEQHFQAIKPVWSDELPPLDRTAVGPSSSKNAPAYDAHSLLYQLTGVDLLAIPGLQASTAQTILAEIGLNMEKWPNEKAFCAWLGLAPRHEISGGKVLRRHTLKTRNRAGQALRLVAQAAGRSHSGIGAFYRRMRARLGPKSAIVATAHKIARMIYHMLKYRTAFRDMSPEEYTRRTRAREIAAMRKKAARLGLTLVEG

SEQ ID NO: 65456 - protein, 375 aa, unidentified
MNEAALFVGMDVHKATVAIAVAEPGRNGDVRFIGNVPNKSATVVALLRKLQQKHGAIECAYEAGPCGYTLYRDLVAAGLACIVVAPSKIPSTPGRVKNDYRDALALARLLRAGDLTAVWVPEPVHEAMRDLVRARHAASFDVRKARQRLQSYLLIRDRRYGFKMWGFRHREWLSRQLFEHPAQQIAYQGYLNAMEQAEERRRQLEEQIASLLPSWSFTPVVTALQALRGVAPIIAVSIVAEVGDISRFASPRKLMAYLGLIPGEHSSGATIRTRGITKQGNSVLRSLLFEAAWAYRFMAKVSVAMKARRPEGIPQGAIDIAWKAQLRLCGRYRKLLAKGKKSQVAITAVARELLGFVWAIATTIAPASQVVAEPA

SEQ ID NO: 65457 - protein, 322 aa, unidentified
MTPPEIYVGIDIAKEQLQVAVRPGGEAWSVTNDRPGLRDLVKRLAASKAALVVLEATAGMEMPVVAALAAAGLPVVAVNPRNAREFARATGRLAKTDVIDAHVLAQFGEALKPPLRPLPDAATQELNALVTRRHQLVEMITAEKNRLAQAVTKAVRAGIREHIRWLERRLADIDQGLADAIRQTPVWREKDELLRSVQGVGPVLSTTLLAGLPELGALGRKQIAALVGVAPLNRDSGRHRGKRMVWGGRARVRAALYMGTLVATRFNPVIREFYERLLAAGKPKKVALTACMRKLLTILNAMARHNTPWQIMDLTLVRQDGC

SEQ ID NO: 65458 - protein, 324 aa, unidentified
MIDGILGIDVCKNTLDVSISSYTKVRTKSFTNSPDGWRHLLDWLIAQKIQRVHACLESTGRYSLGIACALYEADHVVSIINPAQIRDFVRTKLGRNKTDGVDASHIREYCELFKPSPWAPPSKAHRRLGELQTIRSGIIAGLTEWKNRKNSGIVDAEAQALADATISHFTSQLGAVDKAIALTIDNDCDLQSKRDLLLSISGVGETLAGVVLAELPGPDVLRSSAEVVAYAGLNPRQHQSGTSIDRATRISKIGNAVLRAALYMPALSAMRYNSAIVALVSRLKSRGRLKPKQIVVAAMRKLLVLCFGVLKTGRPFDAAIAMGG

SEQ ID NO: 65459 - protein, 340 aa, unidentified
MVHVGVDLDKRSSQIAVLSEDGEIVQHRLANDAARLEKFFADLPPHTPIAIEASGTWWWLVDLLEELGHQPVLSNPKQTKAIAAARLKNDRVDAERLALLLRGDLLPRVWIPPTALREARELIRHRIQLVWLRGVIRNRLQAMLARRNLQPTSGQSWLTQRGQRELQRLPLGETPSRIREDCGALLPTLDAQIRRLDADLVTRWGADPRVRRLTTIPGIGPFIAIVLVLELGDIARFASAKRVASYVGLTPRVRGSAGRVRAGHITKEGNRLLRWVLVLAATQAIRRPGPLRAWFHAVKKRRGKKVARVALARRLVEIVFHVWKQECDYFTVVRHGVVRG

SEQ ID NO: 65460 - protein, 366 aa, unidentified
MKKTNTVRVNRNTIFKGHKLTIGLDLGDRWSFYCVLDEAGEIILEQKVATTPEAMKQSFEKIPRSLMALETGTHSPWISRLLRELGHEVLVAHAQKVQLISKSNRKDDRHDARTLARLARIDPELLGPVRHRSARAQIHLTVIRARAELVRARTALVNAVRGLVKSYGQRLPKCGTQQVSRELATGLNAELREVLEPLLKEIESLNERIKEYDARMEKIAKESYPHVELLKQVKGVGTQIALTYVLTLDDPHRFAKSREVGCFLGLKPGRRDSGESQPQLHISKEGDRYLRTMLVQGAHYILGPFGEDSDLRRWGLKLAARGGKNGKKRAVVAVARKLAILLHRLWVGGEVYEPLRNSHKAMRAAA

SEQ ID NO: 65461 - protein, 424 aa, unidentified
MSERKCGHFGSHSVRQYVMTPKFVASWIYLYTMNWKHINGNRDYRIQIGGHYMNYNTVYVGMDVHKESFTLCSCKYEDEKASHYQRTQASYKNVLRYLEFLRTIYGDDTRFVCGYEAGCLGYSLYRQLESFNVECVILAPTTMLEQRSKRRIKTDKRDAEIIARSLAQHNYSPVHIPTETDNQTKEFIRMRDDHKAELKKIKQQILSFCLRQGYQYDGSGNWTEKHVKWLRSLKPVGLYKEILDEYLLTYTTLTDKLNRLDQRIEELASKEEYTESVSKLTCFLGIRTHTALSVIVEVGDFQRFASARKFAGYLGLVPGQHSSGDDRNGLGITKAGNTHVRRLLTESAQSYTRGKIGYKSRVLRSRQAGNSPQIINYADRANERLRRRYYKMVLKDGKKYNIAKTAVARELACFIWGMMTDNIY

SEQ ID NO: 65462 - protein, 311 aa, unidentified
MPDDTIGIDISKATLDIHRLSDGKMMSFSNCPAGFKALSKFCAQTTVTRVVYEATGAYHGGLERALGAHLPLVKVNPLQARRFAQAQGVRAKTDAVDAKMLAAMGNAFALQPDEPATKIQHDLKELRSFRSGLIKDRTGIMSRLKTQTLPITCRQSKTRLAQVDKNIAEINAEIDRLINSNDTLANSMKILRSIPGIGAVCASTILIEMPEIGSMDRKQVACLTGVAPMTRQSGQWRGKSFIQGGRKVVRDALYMPALVAMRFNPDLKAKYQAMIKAGKPPKVALTALMRKLIELANALIKANRNWVKKAT

SEQ ID NO: 65463 - protein, 316 aa, unidentified
MSKRKSYIGIDVSKQLLEVAVHEHKFRYHCPNKPSAFVELVTEMIALRPARIVVEATGGLEKPLVAALQAASLPVVVINPRQVRAFAKALGQLAKTDRLDAAVLAHFADAIKPPLRPLKSKEGQELEALMGRRGQLVDMLVAEKNRRHSATSEAVRETIKEHIDWLEDRIAELDEQLQARLESSAEWHAKDAILQSVPGIGPVVSFCLLAELPELGTLNRQRISKLVGVAPLNRDSGQQRWVRHIFGGRTHVRCMLYMATLTAMRFNSVIKEFYQRLVRKGKPHKVALTACMRKLLSIINLMVRNQTVWKTDLVSA

SEQ ID NO: 65464 - protein, 322 aa, unidentified
MQSVIGIDVSKEKLDVCALFDGKSRKKIVDNSVSGFKSLRNWISKNNIDDPHFCMESTGCYSEGVAEFFHELGFKVSVVNPLQIKAFRNTKLVRQKTDSVDAQIIAEFCLQNDPDPWKPRSPEKKELHNINVRISALKTEVNRASNALENKNLSKVILKSIHDEIKFLKKQIALLEDESRKIIDSNQNLKEQFDRITAIKGIGEKLALAIIADMPDISNFQKSGQFSAFAGVSPSHFQSGSSVHGKSHISRLGSKSIRKVLYMSALVVKNHNPYFQKFVQKLQKKCKAPKVIIVAIMRKLMCILFGMLKNSSNFDPKLAFGD

SEQ ID NO: 65465 - protein, 432 aa, unidentified
MEEVTDEPLYRNRVCGIDIGKAGMAVTIRVPSDKNPARRAQETREFGTTRREVLALADWLRAWQVPAVVMEATSDYWKPVFYRLEAEGFECVLADAKQVKNLPGRPKRDPSDSRWLAQCFERGSVTSCFVAAPEFRLIREHTRYRRDLTGERTREKQRAEKLLESAAIKISSVITDLHGMTGRDIMDRLIAGERDPKALAQLARGKARPKIPRLAEALEGAEFFTPEHAALLKVMLDRIDAVDAEITRLTAVIERLLAPYEEQLQQAESMPGWGRRAAQDVIAETGVDMTRFRTPGHLSSWCGRTPLEHQSGKRAGQARHKKGNRYVAAVVGETSVAAGKTDTREGARHRRLSRRRGKNKAVVATGNTQLRVLHVLLSNPGTRYQDLGADYYERHREAARQVSHHVGKLGALGYQVTLCRLPDTAEEDAQTA

SEQ ID NO: 65466 - protein, 340 aa, unidentified
MTTISAEIPDTEVAVILGVDTHLDFHVAVAVDHLGRRLGESSVPTTVKGYEELLSWAEDFGPVRCAGVEGTSSYGAGLTRHLRARGIEVLEVERPKHRRRSSRRNLEKSDSSDAYSAARAVLAGEASGVPKSADGQVEMIRALRAARRSAVKARTQAANQLQGLRVTASEQLRHRLRGLSTKELVSVAARFRLGDGPSDVPTATKFALRSVARRYEALSAEISQLEAHLDRLVGQAAPELVALAGIGTDNAATLLIVTGDNPQRLGSEASFANLCGVAPIEASSGKVVRHRLNRGGNREANRALYMICLARMRRDCRTQEEYVALGAPRKARASQRSSAA

SEQ ID NO: 65467 - protein, 423 aa, unidentified
MSIDHTRTETAAIRTQINAVFASLELSRSKWVVTSISPGAGEKMSRHVVKGGDLSALCGRLEAVEAKARTRTGAQKPYEIIVMQEAGLDGFWLHRALQARGYVSHVVDAASIAAPRRKRKKKTDRLDGEALLRALLAWARGEPRVCSMVHAPSLQDEDVRRACRERKEMVKERIVHVNRIKGLLFAQGIGDYEPLRRDRRRRLDELRTGDGRALEPNLKKQLNRMLDRLELLIDQLAEVEKARDERVGVEPKRKAAKKAKPTLQPACAASQGATNEGMAAPAAGAPRAVEVARKLIKLGGLGAEISSALSTEGLARDFHNRRQAGSYAGLTPTPWISGELDHEQGVSKAGNPRLRTTMIQLAWLWPTHQPNTKLARWYKDRLAHTHGRGAKQKLVVALARKLFVALWKYVAFGELIEGAVMKA

SEQ ID NO: 65468 - protein, 348 aa, unidentified
MLADQLDYVVGVDPHRDSHALAVVHVVSGVVVFEASVVASSDGYAQALTLVDRHASGRRAFAVEGTGSFGAGLTRFLTARGERVFEVGRLRRERRSGGKTDALDAVRAARSVLTSERPATPRAGGERQALQALVAAREGAVNAKRAGLCQLRDLLITTPEPLRSELRPLTRARLLQRLAATRPDGRRDPELRGSMLALRSIARRVLQLTAEERELARQIEAITRTLAPQLLEQPGLGPHAAAQLVLSWSHQGRISSEAAFARLAGAAPIPASSGQTIRYRLDRSGDRKLNRALHMILVTRKRSHPATIAYIERRLQEGKTRREATRCLKRYLARSLYRLLEHGAPQAT

SEQ ID NO: 65469 - protein, 347 aa, unidentified
MKHYAGIDVSLEYASVCVVDATGKIVREGKVASEPVTLITWLRSLGVNLERIGLEAGPLSQWLYGALREAGLAVELLETRHVKTALSTMPVKTDRNDARGIAQLMRLGWFRPVHCKSMAAQEVRALLTARKLVQSKLYDIEMSLRGILRGFGLKVGPTTSQSFAARINHLVDGQTSLEAVAAALLSLHAVALREFKSLEKSVRQISRADARVRLLMSTPGVGPLVALTYVAAIDDPARFTSSKSVGAYFGLTPKKYQSGETDVSGRISKMGDGSVRTALYEAAHVILTRPIKGGALKSWAMKLARRAGMMKAKVALARKLAVVLHRMWVDAIKFDADKASGCVRVAA

SEQ ID NO: 65470 - protein, 376 aa, unidentified
MTTPETALQAQHTAKRGLLVAFELGLRQWRLAMGDGAHSPSRFTIDAGDLEQLHRCIAKAKERFGLAADAPVHSCYEAGRDGWWLHRALQALGIDNIVVDSSSIEVNRRQRRSKNDRLDADKLLSMLQRFHGGELRVWSVVRAPSVEQEDARRLHRELQTLGREQTQHTNRIGSLLALMGLQVRSIGGRNWERWWGDHASQLPPELCAQIERENARLALVRAQLRQLEREQRSRQADEQRRNPMVAQLARLRCIGLRSAWTFAHELFWRHFDNRRQVAACLGITPTPYDSGQLEREQGISKAGNKRLRTLMVQLSWMWLRLQPGSELTLWFNERFAGGKRSRRIGIVALARRLAIALWRYVEFGQIPAGATLKAAA

SEQ ID NO: 65471 - protein, 352 aa, unidentified
MAEDNSGVTAVIGIDIGKNAFHVVGLDGRGAIVLRQKWSRGQVEGRLANMLPCLIGMEACVGAHHLSRQLRALGHDARLMPAKYVRPYSKGQKNDFRDAEAIAEAVQRPTMKFVATKTANQLDLQALHRVRERLVGQRTGISNQIRAFLLERGVAVRQGLRFLRAALPGILATRCDVLSPRMVRLIEDLAGDWRRLDERIDGLSGEVDALARQDAGCERLMSVPGIGPIISSAMVAAIGAGDAFDKGRDFAAWLGLVPKQISTGDRTILGKISKRGNRYLRVLFVQASWVVLIRPKSWERYGLKPWIEAAKRRLHHNVLAIALANKLARIAWSVLARGRGFEARSIATAQPI

SEQ ID NO: 65472 - protein, 400 aa, unidentified
MDGWIERCCGLDVHKQTVAACVRVPGAQGRRTQEVRTFGTTTPDLLALQDWLAAHQVTHVAMESTGVFWKPVYYVLEARFTVLLVNAAHVKQVPGRKTDVRDCQWIAELLEHGLLRGSFVPPPVIRDLRELTRYRRTQIQERTRVANRLHKVLQDANVKLSNVTHHVLGVSGRAMLDALVAGTTDPAVLADLARGQLRKKLPALRQALTGRFRAHHAFLLAIAAVSAHIEEQLRPFAPQVERLMTIPGVQRRTAETILAEIGTDMAAFPTAGHLASWAGMCPGNDESAGKRRSGKTRKGSKWLRTSLIEAANAAARTKATALGARYRRILPHRGHRKAIVAVGRHILEISHHLLRTDRTYQELGPDYFDRRHAERLQRRCIRQLEQLGLQVTITPASAAA

SEQ ID NO: 65473 - protein, 368 aa, unidentified
MEEKKRAATRFIGIDLGKRTYEMAIVGKNGKVAKSGGKTFAAGRQALYKKLLPGDKVALEAGGIAFIMAKEIEAAVGCKVYVLNPSQLAIIYRSMKKTDKEDSLKLAHIIEDFKEERLPTVPVPGDKEIKRRKLLAGYRRAVQSRNRDINHMHGLFVSQGITTKVRKELASVENREEAIKELSGLEFQEAEYLMKRIALCEERIAALGKQMEEESAGDKEIEKLKSVPGVGPKVAFAWVAHIAVERFENASQVGNYLGLVPRVYMSGDTVRYGKITKRGNGYLRALLVQAAWALIRSKKGGALKERYEYMTVEKSKSKKQAIVAVARRLAELMYTLLKEGNVYETRKFVPEKKNNRKGEELASLALGA

SEQ ID NO: 65474 - protein, 399 aa, unidentified
MSALRRVVIGADTHLDTNHLAVLTDTGKPLADAEFPTSPAGYDDAVRWAQSLGTICIAGVEGTSSYGAGLTRVLQAAGIEVAEVSRPDRAARRRRGKSDPLDAYAAARAALAGDRLAVPKDEHTTALRALLSARRSAVKAHTAATNQLHALLVTAPAELRERYRRHHITALVAALAQCRPATQGDPTSAAVLTAAKALAQRVKFLEQQRQDLTAQLDGLVGQINPALRAAYGVGPHTAAQLLVTAGTNPHRLRSEASFAALCGAAPVPASSGTITRHRLSRGGDRAANNALYRIALVRMSSHSQTRDYVERQVTKGRTKKEILRLLKRAIAREVFRLLTRPGPVDDYRDLRAARQAKNLTLAAVAQHFGVPIITISRLERGHQRNDTLANHYRQWLTAA

SEQ ID NO: 65475 - protein, 326 aa, unidentified
MLEGVNGKEDWILEESVFVGIDVSKGTLDIVMRPGGSRESIPNQEAQIGELVRRLSTLRVTLLVVEATGGVERRVVRALAAAELPVIVVNPRQVRDFAKATGRLAKTDKIDAEVLAHFGEAVRPALRTLPAPASEELRAQIARRRQVTEMLTAETNRLAHSAKAVRKRIEAHIRWLEAELDRVDNELDQSIQQSPIWREQEDLLKSVPGIGAVISRTLLAELPELGKLNRKQIAALVGVAPLNWDSGMMRGRRAIWGGRATVRAALYMAALVASRCNPNIREFHRRLRAGGKAPKVALVACMRKLLTILNAMIKHRTRWSVIVEAQ

SEQ ID NO: 65476 - protein, 366 aa, unidentified
MKKTNTVRVDGNMIFKGHKLMIGLDLGDRWSFYCVLDEAGKIILEQKVATTPEAMKQTFERIPRSLIALETGTHSPWVSRLLKELGHEVLVAHAQKVQLITKSNRKDDRHDARTLARLARIDPELLGPVRHRSAKAQIHLTVIRARAELVSARTALVNAARGLAKSYGQRLPKCGTQQVSRELAAGLKAELREVLEPLLKEIESLNERIQEYDVRMEKIARESYPQVELLKQVKGVGTQIALTYVLTLEDPHRFPKSREVGCFLGLRPGRRDSGESQPEMHISKEGDRYLRTMLVQGAHYILGPFGADSDLRRWGLKLAARGGKNAKKRAVVAVARKLAILLHRLWVSGEVYEPLRNSDKALRAVA

SEQ ID NO: 65477 - protein, 318 aa, unidentified
MSDSVFVGIDVSSQMLEVASSGQAKTWQVSNDVAGLETLVSQLSAIRPGLTVLEATGGYEFEAACALQAAGLAVAVVNPRTARDFARAMGALAKTDALDAKMLAAFARVLHQHPERDRFVKPLADAELQRLQALVLRRRQLVQMITSERQRMRISHVAARPSIERVIEFLKTELGDADTEVAAHVQRHHAELADALASVPGIGAASVAVLLAELPELGKLDRRRVAALVGVAPLNRDSGQMRGQRTIWGGRADVRRTLYMATLTAVRYNPILKNHYEHLLATGKRKKVALVACMRKLLTMLNAIAKHGTKWDPTLHNA

SEQ ID NO: 65478 - protein, 365 aa, unidentified
MNCVGIDVSHGKSIIVVMRPFGEVVVSPFEVLHTDSELSKLAGLLKSLDGETRVVMESTGYHHTPVAWLLHDAGLYVSVVNAMLVHDYGNNSLKRAKTDKKDAVKLANCGLDHWLTLPRYVPEEDTRLMLKTCYRKYQQYSKVQTMLKNNLISLLDTAFPDANRLFTSPPRADGSEKWVDFVAAFWHCECVCNLSEKAFTAKYHKWCRKHRYKFCEDKTLDIYSSACGHFGVIPKTDTAKLLVEQAVFQIRATSTTLAALKQEMQSLAASLPEYPVVMGMFGIGPALGPPLMAEIGDVRRFHSKKALVAVAGIDAPPYQFGQMDVRSHSISKRGSASLRRTLFLVMSVILQHAPMNEPVYQFMNK

SEQ ID NO: 65479 - protein, 370 aa, unidentified
MKKLKQFVGLDVHKDSISIAVAIGGPGLEVRDLGKITHDVPRLKKRLLKLGAPEDLHVAYEAGPTGYGLLRSLEADGISCVVIAPSKTPIRPGEKVKTDKKDAMKLARYLRAGELVAVAPPERETEALRDVLRAREDAVRALRSARQQLSSFLLRHGRKWEGKTTWTEKHIEWTRTQRFDSEAQRQVLEDYVQEVRRLTSRVKEWDSDVVRFAEACAPIAPLYYALQALKGVATIVAATIAAEIGDLRRFPSASKFMGYLGLAPSERSSGSEVSRGSITKAGNPHVRWKLVQAAWQYRHRPAMTTILKRRNEGLPKRVTDIAWKAQKRLHRKYWSMTSRGKRVQTAVVAVARELSGFIWAIGQEIPRTNV

SEQ ID NO: 65480 - protein, 347 aa, unidentified
MKFYTTLHKYYCGIDLHAKILYVCILDQQGNKLVHQKIGADPLALLRLLEPYIGNAVVGVECMHCWYWVSDFCRAHQVDFVLGHALYMKAIHGGKAKNDKIDSYKIASLLKGGNFPLAYNYPKEMRATRDLLRRRTGVVRHGASLKAHVVNTDSQYNLPIQHLNLKNVSAREHLRHNYEDEVVQRTIELDMVLLDCYAKELAKVESFIEKQAKQHHGAYLYIIRSFPGIGQILGLTILYEIGHITRFKSVQNFASYSRLVKCKAESAGKTYGTSGNKIGNGHLKWAFSEAAVLYLRGNDKAKNYLNKLQRRMSKGKALSALAHKIGRCIYFMLRDKTVFDEKKFLKG

SEQ ID NO: 65481 - protein, 415 aa, unidentified
MKPWIELTHYAGFDWASDHHDVVVVDKSGAIVADFRIPDTAEGWRDFAERVKKFAVVGMVVETRYGAMIERMLGSGCTVFPIDPKKASRYRERKTSSGAKTDRLDAWSMADALRLDGQAWKPLKLEDTATQELRQLCRDEVTLIEQRTALVNQIQQALHEYYPTALEAFDNWTHPATWDFVIKWPTPEALKSAGKRYWEKFLHVHRLYRPETHEKRLACFARATEFCGSPGTTAAKSLLAVSLAKTLLVLQKQLDEYRARITTAFEQHPDHDVFGSLPGAGEKIGPRILGEIGTDRDRFEDPQALQCYAGTAPVTQATGKRLSVHMRRACNLNLRQAIHFLADRSRKTCAWAQAYYLKKKEEGHRHSSAMRCLGQRWIKIIWAMWRNRKKYDPDLHQRNQVAHGSWVIALMSEKP

SEQ ID NO: 65482 - protein, 328 aa, unidentified
MKKNSTVANSGKQIFRGKKRTIGLDLGDRWSFYCVMDEAGQVILEQKLPTTSEAMKQTFGRIPRSLIALETGTHSPWVSRLLSELGHQVIVAHAQKVQWITKSSRKDDRHDARTLARLARVDPELLGPVRHRSAQAQLHLTVIRARAELVSARTALVNAARGLVKSYGQRLPKCGTYQVNRELATALSAELRDVLEPLLQEIESLNERIKEYDGRMEKIAKEVYPEVSLLKQVKGVGTQIALSYVLTIEDPYRFAKSRQVGCFLGLRPGRRNSGESEPQKGISKEGDRYLRTMMVQGAHYILGPFGEDSDLRRWGRKLAERGGKNAKK

SEQ ID NO: 65483 - protein, 341 aa, unidentified
MNHPKVVVGLDVGAETFSAAALRTAGEAVEMKGSFENTPEGFDAFAVWMKEYRITKEKSAVCLEATGVYGEALCYDLISRGYRVAVESPLKVKRAFAASAHKNDTVDARQIAEYGHRFYDELQWWSPPSEVMEQVQMLLSAREQFVTQRTANINALKTMQRKVIKTVTGMKAYEQAIKQLSENIEEIEREMKRLMKEDDSFHRLIKTLTSTPGIGLLLATNLAVTTNGFLRTSNHKRIASYAGISPIEHTSGTSVYRRPRSRSFGPPRMRKLLYLAAMSVSTHNPEFRRYYLRKVAEGKSKKLILNNISNKLLKVVCALVRTETEYIPNYKSVNPMLLKSA

SEQ ID NO: 65484 - protein, 310 aa, unidentified
MSTEIFVGIDVSKDSLEVGVYPSHPGCRMANSEQGVEELIHALRALNPQLIVCEATGGYETLAVGCLAAAGLPVVVVNARQVRDFAKSIGRLAKTDAIDAGVIARFAEAVRPELRGIKDAASQQLSALVTRRRQIVEMITAETNRLSVACRRSRRDIETHVRWLHKRLDQLDDQIKRDIHSGPMWRTKDQILRSTPGVGPTTSAMLISCVPELGQLNRKQIASLIGVAPLNRDSGRLRGRRMIWGGRGQVRAVLYMSALSAIRHNPLIGQFYQRLRASGKCFKVAIVACMRKLLVILNAMVRDQATWRQC

SEQ ID NO: 65485 - protein, 457 aa, unidentified
MKKLIVGVDVAEAKFDVAFRDINCQPVRADLSFSNSSDGIRDLIGCCIASASLAGKKVKIVIGMESTSNFHKNLERALRDSSRNFEIHVINPLAIKQFKKMNLKVYKTDKLDAHMIASYLARMEPNPSFAPLPGQEELKELTRLRRSYLEETTQLKNRIRSLLRIHFPGYKRLLGTKISSKMLIAFSNYSSPEEIISTGIDTLAEFSVSFRHRIGRPFAENLVRLAGKAPSRVLPGGIALAIKWTAQSLLQLQERIKMLDAEIVAMLDEYFPEHKLLSIPGIGPISAAAIIAEVGDIKRFSTPEKFIGYIGLYPVVWESGEMKTRFQMTYKGNKSLKMTFLVATAAARQFNPAIRQMYDRLRARGKSKRAAGGAVARKLACIVYAILAGDKKWDPEIASEGLRKSQQMAESLTEKKERNELPTEVVPQNAVIAAMEFNGQRRSPGNSILNGGATGNP

SEQ ID NO: 65486 - protein, 456 aa, unidentified
MIMKRKKKVLQVPKLESLKQINPNAAGVDVGASELYVCVPEDRDPRPVRVFQTFTSDLHEIAAWLKRCRVTSVAMESTGIYWIPLYEVLEEAGFEVKLVNAREAKNMPGRKSDILDCQWIQQLHSYGLLTASFRPPKHIVALRSLVRHRDRLIVARAVHIQHMQKALHLMNLQLDNVLSDITGVTGMRILRALVAGERNLDTLVSYRDPSCKSSTQVIRESLKGNYQEEHLFPLRQSLELYDYHTTMIQQCDREIEQKYRALPSRVDLQRKPLPPSKKQQKKPRKNAPTFDLRSRLYETAGVDLTAIDGCNAATIQVVLSETGVDMRPWRTCGHFTSWMCLAPHNDISGGKVLRSRAKKTKNRANTALRLAAQALTHSDSWLGAYYRRQRARLGAPKAIIATAHKIARIIYYMLKYQREFVDLGANHYEAQHRKRQINSLTKKAASLGLLLVPAKA

SEQ ID NO: 65487 - protein, 351 aa, unidentified
MMIIGVDYHPGFQQIAFLFKETGECGERRLNHSDGEAENFYRDLKARGISVRVGMETTGFSRWFERLLAELGFEVWIGDAAEIKTRRAKKQKTDRLDAELLLKLLLEDRFPRIWVPSPENRDLRQLLWHRHRLVQMRTRIMNQLQALAMNENRYWKGKLWSERGRAELEKLPLAPWTSRRRQELLELLDRMNPTIEELTAAATLEAKKRPEALRLMTHPGVGPLTALAFVLIIGTPERFGCAKQICNYVGLIPSEDSSGGRQRLGHISKQGSSLLRFLLVEAAQAAVRCNADWRRRYRHLAMRRQRNIAKVAMGRRMGARLYWLWRNGREYSPSLEFGSHAGKLGTGNGVQ

SEQ ID NO: 65488 - protein, 356 aa, unidentified
MSQKLNSTIAVIGIDIGKNSFHVVGHDKRGAIVLRQKWSRGQVEARLANMQPCLVGMEACVGAHHLSRKLQVLGHDARLMPAKYVRPYSKGQKNDFRDAEAIAEAVQRPTMKFVGTKTVDQLDLQALYRVRERLVSQRTGVINQIRAFLLERGVAVRQGFRFLRAELPSILAKRTDVLSPRMSHLLEDLAGDWRRLDERIEHLFREIEGLARQDQGCARLMSVPGIGPIIASATVAAIGMGDAFSKGRDFGAWLGLVPKQISTGDRTILGSISKRGNRYLRALFVQAAWVVLVKVGPKHWERYGLKSWIEAAKKRLHHNVLAIALANKLARIAWAVLNKGRAFECTKTYAVAPQAA

SEQ ID NO: 65489 - protein, 406 aa, unidentified
MGKEGIHMISVGIDISKDKSTVCILAPYGNFIKKPFIIEHTKESINELALFINSLCEETKVVMESTGIYHLPVLKQLLSHNLFISLINPLVMNKYANTNIRPGKTDNKDAITIANYGIDYWYKLQPYVEKDTRYEQLRLLSRQYNQYINMRVKCKLALLNLLEQAMPQITTLLENDSQDIKRDKLNAFVKKYWHYDNITKFTQRQFIANYNQWAKKEGYQVSQSKAEKIYALASNKIPTLSSQDPSTKMLLLEAIRMYREINTSTDMILSQMKNIAKNLVEYDILISMKGIGEKLAPRFIAEVGDIRRFHSASALIAYAGIDAPAYQSGQFCSSNRRISKRGSKSLRKVGYEIMASFTRQKPLDNDIYIYIKKKESEGKAKKVAKVAGLNKFLRIYYAKVRDAYLA

SEQ ID NO: 65490 - protein, 374 aa, unidentified
MWSWPVEPQMWEAPVKVQRTSVGLDVHARSVVACALDGDTGELLERRLTPDHGEIVAWLADLPGPVAATYEAGPTGFVLARSINAAGIRCSVAAPSKLQRPVGDRVKTDVRDARHLARLLHLGEIVEIEIPSVEQEAARNLFRAREDCRCDLMTARNRLSKLLLRQGIVYYGGTAWSRNHERWLQAQRFDHPALAMTYDTAFDTVLAITARRDRLDTAICEMAADSPFTAVVTRLGCLRGISTLTAFGLAVEIGDWHRLTGRTIGAYLGLVPCEYSSGATRAQGGLTRTGNTHARRLLVEAAWHHRKPYRPGEVMRRRWNAAAPAPRARGQAANRRLHERWLRFDERRKRPVVANAAIARELAGWCWSLAVMDD

SEQ ID NO: 65491 - protein, 415 aa, unidentified
MSLLGRWVGRAIGVDVHRGFCVIAICEEGVVRSAGRVSSTPEGIEAFAESLLPSDRVALEVTGSAWELARILEPRVDRVVVVSPDDTGIVQARAKTDRLDARALARLLWAGELESVWVPDERCRVLRRRLARRQQLVHARTRSKNEIHAVLQRRLRGRPPCSDLFGVKGRRWLSGLELPLEERESIDAAIRQIEFLDWEIREVEQLIAHQALSWPEIHRLMTVPGVNLICAATFIAAVGEVNRFMTSRKLVAYLGLDPKVRQSGEAPARSGRISKRGSATARWALVEAAWQAARQPGPLHAFYQRTRARRGHGKAIVATARKLAVLFWCMLTRAEDYAHQQPSLTKRKLRQLELTAGAPKHARSTVGALSRNETLRQAERQIAEQAETSYLRMVKDQQAAAPTRKAGASVTLERA

SEQ ID NO: 65492 - protein, 339 aa, unidentified
MSEFTKKKHFIGIDISKDKLDLALVNEKSPGVFEDKIVDNSFKGFDNIQKWLSKQKIKFEDCLFCMEHTGTYGLLLFAWLGQMEIDFCVEPGLQIKRSLGMSRGKNDKVDARRIADYAFTNRGKLAPFSLPSTLLLQIKQLLTYRDQQTRIKVSLKNSLQSHDQYQRVSGLKSISDDIENQIEECESRIKRIAEQIKDLIKSDKTMKKNFDMATSVKGIGLVIAAFMLVTTNNFTGFENGRKYACYSGIAPFDNTSGKYKGKTKVSHLANKRMKTLLSNGANSARKWDPELRVYYDRKIQEGKSHNLVINSIKCKLVNRVFAVVKRQTPYVHIYQQNFA

SEQ ID NO: 65493 - protein, 402 aa, unidentified
MNCVGIDVSKGKSMIAVMRPFGEVVVSPFEVLHTDSELSELARLLKSLDGETRVVMESTGNYHAPVAWLLHGAGLYVSVVNAMLVHDYGNNSLRRAKTDKKDAVKLANYGLDHWLTLPRYVPEEDTRLMLKTCYRQYQQYSKVQTMLKNNLISLLDTAFPDANRLFTSPPRADGSEKWVDFVTAFWHCECVCGLSEKAFTAKYQKWCRKHGYNFSEDKALDIYASACRHFGVIPKTDTAKLLVEQAISQLQTTSSALAALKQEMQSLAASLPEYPVVMGMFGVGPTLGPQLLAEIGDVRRFHSKKALVAFAGIDAPPYQSGQIDVRSRSISKRGSASLRRTLFLVMSVILQRAPMDEPVYQFMNKKRSEGKPYRVYMMASANKFLRIYYASVKAYLESLEHD

SEQ ID NO: 65494 - protein, 340 aa, unidentified
MKKLYGAFDLHSSNNYLGISDEKDRRVYKQRLPNQPDVILAELEPYREQLVGIVVESTFNWYWLVDLLMDNDYQVHLANPAGIQKYKGLKHSDDKHDAFWLAHLLRLGILPEGYIYPKEERPVRDLLRKRGHLVKLRTSLINSLQAIIHRNCGVKLNARKIKAIRDNNVAPLLSYQDDLALSGTVSKETIDYLGQQIRKVENIVLGKIKLKKEYHYLLTIPGIGKILALTIMLEAGPIARFQKVGNLTSYCRKVPTKWTSNNKQKGKGNQKNGNKYLAWAFSEAAEFARRYDEQARAFYNRKTSKKNFMVAHSALAHKLARAAYYVMRDQVAFDPQKLFA

SEQ ID NO: 65495 - protein, 395 aa, unidentified
MFIVGIDVAKRSHEVCMITSDGQTVQRPFSIRNNCTGYNLMLEKIRKHTNIKSQIVFAMESTAHYWLALFTRLRKDGYHVILLNPIQTSAMRDMFIRKIKTDAKDSFIIAELIRFGRYAESNVAQDRLLALKELCRNRFYLVDMAGDLKRKLIALIDRVFPEYEAQFDTIFCKSSVALLKKYPTPQRLSNAHLDKLTELLWNSSNGHFGEWKARELRELARNSFGVEDCDGAYSTLILLMLDQIQSLSGKADALEKEISRLFQSFDTTVTTIPGVGPIIGAVILSEVGDISRFSSADKLAAYIGVDPSVNQSGEFQAAHAHMSKRGSPYLRRCIWMASQVAVQRDPMFRAYYEKKAAEGLKYMTIIGHVTRKMTAVVFAILRDHKVYEPILPTAA

SEQ ID NO: 65496 - protein, 433 aa, unidentified
MNASTSTPTTNFAAFIGIDWADKEHEIWLQPTDGSPARRSTLSQNPVAIQEWVSQLRQQFGGQLVALAIELSHGPLLAALLGVEFLVIYPINPKSLARYRQAFRPSGAKDDRSDAELLCEFLRHHYAQLKPWQPEDAQTRLLGGLTQVRRHWVDEVTGAVERVRANLKHYYPVILELFTEGLAQPMVVHFLQRWPNLKSLQAASQSELRKFFYGHNSRSAQLLDARLQLILKAKALTEDPAVLGIYQTDTLVIAELLGVLLKKIKEIQKQIAKLFAAHSDAFIFQSLPGAAQVLGPRLLTACGTQRERFAEAVALAQLSGIAPITVQSGQSEYQMFRFTAPQFMHQTFWEFAKCSIKYCLWAKAFVDQKIHNGMGFNAAVRALAFKWIRIIWRLWQNREAYDETKYLAGLRRAKPACVEPLITSVSSLDSALL

SEQ ID NO: 65497 - protein, 317 aa, unidentified
MKTVPFEQVILRGCGIDVHKDMVVATISGEGLKTETRSYKTFSSSLTELKEWLLSSGITHVAMESTGVYWKPVYKILECPDMKVWIVNARHIKYVPGHKTDKKDSAWICKLLLAGLLKPSYIPEREQRELRDLTRYRNKLIQHVSSEKNRIVRILEDCNIKLSSVVCSLDGVVANKLIDMLIDKGHVTMDDITCIYHKKLEASPELLYQACEGFIEPHHIYMLQTIRKDMEQTKAIIADLPCRIKEVLSPYENVMELLQKIPGLSRKTVEDLIAEIGVDMEAFPTEKHLASWAGVCPGNNESAGKKKVVEPPMATNS

SEQ ID NO: 65498 - protein, 416 aa, unidentified
MKKNSNSSVKKEPKARQAKAQRIVQREAKEVLAELVEKLRGKLEVKATSASPAEAGPRAELGPNMDRLTVGVDLGDQWSHYCILGLQGETLSEGQLQTRGAEVAEFFQALPPARVVMEVGTHSPWMQEIIAGEGHEVVVANPRLMEGSKRRKRKNDRIDAKKLARLGRVDPQSLHPIRHRSREVREDLVVLRAREALVAARTELINATRGLVKSMGTRLPKCSSPSFGQKVKDAIPEKVRAALLPLVQFADALSDSIQSYDQKIEELSSEKYGHTKLLRQVKGVGPITALAYVLTLENPEHFAKSRDVGPYLGLVPKQEDSGESQPQLGISKAGDTMVRKLLVGSAHYILGPFGPDSDLRRYGLRLCERGGKNAKKRAAVAVARKLAVLLHRLWVSGEVYEPLGYASSRVMAQQAA

SEQ ID NO: 65499 - protein, 420 aa, unidentified
MKAYNVNDFAALIGIDWADKKHDICEHPKNTKQYHYTVIKHKPEALHKWAMDLKLRYPDQKIAIVCELKKGPLIYALAKYDHLVLFTVNPSAVANYRKAFTPSGAKNDPTDAFIQVEMIKLHIDKLSVIIPESTSIRALAQLVEYRRSLVQDSVDLSNKITATLKNYYPQALEWFKEKDTFIFCDFISKWPSLTTVKKARKQTLLNFFNHHNSHYETVNNARLLSIKEAVPLTKDEGVIAPNQLLVEVLIAQFKVLLMGIEQLDKAIKQLYKKQQDKAIFDSLPGAGPQLAPRLLVAFGYNRERYTDASQMQKYAGIAPVIESSGKKTWTHWRYSCPTFLRQTFVEWAGFSIRYSFWAKAYYDQQKSKGKPHNSIIRSLAFKWIRIVFRCWKTKTPYNESKYLEALKRRGSPLLKFAINS

SEQ ID NO: 65500 - protein, 369 aa, unidentified
MATQLPVVGIDVSKATFDSQWGSQKGKRQQAHFGNDAHGFADLQAWILQHGVTQVHCCLEATGTYSDALAAFCFAAGHVVSIIAPHKMHAFRTSEGILSKTDKIDARLLASYGEQKRPGPWHPVSASAQQLKCDLDRLDELKSMQQQETNRLENHRLDAQARKRIQAHITWLDDEITSWAPLLEERFAQAFKQEHPQEPPQQKQTPGKKVKRPRKKTMQIAPIDAMMQVVGIGRLSALRMYAIFATLQEHASSEQMASYFGVVPHQHESGTSVKGKTRRRGGNRQARNWLYMCALTSKRCDPDMKQWAQELQARGLCKKAVIVAVMHKLARILFGLFKTNAPYDATKAFPMHYLKEKEETTTKKLAIAA

SEQ ID NO: 65501 - protein, 290 aa, unidentified
MTDTTIGIDISKDHLDACRWPADETCRVSNDAAGHRKLLRWIAADLAADLAADLAADLAIVAFEATGAYHGALERALHKAAIPCAKLNPARVRRFAEAIGTRAKTDRVDARLIARMAAMVEPAPQAPKPAGHAPLHELQLARTSLVRARTAARNRARHLTLPLLRRQHADRLRCIRRDLAAIDAAIAALIAADPEIARKAAILCSIPGISKVSAAAILADLPEIGTLEPAAVASLAGVAPITRESGEGKGQAKVGGGRRDLRRALYMPALAAARFNPNLEAVYERLRACE

SEQ ID NO: 65502 - protein, 385 aa, unidentified
MLYIGIDIAKNKHDLACINENGEIMIANFKFANSYQGFVQLKLRLEQLSPLTQDIQIALESTGHYNYNIVTFLRELGYNVFTYNPLIIKEFAKSQSLRKTKTDRKDALLIARKLRSDVTPERYQTDSIVDELKELTRYQNRLIQSRSKCKNLYVRLLDIIFPELHAIVSNLHNQFIYDLLTHYPSPQKIARVRFSSLLKIKRLTADKAHQIQEEAKKTIGKDSPALVLELGQLIETIKHYDKQINQTQEEINRLMNDLNSPITSITGIGTRFGAIILAEIKNIHNFKNPNQLQAFAGLDPAIYQSGQMDNTGHMVKRGSSYLRYALIQAAKLISIYSPHFKAYLKLKISQGKHYNVAVTHVAKKLTRIIFHLLKTNQQFDETKLR

SEQ ID NO: 65503 - protein, 343 aa, unidentified
MQTITTIGLDIAKSVFQVHGVDAGGQVIVRRQLKRRYVLTFFQKLSPCLVGIEACASSHHWSRELQALGHTVRLIPPAYVKPYVKRQKNDATDAEAICEAVTRANMRFVPTKTPEQQSGLVLHRTRHLFIRQQTAVINAIRAHLAEFGIVAPVGRHGVEELLNVVADPNDTRVPEIARACLSAFGAQLHRIKEQILEFDRLIRAWHRSNEMSMRLEEAPGVGPVLATALVATVADPKSFRSGRNFSAWIGIVPKQHSSGGKNRLGNISKQGDRYLRGLFVAGALSVIRYAKIHGTNHRPWLTALLARRPTKVAAIALANKIARMVWAMMAKGERYKEPVALAR

SEQ ID NO: 65504 - protein, 309 aa, unidentified
MNNVVVYIGVDVAKASLDVAWAEHSRRFANNKSGLGALTKWVKQSPLAVHLICEASGGYERGLLDAAQQNGIKVSLVQANRVRQYARTAGILAKTDKVDARVLCAFGSTMQPEPRAPLSAQQKQLRELETQRRHLSRMLVAEQNRLAQLNDKALQRLTRSLLATLKRQMAAIDARIAGLIAQDQSLKEKAQKLTAIAGVGPRTAVLLLAQIPELGTLNRAQAAALAGLAPFNRDSGTLRGKRTIFGGRRALRCGLYMAALVAARHNLILRNFYQRLRSNGKPHKVALTAVMRKLLLALNHTLKPAASFA

SEQ ID NO: 65505 - protein, 403 aa, unidentified
MMCLPLAAGAGPATATGLIRSPSAPRGVTHHSLAERILTRAGDRQPTPVEGGLRKMLADEVDNVIGVDTHRDTNTAQAVAAKTGAIGPHTTTDADSPGYRRMLAFADEHTPGSRVWAIESTGSYGAGLTAYLHEHGERVVEIDRPKRPARRNGAKSDELDALRAAREALGRRHLAEPRRRGEREAIRVVLRTRQGAVRARVIAIGQLKSLIVTAPESLRSSLRRRSDKDLAGCCARLRICSSQSVEHRMTVRALRSTARRALALEAEAAELEAELRPVLEALCPQLLAEPGVGTISAAELVNAWAHPGRIRSEAAFAMLAGAAPIPASSGQTVRHRLNRCGDRQLNRALHTITTSRLRHDARTRAYAQKRREEGKTPREIRRCLKRYVARQLFRLLEAEAKMA

SEQ ID NO: 65506 - protein, 394 aa, unidentified
MKLVGIDVGKNSHHFCVMNKETGEFNVAPSSFSNNKEGFDFLINSLKPYSKKSILIGMEDTGHYHVALLKFLLSNGYTVALINPKTTDLTRKMEGGITKNDKLDTITICDVLDTPERKKQYRITKVDRFDLYEQRQLTRHHHNLKEELNVYCNRLQKSIDLVFPEFNTLFSSKYSIVYMNLLKTFGSAEAIASTDIRTIRKCFEIKGRGNRISLTPEKLKECAKNSIGISSEVETIQIKHLVSQITLIKEQIAEIDKKIKESSITNNSPILSIPGISHFSGTSILAELGDIGNYSKPSQIIKFAGVAPYHYESSQYNAQHTGITKKGSKYLRKTLYQIILTVINNNPVFKKYYLLKISQGKGHRCAQGHCIRKLLRIIYHLLETGQSFDPALLR

SEQ ID NO: 65507 - protein, 339 aa, unidentified
MKNKKYYIGLDVHKEKTTYVVRDKLGNVLLEGEAATLYTELYERLKPYLKSSVIGVEACTSYYTLYQSFLKNNYEIKVANTMQLRQLITKNDSLDAKRLSEMLRLGTFPCSYIPDEDIQRLRSLVQIRHSLMEEKTRCNIRIQAFLDRNGISMPSYKAFTKKWRYALMQYMGSGIVSLELRYEYDHFVFLEKKIEQLDQEMTGYTKKHWKAEYSNIQSITGFGPLLTCYIIAHILPIERFSSNRKLRRYAGVIPTFHESGGKSSKGHIPKTSSRKLLRWALVQAANTAGKTNTKLGWYYRMKKKQKKNAGIAKIAVASSMIDIIYKVLTTKKPYTPTVC

SEQ ID NO: 65508 - protein, 311 aa, unidentified
MTSVIVGIDVGKSNLDVAVAGNGSVREWSNDERGRRVLSGWLSEQGVELVVVEASGGIESALVSELVEQSIPVAVVNPTRVRSFARAAGQLAKTDPIDARMIARFGATMKPKAKAIRDQAQLALSQQVTRRRQMVQMVTAEKNRAQTALGAMKEQIERHIAWLQSEIEQLEHEINQAIMADPAWQETSERLQSMPGVGAVTAATLVAELPELGRLNRQKIAALVGLAPFNHDSGKRRGQRRIFGGRASVRTVLYMAALSAIRCNPVIRAFYQRLVDKGKAKKVAITACMRKILVILNTMAKTGQAWRPPTS

SEQ ID NO: 65509 - protein, 342 aa, unidentified
MKRKIYIGVDVSKNWLDLAYYDGVEIDWKSGHIRVDNNKSGYRRISLWMKKLQIAKESALFCMEYTGLYCYNFRVWLESEGIIYGMINPRKMHRFEPDLGEGEPALDRIKTDEMDSFRIAMYCEKHSRKIKSSPSRLPGPAFFNLKRLLAERRQYVKHSVLYKQQLHDISAYDTEESCKRKQAGLKSLSVLRRQTDIEMRKIIKSDEAIYKNYKLLCSVIGVGLVIAVETIVLTENFTAITNPRKYACYVGIAPGRKESGISIRGGDHVSKKGFKQAKANLSLVALQAIRHDSNIRSYWLRRKADGKHTGVVLNAIKFKMILRMFAVIKRQKPYVEMDAYMK

SEQ ID NO: 65510 - protein, 385 aa, unidentified
MRGKSFIPKDYDVFTGLDVSKKSMSVTFTNHQGLIRSLNMPHKAEPLLHYVRKHFPDQKVAFVYEAGPTGYGLYDGLAAQAYPCLIAAPSMIPRAPGQRVKTNRLDSKALSESLRGGQLKSIHVPSPTYRQLRHLTQLRDVLVSELAGMKQRIKSLLLFEGIEFPPAPPGSQWSFMVKDKLRKLPCSGTVRFKLDQLLDSLEFNEKQVLKTITEIRRFCRNDPELSQCIEYLMTLPGIGWITASQLLARIGDWRELNNIRQLGGFLGLVPTEHSTGERVDRGSITRTGNERLRSKLIQASWSAIRQDGELREFFRSVCRKHPREVASRVAIVAVARKLSVRISVVLMKQRPYEVREKIHSAPLTQEETSPQGTTRRLAEPGEKNS

SEQ ID NO: 65511 - protein, 407 aa, unidentified
MQVIYPRCAGLDVHKQTVVACVRIAGNGPPLQEVRTFATTTSGLLSLADWLDSFGVEHVGMEATGVYWKSVWHVLEGHFELVLANAAHVKNVPGRKTDVNDAMWLADLLAHGLIRASFVPPVAVQELRTLTRTRKQFVRERSAHAQRIDKVLEDANLKLSVVLSDILGKSGRAVLQAIVDGHTDPERLASHVTTRVKASRAELLEALRGRVSTHHRFMLKLHLGHIDALDRAIADIEKEVGLGLEPFRQAAKLLSTMPGLSEVSAHVIVAEIGIDMSRFATAGHLLSWACLCPRNDESAGKHRSTRLRRGGKWLKTTLVQAAWSAVRVKGGYLQAQFHRLRARRGAKKAIIAVAASMLTAAWNMLRDGTEWHDLGATHFDRADAHKTANRLIRRLQQIGFAVQITPA

SEQ ID NO: 65512 - protein, 411 aa, unidentified
MERLIERCAGLDVHKASVTATVRVPGDQGGRRAETRTFRATTAGLVLLGDWLASFGVTLVGMESTGVYWKPVYYLLEDDFECWLLNAQHLKNVPGRKTDVADSVWICQLVEHGLVRPSFVPPKPIRELRDLTRYRKALTAERTREAQRLHKVLEDAGIKLASVASDPLGVSGRAMLEALVAGTHDPQVLAELARGRLRAKLPALREALEGRLGAHHGLLVGEMLARIDQMDETISRLSAEVARVAAPFSPLLGLLVTIPGVSRRTAEVMLAEIGPDMGRFPTAAHLVSWAGVCPGNNESAGKHGSGRTRKGSKWLRVALVEAAHAAARTKNSYLAAQYARLRGRRGPKKAALAVAHSILVIAWHLLSRGEPYTDLGADYFVKRQSHQAYRDRLVRQLERMGHKVTLEPTAA

SEQ ID NO: 65513 - protein, 355 aa, unidentified
MEYIAFDAHKHYTLASVARPDGRLVREQRLAHERGAFQQFLARCEPGSPVALETVGNWYWIVDEIETAGCVPKLVHARKAKLMMGQINKTDKLDARGLNTLQRNGTLPTVWIPPGELRDQRELPRTRMALVRQRTQLKNRLHATLAKYALHNLEVTDLFGVRGRQLLRQRCELLPPHTAYATRELLEQVESLDRQVTGFEHRIKSVFKPTLPIQLLTTVPGIGLTLAVVIALEIGDVTRFPTAEKLASYAGCTCRVHASGDKMRYGRLRPDVNRYLKWAFIEAANAICLMRRRHPHRHVSRLYERIARRKGHPKAIGAVARHLAEATFWLLSKQEAYREPNRQPFRRQGISATSP

SEQ ID NO: 65514 - protein, 411 aa, unidentified
MKFIGLDWKDKGYTTRIINEKGTDLSGSFEVEKNREDFSEFIHKVRKYCDGDSNVLFGIERERDPIVEYLLTLGYKVYLVCPNMMKSLRKRYSSTGKYNDEFDSYIIADTVRTDRNRLTQIEPRDDKIRKIEFLLRHRDKTVDDKRRLTNRLTCYLKEYFPAFLDFFSDITCPTALSLLKVYPTYEDTKELSKEDIKAFLRKHHYHKESGALRICKAIKEGQVKIDTTVIQERSRSAILLIKRIELLNEEIKEYENDLKETTENDKDAEIFKSLPGSGDTLSPGLMVIFGKKRSRYENAEEINSLSGIVPFTKQSGNWETHLFRFGCNHFYRNIITRLAYCSLTKSEWARSYYNEKRAEGKSHYHALRCLARIWIKVAFSLWKKRERYNEDKHMAAVQRHKIRNRLARKSA

SEQ ID NO: 65515 - protein, 452 aa, unidentified
MSRRRKNNRKTGAPVLHCLNPHAAGVDIGATEIYIAVPVGRDPQPVRRFSTFTEDLRAAAAWLKSCHIETVAMESTGVYWIPFFQILEAQGFSVFLVNARHVKNVPGRKSDVSDCQWLQYLHAVGLLRGSFRPEQAVCTVRSILRHRNDLVQMASSHVQHMQKALDQMNLQLHHVISDITGMTGIAILEAILAGERNPHSLATLRDRRIKASADTIAKSLVGDYRREHLFTLRQSLMAFRHYQELIGACDTEIAQYLEAFESKVDPCEGPLAKSQEEQKPNSDQPHFDLRSHLHRIFGVDLPRVPGINVLTTQTLLAEIGPDFSRFAQGPAFTSWLGLCPDNRISGGKVLSVKTRKVKNRAATALRMAALSLHHSQSYLGHFYRRMRAKLGAPKAITATAHKLARIIYHMVTAGQEYHETICSQNEMQHRQRLEARLRKQARELGLQLIAAS

SEQ ID NO: 65516 - protein, 592 aa, unidentified
MGGAVRITRRDLTAKDLRAAAGREKDGSAARRMLALAMVLDGVDRKSAAESCGMDRQTLRDWVHRYNAEGLGGLHDLKTPGPKPKLTAEQQAELARLVEAGPDPARHGVVRWRRVDLRDELERRFGVALHERSVGKVLAKLGYRRLSVRPRHPQADEEAQEAFKKTSPRRSRHSFPTTPRTSRSKSGSRCYEDGLSRYFGSPNQSDGAATMQTIDTVNPTILLAIELSASTWLVAARVPGLEKPHLHRIDGGDTAALLALISSLRARVARRLDATIGIVCCFEAGRDGFWLHRLLTAHGVVSHVLEPTSILVNRRARRAKTDRLDAEGMLRVLAAYLRGDHQACSMVRVPTPEEEDAKRTHREREKLVQERLRIENRIEALLFTQGIRKRPSLRSWERDLAVLRTGDGREIPHHLRAELDRLRRRLVMTLELIREVEAERDQAAKTKPQDQACHKIAALCRIRGIGENFAAVLTREVFYRSFDNRRQIASYVGITPMPYQSGGMDRDRRISRAGNPRARTTMIQLAWLWLRYQPGSELAEWFRERVGTLAGRTRRIAIVAMARKLLIALWRYAETGVIPAGAEIRAETTVAA

SEQ ID NO: 65517 - protein, 345 aa, unidentified
MTEAYDGRQVVGMDLHRRRSVLVRMTMDGRKLETARIANSPAALRAVIARAGENPQVVVEATYGWYWAADVLEAAGAEVHLAHPLGVKAFSYRRVKNDERDCADLADLLRLGRLPEAWIAPPPVRALREITRYRHKLAGQRTSCKDQVHAVLAKCGIPVTHSDIFGRGGGIWLDGLPLPQPYAGKIASLRALIGVLDSEIARLEEQAAAMLAGDRGYAAIRQLPGIGPVLGAVITAEIGDITRFRTPGQLASWAGLTPRHYESDTKVIRGHVSKQGSRMLRWAVTEAIQRQPAGTRPQQVKDAIITRRGPEARSIAKTAAARQLLTLVFYALRDGHIRRATSQAA

SEQ ID NO: 65518 - protein, 325 aa, unidentified
MTSHHPLGLDVAKRSFDAALLLDNDRYRHRQFTNSPTGFTQLAAWLRQHATGPVHAGLEATGTYGNALALFLHQQGLRVSVINPTRIHAFGQSELSRNKTDPLDAALIARFVATQQPPPWTPPPPEQRQLQALVRRIEALQAMRQQERNRLDLEADDSLVADSLREHLAHLDAQLRGLQQRLRQHVRAHPGLQHQNDLLQSIPGIGETTALKLLAEMPALAQWSSARQAVAYAGLNPQQRTSGSSVRGRSRLSKIGNARLRRTLYLPAVVAMRYNPLLKKFAQRLRERSKPPMVIVGAVMRKLLHQAYGVLKHATPFNPNYATTH

SEQ ID NO: 65519 - protein, 409 aa, unidentified
MATEIPNIIVGVDTHADTHYVAIIDEHGKHLAAEEFLAVGSGYRKILSFITHSGLVIGVGVEGTDSYGAELSRVLRSAGLPVREVNRPNRQARRLRGKSDPLDAYQASESVLAERGISTPKTKDGPLECLRVLRAARSSAMKARTIAINQIKGVLVSAPEPVRSRFRALTNAQLVPALERSRPMGNLTDPDTATALTLKKLAARYRFLEREILDTDAGLAEILRDCAPLLRDVPGVGIEVASQLLVTVGDNPERIATEAQFAALVGVAPIPASSGKTSRHRLSRGGDRAANAAIHHVVVSRLATDSRTREYAARRTAQGKTKKEIMRCLKRYVARELYRQLTNPQAAPSITDLRTAREELHITLREAGGHLNTWPGTLSRIERGLSRDDNLAGQLRDWLHEQKEAQKIN

SEQ ID NO: 65520 - protein, 341 aa, unidentified
MSKPNTYIGVDLHKKTCYITVMSYKGTIKKQIEISTDTDKVSKFFKKYTNAQIAVESTMNWIPFYENLESLGCQVVLSNPLQTKAIASARIKNDKVDSKVLADLLRTNLLPTAYIQPKDIRDLKELVRQRVHYVGIRTRIKNKIHSVLFKTNIKHCFTNLYGKAGMQWLKQLELRSIYKNELNRYLETLYLLDKQIDELSKTIQNTAKLDYDCKLLMTIPGISYYSALMIKSEIGDISRFPNANKLCSYAGLIPSTYASAEKIRHGKITKRGSKWLRSALVNAITSGCRNHNRIASFYKKLKKNKGTGKAKVAAGRKLCTIIFAMLTDQTPFRNFVSVKQR

SEQ ID NO: 65521 - protein, 313 aa, unidentified
MFVGIDVAKDTFDAALGVGGEVVQFSNDNAGFEALLARLRGFDVPLVVMEATGGYQAALACALQAGGYTVAVVNPRQARDFAKAMGYLAKSDRIDAGALSQFAQTLNGHPKRDSFIKALPDPEREQLAALVTRRRQLVEMLTAERNRLAMSHRAARKSIEAIIKALQRQLDDLEGSMANHIAKHHADLAALISSAKGIGPTTAATLLGELPELGHLSNRRIAKLVGVAPLNRDSGPQRGKRSVHGGRANVRAALYLPTWVAVQHNPVIRKFYSRLIAAGKPKKVALIACMRKLLTILNAMVRSGQAWNDALHT

SEQ ID NO: 65522 - protein, 357 aa, unidentified
MKIVGCDLHARQQSIAMMDSETGEFVEKTLLHKGSAVRDFYAALEGPVVVGIEATGSMQWFLELLEELGIECRVGHPAKIRAAETRKQKHDRRDARLVLDLLLRDRFPEIWMPSTEQRDLRTLLRDRHQWVKMRSRLQHTLQAIALNHGLRQGSRLWSQAGQTALQALPLPAYSSQRRAELLSLYIQLQKRIQKLDQEVEAQVQQRAQAHRLLTHPGVGPVTALASEVFLGDPTRFANGNKVGSYIGMIPCEHTSGKRQRLGKMTKQGNALLRYLWTEAAMHAVGKDPELKRFYRRKLIQKGMGKARIAAARKLGIRLWIMMRDQIDYQEFCRRGKLRQSGEAHAGMPDFNSGPALQ

SEQ ID NO: 65523 - protein, 379 aa, unidentified
MEISSSTLPAVAAERATMFVALELSKSSWLVALHSPVADKVSMHRFVGGDVAGLLALIARKQTQAEARLGRTIRVLSCYEAGYDGFWLHRLLCARGIDNRILDAASILVDRRSRRAKTDRLDAAGLLRTLMALDRGESRVCGVVRVPSVAQEDARRRSRERTRLVVERGQHSNRIKGLLMTLGVRDFEPTRRDWQERLGGLRTADGRELPACLKAEITRECRRLHQVIVMIAEVEAEQAAALDAEEGRAAQLIRLRGIGLVSATVLADEVFYRDFRNRREVAGYLGLASSPWASGRVQRDQGITKSGNPRARRTAIELAWLWLRHQPGSFLTQWFRQRVGTTRGRMRRIMLVALARKLIVALWRYLSDGLIPDGAELKA

SEQ ID NO: 65524 - protein, 350 aa, unidentified
MKKRILKFSLGIDVAKDKLDCNLSYINELQEVKTKARRKFNNTPAGIRDLIIWSKRHWKEVAPLIAVLEATGVYHENLAFCLDDNLVDFAVVLPNKAKKYMESLGYKSKNDTIDAQGLARMGAERALPKWQRPSKSIYMLRSLCREHASLQDELTEIRNQLHALDHAYMKDDRCYKRLEAKLKFIQKQEKINKKDIEKTIKNDEELSSKVDNITAIYGVGLISVATVIGETNGFAQVEKQGQLVSYAGYDVVEKQSGKRQGKTRISKKGNSHIRRVLHFPALNVVRYGTEPFASFHQRLMDNGKLKMQAYTAVQKKLLVLMWALWRKGERFDPKYVNPNLERIQKGKLFR

SEQ ID NO: 65525 - protein, 355 aa, unidentified
MDSLKYVGLDVHRDTISVVVLEESGKMVMQTTLATQSGALLDLVGGLRGTVHLTFEEGTHSAWLHDLLVRRVARVVVCDPRQNALLKAGNKSDRIDARKLAELLRAELLSPVYHGETSTVTLKHLCRSYAALTEDTTRVKGRIKALYRSQAISSAGKKAYGRRHRDEWLVQLTQAGMHRRAERLYEELDALLSLRRAARRELIVESRKHDAVKLLCTVPFLGPIRAAVLVGRVQTPHRFRSKRPFWSYCGLALETRSSADYRFQEGQLVRAKKPLFIRGLNVNHNHDLKNLFKSAATAASAMPGPFRLFYENLLTKGMQPAMARLTLARKIAAIALCVWKKGEPFNAEHLKPQAA

SEQ ID NO: 65526 - protein, 359 aa, unidentified
MRKPKQRKPNDLSRSLAALDVDHTLIAVVEMSLSSWLVAGIVPGVERQPLKKLKTDACALLELLHRWRAEALRVGHKITRVAVAFEAGRDGFWLARWLKAHGIEAHVIHASSIAVSREHRRAKTDRLDTDLLKRSFLGWLRGERDHCKTVAIPTLEEEDAKRPNRERESLVGEQSRLVNRMKATLVRLGIRGFNPKLKRAARDLEALRTPEGAPIPPNTLAELKRDMERRRFICDQIRKIEQARIERLQRAPNTGPNAMVRLLARVVGIGVETAELLVHEVLLRNMRDRRAVARYGGLTGSPDRSGTISREKGIARSGNARVRRGMVQLAWRFLLFQKDSALAQWYRHRTENAPRSRKT

SEQ ID NO: 65527 - protein, 326 aa, unidentified
MEQEEKLSCLGIDVSKAKLDVALLRDGGKFRDKVIGNDRKGFEALLAWCTKHGVARGHVCMEATGAYWEELAEFLVDAGFEVSVVNPVLIRKYSESLGERSKTDKIDARVIAKFCAERRPERWQAPSKTVRGLRALVRRRDALIELRTEELNRRDSASEPRVLESINQVIAHLNGQIASIEKQIRDHIDSDPTLRDQRKLLQTVPGIGKVVSAMLLSYYGGDLRFANSKQAVAYAGLDPSLRESGTSVRSKPRISKKGHSNIRGTLYMPAVCAMTKSAWAKAVAKRLANAGKPPMLIIGAVMRRLVAIAYGVLKSGQPFNPALHAA

SEQ ID NO: 65528 - protein, 471 aa, unidentified
MAGRRKSRQASPEQLTGEPVELSDEPAEVIARAAAIDVAKDSGMVCTRVPHPDKPHRRIQRVWQVSARYAGIAALMDELAAMGIQRLVLESTSDYWRIWYYLAEAAGLEVWLVNAKDARHLPGRPKTDKLDCVWLCKLNERGMLRRSFVPPEAIRDLRALTRLRSRLAQDQARHQSRIEKILEDALLKISAVISDLMGTSGRRFLAALVAGERDPAKLAALGDRRLKASAAELEAALTGRFRDIHALETGMLCELIDDMNAKIARLDAEITARLARLPGIAPACAGCGEIGGGHAPACPRAGTPVLPVIERLDELTGIGIAAAQVIVAELGTDKTTFPTPGHAAAWAKLTSRTIQSGATSKNGRAGKGNPYLRAVLGRAAMAAAKTDTYLGERYRRIARRRGKQKAIVAVSRTICEIAWMIITDPSVRFSELGPDYYARLDAGRQTRNKIRGLERLNPGMKVTITPATHAA

SEQ ID NO: 65529 - protein, 534 aa, unidentified
MRTRNRRRRKRTLPKLKKAPNSLQPRIEEIGAQHFGILAVDCAKARFQVLLGNFCGTVLMEPQEFDNSGPDLEHLVETVQHEVRRHGLKDLLVALERTGRFHHPVRTVLRQHWTVKMIHPLATKRLRQPADPGNKTDATDLVAILRAAIAGYGTDEEELSERWAAWRLVGREREALVRHRACVRIRIQDRMEALLPGYLALFADPWKMSAAFRVALDYGSAAALAQAGPEALLAHLHQAGLSMRRDTLGRILLWAAKAAPGDPSGELLRRLVADERTLLTALEGQIRAYERDLLAHLVDTPFLLLLSLPGIHVVSAASYAAELGPIEHYPHPRKITGRAGLYPSRYQSDETDYADGPLVHRRNARLRDALMEIAHNLVRCNTYFKAWADVRRKAGWPEKPLRIAVASTFSRISYAMVAGCRVFEHPAIRGRDAILPKVTAFILDHDIAPEAARDLLRRAAQQIPPEARPAEAEALRPELARRHRRGSIWTRGTGPQLLADILPELLTWLGLPVAPQPERNPSPPTNEESTGTPH

SEQ ID NO: 65530 - protein, 398 aa, unidentified
MLSIGIDVSKGKSTVCGMKPGGEIVYTPFEVQHTREGMSELVSLLRGSGEEVRVVLESTGSYHCPVVAALLENGIFVSVVNSLRMKRFCSQSIRRVKTDQIDAMQIALYGLAYWQELQPTRLPENTYRELQLLARQYYQMTSLLIKAKVDFNALCDQVLPGMQELMSDHAGRHKLSDFVLRYHHTAHILKMGETRFRKDYCKWAEKKGYRNHERMAALIFATAQNGIPVLPDAPSTQIVITEAIRVLHTVEASRDAILTQMQALAKTLPEYSLVREMPCIGDTLAPRLIAEIVDVRRFHSKRALIAYAGIDAPPYQSGKFSANNRHISKRGNRYLRKTGYEVMQSYVMHKPANDPIFTFIEKKRSEGKSGKLAMVAGLNKFLRVYYGKVTELYRSLPQ

SEQ ID NO: 65531 - protein, 344 aa, unidentified
MPTEARQSVYAGLDLHKRNVYCGLIDQEGQPIYRRRLPAELAVILQALEPYRAPMRAIAVESTFNWYWLVDGLQAADYPVHLANPAAMVQYSGLKQTDDESDALWLAEMLRLGILPEGYIYPKAQRPVRDMLRRRMLVVRQATQALLSLQSMVTRHTGQSVGAATLQAWTLREVRESFADSYSQQTAAAMLELLREQRRIQHRLEKQVLAVGKLSGPFQRLQTIPGIGPILGLTIALETGPITRFASAGDYASYCRTVGSRCESDGKKKGENNRKNGNKYLGWAYVEAAQFAQRFSPRAHAWFARKTARAVRVVAVKALACKLAKAVYYMLRDEVDFNESKLFG

SEQ ID NO: 65532 - protein, 421 aa, unidentified
MLGVGIDWAEEFHLVALGRPGEGVFDIARVEHRPADIDALVARIASIEADPAEVRVVIETSHGMLVERLLDAGYVVVPVNPDLVARRRGPAKKKDDPEDARIACLIALDRFERLRVMVPHGEEAGELRAITRDDERAARDERRLLNRLRADLIATFPAALAIASDDMGAPTFLRLLERWPTAEALAGASQDELVAFARAGRHGWPERFAAQVAAAVATSHFVPRSYLVRAKEGTIRLLATQLLALGAQRRAWERRMGELLLGAPRTGRKKQPKEGERGPTVPGGEIYLSFPGLGDRLAARVAAEIGDISNFDTPNGLQCYAGKAPVTRRSGKHELVVANRLACNGYLRDAVQHWAFCSLVRSGWAREFYDGQRSRGKGHHAALRALGNRWLEVLWHCLSKNLAYDEAVHVANRNRALAKAA

SEQ ID NO: 65533 - protein, 412 aa, unidentified
MQVMIERCAGLDVHQETVVACRLLGSPDVRPTKEVRTFATMTRDLVALRAWLAEAGVTHVGMESTGVYWCPVYAVLEGHFDLIVGNARHIRNVPGRKTDVKDAEWIADLVRHGLVAKSFVPPQPQRDLRELLRYRRKLVESQAAERNRLLKLLETANIKLASVASDVFGVSGRAMLKALIAGDASAEEMADLARGQLRRKRSALILALDGHLEEHHRFLLTLQLRRLEAAEQDIAALDERLAVKLQPYGEQHTLLMQIPGVDWLVAAVLIAEIGTNMSVFNSASHLAAWAGVCPGNHESAGKQKTGRARKGNVHLRTILVGAAISASRTKSSYLKDKFHRLKARRGAMRAALAIAHKILVAAYHMVATRTPYRELGDAYLDHIGQTRTVANLKRRLERLGYRVSLEPNAAVA

SEQ ID NO: 65534 - protein, 368 aa, unidentified
MGTIRLVEGIEQAVTPAPRRPAAGSEVWCAIDIARTKLVCCVRWGGAEQLRLSTPMGIDHVRALVERYRDCRVHVAYEACGFGYEMAWWLQEQPGVSVTVIAPSRVERAPGLIVKTDRLDAGKLARKLEKGDLKGIYVPSRTVHEDRSVGRAYAQCVKERKRAQVRIRSLLQEHGQLGPLPLQGWRVYSQWLATLDLPAPVRPCVEAHLQLRATADLQARRLQGALRALAGSEPYRDLVRELCTQSGVGMYSAIRLVLELGAIDRFPTTDSLPHYVGLTPSQYSSGDLDHRGHILKIGPGCLRALLLQCAWAAVRQGTDTELIAVFERLAPRIGRKRAIVAVARRLSIKLRRLWWQVVHPPLTATAAA

SEQ ID NO: 65535 - protein, 342 aa, unidentified
MSTTTFVGLDLGSSHCQQTVLNADGALRLSRSIATSEHNLRSAFAKLDGDVQVHLEAGELSAWVASIIEPLVQSVIVSHPRSLAWIGKDSQKDDAIDARKLAELLRLNHVHQVFHQTDDSRRTFKYLVTHYEQLSREQARCKSRIKARLRTLGIIRKDARLFSMSGQTALLNEIESTAVKQMMAQSFAVLNQMLASLAAAKAAMLESAKQFREVKLLQTAPGVGIITACRFVAYLQTPLRFSNKRKLWRYCRLGVTRRESNGKRLAHPRLDSAGVGSLKDISRKVFEAARRTKSDNSFKRFYEQSLATTKNAVHARLSTQRKILATLRAMWMSNQPFRHDLS

SEQ ID NO: 65536 - protein, 322 aa, unidentified
MKMANTTTITAGIDTSKDKLDIAIHGQSGGFIVENTAGGWQTLAARLRGAGVGRIGIEATGGYERGAMRYLQKARFDVVLLQPLQVKAFARMRLRRAKSDKLDAALIADCTHTMDAYNKMPPDPRFDALADLLTYIEQIEEDIVRFKTRLEQTRDGRLRKNIKDQIKHFKKQRVAELRRLRDQIFAHGDLAGRYKLLLSIPTIGARTALSLVVRMPELGLVSREQAAALAGLAPFVHQSGKHKGETHIGGGRARLRRSLYMAAFTGAFHWNPALMALYKRLTARGKSHKCAVIACARKLLIFANTVLARGTPWEEARPIPAA

SEQ ID NO: 65537 - protein, 423 aa, unidentified
MAYRIAGIDVHKKKLAVVVADVEVEDEYSFERCWYGSNPEQLQRLAEWLIEQRVEEGVMESTAQYWKPLWSALERYWKPSCQNREGAGKMSGTLHLAQALSNRGRRGRKKDFRDAERLVKRLVSQELILSFVPDTQQRLWRTLTRTRYQRTRDKVRLQNQLEALLEEAHIKLSSLVSDLLGVSARRMLHALAEGETDPAALAALAHQRLRATSAELRDALGACTELNPVYRRLVRLALDDLQLIEQQIGQLDQEIASLLREHQDAVQRLAEVPGLGVDSAQQIIAEVGAKAATFASAKNLVSWVGACPGDEESAGVNRSKRSPKGNRQMRRILNQAANAAVKHKGSIFEIVYRRLVLRLGHNKTIGAIAHRLCQLIWIILHNGVRYEERGPSVCEKAKRARTSRMIRTLRTLGYRVEPVVIPA

SEQ ID NO: 65538 - protein, 339 aa, unidentified
MNPIPVGVDIGKNVFQIHYIAPGSGEIINKPLKRANFLEYFANLEPCLIGMEACGGSQHWARSLSKLGHKVRLMAPRFAKAFNIGNKNDAADARAIWLAVQQPGNKVAVKSEAQQAVLALHRLRQQLVKFRTSQINCIRGLLGEYGEVMPASRRAFDANIAAVLDRVSQHVAAPLIDTLREQWSALTHLDEQIARIEQRLKQWMSTDSSAQAISAIPGVGLLTATAAVATIGDASAYKSGREFAASIGLVPRQVGSGGRTTLLGISKRGDAYLRTLLVHCARVISVQLRSKHPWIEQLLKRRPYNVAIVALANKLARVIWAVLARGRPYQQDFVSTKPA

SEQ ID NO: 65539 - protein, 363 aa, unidentified
MRFYGEQRRFYCGIDLHASKMYVCVLDEQGNVVLHRNLRTEPEALKRALAPYRASLVVGAECMFSWYWVADWCRQEGIEFVLGHALYMKAIHGGKAKNDRIDSEKIARLLRGGTFPLAHVYPKEMRGTRDLLRRRNLFVRRRAELLAHVQNTFTQYNVPTASGKGRDRLREGDVGAAFEDASVQVMLDADVEVIEQLDETIARLETHVLKHAKVHDPARLHLLQTIPGVGKVLSLVMLYEIQDVDRFENIGQFVSYARLVSCAKESAGKKQGSGGRKIGNAHLKWAFSEAAALMIRSSPEAKAFMEKMTRQRGKARAVALVAAKIGRAVYWMMKRKQPFDARKLWKSSLPKGVREMEGAAMKG

SEQ ID NO: 65540 - protein, 412 aa, unidentified
MDVVHERAVGIDISKRDAKVCVRVPGKKAGTFTSTVTTWGSTTAQILKLREFLVQQQVTVVVLESTSDYWKPFYYVMEDSLPVLLVNAKNARNIPGRKTDVSDCAWLAQLGAYGLLRASFVPPEPIRQLRDLTRARTIATQDRTREVQRLEKFLESSGIKLSAVATQLTGASSRAMLEALVGGERDPQVLAGLAKGRLKAKNAELVQALAGRFGDHDAFMTRSHLEQIDTLTDRIDQFTARIEEAMAPFRHIRQALMTIPGASGTVAEVILAEIGADMSVFATAAHLASWAGVSPGSNQSAGRVKSTRTMPGNKRLKGALGIAALAASRSKKNTYLAVKYRRIAARRGRIKALVAIEHTILIAVWNMLTTGEDFTDLGVDYYLRQDPEKATKRAIRQLRTLGYEVAITPAAA

SEQ ID NO: 65541 - protein, 373 aa, unidentified
MGRIASAAVAVVEIVAGVDTHLDLHHAAVISLSGELLGTRSFATTRAGYRAMLAWFRSYGEVIRVGVEQTGTYGAGLTRHLALAGIPVLEVTGPDRAERRAKGKDDTLDAIAAAKAALSGKRVSVAKDRAGQVEALRVLRTTRKTAVKCRRATLQQLRNTITAAPEEVRDQVRNLTRMQLLRTCAAWRPDTLAFRDPAMATKIALRSLARRLLDLNDEIAELDRLITPLVTELAPNLLEKEGVGIENAGEMLVTAGDNPDRLRSEPGFSMLCGSSPIPASSGKTIRHRLNPGGNRQANSALHMIVVCRMRTDQRTRNYVTRRLAEGKTKREIMRCLKRYVAREIYHALTAPATSAPAEEKTLARTTKPTSKTT

SEQ ID NO: 65542 - protein, 438 aa, unidentified
MSNKVIFNLDELFISVGIDVGADFSWMSIALPNQQFVGKPYKILHNSIDSLTTAVSKIKEAEELYSLESRIFLESTGIYHYPLFCYLRDKGFNCSVINPIITKNSTNMNIRKVHNDRFDSKKASLVGLKPDLKVSLMPSDLALNCRNLCREYYDLMDNRSAYVNKLQGELRMAFPQYLGIFSKITINTSLSLLETYTSPNAFIEADKQEIIDVIKSTARFGLTYAEKKYNAIIQAAHDANEFGYIIDSNIKRIRLCISFIRKYDEEIASIMDALHELVDSNEDTDFVKQIHLIETFKGAGFLSAISLMGEIGDFSAFSKPKQLFAYFGLDPAVKQSGKFEGTKVQMSKRGSAIARRVIHILTLQSISTSRNGEAKNPVLRDYYLKKCEAKPKLVAMGAVSHKVCNMLFAILRDNKPFEIITPQEHIKQYNAAKCDVAA

SEQ ID NO: 65543 - protein, 316 aa, unidentified
MSKSSLFVGIDVAKAQLDVALRPTGERWAVPNDDTSIAVLVSQLEAAHPTLIVLEATGGCQRAVVAALAAAGLPVVVVHPRQTRDFAKATGQLAKTDALDARALAHFAEAVRPTPRPLPSAQEAGLRALLARRRQLVGMRTAEGNRLSSAPAQVQADLTAHIAWLDQRVATLDDTLDTTLRARPIWRARATLYRSVPGMGPVSARTLFLDLPELGTLSRQRMAALAGVAPFNCDSGTMRGRRAIWGGRAPLRATLYMATLVAVRHHPVLQACDERLLAAGKAKKVALVACMRKLLTILNAMVKHQTPWQPQEVAIA

SEQ ID NO: 65544 - protein, 413 aa, unidentified
MRVVYPRCAGLDVHKKTVVGCVIIPDEQGWQQELQTFKTTTAELLKLADWLRAHRVTQVAMESTGVYWKPVFNILEEDFEVMVVNAKHIKFVPGRKTDVKDAQWIAELLQHGLLKGSFIPEAPQRDLRELVRYRTHLIQERTREVNRVHKVLEDANLKLSSVATDIMGASGRAMLAAIIAGKDDPAALADLAEGRMRTKIEELEQALTGRIKNSHRLLLRLHLEHIDDLNAKLEELEAEIDKLMPPFDQDALVERLDEIPGVNQVTAQVIIAEIGTDMARFPTANHLTSWAGLAPGKNESAGRNRSSRTLKANRYLRPALVQAAHAAGKTNTYLGEKYRRLARRRGKKRAAVAVARTLLVIVYHLMRDGTRFEERGADYFDQLKPQSTQQWLTRRLERLGFKVTLEPIEPVAA

SEQ ID NO: 65545 - protein, 317 aa, unidentified
MTYVGIDVSKATFVVAYSSAKSSKTKTFKNTTKGVHEFIQTLSASEHHCVLEATGNYSSLLVYLLSQVGITVSLENPLKIKNFARVMLSVTKTDETDARLIALYGEKMQPAPYRLRSDAILTLKQKRTVIRQLKKQLIATRNLKGSMEALPFFDPKCKKAIEKTIAFLEKQVKNLEEELAVLAQCEYKKQMDLLISIKGIGVTLAAALIMATGGFTYFDNAKQLTRYLGLSPTYQQSGTSVNVKGHINRNGDSSLRGQLYIAAMASLRCNAECKECFDRLRSNGKPGKVAVVAVANKLVRQAFAVVSQEKPYVDGFN

SEQ ID NO: 65546 - protein, 336 aa, unidentified
MLKIVYPICCGIDVHKKFVVACIASTNDRGVTSYRSNRFSTFTSGLNKLSEWLLSNSCRHVCMESTGKYWIPVCNILEDISHITLAHPKYVKAIRGKKTDKKDARWIADLFKHDLVAASFMPPLCIRQLRDLMRYRTKLTNFGSSEKNRMQNCLTVSNIQLASVVSDTFGKSSMKIIDYLLENPDDRDLDFTPLLHGSMKSKADSISLALDGIITAEQQQKMKIILCHYSEIKKCKDSLESVILSLSEPYARQCSLVLTVPGIKNPFSAIAIISEIGADMSVFLTAKHLCSWAGLVPQNNESAGKKHSVRISRAGVYIKPLLIQCANAVVRSEKHP

SEQ ID NO: 65547 - protein, 319 aa, unidentified
MAKRTVEYEQVIERGCGLDVHRDTVVVTVMGKGIQTETRTYGTTTSSLKEMGEWLESLQVTDGAMESTGIYWKPVLHVLREYPLNLLVVNARHIKNVPGRKTDKADSQWICKLLISGLLKGSFIPPENIQALRDLHRYKKKLVGTVASEKNRIIRVLEDANIKLSSVVSDTSGVTATYLINGLIEGRNDLEKLVSECYHKKLQATPEQIVEAINGRLTPHLKFLLKSMQKHIQSVEEQIAEIDAEIEKHIKDFEKEIELLQTIPGVGKEGAIGIVAEIGVDMDVFPSEHHLASHSGMCPGNNESAGKKKVQEHDKAINI

SEQ ID NO: 65548 - protein, 389 aa, unidentified
MVAIMRPFGEIVSTPFEIKHTTSDINSLVELINSVEGESRIVMEHTGRYYEVLAHQLSEANLFVSTINPKLIKDFDNDSLRKVKSDKADAVKIARYALDKWQNLKQYSVMDELRNQLKTMNRQFGFYIKHKTAMKNNLISILDQTYPGVNTYFDSPARNDGSQKWVDFASTYWHVDCVRKMSLNAFIDHYQNWCKRKKYNFSQSKAEEIYGKAKGLVPVLPKDALTKLIIKQAVDQLNSASTTVESLRTLMNETASKLPEYPVVMAMKGVGTSLGPQLMAEIGDVSRFTHKSAITAFAGVDPGVNESGTYERKSVPTSKRGSADLRKALFQVMDVLIKTHPQDDPVYQFLDKKRTQGKPYYVYMTAGANKFLRIYYGRVKEYLSSLSES

SEQ ID NO: 65549 - protein, 419 aa, unidentified
MNKLFVGMDISLDDVKVHILDQDGNDACSRFSVDNNPSGCNILVSHILDCCNKYNVQKVFIGLESTSVYGWHIQYYLADHASLKPFNPSVTTFNANTVKAFKKSLGDLPKNDWVDAFVIAEKLRFGRLPKSCPVDFRYLALKRLTRHRFHIVDSIVREKNYFLSNLFLKFSGLCQIKVFSNNFGAAATEIFNEFLTLDDIAARPLEDLIAFLVDKGRDHFNDPNATAKLLQDAVRKSYRINANVNDSLNFVIKSCLDNIQYLEKQKKASEKTIANEVKGFKNQFLCLTSVNGIGPTIAAGLISEIGGISRFDNDNALAKFSGIYWSEYQSADFKAEDTYLKRTGNEYLRYYFIQAADQLRKYCPEFSQYYARKFNESKTHKHKRALVLTARKAVRLVFALLREEKLYKPPAMKGDDCKY

SEQ ID NO: 65550 - protein, 312 aa, unidentified
MNDLLERCMGLDIHKESVVACLMDGPVDCKAEIEVRTFGTLADDLLMLRRWVEEADCRYVAMESTGIYWQPIYETLEDCSGGEIVLLVVNARHMKNVPGKKTDIRDAEWIATLLRAGLLNGSFIPAKEIRELRHLTRYRKSIISDITAQKNRIEKFLQSSGFRLSSFMSDIFGVSGRNVMRYLCKHGKVTLEALDGCLKTQTRNRINEIMASVNGTLSGHQKQFLSMMLEHLEQLERHRREVEDAITAEVEKHSEAMLLLCSIPGIDTTAAASIIAEIGTDMSRFPSAEHICSWAGLAPGNNESAGKKNELP

SEQ ID NO: 65551 - protein, 317 aa, unidentified
MDVLGIDISKDDFHTCLIQGAKRRSKTFVNTPTGYRQVQAWLKNRRCTEVHACMESTGAYWTGLATALYNAGMKVSVVNPSQTSFFSRSQLRRTKTDEVDAEMIADYCVQRQPGAWVPPPPQILELRALLNYRDHLVRERVRLRQVASQTHMSADVRRLHLRHIKTLNSSIAALKKQLETLVKADPKIDAAVRELCKTKGFGPLSAASIVARLPVDRLRNAKAAVAQAGLSPGERSSGTSVRGKRKICKVGDADLRGTFYMPALAAIRSNNVLRPFVQRLKARGKEDMVIVVAVMRKLLVHAYTVLRNLQRAQAAAA

SEQ ID NO: 65552 - protein, 332 aa, unidentified
MKLLAIDLGKQSFHIHGISNDGEVISRKVARSKLEATVQELAPGTIAMEACASAHHWGRHFEALGFPVRLIHPRFVMPFVRGSKNDAVDAEAIHEAALRPTMRFVPVKTTEQQDLQMLHRTRDRLITQRTGLINHIRGLLGEYGVVIPVGAVRFRKDIRAAVAEAELSALARQNFNALIAEFEASDKRLAEIDQKLIAICRTDDRCKRLATLPGVGPVIATALIAAVDDGRHFASGRALAAWIGLVPQQYTTGGKPRLGGIGKRGNLYLRRQLIHGARSVLIRIAGRSDRRAKWAQDLLARAGHNKTLVAIANKTARIAWAVLCNGESYKTA

SEQ ID NO: 65553 - protein, 385 aa, unidentified
MTNSAQGSSFMPRDYDIFGGLDVDKKSMAVTFTDHATMRKSFKLPNSGSALLNYTRKQFPGQRVAFVYEAGPTGFGLYDELTAAHHPCLVVSPSMVPTVQRKRVKTNRLDSNKLSDGLRGGQLRGIHVPPASYRELRHLVQLRDTQVAQLTASKLRIKSLLLYEGIPFPAANGKWSGRVLRQLAALPCSGAVRFKLDRLMDALQFHFESAARVQKEIRHFCQNDPDLRQSISFLASLPGVGSITATHAAARLGDWRQISDVRQIAGFLGLVSSEHSTGDKENRGEITRIGDSRLRSKLIQCAWTAIRKDPELRAFYRRIYERQPKKVAARKAIVAVARKLTTRMYAVLKEQRPFVIRADSSIAPLTAEETAGLRERLDAAQNDQP

SEQ ID NO: 65554 - protein, 342 aa, unidentified
MKDTMIGVDLAKRVFQIHGTTMAGEVKFRKKLSREQFRVFMAAQPACLVVFEACGSASYWAREMAALGHEARLIAPQYVRPFVKRQKNDAADAEAIVIAARQPEMRFVAPKTVEQQARAALFRGRERLVQQRTEDVNALRAVLYEHGHVFPIGMGHLRRMEALLEAETCDLPAMIRMECQDLLEQITEKTSRIAARDKKLKELAAQSDKARRLQTMPGVGPLTSLAIEAFGPEMAQFKTGRDFAAWLGLIPRQHSSGGKERLGRISKAGQADIRRLLIIGAMSRLNWMGQRTIFEGSWLAKMLARKPKLLVAIALANKMARQIWAMMNKNEDYRDPALTTTA

SEQ ID NO: 65555 - protein, 413 aa, unidentified
MDVIHERCGGIDISKVDVKVTIRVPGTGKRRRSETRTFSTVTSGLLAMRDWLLAEQITVVGMEATGVYWKPVFYLLEHEMECWLLNARHMKAVPGRKTDVKDAEWIARLVECGLVRPSFVPPEPIRQLRDLTRYRTEVIRERTREAQRLEKLLEDAGIKLSAAVANILGVSGRTMLEALIAGQRDPRVLADLAKGPMRRKTDALVEALTGHFTAHHAFLARAMLDRVDACTAMETRLDERIDEQIAPFRRRIELLVTIPGVSTRAAEVILAEIGDDIARFPTAADLASWAGVCPGNNESGGKKGPGKTRHGDPWLKAALGQAAISASRTKDTYLAARYRRIVARRGKKRALVALEHSILISVWHMFTHDTAYADLGGQYFLERTGRARQTRRLVSQLNQLGYQVALQHMEEAA

SEQ ID NO: 65556 - protein, 370 aa, unidentified
MEKKILYVGMDVHKKSIDVAITDKRTNGKVRSYGKIDGTLEALDKLVGKLKSSGADLHFVYEAGPCGYPIYRHLTSKGHSCSVVAPSLIPRRSGDRIKTDRRDAVNLVRLFRAGELTSIYVPTVEDEAMRDLLRCRVDIRQIERKTRQRLLAFLLRHGLYYPGKKNWTKGHMNWLADLKLTHRAQQIVLQEYIDAANECTRRIQRITEQIQGLVPQWSRAPLVRAYQALRGVSLIVATTVVSEIGDMNRFKNPKQLMAYLGLVPSEHSSGNRIRRGSITKTGNSHVRRVLIEAAWTYNLRARKTKIILKRQQGLDDRICEISWKAQLRLCNKYRRLFARGKSKPAITTAIARELSAFIWAIDKQVQKLTA

SEQ ID NO: 65557 - protein, 416 aa, unidentified
MKKNSKSTVKKEQKATRAKARRPVQREPKEVLAELVEKLPGKLELKATSARPAEASPGTELGPNLDRLTVGVDLGDQRSHFCILGLQGETLSEGQLQMREAEVAEFFRALAPARVVMEVGTHSAWMQEIIAGEGHEVVVANPRLMEGSKRRKRKNDRIDAKKLARLGRVDPQSLHPIRHRSREVRQDLVVLRAREALVAARTELINATRGLVKSMGTRLPKCSSPSFGQKVKDVIPEKVREALLPLVQLADALSDCIRSYDQKIEELGSEKYGHTKLLRQVKGVGPITALAYVLTLENPEHFAKSRDVGPYLGLVPKQEDSGESQPQLGISKTGDTMVRKLLVGSAHYILGPFGPDTDLRRYGLRLCERGGKNAKKRAAVAVARKLAVLLHRLWVSGEVYEPLGYASSRAIVQPAA

SEQ ID NO: 65558 - protein, 343 aa, unidentified
MELYVGLDVSLNETSICVVDKAGTIRAEGKVISQPEAIAEFVSARAPDVVRIGLETGPTSTWLWTELHALGLPVICIDARHAKAALSMQINKSDRNDAHGVARIMQCGWYREVRVKSLGSHGVRAVLNSRALLVRIKRDLGNQVRGLLKNVGLVIGKAQGNVFTARVEELVADHGDLADAVRPLLAARHSVGRQIADLDRKVMALARDDDQVRCFMTMPGIGPITALAYRAAIDDPTRFRRSRSVGAYVGLTPRRYASGEVDYTGRISKCGDRMLRTYLFEAAGVLLTRVHKWCALKAWGLRLAKRIGFKKAKVAVARKIAVILHRMWIDGTPFHWSTKEVVA

SEQ ID NO: 65559 - protein, 347 aa, unidentified
MNFYTQQHTQYCGIDLHAKAMYVCILDQQGTKLVHKNLPTTPEAFLRVSAPYREEVVVGVEGMFTWDWVADLCQQEGSAFVLGHALSMKAIHGGKAKNDKIDAHKSAVLLRGGMIPQAYVYPAEMRATRDLLRRRCHRARKRAERCAHMHNTKSQYNLPEIGKRLANKSNREGVADHFPDPSVHKAIEVDISLIDHYDQLLGEVERYLTRSAKTDDVQTFARLQSVPGIGQILALVLLYETQDIARFPRVQDFVSSCRLVTCTKESSGKRLGTSGKKIGTVHLRWACAEAAVLFLRQRQPGKEYFPKLEHQHGKATALTVLAHKLGRAVYYLLTREPAFDLKRFVTA

SEQ ID NO: 65560 - protein, 520 aa, unidentified
MATTRTRQRSSSRRPATTVAKPRGVLHPRVQQVGPEHFGIVCFDCAKARSKFLLADFYGRVLLPPTWVAHNRPDLDAAVAQLRQAFTTHTLHDGLIAIERTGRYHRVVQRTFAAAGFETRILHPFVTKQYRQPVDPGYKTDDTDLTAIHRATVTGCALLEATRDEAWTTLQLLIRHRRDLVRKGAALNCQIRDHLEAALPGYAACFDKLWDSAIPWHLLQHFPTAAQLQAAGVTALCHSLRQAGIRFQQRTLQAVCDWAAQAAPGDVAASMHHRIALALYDDRQRKTQEILALERDIASRLVQTPYVLLLSFPGINVVSAADFAGEAGPIEHYANPKAITGRAGLRPSRYQSDQVDKANGPLVRNCNRSLRATILGIADNLIGCNHHFGVLATQWAAQGKDPRHTRVKVALRFCRIAFQMVAGRQVFRHPGIQGRHYILDKLTAFHRAHDTAMTEVLRDLQAAVGQVPAREHAAEARPLAEELQKIQDGHRRGPQLLGDILPIVLARLGVGVVQSPESGE

SEQ ID NO: 65561 - protein, 343 aa, unidentified
MQAVTTIGLDIAKSVFQVHGVDAHGNVVARRQLKRRHVLAFFAKLPPCLVGIEACASSHHWSRELQALGHTVRLMPPAYVKPYVKRQKNDATDAEAICEAVTRPNMRFVLTKTPEQQSCLMLHRTRHLFIRQQTAVINAIRAHLAEFGIVAPVGRKGVEELLKVAADASDQRVPEIARACVAALGAQLRMLKAQILEFDRRIMAWHRSNAASKRLDAIPGVGPALATALVACVADPRAFRSGRDFSAWIGLVPKQRSSGGKDKLGAISKKGDRYLRGLFTAGALAVIRYAKIHGTRHRPWLTALLARRPTKVAAIALANKLARMAWAMMARGEHYKEPAALAA

SEQ ID NO: 65562 - protein, 342 aa, unidentified
MYYIGMDVHKKTISYCVKDASGQVYREGTIGATRRELDRWIQTLPQPRIMAMEATIFTGWIYDHLLPHAEQVKVAHPLMLRAIAAAKKKNDRIDAGKIADCLRCDFLPECHMASTEIRDRRRTLRYRHLLVRQMVQMKNRISGLLMETGVSHNKQRLHKVGYFRELLASNDEIHENIRPLLRLSRETIVRCQKTEYALVSSLERDPLLAERLKRLRTVPGVGPITALTWALEIGDVSRFRSVKQAISYCGLCGEEKSSADKVLRTPLSKQRNKHIQHVLVEAAKLAPRQNHELALIHEKEKQKGNGNRATLAVARKMVAYLLAVDRRERDFVPAGGHSTAAA

SEQ ID NO: 65563 - protein, 422 aa, unidentified
MLHDSEDTEEIIERVAALDIGKAELVACIRVPNPDKPGRRAQEITTYSTMTGSLLGLGERLRELGVTRVVMEATSDYWKPVFYILEAQGLDPWLVNAKDVKHLPGRPKTDRLDAVWLAKIAERQMIRPSFVPPPQIRLLRDLTRYRVDLIKARTAEKNRVEKLLEDAQIKLSAVVSDIFGVSGREMLAALLAGERDPRVLAQLARARMRAKIPVLEQAFVGRFTDHHAFLLRTMLARIDETSADVAAVEARVEQLVAPFAPAVDQLDEITGIGATAAHVVIAEIGVDMSRFPTAAHLCSWARFAPGVKESAGKNKGRGTTGHGNPYLARVLGEAAVAASRTDTFLGERYRRIARRRGKKKAIVAVGRSILVIIWHLLSDPEARYHDLGPDFYDHRIGPDRKKRNHVRQLEALGYKVTLEPAA

SEQ ID NO: 65564 - protein, 397 aa, unidentified
MFAVGIDISKSKSVAAILNQDGSMHTSPFEFHHTQPELDAFIKYILNSNQSATILMENTGHYHYPVLKAFQEAGLPVCMVNAYQIKKFGDMDLRKAKTDKKDAVRIARYALEKSYSLVPYTSMEQKYEDLRFLARQYNQRMLTLKTNKVFLLNLLDETMPGITNILPLTTRAPGTSLSVLFINRFKSYDRIKKMGKSRFLDAFEKIARKSRNRQTKTYGLAIYEAALRNITTRGENEYTLAAQDQCLELVCESQKAADSIILKMQTLAETLPEYAVLRSMVGVVDRLGPLILAEIGDIRRFHSGKALNAYAGNDAPPYQSGTFESYNRHISKRGNAALRKYCFEVMQALKLTRPQNDPVYLFLLKKEQEGKPYNVAKMAGVNKFLRIYYARAMETLK

SEQ ID NO: 65565 - protein, 344 aa, unidentified
MKTTEALNQVCCGMDLHSSNVYICVMEKDGTISYSKRLKNDLALILKMLKSHKELKHIAVESTFNWYWLVDGLMENGYRVHLANPAQLSDCAAPKVTGDRHDAARLAYLLQRGDLPEGYIYPKEVRPVRDVLRRRLMLVRQRTQTILSLQAMYARTTGKQVSGAKLKKWTLIDVKKTFEQDADQFSAGELLSTIQGLEKRVKKMDDYVRKFLKTYPNYERVLQLPGVGQALSLTILLETGPVKRFASPGQYASYCQAVPSKRLSNGKSKGQNNRKNGNKFLGWAWVEAAHYAQQHHPRIQSWFQKKQRRTCRNVALKSLAAKLSKATYIMLRDQSDFNEQLLFG

SEQ ID NO: 65566 - protein, 340 aa, unidentified
MVHVGVDLHKRVSQIAVLTEDGELTQHRLANEPLRLERFFAELPADTPVAIEASGTWWWLVDLLEGLGHRPMLSHPKQTKAIAAARLKNDRVDAERLLLLLRGDLLPRVWIPPKALREARELLRHRVSLVWVRTGIKNRLLALLARRNVQPPRSKGWWTQRGRQDLQALPLSAIPSTIREDCLALLRLLDEQIRRLDLELIARWGADPRVQRLITIPGIGPFTAILLVLELGDIYRFPSAKHLASYVGLTPRVRASADRIRLGHISKEGNRLVRWALVGAATQAARRPGPLRAWVRLVQQRKGKKVARVALARRLAEIVYHVWKEEIDYFTVLRRSGVRG

SEQ ID NO: 65567 - protein, 339 aa, unidentified
MKLTPVGVDIAKNVFQIHYVDTETGEIVNRQIKRARFLEHFANRAPCLIGMEACGGSQHWARRLLEMGHQVKLMPAKFVKAFNIGNKNDPADARAIWLAVQQPGKAVAVKTEAQQAVLALHRMRQQLVKFRTMQINSIRGLLTEYGEVMAKGRSALDKAIAGVLERLAERLPAVLIETLREQWNGLEKLDRQIAEIERRLQEWMRQDKACKSIAEVPGIGLLTATAAVATMGDPKSFSSGREFAAWVGLVPRQAGSGGRVLLLGISKRGDTYLRTLLIHGARSVLYNAKDPGPWVEQIAKRRPTNVVLVALANKMARTIWAILAHDRNYEKDFVSAKPA

SEQ ID NO: 65568 - protein, 516 aa, unidentified
MPTVRDNATRVKRFRALREDLRTRRDRLFVGIDVAQAAHVVHLRLAHTRVVTPTLTIPNTARGFTQLWARIQQARRATGCREVVCGLEPTGTYHQAVADFLEQQGADVVLISSSVAYWNRRTQDGTWDKHDRKDAANCADLLEQGKVLFYSRPAGPLAELRPLVKCLRRARSELAACKARWRTTLRPALGPMGAPLPNRLRAELPAVLQAWERVTPGRPAVAQGRLPLGLATACADLGAQVIAVQARIAAVEAALTPLAERLPAYALLRTIPGVGPTVAAILLAEIGDVAWFTTFAQLRKLAGLDIVRVQSGQFAGQARISKGGRSLSHELAWRHAASFMPGRPDELPIDLHWGLVDYPGIAPTTAVHHQELWDRAVRVETSGGAYLGLCREDLLIYLALHWAIHHALAGLGWQLDLALLIRRGDDAWNWEVLAERARRWQIRRAIFYALREVQERFEVAIPPWFLARLRPAGPQCILLDWLRHRGEECMERLDYLIPLLVMDRACDILRALSGAV

SEQ ID NO: 65569 - protein, 344 aa, unidentified
MKNTTIAIDLAKSIFEVGVSDRPGHVVANHRLSRTEIVAFMAKQPNTTVVMEACSSAHYWGRTFQSFGHDVRLLPPLYVRPYVQRSKTDRADVKGMLEAWRNADIRPVPVKSESQQQLTALHRIRAGWIATRTMRINSARGLLREFGIVFPLGAAALAGRVQELIEDADSALSMPLRQLLHELVLEIGELESRVKLIHKQLEAIAVQTPVVERLLTIPGVGLLTATALVGFIGDVSRFPSGRHFAAYLGLTPSEHSSGLRRRLGRISKHGDVYLRTLLIHGARAVLVAAQRRPNPKGLHLWGLQLQRRIGNNKAAVAIANKMARIVWAVWKSGKPFQPHLQDVS

SEQ ID NO: 65570 - protein, 338 aa, unidentified
MFFSGIDQHKQSSVITTLTCDGQRVAQATVPNERRVLLQYFAQFPGPHKAVVESTGRWYWLRDLLVPAGVDLRLAHAKLLKAIAYAKVKTDAVDADTLAQLLRVDLIPHAHMIADAMRGPRDVLRTRLQLVERHVRCELTLASLLEKFNVPERSQLPPLYQLQARVQAAQMELLSAQIKELEQAIQGDLLDDAAVQRLLWIPGIGRLLAFTLFLEIDDIQRFPTVKHFWSYCRLVPGADDSGGRHRHKASRDGNRYLKLAFSHAAIRAVQYCPEVRQWFQRWKRKKPLRVARALVAKELAKSVYVVLHQGVEFDHQFKGTPLTKRKQASWPRRASPSA

SEQ ID NO: 65571 - protein, 425 aa, unidentified
MNCKQNQRINQVKESTLVVGIDIGSTTHYARAFDWRGIELGKVFKFSNSMEGFENFKSWMQWLQDKNKKSDVIVGIEPTGHYWFDLGAYLEDEGILLVMVNPYAVKQTKELDDNSQSKNDRKDPKVIAKLVIEGRYSAPYTPDGVYADLRIMVANRKRLIRELTQIKNRFARWFAIYFPEYKEVFGDYESQSSMLLLKVACTPEAIMELGAGKINQIWRDAKLRAVGMKRATTLCETARRSIGLRKGSSAAEYEMKLLLADYEYKMAQLDSVMDEITSLCKKIPESEQMLAIKGIGVITVAGFLAEVGDVRRFESPRQIQKLAGLSLRENSSGKHKGQTTISKRGRSKLRAVLFNAAIPLIAKNPEFRSLHEYYTTRANNPLKKKQSVIAISCKLIRVFYAILANGVTYDPQKMMSDIHRPPQVA

SEQ ID NO: 65572 - protein, 392 aa, unidentified
MALSAASGQGAAKQYAAYIGLDVHKETIAVAVAEAGRADPLYRGEIANTPKKVERLIAKLSEAYAGALLLFCYEAGPCGYGLHRQLIASGHDCEVVAPSLIPQKAGERIKTDRRDALKLARLLRSGDLTAVWVPDQEQERMRDLSRARDDLKAQERKARQQLNAFLLRHGQHWPKGKSRWTPAHENWLAGLKLDDPWQQVVLQTYIDAERAAGERVAQLNDQLMRALPEWSLAPVVDSLVALRGINKLAAIVLLAELGDISRFDSPRQLMAFLGLVPSEHSSGGRRRQGAITLTGNSHARRMLIESAWSYRFPARQTKHLKAKAANASPEAKRIAWKAQVRLCGRYRTLTRAGKNTKLVCVAIARELVGFIWDIVRQEMPRLSPAPTPATHP

SEQ ID NO: 65573 - protein, 416 aa, unidentified
MKLFVGLDVSSEKLDACFMTDDSTCSVLKEASYGNSQLGASQIKEYILEFSQKFEIESLVIGMEATSLYSFHPAMFFKEDLELNQLNLMVSVEQPNKIKKYRDIFEENKNDQIDAFYIADYFRIQRQVNSIIKEEEYLALQHLTRTRYQLIKQLVRTKQHFIENIYYKCNTLSKELKAEGGSVLSATLVTLMTEDYTMDQLAELSLEEFANLIQKLGKYRFKNPEGIAKAISKAIRSSYRLGKVHQDSVDIVLGVLAKEIRSLEKLIKDLDKAIDDLVVVLPEYQCLTSIPGIGPVYAAGILAEIGPINRFSDESKLAKYAGLYWRQNQSGNSEYENTPMDKRGNRYLRYYLVEATNSVRRYEPEYHAYYKKKYAETPKHKHKRAIVLTARKFTRLVDTLLRNHQLYMPPRSVIDK

SEQ ID NO: 65574 - protein, 282 aa, unidentified
MKPQQQYVGLDVSLEQTSVCVVDDAGATIWRGKCSSTPESIHAVVAKHASEAVRIGLETGQLSTWLFHELRARQLPVICIDARHAKAALSLQINRTDANDAHGIAQIVRVGWYREIGVKSMDTHAIRAMLVARAQLVTQKVKLMNCIRGLLKTFGIVLGGGKGRRFEAMVREQIAENPMLISILEPMLIVLLTTREQLAVFDRLVRQRARADGDVRRLMTAPGVGAVIALAYTTTVEDPARFKRSSSVAAYLGLTPRRFQSGAMGRAGHISRCGDAMLRTYL

SEQ ID NO: 65575 - protein, 408 aa, unidentified
MKVLNRRCAGLDVHKDEVVACVRLAVRGKASHEVRRFATTTRGLLDLAEWLEASGVTDAAMEATGIYWKPVWHVLEERFQLVLANAAHVRNVPGRKSDVNDAAWIADLMAHGLIRASFVPPAPIQELRDLTRTRKQLGREIVQHTQRIEKVLEDANIKLSSLIADLLGASGRRLLKALIAGESDAVALAALGGSRLKCSRAELKEALEGRITPHHRFLVGQHLQMIEELEAAVAAFDARIEAALVPFHDAVERLTSLPGISDVAAQVILAEIGPDMSPFPTAGHLLSWAGLTPRLDESAGKRRSTRLKKGAPWLKPVLVQCAFAAARAKNTYLQAQFLRLKARRGPKKAAIAVAASILTAVYHMLRDGTFYNDLGPQHFARHDKTRAAMRLVRRIKDLGYDVEIKAAA

SEQ ID NO: 65576 - protein, 417 aa, unidentified
MSLNIDGAAFFVGIDWATEIHAVCVQDTNGKQVAAFPVEHTADGLTALMRRLARIGDPAAMPVGIERPDGRLVDALLEAGHPVVPVKPNAIKTWRDGEVLSGAKSDAGDAEVIAEYLRLRHHRLQLATPYTPETKALRTVTRTRGDLVDMRVATTNQLCALLDTHWPGAKAIFADVESPIALEFLTRYPTARHAAQLGVKRLTAFCVKHGYSGRRTAEQLLARLRAAPTGTTDETLCEAVRDAVLALVTVLTAVGAALKTLNRSVTATLGEHPDAEIFTSLPRSGQINAAQVLAEWGDCRQAYDSPDSIAALAGVTPVTKTSGKHRAVHFRWACNKRFRVAITTFADNSRHESPWAAQVYTDARARGLDHTHAVRILARAWIRIIWRCWNDRIAYDPARHGNAVRLLQPVQNELLAA

SEQ ID NO: 65577 - protein, 408 aa, unidentified
MIYCGIDWAEKHHDVALIDDTGQLLAKRRITDDLAGYRLLLDLLAEYGDAEDDPIPIAIETSRGLLAAALRQGNRKVFAINPMAAARYRDRHGVSRKKSDAGDALVLANILRTDMPMHRPLPADTDLARAIAVLARAQQDATWSRQQIANQLRSLLREYYPAALDAFAGWTNGLCRPEAHELLKLAPTPSQAARLTRAQLRSALKRAGRSRGIEAEADRLREVFRGDYASQPQLVEDALGKQAFALLRQLEAACLAADELAEAVEESFLRHPDAKVILSFPGLGVQLGARVLAEIGDDRQRFVDARGMKAYAGSAPITRASGKKHQVGRRMVKNDRLNHAGYLWAFSALRSSPGADAHYRRRREQGDWHAAAQRHLFNRMIGQLYHCIQAGELFDEHIAFPSELAAAA

SEQ ID NO: 65578 - protein, 365 aa, unidentified
MTITTSESPATASEVILGIDTHLDVHVAVALDGLGRRLGELNVPTTVKGYRKLLHWAEGFGPVYCAGVEGTGSYGAGLARYLKAAGISVMEVERPKRRHLRRNGKSDPIDAEAAARAVLADDTAGEPKSGDGQAEMIRTLRSARISAVKARTQAANQLQALLVTAPENLRHRLRKLPTKNLVDTCARLRPGAAPSDVQTATKFALRSVALRYQQLSEEIAQLDEQLDRLVADAAPELTALPGIGTDHAATLLSVAGDNPQRLKSEASFASLCGVSPIEASSGKVVRHRLNRGGDRDANRCLHLICVVRMRHDERTREYVARRAAEGKSKREIMRCLKRYIAREIYRLLAPMAAASAPSAPRSQAT

SEQ ID NO: 65579 - protein, 427 aa, unidentified
MTKVQHTADARVLVGIDISKHRHEVLIAAPGKRRRRRLTITNTVDDIDRLIALLGDYNSPVQIGFEATGNYHRALMYRLGAAEFDLKLVSSIAMALTREALHNSWDKNDPKDAQVILHMLQIGATQIFLDPLRAGTNDIQELSKTHEIVSRAKTELWHRIQGHYLPLYFPEATRFHRSSRSDWFLAFLEMFPSPHLIAAMDKEAFIAAAWQVVGRKVSKTALISDIYETARCSVGLPVAEDSDALRMFRMVLAEGRSLIRQRNTIEVRATELLGDHPDYRLLTSVPGIGPINALTILAEAGDLRRFPHHRQFLKFCGMDLATVQSGMFRGQSRISKYGNARLRRTLWMAGQTAVLQRTNSFRDKFERYIAQDRHNPHLRRKAYTAVAAKMARTIHAVIKSGDPYRPFFEGVSPGGRTPLCRAVEAVR

SEQ ID NO: 65580 - protein, 417 aa, unidentified
MPPGCDPQPVRRFGTFTVDLDALADWLIDCGVTTVAMESTGVYWIPLFELLEARGVQVLLIDPRQAKRAPGRPKTDRLDCKWLQRLHAYGLLAGAFRPEDQVCVLRSYLRHRQMLLTSAAHHIQHMQKALQQMNLKLTQVVSDITGVTGMAILKAILAGERDPVILAKLRNPHCQHSEDEIAKALQGTWRTEHLFALQQAVALYDFYHQQLALCDRQIKAHLETFADKSAGQPLPPKARRHKKTNEPRFDARTPLYRLAGVDLTTIEGIEENTALIILSEIGTDMHRWPSVKHFCSWLGLCPQHQISGGKVLSRRVRPGAHRVTVALRLAARTLHHSQSALGAFFRRMKARLGTPKAITATAHKLARLVYSLLQHGSAYVQQGLDAYEAQYRERKVTTMAKQAKALGYTLVPLAAQG

SEQ ID NO: 65581 - protein, 366 aa, unidentified
MKQQHQDSEVTIGLDLGERRHRFCALDSRGEVLEEGSLLNDRASLARLTARYRGALAVMEAGAHSPWVSRYLKRLGWEVIVSNPRKVRAIYQHERKSDQRDALMLARIGRMDRALLYPVRHGSEEAQQDLLRIKLRDSLVRARVALINSVRFSLKSLGYAVCNPSSERFHKVAMERLPERVQQMIAPSVQALAELSTRIAVLEREINVVARTKYPQTLWLQQVPGVGALTALYFVLKIEDPQRFENVRDVGAYAGLCPRRDQSGQSDPQLRISKRGDPYLRRLLVSAAQYILGPFGPQSALRAYGLMLAADGSARARKRAVVAVARKLAVLLLSLWKNRSHYEAFPHWQTIEDKRSGTIAMHRVEA

SEQ ID NO: 65582 - protein, 403 aa, unidentified
MNNVAGIDVSKGKSMVSVLRPFGEVVAKPFSIGHTGSELKELADYLKSLDGETRVVMEHTGRYYEPVARFLHDEGVFVSAVNPKLIKDYGNNTLRKVKTDKADSRKIARYGIDNWAELRQHTPMDTIRMQLKTLNRQQSLYTKTKTMMKNNLIALLDQTYPGVNALFDSPVREDGSQKWVDFATTFWHVDCVRNMSLTAFAERYRKWCKRHGYNFSQSKAVEVHAGAQDLIAMLPRDALTKTMVRQAIDALNAISASMERLKAEMQALAAQLPEYPVVMAMHGVGDSLGPQLMAELGDVTRFTHRNAITAFAGVDPGADQSGTHEAKSTRVSKSGAPELRRALFLVMDCLLKTQPQDDPVYRFMDKKRAEGKPYLVYMTAGANKFLRIYYGRVKEYLAQLENS

SEQ ID NO: 65583 - protein, 361 aa, unidentified
MFYGVDLARDKFKAACVTPDGAGIEMISCSLTPGSLEAFKKRLTGDDYMVVEATTNAFWFVNQIKDLVKECFVVDPFKFSIISNSNKKTDRIDAVKLAKKLKYYIMFDRSKDEFPTVFVPAREVQEIRSLFTTHETLKKEKNITKNRIRSLLTQNGYFGLQKKNLSYAKTRTEIINLDLNAGVRVQFEVLFDLLMHQEAGIETIKTEILQKGTIFKKEVEVLTSIRGISPFIALAIMADVVDVRRFQNAKHFCSYLRATPRIEASGSSTRIGHINKHSRHLSMTLLVECINHFRDSSPRIEEFYTRKSKGKNKGKVRVAVIRKMLVIIYNMLSDNELYHYRDIQNHERKLKEYDKVIKKVA

SEQ ID NO: 65584 - protein, 409 aa, unidentified
MSVHDDACLAATVVVAVDVGKNAVALSVTDDQRHRLFGPVEFAMTRSGLRSTLARVKDVVPSAAVVKVGIEAAGHYHRPLLSPVSWPAGWQLLELNPAHVTEQRRVRGRRRVKTDAIDLEAITELVLAGGGCPVTGREQVLGELAAWSSHRTRRVATRTATKNQLLGQLDRSFPGLSLALPDVLGTKVGRLIVEHFADPARVVSLGEARLIRFAATRGLRVRRPLAERLVAAAGNALACPDAAVARQVLATDLVLLSQLDEQIAAAETAMADLLPASPFATLTTVPGWGVVRAGGYAAAVGNPARWPGHRQLYRASGLSPMQYESAGKRRDGAISREGSVELRRALIDLGLGLWLNDPAAKAYAASLRARGKKGGVIVCAMANRANRIAFALVRDQSTFDAHRWKQQED

SEQ ID NO: 65585 - protein, 349 aa, unidentified
MKILAIDLGKYKSVACNYVTATGTARFATVVTHANEFDRLLSQESPDLVVIETCSIAGWVHDLCCQRGVKCQVANPSSEAWKWKNVKRKTDRDDALKLAQLAALEQLPTVHVPAPETRQRRALLKYRQSLITRRVAIQNHLRAIAQRQGILLDRGSRAWTAAGFEVIQQLAKPLEQCSADELWRGEAALELQALEAVTKLLREVERKLEAFAASDESVKLLRSIPGVGRCTAEVVVAYLDNPQRFENGRQVSAYAGLVPKQFQSGETDRRGRISRRGPSLLRKMLVEAGWILLRYNSWAQRLMLRLSRGQKTRRKQAIVALARKLLVRCWAMLRDSTEWREPPPATATT

SEQ ID NO: 65586 - protein, 343 aa, unidentified
MQEITTIGLDIAKSVFQVHGIDASGGVIVRRQLRRRQVLPFFRKQSPCLVGIEACATAHHWAREIAALGHTVRLMPARYVKPYVKRNKNDAADAEAICEAVTRPTMRFVAVKTPEQQSVLMLHRTRQLFVRQRTMLINAIRAHMAEFGIVAGIGRNGVEKLLGLIAEGGDERIPSAAHECLMALAAQLELVKRQILDADRRVRVWHRSSELSRRLEAIPGVGPLIATALVSSIPDPHAFRSGRDLSAWIGLVPKQNSTGGKERLGSISKAGNRYLRSLLVVGALSVIRRAKQLGYTRHPWLVGLMERRSVKVAAIALANKIARIAWAMMARNESYRTPLPASA

SEQ ID NO: 65587 - protein, 344 aa, unidentified
MLFVGVDWGEVHHDLCLLDQDGRVLAARRIADGLAGVGELHALMAAHAQDPAQVAVGIETDRGLLVGALLAAGYQLYAVNPHTVSRYRGRHGSSRAKSDRGDAKVLADLVRTDRLNHRRLAGDSPGVEAIKVLARAHQSLIWTRQRHVNALRSALREFYPGALVALGTQLAEPEALAVLELAPTPEQGRRLTRVAVRRALVGAGRRRNLQARVVTVHDALAAPQLAAPEPVEAAYREVVSGLVAVLRCLNEQVAALEGQLAARFGTHPDAAIVQSLPGLGVVLGARVLGEFGDDPARYATAKGRKAFAGTAPVTRSSGLRTMVVARAACNQRLVDACYLWAFAA

SEQ ID NO: 65588 - protein, 345 aa, unidentified
MEHVVIGMDPHKRSVTIEVMTGTEQVLAKHRFDTTADGFASLMRCAKQWPERLWAVEGCNGIGRHVASRLVIAGETVVDVPPKLSARLRMFDTRQGRKTDPDDAHAIAMVAVRMNGLRPVVNDEQHALLRILADRRRALGEDHTRMISQAHQLLLELIPGGAKKDLSAAQARVLLAGVRPRDLVGKTRKRVALELVADLEKIYQRSKALDNQIKQLVTDTGSTLMDLHGIGPSSAARLMIEVGDISRFPDRNHFASWNGTAPIDASSGDQTRHRLSRAGNRQINRALHVMAIVQLRNQTEGRAYFDRRKAAGKTSMEAMRSLKRRLSDIVYRTTMPNTPATEQAA

SEQ ID NO: 65589 - protein, 331 aa, unidentified
MQRKEFFIGIDVSKETLDVSVSGTKSHIRITNGSSGFKQLLTWLQSLNMELSACWFVFEYTGGYEYKLVQFCSTKEIAFTRFAGLEIKRSLGIQRGKNDKIDSKRIADYGYEKREKLSHHSAESAVIIRIKQFLTQRSGFIKERKANEHRMKELMAMMDFDKADPLIDSYHIAAEFARKMTAKTEEYIMQEINKDEQIKSTFQLLTSIPGIGPVNALMAIAYTENFKRFTNGRKFGSYCGVVPFDHSSGKSIRGKSRVNHMANKEIKATLSMAARAAMAYNPEMKLYYQRRKEMGKHPMSIINEIRFKLILRMFAVVKKQKVYVDNYKNAA

SEQ ID NO: 65590 - protein, 377 aa, unidentified
MQNLEWVMRWTLPKTASMRQTGYNSHSVKGNVHHEISTLSIDLAKNVFQVAGFSSNHKRECNKRLKRPKLNAFMANTPPCRVVMEACYSSHYWGRIFTSYGHTVDLIPAQHVTPFVRGNKNDSNDALAIYEASLRPSIKFVPIKTEAQQEILALHKIRERLLQNRIAATNQLRGLLVDFGYVFPVGIKAFEQGIIALESDSELRPLLRTMVSDIYAEYKSLVKRINAIEAMLHKHVDTDTNAKILHSIPGVGVLNASTYAASIGSAQAFENAKELGLWLGLTPKQYASGDKSKMSGITKPGNSYLRKQLIYGARAIIARSHHKTDALSLWINQLREKKHVNCVVVATAHRLAQLMWTLLTKQTLYSPQPVKNTRKDA

SEQ ID NO: 65591 - protein, 428 aa, unidentified
MNCNTQNAKIASITEKTLIVGIDVGSETHFARAFDWRNYEYTKKPLEFSNTEAGFLTFKAWVEDIAEKQGKTAVIPGMEPTGHYWFALGKFLQDNGMKPVHVNPHHVKKSKELDDNNPNKNDRKDPKTIAALVNEGRFSYPYIPTGIYAEIRSLSNLRFQTQEELTRIKNRIARWFAIYFPEYKDVYGDLKTVSGRMVLKVAPLPEDIGKLGVEGVNQIWRSAKLRGAGIKREKTLVSAAEHSVGSKEAPEAARMELKNLLDDMDVYVSRLDELLVNIEEKLKEIPYVDKLMEIKGIGLVTVSGFIAEVGDIGRFDNPKQLQKLAGYAIVANDSGKHNGESRISYRGRKRLRYVLYEAAISLIGKNAEFKSIHEYYRTRKENPLKKMQSVVAVACKILRVFYTILTKGVDYDPVKLLGDIKRPQLQAA

SEQ ID NO: 65592 - protein, 350 aa, unidentified
MKIIGCDYHPGFQQIAFVDSETGELQERRLEHPEEAEKFYRDLGAQGACVRVGMEASGHARWFERLLSELKFELWIGDAAEIRTKRVRKQKTDRQDAELILQLLVENRFPQIWVPSWENRDLRQLLWHRHRMVQARTRIMNQLQAVALNEGLLCKKRLWRETGRKQLESFPLAPWASRRRQDLLELLDRLTPTIAELTQAIEREVENSPEARRLQTHPGVGPLTALAFVLVIGKADRFQCGKQIASYLGLIPLEDSSGKRRRLGHITKQGNSLLRFLLVEAAQVTVRSDPEWRSKYFHLAMRRGRKIAKVAMARRLAVRMYWMMRKGWDYERLNKFGSHAGQPGHRHGVQ

SEQ ID NO: 65593 - protein, 461 aa, unidentified
MPKQDRKRKTPRGKRSQDWEALPPLNQNAAGIDVGNAEHYVAVPAGRDAEPVQTFGSFTADLHRMAQWLKACGIQTVAMQATGVYWIALYQILEDYGLDVNVVNAHHTKTLPGRKTDVLECQWLQKLHTFGLLNNSFQPTEEIWVLRTYMRQREKLVAGASTCIQHIQKALTEMNIQLANVISDISGMTGMAILRAIVSGERNPQALARLKGERIHASREEIAQSLEGTWRQELLFVLEQSLALYDTYQRKIAECNLRIEAHLQSMQAKTTAEQPPPKGRPARGHRKQMTCLDLGSQLFRIAGVDLTQIDGIQVQTAQAVISEVGVDMSRWRTEKQFASWLGLCPDNRVSGGKVLKRGTRHVVNRASTALRMAAWSLFRSQSALGANFRRLRRKLGAPKAVTAMAHKLARLVYRMLKFGQGYVDKGMEHYEAKYRQDQIKWLAKSAAALNLQLTPLAEVVD

SEQ ID NO: 65594 - protein, 391 aa, unidentified
MVCVGIDVAKDKHDCCILDSDGMVRADCFTIPNNMDGFKQLLQTIRNCTKKSDKIKVGLEATGHYSYNILGFLLDNGLPTYVINPLHTNLYRKSLSLRKTKTDRVDARTIATMLLSDVDLKSYTDTAYHNEELKSLTRYRFDKVRERAKLKQSVSRLVTILFPELEKLVTSLHIASVYALLSEYPGAKQISEIHLTKLTNLLATASKGRYGKDKAIQIRDAARTSIGSVMPAKFLELKHTIKLIRELTSEIDEIEVSIQKIMDELNPPILSIPGVGIQSAAMILAEIGDFSNFESPDKILAYAGCSPSTYQSGKLTNCYAHMEKRGSRYLRYALYNATKYVCHWNPVFAEYLAKKRAEGKHYNVALSHATKKLVRLIYALQKSGKAYLVAA

SEQ ID NO: 65595 - protein, 360 aa, unidentified
MKVQRTSVGLDVHARSVVACALDGDTGELLERRLTPDHGEIVAWLADLPGPVAATYEAGPTGFVLARSINAAGIRCSVAAPSKLQRPVGDRVKTDVRDARHLARLLHLGEIVEIEIPSVEQEAARNLFRAREDCRCDLMTARNRLSKLLLRQGIVYYGGTAWSRNHERWLQAQRFDHPALAMTYDTAFDTVLAITARRDRLDTAICEMAADSPFTAVVTRLGCLRGISTLTAFGLAVEIGDWHRLTGRTIGAYLGLVPCEYSSGATRAQGGLTRTGNTHARRLLVEAAWHHRKPYRPGEVMRRRWNAAAPAPRARGQAANRRLHERWLRFDERRKRPVVANAAIARELAGWCWSLAVMDD

SEQ ID NO: 65596 - protein, 352 aa, unidentified
MDRYIGLDAHSQTCTAAVMGPSGRRLQEQVLETNGKVLVSFLKSIAGDRYLCFEEGALSEWLYEMLEPFTKETMVVQASEHQGPKDDSHDAWNLANEYRTGHLQKVVFKAPKCFTGLRQAVRAYQTATQDLVRAKSRFKAVFRSRGVLVDNSVYQPGLRPKWLRRLSGAYRKLAELRAAQLDAVAELHAQAEEWLSEEAAKIDAVKRVSTVPGIGTIRAAQIVAIVVTPNRFRTKRQFRNYCGFGVVTRSSSDYVRGLDGHWKRQAVQQTRGLNRNRNATLKAVFTGAATTVIQQGKDQPLHRDYERMLASNVKPSLARLTLARRIAGATLAIWKNKENYDPAKHERPRTTP

SEQ ID NO: 65597 - protein, 348 aa, unidentified
MQFYTKQHKFYCGIDLHTKKMYVCILDEKGEIREHRNMNTNPENFLAAIAPFREDIVVAVECMFTWYWLADLCQKEGISFVLGHALYMKAIHGGKAKNDKIDSKKIAVLLRGGMIPMAYVYPEKMRSTRDLMRRRNHLMRKRAELLAHIQNTNSQYNLEESFGCIAKPYQRRGKDLVGAFDHPAVKKSMEVNLKVIATYDVLLDDLERTILKLARYHDPVSYALLPSVYGIGKIGALTILYEIENIKRFPRVQDFVSYARLVKCEKTSAGKSYGTGGNKIGNAHLKWAFSEASVLFLRGNEPAKKWFERLTKKHGKGKALSILAHKLGRAVYFMLKNQEPFDMQKFLR

SEQ ID NO: 65598 - protein, 341 aa, unidentified
MAEVCTIGLDLAKHVFQAHGADASGAVLFRKKLRRAQVLSFFATQPPGTVAMEACGSAHHWAREIGKLGHAVRLIPPAYVKPFVKRQKNDAADAQAICEAAQRPTMRFVAPKSEQAQAVALVFRARDLLVRQRTQIINALRGHLAEFGIVVAQGPAHVSSLVRAVEDPAEPVPEIARAILSVLIEMLHTLDGRISLLDREIAQRAKEDVTARRLMTIPGVGPITATALTALAPPAETFKRGRDFAAWIGLTPLQHSTGGKQKLGATSKMGERTLRRLLIIGASAVLRWAARHGAPAGSWLSRMLARKPPMLVRVALANKMARMVWALMAKGGVYRAPAVSV

SEQ ID NO: 65599 - protein, 317 aa, unidentified
MAVASEVFVGIDVSKAELEVCWVPQADRLQVARDEAGLGRLVERLQALGPALVVLEASGGYEMPVVMALAGAGLPCVVVNARQVRDFAKASGKLAKTDRIDAQVIAEFAQAIRPQVRALPDEAAAHLIALVARRRQLVEMLVAEQNRLALSHAAVREDLKQNIAWLKNRLQDLDGELTRAVRESPLWRESDKLLQQVPGVGRVVSAVLLALLPELGRLSPKQIAALVGVCPFNRDSGSWRGKRSIFGGRAPVRSVLYMAIVSAIRWNPLIKVFYQRLLAAGKPKKLAMTACMRKLLVILNAIMRDRTSWNPNGALAT

SEQ ID NO: 65600 - protein, 353 aa, unidentified
MTINIGADVHSKSISAYAIPTFDTESEELEFCEEFNSRFAKFRNDYESLSDLAAFVRDREHGILVENTGFTNVLYWTLVNLGCTIIVALPTDLYEINQSKQKTDANDAKKLANYMRRRTLGETCFAECLMVDEVWMNRRVICRNYVTESEILSDTRRQLRSYILLKNLKPGKLTTDIASATSLASLSRYNDKPLALLITRARDTRLRMDLTLKDIQEEFRDEPMYLITKSIKGFGPVISAYLCSMIIDIDRFTTGNQFAAYFGIVPGQRESAESSPHCRITRRGDATARHLLTKATKLHIQFDKDRESSVSRMYDRLKSRGFPTKKALMACTNKMAHILFARLKAVSDGKEVF

SEQ ID NO: 65601 - protein, 342 aa, unidentified
MYYIGLDVHKKTISYCVKDASGQIYREGKIGASRLELDAWIRTLPQPRVVAMEATIFTGWIYDYLLPHAEQVKVAHPLMLRAIAAAKKKNDRIDAGKIADCLRCDFLPECHMASTQIRDRRRTLRYRHLLVRQMVQMKNRISGLLMETGVSHNKQRLHKVGYFRELLSTNEEINDSLRPLLRVSRDSIVRLQKTEYALVSSLQRDPFLADRIKRLRTVPGVGPITALTWALEMGDVSRFRSIRQAISYCGLCSDEKSSAEKIVRTPLSKQRNKHSQRVLIEAAKLAPKQDHDLALVYERERQKGNSNRATLAVARKMVAYLLAVDRAQRDFVPAVDYRLAVG

SEQ ID NO: 65602 - protein, 390 aa, unidentified
MFFVGIDVSSAKHDCCILDSSRKPIRSFMILNNRKGFSGLSAVLTELAAPEDIKIGLEATGIYGDNLANFLRRKGYNVCTINPLLCKKHQSATTLRKTKNDRSDAKNIALIVASEDLQPDQPLSYHIVELKSLSRARFLTVKDRSSLKNKVKRLVTVLFPELLDAFTDLFGASGMALMTRYPSAKALAACNLDTLTELLRTASRSRFGREKAEALRKLAKESIGTFSDSAVFQLRLLLKRIELLNTQIEMYDDEIRRLMDQLDSPILSLPGIGYTLGAMILSEIGDIKRFSSPAKLLAFAGLEPSVYQSGKFNPASGKMVKRGSPFLRWALLQAATYAPAFSITFTAYYDKKRLEGKSPSVAHSHVAKKLVRVIFALLSKNASFIDSFAA

SEQ ID NO: 65603 - protein, 349 aa, unidentified
MTLFAGLDVSVRETSVCIVDEAGKVLAERKVATEPDDLIELLRSISSEYGRIGLEAGPLSQWLVNGLAEAGLPVVCVETRHMKALLKAQQINKSDRNDARGIAQMMRVGLFKPVHVKTLASQERRMLLTSRKLLQKKLLDVEADLRGTLRNFGLKVGVVSTGGFEARIRELVADFRSLAAIVGPMLAVRKVLREQFAVLHRLLLGLVRHDPVCRRLMTAPGVGPVVALTYRAAVDQPQRFLHSKAVGANAGLTPKRVQSGESDYDVGISKTGDVMLRTMLYEAAQSLLTHSGARWSWLKAWGLRVAQRRGMRRATVAVARRLAVILHRMWVDETDFRWSNKTTGAAMAA

SEQ ID NO: 65604 - protein, 311 aa, unidentified
MYYIGIDVSKKDLSVFDGKDLKFINQEGLTSFKKYLKKKYSLSEIVIIFEPTGVYSLYLKEFCAENSIKSYILNPKQSHNFARALGIRPKTDKIDARTLYQFHKLINLKDIKVPKIDQVAKTLANYLVSYEFALKQRISLSHHLESLRDKQLIALIKKEQKRAKKLEDKIFHDILEYLSKNQNLKEDYQRLSTIPGIGEKAAIALLTLFKTYPGTSREQITALAGLDPVKRESGTSVKYKVKISKNGKGIYRKILYLPTLCATIHNQKIKIFYQRLLANHKPKKLAIIASMRKILLIAHAMYRDKTEYITV

SEQ ID NO: 65605 - protein, 338 aa, unidentified
MQATTIGLDIAKSVFQVHGIDGRGRVVLRKRVTRAKVLTLFANLPRCVVGLEAGGGAHHWARELIRLGHDARLMPPQYVKAYVKTNKHDAADAEACCEAVQRPSMRFVAVKSESQQATLMLHRVRDQLIRQRTATINALRGHLAELGIVAAQRQAGLRELMTALGEVEDHRMPPLAREVLQLLAARIRELAEQIAGLDRRLIAMTRSDPTCRSLTTVPGIGPVIATAFAATVPAARVFRSGRHLAAWLGLVPGQHRTAGKERRLGLSKRGDGYLRRQLIHGARALVRVSRGRTGRLWTWIEGLRARRPFNVAVAAVANKLARIIWVILSRGEDYRAAA

SEQ ID NO: 65606 - protein, 434 aa, unidentified
MKDTIARRAAEVTPDTLIVGVDMARRAAHAAVFVTRDGQRVSRLSFHTTSAGFAALKDGAQAAAQRVGAERILVGIEPAGSAWRLLAQFLDGAGIAYRLVNSFTLRRQREGDDLHHRKSDYRDAEMVTQLVRDGRYLRTQRHVGPYARLMVFQREYRRQQNVLYAETNTLLDLVDQLFPEFHVAFKDVLGVTARAVLRTGLTPAKIARLPLSALRARVRRAAQGRQAWLIRLSALQEVARGSVGLRDEAEQLARRVQQVLQRVDLLLAQCELSKGRLTAEVMALPEGRRLAALPGLGPVLAAGLLAEAGPLTRFSNIKQLPKLAGVIPVEHQSGMYRGRYTPMGKKGRPGLRWVCYRAALCLLRHNEVFREAYQRWTGRAERPLTPMQALGACMHKLLRVAYALARQEAATLPATNPILPGDPVPALGRRCEAA

SEQ ID NO: 65607 - protein, 373 aa, unidentified
MSKIRFIGLDVHADTIAVAVAEPGGEVRSVGTIRNRAEDLRKAMGRLGSPGQIRVCYEAGPTGYAVYWRLAALGIHCDVIAPSLIPVKAGDRVKTDRRDAEKLARCYRAGDLTPIWVPTPEHEALRDLVRTREDAKQDQLRARHRLSKFLCRHGMRPPETIKKAWTAKYMDWIKREVNFDQPALTATLTDYVHEVEHAAERIVRLEKSITDAIAQSPAEMRAVIESLQALRGVAQMTAVTIVSELGNLSRFSSPRQLMSYSGLVPSEHSSGGKTQRGSITKTGNAHLRRVIVEAAWAYQHKPWVGGYLAKRQQGLDQEITDIAWKAQWRLCTRYKKLAGRGKNKTQIVAAIGRELLGFIWAIAVKAEDRTCTA

SEQ ID NO: 65608 - protein, 391 aa, unidentified
MIYVGIDIASEKHDFFMIQAETGITFSKSSITIKNSDDGYKKLHESIQDFCGATGDSQIRIGLESTGIYHTNIISFLLSQNYQVMMINPILTNMARKASKVHCPKNDNLDSQTICKYMIDNSDKFLPYTLSLYHNEALKSLSRKRFYIVQDLRKAKLAVNSLVQQIFPEFKSFFSNIYGDSAIAILKEYGTPKNLAKAHTKKVASLIHGRCKCTAEQLIAAAKVSVGISEPHLAFQLTDAIEEMEHIQKRIKAYDAQIKEYVDMLCPNLLSIPGVGYTTAGLIAGEIRDIDRFHSAESLISYSGVDVTVYESGKYKAQHLMMSKKGSKYLRYALFQVARVIWQHDPVFQAYYNKKKAEGKHYYVILGHIQKKLCRVIYSVLKSGSLYSSAS

SEQ ID NO: 65609 - protein, 342 aa, unidentified
MLYAGIDLHKNYIVITVIDQGGFQISQIRINNDIKAIISFFSQFKEPVKIVLEATLNWYWIVDLLDNMGYEIVLAHPKRLRAIVDAKLEDDIISSHTLAQLLRNDYIPTVYYLSPQIRALRDLCRTRLFLVRQRTAIVNNCRSTLLKYNILAPETGKLYSPAGLSYLRDPDLNINEIYKFGLSCKTDIIKILNENIKILEGKIKQQTIIDNIIKRLMTISGIADVLAPTIRYEVGVMSRFVNDKRFASYCRYTPKIHKSGNRNKHYKTSKEGNAYLKWAFSEVTVCAIKYDSDIRKRYQKYKSKKGKPIALTIIGRNMTSVVYHVWTRDESYRGFKVCKSSK

SEQ ID NO: 65610 - protein, 488 aa, unidentified
MSAAGQQEGKKDPTLNARAPKRKARGSRCPQGKGHRRRSKLTITNPDAAGIDIGAQVHYAAVPEDRAEVSVRSFGAYTAQLDELVQWFKDCGIKTVAMESTGVYWIPLYQKLEEAGFEVLLVDAHQAKHVPGRKSDVQDCRWLQQLHSYGLLRAAFRPEDSVCRLRTLQRHRKNLVEYAAMWIQHMQKALNEMNLHLHHVLSDISGLSGLRILDAILAGERDPRKLASLAHYRVQKSQAQIEAALTGDYRPELLFVLGQSLQNYRQIQQQITQCDLSIEKQLAKMTDCATPRQAAEPMPSSPELGGGKSGKRKPPVALETSLAGHLKRILGVDLTTIPGLNVLAILTLISEIGTNMTKWRNEKAFVSWLGLSPNNKISGQRVLSSRTRKVVNRAATILRLAAMIVGKTDTPLGSFYRRKRAQLGGPKAVTATARKLGCLVYRLIKNGQGYNAPDLHTYELKYKDQILNSLRKRANTFGFDLVELPKAA

SEQ ID NO: 65611 - protein, 412 aa, unidentified
MLHPKMKKLFIGVDIHKRTHVAVIINCFTEKLGELRFENNKKGFEKLIEFVKSHLKRGITPCFGLEDTASNGRNFTRFLLNLGYTVKSVDASLTYTERRNQAISHKTDGHDAFCVAKVLLNQLDTLPDASIHDDSWTLQLLVSRRNSIVKVRAASKNQVHSYISHHYPSYPKFFTVTYCKAGMEFFQNFPSPSKLRGITKEELAEFLSIHSSGFFGIEHAEKILKLVEKDGDTSTEYQETRDFIVSHCIKEIKHCNEELEVIEAEIKKHMKQFPYKLETMPGINTITAAMLISEIGDIRRFSSSDKMCRYSGISPVACSSGDKDKNFRNKQGNRRLYEIFRDIASRNICRGRDKKSPINETFLEYYNKKISQGKTKRQALIAVMRQITKVIYSMMIHQREYIKPTVSKTENA

SEQ ID NO: 65612 - protein, 345 aa, unidentified
MEEATIIGVDLAKNVFHLHGARADGSIAFRKKLSRPQFHKFMAGLARCLVVMEACGGAHHWAREMMRLGHDARLIAPRYVKPFVKRHKNDANDAEAIVEAATRPTMRFVEVKTEAQQERAIVFRAREQLVNRRTELVNTLRAHLYEFGYIAPYGIHHMGRIEEIVADEGTDIPIAVRDICRGLIEQIADLGARADALKKRIDAMSREAETTRRLQTMPGVGPILSLAIEAFAPPMESFRRGRDFAAWLGLVPLQKSTGGKQRLGKMSKMGQRDIRRLLIVGAMSAVVGATRKRPPEGSWLARMMARKPRMLVAVALANKMARSIWAMLKKGEDYRRHQVTPPEMA

SEQ ID NO: 65613 - protein, 371 aa, unidentified
MEHTRFIGLDIHKERISVAVAENERSGAVEYLGEIANEPGAISKLCDRLRRPGKPLAFCYEAGPCGYGIHRQLTRLGHRCDVVAPSLIPTKAGDRVKTNRRDATMLARLHRAGELTPVWVPDADHEAMRDLIRLRSVVRQIVTRARQHLQGFLLRHGRKHGRGTAWRMAYRRWLSTLAFEHPAQQIALQDYVDAVMDAERRLKRVEEQVFGLLPDWNLRLVVDGLQAMRGIALINAVVLVTEVGDFTRFSNPRQLMAYFGLVPGERSSGETVRRGAITKTGNAHVRRALVEGAWAYRMKARIGRHKVDRIEALPKVVRDIGWKAQVRLCTRYRRLRARGKTANVVNVAIAREMVGFIWSIACTIQSAPRAA

SEQ ID NO: 65614 - protein, 342 aa, unidentified
MKKLRADENDLLKLLERWRAEAEKAGHKINRIAVAFEAGRDGFWLARWLRARGIEAHVIHAASVAVSREHRRAKTDRLDTEGLKRAFLGWLRGEREHCKMAAIPTFAEEDAKRPHRERETLVGEHTTIINRIKAALARLGIRNLNPRLKNAAERLEHVRTPEGEPIPPNTLAELQRDLARKQFVAQQIQQIEKARLEQLKQAPKAGPNLMVLLLMRVIGIGIETADMLVKEILSRNMRDRRAVGRYGGLTGSPNESGSKSREKGLARSGNARVRKGMIQLAWRFLEFQKESALAKWFEARTANARGSRKKMIVALARKLLIALWHFVRDGVVPEGVVLRPAH

SEQ ID NO: 65615 - protein, 361 aa, unidentified
MSNGSKEQPKVTAGLDLGDKYSYLCELDTKSGELIEEGRLRTTPEDFRRRFSSAGQLKIAIEVGTHSPWVSRLLEECGHKVLVANPRQTRLIYGHKRKTDKLDAHKLARLARADPELLYPIEHRSEDSQAHLALIHSRDALVRNRTQLINHVRGTVKSFGARLPRCSARSFHKKVRNQLPSELAEALGPVVETITSLTEQIEDYDRRIERLATERYPETELLRQVQGVGTLTALTFVLTLEDPQRFSESRAVGAYLGLVPGADQSGERDAQKRISGEGDEMLRSLLVGSAHYILGPFAQDSDLRRHGQKIACRGGKNTKKRAVVAVARKLSVLLHHLWISAEVYEPLHNARRLGTRREEVA

SEQ ID NO: 65616 - protein, 462 aa, unidentified
MNGSTQTVIGIDLAVTAASELAVATGATIEASRKVASTPKGLTEGIAKAAKGRSVAIVVESTAMAWLIAAVAALRSGVDHTLYRVSGRKSAALRAFYRSHTKTDHIDARVLARMPAVDDSLLSFSLPMPAELALKRLVVARHRLTTESTKLQNRVRSMLHWAAPGVLKAAGGTVSAGVVAVLSRWPNLASLAKARSATIALQGEWGSERAEEVRAAAAESVAFYEGFVDFSAVGLELEISLAQLGFLGSQVERLEERIAALHAQLYPKDRLVSVPGVGPVVAGVVRAVVGDLSRFANLASFRAYTGLVPREDSSGEVRRRGRISKAGPSVLRWALYLAADAARQCDPALADLYRRLMVERGRTHTQAVCAVASHLAGRIYAVARAGRDYLWRDLEGNEITKEQARAIAQGLRVDPETRARLRARREGGPRTPYARQPEVPQDVTQPSGDKLIDAALELASKR

SEQ ID NO: 65617 - protein, 371 aa, unidentified
MGWTACISSPALQHRLRRGRSMDRGSPAGQSSGELASLRRNHRRPRVRTVAGAGIGPGRIAQGRTRSAKDNEEQMDKPAVWVGVDVSKDQLTVALRPSGEQFSLANDGRALRSLIRRLAPLKCGRIVVEVTGGYETLLVASLQAAELPVVLVNPRWVRSFARSLGQLAKTDHIDARVLALYAERAELKFRELPDEQTRELCALCARHDDLLEMIVAEQNRLEHAPRRLLREIRAHISYLRKRLKHLDRDIDSAVRGSELWRQKNELLNSVPGVGPVLRASLLAWLPELGTLNREEAAALVGVAPFNRDSGRMHGWRTVTGGRAPLRRVLYCATSAAIIWNPLLRAYYEHLIGNGKLHKVALSRPCAACCSS

SEQ ID NO: 65618 - protein, 345 aa, unidentified
MEITTVGLDIAKRVFQLHGVDAAGKPVLRRKLQRSEVLAFFKALPPCLVGIEACGTAHYWAREIRGLGHEVRLMPPSYVAPYVKRGKTDATDAAAICEAVTRPTMRFVPIKTAEQQAVLMLHRTRDLLVRQRTMLVNALRGHMAELGIIAPQGIARVADLIAVLLGEDTTNVPALAREALRGLAAELEALDRRVKEIEVAIVTWHKDNEASRRLATIPGVGPITASAIVATITDPFQFHSGRHLAAWIGLVPRQHSSGGKRRQGGISKQGDRYLRRLLVLGATAVIRHSRSKSTAEAGWLKSLLERRPARLVSVAQANKTARIVWALLVRGEAYRIPAAVPSGAA

SEQ ID NO: 65619 - protein, 347 aa, unidentified
MDVYIGLDVSLASTAICVVSRQGKVVKETTAPSEPEDLVKVLHTLTGRIVGVGLEAGPLSQWLYQHLTEAGFPTVLMETRQVKGALKAMPIKTDRRDAEGIARLLQMGWFRSVHCKSLSAQEMRALLSSRKAIQQATISLELSIRGVLRNFGLKMGQVAKGRFEQRVLELVEGNPMLQAAATPILSARRALRQELAGVEKLLRDHAKADPVCRQLMTVPGVGALVALTFKAAIDDPERFSSSRDVGPWVGLTPRRAQSGERDIIGEISRAGDAGLRTALYQAATVMLNNARPNWLSAWAWAVAKRRGKKRATVALARRIGVVLHRMWQDSMEFRFTRADTAAATAAA

SEQ ID NO: 65620 - protein, 399 aa, unidentified
MLAVGIDISKSKSAAAILNSDGTVHTKPFEFHHSQPEMDALIRYIKEQNQPVTILMENTGHYHYPVLKAFEAADLPVCLINAYQMKKYGDMELRKAKTDKKDALRIARYALEKGYSLVPHTSMDQKYEDLRFLARQYDQRMGTLTTNKVFLINLLDETMPGITKLLSLTTRDPETSLTMLFIKRFKSYDRIKKMGRTRFLDSYNNLARKSRNRRAYGYGLAIYELAVNSITTRGENEFTLAAQDQCVDLVSESQKAADVIILQMQTLAETLPEYAVLRSMAGVGDRLGPLILAEIGDIRRFHSGKALNAYAGNDAPPYQSGTFESHNRHISKRGNAALRKYCFEVMQALKLTRPQDDPVYLFLIKKEQEGKAYNVAKMAGVNKFLRIYYARAMEALQRQ

SEQ ID NO: 65621 - protein, 348 aa, unidentified
MTLTIVETRAVTGGVDTHAGAHVAAALDHLGGLLGVQEFPATPAGYARLLGWLSGFGTVALVGIEGTGSYGAGLARHVTAAGIRVVEVDRCDRQDRRRAGKSDPLDAVSAARAAQSGRARGAPKGRDGAVEAIRALMVAKRSARAERTQTINQARALLVTGPDDLRARFAGHPAAELVTQIALLRPRPGDAVGYATRIALRELGRRAEFLDDQMDRLDELIIPLVTARAPGLLALYGIGPETAALLLVAAGDHPERLRSEAAWAHLCAVAPIPASSGKRTRHRLNRGGDRNANHALWRIVITRMSSHPATRAYVERRSKEGLSKKEIIRCLKRYVAREVYPRLRAPGG

SEQ ID NO: 65622 - protein, 403 aa, unidentified
MNAVGIDVSKGKSMVTILRPFGEIVSSPFEIKHTSSDIHSLIKLIHSIEGESRVVMEHTGRYYEALAHQLSAADLFVSAVNPKLVKDFNNDSLRKIKSDKADSVKIARYALDKWQSLEPYSITDELRAQLKVMNRQFHFYVKQKTAMKNNLIGILDQTYPGVNTYFDSPARSDGSQKWVDFASTYWHVDCIRKMSLNAFVEHYQNWCKRKKYAFNKSKAEEIYTKTKELVPVFPKNEITKHIIRQAIDQLNSTSVTVETIRTLMNETASKLPEYSIVMQFKGIGPSLGPQLMAEIGDVTRFTHKGALTAFAGVDPGVNESGSYAQKSVPTSKRGSSNLRKTLFQVMDVLIKTMPQDDPVYQFMDRKRTQGKPYYVYMTAGANKFLRIYYGRVKEYLSVLPDPS

SEQ ID NO: 65623 - protein, 363 aa, unidentified
MLLVGSKQSTKVTMKRATEKLYAGIDLHSNNVVIGVINQDGKRIAQRKLDCNLEQVVGFVQPFKPRLQAMAVESTFNWYWLVDGLRARGYAIDLANPAQIEQYKGIKHADDKHDAFHLAELQRLNILPKAHIYEARLRPVRDLLRRRTNLVHQRTALMLSFKSLYARTTGQALPLNQLKQLTSKEAVALYEHPANQLIAKVQVEQMAALAAGISRVEKAVLDCAREIPLYERLLTIPGIGKILGMTITMEVGDVGRFKTDGDFASYCRTVDARRLSNGKAKGENNAKCGNKYLSWAFVEAANFAKRHDEACRRWHDRKAAKTNPVLATKALACKLAKAAWHLMARQTHYDERRMFPELAMKRT

SEQ ID NO: 65624 - protein, 472 aa, unidentified
MGKGSGISRSDRRRNARKERLRGLLPRDGAVIGIDLGEDKQAVCVIDHDVRVWWRETARVKAHQLGGVLGRAVEAARAAGFAAVTVACEPTGPRWMQVQRLCAERGLVLVCIQPLMSHIAREQQDYTAHKRDESDAVLIARLAAELHCYVPEQLDEARAFLRGLGRRREQLVRASAASVLRIRDFLSVAWPSAVTAAVCPLDSVTWLAAVQVVTERCGADPARLAGAGEEEFCALVADAARAWGAKRADKKIARKVLAVLDDPDAVPWSRRGLFRRVRDELADLRRARAGLHAVEADMAAVLGELGLARLAGIPGLSVTGAAVILAEAGDPRRYETSGSLVKHAGLSPADRSSGAFEGESHISRRGRPALRTAAWRMVLPLLLHNPVMAAKYQAMVAGAESAAAESAAAARPGSARAAQAARAVRSARARARVACAAALLRWIRFMAVHGASWDPVAASAGRLSPEEPAAAA

SEQ ID NO: 65625 - protein, 464 aa, unidentified
MARKRKQQKQSDQAMLPVMRPNAAGIDIGATEIFVAVPADRDPQYVRSFPSFTQDLYALADWLDQCGIETVAMESTGVYWIPLFQILEERGFAVYLVNARHVKNVPGRRTDVCDCQWLQFLHSVGLLKASYRPAQEVCAVRSLLRHRESLVQMAATHVHHMQKALDQMNLQLHHVISDITGLTGLAIIDAILAGERDAKVLAQRRHTRIKASAEVIAKSLVGDYRPEHIFTLRQSVNAYRSYQVMIADCDREIHQWLKDFEAASKLSAADGEAESNPSTSVSETPESKGPSVSGLSSQLQRVFGVDLTKVPGIHVGTAQTLFGEVGPDFNKFKSASAFASWMALCPDNEISGGKVLLTGTRRVKSRAAKALRLAAQSLAHSKTALGDFYRRIRAKLGAPKAITAAAHKLARIIYHLITTRQEFDESRFAADQIRYQKRLEAKLHAKARALGFQLVPLNQAAVVS

SEQ ID NO: 65626 - protein, 390 aa, unidentified
MKDLLEISCGLDVHKEKIVACILTGPLGKPTRSEIREFTTLIPDMIALRDWIVSQNCHHVAMESTGIYWMPIYEILEDAFSGDITLLVVNARHMKNVPGKKTDMRDSEWISTLLRAGLLNGSFIPEKRIREFRDLNRYRKSVIRDITSQKNRIEKFLQSSGFRLSSFISDIFGASGRNIILHLMEHGQIDKTALDSCLKTKTRNRIDEILMSVNGTLSEHQKTFLKILMTHYDSLKEHLTEVETSLEEDMAPFTLQVEQLNSIYGISTTASCAIIAEIGIDMEPFKTAEHICSWAGLCPGNNESAGKRKSASVTKGNPYIKSMLCEIAWVIAGKRNTYLSAWYWRIKQKKGAKKAIVALARKLLVIIYTMLKQGTLFDESCFETRRKNCE

SEQ ID NO: 65627 - protein, 343 aa, unidentified
MSEVSTIGLDIAKSVFQVHGVDVDGAVVICKRVSRAKVLEFFGRLKPCLVGIEACPSAHYWSRRLQGLGHTVRLMPPSYVKAYLKRGKNDANDAAAICEAVTRPSMRFVPTKSEPQQSGLMLHRSRQLLVRQRTMLSNALRGHMVELGIISAKGRKGTAELIKIINADDDRVPAAARVSLAVLARQYEAIAAEIGVIEKSIHAWHRSCEESRRLEEIPGIGPIVATALVAEVGDWKAFSSGRNLAAWIGLVPRQHSTGGKDRLGGISKQGNRYLRWLLVTGAMAVIRYARHHGTRRLWLARLMERRALKVAAVALANKIARMAWAIMVRKERFEEAKLLPAAA

SEQ ID NO: 65628 - protein, 344 aa, unidentified
MDHFAGLDVSVKETSVCIVDDTGRIVKEVKVASEPAALLKVLRSPAYRFKRIGLEAGPLSQWLFSALAEAELPVVCVETRHMQAVLKAQINKTDRNDARGIAQMIRVGLYRPVHVKTLRSQKLRMLLTHRKLLQSKAIAIENDLRGTLRNFGLKVGMVGKVRFEVRIQELVENIPDLAVLVEPLLVVRRVLREQIVILHRRLLAIVREDEVCRRLMTTPGVGPVVALTYRATVDVPARFRKSKSVGAVFGLTCSRYQSGEIDWSGKISRCGDEMMRTMLYEAAQSMMHSKKWSWLKAWAMQIARRRGMKKAIVALARRLAVIMHRIWVDGTEFRWTREQVAAAA

SEQ ID NO: 65629 - protein, 384 aa, unidentified
MPEWPLGRRACRLDWHPSAEPEAATPNSILGPQHRGHPAFARLVRLGHAPAGYTRGGSPVNIPVLGIDIAKATFQACILGPDDRPRQRGFNNNATGFNQLAKWLRNSAPDLTRVCMEATGTYWRALANDLHARGFAVHVVNPKFIKHYGISVGARTKNDRADARLIAHFCLHQELPAWAPPSRALAELQGLVRRRHDLTQMRTEELNRAHESALTAAVQRSLKSNVAHLGKCVDALDTKIADALRSTPEFARNRDLLTTIPGIGPVTAAILIAEIGPIARFPSARELAAHAGIVPAEHTSGTSVRGNARICKVGSDHLRRALYMPALCLISRPGPLGDVARRIKARNTQDMVAVVAVMHKLLRVVYGVLKHEQPFNPELLAHNA

SEQ ID NO: 65630 - protein, 340 aa, unidentified
MSLYGGIDLHANNSVVVLINEQDEVLYRKRLSNELSTILEQLAPYQTTLKGLVVESTYNWYWLVDGLMEAGYRVHLANPAAIQQYDGLKYTDDHSDARWLAHLLRLGVLPEGYIYPKAARAVRDLLRKRAHLVRQHTANVLSVQNILVRNTGTRFSLKRIRELTKQELEGVLPETAHVLAITSSLAVLDCLSHQIKALEKSVHQRLHHTPAYEQLLTVKGIGPILAQTITLETGDIHRFPTVGHYASYCRCVASTKISNGKRKGQGNVKNGNPYLAWAYMEATQFALRFHPSAQRFYQRKLAKSHNNTPLARKTVAHKLARACYYIMRDLVPFDAMKAFG

SEQ ID NO: 65631 - protein, 341 aa, unidentified
MKHYVGLDVSQKETSICIVDESGRPIHQGRVKSDPGVLAAVIARKAPNAERVGLETGAMSSWLWHELKRTGLPIVCIDARHAHAALSVRMNKSDENDARGLAELVRVGWYREVAVKSEESQAARSILVCRSRLVRVRRDLENQMRSMLKECGLLFPRAAGGQFQRRVGDLITDGHALGPILRPLLSVHKQTCGELEKIDRTIRQLARADETTRRLMTVPGIGVVTALTYRHTIDDPTRFQNAAKVGAYLGLTPRRKQSGEMDVTGKISRWGDRLLRAYLFEAASVLLHRTKRWCSLKAWGLRLAKRSSMKKAQVAVARKLAIILHCIWVDGTEFEWGIQPA

SEQ ID NO: 65632 - protein, 343 aa, unidentified
MNSTTIAVDVAKAVFEVAVSEHAGQVRERHRFSRERFRRYLGEQPPATILMEACGSAHYWGREAQTRGHRVVLLPPHAVRPYVVRNKTDRTDAKALLEATRNDEVRPVPVKSETQQALAALHRLRSTWLATRTARINTVRGLLREFGVVIPIGARHVVPALGLLEDADGGVPSLLRPALAEAAREIRELEGRIRTVEHQLDAVAEQTPVVSRLCSIPGVGLLTATALVAAVGDVQRFPSGRHFASYLGLTPRERSTGQRRQLGAISKRGDAYLRMLLIHGARAVLCHAKTKTAPAPDRLRAWALHLERFRGHNKAAVALANKLARIAWAVWKYDTDFAAAPAA

SEQ ID NO: 65633 - protein, 404 aa, unidentified
MWYVGLDWADTHHDVEVQDEGGKCVGTRRFAHSHKGLNELKAFLLGIAASPEQLACIVETNHGLLISFLLEAGIPVYPVNPKSANQLRKAAGAKTDRIDAHLLAKLGRFDLAELRRLEPDSPSVAELKTLTRDQDALIQTQTRLVNQLTACLKEYYPAALHLFAKVQQRSTLVFLLAYPTPQAALAASVEEITATLRRGKHTNPRHAAPKIFEELHRPQLVASEVIVRAKSRLMLSLVKQLLVVIEEIASYDKAIRPLFLSHPDQELWRSLPEAGKRLAPRLLAEWGDDRRRHADGTSVQTLAGTAPVPYESGNYAIAHKRFACLKPLRNALHQFAWQSTQHEAWAREYYQRKRAQGKTHSMAVRALANVWVRIIYAMWVNKTSYQTATFEAAQHAHAPRQRIA

SEQ ID NO: 65634 - protein, 349 aa, unidentified
MQSKSQIRSIGIDLGKSTFHLIALGTRSQVVIRKKFSRTQLLEYTANLPSSLIGMEAGVGSHFLGRALREQGHEVRLIPAQFVRPFVKSNKNDYRDAEAIAEAVERENMRFVPIKTEDQLDLQALHRVRDRLVARRTSVINQIRAFLLERGISFRKGPASLRRQMPEILENADAKLSTAMRRLLDFLWQEWKGLQMQLESLNTELEQIASSDPSCVRLQQIPGVGPLVSTAVVSAIGNGAAFKKGREFAAWLGLVPRQWSTGGKAKLLGISKRGNPYLRKMFIHGARAAVLRVKREGSSLGKWMSGLETRTARNVVIVATANKLARISWAVLAKGNDYQPLHKAAVFPN

SEQ ID NO: 65635 - protein, 373 aa, unidentified
MTTIGAERPHTTGVAVILGVDTHLDFHVAVALDHLGRRLGESSVPATVKGYERLLRWAEAFGSLRCAGVEGTSSYGAGLARHLRSRGIEVLEVERPKHRRRSSRRNAGKSDPSDAECAARAVLAGEASGVPKSGDGQVEMIRALRSVRRSAVKARTQAANQLQALRVTAPEELRNRLRGLSTKELVSVASRFRLADGPRDATTATKFALRSVARRYETLSEEIFELEAHLDRLVGQAAPELISLPGVGTDSAATLLIVAGDNPQRLGSEASFASLCGVSPIEASSGKVVRHRLNRGGNREANRALYMVCLSRMRRDPRTQEYVARRTMEGKSKREIIRCLKRYIAREVYRVLVSCGSHSSPTGPREEAYSSVA

SEQ ID NO: 65636 - protein, 459 aa, unidentified
MGRKGKRTKGIEEAHPFAAMSQVNPNAAGVDIGAVEIVVCVSGENNTQIVKAFGNYTVDLQAIGAWLNEHKIKTVAMESTGVYWIPLFEVLESMGFKCLLISSRSLRRVPGRKSDIIDAQWIQTLHSYGLLESSFRPQADLVALRTMLRHRAQLIEHRAPHIQHMQKAMLQMNVQLSQALSDVMGETGQAIIRTIVKGERSPQVLAGFRDPGCKKSEEEIGQALTGTWREEHLFVLKQSLELYDFYTQQVEVCDKEIDRMYAMIRPDWEMGELPPIPKKKLHTHSKNAPKSAREIRAHLKRINGVDLSLVDGFGVSLAQIVTMEVGSNVSEKFPREGNFCSWLGVAPKHEISGGKVLKNKTLKTKNRAGQAFRMAAQSVKNSKDSVFGVMYKRFRARQGPSQATVSTAHAIARVVYRMLKYQVEFETINVNEYEKKYEEQQVNYFKKKAAKLGYQLVPV

SEQ ID NO: 65637 - protein, 403 aa, unidentified
MAKVFIGVDPHKLSATIEVVDERETVLATGRFDTDKAGYVAMRKTVSGWPDRVWAVEGSNGAGRPLAQRLLADGEYVVDVPAKLSARARLFDTGHNRKTDAHDAHAVAAVAVRTRGLRVLSYDVELETLRMLADRREELTRARIQTVNRLHRLLSELTPGRSKKDITTGQAKVILASVRPRDLAGKTRRRLAAEQLAELVVVEKKIKTLTKELKAMVLARGSTLMDLPGVGPVVAARILADVGDVARFADRNRFASWTGTAPLDASSGEQIRHRLSRAGNRKMNHMLHIAAATQVRLDTPGRAYYRRKLAAGKTKMEAMRCLKRRISDAVYRQLLADAQAAKAPCDGADPGGHCGASQESSAVDLPPHIDTSDQPLPGPARPTLQPPKNLRKTPARKTLQTTG

SEQ ID NO: 65638 - protein, 358 aa, unidentified
MKKIVIGIDISKEKIDATAIDVRDSQLGVVKLDYQVYENRPMGYRRMLVWARHLIKGIGLEDVLFCCETTGGYDRRLCDYIYAKGLDIWREGALQIKRSMGVRKGKDDKADSLMIAEYAMRHIDKAVIYETPDEKVRELKALFLYRHKLVQERTEKKVRASELKATAAKSGSMRFIVRDAMKGVRALDKSIRDCEKQILALIDSDEDLKRNYGHIDSIPGISIVNATAFIAYSNNFRSITTANKIASYWGCASFREQSGTSVDKKAYVKCFSSSLLKATLTQAAECSIKEHGIYNDYYLRLKAEGKPYGIIVNNVRNKLIHLVFSLVTNDMDYEKNHEFLRKKRKSEQGMPDQLEIIN

SEQ ID NO: 65639 - protein, 406 aa, unidentified
MFYLGIDIALNTHRLVMLDDNGERVSSGISFQNNTADFEKVLSKLKELSINPDNSICGLEATGNNWENLYCFLTSNNFKTILLNPHQTNKFREALRKKAKTDDIDAFVIAGLLRSNEFASSYVPEDKIQTLRELTKLRYEFIKDHKNYQRQVLALLTIIFPEYRQTALKNPFAIASIAIFKSFATAKHLSIAKPKHIEKIVRSIKGNNFNVKEIENLISIAKTSVYSGRCQESRALTLNILLTQVENFGKSIQQLEEQVNQILSPASNDDINSFPGSNLLTIPGVGPKTLAAILSCVGESGQAFSNGVKLIGHIGFFPQIYESGETKRANKLSNKGPAYLRHALYMASVACLKHNLQLRNLYHTKISQGKKPKQALICVAKKLAHLCLSMLHSGQDYNPARVFSYI

SEQ ID NO: 65640 - protein, 336 aa, unidentified
MNIKRIGLDLAKLVFQLHGVDHHERVVLRKTLRRSQMLVFFAQLEPCLIGIEACGSSHYWARDLTRLGHSVRIIPPQFVKPYLKGNKNDANDAEAICEAVSRPGMRYVAVKSEAQQSMQAEHRVRARLLRDRTALSNEIRGMLGEFGLALPVGLAALRRALPEILSQQEQWDNRFIRLLCELAEELQILDDRLARYDRRLKQLAQDDDRIRRLQEISGIGPVTASALVAAVGDARQFKNGREMAAWLGLVPRQHSSGGKNRLGHISKRGDSYLRTLLIHGARAVLNACGNKEDRRSRWLQSVAERRNRNVATVAMANKNARIAWAVLSREEEYRVM

SEQ ID NO: 65641 - protein, 377 aa, unidentified
MCGLDVHKDSVFVCILNEKGVVFQEKFGVLTTELERMVGVMLEHGVTEVGMESTSVYWMPVWRVIDPYVEQKLVNPYFIRQLPGKKSDVKDAEWIATCILKGLVRGSYVPEERIQQLRQYDRRIFDLNGDIVYKLTKLDAALQRCNIRLSNYVSTTDCRSYSDVVEAIADGETSPDTLLECIHGRIVNKHGADVIRSALTGVITSVDADVIGQLREEIELARRHRDECQKKMDELCREWFPKQYANLQTIPGVKARAATAIIAELGTDMSSFEDAAHLVSWVGLRPRNDESAGRIKARGITHGNKYLRQTIIECAWGASRTRDCFYAKFSYHQTVVRRKSRMKVLVAIARKMLTAIWFILHDGVAYRDFERDVTTAA

SEQ ID NO: 65642 - protein, 374 aa, unidentified
MIVVGTDTHKKTHTCAAVDALTASGRGELTAPARRGSFGNFLRWARKLDPERVWAIEDCRHVSGAFERFLVARGERIVRVAPKHMAGARRSARERGKSDSIDALSVARAALREGIENLPGAHLDGRALDIRLLSDHRDDLVNARTEDQQRLRWHLHDLWPEFEIPGGALDTAKWLGKVSRRLARAEQTTRVRVARDLVRQIAARTTRIRELEAELARLVSAYAPQLLAERGCGPLTAAKLIGEIAGAERFANDSKLARTSGTAPIPASTGQTNRHRLDRGGNRQLNCALHRLAVNKANWCPATAAYLERKQAEGKSRKEALRCLKRHLARRVWRLLRSPATSKPPPVEAAVAARPNAVETVVVEAAPYLMPCVS

SEQ ID NO: 65643 - protein, 398 aa, unidentified
MLSIGIDVSKGKSTVCGMKPGGEIVYTPFEVQHTREGMSELVSLLRGSGEEVRVVLESTGSYHCPVVAALLENGIFVSVVNSLRMKRFCSQSIRRVKTDQIDAMQIALYGLAYWQELQPTRLPEDTYRELQLLARQYYQMTSMLIKAKVDFNALCDQVLPGMQELMSDHAGRHKLSDFVLRYHHTAHILKMGETRFRKDYCKWAEKKGYRNHERMAALIFATAQNGIPVLPDAPSTQIVITEAIRVLHTVEASRDAILTQMQALAKTLPEYSLVREMPCIGDTLAPRLIAEIGDVRRFHSKRALIAYAGIDAPPYQSGKFSANNRHISKRGNRYLRKTGYEVMQSYVMHKPANDPIFTFIEKKRSEGKSGKLAMVAGLNKFLRVYYGKVTELYRSLPQ

SEQ ID NO: 65644 - protein, 335 aa, unidentified
MMYVGLDVHKRVCYGTVMTGDGEVMKRARFSNTQEGLEEFMDGLEETLVAMEAGYCWQPLYDWLEEAGHDVRLAHPKGVKALAKKKTDKVDSETLAHLIRADLLPESYVPPRDIRELRDRVRRRAFLVGMRTMVKNRVHSELAKRGIGLGAPLWTREGRALLRALGLEAVDQILPVLDTLNRQIAQISAGLKRMCGENPRAGLLTTIPGVGYYIAQLIVSEIGDVNRFPDSESLCSYAGLVPSVWQSGGSTWHGGITREGSRWLRWALTQAAHTHIRHETNLTRFYRRLAGKKPKQVALMATARKMLKVVYWMLRNDEPYHPGLGVVDPARCWDP

SEQ ID NO: 65645 - protein, 429 aa, unidentified
MRDGTAVQRDFQALKQQLELHRSAGVVGVDVAKNKHFATILDPAGQTIQPPFSFANTRSGFDSLSDRIEEMTRRHLINHWVVGFEASGGYEKPLAGYLSDKGYDVVQVKSYAVKRHREMITGSVDKNDMKDCLSVAYLVQQGHIDYYQLKTVSEEDVSGLVLLNEHLKARRRQLKQKIKQNVLKYIFPELEGFLKNIESQFVTEVLTHFPTPHDIVKAGKLEFKKTLLPRLKMRRVAFFLDELYALAENSIGLKADRWSTKALELRTYIAELRVVLEQRSAVSQRLLHKLETNEAYQLITTIPGVGFETGSTLVAEIGDISRFGSDKQLISFAGLDLVNYQSGEYQGKPRISKRGRPLIRKAAYQAVNSAIMATRPNLFNRKYREIRAKQGDTRDIRKKAKTKLCAKLLRIVYAVLTKKEAFRDEAADQ

SEQ ID NO: 65646 - protein, 337 aa, unidentified
MNNSVIGLDIAKNIFHLYTFVEGKAVKKKLKRAELLAYFANYPKSLIGIEACGSAHHWARELIKLGHEVVLLNARYVKSFVIGNKNDFNDAAGIFDAVTRPNKRSVTIKTIEQQDIQLVHKVRQGLVGKRTALVNQIRGLLGERGIIIPKSINQVRKQLPLILEDAENDLSHLSREVFAEQYTKIVALDKEIKAQDQRISQLCKVNVTAQRFLAVPGVGPMTASIVASDIGDGKGYQRSRDYSASLGIVPRQHSSADKQVYLSISKRGNRYIRTLLIHGARAVLKNCSKKEDKLSLWLQALIERRGFNKAAVALANKNARILWAMASQDKEYNALLV

SEQ ID NO: 65647 - protein, 406 aa, unidentified
MLFVGDDWAEDHHDVEVQDEAGRRLAKARLAEGLAGVTQLHELIAQHLGEDQADHAAIGIETDRGPWVIALITAGYRVFAINPLQVARYRERQSVSGAKSDAADAHVLADMVRTDSHQLRPVAGDSDQAEAVKVVARAHKTLIWERTRHAQRLRNALREFFPAALLAFDDLTAADTLELLAKAPDPDTAARLTITQISAALKRAHRHHVSQKAPLIQAALRSDQLRQPAAVTTAYAATVRAQTALITALNAQIKTMGAQVESHFGQHPDAEIYLSQPGLGPILGARVLAEFGDDKNRYADARARKNYAGTSPITRASGKKKTVIARYVHNDRLIDALGAQAFSALGASPGARAYYKDLRQRGTGHRAALRQLANRLVGILHGCLKTGTVYDEATAWPRHAALTTAA

SEQ ID NO: 65648 - protein, 429 aa, unidentified
MTNPQSTPEAVVWVAIDVAKDRHEALIEVPGWKSRKKFRVQNTAEELRSFADFLHGLASKVRIGFEPTGNYHRALAYFLHSEGFQLELISSLALARTREAMHNSWDKNDPKDAQVILHLLKTGLTQHYHDPMVHNLNDLQELSKTHHQVSLEKTRTQHRLLTHYLPLYFPEIARYHSSARSEWLWNLLIEFPTPHSMRQLPKGEFVRRAWPLVGRKVSKERILTDVYLTAQTSVGLPVEENSEAVAMLRVVLRQLVMLCQLRDSIEDRADALLSSNEDYQRLRRIPGIGPIAALTILAEAGDLRRFSHHRQFLKFCGFDLATEQSGQFRGLSRLSKRGNARLRAVFWMAASVAVRMRENSFRAKFERYMRSDPGSADRKRKAYVAVAAKVARVAFTLIRSGADYRCFHEVAVPGGRTRSARAVEAIPTS

SEQ ID NO: 65649 - protein, 241 aa, unidentified
MEIVVGIDVSKERLDVAILPQEEVFAVGNDHAGIDELAERLKGIGVDAIALEATGGFEMLAVAGLSAAGLTVLVVNPAQVRAYAHAIGRRAKTDPIDAAVIAAFVLATKPEIRPLRDAETQALSELVARRRQIVQMTVAEENRLRMALAKQAQKSIKRLLTALRRELESLDADLDSHIRKSPVWRVREALLTSVPGVGPTTARTLLAELPELGSLDRRQIASLAGLAPWTRQSGKWSTRQG

SEQ ID NO: 65650 - protein, 363 aa, unidentified
MNEITTVGVDLAKEVIAVCGADRSGKSVFTRIFRREAFAAWAVQLPPCVFGLEACGAAHHWARWLTSHGHTPRLMAAEFVKPFRKSRAVKNDRNDAEAVLTAVRQPNMRFVAVKSIEQQAYLSWHRMRQGWSEERTALINRLRGLLGEFGVWRGRSAEVLTRALPELEHDEALPLLVRRLLSEARPHLARLDEAIAGCEVEIKNHIKGNQVAKRLTAITGVGALTAAATLATVTDARDFKNGRQFAAWQGLVPSQDSSGGHTRLGHITKRGDTYLRGLLTQGARSALQAALTKEPLRRTRLQAWIVQLHARVGYHKTLVAIANKHARMIWAILAKGEDYDPDAWRRWRRTAASTPPAMCGVTP

SEQ ID NO: 65651 - protein, 355 aa, unidentified
MIVIGADTHKRSYTFSAVGAETGELRASQTAPATGRGHEQLLVWARGIDGERVWAVEDCRHVSGKLERFLLARGEHVVRVPPKLMAGQRRGSRQAGKSDPIDALAVARAALREGISTLPVAALEGPAREVKLLLDHREDLVGERTRIQNRLRWLLHDRWPELELPSDCLDRIVWLERLSGRLARSSQEADVRVMRHQVRRLRELVRETRALERELLLLVRGLQPRLLEIYGVSALTAAKLIAEIAGIERFRSPAKLARLAGVAPIPASSGARQRMRLHRGGNRQLNSAFHRRCHPSTRVPSCQGLRLAQARRGQDQARGRPLPQATPRSRDLHDHDLLRQRCTLSGAGLDIGATR

SEQ ID NO: 65652 - protein, 352 aa, unidentified
MPIVADTYTYVVGVDTHAATHQYAIVRADTGGVIDEQEFPTTAAGMARAAAWIGRRTAQKAGGDLDATLISIEGTGSYGAQLSILLGQTGYRVVDAPSPKRQRGSAKNDRIDAVIAARGALGQRTGELADARGGELQATLQTLLTARESMTTERTRAINALTALLRVHALGIDARRKPGRPVIRTVAAWRTRNEPLPLRTARAEAIRLATRILALDTEAQANERDLREVINQTRPDLLDLVGVGPVNAAIVLAAWSHPGRVRDDAAFAKLAGVCPLEVSSGRRHEHRLNRTGDRQLNRAMHSIAKTRMQYDPRTRDYVHRRTTAGLTRPRIRRCLKRYIARELHRKLSAPMA

SEQ ID NO: 65653 - protein, 360 aa, unidentified
MEVGQTVADHGVVGGVDTHKDLHVAAVVDELDRVLESRCFATTRHGYQQMLTWMRSFGQLRRIGVEATGTYGAGLLRYMQNAGVEVLEVTTPDTHDRRKRGKNDDLDAQNAAHAAFAGRRTVTPKSRDGMVESLRVLKACRKTAVAARRVALQMIHNTIVCAPDDLRETLRKMTRMQLIRTLAAWRPDLTDYRSVVSAYRITLKSLGRRYLDLHDEIADLDTMIVAIVDELAPALVARNSIGHGSAAQLLVTAGDNAERLQSEASFAALCGASPVPASSGKTTRHRLNRGGDRAANSALHIIAIGRLRTDPRTKAYIAKRVAEGHSKLEAIRCLKRYIAREVFSLISQRKREINQGRNAA

SEQ ID NO: 65654 - protein, 426 aa, unidentified
MLSGGSYLSFKIFKFNCCGLDVHKTWIYACIGITDSNNRTEYKQARFSSFSKGLHQLCVWLAKYNCNDVCMESTGKYWIPVFNILEQHKIRVTLSHPKYTKPMKGNKTDRKDAKWICDLYMCGMVKPSFIPPADIRELRDLVRYRFKLTCMITGEKNRAQNCLTVSNLKLDDVFSDVFGKSSRSITEQILQHPGETFDVAPFVHGRCKTPIEEIQAAVDGAVSKEQAVKLRQCLNHIDELEMHKSEIEREIFRLSDKYEDILTLIRTVPGFDKNPMTAIQVLSEIGGDMSVFPTAKNLVSWAGCCPHNDQSNHKIKSTRISRAGSYFKPVLVQVANALIKSKKHPEFSTRYRRIKARRGHKKAIIAICRMILTAIWHILTDLKPYTPEGFLDSRPVNKEKVLTTSQALNLLKQRGYFIKDDPLSVS

SEQ ID NO: 65655 - protein, 450 aa, unidentified
MSPLALDVVIKTGKTPVLGRMLSKYVGRKTSSIENDITKVRNHSRQRGNIMRVVFGIDVSKASSEVAILVNGEKVHGYIIPNDAIGFNRLLGDLKAVYQPEIVFEATGVYSRRLQAFFEDNSYAYTRLNPLESKKQLDSLRVRKTDKIDAEKLATSQFILNRKPSYVQEVLYQELRDLSRFYQNLTEDIVCAKNRLHKVLQITFPELENILSAPTGEQYWHLVMTFPCNSFVLELDDDTLTAIIRQSTAKRISEKRVTYLVDKLTKLANQSYCAVKKTSPMMEEVKYYAGELLRLSEYRQSVLEKMITLAQPLPEYEILLSIPGIAETTATSIIGELGDIRRFHSANQINAFIGIDLRHYESGDFLAKEHITKRGNPYARKILFKCIHNIASASHTNPCHIADFYEKRKRQSQVTSTKPHTIASIHRLIRTMYYLITHNKLYDYTSTQNR

SEQ ID NO: 65656 - protein, 356 aa, unidentified
MGKCTKLDFSGQSIYVGLDVHKKSWSVSIFSEQCEHKKFTQPPEADKLAQYLKRNFPGAAYQAVYEAGFSGFWAHDRLQERGVNCIVVHPADVPTTNKERTSKRDRIDCRKLARHLRSGELKGIYVPTRLQLEDRSLVRSRQTLVRKQTRCKNQIKSFLLFYGLELPEEMVQSRWSKKFLHQLAEIRMERDSGHLALQSYLEELQQLRKLIAAVNRGIILLSREAAYREMVQRLKTIPGVSTLTAMILLTELGDLTRFKNLDHLASYVGLIPDTKASGETEHIGGLTFRRNAQLRAVLIEAAWTASRLDPVLLLAFNQYCRRMKKTKAIVKIARKLLNRIRYVLKNQRDYVPGVIQ

SEQ ID NO: 65657 - protein, 295 aa, unidentified
MKLSAAFDTSTTKRAICVVNSRDGTVAFETTVANDPAVIFAALAPCRSRLDRVGHEAGRVAPWLHRELMAMGLPMVLMEARHAAVALQVQRNKTDKLDARGLAHLVRAGWYRSVQVKNEESHRLRLLLCHRRTLKRKLLDIENEVRQSLKVFGLLLEPRVQRASFAARVRDLVALDPLIAGVTECMLRAGAVLWTEFQRLHKLLVQIVGRNESCRRYCGIPGVGPVTALTVKAAIDDLRRFVKSKTVGAHFGLTLRRIQTGDSIDVEGHISKCGDGEVRTVLYEAGSAMLVRSKQ

SEQ ID NO: 65658 - protein, 350 aa, unidentified
MTTMTPLDVVVTGGVDTHQELHVAAALDQLGRVLGTAAFPTTVAGYRQLLAWLRQHGQLAKVGVEGTGSYGAALARHLAGNDVEVIEVARPNRQVRRRFGKTDVVDAIAAARAVLSGEATGVPKSHDGPVEALRTLKAVQRSGNKARTQALNQIHQLLITAPEDLRTRLRPLGRTDLLATCADFRIKPDDDSLHAMTRLALRELAQRVVHLDEQLTLVSKRLRRITAAAAPKLVAIKGVGPEVASTLLMTAGDNPQRMHSEAAFAALCGSNPIAASSGKTNRHRLNRAGDRQANSALWRIVIVRLSCDQRTRDYVDKRIKEGKSKTEAIRCLKRYVAREIYNSMPSTDAA

SEQ ID NO: 65659 - protein, 321 aa, unidentified
MTEEAVCVGVDVAKITLDVAVSDSEEAWQFANDDEGISQAVRHIAGLKPAGIILEATGHLEMPLAAALQAARLPVAIINPRQVRDFARATGVLAKTDAIDARILALFGVRVRPEIRPLPDKKACEMGSLLTRRRQLVQMLTAEHNRLLQADKDVQPSIESHIKWLEEALSGINDDLEGRIKRSPSWREKDNLLKSVPGVGKVVSSTLLIELPELGKLNRRKIAALVGVAPLNRDSGIMRGKRTVWGGRARLRAVLYMAALVASRRNLIIAAFYQRLVDAGKAKKVALVACMRKLLTILNAMIRTMTVWQPETILQYVSKEA

SEQ ID NO: 65660 - protein, 292 aa, unidentified
MAQKGTIVGIDVAKGKIDAAIRFGAEASFANSAEGRRELLAWLKEHGVCKAVMEASGGYEKSWAALLRGAGVEVVIADPNRVRHFAKSAGQLAKNDPIDARMIAWFGEVFGHASGQPHDEERQELDQIVTARLGIARLKEQIENWGEHEQPKAVQKAQQALLKAVAIQLAKLETIIAAKIDKTERFAQRAEIIQSVPGLAGTAAAGLIAFLPELGLVDRQAAAALLGVAPFDADSGQRRGERHIQGGRHKLRKLLFMPVLSAATQHNPVLKACYQRLIAKGKKAPSSPACAS

SEQ ID NO: 65661 - protein, 397 aa, unidentified
MNRLLYIGMDVHKESFTLSTYHVTLDESELTQDFIGNPLKITDATASGVEKYVKNLKTMLNIKATDNVRIQCGYEAGCLGFDLYFQLKAKGIECVILAPSTIQKSANAKKKKNDPLDSKAIAMALANKTYKSVHVPDKDDLNVREYLRMRNAHRDAVKKVKQQILAFLLRQGIKYSNTNWTKAHITWLHGLKFDHALLKETLDEYITSLENYVAKLERLDKRIEEFAQGDKYQEKAAELGCLLGIKTQAAMTMMSEISDFSRFRTASEFASFLGLVPGENSSGEKTQRTSITKSGNSQCRKTLIEAAAGICRGKVGHKSKELLRRQALCNNPIAISYADRANERLRSKFYRLNLRNGKPANVAKTAVARELACFIWGIMTDTYNGKVPRNDEYALGK

SEQ ID NO: 65662 - protein, 400 aa, unidentified
MNPVIGLDVSKGESQIQAFLDKGKPYGKSFSVPHTTEGLNTLLHFLKVVENEADMKPSVILESTGHYHTPVIQFLEEQNYLYIMVNPLLSYQAKKSSLRKVKTDEIDAFRLCELYYKEELEPYKKRGIQLLNLRNLTRQHETLTGLYVQAKLQFHSILDQVFPEYKGVFGDLYSKVSLNTLLEFSTSESVIQAGESKVTDKIASLCMSRSERWAQERAKKLYEAAQRNPFKSIFYQSHLISLEMYIQLLLQYQEHLAKLDDQIDALAGEIEEYKIIQSIPGIGEKIAATIISEIGEIERFNHPKKLVAFSGIDPSVHSSGKFTATINRITKRGSSRLRHALYMAVLCGIRSSRNKKLKEFYDRKREEGKPFKVAMIACVNKLIHWIYALLKRKEAFLDLV

SEQ ID NO: 65663 - protein, 360 aa, unidentified
MFIERTSVGLDVHARSVVACGIDTVTGELIRARLTPQHAEILGWLGRLPAPVAVAYEAGPTGFGLARALGAAGVRCEVLAPSKLARPAGERVKTDARDALHLARLLRLDQFTAVRVPSAAEEAARDLVRAREDVRGDLMRARHRVGKLLLRQGIVWSGGVTWRPAHHVWLGAQRFEDMALQAAFDSAYEAVVLAEGRRARLDQAIAAMAAHSAWSQTAARLGCLRGIDILTAFALAVEIGDWERFTGASIGAYLGLVPSESSSGRSRSQGPITKTGNGHARRLLVEAAWHHRRRYRPGATMQARWQRAPAAARARGHLGNQRLHQRWNTFTAHHKKPVVANVAVARELAGWCWSLAILPD

SEQ ID NO: 65664 - protein, 378 aa, unidentified
MDVIYPRCAGLDVHAETIVACALWEEDGHIQKDIQTFSTFSKGLGDLLEWLEEHGVTHVAMESTGVYWKPVFAFLEGYVDLTLANPQRIKNVPGRKTDVSDAEWIAKLLRHGLVEKSFVPPADIRELRDFTRLRKKWVGQLTSEKNRIQKVLESSNVKLGSVLSNLFGVSGKDILARLLEKGYVDKDELDQCLRGRLKKKKQAVYDSLLGTLTEHELRLLRLLWKHVEELEQFIEEVDQHIDRLLEPYREEVELLMTMPGVKKQTAAVIIAEMGTDMSVFETPERAASWTGLSPGNHESAGKRKSTRTTKGNPHLRSALCEAAWSAARSKTHPLSRKFWSLAARCGKKKAIIAIARRMLVIIFCMISRKEPFRQPQLI

SEQ ID NO: 65665 - protein, 387 aa, unidentified
MPQLNDLSKSLVALEQDATLIAVIEMSQSSWLVAGIVPGVERQPLKKLTTDQNALLQLLHRWRKEANEAGHVIKRITVAYEAGRDGFWLARWLRAHEIEAYVIHPSSVPVSREHRRAKTDRLDTELLKRAFLGWLRGEPKHCSMAAVPTIADEDARRPSRERENLVKEITRLVNRMKANLARLGIRGFRPHLAQAAGQLQTLQTPEGTAVPANTLAELRRDMDRLRFVKQQIKQIEAARVQRLESEPGERRHAMVYLLARVVGIGVESADMLVQEVFSRKLRDRRAVARYAGLTGAPDESGNKRRERGLAKAGNARVRRGMIQLAWTHLLHQKDSVLAQWYRARTADARGRTRKIMIIALARKLLIALWRLVTTGEAPAGLLIRPAA

SEQ ID NO: 65666 - protein, 356 aa, unidentified
MASIKYNREFFKGKDIFVGIDVHKSTWTVTAICDSEIVYDGAIPADFERLDNILCRFSSGKVHTVYEAGIFGFWLHDLLVEKGYDSMVTPPSLVPKIGGKVKTDRRDSKKLAGMLAGGLLKRVYVLSPEERADRELVRTRNQIERHRKRVQNQIKAKLTFHGVKKPKWLNEKHWSQEYLRWVERISWEYENLRTSMAYLLDLFRHLDRQYKELNQKIKGLAQTEKYKERVKILTSVPGIGVFTAMTILVELQDIERFRKADEIASFLGLTPSQYTTSGKVRFGHITQCGNVHVRRALVESSWTLIRYDKAMGMKYERLKKQCGNGKKAIVGIARTLAIRTRRLLLDKQEYALGVIE

SEQ ID NO: 65667 - protein, 436 aa, unidentified
MASHCQFYNYKFQEVILLSFKILKFKCCGLDVHKTWIYACIGITDSNNRTEYKQARFSSFTKGLNELCDWLAKYNCTDVCMESTGKYWIPVFNILEQHNLWVTLSHPKYTKPMKGNKTDRKDAKWICDLYMCGMVKPSFIPPADIRELRDLVRYRYKLTCMITGEKNRAQNCLTVSNLKLDDVFSDVFGKSSRSITEQILQHPGEKFDVAPFVHGRCKTPIEEIQAAVDGAISKEQAVKLRQCLDHIDELNKHISELEQEILRLSDKYEAALNLIRTVPGFNKNPLTAIQVLSEIGGDMSVFPTAKHLVSWAGCCPRNDQSNQKIKSTRISRAGSYFKPVLVQVANALIKSKKHSEFTSRYKRIKARRGHKKAIIAICRMILTAIWHILSDLKPYTPEGFLESRPVKEGKVLSTSQALNLLKQRGYIIKGEPLAVS

SEQ ID NO: 65668 - protein, 434 aa, unidentified
MSKRNHLKERLNEKLEAVTFKTLIVGVDIAKHNQWARFVDCRGIEHNKALKFENNRNGFNTILTRICEICKQEDFNKVIVGMEPTGHYWKAFANFLLKQAKITVVLVNPYHTKKAKELDDNSQTKSDKKDALTIARLVKDGRYFETYLPHDVFAELRGLSTTRYSMNKRKKAVINTITAVLDEYFPEFGTVFKHPFKGKASMHLLKVCPIPKFILELGEDGVLDEIKKAVKKTVGRKKAAQLVEAAKDSIGVDYGEYAARFKIQQLMEELELIISQLEALETEMSETLKKTEISEYLLSITGMGVVSLATCLGELGDPLRFESARQMSRMAGYNLIEDSSGKSKSGTCISKRGRKNLRSVLYQISLTMVANNKELRQLYDYLKTRENNPLKKMQALVVISKKVLTLVFTLSKKKAYYEPELVFGSYRKSQLQAA

SEQ ID NO: 65669 - protein, 429 aa, unidentified
MNYTQNEKIMQVKVSTLVVGVDIAKNKHAARFFDFRGIEYDKAIFFENNEAGFKKLLNWISKVSEKENKTSVIVGMEPTGHYWLPLEEYLRRKTDFLRVVVNPAHVKKSKSLDDNSPTKTDRKDAKVIAKLVIDGRYSVPHMPEKEYADLRVAMTHRERLVKDIINLSNKIQQLIDKYFPEYQTVFKKWSGKASVAILKELFLPYLILEKTDEEIVGIFKKGANRGVGIRRARKLKKAALNSIGIKEGGEFTRYELRNLLEQYELLNDQKELLEEKVEKLFNSMEEAKYMESVKGVGIITVAGFIAEVGDINDYDHPKQIQKLAGLNLKEHSSGKHLGQTRITKRGRPRLRALLYRVMLPILAKNQEFRQLHEYYTTQRDNPLKPKQSMIALACKLIRIFFALGQKHVMYDGEKLMNDIDRNLDLQEVA

SEQ ID NO: 65670 - protein, 343 aa, unidentified
MQTITTIGLDLAKSVFQVHGVDAGGQVIVRRQLKRRYVLTFFQKLSPCLVGIEACGSAHHWSRELQALGHTVRLMPPAYVKPYVKRQKNDATDAEAICEAVTRANMRFVPTKTPEQQSGLVLHRARHLFIRQKTSVINAIRAHLAEFGIVAPVGRHGVEELLNVVADPNDKRVPEIARACLSAFGAQLRMIKEQILEFDRLISAWHRSNELSMRLDEAPGVGPVLATALVAAVADPKSFRSGRNFSAWIGLVPKQHSSGGKNRLGNISKQGDRYLRGLFVAGALAVIRYAKIHGTTHRPWLTALLARRPTKVAAIALANKIARMVWAMMARGERYKEPFALAR

SEQ ID NO: 65671 - protein, 341 aa, unidentified
METTRHIGVDLHRNKFTCCMQLANGRNYLSEWKLENLPVFVKKLRLTDAVAVEVTGNTRLFYDAVAPHVARVVAVDPNQFRVISHSVKKTDPNDARSLALYLSKGLLPEVRMKEKTQAQIASLTQTRDTLVKLRTALKNKVNNILSAHGINLDKEALSSEKKLTEVLAMQFDPMIRIELKVIVEQIRSLNQSIAELEKIITEEGQKLKGHKNLTSIKGIGPLTGSILLSVIGDIHDFADEGKLAAYFGIVPRVNNSNETERSGRITKRGSKLGRTALVQCALIAQRYSPYLKKFYEKTKARRGTGKAIIALARKLLGIVYRTLKNNWVFKDFPNFVLAEES

SEQ ID NO: 65672 - protein, 358 aa, unidentified
MVDKVTEAAVVGGVDTHKDLHVAAVVDQNNKVLGTQYFSTTRQGYRQMLAWMTSFGTLKRFGVECTGTYGSGLLRYFQSAGLEVLEVTAPDRMERRKRGKSDTIDAECAAHAAFSGIRTVTPKTRDGMIESLRVLKTCRKTAISARRVALQIIHSNIISAPDELREQLRNMTRMQLIRTLGSWRPDASEYRNVTNVYRISLKSLARRYLELHDEIADLDVMIAAIVDELAPELIKRNAIGYESASQLLITAGDNPQRLRSESGFAALCGVSPVPVSSGKTNRYRLNRGGDRAANSALHIIAIGRLRTDAKTKEYVARRVAEGHTKMDAIRCLKRYISREVYTLLRNQNRRINSIPITA

SEQ ID NO: 65673 - protein, 404 aa, unidentified
MYYVGIDVAKEKHYVCILDGTKEFALKPFWIYSDIVGLTELVKRFAELSLNNDDFIIGVESTGAFSENLYEYITDADYKVILLNSYQTAKYRDFSTMKKIKNDSIDAYVIAELLATGKYKESHISNDDYHSLKVLGRLKRSLDDKIKTIKREISTVMATVNPEITIVFKNIFTKTALEIIKAYPTAMDIKKATPKKLTKLFRNIKGNNFNEDKANQLIDLAKNSIYAGRALESRALMIKTNIKILELLSQEKAEIELQIDLLVYGKIDDVDSSIDNLKTIPGVADKTIAALLGECGDIKRFSSAKAFIGYLGLYPTQYQSGNSLSVGRLAKRGIPIAKHALYMAAVSSVRHNTQLKKIFTDKVSSGKSKKEALIIISKKLATIIYSVFKYNKPYEPNRVFIPNR

SEQ ID NO: 65674 - protein, 355 aa, unidentified
MMNDKQVKVYGGIDTHADTHHLAVIDQAGRRLADAQIPTTATGYQAALRFLGSWPGLVSVGIECTGSYGAAVTRAVREAGITVFEVNRPNRFDRRLHGKSDPFDAYSAAEAVLGGRASAAPKGGDGLVESLRVLRTSRSSALQARTATINQIKGMLITAPEDLRTRYKGLSTPKLIAALAASRPTPTPVTAAEATAYSLRLLARRWQALTGQIEDLAGHLQRLLDDHAPDLMRVFGCGRDTIAQLLITAGDNPDRLRSEAAFAALAGVCPIPASSGKTKRHRLNRAGDRQANSALYHIVMVRLRYNQETRDYVARRTAEGKTKMEIIRCLKRYLVRQLYPLIVETLHPRKEVAAA

SEQ ID NO: 65675 - protein, 415 aa, unidentified
MYERVAAIDVGKKIIAVAVRTPGERAGKRRQQVRQYNTFHQTLAKMVAWLVSEGVTHVTMEATGIYWKPIFHALCAAEHPLEVLLVNARHVKNVPGRKSDAMDAVWLAELTECGLLQGSFIPPPEIAAIRELTRYRKKLIEQRTSELQRLAKVLEDSGIKIDSVASKLTTLSARDMIEALIAGERDPAVLAALARGRMRPKIPELTMACAGRFGVQHALMCTLHLEHIDHLADMIARLDTRIDEATLPFARQTELLATIPGIGERSAQVIISEIGVEMSRFPTAAHLASWAGLCPGNNESAGRHRSGKTRKGNQELCEILTECAWAAGRTSTYVGAQFRRFHRRFGKKGGQKAATATAHTLIVIIWHVLAETTAYRDLGPDYFTRRIDSPDARKRRLIHELEALGHKVTIEPNAA

SEQ ID NO: 65676 - protein, 391 aa, unidentified
MTYVGIDVAKDKHDCYIVNSDGEVLAEVFTIPNDQIGFNLLFQKLQSVAPDLGKIKVGLEATGHYSYNLLGFLLDKGLHTYVINPLHTNLYRKADSLRRTKTDPIDAHTIAGMIMSNVDLTSYTAKSYHNEKLKSLTRYRFDKVRERAKLKSSVARLVNILFPELEKLVPTLHMSSVYALLSEFPGAKQIASCHLTRLVHLLSASSKGQYKRNKAIEIREAARSSIGSVMPAKSLELKHTIHLIEVLSEEIDEIETLIREIMDENPSPILSIPGISYRMGAMILAEIGDFTRFNSPDQILAYAGLSPSTYQSGKLANAYPHMEKRGSRYLRYALFNATKYVCIWDPSFAAYLAKKRAEGKHYNVAISHAAKKLIRVICALQKSGKPYCPAT

SEQ ID NO: 65677 - protein, 414 aa, unidentified
MDVLYPRCAGLDVHKDTVVAAVRSAANGPANTEVRTFDTTTPGLLGLSGWLAECGCTHVAMEATGVYWKPVWHILSDGDVTLILANAAHVKNVPGRKTDVADAAWLADLLAHGLVRASFVPEAPTQAMRALLRTRKQLVREQASHAQRIQKTLEDANLKLASVLTQVMGKSGRAIIGALIAGERDPDALLRLVQRGVKAPPERLRAALTGRVTERHRFLLRLHLRQIDALEAAIAEIDQEVDRDLDPFRQAVRLLRTIPGLSDLTAQVIVSEIGLDMSRFPTAGHLISWAGLCPRNDESAGKRRSTRLRKGAPWLKTTLVQCAWAGTRKKGSYLQAQFQRLRHRRGPKKAVCAVAASILTAAYHMLRDGTFYQDLGPDHLRRATPEAQACRLARQITKLGFTCTIAPADTRVSV

SEQ ID NO: 65678 - protein, 399 aa, unidentified
MKTTDRRAVIVGLDVHRRFSTVTARNAEGKITWRQRLDHRDRVRLRKCLDDWPGGIPVILESSFGWEWMCEELEQVGLEPLLASSRKVAAWRDARGMAKSNRTDADLLSELGSQKDRWWQVWLPPPEIRDRREWLRYRMSLVRMQTGLKNRIHAILHRHGILHDLSDLFGTEGRRMLTWLANDTQGECLRESAQATLKGYLQLLDHVRRQIARVTRTVYRQLKALPEAQRLQSLPGVGRILAHTILAEVGDFGRFRSAKHLASYSLLAPRAFDSGEDDKEAPKGRHVGHIGRRTLKWAWIEAAHGAVPRGGRFREVFDRYTDGGQRNRNRGYILVGHELCRTAYAISKKETEYRDDPPERPGSSKKRAASRRRDRPVRGTSQQSRPGTGQPEAAMVAVG

SEQ ID NO: 65679 - protein, 336 aa, unidentified
MKKISYFIGVDISKSTLDVAIIDQNQPNAVLHSVFSNTKTGINSLLSWVRKNTCKDKEEVVFCMEHTGVYGLPLCSTLSEKNLLYSLVSALEIQRSIGIQRGKSDKADSKAIAKYIYLRRDNIKVTRMPDKELLKLRYILSQRDRVIKAKVMFENSKEVERFCDTAASKVLEKENKAIILFLKKRITHFDTLIEKIIIENPVMENQYKLITSIPGIGLQISANIIAYTQAFTLFDCPRKFACYSGVAPFPYQSGTSIKGRSRVSHLANKKMKSILSLGALLAIRNDTEMRLYYQRKVNEGKNKMLVLSAVRNKLLQRIFAVVKRETPYVKLALHIA

SEQ ID NO: 65680 - protein, 326 aa, unidentified
MQGKEASEQEANAKSSVGIDVSKDRLDVHVLPCGARRALANSSAGIRQLKRWLQRFELDLVVVEATGKWHRRVWRSLSASGIPVAMIDPFKARMFAKANGVLAKTDRLDAAVLARFAAVMMPAIRLPPAPVVEELAELVSGRDAAVAELTGLKNQVSAATVGVLRRQLMQRIARLADDIDALESEIMARIAADEGLARRYQILTSIPSIGPVVAATLIAHLGELGGLTDKQIAMLAGLAPIADQSGKRDGKRVIWGGRARVRHSLYLAAVSAVRCNPSMRDFYRRLRAAGKSAKLALIAVARKLVLLANVLIAQNRTWQPSPPLHA

SEQ ID NO: 65681 - protein, 345 aa, unidentified
MEVTTIGLDIAKNVFQVHGVGDGGSVVIRRQLRRSRVVPFFEKLPPCLVGIEACATAHHWAREIAALGHEVKLMPAKYVKAYVKRNKNDAADAEAICEAVGRPTMRFVPIKTPEQQALLMLHRTRKLLVRQRIRLVNAMRAHLAEFGIVAGVGRNGVDRLIKLIEAGDARIPAPARDCLLVLRDQLALARQQISAADRRILAHHRESELSRRLEEIPGVGPLIATALVASVPDPHAFKSARDLPAWIGLVPKQSSTGGKERLGHISKAGNRYLRSLLMIGAFSLIKRAKLGKGKHHPWLIELMARRPVKVAAIALANKIARIAWALMTRGTRYREPQVEPMPHAA

SEQ ID NO: 65682 - protein, 360 aa, unidentified
MNSIGIDVGKKQCRASIKDQHGRILDELSFSNDIAGIRSLLSTASRYGDARAVVESTGNMWMRIHDVLEENGIETVLANPVKTKLIAQAKIKSDKLDSRILADLLRGDLVYESYVPSKEFREKRSLVRHRVGLVKARTALRNKVHALLDKYEYKTKLSDIFGKAGLGWLKELELSPIDRVIMDTSIASVVNLSIQIGVVSTHIAKYAWDSRDVRLLLSMNGFDIFSAMVIATEIVDIRRFPTPWKLVAYAGLAPSQRESAGKTRYGKITKQGSRVLRWIMVQSARNAVRCDDRFKAYYERIQHRKGDGKAVVAVAKEMLVVVWHMLTKQEEYRGVREELYKRKLAKLEKFSSGSTEELDE

SEQ ID NO: 65683 - protein, 402 aa, unidentified
MNCVGIDVSKGKSMIAVMRPFGEVVVSPFEVLHTDSELSKLAGLLKSLDGETRVVIESTGNYHAPVAWLLHDAGLYVSVVNAMLVHDYGNNSLRRAKTDKKDAVKLANYGLDHWLILPRYVPEEDTRLMLKTCYRQYQQYSKVQTMLKNNLISLLDTAFPDANRLFTSPPRADGSEKWVDFVAAFWHCECVCGLSEKAFTAKYQKWCKKHGYNFSKGKALDIYASSCGHFGVMPKTDTAKLLVEQAVSQLRATSAALAALKQEMQSLAASLPEYPVVMEMFGVGPTLGPQLMAEIGDVRRFHSKKALVAFAGIDAPPYQSGQMDVRSRSISKRGSASLRRTLFLVMGVILQHAPMNEPVYQFMNKKRSEGKPYRVYMIASANKFLRIYYASVKAYLDSLEHD

SEQ ID NO: 65684 - protein, 329 aa, unidentified
MKVQHIIGADLSKKTIDLVCHLLKNHIQIENSIPGFKGLMQWFRKQKINPFETMIVMEHTGLYSYCFESFLHKHQIAFCKVNALAIKRSIGLVRGKTDKLDAVRIAAYGYEKKDKLTTDVPASDALKRLQMLHSTRKRLVKQRAALTCAIKEYRHIGIPEKDIIIQAQLQLIKSFDKQIEKLMAQIETIIDEEQSLKQNFRLLQSIKGVGKILALTTIIKTQNFTRFTNARKFACFCGTAPFEHSSGTSIKRKSRVSHLADKQMKTLLDLAAKSAIQYDKELREYYLKRTQSGKSKMSTINVVRNKILYRMFAVIKRQTPFLENYLQTA

SEQ ID NO: 65685 - protein, 364 aa, unidentified
MSQSNWLAAAIVPGVERQPLKKVDPDADVLLKLLHRWRGEAVQAGREIKRIAVAYEAGRDGFWLARWLRVHDIEAYVIHPSSVAVSREHRRAKTDRLDTELLMRAFLGWLRGEKRHCSMAAIPTIENEDARRPNRERESLVGERTRLVNRIKATLARFGLRTFKPTLRKAEEKLAGLRTAEQTSLPENTLAELRRSMARLRIVCEHIKQIEHERLRQLEATASVAKGPHAMVRLIARVIGVGIETADMLVNEILSRDLRDYKAVARYAGLTGSPDESGRKRREKGLARAGNARVRRGMIQLAWRFLMFQKDSALAQWYRERTANGRGDTRKTMIVALARKLLVALWRMVTSGEVPEGVLVRQTA

SEQ ID NO: 65686 - protein, 387 aa, unidentified
MTKNKGRVVGLDVHPDSFAGAVVQGRDPASAMVLRTSTRVELERLEEWARRHTCTEDTLVLEASGNAFAVAARLRAIDREVEILDSHHAGKVGKVYCANDRVDAVKIARIYLSALSPIVWQPDQKTLERREIFSAYQAVVKESTRAKQQLRSMLNEHCVRLEKGFRLCHPQAIARLLKLREWTPARRMLLQQLHGSLMAARARRTLLRRHMAQEIVAEEALLRLTRLCGINLITLYGVVAAVGDVRRFTQSKKLVAYLGLNPSVSQSGNFQGSGALKRHGRGALRALLIQSGKKLLEVNNPLQKWGLAVAARRGRNKAAVAVARKLCVALWHVMMGHAIGTLERLDTLQTKLSKFATEIGPAALIAFGYHNKADFVEKKLYVLRSYP

SEQ ID NO: 65687 - protein, 344 aa, unidentified
MDNHTQYLGFAGVDLAKKVMQIHFVTEDGEITDKSTKRAEFLDFFRNRGKCLIGMEACGSSQDWARKLEAMGHEVHLMSPKAVKPFVSGQKNDHNDAIGIYKAMFNGVRRVPVKSTEIRDLQTLRRIRSQVTKDKVKEINHVRGLLAEYGIVMGKSLKAFNKDISSALERLKERGDVSPLVAEELRTTVEAIKTKIKRQKKLDQEIEQLARGCKSYENFLKTPGVGPVTAAMLCVLLCDPSIFANGRQFAAYIGLAPRSRGSGGKNYVTGIPSKFNCDSESRAVLVECAQAIARCKNKSLWVEEILRRKPKKVALIAIANKLARQVWAMANKGESFKQMVVLTA

SEQ ID NO: 65688 - protein, 347 aa, unidentified
MTIVGPARAVTGGVDTHRDVHVAAALDAVGGLLGTAPFATTTAGYQALLSWLESYGDVAKVGVEGTGSYGAGLSRHLQAAGVIVLEVNRPNRAERRRSGKSDPLDAIEAARAALSGKAKSIAKTKDGAVEAIRALVVAKRSARVARTAALVQMRHLVFGAPDELRSRLRGLNVRSLTAEAARLRPARRGDPVLMATKASLSSLGRRVQGLDDELADLDARIKTLLTGHCPDLLGLFGVGPDTAAALVICAGDNPERLHSETAWAHLCGVAPIPTGSGQSSGRVRVDYGGDRQANAALWRIAMVRVAHDPETTAYFERKRTEGRSKAEIIRLLKRYIAREVYRYLPRG

SEQ ID NO: 65689 - protein, 522 aa, unidentified
MPRSRTSRSAKTRKTFVLQKPNGLLTPRVQAVGPEHFGIVAVDCAKARSRYFLADFYGRVLLEPATLTHSRGHFQAAIDGLRQAMVQHQLGDLVVAIERTGEYHRPVQRAFRAAGFETRLVHPLTSKQYRQPADPGNKTDDTDLAAICRATTHGYGLCDPVWPDLYRTIQLLRRHRRDKVDKNSQLCCQIREVLHAAMPGYAECFGHLWESPAPLVLARHTTSAGAVLEAGLAGLEAIAEAAQIVCRRDTFHKVLAWAAQAPPGHTHSLELRRILGDLDDDRLHKTQQILELERSLAQLVVATPYILLLIIPGINIVTVADLAGELGPIQLYLNANAITGRAGLMPSRYQSDQVDHANGPLRRRGHRRLRAVLMQTADNLVQCNHYFHARADLWKRAGKDARWIRVKVVKIFSRLAYAMVAGQQLFRHDCCQPRHYILGKLLEFHSDHHTQPEQIRQDLETVITQLPAKARAEEAPPLQKLLDEISQRGRGPQPLAKILPLVLARLVQRVLQSEPVREGTSS

SEQ ID NO: 65690 - protein, 347 aa, unidentified
MKTVMAGIDLHSKNAMVGLVDQAGRRLAHQKVDCELKEIVRFLAPYKERLESVAVESTYNWYWLVDGLKAQGYPVVLANPAKIDQYSGIKHADDKNDAFFLAELSRLKILPTGYVYDPVLRPVRDLLRRRMGLVHQRTSLMLSFKSLYTRTTGRAMRLSQLKGMTVAEAKALYEHPANQLIAQMHKEHIEGLSKSIQKIEKEVLKGASALPYYPKLKTLPGVGIILGLTITMEVGDIRRFAEAGQFASYCRTVDSNRLSNNKKKGENNQKCGNKYLAWAFVEAAHFARRSDGPCRRWYDRKAAKTSTVIATKALACKLAKAAWYLMAEGSEYDAKRVFPELAMKAQK

SEQ ID NO: 65691 - protein, 344 aa, unidentified
MEHFAGLDVSVNETSVCIVDETGRIAREVKVASEPDALLAVLKTGAYHFQRIGLEAGPLSQWLFSALAEVGLPVICVETRHLRAALQAQINKTDRNDARGIARMMRAGLYKPVHVKTLRSQKLRTLLTHRKLLQSKAIAVENDLRGTLRNFGLKVGVVGTVKFEQRIRELVADIPDLASLVEPLLVVRRVLREQIAVLHRRLLAIVKDDEVCRRLMTIPGVGPVVALTYRTTIDVPARFRNSRAVGAVLGLTPSKYQSGESEYTGGISKCGDEMMRVMLYEAAHILLMRATKWSWLKAWAMQIARRCGLKKAIVALARRLAVIMHRIWVDGTEFRCSRQEAAAA

SEQ ID NO: 65692 - protein, 394 aa, unidentified
MILVGIDIGKNKHTFSIIDKNSGEILLSPSDFSNNLKGFLFLIQKLSSYTKSELLIGMEDTGHYHFALLKYLLDRRYTVALINPTTTDLARKLQGGITKNDPLDSLTICDVISSNHRNKPYRVTTLNRFDLYEQKQLTRHHHNLKEELNTYKNRLQKCIDIVFPEFNSLFHSKYGIVYMNILKAFSSAKAIANADIRSIRKCFEFKGQGKRISLSAEQLKLTAKSSIGIPSVAEEIQIRHLVSQIELLEKQLSEIDKRIEEFSLKNNSPILTIPGISHFSGTSIISELGDICNYTKASQIIKFAGVAPYHYESSQFTAQHTAITKKGSKYLRKTLYQIILPVISNNEVFYAYYTKKLNEGKGHRCAQGHCIRKLLRVIYHLLSTRQPFNPKLLV

SEQ ID NO: 65693 - protein, 340 aa, unidentified
MEQYVGLDVSQKETVICVIDGNGKQVWEGVCSSTPGAMAAVLHRKAPLAVKIGMETGPLAVWHWHELRRAGLPIVCLHARHAKAALSVQLNKTDANDAFGLAQIVRTGWYREVEVKSLESHTLRLLLAGRARLVSMRTTLYSQIRGLLKTFGVVLQAGKGGTFERLVIKGVPADRHVKLVIESLMATWRHLTLELRKFDREISKISSTNPTCRRLMTLPGVGPITALAYLTTVDEPRRFARSKDVGAYLGLTPRRYQSGEVDHSGRISKCGDRMTRSLLVEAAGVLLCRNKRASVLKSWGLKLRRRVGFAKARVAVARKLAVLMHRMWIHEMVFQSNPAT

SEQ ID NO: 65694 - protein, 423 aa, unidentified
MKFKSQDKQNQLIEKITPKHLVVGIDIAQLTHVARAVNFRGIVIGNPLSFSNDEDGFHSLYQWIERLQNAHNLSAAIVGMEPTGHYWLNLSKWLSERQFEVVLVNPHLVKKNKENRDNTPSKSDKKDALVIADMVKNGYYSFTRTTPEAFEELRVFLSNRDSVVTRLVSAKNQIHRWVDVVFPELRHVFKDIMCVGSLATLRLFPTPAELRMLQPQDLIQGWKSLMKRHSGERKAKALIALAGRSVGSKQATYAYKLHLKQLLEEYELACVQLQAIELEVTSVLERIPFVKSMLVVKGISVVSLAGILGEAGDLSGFVHGNALLRHAGLNLAEASSGKWTGQMKISKRGRSRLRRFIFMMTMSLVMNNPEFKAMHAHNVQVKKMKKMRSIMKLCGKLARILVGMARSGEAYNPSKTLSLQLAA

SEQ ID NO: 65695 - protein, 372 aa, unidentified
MGHHSEAFIGIDTSKLRNAVAIAEGGRGGEVRYLGEFPATEAAMRKLVAKLAAKFAKLTFCYEAGPTGYGLYRLITSLGHECIVVAPSLIPKKPGDRVKTNRRDAISLAKLSRAGELTAVWVPDERHEAMRDLSRARLAAKKDLQGKRQQISSFMLRLGRVYPGKTTWGPAHMNWLMAQKLEHREQRTALEELLQGVRQENERVERLDQAIREAAPEWSLAEVVTALQAMRGIDLIAAVGVLAEIGDLSRFQNPRELMGYLGLVPSEDTTGDRVKRGHITKAGNGRARRILVEAAWAYRYPARVSREKQPKVAAAPRRVREIAWKAQTRLCRRFRSLERKGKLRTVIATAIARELAAFVWAINREVMGNRQA

SEQ ID NO: 65696 - protein, 388 aa, unidentified
MQTVADRPEAPTAIRTDLGAIFVSLELSRSTWLITSLSPGGGEKMSKQVVRGGDVAGLLERFARLREKARARTGKVFPFVVIQEAGLDGFWIDRALQNEGIESHVVDPASIATSRRRRRAKTDGIDGEVLVRALLAYKRGEPRVCAMIKAPTPEEEDRRRLCRERKVLIVERVRHVNRVKGLLFSQGISGYEPLRRDRRRRLDTLQTGDGRLLPVHLKAQVCRELDRLELLLEQIKAVEAERDVLLAAQQVAAPAPAAMLLDIKGIGPEFAAILWSEGLFRHFDNRRQVASYAGLAPTPWQSGSVDREQGVSKTGNPRLRTTLIQLAWLWLRHQPQSALTLWFEERVRRNGGRLKKTTIVALARKLLVALWKYVTAGVVIEGAVMKRT

SEQ ID NO: 65697 - protein, 342 aa, unidentified
MDNPSSQVLSSQVLSSQVPPAGPLYVGIDVAKDKLDVAFSEDPAAPVDVLPNDATAIAALVQRLRALKPAVIVVESTGGLERPLLEALLDAQLPVALVHPGRVRHFAMGVGIVAKTDHIDARVLVRFASQAEPRLAERRRKNHDELRDLVACRRQLTATKTQQTNRRGATFAKSALKSIDAVVKTLDKQIDSLDKQIRDIIDADDDFKYLDGLLQSVPGVGPTVSATLAADLSELGDTGRQAVAALVGVAPFPDDSGTVKGKRSIRGGRSDVRCALYMATLSAVRFNPVIKAFAQRLKAAGKVNKVMITACMRKMLALLNAMVRDGLTWDQLDVVKKIASTH

SEQ ID NO: 65698 - protein, 411 aa, unidentified
MQVIYERCCGLDVHKRTITACVLKWLGGDWKKEIRQFGTMTHDLLVLSDWLVREGCTHVAMESTGVYWKPVYNILEGQFELLVVNAQHLKAVPGRKTDVRDAEWIAELLAHGLLRGSFVPPVRVRELRELTRYRTSLVCDCARTINRLQKVLEGANLKLASVVSDIRGVSARLMLEALVAGERDTSQLANLAKGRLKEKHAQLVEALSCRLQPHQSFLIAEHLAQIDYLEGAIERLSRQIEEKLRPFEQEMAWLDTIPGVNRRTAEVLWAETGGDMARFASARHLASWAGMCPGNNESAGKRRTGRTRKGSPWLRHCLIEAAHGAAHTKNKYLSSQYHRLAARRGKKKAQVAVGHSILVIAYHLLTRKQPYSDLGANYFDERDRQAVTKRCLNRLQKLGFKVTLENVQMAA

SEQ ID NO: 65699 - protein, 359 aa, unidentified
MIVIGADSHKRTHTVVAVDQVGRRLGERTVKATSDGHFALLQWSAQWPQVTFALEDCRHLTRRLEQDLLAAGQPVVRVPTRLMAGARRGARHPGKSDPIDAEAVALAALRHHDLPVAELDGPTREVKLLVDYRRDLVRQRTRVANRLRWHLHELDPALQIPSRGLRRYRVLDELAARLAGVEGTVARLARQLLARCRDLTVEINALEAELRTLVHRLAPTLLAVPGCGVLGAAMILGETAGARRFRTKDAYARFTGTAPIPVWSGDRRGKVRLNRGGNRTVNTALHMIAVTQIRGVGPGQAYVERLMGRGKTRTEAVRLLRRRLSDVVFRALRADEQARSTATQTSRSAAAGSASARAA

SEQ ID NO: 65700 - protein, 343 aa, unidentified
MKIYVGIDLHSNNSFVAMIDEENKTVYKKRLANVLTIILESLKPYKNSIEGIVVESTYNWYWLADGLKEAGYKVHLANVSANIQYSGIKCTGDESDALWLANLLRLNILSTGHIYPKEKRGVRELLRKRLILVRQQTSCLLSIQGGITRYENTCITSTKIKASSDEKSNNKILDYIKDENVKFAVQSQLKVLDCIKEQIKLLEKQILKIIKPDANFELLKSITGVGPILAMTILLETGDIKRFKSAGNYSSYCRCVESKRVSNEKKKGVNNRKNGNAYLCWAFIEASNHAIMSYSDVKKYYQRKLSKVKLRVIAIKTIANKLSKACYFMLRDNVEFDMKKIFM

SEQ ID NO: 65701 - protein, 371 aa, unidentified
MKKRNTSEQSPKRATKALEGKGPFTIGMDLGDKASRYCTLDKDGAVVREGSIVTTKKGMLQTFGGMKRCRIAMEVGTHSPWVSRLLKSLGHEVIVANARQVKLISASSRKDDRLDAQTLGRLARVDPELLRPIRHRSEKAQGHLMVIRVRAALVEARSSLVNTARGLAKAMGERLVKCDTDQLRVERMEGLPAELRESLEPLLKEVESLTEKIHGSDEKIEQIARTEYPETKLLQQVSGVGNLIALTFVLTLEDRERFQKSRDVGCYVGLRPKRSNSGESEPQLRITKEGDIYLRKMLVQGAHYILGHRGPDTDLKRWGLKLSERGGKNAKKRAIVAVARKLAVLLHRLWVTGEVYEPLRNHPAQQSRAAA

SEQ ID NO: 65702 - protein, 400 aa, unidentified
MTTRLEKIFAGVDTHADTHHAAVIDSNGKQLGDAQFPTTPAGYAALAAFMAAFGTVVRVGVEGTGSYGAGLARHLGAAGFVVVEVLRPSRQVRRTRGKSDPLDAYAAARTALAQEEHATPKTGAGQVEAIRYLLVARRSAVKARTAGMVQLKSLLVTAPDLIRERYRALSDKALIEELARSRPAADPVLGAIGRSLKSIARRHQQLGAEISELDQALAALTAGANPALVAAKGIGTITAAQLLVTAGDNPERLRSEASFAALAGVSPIPASSGKTTRHRLNRGGDRQANAALHRIALVRMSYEPRTRDYVARKRALGHSNKEIIRCVKRAIAREVFTLLTTIVEVPVTDDLRPLRQARKLSLTTVAEHFNVWPATISKLELGKHRDDDLANSYREWLTAA

SEQ ID NO: 65703 - protein, 452 aa, unidentified
MKKQKKKKQILSVKSEKGFSLINPHAAGIDIGDTEHFVAVENGEGHEVRRFDAFTIDLKVILQWLISLGITTVAMESTGIYWLPLYLMLEDAGIDVYLVNAKTTKNVTGRKKDDSDAVWIQKLHRCGLLQKSFQPEHGYRIIRNYVRQRKNLITIASDSIRRMQKALELMNIKVHTVISDLAGKSGMAIIASILEGEKNLEVLAGLCDRRIKATREEIIKSLEGSWSDEYLFMLRQAYDQYYFYQKQIKDCDKKIQEQLLQQVAIAKDGDISDVPQKEYIKKKGRKNQFDFNVAGYLNQLVGVDLCKIPGVSEVTALELITEIGTDMNKWPDAKHFAAWLNLTPNTKITGGKIISSKMMKKKNRAGQTLKMSAFSLSKNKTPLGDYYRRMRAKLGGKGAVLATAHKLARIIFAMLKNKKEYSPETLNEAQAQFNIKRIKQLEKQLAKLKQAA

SEQ ID NO: 65704 - protein, 288 aa, unidentified
MQNSNDFNGQKFHVGLDVHKKSWAVTIRSLGVEVAHFSQPPVAEALSSYLQRNFPGGEYYSAYEAGFCGTGTHEQLCKLGIKNILVHAADIPATDKQKKNKTDLHDSRAIAVHLEKGNLEGIHVLTQEQQELRSLFRLRESKVGDVTRANNRLKSFLMYYSITLPETVSKNGFLSGRALEWLDIELGCASGTLVLQQYTEELKYQRKQLSQITKSIRGEILAGDKQTYENLLSIPGIGSITAMGLIAEVADFTRFDDPDEYASYLGLCPWEDSSGEIIKKNKRCPAPL

SEQ ID NO: 65705 - protein, 348 aa, unidentified
MTIAMIGLDTAKTVFQVHGIDESGKAVLKRKLHRSELVGFFEQQPRCTVFLEACGAGHHWARLLSGLGHEVRLIAPEAVRPFVRKGSKNDAADAAALCVAGSRPEASLVPIKSVEQQAVLALHAARPLLVKQETMLANALRGLAGEFGLIVPKGMHKLEELMALVSAEAGIPAAGRQAMAELHAHGRAVAGRVATLEEQIVRHARQDATARRLATIPGVGPITASLIAATVGGNIGAFGSARRFAAWLGLVPRQHSTGGRTRLGRITKAGNAEIRRLLVLGATSMVRRATRWDSQAGLWVRGVLARRPVRLVTVALANKLARVAWALMTRGEIYQARGRTPAAAATVA

SEQ ID NO: 65706 - protein, 310 aa, unidentified
MGGMNAAIEVGKHKLDVALGSNGELFSEPNQARAITRLAKRLAELDCARVLIEGGSYQNVLVAALRAAGLPVVIINPRRVREFAKSIGQLAKTDHIDARVLALYGERIEPPVRELPDEQNQALRGLWVRREQLIEMLLMEENRLEHAPKALHRSLRAHIDYLRKQIKQADNNLDRAVRNSALWDKYGLLSSVPGVGPVLSVALLADLPELGRLNRREIAALAGVAPFNCDSGTLRGQRKIQGGRKRLRRVLYSATVASVRCNPVLRPFYQRLRASGKPAKVALVAAMHKMLLILNAMLKTQTPWRPPCPV

SEQ ID NO: 65707 - protein, 375 aa, unidentified
MTMMHHRQIRYIGLDVHKATISAAIAEESGAPTSYGRIPNDPAAIRTLMTRLGGPQVELRVAYEAGPTGYALHRQLTSMAISCMVVAPSLIPKQPGNKVKTDRRDALKLARLLRSGDLTPVWVPDEAHEALRGLVRARADAKADQLRAKHRLSKFLLRQGCWPPSGVRNWSKRYFTWLHQLEFEHLPDRVVFADYLAEVTAAAERINRLEAALHQCAQSSSQVALIRALQAFRGIAFLSAVTLVAEAGDLRRFRTAPQFMAYAGMVPSESSSGGKQQRGSITKTGNSLLRHVLGEAAHHARHAPCVTTKVKQRQTDLPAEIVELAWRAQVRLHTRYRHLSGRIGALKALTAIARELAGFVWAAGQIFQKEVPTAA

SEQ ID NO: 65708 - protein, 419 aa, unidentified
MAFKILRKNCCGLDIHKTWIFACIGITDSNGRTEYKQARFSSFSNGLRDLADWLAKYSCSDVCMESTGKYWIPVFNILEKTCWVTLAHPKYTKPQKGNKTDRKDAKWICDLYMCGMVKPSFIPPPDIRQLRDLMRCRVKLTNMLTGEKNRAQNCLTVSNLKLDDVFSDVFGKSSRSIIQYILEHPGEQFDVTPFIHRRCKHPVEEIQAAVDGVVSREQAAKLKECLLHIDQLNAHRERIEAEILRLAEPYPYQLELIRTVPGFAAAPLTAVALISEIGVDMSVFPSAKHLASWAGCCPRNDQSNKKVKSTRISRAGCYLKPLLVQIANAVIKSDRHPECRERYRRIKARRGHKKAIIAVCRMLLTAIWNVLSKLEPYSAKGYLADTLTEHSVVISKAEGLALLRKRGYIFKDELAVESG

SEQ ID NO: 65709 - protein, 322 aa, unidentified
MSGYLGIDVAKHELVVAREGVAGSTTYANTVAGHAALCAALRAEASAPAVELIVLEATGGYERGVVAALGSAGLPVVVVNPRQVRDFAKATGQLAKTDALDAQVLAAFGARVQPTPRPLPTEAQEELRDFLARQHQVQQMLLAERTRLQQTLGHRARRPLRQRITRHITFLERELRLLDSDLDDRLRDCPLWREQDDLLQSATGIGPQTARILLGHLPELGRVSAAEISKLAGLAPLNRDSGTLRGQRHIRGGRARVRAVLYMATLSAVRHNPVVRAWYDRLLAAHKPKKVALVACMRKLLVVLNAMLKSGARWQSPAPIPA

SEQ ID NO: 65710 - protein, 412 aa, unidentified
MSHPLLVGADVHRKTNTLSAMDASGREVTPRFRVENNRPGTAAVAQKLNALAAAGGYDAILLAAEATGWYWWHFFRTLAEDPDLQHTPLTLYPFNARLTAHFKKTYADPDKTDSIDAFVVADRLRLGRDLPQPFAYDEPGLLLRFLTRHRFHLVHQLVREKAYFLAHLYLKASEYTHLKPFGDVFGATSRALIQGYPSIEELAAIPFDDLVEIIDQQGKRRFADPADNARQMQAVARNSYPLPQALQVPVNLILRQSLQQIAALKLQVQRTESAITEALQPWPHTLETVPGLGPVFSAGIIAEIGHLARFDYDQAKVAKFAGLRWHHSQSADFQAEETPLTHSGNRYLRYYFCEAANSVRMRDAEYRAYYERKFQEVRLHQHKRAIVLTARKLVRLVVRLLTTNQPYRPRRV

SEQ ID NO: 65711 - protein, 397 aa, unidentified
MWTLGIDIAKRKHVAALLDDQGKRVFKNFSFANSMEGLDLLMTKIKQVGFSNENLLIGMEATGHYWMTLYHFLSTMGFQIRLINPLMTAARRNVGIRGTKTDSADAELIANILREADPKFSAVPDDEVRQLRNLTRLRYECNQTFIAEKQRLIGLLDLVFPEYAEHFSDIFGAASRALLSLYPTAEDIKKIDIRKLTRILKESSKGRMGREQANRLKNAAKNSFSLSGTNLSFTLEIKFLVQRMNVLLEQIEKLEKQIKKYMKKNQRLLQTIPGIGPVWAPTILAEVLPVFHPDEKNGARKLVAAAGLDVRLNESGDSKGTGKMSKRGSRYLRTAAIQAAEVAALVAKDPMFSSVYEKQKAKGKKHLVAISHVANKMLHVVFSVLKNQKPYEVRLSH

SEQ ID NO: 65712 - protein, 364 aa, unidentified
MFTERTSVGLDVHARSVAAAAIDGVTGELVQAKLAPSYEHIRSWVDQLPGPVAVAYEAGPTGFGLRRYLDAAGVRCEVVAPSKLQRPAGDRVKTDAKDAVHLARLLRIGEVTPVVIPSVEQEAARDLVRAREDCRSDLMRARHRLSKLLLRRGIVYYDGRAWTVRHDAWLRGVARSQLTDRATLLAFDNDYEAVRGVQARRDRLDAAISEMAASSEFTPVVNRLGCLRGVGTLTGFALAVEVGDWGRFTGRTIGSFVGLVPSEHSSGQSRAQGEITKTGNGHARRLLVEAAWHHRPQYRVGKTMLDRWDLAPATARVRGDEGNRRLHQRWVRFNARRKRATIANVAIARELAGWCWSLAVLEDT

SEQ ID NO: 65713 - protein, 321 aa, unidentified
MTYVGIDVSKATFVVAYSSAKSSKTKTFKNTTKGVHEFIQTLSADDYHCVLEATGNYSSLLVYLLSQAGITVSLENPLKIKNFARVMLSVTKTDETDARLIALYGEKMHPAPYKLRSDAILILKQKRTVIRQLKKQLIATRNLKGSMEALPFFDSKCKKTIEKTIAFLERQVKDLEEELANLAQGEYRKQMGLLTSVKGIGVTLAAALIMATGGFAYFDNAKQLTRYLGLSPTYQQSGTSVNVKGHINRNGDSSLRSLLYVAAMASLRCNAECKECFNRLRSNGKPGKVAVVAVANKLVRQVFAVVTQEKPYIDGFKSAKP

SEQ ID NO: 65714 - protein, 338 aa, unidentified
MAIVTLGIDLAKNVFALHGVNEAGKPVLLKPQVPRAKLLELIAALPPCTIGLEACGGAHHWARQFQRFGHTVRLIAPKFVAPYRLSGKRGKNDAADAAAICEAVQRPNMRFVPIKSVDQQGRLMVHRARQGFVDQRTATINRIRGLLAEVGIVLPLKAATVRTQATALLDELSGWVNRVIGDLLGELHRLDERIANYDQHVAQMAREDHRAQQLMRLCGIGETTSTALVAMIGNGHEFKSGRQLSAWLGLVPGQYSSGGKARLGRITKAGDGYLRSLLILGARAVLNAAKSKTDSISRWASALAERRGYWKAVVAIAAKNARMAWAILRRGDAFELPS

SEQ ID NO: 65715 - protein, 360 aa, unidentified
MSKVTIYVGLDYHKDSIQVCIMDGSGKMLANRSCGNDANALAVLVAFFGDDVRAAIEACTGAAELADEMVTRHGWHVELAHPGYVNRMKQSPDKSDYSDARMLADLVRVGYLPRVWLAPQDVRQLRTLVRYRQQLVNERRTVKLRVTALLRDARITGPEFRRWGRPWLRWLASAEGLRSETRWVIDRHLANLQRLDEAIVQVEMRLALVTAEDPVVAQLVALRGVGLVTAWALRAEIGRFDRFRTGKQLARYCGVSPRNASTGQKQADAGLIKAGSELLRMTIIEAAHRLIRYDDRWKALASSLRAAGKPACVIAAAVGNRWIRWLFHQVEGGVITLKPVSEPSLPKTKTASSGKCHVAL

SEQ ID NO: 65716 - protein, 317 aa, unidentified
MSKDITVCAGIDIGKHKLDIAIDGSAERLQVDNNSEGRRSLSSWLRQRRVERIGLEASGGYEQAVVVSLRADGFVVIVFQPAQVRAYAKFVLQHAKNDAIDAVLIARCTAAATDIREPPDARLAFLAQHLTMIEQLTEDVGQLKTRREASREQRIREFWKREINRLKVLLNSELKQLVAVIREHRDLAHRLDLIASVDGVGLRTAVAILVRMPEIGRVTREQAGAIAGLAPYDDDSGLRRGSRHIKGGRQRLRQSLYAAALPAVFYWNPQLKVFYKRLLAAGKSHRLALVACARKLLIFVNTVVARGTPWTPSAATT

SEQ ID NO: 65717 - protein, 365 aa, unidentified
MTSMTSPTAPVTVIGGVDTHGQTHHAAVIDQVGRQLGDREFPTTPAGYRALLTWLRGHGQLERVGVEGTGSYGAALARHLRRMGEGVVEVDRPDRKARRAKGKSDPLDAYAAARAALSGTATGTPKTRDGRVEAIRVLRVARSGAVKARTQGTNQLKALLLTAPAELREQLRHLSTTTLIATCARLRPSSELTDPEQATKTALRRLARRHQHLSEEIAEADTELRTLVTAAAPRLLALPSVGIEVAGQLLTSAGDNPDRLHSEAAFAHLCGVAPVPASSGRTHRHRLNRGGDRAANNALYIVVLGRLRYDSRTRVYADRRTKEGLSKPEIIRCLKRYVAREVFAVLTAPTVEDPVATTTTMSTAA

SEQ ID NO: 65718 - protein, 296 aa, unidentified
MPQGTCVVGLDVAKRKVDACIRSMRLRLSTPSTPEGEAQLVAWLRANRVGLAVMEASGGYERRWAEALRAAGVEVRIVDPKRIRHFAKAAGRLAKNDPIDADTIAWFAEAFPDADPQPHDAAREELDRLVQARAALKDEEDRIKQQCEHRPPPIVAQALAAVAKAIRAERRKLEAVIAARIKANPAFARPAEIIHSVPGLADQTAAGIIAWAPELGRISNGAAAALIGAAPYDDDSGGRKGARHIKGGRRKLRNLLYMPVMGAATQHNPVLKAYYQRLRSPRARRPRSLSSPACAS

SEQ ID NO: 65719 - protein, 289 aa, unidentified
MKPGCAFLFVFDKVVFEENDLRRLAKWLADNNCRDVCMESTGKYWIPVWNVLESTCDLVLSHPKYLKAIKGKKTDKRDAKWIADIFKHDLLNGSFIPPAEIRQLRDLVRYHTKLTNYTTGEKNRAQNCLTVSNIKLDDVFSDVFGKSASAITSRILESNKPFDVAPFVDGRCKTPIEQIQAALDGMMCAEQAEKLRIIRSHMDSLALCKAKLESEILSVAEQFLPQINLVTTVPGIQSFSAVAIIGEIGADMSVFETSRHLCSWAGLAPQNDNNTGKKKPLAFLVPEFI

SEQ ID NO: 65720 - protein, 429 aa, unidentified
MDDVDDADLVVERVAALDLGKAGLEACVRVPNPQRPGRRMQELRGYATTTAQLLAMVGWLRHWHVQRVVMESTSTYWKGVYYLLEAEGFDAWLVNAREVKNVPGRAKTDRADAVWLAKVAERGMCRPSLVQPPEIRRLRDLTRYRRALVQDRTREQQRVEKLLEDAQIKISAVLSNLHGVTGRAMMDALIAGQRDPRALAQLAKGRARKKTAQLEEALRGFFTDHHAAILRMMLDNTDRISAQIAALDARIEKEIGPFSGQAARLAEIPGVDAVAAAELIAEIGVDMTRFPSDAHLVSWAKFCPQTHESAGKSKSKGRGRGNPWLAGTLGRIAFANSRADTFLGARYRRLARRRGKQKAIVATGNSVLTVVYYLLSDPMATFRDLGPGYYESRINVHRRARDLVTQLQALTGQHIVIRDGKAVITDAAA

SEQ ID NO: 65721 - protein, 340 aa, unidentified
MDTIGLDLHKRESQLCVLTEAGEIVERRIVTSRERFTAVLGSQPSARILVEASTESEWVARHLESLGHEGIVADPNFAPMYATRRRGVKTDRRDARTLAEACRLGAYRPVHRASAPQRHVRAQLAVRDALIRTRTRYVSVVKALVRRDGLRLPPGNPVHTDAKLAALPLPVPLARELAPLRALFEPLNNEITAADERLAAVAAADPVVERLRTAPGIGPVTAVAFVATLDDVTRFASAHHVAAYLGLTPREYSSGEQQHRGRISKTGNARMRYLLVEAAWRVLRTKDPAAAALRVWAEGIAQRRGRSIAAVALARRLAGILYAMWRDGKDYCAPPSAAVA

SEQ ID NO: 65722 - protein, 338 aa, unidentified
MARFIGVDLHKNSFRVCYYKSETDYEFKTYHVSKTGLEAFKKSLKKSDEVAVESTGNTGFFTREIEGAVKRIRIVNPIQFKVISNSVKKTDDEDAMTIAKFLSKDMIPEVRMRSKEQAQISSLIGTRDKFVKLRTALKNKVHNILNANGIVSRTEMFSGKKGLEQVLNMDLEDSYRFEIELIVDQIKNLNEAINRIDDELKDRGSKLDGHKNLKSIKGISDTGATIFINTIGDINDFKDEKALFSYFGIVPRVHISNETIHYGRITKMGNKIARTALVQSTLVAIRYSPYLRSFYDKIKAKKGGGKAIIATSRKMLGIIYKTLNNNWVFEDFTQFKLA

SEQ ID NO: 65723 - protein, 330 aa, unidentified
MTTTSQQNTQRENNENNFVGIDVAKNELVVHVLPTNQQLAVPHSVTGIKELLKLFKEINPKQILLEATGGLERELLTNLVAHGFTSVVINPRQARDLAKGLGQLAKTDAVDARMLALFAQLQHFEARPVPSRETQEMNDLVTRKQQLIDMRTMEKNRLQQTKQKAVRKSVEKIIDALDKQLVDIETKISAMIDANPDWNEKDKILQSVPGVGPKTSQVLISALPELGTLNRQEIAALVGVAPFADDSGTKSGKRRIRGGRADVRAALYMATFSAIRHNSTLKAFFERLVADGKKYKVALVATMRKMITILNVMLKTKTYWKEHRVLSENC

SEQ ID NO: 65724 - protein, 347 aa, unidentified
MRFYTRQHRHYCGVDLHARTMYVCVLDQAGEVLVHRNLKCDRDAFLEVIAPYRDDLVVAVECLFCWYWLADLCTEQGLAFVLGHALYMKAIHGGKSKNDRIDSFKIAALLRGGTLPQAYVYPRQMRATRDLLRRRQFFARKRAELLSHIQNTNTQYNLTPFECCIDKAANREGLIEHFDEDSVQMSIATDMSLLDVYDHAIHELELYLIHQIREDANALFYLLRTVPGIGEILSMTLLYEIHDIERFPRVQDFLSYSRLVKGTRESAGKKKTSGGKKMGNVHLKWAFSEAAVLFLRLNAKGQKYFARLEKKHGKGKALSVLAAKIGRAVYYMLRRHTPFDMKKFAVA

SEQ ID NO: 65725 - protein, 342 aa, unidentified
MFYIGLDVASKSSFVYVIDGRGKKIESKEIPTDKDSYRQYFGDWSKKPVYVAVEAGGHTRWIHDTITKYGINVYVVNPHKVKLIAESKKKTDKIDAKILAELLRMDGLPKRVHVATGDSRELRDLLRSRQQLIKSTTNVMNHVRGLLRQEGIRLRPKALCTGEIFSRLRESGSIPAHFVPILACYESTISELYKQRRALDTVIAGYEHEDINLLRTIPGFGEVSSKTVFAAVSTIKRFQRAKQLTSYCGLVPTVRSSGERADYGHITREGRSEVRQMAVQSAHALLRCKTIESFPLRKWHERVAKRRGFKTAVVGLARKLVEIAFYVLRDRRAYDARLLQVA

SEQ ID NO: 65726 - protein, 430 aa, unidentified
MKSNTQNAKIEAITEKTLVLGIDVGSETHYARAFDYRGIEYSKKPFKFSNTEAGFVTFKEWILDLKERHEKDKVVPGMEPTGHYWFNLGKFLQDNEMKPVLVNPHHVKKSKELDDNNPTKNDRKDPKVIAGLVREGRYMIPYLPDGVYADLRTASNIRFQLQAELTRIQNRISRWFNIYFPEYKTVYGKPDAKSGMLILKAAPLPEDILTLGIDGVNQIWRDAKLRAVGKARAKTLIEAAEHSVGSKEGAVSARMEIRMLLEDYESRNTRLQEVMVLIEELVRKIPMAEKLLEIKGVGIRTVSGFLAEVGDISRFNNPKELQKLAGLALVENSSGKHKGETTISRRGRKRLRYLLFEVAMSLVAKNPEFRELHNYYTTRRLNPLKKMQSLMAIAAKLIRVFYAMLTKGVDYDPKKMVSDIKRPAVYLQAA

SEQ ID NO: 65727 - protein, 381 aa, unidentified
MIKYSVGLDISSKSIYGCISSIDSGQRVTVKSTQNFPNTKAGFKSMDGWMRKHRKDENIPLVVCMEATGNYHESCALYLFEKGFSVSVVLPNKAKNYLRSLGHKSKNDSIDAKGLAQMGAEQCLRIWSPFGRFFYELRSLTRHHQSLQEQKTVVKNQLHALKSGMYSSKTVEKHLESMIKLIDRQLEQLDTTIKNHLQSEEEVWEKVCNICMIKGVGVLTTAILLAETNGFELFENTKQLVSYCGYDVIENQSGKHNGKTKISKKGNSRIRRAMFMPAFQAVTYQVKPFCNLFNRTFEKHGLKMKSYVAVQKKILTTIYALWKNNTAFNQEYQHQLSKEQELELPSPVSFEKAGKSSADQVGTTQGKHPSEQSLHASSPVS

SEQ ID NO: 65728 - protein, 346 aa, unidentified
MLHIGLDLSRKRIDVCLISDQGELIDRFTATPDRDGLHGLARRVAVYGEPVRAVVESMNGARFVHDELTAHGWVVLVADAQKVKGLAPLACKTDKIDSRVLAELSFRDLVPAIWLPTFGLRSEREISRWRLHLVKHRSTLKNRVHSTLITFGHQRHMSDLFGVAGRRLLKELEIPEPWRSHVDASLVLIDDLETRIIQIAKELRRSGADHPYVPLLMTAPGFGWITSFTVACEIGDINRFASPVKLSGYTGLCPRVKQSGDMDQRGPLSKHGPKYLRWGLMEAAIAASSHPLYRERYQRTKRRLGKQRGPKVAQIDLARQLTEAIWYMLTRNQPFAPAGATIRLAA

SEQ ID NO: 65729 - protein, 414 aa, unidentified
MNRSCGIDWAEGHHDVAIIDDGGKLLAKKRISDDPAGFSALTELLADSGDSPERPIPVAIETPRGLLVAALRSTGRPVFAINPMAVARYRERHSVARAKSDHADAMTLANILRVDSHIHRQLPTDSELAQSIAVLARAQQDAVWRRTKASNDLRSILREYYPAFLATFAGKSATNLAKREARAILAIAPTPAHAVRLTKARIAAALRRAGRKRGIDDLATDILQHLRIPQLRQPDLVEKAMGRQAMALLAMLNAACAGADDLEQAATEEFRKHPDHAVITSFPGLAEVTGARILAEIGDDRDRFADGRGLKAYAGSAPVTRASGKVTSITHRRVKNDRLAAVGWVWAIYASINPGPARTHYRRRRDHGDRHAAALRHLFNKMIGQLYHCLQTRQTFDPIKAFGQPAAPTEPAAA

SEQ ID NO: 65730 - protein, 335 aa, unidentified
MTITTIGLDTSKSWFQVHCVDADGRTVLRRKLARSKVLSFFANIPSCLVGLEACGGSHFWARELAKLGHDARLMPARYVRAYVKTNKHDAADAEACCEAVQRPGMRFVPVKTEEQQSTLMIHRARDLLVRQRTAAVNALRGHLAEFGIVAAKGTAKAHELMRLAGDDERLPPMAREALGYIVAQIHDIESRLKIFEQRIRSLAKEDEVCRRLMTVQSVGPHIATAIAATVGDPRNFASGRHFAAWLGLTPKQHSTGGKEKLGGISKRGDSYIRRLLIHGARAIVARVRSGQMKSAWLSGILSRRHFNVATVALANKTARVAWAVMSTEQAYRSAA

SEQ ID NO: 65731 - protein, 414 aa, unidentified
MEVIVDRCAGLDVHQKTVVAAVRSPGSGRRRRDTVVRTFATFDADLVALRSWLVSEGVTEVAMEATGVFWKPVWQVLDDGGRFEQVLLVNPQHVKNVPGRKTDVNDATWIAQLLECGLLRGSFVPPVEIRQLREITRYRRQLTEERSREVQRLQKLLEDANVKLSAVASNTLGVTGRMILDALCDGERDPEVLAGMAQRKLKAKRDLLARAVPGRFGEFHAVMCRQILSHIDYLDTAVTDLDEQVDRLMVPFVEARDRLDTIPGVAKRCAEIIVAEIGVDMSRFATPAHLASWAGLCPGNNESAGKHRSTATRHGSPWLSSALVEAAWSAVRTKDCYLAVRFWRIAKRRGQQRALIAIAHTILVICWHILAEGATYTELGPDYLAGRDHPDHRRKNLVRQLEQLGYQVELSPAA

SEQ ID NO: 65732 - protein, 343 aa, unidentified
MQTITTIGLDIAKSVFQVHGVDATGQVVIRRQLKRRSVLMFFQKLPSCLVGIEACASAHHWSRELQALGHAVRLIPPAYVKPYVKRQKNDATDAEAICEAVTRANMRFVPTKTPEQQGGLVLHRTRHLFIRQQTAVINAIRAHLAEFGIVAPVGRHGVEELLNVVADPSDKRVPEMARTCLLAFGAQLRRIKEQVLEFDRLIRAWHRSNEVSMRLDEAPGIGPVLATAVVATVADPTSFRSGRNFSAWIGIVPKQHSSRGKNRLGNISKQGDRYLRGLFVAGALAVIRYAKIHGTKHRPWLTALLERRPTKVAAIALANKLARMVWAMMVKGERYKEPVALAR

SEQ ID NO: 65733 - protein, 337 aa, unidentified
MKRYLGVDLHRTQLTVCTRLENGRTYLRQWPMRELKLFAAQLRKDDEIAVEATGNTRLFYDAVVEHVKRVVVVNPSQFKVISQSVKKTDRNDAEMLALYLSKGLLPEVRMKDKQHRSMAHLAQTRDLLVKQRSALKAKINNLLSAEGINLKREALSSNKALERVLAMPLPPVLAAEARVLVAQIRSLTGSIAELEELIEEEGPKLAGHENLMSIKGIGPVSAAVLLSVIGDIGDFSDAGKLAAYLGLVPRVANSNETEHFGHITKQGNKLARTALVQCALIAKRYSSYLQQFYLRIQRRRGGGKANIALARKFLGVIYHTLKNNWVFEDFPNFVLAS

SEQ ID NO: 65734 - protein, 302 aa, unidentified
MINNQGEFIAETKVDAEVTDVVAYFDGLDLDILSVGLEAGTMTQFLTYGLQSAGYEVVCMEARQVKAALSAMRNKTDKNDARGIAQLLRSGWYSPVHIKSMASHRIRLLLSSRKAVLSKCIDLENEIRGLFKVFGIKLPPKLSHGSFDPAVRDIIETDVTLSESLLPLLDVRLVLYHCFRELDNRTRHMAHADVVCQRLMSAPGVGFVTALTYKAGVDDPTRFKHSRTVAAHFDLTPRRFQSGEIDIEGHISRCGDRDVRNTLYTAANAMMTRSSKWSSLKAWGMQIAKTRGHRRAVIAAAG

SEQ ID NO: 65735 - protein, 401 aa, unidentified
MNAVGIDVSKGKSMVCVMRPFGEVVLEPFEVLHTAQSLNDLAGKLKALDGETRVVMEATGNYHKPVAFVLHDAGLFVSVVNPVLIHDYDNNSLRRVKTDRKDAVKIANYTLDKWTRLRQYLPEDDTRLALKNCYRQYQQAVAVRTMLKNNLISSLDLTFPDANKLFSSPAKSNGCEKWVDFIGDFWHSECVSSLSSDAFAKKYLKWCQKHGYNFTRSKSDTIYACAVNAASLPKSPTSKLLIQQQVAQLKAVSQSVAAFQQEMLRLSQQLPEFDTVMEMYGVGPSLGPQLMAEIGDIRRFSSKKLLIAFAGIEPQPNDSGKIVGNDSGISKVGSAVLRRTLFLIMTVILKTQPQDEPVFQFMNKKRSEGKPYKVYMMASANKFLRIYYARVKAVMDSKHSK

SEQ ID NO: 65736 - protein, 455 aa, unidentified
MRQPSTLPQISPHAAGVDIGAHSHFAAAPPGSDPQGQDVREFEAFTADLYALADWLAACAVTCVAMESTGVYWIPLFQILEERGFDVRLVDPRRMKHVPGRKTDVVDCQWIQQLHSFGLLDGAFRPSDQIVVLRGFLRQRAMLLRSCAQHIQHIHKSLEQMNLKLHLVVSNIVGVTGLRIIRTLLAGERDPLKLAALRDRRCKNDVATIARALHGHYRLDLLFALRQAVELFDLYQTKVAECDKEIEAVLASFEDASKGKTLPPPHRKGGSYRNAPAFDARSALFRISGTDLTRVEGIDTSIALTLISEIGLDMARWPSEKHFASWLGLCPGSKVSGGKVLSSRTKLCANRAATAFRLAANGLHNSHSALGAFFRRMKARLGTPKAITATAHKIARLVYRLLRFGEDYIQVGEEEYERRHRARTVRSLERRAHSLGFVLHPAPGSPGLSAEPAYS

SEQ ID NO: 65737 - protein, 412 aa, unidentified
MKDLLEISCGLDVHKEKIVACILTGPLGKPTRSEICKFTTLLPDMIALRNWIVSKNCHHVAMESTGIYWMPIYEILEDAFSGDITLLVVNARHMKNVPGKKTDMRDSEWISTLLRAGLLNGSFIPEKRIREFRDLNRYRKSVIRDITSQKNRIEKFLQSSGFRLSSFISDIFGASGRNIILHLIEHGQIDKTALDSCLKTKTRNRIDEILMSVNGTLSEHQKAFLRILMTHYDSLKKHLAEIETSLEEDMAPFALQVEQLNSIYGISTTASCAIIAEIGIDMKPFKTAEHICSWAGLCPGNNESAGKRKSTSVTKGNPYIKSMLCEIAWVIAGKRNTYLSAWYWRIKQKKGAKKAIVALARKLLVIIYTMLKQGTVFDESCFETRRKHCEQKQLSRYIRELEKHGYHVEAQS

SEQ ID NO: 65738 - protein, 362 aa, unidentified
MRIIGCDLHARQQAVAMLDTETGEVVSMTLKHEGNNVREFYSSLPRPVRVGIEATGSMQWFVNLMEELGTECLVGHPAEIRAAEPRKQKHDRRDADLILKLLVENRFPAIWLPSKELQDLRSLLRHRHQWVRMRTRIQNALQSIALANGLRRGTALWSHDGQNRIASLPLTPHTAYRRSELQAMYAKFEAEIEKLNQRVEEQACGRVGARLLMTHPGVGPVTALATEVFLGDPARFADSKALASYVGMIPREYSSGERQRLGGLSKQGNPLLRFLWGEAGAHDVRKDPELKRFYRRKLNQKGFGKASVAVARKLGIRLWIMLRDQIGYNEFCRRGQKQQKSSEACAGMPETPNGANSHRTID

SEQ ID NO: 65739 - protein, 426 aa, unidentified
MNYTQNSKIAQVTERSLVVGVDIGSETNYARAFNWRGQEVSKKVLRFSNSQEGFQSFLEYLRSNQIIAAAEQIIVGCEPTGHYWFTLARYLKAQQINMVLVNPYHVKQIKELDDNSPRKTDQKDPKTIAKLVVDGRYSYPYLPEGIYADLREAVSSRERIVKEVNAVTNRIKRWLKIYFPEYLAVYKSFASESGLTVLETAPLPQDVVKLGAEGVNRLWREKKLRAVGMKRAQTLVEAAQNSIGLDGGVCARMEMQLLLEDYRAKEVQLEKVTAVLEAETLKVPHAEKLLCIKGVGLITVAGFLSEVGDIRRFDSPKQIQKLAGLELKENSSGKHRGRTSISKRGRKRLRKILFQVMLPMIQNNAEFREVYEHFTTRQSNPLKGKQAIIAAGCKLIRVFYAILKHGAEYDPQKLRMDRIRPEPAAA

SEQ ID NO: 65740 - protein, 461 aa, unidentified
MGNKRKSGDRPGSTRTIAGLPVVRAKVAGIDIGSERHWVCAPGLEGSGREVADFGATTPELVRMAEWLKERKIESVAMESTGVYWIAPHEVLEKDFEVLLVDTRQLARVPGRNKKTDPSDCEWIQRLHSCGLLNGSFRPQEQVCMLRTLVRDKANLVAESADWVRRMQKSLDQMNVRVHRAVSELSGVTGMAIVRAIAAGERDAQKLAQFRDRRCRQSKEEIAEQLSGHWREDHLFSLRQSLQMYEAIAERITAYEQEILKKLATMEVEEHPGGAVPPVKNLEKSKAIKKRGQEPMRQALYRMSGVDVTQIDAIGVETVEVVLSEYGPDLSRFPTEKQFVSHATLAPRVPKSGGKPLKRKKRNSASTRVAAALRMAALALRRSPTALGAYYRRLARRIAGDVAVFATARKLATLIYRLLRWGQPYVDEGAEAFEQRYRQQHIKGLAARAKELGFQLMPTTT

SEQ ID NO: 65741 - protein, 340 aa, unidentified
MKEVITTIGLDLGKKVFQVHGVDAVGGVRVRRSLRRSQVLGWFGKQPACLVGMEACATAHYWGRELSRLGHEVRLIAPAYAKAYVRRNKNDAADAAAICEAVSRPGMRFVAIKTAAQQAAGGLHRVRDLLQKQRTMLINQLRGLMAEFGIVVAGGPQHVKDLLAVLADPADARVPELLRGPLLGLAQVLGDLERRVATLERQIVAWGRGNATYRHLITVPGYGPILAGAFAAFVVEPSTFRSGRDFSASLGLVPRQEGTGGKLRLGSISKRGNGYLRRLLVNGAMSVLNTRRARQDPWIARLLASKPRKLVAVALANKMARIGWAMMVRQEDFRPRSAAA

SEQ ID NO: 65742 - protein, 427 aa, unidentified
MSEVRSTQTEPEFAAFIGIDWADQKHIWSLQTADSEQRESGELEHTPEAVESWVAHLYQRFAQRPIAVAVEQSRGALVFMLSKYEPFHLFPVPAQMAASMRQALYPSGAKDDPRDADLLLDLLVQHRNKLRRLSPDSEATRRVQNLVEERRKLVDEKTAQINRLTDHLKVYFPQVLEWFGRLDTELVCALLERWPALEELQKASPASVRAFFRKHRCRDRERIEHRMEAIRRALPAIQDRAVIEAKSAVVKVIVQLVRILVEGIEDLDGQIEEAAAAHPDFFIFNSLPGAGPVMAPRLLAAFGSQRERYRSAREIQSFSGIAPVTESSGKRKWVHFRWACPKFLRQSFHEWAGHSIVQSEWARVYYQQQRRKGNTHHAAVRALAFKWIRIVFRCWQDGVAYDENTYMAALVKRGSPLGAGVATGKTL

SEQ ID NO: 65743 - protein, 422 aa, unidentified
MHKERRWFVGIDWGSQEHVVSLCDDVGKRIGQRKFAHGGTGLTDMIAWLLKESGGKPGEIHVAIETPHGPIVEVLLERSCNVYSINPKQLDRFRDRFTVAGAKDDSRDADVLADSLRTDMRAFRKLSSVDPTIVELREWSRIDEELKAEHVRLTNRLKHQLWRYYPQIYELANDVGAGWFLDLLEALPTPEKAAKTREKTVARILKQHRIRRFDAAHVLGELRKPALTVAPGTIEAATAGIRILIARLRLINSQLVDAEQQLDRLCKKIVGPVAGEEGENTPGQKNEPRDAAILDSTPGIGRTVLASLLTEASDALQRRDYHALRALCGTAPVTKRSGKSCLVSRRRACNRRLRNAVHYWAHNAVQHDATSRAKYEALRAKGHGHARALRSVADRLLNVVCAMLRSGTSFDSSLASKKQAGA

SEQ ID NO: 65744 - protein, 350 aa, unidentified
MKFVGIDIHKRYSVCVAQDEQGRKLGVARIEGNTASGFAQFFEGLGGESRAVIEACWNWGKIHDLLETVPAVVEVVVANPLKTHLIASAQIKTDKIDAGALATLLRGNLIARVHVPSKAVRQRKDTLRQRLYWARLRTRIRNRIHAVLDRQPQLELPQCSDLFGVRGMAHLRKLRLPEPDRTLLSEDLALMDLLNHQIKEQEKAIAARNQQDEATRWIQSIPGLGPILASVIAAEIDGIERFADSAHLCACAGLVPTTHASGGQVYHGGLLWACNKWLRWALIEGAWVAVGCSPYFGALYQRHRARGKKANTAITIVARRMCQIVYCLLKEQRPYRDQPKPFSPVAPLVA

SEQ ID NO: 65745 - protein, 412 aa, unidentified
MDRLVERCAGLDVHKDSVAATVRVPRKDGQRLQETRTFPTTTRGLLTLADWLASYGVTLVGMESTGCYWKPVYYVLEERFECWLLNAQHLRNVPGRKTDVADSAWICQLLEHGLVRPSFVPPKPIRELRDLTRYRKAQIEERVREVQRLDKVLQDAGIKVSSVAAETLGVSVRRMLDALVAGTHDPEVLAELARGRLRQKLPALQDALTGRFRSEHHGLLVSQILAHIDYLDETIATLSARIEHVIAPFSRERELLQTIPGVARLGAEVLIAEIGVDMSVFPSDAHLASWAGQCPGNHESAGKRRSGKPRKGSKWLHKTLTESAKAGARSKGTYLSAQYGRLRGRRGPGKATGALRHSILIAAYHLLEQKVPYQELGADYFDRRRSTEQRTRRLVRQLEQLGHTVTLQPLAA

SEQ ID NO: 65746 - protein, 322 aa, unidentified
MAMLSFGGIDVSKDRLDIMVLPDEQCSWVSNDAAGWAELVEQLRSSSITAIGVEASGGYERGVVRALLAAGMSVRQINPFKLRQFAKASGTLAKNDRLDARMIASFVAIMPTRPAQRHAPVIEQLAAMLTVRRQLSDHKVATENASRLLEGAMLQRLSRRRVAGLTADIDLLEQRLVEIVTADAALAHRFRLLTSMPGVGAVLACTLIALLPELGQMSRKQVAALVGLAPYDFDSGKLKGRRCIWGGRARVRHVLYMAALSASNWNPALKAFHDRLAATGKKPKVVIVAVMRKMITTLNAMLRDGTAWVDRYSGRRSASTAR

SEQ ID NO: 65747 - protein, 394 aa, unidentified
MLFPPCGRKESMRIAIGIDLHSKRSVANAVYAEYGDVPERHAKFLREFNEAFSDFPSTPKWFKKMADTLQKHEAWILIENSTKTHEVYWYLTNLGMNVVIAQAQDLYRITKSVKKTDRNDSSELAGYMRRRIHGECEFAECYMPTPEWMTRRELCRGLSAEKDYLAVTKRRIRAHLLLHGIKLTREYGDITCDRALKELADYKDPYLMMQIKYAIDCRKRVDFNERVVEQTFSGMRMYELIHSIPGFGILSAAYFTSLIIDVSRFPNSSSFTASFGVVPKMRSSADSNPNCSTTHRGDEMARYLLMFCVLSHVKHVPKSVVSKMYRRLVAKGKKKREALVAAGRKLLTVVYAVLRDDRMYVADLDELIRSREEEDGQREDLTFEDLSEKEDKFD

SEQ ID NO: 65748 - protein, 330 aa, unidentified
MDKFVNALGIDVSKKTLDVYDYAGQLACQFSNCKEGFKQFLKWAKRNNGNLPQVLVCFEHTGMYSLPLAVYLTEQKWAFAMLPGLEIKRSLGIQRGKSDKADAKAIAKYAYLHRDEVRIYKLPSDRILELKSLLSLREKMVGQRAGYQATRREAKAFGSTNSKLIVEIQNKLIKELNAHIKSVEQQIKQVIASDAVLKKIYDLVTSVKGVGLILGTTMMVYTNCFSTFDDWRKFACYCGIVPFPFQSGTSIRGKQKIHHLANKRLKALLSNAACTSIQFNPEMKAYYQRRIQEGKSKMSTQNIIRNKIVARVFAAVQRGTPYVDTLKYAA

SEQ ID NO: 65749 - protein, 431 aa, unidentified
MKYKQSKKQNQRITRITENTLVVGADIAKETHVARAIDFRGIELGKDCVFSNTRAGLEQLVQWMKELQWDHAKTDVLFGIEPTGHYWFTLAEYLGREGIPLVIVNPHHVHKSKELEDNSPTKNDYKDAKVIADLVRNGKYSEPKLPTSVYADLRILMNLREKIVVNFGQVQRRVQNWLDRFFPEYTQVFKDWEGKASRITLSEFPTPGEIVEMSPEAIVQRWKTDVKRAVGAKRAQHLMETARSSIGLTEGLPAAKIELKTLLEQYDMFTRQLEEILTEVERLLAQIPGTKEMLTVPGVAVVTLAGFLAEVGDLSGYEHGQQIIRLAGLNLKENSSGKKKGKSSITKRGRARLRALLFRAVMPMVAKNAEFKALHQYFTKRSENPLKKKQSIVALCGKLIRVLHTLGTKQIPYDANDVLGPVRQAQLQIAA

SEQ ID NO: 65750 - protein, 421 aa, unidentified
MRSIGLDIHRDFAEVAIAEGGEVRSAGRIEMTPEALELFAGSLGAGDRVAMEVSGNAWEVARIIRPHVARVLCVSPADTGIRSARAKTDRLDARALAKLLAAGQLESVWVPDEKTRAIRRRLARRARLVRLKTKAKNEVHAVLMRRLIPKPKPSDLFGVKGRRWLAELALPAEERETVDASLRQIEFCESEIAAIDRVVAAEALSSPEIRRLMTVPGMGVITAASFMAAIGEVRRFADRKKLVGYLGLDPKVRQSGQSQAQRARISKQGSAAGRYALVEAAYSAVLSPGPMRAFYQRIRARRGHQVAIVATARKLACLLWCLLSRGEDYAYAQPSLTAKKLRRAELLAGAPRGKRHVERGLWSTNAAMRKAERELARQAEVAYERTVADWEAQQSKRKGPGATPGRASHAARQVQAPGPAL

SEQ ID NO: 65751 - protein, 326 aa, unidentified
MQSILGIDVSKDTLDAILLIGHRRIHKVFSIDLKGHHYLENWLIINQAGQVHACLEATGQYGEEIAEYLYDLQHKVSVVNPARIKRYGQSKLHRNKTDKADAELISEFCWKEKPGLWKPLSPEMKHLRALVRRSQDLKAQLQQENNRLKSGEKNPWVLDDLSLNVEFLRGRIKAAEKEIKEIIKQSETLKTKHDLLTSIPGIGLITASTLLAEVGDFSAFESAPQLAAFAGLNPTNHRSGSSVYKKTRVSKEGRSELRACLYMPALVALSWNPVIQDLADRMMKSNHNKMEIVIAAMKKLLHLAYGVLKTQKPFDPAYGTQFNFSS

SEQ ID NO: 65752 - protein, 364 aa, unidentified
MDPALGLGWDVEVSTAEQETSMNIVRIGLDLAKYVFHLHGVDERGKVVLRKTLRRPGVAPFFANLPRCVVGMEASNGAHYWAKTLSEFGHDVRLISPQFVTPYVKSNKNDRNDAEAICEAVGRPNMRFVSVKSAEQLAIQAVHRIRSRLVASRVRLVNQIRGLLGEHGVVVAQAIGNLRRALPRIIDDEANGLNSIVRALIGELREELSDLDGRITIYDRKIINLYRMSEACQRLGEVEGIGPITATALVAAAGDGKCFKNGRQFAAWIGLVPKQRSSGGRSRLLGISKRGDRYLRTLLIHGARAALGRTRGKQDPRSLWLLKMRERRHANVVAVALANKNARIAWGLLASGMNYDQHLTVSSA

SEQ ID NO: 65753 - protein, 415 aa, unidentified
MYYVGIDIAKSFHVVSVIDDEETKVINKPFKINNDAKGFEKLITILDSISLDKNEFTIGLEATGIYGENLQEFLKSKAYLVKLLNPFQTTRYREQITLKKVKNDEIDSLVIALLLKSGKFSSGYITDDEYQSLRTLYRNRATIQADMKDVKKRILTQITVTFPEFEGFIKPFNVTGLVLLDKYPTAHHYKHSSVDRIMKLFRHIQGNNFTQSKALQLLELSKESIYSGKAKDARAIAIRSTIRLLQMYLSELDIIEAEILSLLQNSSIETTVDEAGIEIQKTDSLLANLKSIPGIAEKTIAALISECGDLTRFPTIAKFIGYIGLFPNENSSGNSKHIGHLSKRGSPLVKHALYMSAVSCLIHNTQLKQLYDTKRSQGKSKKEALIAVSRKIAVIIYSIVKYNVPYDPNRVFAKS

SEQ ID NO: 65754 - protein, 373 aa, unidentified
MRILYERSCGIDIHKKMIVACLLISTAQGVEKEIQTFSTMLQDLYRLRDWLKAKQCQVVAMESTGVYWKPIWNVLEEEMELMLVNAQHIKAVPGRKTDIKDAEWIADLLQHGLLRASFVPPRSQRELRELTRYRSTLVAERARLVNRLQKVLEDTNLKLTSVITDITGTSGRAILHAMLQGEQDPEVLADLARGRLREKREQLKEAVQGTLSEHHRFLLGSQLRQIDFLDGQLAELDQEVAQRLGISGSPDGPDPSGGQPPHELESQAPDPACSTESTPSPSAQSERPGRLSSAQVISILDEITGINVRIGAIVVAEVGTVVDRFLSEDHLVSWAGLCPEAKISAGKRLSNKTGKGNRWLRQALIAHEVRNEE

SEQ ID NO: 65755 - protein, 357 aa, unidentified
MTGSSDYESVQVFIGVDVGKDTHHAVAVNRSGKRLFDKALPNDENKLRSLISDLKQHGQILLVVDQPATIGALPVAVARSEGVLVGYLPGLSMRRIADLHAGEAKTDARDAAIIAEVGCELSMICGFDDDPAQATQASNRIRGLLTQIHPALERVLGPWLDHSAVLDLLQRYPSPEKLASQGEKRLASQLCKLAPRLGKRLAADITQALAEQTVVVPGTNAAVVVLPRLALQLITLRKQRDEVAMEVEQRVLTHPLYPVLTSMPGVGIRTAARLLTEVACRAFASTAHLAAYAGLAPVTRRSGSSIRGERPSRRGNKTLKRALFLSTRPDIQGLLHTQNEPGKATQPGAYRPGKAAL

SEQ ID NO: 65756 - protein, 341 aa, unidentified
MHAITIGLDIAKFVFQVHAEDAEGRIIIQKRLRRSQVEAFFARLPPSLVGIEACGSSHHWGRTLRAHGHEVRLIPAAYVKPFVRRNKTDARDAAAICAALSRPDMRFVAIKSVEQQAARGLERSRELLVKQHTQLRNCVRSQLAEFGIVAAQGQRGFAALKSMLDAGDAPVPAVLVTAMRALVEQIESLRTAIAALEEQILAVAREHPVMRLLAGIPGVGGITAHAIVAAIGDGRQFRSARDFAAWAGLTPRQHSSAGKRRDQGISRQGDSRLRKLFALGASTIMRNVRFRADRATAWQRGILARRPIKVAVLAQAAKTARIAWAILTSGETYQPRRTVTA

SEQ ID NO: 65757 - protein, 408 aa, unidentified
MTSVREDGLNDSGEIGVFLGLDVGKTAHHGHGLTPAGKKVFDKQLPNTEPKLRDVFEKLKSKFGTVLVVVDQPASIGALPLTVARDTGCKVAYLPGLSMRRIADLYPGEAKTDAKDAAVIADAARTMPHTLRSLELTDEITAELTVLVGFDQDLAAEATRTSNRIRGLLTQFHPSLERVLGPRLDHQAVTWLLERYGSPAALRKAERRRLVEVVRSKAPRMATRLIDDVFDALDEQTVVVPGTGTLDIVIPSLARSLGAVHEQRRAAEAQISALLEAHPLSKVLTSMPGVAVRTAATLLVTVGDGTSFPTAAHLASYAGLAPTTKSSGTSIHGEHAPRGGNRQLKRAMFLSAFAALHDPASRTYYDRCRAPGKTHTQALLRLARQRINVLFAMLRDGTFYEPRTPRLA

SEQ ID NO: 65758 - protein, 427 aa, unidentified
MPYRIAGIDVHKRMLAVAVSEVEVEGEYGFERRQFGTSPEQLRELADWLLEQQVEEVVMESTAQYWKPVWGALERYWRPIRQKREGAGPMSGTLHLAQAQSNRAPQGRKNDFADAERLVKRLVANELKLSFVPDPEERLWRTLARTKYQLTCNRVQLQNRLEALLEEAHLKLSSLVSNLLGVSARRMLQAMAEGETDPAALAALAHYRLRATPEQLRDALGACQELHPVYRRLLKMALEGLHLLEKQIDLLDQQMADLLRPHQDQVQRLAEVPGLGVDSAQQILAEVGATAATFPSEKRLSSWVGACPGDNQSAGVNYNHRSPKGNRNMRRILNQSANAAVKAKGTIFELVYRRSVSRLGHKQTIGAIAHRQCRLIWKILHDGVRYEERGPAVSKGSKQRRAWRMIRELRSLGYRVELEKPQQPSPA

SEQ ID NO: 65759 - protein, 419 aa, unidentified
MKKNSKSPIKKEPKVKSKPAKTQSPVQRETKEVVAELVEKLRGKLELKATPASPGEAHGQPELSPNLDRLTVGVDLGDQWSRYCILGLQGETVSEGPLQTRQAEIAEFLHALPAARVVIEVGTHSAWVQEVIAGEGHEVLVANPRLMDGSKRRKRKNDRIDANKLARLGRADPKLLHPITHRSREVRQDLVLLRARDALVEVRTELINASRGLVKSLGTRLPKCSSPSFGDKVADAIPVEIREAVLPLVQLVDGMSACIKVYDRRIEELASDKYGHTKLLRQVKGVGPLTSLAYVLTLEKPERFPKSRDVGPYVGLVPRQEDSGESQPQLGISKAGDTMLRKLLVGSAHYILGPFGPDTDLRRYGLRLCERGGKKAKKRAAVAVARKLAVLLHRLWVSGDVYEPLGYTSSGAKVQKAAA

SEQ ID NO: 65760 - protein, 429 aa, unidentified
MHVAAVGPDRDKEPVRTFRTFTGDLERLADWFARCGIKTIAMESTGVYWIPVFEILEQRGFEVMVVNARDAKHVPGRKTDVSDAQWLQRLHEYGLLRASFRPQAEIAGLRAYLRQRERLLDHAAAHIQHMQKALMQMNLQLHHVLTDITGVTGLSIIRAIVAGERDPTVLASYRDRRCHASVETVCQALAGNYRTEHIFALTQALELYDVYQTKVLACDRQIEAILKRLKKSATPSANKLTPARQRTRQPNAPAFDARAALHAILGVDVTQIDGLGPYLALKLVGECGTSLAAWPTAKHFTSWLALAPHNKISGGKVLSSKTRRTSNRAASLLRLAAGTVGRTDTALGAFYRRLSARVGKAKAITATARKIAVLFYNMLRHGMSYVDPGATYYEDRYKQRVLNNLQRRAKSLGFVLQPSAPDIAQAGVS

SEQ ID NO: 65761 - protein, 419 aa, unidentified
MFSDTTLLVGVDVHQRRNVTLVMDGGGDVVDKHRHFANNRLGSDRLACYLAEVAQRGSFTTIHIAAEATNNYWLPFFCHLAETPALAAWPVTLYPFNPRLVANFKKALGEEEKTDLRDAGVVTERLRFGKKLPRPFAMDELYLPLRTLTRYRYHLVRELVRVKSYCLSLIYLKATDYTDKVKKPFSSPFGATSQAVLRQFATLDEIANTPLDELAEWLDVKGKRRFPNPEENARKLQQVAQTAYQLPDEWTVVIHDVISLNLRHIACLQKLIVRVETAITPQMEEIPHTLETIPGIGPVFAAGIIAEIGDLARFEYQEAKVAGYAGLRWPRSQSDAFEADDRRMSRSGNHFLRYYFCEAAQLVRLQAPEYRDYYNRKYKEVRKHQHKRAIVLTARKLVRLVVRLLTTNEPYRLRQVPRN

SEQ ID NO: 65762 - protein, 355 aa, unidentified
MDKTKYIGMDVHKETISIAVLDSTGKLVMECIIETKASTILQFIHGLSGSLHVTLEEGTWAAWLYDLLKPHVTELVVCNPRRNALLKEGSKSDRIDARKLAELLRSNLLRPVYHGEQGLRTLKELARSYLTISKDLARVMSRLKAIYRSWGIACTGKQVYAPRYRSEWLGKIEEAGVRRRAEFYYQQFDALRSLRQEVRRDLLAESGKHSAWKLLRQIPFIGPIRAALIIAILQTPHRFRTKRQLWTYIGFGIETHSSAEYRYVDGKLQRSNKQISIRGLNRNHNHDLKNLFKSAATIAAAKAGPFQEFYDALVAKGIQPEMARLTLARKIAAITLVVWKRGVCYDANYLKPQTA

SEQ ID NO: 65763 - protein, 343 aa, unidentified
MQMVTTIGLDIAKSVFQVHGVDAVGNVIVRRQLKRRYVLPFFQKLPPCLIGIEACASSHHWSRELQALGHTVRLMPPAYVRPYVKRQKNDAADAEAICEAVTRANMRFVATKTLEQQSCLMLHRTRHLFIRQQTAVINAIRAHLAEFGIVAPVGRNGVEQLLDVVADASDKRLPEIARACLLALGAQLRSLKVQILNFDRQIMAWHRSNEASKRLDEIPGVGPALATALVASVADPKAFRSGRNFSAWIGLVPKQHSSGGKDKLGSISKQGDRYLRSLFTAGALAVIRYAKIHGTKHRPWLTALLARRPTKVAAIALANKIARMAWAMMARGDHYKEPVALAA

SEQ ID NO: 65764 - protein, 343 aa, unidentified
MKITRVGVDLAKKVFQVHGVDVAGRQVWKRQLKRCSWLSVLTEAVEPGCEIGMEACGGAHHWARELKSRGFEVKLISPQFVKPYLKSLKNDVNDAEAICEAMTRHHMRFVAVKTVAQQDIQAMHRVREGLMNYRKAKANQIRGLVAEYGLVAPRQMGPLRKAIPCWLEDAENGLRSAFRILLHGLWEDLQSVDLRLKVLDKEIFALSETHADAKRLKQLRGIGPLTATAMVAQFGDGRHFKRGRQASASVGITPRHAGTGGKNYLFGITKKGNPYLRSILIHGARSVVSKAKHKDDRLSRWVTELANRKHPNVAAVALANKTVRIAWAMLRNGTDYDPELAMA

SEQ ID NO: 65765 - protein, 428 aa, unidentified
MKKHSFSKLEAITPNTLIVGVDIAKNTHWARFTDYRGIPLGKALKVSNNKAGFKNILTSIKGVGKQNDLPKVILGLEPTGHYWKPLANYLVGHGIKVVLINPYHTKKAKELDDNSPTKNDKKDALTIARLLRDGRFSQLYLPQDVFSELRVLSSTRVSLLKRQNAIKNTIRAVLDEYFPELVTVFKYPFKGKACRQILKSCPFPSLLLKLGRDKVLTQIKKAVQKTIGQKRVEQLFQAAQDSIGVNYGIQSARLKLTLLIEELELMEKQLDQLETAMEQALTLTGFKEIILSIPGVGIVTAASFLGNTGDPLRFTHPRQISKLAGYNLTEDSSGENKSKTTISKRGRKQLRNVLYQMARTTVAVNSEMKTLYHYLKTRPHNPLKKKQALVVISKKIITIIHSLLKKQTQYQAELVFNQFRKNQLKQVA

SEQ ID NO: 65766 - protein, 340 aa, unidentified
MGEYIGLDVSLKETAVSIRRAGKRVWRGKCASDPQLLAALIRKHAREAERVVFETGPLSIWFFHALTAEGLPAICIDARHAKAALDMAANKTDANDADGLAHLAEVGFYKEVRVKSFDSMLARTLVAARTRLVRIGTELSNQIRGLMKTFGLVVPPATGSKFECQVEALLADNAELGRIIRPLLEAWHAVRLRAAELGRKLLADARRSDACQLLMSIPGVGVVTAISFVTAIEDPTNFKHSRSVGAWVGLTTRRYQSGEIDYDGHISRRGDSHLRGLLYEAATVLLVRSRSECDLRKWGLQLRERLGFKRAAVAVARKLAVIMHSMLITGEPFRETRATN

SEQ ID NO: 65767 - protein, 344 aa, unidentified
MHIASIGIDLGKTTFHLVALGERNKILLRRKFSRSQLLAYTANLPSSLIGLEACAGSHFLGTVLREQGHQVRLIPAQFVKPYRKTNKNDFIDAEAIAEAVTKQNMRFVQIKTQEQLDIQAMHRVRDRLVQRRTALINEIRGFLLDRGLTFAARPIHLRKNLPSVIEDAEQNLSPRFRWLLDRMWQEWKQMEVDIKAITEAIERIGNENALCRRLRQIPGFGPLVSTATVAAIGNGAAFRRGRDFAAWLGVVPRQYSTGGKQKLFGMSKRGNTYLRRMLIHGARAVLLRVKYDTGGFGQWVHRLAQRAPHNKVVVAIANKLARIAWAVLSSGHDYQHQRLQSVAA

SEQ ID NO: 65768 - protein, 380 aa, unidentified
MSSMPRRPSSGQHPSTVDTNAQAGDGGACLEEAVLGVDTHKDVHVAAVISMVGALLGTRDFPATAAGYQALLAWARTFGVVLRAGVEGTSSYGAALNRMLRTKGVAVIEVNRPDRADRRRRGKTDATDAEAAARAVLSGKAAAVAKAGDGPVEMVRMFKLAKSSAIKSRTQAINQLKAVLVGADPALREQLSGLSAPLLVRACAALEVTDPTADTDRAARHTLRLLARRITQLTEEIDDLDVQLTEVLAAHAPDLLAGYGVGPDTGATLLIAAGDNPERLHSEAAFAALCGVSPVEASSGKTQRRRLNRGGNRQANAALHRITLARLRWDPATRAYVERRVREGKTRREAVRCLKRYLARELYPLLMTVAASTADVLPAA

SEQ ID NO: 65769 - protein, 417 aa, unidentified
MPQLWAGIDAGKTEHHCVVIDGNGTKLLSQRFKNRESAILTLMGDVASLPGGTDVAWATDLNHGGTGLLQSLLSSHAQPLFYISGRVIHHASGAYRGEAKTDAKDAVIIADQARTRRDVTLMRQADEVTADLRLLSARREDLVHDRTRAVNRLRAILVHYFPSLESAFNFATTRGPLVLLTRYATPAAIRRMGESRLASWLRGQGCWKSAVVAKTAIEAAREQTSVVVGEAAAARLISRSAHDLLRIRDELAELEAEIEAALEGSTSAELLVSIPGFGRRIAADFLAATGADLAAFESPDRLASFAGLAPVPRDSGKISGNHHRPRRYDRRLLNACFQAAFIAFRTCPVSRSFYERKRREGKSHKQALIALARRRINVIWAIFRDQTRYSITSTDPAGSASGAVADVSAVRTFDAGA

SEQ ID NO: 65770 - protein, 346 aa, unidentified
MEQYVGLDVSLKMTAICIVDRTGKMDREGMVASDPAAIAAFVRLHAPRVARVGLETGATSTWLWTELNKMGLPVICIDARHAKAALKMQINKSDRNDAVGIARIMQCGWYKEVRVKGLDSHAIKAVLVSRALLVKIKRDLENQIRGLLKNLGLVIGRAKMNMFVVRAAELIDDRPELAAAVEPLLKAREAVEKQIADLDRKVMRLARNDVQVRRFMTAPGIGPITALCYLATIDDPTRFKRSRSVGAYVGLTSRRYASGEVDWTGRISKCGDPMLRSYLYEAAGVLLTRVAKWSVLKAWGMRVAKRSGLRKAKVAVARKLAVILHRMWVDGTEFKWSSKEVATQPA

SEQ ID NO: 65771 - protein, 323 aa, unidentified
MNMTPNDHQFNHIVAFEVSKHELIVHTLPADRQQTVANTPIQVRRLLRAEQRINAKLGMGPLLVVCEATGGYERHVLAEAAALGLASHRAHGSRTRLFARFQGKYAKTDTIDAKLIAHYGLTAGLQIYAPPSPEQAALRQLRQRRDEVQHMLRMEANRTEHASLKRLKSSIQRHMAWLNTELKAIEAEIQDLINSVPELERKATLMRSLKGVGPHTAAAILAYLPEIGSITKSTAAAIAGLAPIAQDSGQHKGKRHIAGGRAHLRASLYMAALVARHRNPNLRTFAQGLKARGKPNKLIITAVMRKLIVILNAIVASGQPART

SEQ ID NO: 65772 - protein, 354 aa, unidentified
MFHVGLDIHTKHIAICALDEKGQVVHRSQVRTIQDLVRVLTGLPDRLEVCYEASCGYGHFHDLLRPLATRVLVAHPGQLRLIFRSKHKNDRNDAERLAKLLYLGEAPAVHVPSLEVRTWRELINCRSQVIAKRTRAKNTVRALLRSAGVTPPKSPGLWSKKGLAWLRQLELPTASQQLRRDLLEEIEGLIRPVRRVEQQLNRQAGQTGAVARLRSIPGVGIRTAEAMAAFIDDPQRFGDAKAVGCYFGLVPCQDQSGDKNRLGHITREGAPVVRQLVAEAAWQAQRRSPTVRAYFERVQRDDPQRKKIALVATAHYLVRVMWAMLKRGTDWQEGPALATASGAAAGGDPAPEVD

SEQ ID NO: 65773 - protein, 410 aa, unidentified
MLFIGDDWAEAHHDIEVEDDSGRVLARRRLPEGLAGITTLHELVAEHLDPTAEPDQVQLGIETERGPWVQALLAAGYGVFAINPLQVARYRERHSPSGAKSDAADAHLLAEIVRLDRAHHRRIAGDSEIAEHVKIATRAHQTMIWSRVRQVNTLRSLLREYYPAALAAFGTDLASRDALAVLTVAPSPELGRRLSQSRIETLLRRAGRQRNVSTTAVKIRAALRSEQLAARPGVIGAYTASASALLAVLTAMAAQTEVLAGQVEQGFGQHPDAEIYRSQPGLGDILGARVLAEFGDDPGRYADAKARKNYSGMSPITKASGTKRVVLARFARNRRLGDALFLQAFAALNNSPGARTFYDRQRARGATHYQALRTLANRLVGILHGCLRTHTLYDEHLAWHTEPDKLSPAA

SEQ ID NO: 65774 - protein, 375 aa, unidentified
MHTVRFVGLDVHAETLVVAVAETDGEVRSLGTMPNRPEAVRRLVRQLGPVDQLRICYEAGPTGYVLYWQLIGLGVHCDVVAPSLVPTKAGDRVKTDRRDAEKLARSYRAGDLTPVWVPDAEHEALRDLVRAREAAKKDQLRARHRLGKFLLRQGRRRPAHLKMAWTIGHLDWIRTVHFDSTAHQVVLADYLHEVERVATRIAHLNQAILEAIRTAPPQMQAVIQALQALRGVAAVSAATIVAEVGQLSRFEKPRYLMGYSGLVPSEYTTGPRRRTGAITKTGNAHLRRVVIEAAWAYRFAPAVRAPLRARHAGLDPAITEIAWRAQKRLHDRYRTLAAKGKNHNQLITAVGRELLGFIWDIARTVERQVPVAATA

SEQ ID NO: 65775 - protein, 341 aa, unidentified
MKDLELVGIDLAKNVFQLHGCSSTGEVVFRKQLKRSKLLSFIAELPTCTIAMEACSGSHYWGREFGSLGHSVRLIAPKYVKPFVKRSKSDAIDAEAICEAALRPTMRFVRVRSEDNQAAGLAFKARDLLVRQRTQIINALRGHLSEFGFVVAKGPTHVRKLVSAIEDGDIDLPEISRPLLSILVDTLEALNARIRLLEAQIAQRAREDEICQRLTTIPGIGPIVATAIAALAPPPSTFRRGRDFAAWVGLTPLQHSTGGKQRLGRTSKMGNRTLRRLLIIGASAVVRWAEHKGAAPGSWLARMLERKPPMLIRVALANKMARIAWALMAHGGEYRAQTVTR

SEQ ID NO: 65776 - protein, 342 aa, unidentified
MTRAITGGVDTHADVHVAAALDPIGGLLGVEEFPVTPAGYALLLGWLGGFGTVGLVGIEGTGSYGAGLARHVTAAGVRVVEVDRSDRQDRRRQGKSDPLDAVSAARAAQSGRARGAPKGRDGAVEAIRALMVAKRSAAGERTRTINQARALIVTGPDDLRTRFTQHTAASLVAGLASLRPRPGDVVGYATRIALRELGRRAEFLDGQLERLDDLIVPLVTARAPGLLALYGIGPNTAALLLIAAGDHPGRLRSEAAWAHLCGVAPIPASSGKTVRHRLNPGGDRQANHALWRIVFTRLGSDTATRAYAERRTAEGKSKAEIIRCLKRYVAREVYPHLRTAAG

SEQ ID NO: 65777 - protein, 316 aa, unidentified
MSDIYIGIDVSKARLDVAWSDGREDRVANEEAAVASFAQQVQRAKVKLVVMEASGGYERLVLAALREVGVSTVAVNPRQVRDFAKAMGRLAKTDRIDASVLCEFALRIQPEVRKARDPLSIELTELVSRRRQLVEMISAETARLKQTPRSRTAIRASIEAVRTLLRKQLRLIDQQLDAASKRDASCAGDIALLASVPGVGRVTAITLRACLPELGCASRKEVAALVGVAPLAHDSGGHQGKRSCWGGRANIRAVLYMASLVAVRCNPVFKAAYAALRARGKLPKVALVACMRKLLTVLNAMMRTRQPWNLAPATSS

SEQ ID NO: 65778 - protein, 406 aa, unidentified
MEGPIITVDVSKGSCHYQPFIENGHPMRKPKQLSATIDGFQKLGQTIKDLEAKTEREDIPVIFEATGVYHRPLQKYLEDHKIRYYIISPLLSATYRKTDLHSNKTDALDCAHIAKAYYCEKELRQYQAQPQEYKRLYQLSRIYESELVHLRKRKVSLRSMLDIIYPRIDKTFKGNQNLYDPIPMEILKRYPHPSLLLSHREDTIVKTVGHRTGHLKGYTERIVHKIYEKAKECYSGCEINDIEVLKLPSLIENVQEQKKKCDSLLKEMIEIARTCPYFASVVSIVGIGENLAARIIAELGDVNRFDNRAAIVAYAGLNPKIQQSGDIDGLHLKISKKGNKHLRCLLYLGAQCNYRLRKEDPLYEFTKKKRQQTQCPLSSKAAYTASAHKLLVIIYSLCKNGTLYHS

SEQ ID NO: 65779 - protein, 408 aa, unidentified
MKTLHQRCAGLDVHKQEVVACLRLVTQGRVHREVRRFPTTTRGLLELAAWLEAARCTIVAMEATGVYWKPVWHILDGSFELVLANAAHIKGVPGRKSDVNDATWIADLLAHGLIRASFVPPQPIQDLRDLTRTRKQLSREIVRHTQRLQAVLEEANVKLASVITDILGASGRRILKAMITGETDPSHLAELGSRRLGCSRDTLVEALDGRVRDHHRFLLDQHLKTIEQLEETMAAFDARIEAALAPFRDTVERLTQVPGLSTRAAEVVIAEIGLDMSRFPTAGHLLSWAGLVPALDESAGKRRSTRVTKGAPWLKPVLVQCAWAAANKKNSYFEAQFLRLKGRRGPKKAAVAVAASILTTVYHMLRDGTCYQDLGPNYFARRNPARTARKLADRIRSLGYIVEIRSAA

SEQ ID NO: 65780 - protein, 437 aa, unidentified
MSKRLQVGLDIHQKHNHVCLMTNEGQMVNPHQRFDNNWPGFQEFVEMLAGVLDEGQFEGLDIAGEATGLLWFHPFYNLAQAEELSLFDPHLYLFNPRTIKHFKKVLAQRDKVDPKDAHAVVERLRFGGRLPHEVTFDERYLPLQRLTRYRYHLAHDLAREKVYARMVPIYLKASDYTRKPMPFSDVFGVTSRHILAKYATIDELASMPLDDLAEELDRVGRHRFKDAADNARRLQHAAAQSYPLAPSLVEPINAILDSLLAHIRFLEGLLENLNLLIEAALTDVPGAPYLLSVKGLGLVYSAGLLAEIQHPSRFMQGFKRNKQGHLRPKTRHDGQAALARFAGLWWPRSDSGNFHAEDRRLPKTGNHYLRYYFIEGGNSLRRHNAEYTPYYQRKFDESLKHKHWRATVLTARKLVRLVFALLHDEEMYQPPEVRYRS

SEQ ID NO: 65781 - protein, 417 aa, unidentified
MNEYAAFVGFDWADKKHDICLVDAATGKKEFCVIKHTPQALQEWASSLRQRFQGHQVAVALEQSRGPLIFALMKYNFLTLYPINPSTLARYREAFSPSRAKDDPRDAEYAVELLIHHRERLKAWLPDSDQTRTLQYLVEHRRRVVSDRTRSSNRMTALLKLYFPQVLEWFDDIRTPLVCDFLLRWPTLEAAQKARRATLEKFFCGHNSVRQEALSARLKAIKEGGALTTDRAVISSSVLMIKTLAQQMKTTISAIKEFDQKIAELCAGHEDYHLFASLPGSGTVYSSRLLAAFGTDRGRFESADEVARLSGVAPVIERSGQSCWIRWRYFCPKFLRQSFHEYAGESIKHSFWARAYYAEQKAKGKSHQAAVRALAFKWIRIIYRCWQTRTEYNEVKYLENLRKKGSSLLGYAANNPA

SEQ ID NO: 65782 - protein, 323 aa, unidentified
MNKDIKYFGIDISHLVFDVTDSDGNYYQFKNTISGFKKFVKLLTMHSHCVMEATGYYHYRLAYYLLESGFKVSVENPLSVKRFIQMRLSKVKTDKSDSKLICEYAKQVELKLWKGNSKHQTESLQITRLLAVYTKQSTMLKNKIHGESVLGNPSKAVVSSLNRSLKQIQKEINLLEGKLLILVKEEHQDVLTRLKSIPGIGSKTALMLVVLTDGFERFTSGSELCSYAGLTPVIRKSGSSVNGRSRISKIGNQKLRNLLFMCSFNACKYNKACREIYERIVAKGKSKKLALIAVCNKLLKQAFAIAKSGLIYDATYKSTPVKN

SEQ ID NO: 65783 - protein, 337 aa, unidentified
MMYGGIDLHSNNCMMAVIDDADHVLAQKRLPNDIGKIVGFLEPWKSEMAGVVVESTYNWYWLVDGLQDAGFRVHLANTSAIKQYEGLKHGGDESDARHLAHLLRLGILPTGTILPREHRAVRDLARKRMQLVRSCTAQILAIENIMSRQQGERLSSNQIKRLDDERIDKMSLPADVSLAMKANIAVIETLREQIELIEKRLLERVKPRPQYGLLTSVPGIGKTLATVILLETGPIDRFADVGNFASYARCVDSVHTSNGKKKGEGNVKNGNKYLCWAFVEAANFAKRLCPEAKRFHERKKARTNNIVATKALAHKLARACYHILKESKPFDVTRCFA

SEQ ID NO: 65784 - protein, 374 aa, unidentified
MENAITYAAMDTHKKQHKIALHYPGREEIVEFAVNNTAADIKKMVNKIKKQAPGNIEFCYEAGVCGFALKRRIEQLGCRCMVIAPSLVPRKPGERVKTDRRDAKKLLVMFKAGLLTEVHAPDEHQEAARELTRLRETAKDNLKRVRHQLLKFLTRHGYVYRQGRHWTQRHIAWLRSLEFTEPMLKDVFESYFNQMIYCAGRLENLDKEVALLADSKEYKELVGLLCCYHGIDTLTAITIITEIFEFGRFESPRHLMSYLGLTPSEDSSGDKQKKGSITKTGNKRIRRLLNEASWHYRHMYVPSAALKKRRKGQPKWAIEIADAAGRRLSKRHRYLIHKGKMPCKANIAVARELAGFIWFTITQYHARKDMVDAA

SEQ ID NO: 65785 - protein, 391 aa, unidentified
MKKDTIEKLQVLAKGKKGQIRRMAAKQRLTVGLDLGDRASRYCILDEVGEKVSEDKLPTTKTGLDSLFAKMVPSRIALEVGTHSPWVSRHLAGMGHEVIVANPRKVRLITQSVKKNDRVDAEQLARLARVDPKLLSPIRHRGPEAQADLAVIRARAELVDARTALINCARGMAKPMGERLKKCDADQVKESMAEGLGEALQTVIGPLLKSVEEISRQIGVYDERIEGIGKRYPEMKLLTQVWGVGTLIALTYILTIEDAQRFEHSRDVGPYLGLTRKQRDSGDSEPELGISKAGDELLRRLLVQGAHCILRKDAPDSDLKAWGMARLQNRDPKGGQKGQKVSKKTRKKTVIAIARRLAVLLHRLWVTGEVYDPHYNRKAAEAAKGKAKAAA

SEQ ID NO: 65786 - protein, 345 aa, unidentified
MKKVMAGIDLHSNNLVIGIMDLDGKRVASQKLSCKLKEVVEFLSPFKQRLEQVAVESTYNWYWLVDGLQALRYPVVLANPAGMEQYSGIKHADDTNDAFFLAELLRLKILPTGHIYEAQLRPVRDLLRRRLTLVHHRTALMLSFKSLYTRTTGLEMSLGELKELEIKAAQDLYDHPANQLIAGMQIKHIEQLTESIEKIEKAVLGCARELPLYTKLTTLPGVGTILGMTIRMEVGDIKRFAEAGHFASYCRTVEAKRTSNNKKKGPNNSKCGNKYLAWAFVEAANFARRYDEQCRKWSERKAARRGKVIASKALACKLAKAAWYLMALGTDYDAKRMFGQPATAQ

SEQ ID NO: 65787 - protein, 387 aa, unidentified
MAQQLDDLSRSLTPLEQDSTIISVIEMSQASWLVAGIVPGIERHPLKKLEPSEVDLLRLLMRWRAEATQKGRTITRIVVAFEAGRDGFWLARWLRARDIEAYVIHATSVAVSREHRRAKTDRLDTGLLKRVFLGWLRGEPDHCHMVAIPTLAEEDAKRPNREREGLVRERTRLVNRMKSCLVRFGVRSFKPTLRKAPDRLATLRTPEGVPLPPNTLLELRRDMARLRFVMDQIKEVEEARAQGLEQAPQDKPHVMVHLLARVMGIGIETADMLVHEVLARTLRDRRAVARYAGLTGSPDESGSRRREKGLAKAGNARVRRGMIQLAWRFLLHQKESALAQWYRARTADARGGTRKTLIVALARKLLIALWRMVTTGEVPAGVVLRAA

SEQ ID NO: 65788 - protein, 484 aa, unidentified
MAARKNTKKNTKKDAASGSLTASPRPGNDGAEVAEEHVEVVTYAAAIDVAKGSGMVCARVPGSRPDRRRQTVWQAGATYASVVALMDHLRCQGIQRLVLESTSDYWRIWYYLAEAAGLEVWLVNARDVKHLPGRGKSDREDCVWLCKLNERGMLRRSFVPPQATRDLRSLTRTRSRLAQDQVRHQNRAEKILEDALLKISVVISDLFGASGRRFLDALVAGERSPAALAALGDRRLRATPAELAAALTGRFREVHAFEIATHLRLIDTINDEIARLDARIEQQLTSIPGVAPACTGCGLIGGGHAPGCASDAAPVLGLVARLDEITGVGVRNAQVLIAELGTDMSVFPTPGHAAAWARLTSRTLQSGTTTKNGRTGKGNPYLRAALGQCVMATARTDTRLGEQYRRIARRRGKQKAIIAVSRVICEIACILIADPAARFAELGAGYYGSGNPQRQTRSRIRELERLNPGMKVTLTPIEPATAAA

SEQ ID NO: 65789 - protein, 380 aa, unidentified
MEWTPPVKAASSVPEWKVQDQPLRMRRASKMKITTIGIDLAKNVLQVHGVDEQGKVALRKQLRRSQVMDFFAQRAPCLVGMEACGSAHAWARRLIKMGYTVKLMAPQFVKPYVKTNKNDAADAEAICEAVRRPNMRFVPVKTEEQQAVLSLHRARQGFVRQRTAQANQIRGLLAEYGIVIPQGIGHIGKCLPEILEDADNALPGLFRQLLRQLGEHLKTLTQLVEEMEQQIQQWHGRNEASRKLATVPGIGALTASAMVASVGDARNFSNGRQFAAWLGLVPRQHSSGGKATLLGISKRGDRYLRTLLIHGGRSVIQAAERRKKPPVEEPLSQQRSWLQALVLRRNKNVAAVALANKNARVIWALLAHDRNYQPGYTVAA

SEQ ID NO: 65790 - protein, 342 aa, unidentified
MLYVGIDVAKNKHDVTALNVPGKTVLKPLTFSNNKAGFELLDLSFRQLNQDCLIALEDTGHYAFNLLNFLHEQGYKVYTYNPLLIKEFAKSLSLRKTKTDKKDAHGIALKLLSDPNREQFQHDNRQVELKILARHIHRLKKKQSDWKVQYTRCLDIIFPELDKIVGKHSEYTYQLLTCYPNPQKRLEAGFDKLIEIKRLTASKIQDILSVAPRSIGTTSPAREFEIIEIIKHYKRLIDKAETCVNDLMAEFNSVITTVTGIGDRLGAVILAEIRNIHAFDNPAQLQAFAGLDSSIYQSGQIDLAGRMIKRGSPHLRWALIQAAKACARFSPAFKAYLKTKLE

SEQ ID NO: 65791 - protein, 344 aa, unidentified
MPVMIGVDPHKASHTAAALDEHGQLLDRQRVPATLMGYRALRQWAGQWPQRCWAVEGAHGIGRALAQRLVGDGEHVLDVPAKLAARVRVLSVGHGRKSDSDDAVSVAVAARNAVGRRQVGVEDQAVVLHLLTKRRQDLVAARTQTINRLHRLLMDLVPGGAQRNLTVKRAAALLAAVTPAGAPALTRWQLATELVDDARRLEQRIAAVEARIKTAVAQSNTSLLELFGVGPVLAATFLGEVGDIGRFPTKHHFAAHTGTAPLEASSGQVIRHRLSRAGDRRLNHALYMMAMVQVRRPSAGQAYYQRKLAEGKSPKEALRCLKRRLSDAVYRCLLADARSPAVTG

SEQ ID NO: 65792 - protein, 435 aa, unidentified
MEDVRDEPLYRSRVCGVDVGKAELYATIRVPSDGNPARRASETRRFATTRRGVLELADWLRCWQVPAMVMEATGDYWKGPFYRLEAEGFDCVLADARQVKNLPGRPKRDPSDSAWLAACFERGAVTACFVAAPEFRLIRLHTRYRRDLTDERTREKNRAEKLLESAAIKLSSVLTDLHGVTGRDIMGHLIAGERDPKTLARLARGRARAKISELAAALEGAEFFTPEHAALLATMLDRIDQINTDIARLSQAIERLLAPWEEQLQQAESMPGWRRRSAEDALAETGPDMSKFPTGAHLASWAGRTPLDNSSGQRKGKTRSKKGNRYLAAVTGETSVAAGKTATREGARYRRLARRRGKAKAQVALGNTQMKVYHALLCRPGARYQDLGPDYYERQRDTRRQIAHHIGKLGALGFQVTLARTPGPEPDQAATTGAA

SEQ ID NO: 65793 - protein, 381 aa, unidentified
MATMTRNRESNAPTACLLLAFELGQRSWKLGFSAGMGQRPRVRQIQAGAVGVIENEVVRAKRRLGLPLEAAVISCYEAGRDGFWLHRYLVAHGITNHVVDSSSIEVNRRARRAKTDRLDLGGLLNLLARYVLGDRRVWRVVRVPTVGDEDARQLPRTWETLAEDRTRLINRMKGLLTTQGVRVPIDKEFLEHLQAARVWDGTPVPAGLQERLAQDWAQLRQVEQQLRERKARATRPSDVTTPTGRAIEQLQTLRAIGVTGAWVLATEIFGWRQIENRRQLGGLVGLVPAPYQSGETAYDQGITRAGNTHVRRVMVQLAWLWLQYQPQSALSRWYQQRFGSGGKRLRRIGIVAVARKLLIALWRYLETGAVPDGAQLKPMEV

SEQ ID NO: 65794 - protein, 353 aa, unidentified
MMIIGCDFHPSFQQIACVEQETGEYEERRLNHRGEAEAFYRSLAGRAVRIGMEATGNDRWFHKLMSELGHELLVGDASAIHASAPREQRTDKRDARHILRLLLENRFPAIWQPSAGNEEQRQLLLHRCRLVRMRTRIKNQLDSIAKSEGLTGSRVWSAKRRQQIEALPLTGWYAERRKDLLALLEEMDKRIEPLNKAVKAAAEQNAEAQLLMTHPGVGPVVSLAYVLILGDWRRFPRGKQVGSYLGLIPAEASSGKHQQQMGHVTKQGNTFLRWLLVEAAIKAQSKDPSWHRQYVRLSMNKHHGVAKVAIAHKLAVRLYWMLRSGQNYTQVMERGSHAGQSVHPNGCGLKPSL

SEQ ID NO: 65795 - protein, 375 aa, unidentified
MSQTAAALIPAPVAYASTLVLAIEVSNKSWVLAAQVPGLPHTKAKRTIHPEAGALLAAIAGYRARAAATGHSIERVIAVYEAGWSGFWLARWLIRHGVEVYVVQPSSVPVDRRMRRAKSDGIDAELLLRTLLAWLRGEPRVCSMVPVPDEADEDARRCVRERTELISERVGLTNRIGAVLATLGVTDYNPLLRSRCRRLAELRTGLGEPLPANAHAKIKRLLARLELVLTQIAELERERDAVVETEASDKAGKMIQQLISLRGIGVQSATVLVREAFVRRFANGKALGSYAGLASSPYNSGGINREQGIGKGGNRRVRTVMVELAWLWTRYQPSAAQVCWFRERIGSACSQNHGGGPGSKTADRAVEVRHRRCGA

SEQ ID NO: 65796 - protein, 312 aa, unidentified
MQISGCVIGVDVGKFELQVAGHEKSIVSGVLPNNRSSIVGWLKRLPAGSVIGMEATGGYQELLARLAHERGFVVYVLNPTHVHHYAISLGNRGKTDRLDAEVIAQYIAQRHTKLHPYEPISPELQQVRALQALRTTVVRVSTSLRLSAQRHGCASVHQKKALAGLSSWAEQLERELIAKIKAQSEWAKIYGLLTGICGIGPINGVALTALFTRVHFTSSDAVVAFCGLDPRPKESGRKVGRRRLSKQGDKAARSLLYNAASSAVRTPHFKDYYAALRARGLASTAALVVIARKLLRIAYGVWRTGQAFDPGG

SEQ ID NO: 65797 - protein, 402 aa, unidentified
MNCVGIDVSKGKSMIAVMRPFGEVVVSPFEVRHTANELSELAGLLKSLDGETRVVMESTGNYHAPVAWLLHDAGLYVSVVNAMLVHDYGNNSLRRAKTDKKDAVKLANYGLDHWLTLPRYIPEEDTRLMLKICYRQYQQYSKVQTMLKNNLISLLDTTFPDANRLFTSPPRADGSEKWVDFVATFWHCECVCGRSEKAFTTQYQKWCRKHGYNFSEDKALDIYASACRHFGVIPKTDTAKLLVEQAISQLRATSAALAALKQEMQSLAASLPEYPVVMEMFGVGPALGPQLMAEIGDVRRFHSKKALVAFAGIDAPPYQSGQMDIRSRSISKRGSASLRRTLFLVMGVLLQCAPMDEPVYQFMNKKRSEGKPYRVYMMASANKFLRIYYASVKAYLDSLEHD

SEQ ID NO: 65798 - protein, 341 aa, unidentified
MKHLYLGIDWGKNFSQLFGFDQAGEVVIEERLKTLDLSVWRKKLRSLKSYSIHAAFEIGAHYDWLHDLLTEYCCEVAVIDPAQFAVICKSQRKTDKIDAQKIAEGLRRGDLPLVHVPDKQTRADRRLVAFTHWHSQQAASVKGKIRSLLLAQRLECPYSNITGMAALEWLNEQLPQMSDDAQLFLRLLLAEVELLRQQRQELDARVAIRVKRYKQVAVLDSIPGFGQLTILAVLSSIAGVARFSRPEQLSSYWGVCSSVYQSGTTLRLGSLTRRGNVHVRWLLSQALQHLHRKDARARKRYLKLKRKKPRGVARAAQVRWLTQIIWHLLKKDEPYRIKAAA

SEQ ID NO: 65799 - protein, 312 aa, unidentified
MTRIICGVDVASESLEARMGRDGAAASFANNAEGIAALALFCAQHGAELVAMEATGGYEQQAFAQLAQLDLPVAILNPRAVRQFAQSMGRLEKTDAIDAGMIAWYAEVKNSPPVCLAPDRQQHLRALVTRLRQLTQIRTAQLNQQRLVTDRAVQASFKKLLAVVARQIRELEQRIAALIEQDPTWRELNLAFRTIKGVADRTVARLVAEMPEIGTLSNKTISKLAGVAPLARDSGKHQGKRAVRGGRAPVREILFIVASVVGRYEPDFIAFQQRLRQAGKPPKVVRIALAHKLLVRLNAKAREVRQTARLAA

SEQ ID NO: 65800 - protein, 319 aa, unidentified
MFEYVGFDIRKYTLDVDLPGGVVRYAQTSADHARLLAALPAEATVILEATGPYGLRLLGALHQAQRPVCVINPLQARRFAQSQLRRSKTDRSDARVLSAFGAAFQPRLTEAKSREQQQLAQRQALLELLKKQLAALKNHAQALVQALWPDPVSEAALAEQMARLQEQIAQLEAELDADVRAAFPVYERLRSIPGLGPKTVAALLLAGPGLAAYPGWRQAVAYAGLCPRHFESGTSVRARPRLSKLGDGRLRRLLYMGSWSASRVNPACKALYERLLERGLAKQQALCAVAARLLRQAWAICNDPKERLFDPEFHLATGN

SEQ ID NO: 65801 - protein, 424 aa, unidentified
MRYFGVDVHLEFCEIAVAEDGRVSQVGRIASTPEAIREFAASLGSEDQIVLDASGSVMAIARILRESNVGRVVVSDAAQTRAISHARVKSDRFDAAMLARLLSSGMLSEVWVPDEATLALRRRVARRAALIRARTRTKNQVHGVVMRCLLGRPPVSDLFGRKGRVWLAEQQLPEEETETVQGALRQIDFLDGEIAQLDKKIAEQALAWPGLCRLLTIPGVDIGTAAAVIAAVGDISRFPSAGQLVAYLGLDPKVRQSGSEPARYGHISKRGNAQARSMLVEAAWIAIRSPGPLRAFGERVRARRGAQVAAVAVARKLVVLCWQLLSKDEDYAFARPSLTRQKTRRLELTAGAPRRPRRHDGLTVSPTTAQRAAERELQHQAELAYRRLVADWRAAAPKGGAGATPGRASNRPSKGKAARQATSP

SEQ ID NO: 65802 - protein, 417 aa, unidentified
MRRVIGMDIHRTFAEVVFWEAGQLRPAGRVDMTRAGLEGFGRTLSKADEVVVEATGNSMTVVRVLEPYVARVIVANPAQVKAIAYAHVKTDKIDAGVLASLRAANFLPEIWLPDADTERLRRQVARRNQVVRHRTRIKNEVHAVLHAYLVPRCPHDLFARPGRDWLARQVLPDDERAAIERHLRELDRLGQDLDLLDRDIAQAVIHDPAVKRLLTITGVNLIVAAGVVAAIGDVRRFASSEKLVSYVGLNPRVRQSGLGLAQHGRISKQGRSHARAMLVEAAWAASKAPGPLRSFFLRIRARRGHQVAAVAVARKLAVLCWHLLTRDVDYQWARPALVANKVRAMELQAGQPTRKGNKRGSTYAYNVKELRDREIDIARQAEQAYETFVRGWQPRSPAKAVHGRRHGGATVKAARPG

SEQ ID NO: 65803 - protein, 346 aa, unidentified
MKVLIGVDPHKGSVAVAALDEASGELVERAAFSQDRAGLRSLERWAKRFPERRWAVENASGLGRHLALRLAAAGESVVDVPPKLSARVRVPSTGNDRKNDGLDALATALAASRNERLAAIDPEAASEALRLLSERREDLVAERTRALNRLHGLLRDLLPGGATGTLSARRAARILRGIKPQGASARLRRRLASEVLRDVRTLDGKIADLNGRIEAEVEASGTTLTEIFGVGPILAAKIIGTVGNVARFPTKSHFASYSGTAPVEASSGDVVRHRLSLAGNRRLNYALHMVAVCQARSDARGGAYYRKKIAEGKSRKEALRCLKRRISDAVFRSFVADSQAHSRSTA

SEQ ID NO: 65804 - protein, 312 aa, unidentified
MEARYVGVDVSKDRLDVHVLPEGAAFAVARDGKGLAELVERLSALQPQRIAVEATGGFETIVAAALAGASLPLVIVNPAQVRHFAQALGRRAKTDPIDASMIARFVEATKPDLRPLADEATQLLADLVARRRQIIEMIVAERNREKRVAVRRIRKSIARLIAALEKELSEIDAEIDASVRGSPAWREKEDLLASVPGVGPITARTLIAELPELGTLDGKRIASLAGLAPFTRQSGQWKGKAMIAGGRKSVRSALFLASLAACRHNPVLKAFRQRLIDAGKPKMLVAIAAARKLLTILNAILRDKQPWRPESA

SEQ ID NO: 65805 - protein, 377 aa, unidentified
MTKIRFVGLDVHAETIAVAVAESGGEVRSLGIIPNKLESVRKLVGKLGPAQQLKCCYEAGPTGYVLYWQLTQLGVACEVIAPTLVPTKAGDRVKTDRRDAEKLARCYRAGELTAVWVPDAEHEALRDLVRAREAAKKDQLRARHRLGKFLLRHGQRPSDAGKAWTKKYLEWIKTHVRFEPAALEATLAHYLEEVDHAAAQIVKLEQAIDQAVAQANPEIRAVIEALQSLRGVAQMTAATIVCELGSLSRFESPRQLMGYSGLVSREHSSGNRIQRGAITKTGNAHLRRVLVEAAWAYQHRPNVTGYLLRRQKSLALAEETKQMAWKAQHRLHKRYKALAARGKNKNQIVTALGRELLGFVWAIAVHTEAQHRQAQAA

SEQ ID NO: 65806 - protein, 354 aa, unidentified
MTSTKYIGMDVHKESISIAVMNAAGKIVMECVIETKANMILQCIDGLRGDLHVTFEEGISAAWLYDLLKPHVTELIVCDPRKNASMREDSQNDKIDARRLAELLRIDHLSPVYHGEHGLRTLKELVRSYLTVTKDLVRVKTRVKAIYRSWAIPCNGKEVYGACHRAEWLGKITESGVRRRAEFYYQQLDALRVLRQGVRRELLAESKKQKAWKRLCQIPAIGPIRAAVLLGILQTPHRFRTKRPLWKYSGLAIETCSSADHRSIHGQLQRSKKNSVRGLNQNCNHDLKNLFKGAAIVASSKPGPFQEFYTALLTKGLRPEMARLTLARKIATIVLIVWKKGVCFDAQHLKPQTA

SEQ ID NO: 65807 - protein, 343 aa, unidentified
MAYYVGLDVSLKTTAICVVDRDQNVVWQGSAETHPEMILNALDRWMGSVMRIGLETGSSSPWLARALKARNLPVIVMDARRAASALKARPVKTDRADARALAEMLQSGWYTEVFVKSEESHRIKALLSARDQLVRNKRTFFGQIRGMLRPFGIRLPARQGTRRFDEAARAACRHDDLLYACVNALLEALGAIEVQIAALAKRVRAMVQTSKACWYLTSVPCVGPITALAFAAAIEDPGRLRRSRDVGAYLGLTPRRWQSGEKDIVGAISKQGDAMARHCLYEAANCLLTTWGGRSALKSWGLRLVKRVGAKKARVAVARKLACLLLRLWKAESHYDEDQVRTA

SEQ ID NO: 65808 - protein, 358 aa, unidentified
MRIIGVDFHVRQQTIAMFDTETKELVKKILRHEGEQVREFYSALPRPVQVGIEATGSMYWFLDLLEELRIDRQVGHPAAIRATEPRKQKFDGRDALLLLRLQIEDRFPSIWVPSRELRDLHALLRHRHQWVRMRTRVQNALQAIAVSHGLRRGPSLWSQTGQHAIASLPLAPHAAHRRNELQALYCTLSTKIDELDQRVKDQALQRSGAKLLMSHPGVGPVTALATDAFLGDPSRFADSKTLTSYIGIIPSEYSTGGRQRLGGLSKQGNPLLRFLWCEAGMHAARRDPELKRFYRSKLHQKGLGKVRVAVARKLGIRLWIMLRDQIDYQEFCRRGQLRQKSGAARAGMPEGVHSPATS

SEQ ID NO: 65809 - protein, 428 aa, unidentified
MDEVNRNRLEEFRQLRQGVRHSEEYLIVGLDIAKDRHHAFFGTATGKTLLRRLVFSNDHEGFRKLLDQAEVLRVRHGLKKVVYGMEPTADYHKPLGEYLITQGRMVVLVSGVTVKRNRESLDGRWDKHDVKDSANVADLISQGKCLYYEHPSAELRGLRGLLSLKRRLKKQEQGYRVRIRNHLIAQYFPEMDRDYERLGVEGLSIVRWCFPPSQITELDVDPFIERVTSRRIRLERRRRLEGIWEKAGGSIGCDGVPGVEHEARMMVEGLQQIRQMIKETEGKIQELCERFLEYKYLLTIPGFGPDLSAKVLGAIGDPDRFQNGKQVLKLAGLDLSADRSGKDSDKAIPEISKRGKSDLRYALYQAALIASTKNQDFMRYYVRKLEGRQKEKGIQTKMWVKLSAKMLLIAWTLMKKKEAFDPAYLNVE

SEQ ID NO: 65810 - protein, 415 aa, unidentified
MEEQTKSSAGIDWAKDEHAVCVVEEASGRKTFEGRFAHDEEGIQKLCRSLVEMGVERVAIERPEGVLVERVLDAGLTVLAIHPNQLKASRPRFRASGHRSKSDSFDAFCLAELARTDHHRFRALMPDSDETKALKVLTRAREDLVATRVALANQLRSELEAFWGGAALLFSEIDSAISLAFLAHYPSPKDAARLGEKRLAGFLSKNSYCGGKSAPELLGRLREAPQGRASEAEMEARREAVLALVGTLKALVGRIKALEDRIARAVRAHPDGEIFLSLFVSPKSTLTAASLVAHIGDRRERYPTNEALAAAAGMSPVAVESGKRKVAAFRRACDKRLRSAFATLAESTRQHHPWAKEIYRRARGRGCDHAHAIRILGRAWVRVIFRMWRDGLPYDPARHGGLKRLRSGEGLPQGV

SEQ ID NO: 65811 - protein, 447 aa, unidentified
MRSTIGTAFTETSGGPAPSGPRLYVGIDVGRRFHQVAAIPEARMENGSWERAPVRRIATSGAGFRELTSWLETTAIAPALVRIGCEPTGGGYSRTVAGWLERHGYEVQWLQNWAIHDRRQLMIGKQAKTDALDARLIARLVYKRDRLSLVGGFLHRPPRNTDALRTLVRGRLRLMDQHIRFRQQLTAVEDVLFPELKDFYRSSVTSSSARILLESFPTPESVAAADPADLYRVIVTVGRNRRMVPRLLDFQLAAADSAGLTDDREPLVRAQHWLLYQLRLLDRQLEDAEAAIGETLAEWPEQDRRVLDSFPGMSQHRQAVLLSCIGDLSTFNSDRQLRKLLGWYPEAYQSGTAVHKHHLGKSGNRIGRHEIWLWSLQMLSPLFPPNPFRTYYQRLRGRGMSGSVAIGHLAGKLISVLFFCLHSGQPYDPVRHARDLGLGDVCTELEA

SEQ ID NO: 65812 - protein, 354 aa, unidentified
MLDTTTGELANLTLMHEGNNVREFYSQLPRPVLVGIEATGSMPWFLSLMEELGIECRVGHPAQIRAAEPRKQKHDRRDADLILRLLAESRFPTIWLPSKELLDLRALLLHRHQWVRMRVRMQNALQAIALANGLRRGPSLWSYDGQAKIALLPLLPHTAYRRSALQAMYKTLESEIENLTQQVAEQAGNRPGARRLMTHPGVGPVTALATEVFLGDPQRFTDSKALASYVGIIPREYSSGGQQRLGGVTKQGSPLLRFLWGEAGAHAARRDPELKRFYRRKLVHKGLGKARVAVARKLGIRLWIMLRDEIDYQEFCRRGQMQQKTVRPVAGMPETGNGAKSHRPVDEATRLPES

SEQ ID NO: 65813 - protein, 419 aa, unidentified
MFKIFYKNCCGLDVHKTWIYACIGITDADGKTVYHESRFSSFSKGLRKLAKWLQKYNCKLVCMESTGKYWIPVFNILEKTCDVTLAHPKYTKPQKGNKTDRKDAKWICDLFMCGMIKPSFIPPAAIRQLRDLVRYRSKLTNMLTGEKNRAQNCLTVSNLKLDDVFSDVFGKSSRSITEYILDHPGETFDVTPFVDGRCKAPIEEIQAAVDGSVSKEQAAKLRQCLKHIDELTAHKQKIEEEILQIAEPFSAYLDLLRTVPGCDSDKMTAITILSEIGYDMSVFPSSKNLTSWAGCCPRNDRSAKHTKSTRISRAGAWIKPLLVQISNALIRSKKHPEFSERYRRLKARRGHKKAIIAICRMLLTAIWNILSKLEPYTPDGFINDRPADKKKTMSTAEALKLLKSRGYIITDLPDGSVTT

SEQ ID NO: 65814 - protein, 328 aa, unidentified
MNHPFTCWAHLGIDISKLSFEACLWLNNTLRSATFPNNPEGFTQLDAWLKEHDVPKTFAGLEATGPYGAALLWHLHVQGHRVHLLNPRRVKDYGRSQGRRVKTDRSDAALIATYLRASEKLQPWQPPTQALVELQALVRRRAQLLDALQAERNRNEVAPSAAVAASLQRQITELKAEVKRLNTAIDKHVLENQPLQKSVRLLRTIDGVGRMIAVTILAEVPAISTFARARDVAAFAGLTPALAESGTSLRRRGHMTKEGSALLRKMLYMGALQAAKRPSNAFHKCYQAFIQRGKAKMCAMGAIMHKIIRVAFGVLKHDTPFVENFARL

SEQ ID NO: 65815 - protein, 422 aa, unidentified
MFDTAGRGAKGDDLQYQNFVGIDWGTEKHRVCLMNRDGKQLQERWCEHSGDSLAELMDWLRNEGSGKAEDTAVAIEIPRGAVVETLVEHGFRVFSINPKQLDRFRDRYSPAGAKDDRRDAFVLADSLRTDMHCFHVVRIDDPVVIRLRDLSRLDDDIKSEGNRVTNQFREQLQRFFPQLLKLSSSANEPWLWALFELAPLPVKAARLSEPRITRILRRYRIRRWDAGQVRETLAQTSLTLAPGAAESASERALFLLPRLRLLREQRTEIAKRIEALLGELGAPTDASGETTEHRDAAILLSLPGVGRQIAATMLSEASEAIAERDYHAFRCYSGSAPITRQSGKKIVVIMRQGCNERLRNALYHWSRVSIACDPASKEMYAAMRARGHTHGRALRGIADRWSAVLFSMLRHKTLYNPKLRAA

SEQ ID NO: 65816 - protein, 339 aa, unidentified
MLAVGVDISKDGFHACLKEKTEGGTVKIKGTHSFLNNIQGFEKLTAWVLKREKQGTQVSYIMEATGTYYENLAYYLHDNGKRVFVVLPNKIKHFAKSMNIKTKTDKVDSGIIAQVGIERKLAIWRPMSANFKELRDLSRERLSLKKEKSRAMCQLHAMEYSHHKTPRVLQIKNNLIEFYATSISQIETELAEIINADTELKTRIERIMKVKGLGMNTIVAVLCETNGFELFNNIRQVVSFAGLDVQMNESGTFKGKTRISKKGNARIRQCLFMPALSATVHNDKIKDLYERIVERNPDIKRKGVVAAMRKLLIIIFVLWKNGEEYNPQHVWGINANDIG

SEQ ID NO: 65817 - protein, 352 aa, unidentified
MVVIGVDAHKRSHTLVAIDGAGRKLAEKTVPATSDGHLAAISWAARWPERIFALEDCRHLTRRLEIDLLTSGEAAVRVPPHLMAGVRRGGRERGKSDPIDALAIARAALREPDLPVARLDGEARELRLLVDHREDLVAERTRIQCRLRWHLHELFPGLVIPSRSLRRYNVLAELEERLAGQEGTVAGIARELVARCRELTLRARDLEREITTIVRRLAPSLLAMPGCGALSAAKLVGETAGAGRFRSKAAYARWNGTAPIPVWSGNSTRHRLTRGGNRQINAALHRIAVTQLRGVGGLGQAYVERRMAAGDTKVEALRALRRRLSDEAFRRLLADETAIGASVASGELAAAA

SEQ ID NO: 65818 - protein, 352 aa, unidentified
MKSYFGCDAHKKYSVFASINEAGHRGSCIRVENDRYQFSRFLQTLPPGSPIAVETVGNWYWMIDEMEKARHEPRLAHAGKAKLMMGQINKSDKLDANGLALLLRNGTLPSVWIPPGELRDQRELPRMRMAMVKVRTLFKNRIHATLAKYAIQIKEVSDIFGAQGRKLMENRLSELPPQTCRSVEEQLKLLDQVKEHIKECEKQIEEIIEETPAMRQLMTIPGVGSILAIVIAMEIGQIDRFPRAENLASYAGTVPRIKESGGKIRYGRVRPDVNRYLKWALIEAANVVVLNQNRWPESHVVQLYRRIKQRRGHAKAVVAVARHLAEATYWMLKRNEPYKEPKKNKTVSSTRK

SEQ ID NO: 65819 - protein, 379 aa, unidentified
MEAQKKDPPSIRHRCARVEMFSNHSQDRGSGMQVTTYGVDLAKRVFQVHWVEPDTGEVKRKMLTRGEFAAFFARRAAGLVAVEACGSAHHWGRTLRGLGHQVRLIPTQFVRPFVKSNKTDTADAQAIWEAVQRPEMRFVGLKSELQQAVLGLHRVRAQLVKMRTMQANQVRGLLYEFGVVVPRSWRALLLQAGPILADSSRREVPELIRGELQHQLEGLRDLTGRIEKLERSIGGYRQRDEQCRRIEAIPGVGPLSSTAVLATVGDARTFRSGRQFAAFLGLVPRQSGTGGRVKLLGISKRGDPYLRTLLIHGARSVVNHASRPGATPPQWLQGLLRRRPKNVAIVALANKIARTIWALLAHGRTFDRRWGQALPVSVA

SEQ ID NO: 65820 - protein, 391 aa, unidentified
MVCVGIDVAKDKHDCCILDSEGTPLVDCFTIPNNMDGFKSLLQTIQDCSQKSDKIKVGLEATGHYSYNILGFLLDNDLPVYVMNPLHTNLYRKSLSLRKTKTDRVDAKTIATMLLSDVDLKSYTDTAYHNEELKSLTRYRFDKVQERAKLKQSVSRLVTILFPELEQLVSSIHGTSIYALLSEYPGAKQISEAHLTRLANILVKTSRGHYRKDKATHIRDAARTSIGSVMPAKSLELKHTIKLIQELTSEINEIEDAIRKIMDELKPPILSIPGMGFHSAAMILAEVGDFSNFNSPDKVLAYAGCSPSTYQSGKLTNFYAHMEKRGSRYLRYALYTATKYVCYWNPVFTEYLTKKQAEGKHYNVALSHATKKLVRLIYALQKSGKAYLAVT

SEQ ID NO: 65821 - protein, 591 aa, unidentified
MALSFAAAPPTMQRVGVGIDTSRYGHYAAFLGDDLQPAAAELSFAESAAGYAQLRHRLEHIAQRHGRVHFVIRLDAAGQYADNLLHFLHGLDAWRGQAPSLAHVTCSISCGDPQRNKNYRAAVFGSKKSDPYEARAAARFAVSEQPAPGTVLPVQLRTLRQVAGRLQAVVRQRTRLINQFHHLLALTFPELALIVKDIATGWVLEMVHRYPTARLLAQASASNLENIPYLPHEQVEALLTHARTSIASLGQPAIEELIRDQVRQLRDVNARQKRLENLLVSSYQQLPEANHLDSIPGIGRVTAAVLTAFMLDSDRFETPGKLVAYFGIMPVEASSGVDRDGRPRGPRRYVMSRRGNDLVRRYLWMAALSALRHNPAARALYARVVAKHPDKKAIAVGHVMRKLLHLVFAVWKTKKPFDPEHYPWHTPAHVEGREQRGEGREESRVTSVPRNEGNQAAGLKNPAPPVRKEVTAAGSITSTPSIPHTLPVDEHTAVDFAHLTRQLTMAQVADHLGLRLRGSGPQRRGPCPIHRGDGRGRTFSVHLEQNVFHCFDAACAKKGDVIDLWASVRGMSLRAAALDLVRTFNLEPTPT

SEQ ID NO: 65822 - protein, 368 aa, unidentified
MGLYIGLDVHSKQTTYCVMDDVGAVKAQGSVETSANSLVRFLESTGAEPASLVGLETGVQSRWVSLLVRSTGLVPIVINATEVRRKARRSRQKSDTRDAFEICDGLRRGLWDSVVYVPEEPVQRLRDLLSRRRHFVSLCTMEVNAARYVVRAHGITLGPGRLNTENGWKTFLARADVARWRELLELHAATWRLAEATVRQLEEQLSEALKPFHDEYLRLQTMPGVGAVVATTFLAVIATPDRFPTSAHAASYLGLVPSTYDSGERERHGRITKQGSRELRAVLCEAAHRAADVRHPLNPYFVKVMAKSGYRRAIIAVAHRMARILFQMWKRKEDFDVTKLGVEPGMHIVKKRRFFALKGARPGSRRVA

SEQ ID NO: 65823 - protein, 412 aa, unidentified
MLDVMFTHCAGLDVHKKSVTACLLIPGKNGKVRRRVKTFGTTTNSLQGLKSWLLEMGVTHAAMESTGVYWKPVYNILQGAVEVWVVNAQHIKQVPGRKTDVKDAEWIATLMRLGLLNNSFIPDEEQRDLRDLTRYRTQLTNERSAAVNRVQKVLEDANIKLSSVVSDIQGVSARRMLAAIIEETDDSEALAELAKGRMRNKIPELVEALTGHVRAHHRFMLQELLEQVDGLNQRLQSLNQRIDQHTAPQAELIKRLEAIPGVGEHTAEILLAEIGSAVDQFPTDKHLASWACLCPGNNISANKRRTGKTRKGQKWLRTALAEAAWAASRTKETYLSAQFHRLRARRGAKRAAVAVAHSILTIVYHLIKNPEATFQELGGDYFMKRNKGDHKRRAIKTLTTLGYAVELTPVAG

SEQ ID NO: 65824 - protein, 352 aa, unidentified
MRNLAAPKGDRRFGRKLTRVGIHPDGLTLTPEGTAMQSILDLGADVDSRYIWVACAAHSFAPYRIDNTRNAILVWLRTLPRGSRLGMESTATYHELLANLAHKAGLQVFVANSRDVRRYAQGVGCRGKTDRISAEVIARYVAREHADLHAYVPPTKEQLALKQLLKRRAKLTVTKAALTQSLRGLPGAGREIKRLMTGIDELIAHIDRLSERTLQKLTSAREAAEHIRTIAGFGALSSAYLGYSFTRHPFSNSDSVVAFSGLDPRAEDSGKKHGRRRLSKRGPSEERRILFNCARSASRTKVWRPYYQAQRAKGLSATAATVILARKMLRVAFALYKHKQPFDPALLAVGTA

SEQ ID NO: 65825 - protein, 429 aa, unidentified
MKNSAANKLKQVPVGYLVIGIDPHKKKHAAVLMTQDFTTHSKFKFNNSKVGFDMALERIRMDMVRTGSRGAIFAIETGGHYWRNLAYFLDGRGIPFRFINQFTLKRRREGKDLNRRKNDYRDSEVAAQLLCTGEFTETQLRHGVYAELRAAHNAYRRLVKERTRITNLVKGLLDGLFPEFTQVFRDPCGMTAMSVLSICPIPHIIAGMTEEQFINTIRAGHQGPLMRKKLRTLHYTAKTSIGIEADAQSVSYELSFLAEKLQLIKRHIRSIDETLVKLVDEAEEGKYLLSIIGLNYISVAGLLAELGSFRSYRSAKQLIKMAGSNPIESESAGKRRNHTPMSKKGRPVLRYCAWTAVIPMLRFNPDFRTWAERIRERPVHANPLGGREIVGAGLNKLLRLAFALVKKQTFYQVQGIELIPELELLPVAS

SEQ ID NO: 65826 - protein, 338 aa, unidentified
MKIVTVGLDIAKQTFQAHGVDCKGKVVLRKRLRRVEVSSFFAEVEPCLIGLEASGGAHYWFRVLSRLGHTVRLIAPQFVKPYVKSQKNDANDAEAICEAVGRPSMRFVPAKKIEQQDLQCLHRVRSRLIGCRTQLVNQIRGLLAEYGIVIPQHVAQLRRHLPVVLEDDANDLTMSARCLFHSLYEELVELETKISSADQRIERAFRENAECQRIGAVEGIGPVTATAVVAAISDGHAFRNGRQFAAWVGLVPRQHSSGGKTQLLGISKRGDPYLRTLLVHGARSVVYRAKTKSDCRSRWINDKQGRLGTARACVALANKNARIVWSLIAKQQVYRPAA

SEQ ID NO: 65827 - protein, 339 aa, unidentified
MDHVAIDLGARKSQICVRSADGEIVEEKRLETWDLKQYLAGRPKSRVIVETCAEAFGVAAAAKELGHETRIVPATLVRTLGVGARRTKTDQRDARALSEASCRIDLPSVHIPKAESRERKTFCGMRDSLVSARTKVINTVRGWLRGQGRRLGKGSSPTFAKRVRALCGADLPDYVERQLRVVEALAAEISEADKALESQAEQDETCRRLMTVPGVGPLTALRYVAAIDDVGRFATAHQVESYLGLVPGENSSSERQQRLSITKAGPPALRWVLIQAAWVLRTQCRQPKVVPLQLWAHRIELRRGKRIATVALARKLAGILYAIWRDGTEYDGARGAKMI

SEQ ID NO: 65828 - protein, 365 aa, unidentified
MEVLYPRCCGLDVHKSSITACTLLREQGQMRTERRRFTTMTQDLENLAAWLRQLQVTHVTIESTGVYRKPVWNKLEGQFTIILANAQHVKNVPGRKTDAKDSEWIAELVQHGLLRSSYVPPEIIRDLRDLTRGRATLSQEASRIASRIQKVLEDANIKLASVAGNTLGKSGRAMLDALVAGQIDPEQLADLALGHLRAKIPQLRLALEGKIREQHRFLLERLLHQLRFIEGEIDLLDQRLEELGPRDPTLAAAVARWTIVPGVDRVAAWSLAAEIGVAMEQFPTAAHLASWAGLCPGNCESAGKRLSGKTRKGSPWLGRMACQCAWAAARTKNTYLSVQFRRRAAKRGKKRAIVAVAHSILVIAY

SEQ ID NO: 65829 - protein, 448 aa, unidentified
MSNGNGVSRGDRNRNARLNRLRELVPVTHAIVGIDLADSKQMVVVTDHDSKVLARRTFRCRAWDLGLALDWAGQHASKAGFAGVTVACEPTGHRWRVLGQLAADRGMAFVCVQTLLTSWARRSEDLTFDKTDEKDAVLIARLTAQLRCYVPEPLDERWGRLRHLGARRERLLAETVSQVQQVRDLLECVWPASLDTAKHPFRSRTWLAGMSVILGRTGGDPTRLRRLGPARFEAAVRREIVARQGKKPCLRIVRLLFAAATDPRGVTTHRPGALERVQFLLDDFRDTGRRQTETEARMVEVLDELQLTELVCSIVGLSALGAATILAETGDLTRFASARAVVKHSGLAPREKSSGTYTGRTRLTGQGRPGLRRAAWRAVWGAQKANPVYAAKFTHLTTRTENKLNRGQAHAALAAAILRQLYAVVSTGQRWDAAIAAGGRCEVIEPAA

SEQ ID NO: 65830 - protein, 332 aa, unidentified
MLKLLHRWREEAKKAGHGIKRIAVAFEAGRDGFWLARWLRAYGIEARVIHASSVAVSREHRRAKTDRLDTELLKRAFLGWLRGERDHCRMVAIPTIEEEDAKRPNRERESLVGEQSRIVNRMKAALIRLGIRGFNPKLKKAAERLDGLRTPEGDPIPPNTLAELRRDMVRRRLVSDQIRQIENARLERLEHASGDGPHAMVRLLARVIGVGTETADMLVQEVLSRNMRDRRAVARYAGLTGSPDESGKKRHEKGLARSGNARVRRGMIQLAWRFLMFQKDSALAQWFRARTENARGTRKTMIVALARKLLIALWWLVREGVVPDGVVLRPAQ

SEQ ID NO: 65831 - protein, 368 aa, unidentified
MNSEYYTTIGMDVSDRTTKVCVMAKERGARRILEETTIPTTKDGLRAYLSGKSAAWPVVFETGAHCRWMKRVVESLGMKAIVANPSKLRMVSESNTKNDRNDARELARFALADVELLHPVRLRGERCQQALRLMKARDMLVKVRTMHVNALRGFAKSMGFRLPSCPANRVHALDKSGWPADFESVAWPLMDVLETVDLKIRAYEAQIRSLAESRELKDKVDRVREVYGIGLLSGVALVASIDADPGRFRKARDAGAYFGLVPKQRQSGKMDVQCHITHAGSDFVRRLMIEAAQIAMRDSARDTDVKLKGCRICARGGKIAKKRALVAVARCLVVTAVALLKKPDAEYVPLSESARREFEAMRSWTTVA

SEQ ID NO: 65832 - protein, 365 aa, unidentified
MTMYLGLDVHASATVYVAQDQEGKVLGKGKVSTSREGLKGMLEQVGAPAGSKVALESGSQSFWVSGLLSELGMESYVIEASEVRQKARRPRQKSDRRDAFEICDGFRRGIFVKMVYVPVREAQRLRLVLSRRRHFVRICTSQINAAKSLLRSIGLAELAGSLVTVKAWEELLAKAELGELKQMVSLHYQVWRSARSQAEELKGELDKVLTPFAAISRRLQTVPGVGEITAATFIAVIARPDRFPGSGEVSSYLGLVPSGWDSGESEKHGPITKTGNSELRSLLVECAHHASSPNHPLHPYFARVCAKGGFKKAVVCVAQRLARILWRMWLNQEDFQVEKLNVIKGRRKVSRTYYWRIKEPVSAEA

SEQ ID NO: 65833 - protein, 355 aa, unidentified
MSSEKYIGLDVHQATISVAVMDSQGKTIMESILETKASTLLEFFAGLRGSLFVTFEEGTWAAWLYDLLKPHVSDVLVCNPRKIPLHKQGNKSDKIDARKLAERLRLHDLKPVYHGETGVRMLRELARSYLTVVKDLSRVMNRLKALYRSWAIPCAGRDVYYTRHRSQWLEKIPEAGTRRRAEQLYQQLDMLKHLRQQARRELLAESRKHAITAKLRQIPALGPIRCALAVALIQTPHRFRSKRQLWTYSGLGLETRDSGEYHYVHGQVRRRKKQATIRGLNKDYNHDLKGLFKGAATRASVQPGPFQDFYQRSLAKGIKPTMVRLTLARKLAAITLTLWKKGEDFDIHKLNSQAA

SEQ ID NO: 65834 - protein, 327 aa, unidentified
MIEAVLGIDISKLKFNACLISPKGKRKHKVFPNTRAGFEQLLAWLSRQGVEPLHACLEATGTYSEPLALFLVEAGRTVSLINPAAIKAFAQSRLSRTKNDRVDAELIARFTQAQPPPAWTPPSVEVRELQALVRRLESLVELRVMEENRLSAGLTVASVRESVEELLAHLNTQIRRTEELSRAHINKHPKLKQQRELLDSIPGIAETTAAHLLAEITDITQYRSARQVAASAGLVPRERQSGTSVRGRTRLSKIGNARLRRALYFPAITAIRCSPFFKAWAQGLQERGKSKMSVICAVMRKMVHIAYGVLKTGKPFDPEWTRKEKIA

SEQ ID NO: 65835 - protein, 416 aa, unidentified
MDTMYERCCGLDIHKKTIEACFRSGKKKTHMSFGTTSAELRKLTMWLVENDCQSVAMESTGSYWKPIFNILELSGTDMKIIVVNARHMKNVPGRKTDVHDAEWIAELLQYGLLRPSFIPDREQRELRELSRYRKSLVEERAREINRLQKMLEGGNIKLTSVVSEVTGYSSRRLLDRLLRNDEPMTEDVISGLVHTSLAGKSKELETALDGLLSELQKELLIKVLDHIDDMSRRIADLDDFCRKQMKKYEDALDKLDEIPGIARRTAETILIETGLDMSRFPTAKHFARWAGLAPGNNESAGKRSSGRTTKGNPTLKSTLIQSAKVAARKKDSFFKARYQKIAARRGANRASVAVAHSMLIAIYHILKSGERFKDLGEDYYNQFNKEKKKKYYLKKLTKLGVNLKEATLSISIQAAT

SEQ ID NO: 65836 - protein, 341 aa, unidentified
MNITHVGIDLAKHVFSVHGVDQRGRCRLRRDLRRTQLLKFFANLNPCVLGLEACASAHYWARELGKLGHEVRLINPRFVTPYRKSDKNDHNDAEAICEALSRPSMRFVPVKSPEQQAVLSLHRARALLSSQRTALMNQMRGLLAEYGLIVAQGPSALRTRVPEILEDADNELPDIARETFAELYERWLDHERRLTDYDRRLQRMAHQDPATQRLLQLPGVGVITATALVASAGDLGVFRNGRQCAAWLGLVPRHYASAGKRRTGRITKRGDAYVRTLLVHGARAALRTAHRREDALGHWALAVKERRGPNKAAVALAAKHARIIWALLTREVDYQPRLVSA

SEQ ID NO: 65837 - protein, 366 aa, unidentified
MAVEAVYQRCVGIDVGKAEVKVCVRVQGRGSRPTKCTVTTWRTTTPQLIKLRDRLVAEKVELVVMESTSDYWRPVFYVLAEQLEVMLVKASDVKAIPGRKSDVSDAEWLADLAAHQLVRASFVPPEQQRQLRDLCRARARLLDDRTREVQRLEKNLEDACIKLSTVATDLQGVSARQMLDALIQGRSDPAAMAELAKGRMRAKIDQLTEALTGRVNEHHRFMISFRLRRIDAATDDLALLDARIDELIQQAPGFSAARDLLLTVPGLGLRGAEDLLAEIGADMRVFSCPQHLASWVGVCPGSHESAGKRKNVAARRGDRYAKRALGMAAKNAVKRKNTFLNRPGFVGGCVVYATSRSGVAVLACRW

SEQ ID NO: 65838 - protein, 331 aa, unidentified
MKEKEIIAGIDVSKATLDICLLIEQKTEHYQIKNQQKSIRAFFKKIRKAHTSARLIVCMENTGYYNWPCYEVFDELKLILYVVNPLHLKKSLGLTRGKNDTIDALRIARFITLHKTELKPAIIPRREIRVMQALLAQRNRLIETRKKISVPASELALIADKELSKNILKSSQKMAEQINLQILNIEKLLNQLIDNDTELKQQYQYITSVQGVGKVLAWTILIKTNEFKSIKDPRKLACYAGVVPFDYQSGSSIYKKPRVSVMADKTLKKLLHLAAMRVIQIKGELQNYYLRKVDEGKNKMAVINAVRNKIIARICAVINNKRMYNNYLLLS

SEQ ID NO: 65839 - protein, 416 aa, unidentified
MSLALPPAEFFVGVDWAAEVHAVCVINIEGKVLSQFTVAHSADGIALLLRRLAKFGEPIDIPIGIERRDGRLVDLLLEAGHPVVPVSPNAIKTWREGEVLSGAKSDAADAAVIAEYLRLRRHRLTAAAPYSAETKAVRTVVRTRDDLVQMRVAAVNQLAALLDAYWPGATAIFADLESKIALEFLSRYPTPTAAAHLGEKRIAGFCAARGYSGKRSAAELLTRLRAAPAGTTEPHLTVALHDAVLALVGVVKAVNTAIKDLDKSVAARLGEHPDGKIFTSLPRSGQINAAQMLAEWGDCRQAYEAPDSIAALAGCTPVTKASGKHKAVHFRWACNKRFRVAITTFADNSRHASPWAAKIYNDARTAGKDHPHAVRILARAWIRVIWRSWHNNTPYDPTRHGAAQPLSAHSSANLAA

SEQ ID NO: 65840 - protein, 475 aa, unidentified
MNIKGTKKKNQVVTVNIFEQQELLKKAEVIREKLTASTWRELETNGKFGKNEKRSFISDDMLILGCDIGSDTHYVRAIDTRGRELSKSAFPFSNTLEGFQSLMDWATKIAASNDKKQIILGLEPTGHYWFCLAAWLIGNGISVVQVNPYAVKQTKEIEDNSQLKDDRKDPKLIANLEKDGNFGMPYLPEKLYADIRRLSMLRDQINEDRIRDLNRLHREMKIYFPEYKDAFGKIDGAFCLEVLKVAPFPEELVTLGVEGIRQIWHEAKLRGRGYVNATSIFENAKKSIGIQDGAESGKLAVKWFVHRMMESNEQLAEIESRLHQMCMEIPYAENILEISGIGENTLSGILAEMGDISRFDDVKEIQKLSGLGLVACSSGKHKGETKISHRGRKRLRYWLFQAAKSAVAHADEFKELHAYYTTRKENPLKKKQSLIVIACKILRVIFAILTKGTTYDPKKMLGDIVRPNEQSVQVA

SEQ ID NO: 65841 - protein, 350 aa, unidentified
MVTLGGDSHKQTHTVVAVDDNGRQLAEKTLPATCAGHLEALQWAARWSERKWALEDCRHVSRRFEAELLAAGELVVRVPSKLTGGARKVARTSGKSDPIDALAVARAALREPDLPVAKLEGAGREVRLLLDHREDLVGERTRIQNRLRWHLHELEPETAIPARRLSRYHILAEIEQRLERHQGVVAQIARELVVRIRELTRCINQLEAEIGHRVGALAPTLIQLTGCGALCAAKVIGEAAGISRFRSRAAFAMNNGTAPVQASSGNQQRHRLNRGGNRQLNVAMHRIAITQLSRPGPAKEYLAKRLAAGNTKTEAIRALKRRISDEVYRRLLRDERESSTSDVTTCVAAA

SEQ ID NO: 65842 - protein, 402 aa, unidentified
MNCVGIDISKGKSMIAVMRPFGEVVVSPFEVRHTANELSELAGLLKNLDGETRVVMESTGNYHAPVAWLLHGAGFYVSVVNAMLVHDYGNNSLRRGKTDKKDAVKLANYGLDHWLTLPRYAPEEDTRLMLKTCYRQYQQYSKVQTMLKNNLISLLDTAFPDANRLFTSPPRADGSEKWVDFVATFWHCECVCGLSKKAFTAKYQKWCRKHGYNFSQDKALDIYASACGRFGVMPKTNTAKLLVEQAISQLQTTSAALAALKQEMQSLAASLPEYPVVMEMFGVGPTLGPQLIAEIGDVRRFHSKKALVAFAGIDAPPYQSGQIDVRSRSISKRGSASLRRTLFLVMGVLLQCAPMDEPVYQFMNKKRSEGKPYRVYMMASANKFLRIYYASVKAYLDSLEHD

SEQ ID NO: 65843 - protein, 319 aa, unidentified
MGEGKASFVGIDVAKATLEVALRPTGECWQVTNNGQGITELCRRLLEVRPDLVVLEATGGLERLAVAELAHAGLPVVVVNPRQAHDFARATGRLAKTDRLDAHALAHFADAVRPAPRLLPDATTQELAALVTRRRQLMDMRVAESLRRSTAPAAALPRLKEHIAYLQACIDELDKMLQQQIEASPMWRAKDQLLQSAKGIGPVLSATLLGLVPELGRIDRKEIAALIGVAPFNRDSGAFQGKRSCWGGRGDVRAVLCMATLAAIRSNPPISALYARLIAAGKLHKVAITACMRKLLVVANALITSQTPWTPDFAQQHSC

SEQ ID NO: 65844 - protein, 412 aa, unidentified
MLHPKMEYVYVGIDSHKDTHCAVALNCFFEKLGEITFPNAPSEFEDFFQAAQKFKLKGTKLAFGLEDVSAYGRSLTVFLTGKKQLVKHVNASLVASERKSRNILHKTDSEDAECAARVLLNRFDQLPDADPQDKYWVLSNLVTRRRSIIKMNTALKNHLHAFLTSHYPSYHKFFVNIDCNSSLIFFEKYPSPSKLEGVTVQELAELLEEHSNRRLKLEKAGQILECVRKDGDTRVQYQEARDLSVKSTINQINNNLKEIESIDTILEDFLEHFEYKLQSMRGIDTVMAASLIAEIGDISRFPTPAKLARYSGVAPVTYSSGKTDVQYSNERGNRVLNSIFFRLAVIVTMTAGRYKKIVNPFFYNYYHKKISEGKTKRQALKCVQRRLVNIIWSMMTNRTEYINPPTEDFKST

SEQ ID NO: 65845 - protein, 354 aa, unidentified
MSQQLNTKIAVIGIDIGKNSFHIVGLDKPGAIALRQKWSRGQVEAHLANMPPCLIGMEACVGAHHLSRKLKALGHDARLMPAKYVRPYSKGQNNDFRDAEAIAEAVQRPTMKFVATKTTDQLDLQALHRVRERLVSQRTGIINQIRAFLLERGIAARQGQRFLRAGLPTILTTPPDVLSPRMVRIIEGLASDWRRLDERIEGLSSEIKAIACQDSSCERLMSVPGIGPIISSAMVAAIGTGDTFSKGRDYAAWLGLVPKQMSTGDRTILGKISKRGNRYLRVLFVQAAWVVLIKPKSWQRHGLKPWIEAAKKRLHRNVLAIALANKLARIAWSVLAHGRGFEASTINDTATQPA

SEQ ID NO: 65846 - protein, 402 aa, unidentified
MNAVGIDVSKGKSMVAIMRPFGEIVSTPFEIKHTSSDINSLVKLIKSIEGESRIVMEHTGRYYEVLAHQLSEANLFVSAINPKLIKDFDNDSLRKVKTDKADSVKIARYALDKWQNLKQYSVMDELRNQLKTMNRQFGFYMKHKTAMKNNLIGILDQTYPGVNTYFDSPARSDGSQKWVDFASTYWHVDCVRKMSINAFIDHYENWCKRKKYNFSKSKAEEIYGKAKELVPVLPKDDITKLIIKQAVDQLNSASITVESLRTLMNETASKLPEYPVVMAMKGVGTSLGPQLMAEIGDVSRFTHKGAITAFAGVDPGVNESGSYEQKSVPTSKRGSSDLRKTIFQVMDVLIKTHPQDDPVYQFLDKKRAQKKPYYVYMTAGANKFLRIYYGRVKEYLSSLPES

SEQ ID NO: 65847 - protein, 351 aa, unidentified
MRHFYTRQHRFYCGIDLHARLLAICIVDHETASVVCRTQIPADQQQLLDTLAPYRADVVVAVECLFAWYWVADLCAKEGIPFVLGHALYMKAIHGGKAKNDDIDAEKIARLLRGGNIPVAYVYPKGLRETRDLLRRRMHLVHQRAGLITHVQILNAQNNLPDFKKKLIYAKNRAELKVAERFLNPHVRKSVEVDLALVDALDVQIAELELYLERTAKIEDPTTFHLLKTIGGVGKILGLTLLYEIHDIRRFAEVGEFLSYARLIRCTHESSGKKLGIGGAKIGNAHLKWAFSEAVCLLVRNYPAVKAWQAKRQKRHGKKKTLGILAARLGRAVYHMLRKREAFDARRFLGQ

SEQ ID NO: 65848 - protein, 408 aa, unidentified
MLFVGDDWAEDHHDVEVQDEHGRAVRTARLPEGVDGMARFHDLIAGFLPDRADPSQVLVCIEVDRGPWIRALIAAGYQVYGVNPKQSARHRELMSLSGAKSDKADAHTLADMVRTRRHQLRQVAADSDLAEAVKVVARAHQTLIWERTRHTLRLRAALRDYFPAALAAYQVLTLTGADALELLAKAPTPAAAAKLTLAQISAALRKAHRRDIPAKAAAIQQTLRGEHLGQADIVAGAYAATVGSAVAVLQVLNAEIRTLEGQVEAHFGRHPDAEVYLSQPGIGAVLGARVLAEFGDAAGRYANAKSRKNYAGTAPITRQSGKTKTVHARFIHNDRLVDALHMQAGAAILHDPRVRTYYDQLRSRDIGHNAALRQVGNRLVGILHGCLKTTNHYDQTIAWAHRTPPLAA

SEQ ID NO: 65849 - protein, 341 aa, unidentified
MDTIYYTGLDIHKKTIAYCVKRIDGVLVQQGTVATERKALQKWQSELPGPWYGAMEATIFTGWVYDFLKPYAVELKVAHPAMLKAITAAKKKNDRADAEKIADLLRVNLLPECHMMPEDLRELRRVLRYRNMIVRTAVKMKNKMSGLLMEVGAQYNKKRLHGRKYFSELLERVEDVPSSVKELLRLSRGGFELFNATQKKLISALRKNKLIKERVQRLMGIPGIGEVSALTWVLEIGEPSRFSSSRHAISYCGLCSAQHESAGKEQRGPISKQRNKHLQTTLIEAAKLAPHWNEQLALLHEKELARGNKNRATLSVARKLVEYMLAVDRRETNFESMKTAA

SEQ ID NO: 65850 - protein, 356 aa, unidentified
MSAKTSDVDDLMVLYPCCAGLDVHKKTVVACIITTGERGKVSRQVRTFATTTVHLLELSDWLAEHEVSHVAMESTGVYWRPIFNILEATCEVILVNAQHMKAIPGRKTDILDSQWIATLLRHGLLKASFIPPRPIRDLRDLVRYRKSLVYARNQEVNRRPLLLETANIKLGSVASDILGKSGRDMLASLRQGVTDHSLLAELARGKLRGKLPDLREALEGRVQAHHRLLLGHLLDHIEFLEQRVQTLEGELEPYLNPYQAEIALLVSIPGVAETTAATILGEIGAEMSAFPSAKHLASWAGVAPGNRQSGGKRLKAHTTKGNARLRAALAEVVWAISHTKDNYLRFVLISDKKREL

SEQ ID NO: 65851 - protein, 377 aa, unidentified
MRPTAAVGPGCDGVDASPTALVCQSGGVVTTEQEASVSEVSTIGLDLAKYVFQAHGADASGKVVFRKRLRREKVLEFFAGKPACVVAMEACSSAHHWARELARLGHIVRLIPPAYVKPFVKRQKNDAADAEAICEAAQRPTMRFVAVKSETAQANAVVFRARDLLVRQRTQAINALRGHLGEYGLVVAKGPGHVIKLVEHVEDPDSNVPDAARLVLRTLVEALRFLRERIDLLDREIARRARENNEVRRLMSIPGVGPITATALAALAPPADAFRKGRDFAAWVGLTPSQHSTGGKQKLGTTSKMGERTLRRLLIIGASSVVRKALRQGTAAGSWLGRMLARKPRMLVIVALANKMARIAWAVQAKGEVYRAPVVAA

SEQ ID NO: 65852 - protein, 403 aa, unidentified
MNAVGIDISKGKSMIAVMRPFGEVVASPFEISHTERELKELTRFLKSLSGETKVIMEYTGKYYQPIARHLHAAGIFVSVVNAILLHNYGTNSLRRVKTDRKDAIKIANYGIDYWVDLTEYTPEEDIRQMLKTLNRQYNQYVKVKVMFKNNLIALLDQTFPDANRLFNSPARKDGHEKWIDFAATFWHCKCASNTSENAFKERYAKWCKKHRYNYSLTKAKEIYDKSCNLVSTLPKNNTAKLLVTQAIAQLNTISETLAAIMTEMRRLTTRLPEYDVVMSMYGVGPTLGPQLMAEIGDVRRFYAKKALIAFAGLDSPPNQSGAFESKSRSMSKRGSATLRKTLFQVMSVILQNSPPDEPVFQFLDKKRAEGKHYGVYMMAAANKFLRIYYTRTKEHLRNIDEAA

SEQ ID NO: 65853 - protein, 422 aa, unidentified
MTYLTDNAFTAYVAIDWADAKHDICVQAAGGQQREFDCISHQVDQIEQWAQSLHKRFGGTIAIALELTKGPIVYALQKYDFFVVFPVNPSTLAKYRETFTPSGAKDDPTDAELILDLLVRHPERFAPLNPQSVEMRTLACLVEQRRNLVDDKTRITNRLRSTLKQYYPQILEWFKHVDTVMVCDFITRWPTLKQLKRARKNTLEKFFHEHNMRFAYILNARLESIKASKPLTLDAAVVTPYSLQALVLTDQLRVSLQAIRRYDDEIAELAPKHPDYDFFSALPGAGPSMAPRLLVAFGEQRDRFDSAAALQKYAGIAPVTERSGKKHWVHWRWQCSTFLRQTFVEWAAQTINKSFWAGAYYRQQRSKGCRHQAAIRALAFKWIRILYRCWQTRTLYNESVYLKVLERRGSPLLNLSTTVTMT

SEQ ID NO: 65854 - protein, 420 aa, unidentified
MPNIEIGVDFMVKENFIYVGIDLHKETHTAVMIDCYNQKLGEITFPNRPADFPKLVTKVKKCNTDAKEVVYGLENAYGYGRPLAVWLIDKGYFVKDVNTAISHRQAKHRGAMYRKSDSDDAEAIALATLNMLDKLPDACPNDAYWSLGQLVHRRDNIMKQRTRLVNQLHEQLCIAYPSYKQFFNDISRPTALYFWEHYPSRKYLKGKSVEDLRAELVPVSHNKCSTKTCEKILDAVASDKVKNNNFQDARDMVTLSIVSDIQHYDKQLVEVDKMLEQMYKMLGCTLTTIPGVNVITAVKILAEIGDIKRFSNANKLAQFAGIAPLHLSSSGRGKDVATKQGNRRLQATIYFLAIQMVQVSSKGTPRNSVVRAYYEKRKAEGKTSQQALICISRRLISIIYGMLKHGTEYRMPVVESAGEK

SEQ ID NO: 65855 - protein, 343 aa, unidentified
MQTVTTIGFDIAKSVFQVHGVDAAGQAVIRRQLKRRQVLTFFEKLPPCLVGIEACASSHHWSRQLQALGHTVRLMPPAYVKPYVKRQKNDMADAEAICEAVTRASMRFVPTKTPEQQSCLMLHRTRHLFIRQQTAVINSIRAHLAEFGIVAPVGRKGVTELLHIVADPSEKRVPEVARACLAALGDQLLSVKEKILQFDRMIMAWHLSNQTSKRLHYIPGVGPMLATALVASVADPRTFRSGRNFSAWIGLVPKQHSSGGKERLGSISKQGDRYLRSLFVAGALAVIRYAKIHGTEHRPWLTALLGRRPTKVAAIALANKIARMAWAMMAKGERYKNPVALAR

SEQ ID NO: 65856 - protein, 339 aa, unidentified
MTELKLIAMDTSKHVFSLHGVNERGAVVLRRELRRQQLDAFFRKLPPTEIVLEACGSSHHWGRTLAALGHRVRLIAPQYVKPFVKRGKNDRIDAEAISEAALRPNMRFVPVKSAEVQAEAMILSVRELLVKQHTQLVNALRGHASEFGVIAAKGTGHVEGLLERIAADPAVPAPAQAMFVELGERIAELRTRLAELDRKLAGLHKANPLSQQLAAVPGIGPIGALTLALTVDASQFKSGRHFAAWLGLTPRQNSTGGKTRLGGISRQGNERLRQLLVLGATSVVRLTKPDYRHANAWLLALLQRRPRKLAAVALANKMARVVWAMMTSGEAYRPQPAAG

SEQ ID NO: 65857 - protein, 405 aa, unidentified
MEILVDKGCGIDVHKETVVACGMGTGIKKEIRTYSTMTNDLFRLRAWLKENRVTHVAMESTGVYWKPVFNILEDSFEVIPVNARHVKNVPGRKTDVKDSEWLCKLLRSGLVRGSFIPPKDIRELRDLTRYKRKRIQAISSEKQRVQKILEDADIKLSSVASDVFGVSGARIIEELMKGELEPEEMAELSKGRLRRRKDDLKEALQGNMEEHHTFMMNASLGRIRAMEGILARLEERIQEKITRHFNEEYELLKTIPGVKENASVIIAEIGVNMDLFPTEAYLSSWAGMSPGNNESAGKKKSGSTTHGNKCLKSILTEFAWVASRTKNTYLSAKYHGLVGRRGKKRTMVAVGHRILISCYHILKYKVPYKELGGNYLDQRKKDRIAKSYIKRLTNLGYDVTLKEVA

SEQ ID NO: 65858 - protein, 413 aa, unidentified
MERIVERCAGLDVHKSSVTACVRSAEASEGLHQEIREFATTTRGLLLLRDWLASFDVRLVGMEATGVYWKPIYYMLEDDFELWLLNARHLKNVPGRKTDVKDAEWICQLVEHGLVRPSFVPPKEIRELRNLTRYRKAQIEERTREVQRLEKVLQDAGIKLSSVATRVLGASGRAMLDALVGGTTDPEVLAELARGRLRSKLPALRDALEGCFSSHHALMVGKILAHVDYLDESIDDLSVEIERVIAPFSEQVELLDTIPGVNRRTAETLIAEIGVDMSQFPTHRHLVSWAGMCPGNEESAGKRRSGKTRKGSKWLRSALTESARAAARSKGTYLAAHYARLRGRRGSKKAAVAVGHSILVICYHVLERGVPYEDLGEDYFDRRRSSEVYAKRLVRKLERLGHKVALEPLPQTA

SEQ ID NO: 65859 - protein, 369 aa, unidentified
MKEFSKYVGLDVHKETIAVAVADAGGEVRYVGEIAHTPEAITKLVRQLRKGAGPMSWCYEAGPCGYGVHRQLSAAGENCQVVAPSLIPKKAGDRVKTDRRDALSLARLHRAGELTAVWVPDQAQEALRDLTRCREDMKHLQRQSRQRLSAFLLRHGRGLSGKSKWTQAHLRWFETVRFEQPVQQIVFQEYVDTVLACSQRVRALDEQLERVARESVFWPIIEALMALRGVNLLTATTIIAEIGDLHRFTSAPQLMAYLGLVPSEHSSGSKQTRGAITKTGNGHVRRVLVEAAWTYRHPARKSAFLQRRAERTGEAVQDIAWKAQKRLCQRYRHLTNRGKQSVQVCTAVARELAGFIWAIGYAAPRVAAV

SEQ ID NO: 65860 - protein, 350 aa, unidentified
MKRLPKSERRIAMGYYIGIDLGQQSSFWVIQDLQGVICQRMKIVNDAAVIEKALKSYLTQSCKTVMEATTNYYWMYQTLRKLGCEVILAHPLKTRAIASAKIKNDRLDATILVNLLRADLIPQSYIPTEDIRALREMTRQHIRLVQIRTRIKNQCHALLVKLNLRPTEKFSDMYGKKGMAWLGEMRLPEPFEFQKHQLLDQIQYYNRLIQHADCRIKEMLKSYPQSHELFKIPGIGDLAAAMLIAEIGPMDRFPSPKQLIGYSGLAPGLYESGKTSHARGITHEGNKFLRWILCEVVQIHVRKPGPLRNFYLRLKDKKGHGKALVATARKFLIHIYYILKDSKVSPVFAG

SEQ ID NO: 65861 - protein, 432 aa, unidentified
MSNNRLQVGIDFGQATTHFCLLRPDGQPLELHQAFANSLTGYTAAKKLLLKTLAAQPLDGLDISGEATGFYWLPFFLQLATDPELEPYAPQLFLLNPRWVHWFKKCFPQDDKSDQKDPYYIAERLRTRRPAVAWTPQLATLPLRFYTRLRFHLIESLAREKNYLSAFLFLQASAYRQLRPFADVFAVTSRWAIGHLPSLDDLAALPVETLAAQLDELSRHRLPDPVSNAQRLQQVAAESSPLPAALAEPVQRILDLSLEHIAYLDGQIQQVDHGIATEVDARPAIAKLLTIPGVGPVFAAGLGAEIGEIQHFLQGTKWDTHRKAFRPKNLRDAEDAVAKTAGLWWPRTNSGEFEAEDRHLAKTGNRYLRYYFVQAADKMRQHIPDYTAFYARKYREVTKHQHKRAVVLTARKSVGLIVGLLHRNEAYRPPEA

SEQ ID NO: 65862 - protein, 412 aa, unidentified
MRRVIGMDIHRTFAEVVVWEEGRLRPLGRVDMTRAALEGFGKRLQASDEVVVEATGNAMAVVRVLSPFVARVIIANPLQVKAIAYAHVKTDKIDAGVLANLYAAGFLPEVWTPDADTEQLRRLVARRNQVVKHRTRIKNEVHAILHAHLIPRCPHVDLFNRRGREWLARQPLPCDETAAIERHVRELDRLGEDLVLLDREVAQAILGNPAVERLITITGVNVVVAAGLVAAIGDIRRFASPQKLVSYLGLNPRVRQSGLGLAQHGRISKVGRSHARAMLVEAAWAAAKAAGPLRAFFIRIRARRGHQVAAVAVARKRTVLCWHLLAKQSDYLWARPALVANKKRSLELQAGRPAKKGNQRGSAYAYNVKALRTQEMVIAEQAERAYERFVSQWRPRGPGRGVRERLKPARHE

SEQ ID NO: 65863 - protein, 338 aa, unidentified
MESFVGIDLHKYVSQLAVLRESKSPSQLRFANDVVTVERVLKKLPEGSKIAVEAMGSWWWLVELAQKSGHEVFLSHPKQTKAIASARLKSDKVDALMLAKLLKADLLPTVWIPPATQRHIRELLSHRGRLVRQRTAVINELRAVYAKRNIDPEAKLQRARPIVSGAEDLSGYGPRIVEEDLKLLEFINRQIGGLDKELIKIALEDAQAKRLMTIEGVGPVSAVAISCWIGEIGRFSNAKKLASYFGLAPRVRQSGDTERHGHITKEGNRMVRMLLIQAALVHTRRGKGPSRKHYLGVVKRRGKQIARVAVANKLIGAIFHMMKEGMDYSDFIKRSGAQ

SEQ ID NO: 65864 - protein, 326 aa, unidentified
MDTPATATAIARVLRVIGCDVGKAKIVVFDTLTGRTREVANEPEALEGFVRELDGTCLVVCEATGGYERNLLVAAAEAGIPAHRADARKVKAFIRSLGRIAKTDAIDAQGLARYGQERHQDLALWQPPADVLEELQTLVRLRRQLVGYRTALTNQLKAPGGNAAKPHLQDLIDTTAESIRKIETDLDTLVEQDLKIARRVEIISEIPGCGLLTAISIAALIPEIGTTTKRRIASLAGLAPHPYDSGEHHGYRRTRGGRPEIKQILFMAAMAARNHNPELKAFYTRLVKNGKKPLVAITALMRKLITIINARIRDAEKTPQPQPELS

SEQ ID NO: 65865 - protein, 338 aa, unidentified
MQVNTIGLDLSKQVFQVHGVDGAGVVVVRRRLRRSQVLGFFADLAPCVVGLEACGAAHHWGRELEKLGHAVRLMAPSYVKPYVKRGKKNDATDAEAICEAVGRPGMRFVKVKSADQQGALMLHRARALLVRQRTMLVNALRGHLAEFGIVAARGIWNVKGLMALVADDGEGRIPMVARPALRALADQIAALGERLREIDRAILAWHKDNEASRRLATIPGVGPITASAIAATVGDGRQFRSGRHFAAWLGLVPRQHSSGGKEKLGRISKMGDRYLRTLLVIGATNRLRYARTKTSADATWINRLLARRPPRLVTVALANKMARVAWAIMAKGDVYRAA

SEQ ID NO: 65866 - protein, 346 aa, unidentified
MLYAGLDLSRKRLDFHLLDREGATVEVGACPPDADGLRGLTERVDRHGAPIRAAIESMNGARFVHDQLELAGWQVEIADAQKVKGLAPLACKTDRIDAWVLAQLARRDLVPAIWLPDPQVRAERERARWRLHLVRHRSSLKQRVHAVLLTHGTPCPVSDLFGVRGRQLLARLGLPEPWQATIEASLRLIDDLDREIGDCERELRRLGADHRYVPLLCTVPGISWVLAYTIAAELGDINRFPTPRKLAGYTGLCPRVYQSGDRDLRGPLAKQGPRYLRWALVEAATHACTHPIYRERYQQTKARIGKQRGAKVAQIDLARRLSEAIWHMLSRNQAFAPKGATDPLAA

SEQ ID NO: 65867 - protein, 408 aa, unidentified
MKVLHARCAGLDVHKDLVVACARLQDSAGVQREHRRFETTTKGLLELLAWLVELRCTHVAMEATGVYWKPAWHVLEGHAELVLANAAHIRNVPGRKSDVNDATWIADLLAHGLIRASMVPPTPIQELRDLTRTRRQLVREIGQHTQRVQRVLEDANVKLSSVISDVLGMSGRRILEAIIAGENDPEKLAALGSERLRCSQEQLREALRGRVTAHHRFLLRQHLDTIDHLQRAVDQFDQKIARQLEPFRAQFELLMTIPAVRETAAAVLIAEVGVDMSRFPTAEHLVSWAGLCPRMDESAGKRRSTRLRKGASWLKPVLVQSAWGAARTKRTYTQAQFLRLRARRGPMKAVVAVAATILTAAYYILRDGVSYRELGPDHFVERDRTRIAQRLARQIRELGYEVTIREAA

SEQ ID NO: 65868 - protein, 320 aa, unidentified
MMAQNDLVVAGIDVAKDKVDVCIRSLSLRRTFASTAEGRRELASWLRRKKVGKAVMEASGGYEREWAKALRDAGIEVRIVDPKRVRDFARSAGRLAKNDAIDAEMIAWFAETFGEAPSQAHDAAREKLAQIVNARQGLLDLQTKLLNRGEHAGPEPVQKMHARLLKKIAAEVAKLEVVIAAMIKATPHFAELAEIIESVPGLARTTSAGLIARMPELGQVSNKVAPALLGAAPYDDDSGRRQGERHIKGGRRRVRNLFYMACLGAATRHNPVLKAFYDRLIAKGKKPKVALVACMRKLIVILNIMIARRQKWDPNLHVLS

SEQ ID NO: 65869 - protein, 419 aa, unidentified
MSFKILKNNCCGLDVHKTWIFACIGITDSNKRTVYKQARFSSFTKGMQELCHWLAKYDCTDVCMESTGKYWIPVFNILEKNNIWVTLSHPKYTKPQKGNKTDRKDAKWICDLYMCGMVKPSFIPPADIRELRDLVRYRFKLTCMITGEKNRAHNCLTVSNLKLDDVFSDIFGRSSRSITEQILQHPGETFDVAPFVHGRCKTPIEEIQAAVDGAVSKEQAVKLRQCLNHIDELEMHKSEIEREIFRLSDKYEDILTLIRTVPGFDKNPMTAIQVLSEIGGDMSVFPTAKNLVSWAGCCPHNDQSNHKIKSTRISRAGSYFKPVLVQVANALIKSKKHPEFSTRYRRIKARRGHKKAIIAICRMILTAIWHILTDLKPYTAKGFLEPRPVSKEKVLTASQALNLLKQRGYVIKDEPIFIS

SEQ ID NO: 65870 - protein, 325 aa, unidentified
MQGWDTKIAVQVWAAGIDVGKANLDIAIHRKPGETLRVRRDQAGFTQLIAWLRQHDVTRVGLEASGGYERDVMDALEDAGFMADLLNPLRVRRFAQAKGRLAKNDRVDADIIAAFTAQMLDAPPRRRDRALERLGEYLTVRRRILGWINDCDNAMEQARDPAMRKLLRAQRLGFEKLLAKQDAAIAGLIAGNADWDVLDRRLRTVPGVGPVLAAALIAWLPELGRLDRQQIAALVGLAPFDRDSGRYHGRREISGGREHVRHALYMPSLSAMRHNPVLAAFAKRLAGKPPKVIIVACMRRLLTFLNAMARDATDWRAPASVVKAG

SEQ ID NO: 65871 - protein, 342 aa, unidentified
MPQVAIIGVDLAKRVFQLHGAAADGSVLFRKKLTRERFLSFLASQPLCVVAMEACATAHGWGREIERVGHMVRLIPPIYVRPFVKRQKNDAADAEAIVEAASRPTMRFVAVKSEAQQARAMLFRTRDLLVRQRTQLINALRGHLAEHGVVAAHGPAHVKRLADAIANGDSCLPIAVRELGELLLEQIAALNEKTRDLDKRLRDAAGRDGATKRLQTMPGVGPVTAVAVETFAPPMEVFRRGRDFAAWLGLVPIQRSTGGKPRLGKTSKMGQRDIRRLLITGAMSVVQAAGRSAPSENSWLAHMLGRKPRMLVALALANKMARGIWAMLTKGENYRDPVTTGA

SEQ ID NO: 65872 - protein, 400 aa, unidentified
MRTVFGIDVSKASSEVAILVNGEKVYAYTMPNDIIGFSRLLDDLKTVSNPEIIFEATGVYSRRLQAFLEEYSYDYTRLNPLEAKKQLDGLRVRKTDKIDAEKLASSQFVLNRKPTYVQEEVYQNLHDLSRFYQNLTEDIVRTKNRLHKVLQVAFPEIENLLSTPTGEQYWNLVSIFPTKHWVLELSEVELKEAIRNSTSKRISENRVGNLTEKLVGLAKQSYAGISKTSPMVEEVKYDAQELIRLTNRREQVLQQLIALAEPLPEYKILLSIPGIAETTATSIIGELGDIRRFKSANQINAFIGIDLKHYESGDFLGQEHITKRGNPYARKILYKCIHNIASASHTNPCHIADFYEKRKRQSQITSTKPHTIASIHRLIRTMYYLIMHNKLYDYTLAQSH

SEQ ID NO: 65873 - protein, 374 aa, unidentified
MADYSEVFVGIDTSKLRNAVAIAEGGRNGEVRYLGEIENTEAATSKLVKKLAAQHRRLTFCYEAGPTGYGLHRLIKTLGHECVVVAPSLIPKKPGDRVKTNRRDALNLAKLLRAGELTAVWVPDARHEAMRDLVRAREAAVDDLKSKRQQVLSLLLRLGRHFTGKRTWTRAHMNWLVSQKLAHREQRIAFEELLLAVRQADERVIRLERAIAAAVPDWSLAAVVSALMALRGLDLISATIFLAEIGDLSRFASPRQLMAYLGLVPGEQSTGDRVWRGGITKAGNHRARRILVECSWSYRHPPRVGKKKLAKVEAAPPAVQEIAWKAQARLTARYRALARRGKRPTLIVTAIARELSGFIWAVSHAVAAPATPAR

SEQ ID NO: 65874 - protein, 451 aa, unidentified
MKKEIEKKVLIKLGKGLPVFNFHAAGIDIGDTLHYTAINDENGGHEVKVTSAFTCDLEEIVSYLLQHKITTAAMESTGIYWLSLYLMLEEAGIDVYLVNAKSVKNVSGRKKDDTDAIWIQKLHTCGLLQKSFQPDNEIRLLRTYTRQRKNIILLAADSVRRMQKALELMNIKIHTVISDILGKSGMKIVKAILHGERNPDFLATLCDPRIKASKEEIIKSLQGIWKEEYLFMLEQALENYEFHQGQIKKCDEKIEQQLIKQVAIVNDGDITGLKELVTKKTKGIKNQFSFQVAPFLKQITGTDLCKIPGISDVTALEFIAEIGTDMTKWKSAKHFAAWLNLTPNTKITGGKIISSKMEKKKNKAGQYLRQACSCLSTNKTAIGDYYRRKKSNLGGKGAVVATAHKLARIIYTLLLNKIDYSPEILANNDLKYKENKIKYLEKQLEKLRKAA

SEQ ID NO: 65875 - protein, 405 aa, unidentified
MPMNMQYERAFGLDLSKKTFHGCILDGPDLGSRHFFTGEMGQQGKAKLAGRLCKGDLVLMEAGTASFSLARFLLENTEAEVVVLNPAKLYNIFNSSLKNDKVDSEKIARIARTMPRDEWPTVSIPTKEEQAERSAVSLEVFLAREITMLVNRLYALFNSMGHPFIKKSDLKTEESRLTLANRLLCEDSLAIEQAIMLSDQIGNVTEQLEQCKQRLRDICLSHPKEALSLLSIPGIGLMTAASQIAFLGDGSRFDSPDSYVNYVGLSERRFDSGNKISKGHISHMGNTCIRRNIIQAAWVATKTSKGNPLARKYDDLRLRGKSKPVAAVAVAKKMIQLSYILVKSNGIYEFTKQQGLAAFRRRLQYHKLAQLLDFLPEITKRQMEEIDRTKRKEAAATTSRPKKFA

SEQ ID NO: 65876 - protein, 387 aa, unidentified
MNDVNVAAASAAIRTDLCAIFVSLELSRSKWLVTSLAPGAGEKMSKHAVTASNLAELFERFSQLKVKTRARTGREFPIITIQEAGLDGFWIHRVLEREGIESHVVDAASILASRRRRRAKTDKIDGETLVRTLMAHLRGDPRVCSMVRAPTPEDEDRRRICRERKTLVAERIQHVNRIKGLLFAQGIADYAPLRRDRRQRLQELETGDGRALPVHLKAQISRELDRLDLVLAQLAAIEAQRDALIEAQASEPPVPASMLSRLRGIGPEFASVLWCEGLYRDFQNRRQLASYAGLAPTPWKSGSIDHEQGVSKAGNPRLRTALIQLAWLWLRHQPKSALSMWFFERIAQNGGRRRTAMIVALARKLLVALWRYAVAGVVIEGAVMKAA

SEQ ID NO: 65877 - protein, 309 aa, unidentified
MKQSVVYIGIDVAKTHLDVAWAGTFRRLPNERSGHAALVRWIKQSATPVQLICEASGGYEQALLESLEKSEVKVTLVQAVRVRQYARAAGILAKTDRIDAKVLAAFGSAMQPQPTSPLSAEQKRLRQYEAQRRQLSRILVAEENRLAQLSCTELRTLSRSLISKIKTQIKTLDRGISDLIAQDQTLCVKAQKLTAISGVGVRTAALLLAQMPELGQLNRRQAAALAGLAPFNHDSGSVRGKRAIFGGRPALRSGLYMAALSAARFNPILSSFYQRLRAKGKPHKLALTAVMRKLLLALNQTLKPLPCST

SEQ ID NO: 65878 - protein, 313 aa, unidentified
MDKQFVGIDVSRGNLSVALHPTGQSTEFPNTDGGRADLITHLRGQEVALVVVEASGGIERVLARSLAHASIPVAVVNPRQVRDYAKALGRLAKTDAIDAQVLARFAEAVRPEPRPLADDKTQELADLVTRREQLVNMLTAEKNRLRSARPDIQPSIVEHIAWLNGQRDQLDRKIRALSKADPKWREHERILRSVPGVGPVLSATVLGCLPELGQLDRREIAALVGVAPFNRDSGRMRGKRRVWGGRGQVRKVLYMATVAAVRSNPVIRAFYDRLVDAGKAKKVALVACMRKLLVILNAMLRQGTPWSPSIASP

SEQ ID NO: 65879 - protein, 354 aa, unidentified
MNEITTVGVDLAKEVIVVCAADVHGRPIYFKQVSFSGFAEWAVNLPPCVIGIEACSSAHHWGRYLAGRGHTPRLMAAELVAPFRMSRGAKNDRNDAQAILCAVLQPDMRFVAVKSIDQQALPAWHCARAGYLEERKRLLNRTRGMLAEFGVWLARSTTTVARRLPALALEDQLPTLFRPILTHALDQLRQIDERIAECDVRIRSHVKENEAARRLQAIVGLGPLTASALIATLANPRDFRNGRQMSAWAGLVPRQHSSGGKTRLGTITKRGDAYLRGLLTQGARSTLQAALKREPLRRSRLEQWIVALHGRIGYHKTLVAIAIKHVRIVWAILAHGESYDANVWRRDQHVAQIA

SEQ ID NO: 65880 - protein, 407 aa, unidentified
MTAVMIGVDPHKATHTAVVIGPGEEPLGELRVRASAGQAGKLVAWAADWPERTWAVEGAAGLGRLLAQQLVAAGERVLDVQPKLASRVRLLQAGDTNKNDPNDALSVAVAALRSKTARPVMAEDYPAVLKVWSKRHRDLARLRNQVACRLHAVLCDLVPGGHSKEISAAQAARILGQVTPSGAVDRARAELAAEFLEDMRRLDAQLRDTRKKLAAAVRVSGTTLTGLFGVGPVIAGTVIGDIADVYRFPGRGHFAAYNGTAPVEVSSGNRKIHRLSLRGNRRINHAIHMAAITQIRHRHSDGRAYYDKKVAEGKTHKGALRSLKRRISDAIYACLLADARRAGQRSAGTAREGNQGTTLTPARPARTPNAGSSDKPLPDLGTTIRPGTRAATPSPSKPTSKKTLTTT

SEQ ID NO: 65881 - protein, 412 aa, unidentified
MQVMYARCAGLDVHKKMVVGCVMVSGNGGNVEQEIRTFATYTSDLLALSDWLKSHGVTHVAMESTGVYWKPAYNLLEGLFELLVVNARHVKAVPGRKTDVKDAEWLADLLRHGLLRGSYIPARPQRQLRELTRHRANVVQRRAQAVNELQKCLESTNIKLASVATDITGVSATEMLSLLLAGQTQPEALAELARGRLKEKRPLLQKALQGRVEAHHRLILSQLLAEIAWCEEQVSEVGMEIAKRLKEHEELLKRLDEIPGVNQRIAQVAAAEVGTDVKAFPSDKHLSSWAGLCPGNNESAGKRHSSRICPGNRHLKVALMEAANAASRKKGSYLRAKYHRLSGRRGRKRALVGVARTILQSMYYIIQRGTHYQDLGENYYDQRNPEKLANRLAKRIEKLGFKVTVQTVPPAP

SEQ ID NO: 65882 - protein, 411 aa, unidentified
MTNTLNEILVPIDVSKYFHKATIVGPRGEILEDPFEIDIYQEGLQKLLDKVKASRNGSKSKVIFAMEPTSYYHQSLMEQLGKLGHEIQLINPNITARVRKLDYDHVKTDDIDLKVLTKAVELRKGRVVEPKEKNIERLRLLTRQRVRRGKFIKRLKTQIHYHLDALWPGFVNRYERQKGLVRNIWECKMAWAVMQICPNPKKISKMMPKDLIAMFRRHKVSGIGPFRAKKIISHAQTAVHRSCYFPEIRNNLRQDLQLLHHLNTIVSDLENKAVRAMPPQAALINSIKGVSPFFAAAFVAEIEDIAKFATPKQLIKYTGLSISVKKSGMYESRNNHFNKVGNRHLRFITMMMARSVARCHPDFMLYFEKFKRRGMKNRSAIGCVATKLLKTIHNMLIRGEEFNSIRFNKKR

SEQ ID NO: 65883 - protein, 452 aa, unidentified
MEEKEIAMEVVNPQAAGVDIGSRLHWAAIGQKDEDVQEFGVFNEDLKRMALWFKEKNIKTVAMESTGTYWQSLYAVLLSEGFEVILCNGKFTKNIKGKKTDIKDCQWIQKLHSLGLLSGSFLPDKQTEKLRTYCRQRALLLDSSASASKKMQKYLRLLNLRLDVVVNDICGQTGLAIIKAICEGEKDAQKLASLRHYNCRKSEAEIAKALESNGREDYLFALRQELEMYEMFQSKIEQCDQEIGKLLEQIVDSDDHKRQHHIESKPYKKVNKNTPKNIDLNLRAYQYFEGVDLMAIEGMSYSTVLAIMSEVGLEGIKRFKSAKHFASWLRLAPNNKISGGKILSSKVPKGSNRLKIALRNAANAIGNLKESTPLRDFFQRINFRKGRVSAISATARKLAVIIYNMVVQNKPYHNPKEYLFLDQKRKLGLVKRIQKQITKFELSQHNFNFVTT

SEQ ID NO: 65884 - protein, 354 aa, unidentified
MARHIKKIVTGQRLFVGIDLHNHRWHITIISLDAEFFNGSIPGTWESLRNLLNRYRDNHIQAVYEAGYFGYWLHDCLSDYGIECIVTPPSLVPMEYGNRVKTDKRDSRKLAHLLAKELLKRVWVPNEEERYHRQVGRRRRQLVRDRNRTQNRIKAELRFYGIDIGKQRSCWTQIYFENLQRIRFKNRWMQESFNRLLEQYEFLSGQIKKQTSLLKELAKSSLYQERVKILTSIPGVGILGAMELLLELQDVSRFRRADQLAAYVGLTPSQYSSADKIRMGRITGAGKKSVRCALVESSWWLIKKDKIMREKFERIKARSGAKRAIVAIARTLLLRARRLLLDGNHYILNFGTLS

SEQ ID NO: 65885 - protein, 345 aa, unidentified
MELHTIGIDLGKTVFHLVGLNLRGEVVVRKKFSRTQLLRFTANVHVGLIGMEACGGAHFLGRALREQRHEVRLIPAQYVKPYVKTNKTDYIDAEAIAEAVARPTMRFVPIKTDDQLDLQSLHRVRERWVMRRTAVINQIRSLLLERGITLRKGRRYVDAALPLILEDADAKLSGAARMLLAQLKLDLDQLAARIDKADAVIGKTAHENEACRRLVAIPGVGPVTATALIATIGNGGAFQRGREFAAWLGIVPREHSTGGQQKLLGISKRGNSYLRRLFVQGARAVMQQRSKQSFGLSAWLAQLTARTHRNVAAVALANKLARIAWAVLAKNEQYRPQVLADVAAA

SEQ ID NO: 65886 - protein, 326 aa, unidentified
MVSALGIDVARDKLDVVLVNEAQQEHSGLFANGPKGFEQLQHWLDKRVKGDLHACLEATGQYGDAVAVFLYSAGCTVSVVNPARIKAFAASRLSRQKTDQTDARLIAVFCQSQRPEAWTPPPPEQRALQAMVRHLRDVKAIRQQEYNRLASGVSTEAVIHALQQHIAFLDQQILELERQIHDHLEHFPLLKQQRDLLDTIPGLGETTIAILLAEVPAIRAFDSASQFAAYAGVTPRHFRSGTSVRGRTRISKCGNATLRAALYFPAMVALRHNPLICAFGQRLRTNGLAPKAIVVAAIRKLLHLVYGVLKSGRPFDPNYLSQASTA

SEQ ID NO: 65887 - protein, 341 aa, unidentified
MMIIGCDFHPRFQQIAFLDQATGEYGEQRLSHPQEADQFYRSLTGRQVRIGAEATGNFRWFRQLMQELGHEFLLGDASAIRAACPRRQKTDKRDARHILTLLVEDRFPVVWQPPVENDELRQLLLHRCRMVRMRTRVKNQLDSMAKNEGLLSSRVWSAKRRSAIEALPLPDWYAWRRSDLLGLLEELNKRIKPLDEAVCKAAEGNAEACLLMTHLGVGPIVSLAYVLTIGDWRRFSRGKQVGSYLGLIPAEESSGNKRRLGQISKQGNTLLRWLLVEAAVHAQRHDASWHRQYVRLSMTKHHGVAKVAIAHKLAVRLYWMLRSGEDYSKVMERGSHAGQSV

SEQ ID NO: 65888 - protein, 344 aa, unidentified
MPYNFYLGIDVSKASLSVVLMNSDSKVLWSSKKIANQPSGFKQMVEHASKIASKHADGDDYSIAAGMESTGVYGEQLSYYLADNNMSGRISLYVLNPFAVKSYRKATMQLNKNDAADARLIASYLISMITTGQITPWQAPSLAERLLRELTRRRAELVTLREAEYNRLEKFRAGGSHPHPVIESVQELIAHLEQQIREIDEAIEKHIDDAGLRDTAELLRSIDGIGKVSSASFIGEAGDISRYRSVKQLVSRLGIAPCENQSGTSVHKKPVMSRVGSAVLRHAMYMAALVATRKNKVISAFYNRLLARGKCKKLAVIASMRKLLHIIWGVLTHRVKFDPEYAPA

SEQ ID NO: 65889 - protein, 447 aa, unidentified
MTDERDGFPVLRRDVAGIDVGSEEHWVCAPSRTGDGRDVERFPATTPGLERLIAWLQDRRVRAVALERTGVYWIVPHEMLEQAEFEVRLVDTRELRRVPGRPKSDRRDCEWLQRLFSCGLLRGAFRPPETVCLLRTLVRDRATLIAERADWLRRMQKALDQMNVRVHRAVADLDGVTGMAIVRAIVGGERDPHRLAALRDYRCQKTEAAIAEQLTGHWRADHLFSLQQGLKMYDAITDRLADYEREILQQLAAMAQTDDTPPPPTNVNKARMIQKRGEEPLRQALYRISGVDLTTIDALGVETVNVILSEYGPDLSRFPTEKQFIAHLRLAPHQAISGGKPVRTPKKPQRRSARVTMALRMAATSLRRSRSALGAYYRRIAQRLGADVAMFATARKLAQWVYRVLRWGQPYVDEGAAVYEHRYRQARITRLAATAKDLGYALVSVEA

SEQ ID NO: 65890 - protein, 267 aa, unidentified
MNRIVVGVDIAKRVFQLHWVEPETGEIVALQLKRERFLEHFANRSSCLIGMEACGGSQHWARSLQKLGHEVKLLSARMVKPFVGGNKNDAADARGIWTAMQQPGIKAVAVKSEEQQAVLALHRMREQLVKFRTAQINGLRGLLMEYGEVMPQGRAGIKRDIPGAFGRLSDRLPAIVIETLREQYARLGELDEQISQIERRLRQWQREDSASQRIAAIPGVGLLSATAAIATMGDAKAFKSGREFAAWLGLVPGQTGTGGRVRLPRYQ

SEQ ID NO: 65891 - protein, 346 aa, unidentified
MEQYVGLDVSLKLTAICIVDRTGKIEREGVVASDPEAIAAFVKSHAPRVARIGLETGATSTWLWTELNKMGLPVICIDARHAKAALKMQINKSDRNDAVGIARIMQCGWYKEVRVKDLDSHAIKAVLISRALLVKIKRDLENQIRGLLKNLGLVIGRAKMNVFAVRAAELAEARPELAAAVEPLLKAREAVERQIADLDRKVMRLARNDVQVRRFMTAPGVGPITALCFLATIDDPTRFKKSRSVGAYVGLTTRRYASGEIDWTGRISKCGDAMLRSYLYEAANVLLTRVTKWSTLKAWGIRLAKRSGLRKAKVAVARKLAVILHRMWIEGTEFKWSSKEATSQAA

SEQ ID NO: 65892 - protein, 345 aa, unidentified
MKKNIIGIDFSKETFDATLLDCRNSELSEAVQSAVHEKFTNKKEGFQAFVKWIKSSVKKITPDELLLCGEKTGKYSLPLSNFLYAKGYSIWLDSGLRIKRSLGISRGKSDKADSLKIALYAYRYQDMAVCYVPLSKNVSRLKELFLYRQHLVSQVKAMAVRKNVTDDFKKELGDVKFIVDSAAKIIQQIKATIKKCEEKMQELIEEDDELKTTHDSITSIKGISLINATAFIAYTNNFKDFGGNAKKIATYWGVAAFAQESGTSVHKVARVSKIASKMLKSLLTQAARITVRWEPKFRQYFEQLISRGKHQGVALNNVKNKLIHVITALAVSKEKYNREYEYIKR

SEQ ID NO: 65893 - protein, 350 aa, unidentified
MVSALKEASVTEVTTIGLDLAKSVFQAHGADAAGSVVFRKKLRRDRMMPFFTAQPRCLVAMEACASAHYWARELERLGHEVRLIAPAYVKPFVKRQKNDASDAEAICEAAQRPTMRFVAVKSEAKQALAAVFRTRDLLVGQRTQLINALRGHLGEYGIIAPQGPSHVERLIAELESPNSAVPEAARTCLMLLVDTLRTLRERIDRLDVEISTRAKQDEGAQRLMSIPGVGPMIATAIQALAPPAGTFRSGRDFAAWVGLTPVQKSTGGKTRLGRTSRMGERTLRRLLIIGASGVVRWAKRKGVPPGSWLAGMLARKPPMLVIVALANKTARVVWALITKGEKYRAPIVAA

SEQ ID NO: 65894 - protein, 309 aa, unidentified
MQAVRTIGLDIAKSVFQIHGVDAAGNVVVRRRLKRRYVLSFFQKLPSCLIGIEACASSHHWSRELQALGHTVRLMPPAYVRPYVKRQKNDAADAEAICEAVTRANMRFVATKTPEQQSCLMLHRTRHLFIRQQTAVINAIRAHLAEFGIVASVGRHGIEQLLDVVADTSDKRLPEMARACVLALGAQLRTLKVQILNFDRQIMAWHRSNEASRRLDEIPGVGPALATALVASVADPKAFRSGRNFSAWIGLVPKQHSSGGKDKLGSISKQGRSLSARPVHGRRAGRHPLCQRSCPAEPRTRTSAISRNI

SEQ ID NO: 65895 - protein, 351 aa, unidentified
MSLKLNSEIVVIGIDIGKNSCHVVGQDKAGSIVLRQKWSRSQVGARLANLPPCLIGMEACVGAHHLSRSLRALGHDARLMPAKYVRPYSKGQKNDYRDAEAIAEAVQRPTMKFVATKSADQLDLQALHRVRERLVGQRTAIINQIRAFLLDRGIAVRQGLHFLRAELPSVLATRTDVLSPRMLHILEDLATDWRRLDERIEDLSGKIEGLARQDQACVRLMSVPGIGPIISSAIVAAIGTGDAFSKGRDFGAWLGLVPKQMSTGDRTILGPISRRGNRYLRVLFVQAAWVLLVRVKNWERYGLKAWLEAAKKRLHHNVLAIALANKLARIAWAVLNKGRAFECVKIDAAAS

SEQ ID NO: 65896 - protein, 373 aa, unidentified
MKKLGEAFIGIDAAKARNAVAVADEGRDGEIRYLGEFDASPEAMRRLVQRLAAKYERLHFCYEAGPTGYGLHRLIVSLGHGCVVVAPSLIPRKPGDRVKTNRRDATTLARLLRAGELTAVWVPDPVHEAMRNLVRARTAAVETVRVHKQQVNAFMLRHGRTAPVKKAWGARFRRWLQQQKFEHPADQIVLQEYVEAVRLAEERLGRIEAAIVEFLPGWSLAPVVEGLMALRGVDLVVAVNFVVEVGDIRRFETPRKLMGYIGLVPEERSTGESIRRGSITKMGNARLRQLLVESAWTYRHPPRVGKRKLGLMARVPPKVREIAWKAQSRLTARFRVFAARGKRLTVACTAIARELAGFMWAVAQEVQPQSNAA

SEQ ID NO: 65897 - protein, 433 aa, unidentified
MAYRIAGIDVHKRMLAVVVADVEVEGTYEFERLRFGSNPEQLRLLAEWLLERAVEEVVMESTAQYWNPVWGALERYWKPSCQKRQGAGPMSGTLHLAQALSNRGRRGRKKDFPDAERLVKRLVAQELILSFVPDAEQRLWRTVMRGKYQLTRHHTRIQNRLEALLEEAHIKLSSLVSDLLGISARRMLQALADGESDPATLAAMADKCLRATPAQLCDALGACTELNPVYRRLLKMALEELQFLEQQIGKLDQEMAGLLGQHQDAVRRLAVVPGLGPDSAQQIIAEVGSTAATFPTAKQLSSWVGVCSGDQESAGVNYSHRSPKGNRHMRRILNQAAHAAVKYKGSIFEIVYRRQVPRMGVITENSVHARPASSRGVAVSLRRLERYSGDGDRTWPPRSWCSGLAKTWMQTSRTFAFRTKRNVGGKARFLGSV

SEQ ID NO: 65898 - protein, 409 aa, unidentified
MEVVHARCAGLDVHKKSVYGCVICCEANGEKRQAKRSFGTVTADLLSLADWLREHEVTHVVMEATGVYWRPVWAILEGQFELMLVNPHHVKAIPGRKTDAKDCEWIAELLQHGLVRGSFVPPTEIQDLRDLTRYRVELTQAQNRVANRIQKLLEQANIKLSSVASNALGVSGQRMIEAIIAGEEDAERLANLAQKRLRQRIPELQLALEGRVRDPHRFLLQEFLDEWRALGARIRRIEEEIDRRIVPFEEAVTLWQSIPGMDRVTACNLVAELGVNMAQFPSAQHLASWAGLCPGNNESAGKRISGATRDGNKWLRRTLCQAAWAVTRKKDCYLSAQFRRLAARRGTKRAVMAVAHTMLIIAYTMLKTGRSYHELGGNYLEQINKDQLQRYFVKRLQKLGLTVTVAPAA

SEQ ID NO: 65899 - protein, 366 aa, unidentified
MKKISTVAKRGNEIFEGPKLTVGLDLGDRSSHYCILDEAGNVILEHRLPTTPKGIHQVFSRIPRSRIALETGTHSPWVSRQLTQLGHEVIVAHARNVRLIGESSRKDDQLDARTLARLARIDPGLLGPVRHRSAKAQIHLTVIRARAALVSTRTALVNAARGLTKSYGERLRKCGTGQVNREIAKGLSQELRDALDPLLGEIESLNERIAEYDRRIEQIAKEVYPQVALLQQVKGVGTLIALTYVLTLDDPHRFRRSRDAGCFLGLRPGRRNSGNSEPQLHISKEGDRYLRTLIVQGAHYILGPFGQDSDLRRWGLKLAERGGKNAKKRAVVAVARKLAVLLHKLWVGGEVYEPLRNNHKVVSAVA

SEQ ID NO: 65900 - protein, 382 aa, unidentified
MTTARTGHAAPFDYTSTLVVAVEISDRSWMLGAHVPGSARSSSRLVIEPAFEQLIAALAHLTRRAALRPARTVVVYEAGHTGFWLARLLRAQGMEAHVLHPASVPVDRRARRAKTDRLDVDLLLRAVLAWLRGEPGVCSMATIPDEADEDQRRAVRERQELLTERTRLTNRVGALLSILGVSGYDVRRSDRRARLAALERPEGVSIPPCAKAKLERLIARYELVVQQIEELEAARDQVLEREPRGEAEAMIQRLCTLKGIGAQSATVLVREGFVRQFRNGRALGSYAGLTGTPWASGGYAREQGISKAGNRHLRTVMVEIAWLWRRWQPESALARWLTARAGDATGRLRRVLITALARKLLIALWRFACHGIVPEGALLKAA

SEQ ID NO: 65901 - protein, 421 aa, unidentified
MHVLYQRCAAVDIGKDVIAVAVRLPGDGPEHRQTIKRTFKTFYGVLKHAAGWLTAQQVTHVAMEATGIYSMPVYHALIEHGQFEKVLVCNAGHVRNVPGRKTDLSDAEWLVHLLECGLLRGSFIPPAQIKAARDVIRYRTKLTESRTSELQRLGNVLQDAGIKVDSVASTITTRSVRAMVEALIDGERRPLLLAELAKGRMRAKIPDLQRALEGRFDDHHALMCRLHLDHLDHLDEMIARLDTQIEDMMQPFRSQRELLTSIPGIGPFAAAAVISEAGADIAETFPSAGHFASWIGVCPGNHESAGKRHSGKPRKGNQHLQHVLVECAWAASRTPGYLQSHYRWHVRKFGGSRNPTAKNKAIVAVAHKLAIIIWHVLATGKPYTDLGADYLDRRVDPAKETRRLIARLQALGHTVTIEPAA

SEQ ID NO: 65902 - protein, 375 aa, unidentified
MSANTMSRPVVHLALELSVTSWVIAYRLPWSDKVRLQRLSAGDGAALLALVSDLRQKVGARTDHDVTVGQLFEAGRDGFWLHRLLTDHGVVNHVVEPTSILVTRGARRAKTDRLDAQGLLRVLAAAFAGDREICRMVRTPSVAEEDDKRPHREREYLVQERVRIENRIAALLATQGVLKRPSLRTWAADLAALRTGDGRPLPPCLKAELDRLRRRLLMTLEMIREVEAAREQAVAAQDNPANQTVKALCKLRGLGDNFSAVLAKEVFYRTFDNRRQIAAYLGLAPTPFQSGGMDRDRRINRTGNSRARKTMVQLAWLWLRYQPESCLAQWFRGRVGELQGRTRRIAIIAMARKLLIALWRFITVGVVPEGAILAA

SEQ ID NO: 65903 - protein, 341 aa, unidentified
MSESALIGIDLGKHSFHLHGQDKSGREVFRKKLSRPQMMHFFGNLPSCVVVMEACAGAHFVARQLTAMGHTAKLISPQFVRPFVKGNKNDFVDAEAICEAASRPSMRFVTPKTEAQQTLSVLHRMRESLVHDRTKTANQMHGFLLEFGIGLPKGLAIMKRLASVLAEHELPVRLTVLLQRLHDHFVYLDEQIKALDKELAGQLDDDDLGSRLLSLPCVGPITASLLAVEMGDGQQYGCSRDFAASVGLVPRQYSTGGKANLLGISKRGDKHLRQLLVQCARVYMQRLEHQKGTLADWVRSLLSRRHSNVVACALANKLARIAWAIAAHHTQYEAGPDALNA

SEQ ID NO: 65904 - protein, 348 aa, unidentified
MAMLADTVELVIGVDTHKHTHTAAVVVAATGAVVEQVTVPATPAGYRQLLGLADRHDGRRVWAIEGTGGYGAGLTRFLHAHAEQVVELDRPKRAARRHGAKSDSLDATRAAREALGRDHLAQPRAAGQRAALQVRLTARRSAVQAATDAQRQLHALVVAAPDTLCSRLRGLTTPRLVATCRRLRLRADTDPETTATAASLRAVARRIQHLNTEIAEHTRAITALVRAWHPELLTPTGVGPIVAAVVLCAWSHPGRCRTDAAFAMLGGAAPIPVSSGQTVRVRLNRSGDRHLNQALHLVVLTRLRYDPATRAYAQRRRAQGKTNREIRRCLVRYVARQLYRLLEAQPAL

SEQ ID NO: 65905 - protein, 348 aa, unidentified
MVFGVDPHKQSHTAVAVDQLGRKQAHKMVKARREGHLQLLAWARQLAGGGRLWAVEDVRHVAGNLLRDLLAAGEQVVFVPPKLMAGERRGGRERGKSDPIDALAIARLALREGKGLPTACLDERTRPLRLLTDHRDALIKDRTAMVNRLRWHLHDLAPDLAPAARALSRPAARRRLAAALATLPPSPSRRIAAAQLARTQHLSAEIDALAAELAPLVAELAPALLAVPGVGVITAAKLLGETGTITRFRSPAAYARHNGTAPIPASSGTGTTGPHRLNQAGNRQLNAALHRIAITQARHHPPARALLARRKETTRDTTKASLRVLKRHLSDVIYHAMTADRERLSQAA

SEQ ID NO: 65906 - protein, 458 aa, unidentified
MRIIGIDLATTAQHRAIVVDGRSEFITPLLKFDTRLADLERLRARALKGAPPDEELVVVMEATDINWYPIAVYFCRHATRIHVVNPRMSADLARFYKRHAQSDRLSAKILARLPLVSPESLYPLVLSSADHLALQRACKELDRLMVRISAHKNRLQAIDRLGWPGLKVRVFKAPDSPLCRWFRDHFYDPRQVMAAGGAGLRQVWRAAASYDEDESWIEPLLELAQELLELYGDQGAYLDYAALAGEVHREQRRLAEVEADAHQVRLRLMRPRYRQLHASRHLETMPGVGQDGAAVYVGFVGTSSRFANGRSFRGWSGMVPRSRQSGESESKGMKISQAGPDLIKKYAYLDADSARHQDPQVAAIYYDQMVNKGQHHTQAVCACATHLLDRVRVILTEERAYELRDVDGTLVTPEQAKTIIAEHYTVPKEVRERNNRRARRERSEEKTERKEERRSRAR

SEQ ID NO: 65907 - protein, 412 aa, unidentified
MEVLYTCCCGIDVHAKMLVACLLKQGKKDVRTFSTMTADLLRLLDWLVVEGCTHVAIESTGVYWRPVFNILEGSLDVILTNARDAKGFKARKTDVIDAEWLADLLRHGLLKPSFIPPRPIRELRELTRYRESLVREQTALANRIQKLIESANIKLGQVASDALGVSGKLMLRALAAGETDAEKMSHLARRTLKRKQPQLQQALEGRLTQAQRWVLGQLLDQYDQIEAALTRAEERITQEVESSPDPFVPEAVKLRATIPGVGETVAQIIVAEVGVDMDRFPTDHHLASWAGMCPGNNESAGKRKSGQTTKGSRYLRAALVQAAWAASHQQGTYLAAQYKRLVKRRGKKKALVAVGHSILIIVYHVLQDRRSYQDLGGDYFDRRNVDKQRKRLIRQLESLGGKVTVEEIKKAA

SEQ ID NO: 65908 - protein, 343 aa, unidentified
MPHYVGLDVSQKTTAICVVDEQGRRLWRGVCATDPGAISARVSQHAGVDAKVGIETGSMTPWLVHGLRAAGLDVACLDARRVKAALQMQLNKTDENDAEGLAQIMRTGWYRAVHVKSLDAHRARALLGARAQLVGMTTRLSNMIRGVLKTFGLLPGAGRGLRFDRKVEALLESAPEIALVVRPLLATWRQLREQIAVFDKAVLQQVRADPICRLLMTVPGIGALSSLMYVSTVENPSRFSRSRAVGAHLGLTPRRYQSGETDRSGHISRCGDGLARTLMYEAAVVILHRVKRPLHLKDWAEAIERRSGSGKARVALARKLSVILHSVWRSGEPFRWAAPAMAA

SEQ ID NO: 65909 - protein, 412 aa, unidentified
MQDILTCAMGLDIHRDVIVACLAKGELGTEPEIEIRSFSTLIPEMRKLRDWVLETECRHVAMESTGIYWQPIYEMLEPCFDGEINILVVNARHMKNVPGRKTDMRDAQWIATLLRAGLLKGSFIPDKAFRELRHLTRYRKSIVHDITAQKNRIDKFLQSSGFRFTAFLSDAFGASGRNIIRHLMEYGSISWETLDKCLKTQTRKRIDEILIALNGSLSEHQRSFLRMVFGHLEALEQHRRTVEDAIVEEITKHEEALSLLCSIPGIDVTAAAAIIAEIGTDMSAFPDSQHICSWAGLSPGNHESAGKRKSVHINKGNPYLKSMLCEVGWVMSGKRALYLSGWYWRIKQRKGAKRATIALARKLLALIYTMLKTGTPYNEECFEIRRKQSERKRASRMVNELQKLGYLVVAPG

SEQ ID NO: 65910 - protein, 391 aa, unidentified
MIYVGIDVAKDKHDCFVTSSDGKVLFPVFTIQNNREGFDDLFSKIQSVSSEVSNIKVGLEATGHYSYNLLGYLIDKGLTTYVINPLHTNLYRKSLSLRKTKTDKVDARTIAMMLMSDVNLKSYSDTSYHNEALKSLTRYRFDKVQERARLKQSVSRLVTILFPELEKLVPSLHSASVYALLSELPSAEKIASCHLTHLTKLLENASKSRYRREKAIEIRDAARISIGSNMPAKSLELRHTLRLIGELDSEITEIESEIKQIMDQISSPILTIPGISYRMGAMILAEIGDFSRFDSPDKILAYAGASPSTYQSGQLKSSYSHMEKRGSRYLRFALINAAKYVCHWDETFGAYLQKKISEGKHYNVAITHAAKKLVRLIYAMEKSGMPYIKTA

SEQ ID NO: 65911 - protein, 336 aa, unidentified
MYYIGLDISKTTISVYIPKIDKDIEIENSIKAIRSLYSKLKKVYKKDIEGVVFVYEPTANYSSILKRFCSEKNIKVFLINPKQSSNFAKAIAQRGKSDKADARMLSHAGIIAKDDEIVVPVINHLVEEIKELMAYYKIKVKHRVGLSNHLESLSAKQNNSTLVNKVQKELDKLKKDEKEIIEEIYQLIKKDTTLHDKYKAIISIDGIGKIVAIALIHLFVKYPNANQREIVSLIGLDPIKRESGTSIRGKTRISKAGGKIYRGGLFMAAMVAIRYNENMKQFYNRLKENHKHTTVAQVAVMRKLVIIAHSLFKSGELYDENKYLQETSSEKLEKVA

SEQ ID NO: 65912 - protein, 364 aa, unidentified
MYNAVGIDASKLKSTITIIQPAGVVIRKPFDVLHTSDELNTLVTYLKSLVGETRAVIECTGRYHEPVVKSLSEAGIFISAVNPKLIKGQKQNTLRKVKSDPADARKIAKYALDNWAELREYSSMDTTREQLKTLNSQFTFCMKQKVAAKTNLISLLDNTYPGVNKLFDSPTRDDGSEKWVDYAYSFWHVDCVRKIGLKAFTERYEAFCKKHHYNYQKNKPALLFEESKQLVAVFPKEKSYKLLIQQSIQQLRLASEHIEIIRKEMNELASTLPEYETVMSMYGVGETYGPQLIAEIGDVSRFTHREAITAFAGVDPGVNESGQFKQRSSRASKNGSTRLRKTPFSSDVHIPSKQACKRTCLSVP

SEQ ID NO: 65913 - protein, 376 aa, unidentified
MREFNSVYVGLDVHKATIAIAVARGIRDEVTYHGEIENTPTAVNKLVKRLSPNGEVLNVCYEAGPCGYGLYRQLAALGHECEVVAPSLIPRKAGERIKTDRRDALMLARLHRSGELTAVWVPDQEQEAIRDLTRAREDMKSAELKTRQRLGHFLLRHGRVFSGKSRWTQAHFRWLERVKFDIAVQQIVFQEYIDAVREAQRRVAGLESQMRKALKDWSLGPVAESLMALRGVSTITAMTILAELGDITRFDSPRELMAYLGLVPSEHSSGGTRRQGGITRTGNGHVRRVLVESAWNYRFPARKTRCIEKRAEKTSARVQAMAWEAQKRLCGRYQLLMQAGKEKNVVITAVARELAGFIWAIACESMGKAHGSKALA

SEQ ID NO: 65914 - protein, 341 aa, unidentified
MKKLFVGIDFSKEKVDVAIISAEGLVETSVRVFNEFKNSVSGYKQLVKWVEKNANGIDSSLWLFCGENTGDYSKPLCNHLYGRGFDMWLENSKCIKDASGIRRLKSDRADAVMIAEYAMRNHDRAVGYEPLSESLVQLREYYLYRQMLVRHRCSFEVRRGEKRLMMEKSAAKTVIAQSGKHIVTELNKEIAKIDKKIASLIESSDELSEVYRIVTSVPGIGTQNAVCLMVYTDNFRRFNYDARSIACYYGIAPFGKDSGTSVHVDPHVHYMANRHIKAMLTQAALAAVRFNPIIALYYQRLIARGKKMPVAMNNVKNKLLHVVTSMVKNKQVYNPEYRFSA

SEQ ID NO: 65915 - protein, 384 aa, unidentified
MKLDRTDTPTKAEYGTVYVAFELSKAKWKLGIVVPGSEKMSRFTITGGDLAALAARLAAARAKAERHCQSVRIVSCYEAGYDGHWLHRWLLEHGVVNYEIDSSSIEVSRRARRAKTDRIDLDKLMRAFLAHLRGEPRACSVVHVPSVENEDCRRVTRERERLLKERTGHTNRIKGLLHGQGIRDAMPRKPGFIGSLADLRTGDGQPLPRRLREEIEREHQRLCLVDKQLSDLEGGNRDELRTAAPGSNAGKVVQLAELKGIGVAGGQKLVNEMFYKKFDNRRQVGSYLGAVGTPYDSGETRREQGISKAGNHRARATAIELAWLWLKHQPDSELSRWFRARVGDTKGRIRRITIVALARKLIVALWRYLETGVVPTGAVLHRSI

SEQ ID NO: 65916 - protein, 347 aa, unidentified
MRFYNQQHKNYCGIDLHARKMYVCIIDQKGKLKVHQNIKTDPELLFEIVFPFLDDIVIGVECVFCWYWISDLCAEHKIPFVLGHALYMKAIHGGKTKNDKIDSYKIAALLRGGNFPIAYTYPAEMRATRDLLRRRMYIARRCGELVAHIQNTNTQYNLPEFGKKISRKYNRQGVAERFDDPAAKKSVEVDLAMIDSLNEILKKLEWHIEKTARQHDYKTLYLLRSIPGVGQILALVILYEIHDIKRFPRVQDFSSYARLIKPVKESNGKWAGKSNKKIGNHHLKWAIKEAAILMLRSSDQAKEFVAKIEKKSNKGKALGIFTHKLGRAMYFMLKNSEAFSMECFFNK

SEQ ID NO: 65917 - protein, 355 aa, unidentified
MSSEKYIGLDVHQATISVAVMDSQGKTIMESILETKASTLLEFFAGLRGSLFVTFEEGTWAAWLYDLLKPHVSEVLVCNPRKIPLHKQGNKSDKIDARKLAERLRLHDLKPVYHGETGVRMLRELARSYLTVVKDLSRVMNRLKALYRSWAIPCAGRDVYYTRHRSQWLEKIPEAGTRRRAEQLYQQLDMLKHLRQQARRELLAESRKHAITAKLRQIPALGPIRSALAVALIQTPHRFRSKRQLWTYSGLGLETRDSGEYHYVHGQVRRRKKQATIRGLNKDYNHDLKGLFKGAATRASVQPGPFQDFYQRSLAKGIQPTMVRHTLARKLAAITLTLWKKGEDFDLNKLNSQAA

SEQ ID NO: 65918 - protein, 360 aa, unidentified
MSKQIVSIVRPVLCEEELTVPRQASVFCGIDVSADTLSVAVLTSNQAIEQREFLNTGSEHKALIAWLGKKKALVRVSMEATGIYSMDLALALDAADGIELAVLNPKRAHDFAKSMMRRSKSDRADAAVLAEFSLRMKFMAWQRPGLSALTVRSVTRHIEALGLEHTRGLNRLHAAQGSLGTPRCVVEDLKRVLVALERRIVTQRRTARKLIDSDEQTREQFRLLLGMPGIGEISALQILGELVLLAPDLTARQWVARSGLDPVHEDSGSSVHKPAHISRAGSRHLRRALFMPALAAVRCDPHLKAFYESLLARHKSKLQALIAVARKLLHAIYGVFKSGQPYKGKLLFPNIRLEVESIAG

SEQ ID NO: 65919 - protein, 312 aa, unidentified
MEARYVGVDVSKDRLDVHVLPEGAAFAVARDGKGLAELVARLSALQPERIAVEARGGFETVVAAALAGASLPLVIVNPAQVRHFAQALGRRAKTDPIDASMIARFVEATKPDLRPLADEATQLLADLVARRRQIIEMIVAERNREKRVAVRRIRNSIARLIAALEKELAEIDAEIDASVRGSPAWREKEDLLASVPGVGPITARTLIAELPELGTLDGKRIASLAGLAPFTRQSGQWKGKARIAGGRKSVRSALFLASLVACRHNSVLKAFRQRLIDAGKPKMLIAIAAARKLLTILNAILRDKQPWRPENA

SEQ ID NO: 65920 - protein, 433 aa, unidentified
MNTPHPYDLVIGLDRSDKKADLHLITTATGQRRSQTIDTAPEALWEWLLELRQQHPQARVGLCLEQPAVHLIAFLESYDWITLYPINPITLQKFREAFVTSRAKDDAKDAFYLAELLLTHHDQFQPWAPEDSATCAVQQLVFHRRAVVDERTGLTNRLIALLKQYFPQALVLCGEDLWRPLATRFLLKWTSLQTVQKAKPATLKAFYYLNGSRSAKLMEQRLALVAKAVPVTDETALIESVALRVQLICRQLQLVQQTIQSYEKQIAAAYAAHPDREIFASLPGAGPVLGPRLLASMGSQRERFGAAADLQHYTGIAPVTKRSGGSCYIHRRYLCPKFHKQSFHEYAKESILWSRWAAAYYLQQRTKGCPHHTAVRALAYKWQRVIFRCWQNRTPYQEARYEAALRKSGSPLVALFDKVELGKSPFKNPVKKS

SEQ ID NO: 65921 - protein, 348 aa, unidentified
MTMLADDTDYVIGVDTHRDTHTASIVHSGTGAQLGSITAATSQVGLAELVAFADHHPGRRAWAVEGTGSYGVGLLRFLTAQGERVIETERPHRVARRHGKSDEIDATKGAREALAAEHPAQPRERGERAAIAALLVTRRSAVDGAATARKQLRAGIVSAPGPIRERFDGAGSRRFVTVAQHLRHHPGHDIETATAITVMVALAKRIRTLDAEAVVHEKSMRELIVAWRPDLLDQLGVGTIVAATILSAWSHPGRFRSEAAFASLAGVAPIPASSGLTTRHRLNRSGDRRLNSAIYTVVITRLQYHPATRAYATRRKTEGKTGPETRRCLQRYIARDLYRLLENPPTTT

SEQ ID NO: 65922 - protein, 343 aa, unidentified
MHVVTIGLDLAKNVFQVHGIDGEGRVVVRRRLRRTEMLPFFGALSPCRIGMEACSTAHHWARELMAFGHDVRLMPASYVKPYVKRGKNDANDAEAICEAVTRPTMRFVPVKSIEQQSVIMLHRTRDLLVRQRTMLVNALRGHLAEVGIVAALGLPKVQELISLVKDGADERIEPLMRHCMEVIVDQLQDIQGRIGTLDRAIHAWHRQNETSRRLETIPGVGPITASVLAATVTSPSAFSSGRHFAAWLGLVPRQNSTGGKDRHGKISKMGDQYIRRLLIVGAHAVLRWGRTTKGSAWIMRLLGRRPFRVVAVALANKMARIVWCVLAKGSTYRNEHSAGALPA

SEQ ID NO: 65923 - protein, 367 aa, unidentified
MEKSSTTYVGMDVHKESIDIAIADANEARHFGRIAGDAAAVDRAIRRLRSVHARPLFVYEAGPCGFWIYRRLRAQGLPCMVVSPSRTPRRAADRVKTDRRDAMKLARLARAGELEPIYVPDEKDEAMRDLVRAREDAVCMQHQARQRLQALLLRNEIRYVGKSAWTQAHRRWISKLKLPNGAQQIAFEEYVQAVEEAARRLERLGDAIAAQLEHWRWRPVVEALQALRGISAIHAVRIVAELGDFNRFEAPRKLMGYLGMIPSEDSSGARRRQGAITKAGNSSARRALIEAAHAYAHPARVSWVIARRQTKLSKSVCDIAWKAQLRLCARFRRLAARGVQRNKIVVAVARELSGFVWAIARQVKPTH

SEQ ID NO: 65924 - protein, 359 aa, unidentified
MNEAIAGGLDIHRKFSRLSVVQRNERGEIRVMKRMRLEHADRLAMRERLAELPAGTPVAMEGSFGWQWVADLLVELKLDPHLGHPPAIKVLAKNEAKADRVDADRLGRFWLRGIFPESYLAPPDVRQLRERLRYRMALVYLQSGMKNRIQAILHRQGILHDFSDLFGKGGRAFLKELGLPEASRLVLDGWLAQIDLVREHVAQVEAWMEQHLQEDEVTRLLKSIPGIGLILAHVIQAEIGQLTERFPSRRHLTSYAGLAPLADDSAERHGRRHIAVACNHTLRWAFIEAAGGLLKSKRCPTNLRRLHNRLTHGGRVNKSQAKVAVAREICELVYVIWKKGEPYREILPTEPRRHNRRPA

SEQ ID NO: 65925 - protein, 424 aa, unidentified
MKVTYQTCCGVDVHKSFLVATIIKTTAGIEPSYQKKRFSTFNNSILDFKSWLLENECHDVCMESTGKYWVPVFNLLEDQINVTIANPKWVKAVKGNKDDTKDSKWIGDLFRLGLVKSSYIPCRLIRILREYTRYRYKLVSCRSSEKNRYQNALTVCNIALDSVVSDIFGKSSSSIIDYLLEQSGTTINHEEIASKLLKSLKSKEDAVIESIEGYQMTDAQKYRMRLIRAHMDYITAEINDIDKQIESLISSDPDYDKAIRLLTTIPGVKRDSAITIISEIGIDMSQFCNSKRLCCWAGLTPSNNESAGKKKSVRITRAGVYLKPALVQCAHAAVKSDKSPYYKTKYESLVKRRGKKRAVIAIARMILIAIYRMLSTGEVWNPSDLYKIDMPAPLAEKQKAKAIKQAKKLLQKEGLLPPDEPLVS

SEQ ID NO: 65926 - protein, 316 aa, unidentified
MTAAARCVGIDVSHGELVVAQQPPADVWTLPNDPAGAADLVRRLRRLGPTRIVLEATGGYERTVVAALATAGLPVVVANPRQVRDFARGLGQLAKTDPVDAAILALFAERVQPEPRPVPDAALHALEAVVTRRRQLLDMLTAERNRLALAAPPVHADLRKHIDWLTRRVAKLDRDLDKQIQASPVWRTRDNLLQSAPGVGPTVSRTLLGALPELGTLTHKQIAALVGLAPMARASGRWRGRRRITGGRAPVRAALYMAALVATRHNPAIHTFYARLLAAGKPKKLALTACMHKLLTILNAMVKANTGWRPTLAQTT

SEQ ID NO: 65927 - protein, 371 aa, unidentified
MNDFSKYVGLDVHKETIAVAVADAQGGEVRYYGEIANTPEEVVKLVRRLGKEGAKLSFCYEAGPCGYGLHRQLKALHQNCQVVAPSLIPKKPGDRVKTDRRDAMTLARLLRAGELTPVWVPDEAQEALRDLTRGREDMKHLQRVAKQRLSAFLLRQGRRYPGKKNWSQAHFRWLETLKFEQPVQQIVFQEYIDTVQALTRRVAAFDAQIESAGTEAVFFKQIGGYMALRGIDRLTATTIVAEIGDLKRFPDAPGLMKYLGLIPSEHSSGPTKSRGGITKTGNGHVRRVLVEAAWTYRHPARKSPLLQRRAEKASEAVQAIAWAAQKRLCARYRMHEARGKKKVLVCTAIARELVGFIWAIGQTLPAPETKA

SEQ ID NO: 65928 - protein, 436 aa, unidentified
MKKHLPILDVKAAFVDVGSEHMHVSVGGDEPKVFGSVTSQLHALRDWLLAQDVRSVAMEATGVYWLPLYGVLEAAGLEVRMVNGRQTRNAPGRKTDMQDAQWGATLHMHGLLRAGFVPTADIRRLQDYLRLRADHVGQAGSCVQLMQKALERMNVKLHDAISSLAGASGMAVMRAIVAGERDPAVLLALCDVQIRRAKAELVKETLRGTWSDEHIFALEQALQSWDHYERLIADCDRRIESVLPPHDPSLPPLAGPAKRGGANAPEIAMLREILAKMCSGRDLTRLPAHTPYGVLQIIGETGTDLSKWATEKHFTAWCGLAPGSNDSGKRHGRVKRSRNRVGRLFCMLASSLARSKTIALGAFYRRLAGRRGKAVANKALARKLAAWFWRVMVKGDDYVEKGIADYEAQVRKGKERALRRLASELGQRLMPVESST

SEQ ID NO: 65929 - protein, 324 aa, unidentified
MSKIKEFFGIDISKDVFDVMDPLGKHHQFKNDPSGFKAFGKLLNGNTHCIMEATGSYYQGLATWLFSQSFKVSVVNPLSVKRFIQMRLKTSKTDKLDAQMIRMYGESEEPKLWNPPSKLIIEATELHKLIELLVRQRAGLKNRLHALESKGITTSLVVTSVRRQIWNLSNEIADLELKLESVIKEYEPDLLTRLCSIPGVGKRTAIYLIVLTQGFEKFESSRQLISYFGLNPIIRESGSSVRGKSRISKTGDNQVRKLLFMCAFTAYEHNKACREIYQRLTAKGKSKKLALIAVANKLLKQSLAIAKSGLYYDENYRSVNVNLV

SEQ ID NO: 65930 - protein, 464 aa, unidentified
MEKKKTRGARDRRKSPPLLERVNRNAAGIDCGSAEHYVAVPPDRDPMHVRSFRTFTTDLHHLADWLVACGITTVALEATGVFWIPIYDILQERGLEVLLVNARHFRNVAGRKSDVSDAEWLQELHSVGLLRGSFRPAAEITTLRAYLRHRDTLVQSASTMVNRMQKALVQMNLHLHVVIADITGTTGLRILRDIVRGVTEPAVLAKHRDTRCRASEADIAAALTGYYRPEHVFALRQHLESFDTYQAQMQACDTEVEVLLKALTAAKPSTTPPEPRPGAVRKARRNEPRFEVRLPLYQLAGVDLTGIDGIGPYSALRLLSEIGTDMTRWPTERHFTSWLTLAPRNRISGGRLLGSTTAPSANRAAAILRMASVAVGKTQTALGAFYRRLAYRVGKPKAVTATARKLAVLVYRHLKGEIAYHDIGAAAYEARQRERSVKALTRRARNLGFALVDTATGEVLGGVS

SEQ ID NO: 65931 - protein, 366 aa, unidentified
MLYLGIDQHHKQLTVSLRNGEGHVILRRQVSTEPEKARAFLDDVRRQAGEGGFMALLEVCGFNDWLLELLDEYGCREIVLIHPDKRSQRKTDRRDASKLSELLWINGKRLQNGHKPRGLRRVVIPSADDRQDRQLTALRKRAGQQQTRTVNKIKNILRRHNLTWRQPTKTFETRAVRQWLAELELPEIDRLELDQLLAQWELWQAQVKQLEERIIRRFRRSDTAQVLATAPGCAAYSALAIASRIGPIERFAKPRSLANYFGLTPRCRNSGEVTDRLGSITKEGSGMVRFLLGQMVLHVLKKDPRMREWYRRIRRRRGSKIARVAVMRRLATIFWHMLTYKERYHVGGPPRLRLKQAQRRETANCV

SEQ ID NO: 65932 - protein, 312 aa, unidentified
MTTLCAAGVDIGRDHLDVGLAPNGGVFRTANSAPGIEALVRRLAGAGVERVVLESIGSYGARLVRALADAGFAVGVVDPRRVAALRLAEGRHAKTDRLDAGLIARFALIMSDATRPVPGPKAFEIRALSSRRRQLVEMIAMEKTRLKQALDAAVAESCRRTIAMLAEQRTAVEDKLHQELQAQPDGAERNRLLQTIPGVGPVVAMTLLADLPELGSLDRKTVASLAGLAPHPKQSGTRTATARIHGGRPCVRAALYMAALSAARSDKGFRAEYTALREAGKPAKVALIAIARKIAVAANAIIKAKQPWHKNT

SEQ ID NO: 65933 - protein, 377 aa, unidentified
MNHVPTEACPLAGPTTRPLTRSKEGPLPIVIGIDAHKNTHTAVAVDAATGAQVDQLVVAARTKGHERLMRWARRLDTDRTFAVEDCRHVSGRLERDLIKNGERTRRVPPKLMSGARRAARTRGKSDPIDALAVARAALREPDLPEARLEGPERDLQMLVDYREKLVWRRTEDQSLLRWRVHDLDPDLAIPKGALDRTVWLNELRSRLQAMPASVAVEICLDVLERIVAATVKVNELQRRISTLVGELAPALLELPGCGALTAAKILGETAGVDRFSSEAKFAMHAGIAPLPVWSGDRTRFRLNRSGNRQLNTAIHRIAVTQIRMHEPAKLFMKRKLSEGKTKTEALRSLKRHIARKVFDTMTRDTIKTRAGLQPAAA

SEQ ID NO: 65934 - protein, 416 aa, unidentified
MDTMYERCCGLDIHKKTIEACFRSGKKKTHMSFGTTSAELRKLTMWLVENDCQSVAMESTGSYWKPIFNILELSGTDMKIIVVNARHMKNVPGRKTDVNDAEWIAELLQYGLLRPSFIPDREQRELRELSRYRKSLVEERAREINRLQKMLEGGNIKLTSVVSEVTGYSSRRLLDRLLRSDEPMTEDVISGLVHTSLAGKSKELEIALDGLLSELQKELLIKVLDHIDDMSRRIADLDDFCRKQMKKYEDALDKLDEIPGIARRTAETILIETGLDMSRFPTAKHFARWAGLAPGNNESAGKRSSGRTTKGNPTLKSTLIQSAKVAARKKNSFFKARYQKIAARRGANRASVAVAHSMLIAIYHILKSGERFKDLGEDYYNQFNKEKKKKYYLKKLTKLGVNLKEATLSISIQAAT

SEQ ID NO: 65935 - protein, 428 aa, unidentified
MQVIYEKACGVDVHKDFIVAVICDSTSITPKYLRKRFSTFNNDLIRFKDWLIENDCQNVCMESTGKYYIPVYNALESYISNVVVANPKWVKAIKGEKDDNKDAKWIADLFKMGLVRPSYIPSKDFRILREFTRYRYKLTNTKTSEKNRFTNALTVGNCKLDMVFSDIFGKSSQAIVNIILNNDNFSDEDIISYINKKCKSSNEDILSSVSGIQLTNEQKLRINIVKDHIDYIINQINKLSEIIDTLVAPYESYIDLLCTIPGIDRNSAIGVLSEISNDVSQFKSHYRLTSWAGLAPGCNESAGKMKSVKISRAGVYLKPYLVEIAHCAVKDKNNSYYAKKFEKISKHRGKKRAYIAIARKILVAIYHMFETGEVWNPVDLASVETPILDRIKYTKNNFNQSFKQLLSLGLTSEELINLINQNATKLPV

SEQ ID NO: 65936 - protein, 428 aa, unidentified
MKYTQNEKILQVTEKTLVVGVDIAKERHVGRAFDFRGVELGKRIEFENRKEGMEKFLDWANKIMKANGKENVIVGIEPTGHYWLCFEQYLRENGIKVVLVNPFHVKRSKELDDNTQTKSDIKDPKTIAMLVKDGRYTEPNIPEGIYAEMRVAMNIYERLQKQLNVLKNQIINWLDIYFPEFLEVFSDWEGKVALLTLKEMPLPSDVIEKEVEGIIEYWRDKVDKRAISRRRAMDLVETAKRSIGKKEGRKLARQEIKYLLEEYELLKKQVEEIEGEMAELLKDVPNGDRLLEIKGVGVKTAVGFISEVGDIRRYEDARQIQKLAGLNIIENSSGKYKGQTCISKRGRGRLRSSLFRAMITIVAKNEEFKQLHMYYTTRQNNPLKKKQSLIALCCKLIRIFYAILKKGIRYDGNKMLSDIKRETLARTA

SEQ ID NO: 65937 - protein, 416 aa, unidentified
MEEEVYYERCAGIDVHKKLLVVCMRIGRKTEVRSFGTLTHEIREMIAWLRANGCQMAAMESTGSYWKPLYNIFEQEGLPAMVCNAYHIKNVPGRKTDVNDAQWIARCLSQGLLNPSFVPDREQREFRDMMRFRKSQIEERARNINRLQKFLEGANVKLGSWLSDIEGKSATELLELIIGKPDFTVDDVAERMHGKLKSTAEELFFSLEGSITPLQREFFAHVMDVIREQTSQIEKTDAMIQRNLNDNYKAAIEAIDVIPGIGRISAEQIIAEIGTDISRFKNQHALSKWAGVCPGNNESAGKRKSGRTPPGNKTLKSTLTQCAKSASKKKDSFFSAQYSRLVSHRGKNRATMAVAHSMLIAIYFVLYGCAYEDLGADYYTQFNREKKINSHIKQLSKLGVTIPDDVLQEAIQCPPD

SEQ ID NO: 65938 - protein, 341 aa, unidentified
MSIVGAFDVHRRQLTFEYLDTGTGELKRGRVVPADREHLRQWLARFDGHDDVHFALEGCTGWRYVAEELAAAQVTAHLAEPADTAALRGRKRHAKTDKADARHLRVHLLAGDLPECWIPPEHVLEARATVRLYKDLVDERGAWHQRIAATFFHQGVPAGVSAAKPAGRAAAAEADLSPAGRQAVEAALRQVDRLTAELDPLRRQLDMYSRRQPGCAALRRAHFGIGAVTSVAIWAELGDVRRFTSSDHVVRHTGLDITVHSSDIKRPPGKLSRQGPPLLRWALYEAAKSASRPAAPDYGYYTATRERRDGGLATLSVARKLARRCYHTLRELEEEALAPAA

SEQ ID NO: 65939 - protein, 391 aa, unidentified
MSVSSSASTTAPRSASTVYVGMDVHKDSVMVAVLPERAPQPIAVDRLPNDLAVLRRFFARLVRDGAVVQACYEASGAGYVLQRALAEWGHACVVIAPSLTPQRPGHLRKHDKRDAIELARLFRAGELVPIRIPSSADERVRDLVRCRQTLQQNVLRARHYVSKFLARRGFVFRDATPWHRAHFRWLHALVAGTGDRALTSEDAVVLGEYLALLEYTLGRRDALDEQIAALALTPAYAVPVGRLKCFRAIDTLSAMVLLTELGDWRRFERPAQLMAYWGLVPTEHSSGPRERRGSITKAGNSHCRHILVQAAWHYRHRPALSGALKGRQRGQPAAVIAHAWKAQHRLYALYHRLAARRPAQIAVVATARELVGFLWAVMRDVADPHAGGLPA

SEQ ID NO: 65940 - protein, 310 aa, unidentified
MMGTYVGIDVSKDRLDVHVLPQDQAFWVERNGKGLAVLVEQLKPLAPSLVAIEATGGFEAIAAAAMAGAGLPLAVVNPAQVRHYAQALGKRAKTDPIDAKVIARFAADVKPEPRTLPDETAQLLADLVARRRQIVEMLQAERQRQMRVTVRRLRKSIERLIKALEKELAELDHDIDTAVRSSPAWREKEDLLASVPGVGPQTARTLIAELPELGTLDRKQIASLAGLAPYTRQSGTWKGKSMIGGGRKTVRTALFMAAMVAARFNPLLKAFRDRLVHAGKPKMVALIAVARKLLTILNAILRDKNPWQIA

SEQ ID NO: 65941 - protein, 371 aa, unidentified
MNSIVYVGMDVHKESYTLCCYSYDTDKIEYKQTIPSDYKLILKYMEQVRTRYEGEVSFVCGYEAGCLGYSLYHELKEHAVDCKILAPTTMGITNTHHVKTDKRDAANIARCLAFHTYSEVYVPDDEDNAIKEYIRMRDDQKLMLKKIKQQILAFVLRQGKRFEGGKTYWTIAHMKWLKSLELIGLDKETLSEYLITYEYLTDKIERLDKRIEELASDEKYVKKVKNMSCLLGVKTHTALSMIVEVGDFERFEKAPRFAAFLGLVPSEDSSSDKVNRYSITKAGNSHLRRLVVEAAQSYTRGNIGHKSKALKQRQQGNPPEIIAYADKANERLRRRFYMMTLKKGINRNVAATAIARELACFIWGMMTEQVG

SEQ ID NO: 65942 - protein, 349 aa, unidentified
MDRTTYGLDIAKSVMQLHWVEAETGEIGRKKLARAKLAEYFAQRLPVRVVMEACGSAHHWARVLGKLGHEVELLPAAQVRPFVRSNKDDAADARAIWLAAQHRDIRRVPLKSVEQQAVLGLHRTRSHWVSVRTATVNALRGLLYEFGVVLRGGRQAGLKALVEQRAQIDEQLPQVMRTLVDGQLQTLAQVQQRIDQLEHELAAQQKQLKKADELRRVPGIGVLGATALAATLGDGKAWRSAREFSASLGLVPAHSGTGGKVRMGHISKRGDPYLRTLLIHGARSVIEHAKAKSKWLQQMLMRRPPNVVVVALANKMARTAWALVAHGRKYQRHWQSAKPGCSTAQAAAA

SEQ ID NO: 65943 - protein, 321 aa, unidentified
MTSQTESPRFGIDVSKRWLDIAEYGRSPVLHIDNTAQAIRGWLRTLPPGACHIACESTGTYHRALVKLLIGAGHRVYLIDGYTLSRYRDTLGQRAKTDRHDAGLIARYLAHEGARLRPFSLPPRAVTDLRALLRRRATLVRCLGRMRQSMEELPGFTRQVRAVTERIQALIKRLEQRIAALIGTSGWGDPYRRILKVEGIGTLTAAGLCATFHRAPFGRADAFIAFLGLDVTVRQSGTQRARGVLSKKGDAEMRRLLYNAAMAASRSSTWQPFYQRMLQRGFSRTQALVALARKLARVAFSLMKNASDYVPQQHENACART

SEQ ID NO: 65944 - protein, 371 aa, unidentified
MQSSITMSKETKKRTSQKSENEYFKYSVGLDISKDKFDTAVSVICKDQCVKVIASRTFTNNPNGFKELFEWHSRKCKLDLPIVFTMEATGIYYEKLAWFLGRKGLYVSVVLPNKAKKYLQSLGLKSKNDKIDAIGISRMGAEQKLQKWVAPKEIVVELRDITRHRQNLQESKTRFNNQLSAYKCGEFVDKAIVKGLEKLIALIDKQIRSTEQMIQKKIDSDEEIKEGVNRIAEIKGVSTITIATILAETNCFELFNNQRQLVSYAGYDVIENQSGKHVGRTKISKKGNAHIRRILHMPAFNVVAYGEQVFVQLYERVYDRTKMKMKGYVAVQRELLCLIYALWKKKEKYLRNYKSERPEMQSRSSSFRLVS

SEQ ID NO: 65945 - protein, 346 aa, unidentified
MNQIIRIGMDTSKHFFQLHGVDAAELPVLRRKLRRHEVLAFFAKQPPTVIGMEACGAGHYWGRELRKLGHEVKLIAPQHVKAYVKRNKNDGRDAEGLCEAMSRPTMQFVPVKTEEQQAALMLAGIRQQLMTRRTQLSNAIRGYAAEFGLITAKGLVKVEPLLADIAQDESLPALAREMFAVHGREYARLQVELKAVEARLMAWHRANADSRRLAKIPGIGPIGATTLVMKAPDPGLFPSGRHFAAWIGLTPKDHSTAGKTRIGKITRAGDEMLRSVLVAGATAVIQQAKKGRGRPSPWLVALLARKSPKLAAVALANKTARIAWKLLTTGESYDGARMPVASALAA

SEQ ID NO: 65946 - protein, 440 aa, unidentified
MFDGWLAIRLPIGLSVWLANGELPSGIAVRGVAREGNARLEVALPSSRFQPTSEEKPVAKVVIGVDPHKRMNAVVVINGKGQVLARQQFANSAGGFRELKSFWRQWRPRTWAIEGCNGVGKYVAQRLVAEGETVLDVSTRRAALVRVFGGGNGRKTDDTDAHSIALAALHGTDLPRVRPDAMTVTLRLLSNRRSELAGLRTQAVCRIHRDLVVLVPGGASRSLTAKKAKQILGRIRPRDEIGRLRRKLVADQIADLISIDKRLDVVHREIKAAVAAAPTRLTRLFGVGPVTTARVLGEVGDMVRFKSRHHFASYNGTAPTDHSSAGPCPPRVNTKGNRKLNHAIHIVAVTQKRSTKSAGHAYYRRKLAEGKTEKEALRALKRRVSDAIYRQLTDDELLRGPGGQVGTTPKTSVTGSNPNAGSSVKPQPGPRRKATRHPLH

SEQ ID NO: 65947 - protein, 329 aa, unidentified
MHVIGVDVSKAKLDCALIVQVEPMKRRQKVVSNDPQGWAKLLEWACQNAHCEPGELKLVLEPTSSYHEGVAHYAHDRGGRVWIINPKQLRDFAKGLGVRSKTDSLDCSVLAQFGLKAQAPDWIPAPLPLRELHSLLRRLEDLQQTLQAELNRVEAAQARQAPALVMDSLQSSVSFLEQQIKRLNAQIDQHIDGHPQLKADYELLRSVPAVGPSSARVMLVKLRGRAFDSAAQASGFLGLRPVHWESGSSVHKLPRLGPHGDRLARRILYMAALTAKRTNPDARALYERLVAAGKKPMLALCAVMRKLVHICFGVLKHQRPYTPQIASSD

SEQ ID NO: 65948 - protein, 475 aa, unidentified
MGKVKHIKASKRTELQKKLRDIPYDKVLVVAIDPAKYSPKALICNYFGEILVNPFFFTINSKGLNLLLTKIQETVNNISAQKVLVCIETTGHYHEIIVRYLQEFDYDVLLINAYTTSESRAENLNWSKTDNIDLFAIASALIDGKTTKSRLLDGNYEKLKDLCRYRRYEVQKRSAIKSKIRVLMDKIWPNFQGKGKIVNGTGKVEKIFSKFWGKAPLFIMKNYPHPSLIKKFNKTDLREISRKNNLKFRNSTIEKLLLAAENSYARPYEELEVEIELLTMTIADYENANQKIELLRDKIENILVQNPGLLLLSVPEIGVVTAAEFSAEMGPATQYDYAGQVIKTAGTNPLVKESGGKKARYGSISKQGNPSFRHIVYLVGKSLATGKTNPYFKSYAERLRKRDKNPNQIYIAAGNKFIRVTFAMLRDHKLFDPPMWKGESLTSNIFDKIDSPENKEIALKTLENYPGVNSSKLTG

SEQ ID NO: 65949 - protein, 342 aa, unidentified
MDHFAGLDVSVKETSVCIVDDMGKIVREVRVASEPEALLQVLSDPAYHLKRIGLEASPLSQWLFSALAEAGLPVICVETRHMRAMLKAQINKTDRNDARGIAQMMRAGLYRSVHVKTLRSQKLRMLLTHRKLLQSKAIAIDNDLRGTLRNFGLKVGVVGTVRFEARIKELVVDLPDLAVLVEPLLIVRRVLREQLSILHRRLLAIVRDDEVCRRLMTVPGVGPVVALTYRATIDVPARFRNSKAVGAVLGLTPSKYQSGEINRTGAISRCGDEMMRVMLYEAAQSMLNTNKWSWLKAWAMKIAKHRGKKKAIVALARRLAVIMHRIWVDGTEFRWTREVEAT

SEQ ID NO: 65950 - protein, 300 aa, unidentified
MAKDTLAVHVLPQDQLLSFPNTAHGHQRLCDHLAGQCVGNALLEATGGYERAVMTALATARIAVTRINPRRARAFATALGTIAKTDRLDAALLARMAQLVQAPAPVPDPLREQLRMLVQRREQLVQQRDDERRRLHQATLAVVRACLIEQIGDLRRRIQRMNQAIKQVRCQLDDALAHALSTVPGIGVVTTASLMAYLPELGTLDRRQIAALVGLAPYNVDSGQHRGKRRIRGGRASIRRVLYMACWSVVRTQASFKERYQQLRARGKPAKVAITACMRVLLIRLNAMARDRTPWREAIG

SEQ ID NO: 65951 - protein, 345 aa, unidentified
MKITTVGIDLAKNVFQVHGIDAGGKAVLRKRLRRAQVAVFFENLPSCAIGMEACASAHHWARTLQGFGHTVGLIAPQFVKPYVKTNKNDVADAAAICEAVGRPNMRFVPVKSIEQQAILSVHRVRQGFVKARTAQANQIRGLLGEFGLIIPQGIINVAKRVPEILEDASNELPVPFRHLIDRLTTHLKELDRQVKEFEGEIIAWHRSSELSRKLEKIPGIGPLAASALVASIADAHSFDNGRQVSAWLGLVPRQSSSGGKPTLLGMSKRGDTYLRTLLIHGARSAILAAKNKVDNTNGWLTNLLKRRHPNIAAVALANKNVRTVWAILAHDREFKADYVPTRMAA

SEQ ID NO: 65952 - protein, 354 aa, unidentified
MRIVCALDVHRRQITYAVVDVVSGEMSRGRITPATRESVREWLARFEGLDEVHFALEGTTGWRFVVEEIARAGHRAHLADPAETAAKRGRKRRAKTDRADCDLLLKLLSARELPESWIPPAQILELRTRVRLRKRLVDERTAWQQRLQAQLFHQGVPAGLRPRTRAGREALASVDLSPAGRELLALALRMIDVIDHELAPLDRTLSLFARRQPGCRELIARLYGIGPVTATAIVAELGDARRFGCSDDAVRHCGLDVTVHQSDNKRAPGHLSHEGPELLRWALFEAAQQACRPASPDHEYYRQVARRIDHNRACLSVARKLCRRAHHILRELGDEALAPVEPAPTREEVIAAAA

SEQ ID NO: 65953 - protein, 334 aa, unidentified
MENIALIGIDLGKNSFHIHCQDRRGKAVYRKKFTRPKLIEFLATCPATTIAMEACGGSHFMARKLEELGHSPKLISPQFVRPFVKSNKNDFVDAEAICEAASRPSMRFVQPRTESQQAMRALHRVRESLVQDKVKTTNQMHAFLLEFGISVPRGAAVISRLSTLLEDNSLPLYLSQLLLKLQQHYHYLVEQIKDLESQLKRKLDEDEIGQRLLSIPCVGTLTASTISTEIGDGKQYASSRDFAAATGLVPRQYSTGGRTTLLGISKRGNKKIRTLLVQCARVFIQKLEHQSGKLADWVRDLLCRKSNFVVTCALANKLARIAWALTARQQTYVA

SEQ ID NO: 65954 - protein, 355 aa, unidentified
MSQEKYIGMDVHQAAISVAVMDARGKLLMECLLETKAATILEFIQGLRGTLALTFEEGTSATWLHDLLKPYVSRLVVCDPRKNALLKDGNKSDRVDAQKLAELLRTNQVKPVYHGKHGTRALKELGRSYLTVTKDLTRVMNRIKSVYRSWAIPCAGTSVYTRRHRGEWLAQLVEPGVRTRAEPLYQQLDSLQPRRQVARRELLRESRKHAAVKLLGQIPAIGAIRSALLVALLQTPHRFRTKRQLWAYSGFAVEVHDSGEYRWVRGKRQRNRERITVRGLNDNHNRDVKNLFKGAAISASTRPGPLHDFYVARVESGMRPTMARLTLARKIAAITLTLWKKGVSFDPKQLQRQAA

SEQ ID NO: 65955 - protein, 350 aa, unidentified
MQLHTIGIDLGKTVFHLVGLNLRGEVVVRKKFSRKQLLHFTANLQVELIGMEACGGSHFLGRALREQGHEVRLMPAQYVKPYVKTNKSDYIDAEAIAEAVERPKMRFVPIKSDDQLDLQSLHRVRERWVMRRTAVINQIRGLLLERGITLRQGRRHIDAALPGILEDASAKLSGAVRLLLAQLKLELDHLQMRIDEADAVINKIAGDNDACRRLVAIPGIGPVTATAIIAAIGNGAAFKKGRGFSAWLGIVPGEYTTGGKQKLLGISKRGNSYLRRLFVQGARAVLQQSAKQSSGLSAWLAQLTTRTHSNVAAVALANKLARMAWAVLAKNEPYRPPMLAGAATECLACR

SEQ ID NO: 65956 - protein, 461 aa, unidentified
MSSKKPEGKRHKSVSTKMEWKALEVVHPDAAGIDIGGSEHWVAVSPERDPEPVRCFGCFTADLREMARWLVVKGVRSVAMQSTGVYGMPAFEVLQQHGLEVFLVNARHTKNVPGRKSDVQECQWLLKLHSFGLLNNSFQPSDEIRIARTLWRQRGNLVAEASSVIQRMQKVLIEMNIQLSTVLSDISGLSGMSIIGAILAGERDPWTLAALVEPEVKATPEEIAKGLEGNWRKELLFVLRQEVELYRIYQNKIRNCDRELRKHLQSFASVVDLKKQPIGPQPKHKKVAKNAPSFDLRSELYRITGIDWSQVNGINVLTAQTVIAECGADLSGFPSEQQFTSWLGLAPTNEQSGGKILKRRTRKVVNRAATAFRQAATTLLRSQSYLGAQSRRLRTRLGAPKAITAMARKLACLFYRLIKHGQQYVDKGNEYYEAKYRDQQIRALAKRAQKLGVQVVLPALA

SEQ ID NO: 65957 - protein, 351 aa, unidentified
MWIVGVDYHPSVQQVAFVDTDTGECGERRLNHSDGEAEKFYRELKAAGCRVRVGMEATGHARWFERLLAELGFELWIGDPTQIKAKRVRKQKTDRLDAALLLQLLLEDRFPRVWVPSAENRDLRQLLWHRHRLVQMRTRMMNQLQAVAMNEGVRRKQALWNKSGRAQLESLPLAQWAARRRRDLLELLDRLDPTIEELSAVVEQEAKQRPKVLRLMTHPGVGPITALAFTLIIDSAERFACGKQIASYVGLIPCEDSSADRRRLGHITKQGNTLLRFLLVEAAQAAVRRDPDWRRRYAHLAMRRERRIAKVAMARKLAVGLYWMMRKECNYEQLKKFGSYAGESKYGHGVQ

SEQ ID NO: 65958 - protein, 383 aa, unidentified
MKKTQETLRIEDSIKEAILYIAFELSNSKWKLAFSDGSRIRHKAITAGNLAQLQVEIDLAKRKFKMIEDVRVVSCYEAGRDGFWIHRYLESQGIENLVVDSASLEVNRRKRRAKTDRIDAGKLLRMLLRYWGGEKQVWSVVRVPSEQDEDARHLHRSLDSLKSERTRHRNRIKGLLIQQGIKVSNPSQKKFLEVLEKVRTWNGQAVPPGLNAQVVREYERLQIVEGQIKALEKEKQERLKNPDTVSLQKVAKLATLYGIGSVSSWTFVMEFFGWRQFQNRKEVGALAGLTPTPYDSGKSLREQGISKAGNQRIRALAVEIAWAWLRFQPQSNLSQWYMKRYANGGKRMRRIGIVAVARKLLIDLWRYLEYDKIPEGARLKSAV

SEQ ID NO: 65959 - protein, 374 aa, unidentified
MPILAELVDAVVGVDTHRDSHEVEIAHPSGAVIATRRIDNDTSGYALLLAWILDHAPGPRLVVSIEGTRSYGIGLARAVAAAGMTVIECEQPHRKARRGRGKSDPIDAHLAVLTALRTDPDRLPAPRADGDREALRILLGARDELSTTSTAQTNRLRALLLAGDDQDRDRARGRLTATVLAALARRRPPRDATRDQGVRQAEIRRLALALREARRALAANHTQLQTILDELAPGLTDQTGLGPVTAAQAVVSFSHPGRCRTEAAFAALAGTNPLPASSGNTVRHRLNRGGDRALNRAIHTIAVTRARCCPTTRAYITRRTAEGKTDKEIRRCLKRYITRQLYRTLTHTMTNTPPIPPANPPKTVKTPLSPIPPC

SEQ ID NO: 65960 - protein, 433 aa, unidentified
MLKINYMSTLFVGIDVSSKSNVVYAMDFEENKYISSSFGNNQPGADELASMIAECMQNHKNLDTVIVCLESTSVYSVHIANFLSTCETLMPYKPYVFVVNPKTTANYRKSYIGMEKTDPADAFLIADFARVGRTKKLEPWRGSQFIALKRLTRHRMHLSECIAREKTYMVSNLYLKFSELQLLDGDDRPFGNIYGATSSAVLTEFLSPQEIIDLSEEELLAFLAEKSRNRISDISRTSELLRKAARDSYRLDKCMYEPLNVSLASSFNCIQAYQKEIKLIEQAIEKCINGMNPNVFLILKSIPGIGPIWASGMLSEIGDISAFHSSDALAKYAGLYWLKNDSGDFTSEDNQVSKAGNLYLRYYLGEAANSVRRYVPEYADYYAKKYAEVSKHQHKRALALTSRKFVRLVFGLLVKNQLYTGEKLDTELHTGQN

SEQ ID NO: 65961 - protein, 339 aa, unidentified
MSKLLKNFIGIDISKTWFDVALIKANHPNESMHHQFPQSADGFKKMVIWLQQLGVLLNAETLFCMEYTGIYNAGLVNFLVEQKAQTWVEMPLRIKRSAGFERGSDDKTCAIKIAGYAFRYQDKMQLWRPVDSSIEKIKNLIAQRDRVMNAITQLTVPVKELSECGCNKDAKELEKLQRSPLKALQKTKEAIEQLIIKTVKQDAEITKKIQQVQSIKGIGEVTAVAFFVYTKGFTTFNNAKELACYCGVVPFSKRSGISIRFKPTVSPHANKKLKKLLHLCALSAIKNDKEIQAYFERKIAQGKNKMSVINAVRNKLVHRVFAVIRDDRFYEENYVRKCA

SEQ ID NO: 65962 - protein, 407 aa, unidentified
MKNLSPHLQVAVDVGCHEHYVVIGLSTGGILDEFPVTHAPSGFQYFFKRIEQQKYLHGDLPVDVAMEGYNGWARPLDQQVQMHGYQLYNVNNLKLARFKEIFPAPAKTDTVDARKMLELFQLQETLPLAKGVLQAVLPVPEANRHLKCLTRRRRQLVNEKVSVQNRIQPDCQAVCPTLLEITGSVDNLWFLTFLTCREELPKLLRLHSKSLLAIPGIGLKYVRLILDWQKQAEFSADVDDVGSMIQEDAQHLLGLIASIKTLDVKISQQLKNSVMAQHIDSIPGFGLVCSAELAGEIGTLARFPKQSSFSIYIGMSPLDNQSGTYQGTKSPKHVNTRARKAMMTAVCRHMAVVPESRTYYDKKRAEGKSHNKAVRALGRHMSRIIWSMLRHDRDYELPTRVPLKEAA

SEQ ID NO: 65963 - protein, 358 aa, unidentified
MERKIVKIDYTNKDIFVGIDVHSTSWYVTVIVEDYIKSQTFSANAAKLAEYLKREYPGGTYYAGYEAGCFGFHIKEKLDKLNVSTIVINPADIPTSDKESRNKTDLRDSQKIALCLKSGLVKGIYAPDRASLEIRMLSRRRSDISGKTTRVKNQIKAVLKLYGIEYPQEFEESHKYWSKNFILWLSQIEFVTIEGKIAMDSFISELEFFRQEKLKVLNYLRALTKSEKFKEQSEVLISIPGIGAVSTVTVLTELINVERFETRDKYLSYIGLTPNEHSSGEKRRIGSLTKRCNRSLRTVFIEASWIAVRRDPALSMYYTEVHKKIGKQKAIIKVARKLATRVRYLLLNMKKYEYGHVA

SEQ ID NO: 65964 - protein, 406 aa, unidentified
MNAVGIDVSKGKSTVAILRPGGEVLASPFEVSHNPKELNELVSLIKSLDGDSKILMEYTGNYYLPVALFLRKSRLFVSVVNPILVKDYSNKSLSVRKGKTDKKDSLKLAAFALDRWHELPLFSPQSDSRTLLKAFNRQYNQYIKLKVMLKNNLFSILDQTFPGANTLFTTPARKADGHEKWIDFVLKFPHCECVSKKSFSAFSKSYLSWCRKFGYLFSEAKAKEIYAFACNCTPSLADSEAVRALVSIAVSQLNTLNETLASLQKEMDLLACSLPEYDTVLSLYGVGSVLGAQLIAEIGDVSRFSDKKALVGFAGIDAPPFQSGNFNPQSRNISKRGSAALRKTLFQVMSVILQKAPANDPVFLFMDKKRSEGKHFYVYMMAGANKFLRIYYARVMEHLNSLQEAA

SEQ ID NO: 65965 - protein, 343 aa, unidentified
MGQVSTIGLDIAKWVFQIHGVDAGGAVVIRKRITRAKLLEFFAALPSCLVGIEACPTAHYWSRRLGALGHTVRLLPPSYVKAYLKRSKNDANDAAAICEAVTRPSMRFVATKSEQQQSGLMLHRSRQLLVCQRTMLSNAIRGHMAELGIISAKGRNGTAELLEIIADGQDDRIPAAARFSLGVLARQYAVIRAQIVAIEKRIHAWHRSSEESRRLEEIPGVGPIVATALVAEVGDWKVFSSGRSLAAWIGLVPRQHSTGGKERLGGISKQGNRHLRWLLIAGAMAVIRYARQHGTKRPWLTRLMGRRPLKVAAVALANKIARMAWAMMVRGERFKEPRFLPAA

SEQ ID NO: 65966 - protein, 412 aa, unidentified
MELLHRRCCGLDVHKETVVACLRLVSDGKVTTEVRTFQTTTADLLRLSEWLAANECTHVAMEATGVYWKPVWRILDDGEFALVLANAAHVKNVPGRKTDVNDAMWLAELLAHGLIRASFVPDAQTQEMRNLLRTRKQLVREQSSHVLRVQKTLEDANIKLDSVLTDLMGKSGRAIIEALIAGETNPVKLAGLADRRVKASSEEFREALRGRVTKHHRFLLRLHLNQIDALDAAMATLDAQVEANLGPFRTAVELIGSIPGIKNLGAHVIVSEIGIDMSRFPSAAHLISWACICPRNDESAGKRRSNRVRKGGTWLKTTLVQCAWAAVKKKDSYLQAQFYRIKARRGPKKAIMAVVASILTTIYHMLKDGTMYKDLGRNHFDRRSSDQQKNRLVKRLAELGYAVEIKPLAATA

SEQ ID NO: 65967 - protein, 308 aa, unidentified
MAQNYIGVDLSSDWIDIHDPLRGTFRIANSNAALARWMGSFAPEDFLVFEATSGCDRAILQEAEARGIAMRRINPLHGWHFARSLNLPKTDRVDARMLARFGAERQPEPQAASSPARRELAELETRREQLKVMEGQEKSRLRKATLEAVRGDHLTMLRSLAARRAKIEAHIRDHLKAHPDLARTAHLLQSIPGIGIVAATVLIAHLPELGRIDRRAIASLAGLAPKARESGKWRGNRPIGDGRRHIRRALYMAALSALRSRSCFAQAVSALRAKGKPGKVIAIAMARKLLVIANAIICKQEPFRSAKQ

SEQ ID NO: 65968 - protein, 388 aa, unidentified
MQTVADRHEGPNAIRTDLGAIFVSLELSRSRWLITSLSPDGGEKMSKHAVRGGDVSGLLERFAQLRKKARARTGKVFPFVVIQEAGLDGFWIDRVLRKEGIESHVVDPASITTSRRRRRAKTDGIDGEALVRALLAYKRGEPRVCAMVKAPTPEEEDRRRLCRERKVLIGERVRHVNRVKGLLFSQGISGYEPLRHDRRERLDTLQTGDGRLLPDHLKAQVRRELDRLELLLEQIKAVEAERDVLLAVQQGAAPAPAAMLLNIKGIGPEFAAILWSEGLFRHFDNRRQVASYAGLAPTPWQSGSVDREQGVSKAGNPRLRTTLIQLAWLWLRNQPQSALALWFKERVNRNGGRLKKTTIVALARKLLVALWKYVTAGVVIEGAIVKSA

SEQ ID NO: 65969 - protein, 358 aa, unidentified
MNKLTKIDKFFNNVDFTADDQLFVGIDVHKRSYNVALYLNDAPALDFVMPAAKEKLSQKLKKTNSALKRVAYETGPTGYGLARHLRQYDLPVTVAATSRIPRSSGDDKTDKLDSRKLAEYAAKGLLKPVAVPTLKQEADRQFYRMRHRQARNRSKVKTQIKSFLLMHGIDEPAGLSSWSCNSVDQLRTLPLRKTLRLSLDELLGDLDYYSLRVKTLDRSLKEHLDKGLLARQISILKTHPGIGVVVSCQFAVELFHYRDFGSTRELSRYLGLSPRIHQSGERSVSGGINKVSNSRLRSNLVQAAWQWIRVDIEAKKTYLRLLNNCGGIKQKAIIAMARKLSGHLWTMLVNDEPYDPNK

SEQ ID NO: 65970 - protein, 392 aa, unidentified
MKFIGIDVASLKHDIIIIDDYGEIIKDHFTISNDKVGFKKLHTEIKSCMKSVNDIHIGMEETGIYHENLRDFLISKGFTVYTINPLLTSYSRKAASPRMTKTDKIDSTAICRYIMNNLRILHSYTPSLYYIDELKQLSRTYHHKKQLLSKPKMELKRLLQISFPEFTKNFDPYAKWALDVLGEHPLPIHFKGLHTETLAVRIKTKSDRLAKAILLKEIAKDSIGKCDDLQSFLIRSIISDFNHYESQTKELKKIITDKMSIFPKIMSVPGIGPINGATILGESGNIHRFNNKHEYYAFYGCDPIIHESGNYKLKNSRLSKRGSKYLRTVIFSASRVACVGKFTRDNKFKRKYISMASKKNKHHYTILFAVAKCMVHSIYRILKDNKSYNDSK

SEQ ID NO: 65971 - protein, 354 aa, unidentified
MSNRINSIVKTIGIDIGKNAFHVVGLDQRGAIVLRQRWSRRQIEVRLANLPPCLVGMEACVGAHHLSRRLQSQGHDARLMPAKYVRPYSKGQKNDFRDAEAIAEAVQRPTMKFVATKTAEQLDLQALHRVRQRLVSQRTGIINQIRAFLLERGIAVRQGLRFLRTELPIILATRSDVLSPRMLRVIEELAGDWRRLDERIDGLSQEIEALARQDPACERLMTVPGIGPIISSAMVAAIGNGAAFTKGRDFGAWLGLVPKQISTGDRTILGAISRRGNRYLRALFVQAAWVVLVRIRDWERYGLKAWIDAAKKRLHHNVLAIALANRLARIAWAVLNKERTFECVKRYATTSQPA

SEQ ID NO: 65972 - protein, 355 aa, unidentified
MSSEKYIGLDVHQATISVAVMDSQGKVVMESILETKASTLLEFFAGLRGSLFVTFEEGTWAAWLYDLLKPHVTEVLVCNPRKIPLLKQGNKSDKIDARKLAERLRLHDLKPVYHGETGIRMLRELARSYLTVVKDLSRVMTRLKALYRSWAIPCVGRDVYYRRHRSEWLDKIPEAGTRRRAEQLYQQLDLLQQLRQQARRELLAESRKHAITAKLRQIPSLGPIRSALAVALIQTPHRFRSKRQLWTYSGLGLESRDSGEYHFVKGQPRRRKKQATIRGLNKDYNHDLKGLFKGAATRASVKPGPFQEFYQRSLAKGIKPTMVRLTLARKIAAITLTLWKKGEDFDIHKLNSQAT

SEQ ID NO: 65973 - protein, 427 aa, unidentified
MNDSKTSLTLCVGADVHLDDIVLRAVDKASGHEVLAAFHVTNNLPGAQSAAATLADTAKRQGYARLEIGWEATGMLWLPFHRFLSTSPILRPFELELVCFNPKLVANFKEALVLRSPKNDERDAFDVAARLRFGELPVSYVPGDFWQGLRRLTRYRFQLSRELTREKLRFQAYAFLKCSDWHRVEPFSDVFGATSVALLTELTAAELRAMPHHQLVELITHRGHGRFGDPAATARDVRQALQTSYPVDAQMDSLVTAALATGWEHIRFIKRTMKHLDRLIARAIDPVPNPLITVKGLGPVITAGILAEIVDVTRFPEHKHLAQYVGLTWQKRATGHFVSQTSRLTKVGNVYLRYYLVLGADLLRRHNLEYQAYYWRKYQEVTKYQHKRALTLTARKLVRLVHALLTKNEAYVRPQPLQVEHQEVVNA

SEQ ID NO: 65974 - protein, 338 aa, unidentified
MTLYAAIDLHSNNGVLSVIDEQDHVVFERRLPNSLEQVLQALAPFLAALKALAVESTYNWYWLVDGLLDAGVDVRLVNTAAIPQYAGLKHGNDHTDARHLAHLLRLNLLPEGYIYPREQRAVRDLLRRRFLLVRQSVTLTNSLQSAWSRRTGHGIRTNDLRLLTAEAIETTFVDVHERLAVLSELKLLQCLHTQVDQMERWVLESIRYTPELKALRSVPGIGVVLGSTILLETGDISRFDSVGDYASYCRMVESTRLSNGKKKGSGNAKCGNRYLSWAWIEAANFAIRFSPEIRRWFDRKASKKPRPVAIKSVAHKLARAGYHLIKDGGHFDVKRAFG

SEQ ID NO: 65975 - protein, 339 aa, unidentified
MYPFYLGIDLHLKRTYMVLMNTKGDVIDKERISNQEIREYLQEKVPQETYAVLEATRNWPFMYDLLNEHVHKVDLVHAKGVRAIANAAVKTDQIDASTLAHLARMNYIPKAYAAPQEIRDLRQLLRHREWMVNQRSKAKNRIHAVLAAYNLVSPVTDLFGLAGREYLCEVMDKQLRPSARQVVEDHLAMIDHLTERIHALEKSISLNEKQDHIVNILKSIPGVGRLIALIILAEVGDINRFHSPKSLCSWAGLTPKVHSSDAVVQHGHITKEGSRYLRSAMVQAATTACRVSPKWYRVHEHMALRCGRRAARVAVARRLLTVIYFMWKKDQPYQENYGQ

SEQ ID NO: 65976 - protein, 319 aa, unidentified
MAQNDLVVAGIDVAKDKVDVCIRSLSLRRTFASTAEGRRELASWLRRQKVGKAVMEASGGYEREWAKALRDAKIEVRIVDPRRVRSFAQSAGRLAKNDTIDAEMIAWFAETFDEARGQAYDASREQLHQMVNARQALKDMQAKLESQGEHAVPAAVQRTHARILKTIAVELVKIDAAISAMIQATPRFTELAEIIESVPGIGRTTSAALIAAMPELGQANNKIVAALLGAAPYDDDSGRRRGERHIKGGRRRTRNVFYMACLGAATRHNPVLKAFYDRLVAKGKEKKVALIACMRKLICILNVMITRRQKWDANRYALS

SEQ ID NO: 65977 - protein, 341 aa, unidentified
MEIDVLGIDLAKHVFQLHGADRRGRAVHRAKVSRSALFETVRTLGPRLVVMEACSTAHHWARRFQTLGIQVQLISPQYVAPFVKTNKNDRNDAEAIVEAASRPAMRFVTVKSIEQQDIQAAHRMRAILLRQRTALINQMRGLLGERGLAIARSAEAFKRAMPQLLSTSADELTSFCQTLLTELLQHLKAIEERIRLIEASIQSFMRQSSLCKKIAAIPGIGPITATAIVAAVGDARQFRNGRHLAAWLGLVPRQYSSGGKPRLQGISRRGDTYLRTLLIHGARAVLRYVKAKTDPQSLWLQELIARRGYNCTAVALANKNARIVQALLSGDEPYQRSGAAA

SEQ ID NO: 65978 - protein, 403 aa, unidentified
MNNVAGIDVSKGKSMVSVLRPFGEVVAKPFSIGHTGSELKELADYLKSLDGETRVVMEHTGRYYEPVARFLHDEGVFVSAVNPKLIKDYGNNTLRKVKTDKADSRKIARYGIDNWAELRQHTPMDTIRMQLKTLNRQQSLYAKTKTMMKNNLIALLDQTYPGVNALFDSPVREDGSQKWVDFATAFWHVDCVRNMSLTAFAERYRKWCKRHGYNFSQSKAVEVHTGAQDLIAMLPKDALTKTMVRQAIDALNAISASMERLKAEMQALAAQLPEYPVVMAMHGVGDSLGPQLMAELGDVTRFTHRNAITAFAGVDPGADQSGTHEAKSTRVSKSGAPELRRALFLVMDCLLKTQPQDDPVYRFMDKKRAEGKPYLVYMTAGANKFLRIYYGRVKEYLASLEGN

SEQ ID NO: 65979 - protein, 358 aa, unidentified
MRVQRKELNFKGQNIYVGIDVHKKDWKVRIQSEELTYRTFSQPPSVTSLVQHLQRNFPGATYYSAYESGFSGFWAHRELVSQGVNNIVVHAADVPTTQKERAFKNDKRDCRKIARSLCNGELEALHVPSIKTQEDRSLVRLRLTFRKDLNRQKNRVKSMLNLYGKEIPERFLSSGHWSKAFIEWLKEVKFETDSAEQALKLLIVQVEQLRSGLLDVTRKIRSLAISEDYAADIRLMLRLPGVGLVTGIAFLTQLETIDRFPNTDSLSGYLGLVPNCHSSGDKDNTGEMTYRGNKWLRELLIEAAWSSARSDPALHLAYLNLCKRMKSNNAIIRIARKLLNRIYYVLKNKREYEKGIVQ

SEQ ID NO: 65980 - protein, 286 aa, unidentified
MRLEPCRRRQGRVSFRQRLDEPEAETAVLQRLRRWKTAGQFVVEAQGLNRWFVNACQASGLRIIVAHPATLNLKRSGKKTDRRDAYELARRLWLGDIEKHARTYYPADEEYGKRKVVRIRHKCVALRQHVINQLRGLFGAYRLPAPQTVLYTPTSIAKLERVEFPTPELTVCVQTLVAALKALQQAIASLTRQIPQCAEAPRVAALKEQLPSVGAQTALTLDAELGDLKRFGNAKQLCAYAGLVPRVADSADRQSHGPLTKSGNTEVRWIVGQWALRLLASKALST

SEQ ID NO: 65981 - protein, 392 aa, unidentified
MVVSVGIDVSKDKHDCFIVSSEGEVLADAFIIPNTMDGFHYLLQRIRHCTAPQDKIKVGLEATGHYSYNLLGFLLDNGLTTYVLNPLRTNLYRKSLSLRKTKTDRVDARTIASMLLSDAGLKPYTDTAYHNEELKSLTRYRFNKVKERAKLKSSIARLVCILFPELEKLVPSLHIASVYALLEAFPGAKQVANTHLTRLKALLETASNGHYKRDMALKIRNAAKNSIGSQMPAKSLELQHTIRLIRELDREIDEIEEQIQSIMDELHSPITTIPGLGFRMAAMILAEVGDFTRFDSPDKLLAYAGMSPSTYQSGQLKNCYPHMEKRGSRYLRYALYNATKYVCHWDPAFADYLAKKRAEGKHYNIAISHAAKKLVRLIFAMEKSRQPYRSAA

SEQ ID NO: 65982 - protein, 429 aa, unidentified
MQNESIPDARGPVFCGVDTHADSHWLYVLDWRGRKVLSRQFPADAAGYEALAGAIAAAGEPACIAMEGTSSYGAGLTRHLASLGMPVREALSPARTQRRRPGQGKCDEADAERAARAAMSGSRLGTPKSQDGWVDGVRCMLAARSGAVKARTSAINTARSLLTTAPEGLRSRFRGMGGPRLMEELPSVRAEGALGAALGALADLWAAARDAALDMERAIEASLEENCPALLAMYGCGPVSAAKLAVAAGDNPGRLRSEASFAAICGACPIPASSGKTVRHRLNRGGDRQANSALHEIARQRVMRDPETAEYAERARGRGKSDREVMRCLKRYVAREAYRALMRPHEIRRPEDASELVAARRAAKVSQVRAASILGTSEKYISMLERGQRELKPIRRAYEAWVEAGLPLDWDRQAFEAERKMDSKKHLAK

SEQ ID NO: 65983 - protein, 387 aa, unidentified
MAKQNDLSRCLVTLEQDATVIAVIEIGQSSWLVAGIVPGLERNPLKKLNPDQDALLQLLHRWRKEAVQAGCTIKRIAVAYEAGRDGFWLARWLRAREIEAYVIHPSSVPVSREHRRAKTDRLDTELLKRSFLGWLRGEPKHCSMAAIPTLDDEDAKRPGRERQSLVGQRTRIINRLKANLARLGIRDFRPNLARASSQLEALSTPEGVAVPANTLAELLRDMDHLRFVKQQIKEIETARAKRFAGAPNEERHAMVRLLARVVGVGIETADMLVQEVFSRNIRDRKALARYAGLTGAPDESGKKRRERGLAKAGNARVRRGMIELAWGHLVHQKASALTAWYRKRTSDARGGTRKTMIVALARKLLIALWRLVTTGETPAGLLLRPVA

SEQ ID NO: 65984 - protein, 369 aa, unidentified
MNKNILFIGLDVHKESIEIAIAEGSNHEVRRYGKIGGTQDAMRKTLRKLVSSGKTLHFCYEAGPCGYELYRYLIAEGHVCWVVAPSLIPKKAGDKVKTDKRDAMQLARLFRAGELTPVYVPDREDEAIRDLSRAREDAMLVQKSARQRLKSFLLRHDIRYQGKTSWTEAHLRWLADEVRCPSAAQQIVFQEYVNSVTEAQHRLQRLNEQIEIFVKQWRLYPAVEALMSMRGVKMIVAVTVVSELGDLSRFDNPKQLMSFLGLTPSEHSSGARRSQGRITKTGNGHVRRILIEAAWCYRYPAKVSPEIQQRQERLPLAIRDIAWRAQLRLTQRYQHMQRKGKPHNVTVVALARELAGFMWAIANEVKYPH

SEQ ID NO: 65985 - protein, 343 aa, unidentified
MQIITTIGLDIAKSVFQAHGIDAAGQVVIRRQLKRRFVLSFFEKLPPCLVGIEACASSHYWSRELQALGHTVRLMPPAYVKPYVKRQKNDSTDAEAICEAVTRPNMRFVPTKTVEQQSCLMLHRARHLFIRQQTAVINSIRAYLAEFGIVAPVGRRGVEQLLEVVADTADDRLPGVARACLAALGSQLRALKAQILEFDRRIIAWHRSSATSKRLDAIPGVGPALATALVASIADPKAFRSGRDFSAWVGLVPKQNSSGGKDRLGSISKQGDRYLRSLFTAGALAVIRYAKIHGTGHRPWLTGLLARRPTKVAAIALANKLARMAWAMMAKNERYQEPAALAA

SEQ ID NO: 65986 - protein, 419 aa, unidentified
MSFKILKNNCCGLDVHKTWIFACIGITDSHSRTEYKQARFSSFSKGLQELCDWLAKYDCTDVCMESTGKYWIPVFNILEKNNIWVTLSHPKYTKPQKGNKTDRKDAKWICDLYMCGMVKPSFIPPADICELRDLVRYRYKLTCMIIGEKNRAQNCLTVSNLKLDDVFSDVFGKSSRSITEQILQHPGETFDVAPFVDVRCKTPIEEIQAAVDGAISAEQAVKLRQCLNHIDELEMHKAEVEREIFRLSDKYEDALTLIRTVPGFDKNPITAIQVLSEIGGDMSVFPTAKNLVSWAGCCPRNDQSNRKIKSTRISRAGSYFKPVLVQVANALIKSRKHPEITNRYRRIKARRGHKKAVIAICRMLLTAIWHILTDLKPYTPEGFLEQRPVNESKVLTTSQALNLLKQRGYIIKDDGVPVS

SEQ ID NO: 65987 - protein, 407 aa, unidentified
MGITCGIDWSESHHDVALIDEHGTVVARTRIDTGATGFHILLALIAEHGGSVDDTPIALETDKNLLVVALAKAGFTVYPINPRAVARYRERYGQAGGKSDPGDAAVLAHILRTDRHLHRPLPAVSEEGRAVKALARQHQEAIWALHQTVSRLRSVLLEFYPQALQAFPNLKHKAALTVLADAPTPAAGQRLTRGRVVALLRRSGRGNHPALVEQILTDLHTPALGQPPRVEEAYGHTVRGLVAIVIAMGQAVDDLDTELAREFDQHPQAAILRSVPGLGPVLAARVLGEIGDDPARFDNPQGLRAYAGTAPVTIASGRLRYVKARKVRNKRFGDACHWWAYTMLTKSAGARAHYDRRRAAGDHHNAALRNLANKLLGRLWWCLVNNQPWDEHGAWPDHGHTENPTAA

SEQ ID NO: 65988 - protein, 417 aa, unidentified
MNHLDQYPAVIGIDWADKKHDLCLKLPGSDDLVFSTLTHKAEAIDDWANALRERFGGKPVAVCIESRKVPLIHALLKYEFLVLYPVNPQTLARYRRALRPSRAKDDPSDAQMLVDLVQRHPEQFHPWTPERPEVRALAALVEMRRRLVADKVRITNRLTAALKNYYPQVLEWFADRDTLLFCNFVERWPTLRAAQRARQSTLCTFFHEHNARYPKVIERRLEAIRRAIPLTEDAGVIAPNQLLVGALIHQLALLLGQVHRFDQEISSRFAALDDAPLFDALPGAGPQLAPRLLIAFGEDRTRFPTGETLSRYAGIAPVTERSGNKSWVHWRYSCPKFLRQTFIEWANETVRFSFWAKAFYQLQREKGKTHQMAIRALAFKWIRILHRCWLDRKPYDEAKYLMALKAKGSPLVAALAK

SEQ ID NO: 65989 - protein, 345 aa, unidentified
MKHFVGLDVSVQETSICVLDENGMIRREIKVPTHPEDLIEVLKNPAWQIIRIGLEAGPLSRWLFSGLAEASLPVICIETRHTKAFLKAQVNKSDRNDARGIAQMMRVNLFRPVHVKTLASQKHRVLLTARKLLKEKAIAIDNDIRGLLRNFRLKVGVVSAISFEQRILELIEGMLDLSEIISPLLEARKALREQYTRLHRKLLSIVRDDEVCRRLMTIPGVGPVVSLAFRATIDVPARFRNSKAVGPALGLTPVLNQSGESNRVGRISLCGDAMMRSLLYEAAQVLLTRVTKWSWLKAWAMNIAKRRGRQKAIVALARRLAVIMHRIWSDGTEFLWTKEIALAAI

SEQ ID NO: 65990 - protein, 393 aa, unidentified
MENNVYVGIDVAKNDHYACIVNADGTVAAKSFKVTNDQAGFATLVNYVANFTPESLLFGLESTSIYGENLIAFLYARGFRVAVINPMLTANKRKIQNRSSTKTDKIDAKIICDYLRTEEYRLLKPNEVEMLQIRGLCRFRMKLRKQKARLKTQLTGFVDQGFPELPTLFAIHGKAAYAMLSLHSSPEEIAGLNLTYLSNLLTKRSRGHFGKDTARNLKALAKSSVGARNAVLHIQIAQTISQVELLEFQLAELDAQIETAMDALDSVIKSVPGIGNINGAMILSEIGDISRFATDSQLCRFAGLNPVIRQSGKWSASRTRMSKQGSSYLRYALVNAAWNVCLNDATFRDYYDLKVAQGRGHYAALGHVAHKLIRVLFKLLKTDSLFDPLKLAA

SEQ ID NO: 65991 - protein, 417 aa, unidentified
MFKIFRKNCCGLDVHKTWIYACIGITDTNGRTEYKQARFSSFSKGLKELAEWLAKYSCLDVCMESSGKYWIPVFNILEKTCFVTLAHPKYTKPQKGNKTDVKDARWICDLFMCDMIKPSFIPSPEVRQLRDLIRYRFKLTNMLSGEKNRAQNCLTVSNLKLDDVFSDVFGKSSRSITNYMLDHPGERFDVAPFVDGRCKTPLEEIQSAVDGAISPEQAVKLRQCLAHIDELEAHRQEIEQEILLIAEPFSAVLDFLYTIPGLDKNSMTAIVILSEIGPDMSVFPSSKHLVSWAGCCPRNDQSAGKVKSTRISRAGCYLKPLLVQLASALIKSKKHPEFKERYHRIKTHRGHKKAIIAVCKMLLTAIWNILSKLEPYTPEGFLEHRPVKESKILTRSQALELFRKRGYTIIDDPVVTA

SEQ ID NO: 65992 - protein, 347 aa, unidentified
MNYIGVDCHISTLDFAVVDGKGTIKKKACVNTGVKEFMEFVRSIPAPRKIYIEEGELANWLLETSRRFGEQLIITDPRENKWISKAKQKNDPIDATKLAQLARGGYIKEIYHPVNDRRRFKELVFAYHDTVKSQTRIKNKIKACFRREGIICRGETVYSETYRAEWKEKLPKNNIVYLIIDELWIQLDQLQSTKEKIKINIRTCARKYPELKRFMMVPGVGLIHASTISAIIETPHRFANKKKVWMYAGIGLTERGSGDKVYSRHLTREFNRPLKNAIKKATEAAIHGNNNPFMRQYLRLTIEKGVPSHKAKLTVARSLLSALYIIWKKGEDYDPDIDKKRDKGSKK

SEQ ID NO: 65993 - protein, 392 aa, unidentified
MYIVGIDIGKNHHEASIVSPEGKQIGRSLRFATTHKGADSLMRFIFKNIGNSPCVFGMEATGHYWYPIYSFLKAKGYTIYVINPIQSDSLRKMYIRQTKNDSIDSFLIAEVIRFGQFGTTSMADENILAMRQLCRYRDSVISSRTEIKLRIGTIMEQIFPEYEKQFSSLWVSTSMGILEKYLTPENIENTPIDELFEIIKDKSHNRLTKAKAISIKEAAADTFGIKIAQDAFSFQLKQLIDRMNFLDKQIEALDCQILEYYEKFDCYLHTIPGIGMIAAATILAEIGDINRFKSSSALVAFAGIDPTVRQSGEFSSTHNHMSKRGSPYLRHAIFLAATTCSFHNSPLNAYYKKKREQGKHHLTATGAVARKLTTVIYAVLRDGKPYEPKSFC

SEQ ID NO: 65994 - protein, 377 aa, unidentified
MKVGKYFASPARCKPSSFGEDAAGYAQLFQLLGACEDCFVTLEATGHYWKNLFVSLVTKGYAVAVLNPLRTRRFAEEELERTKTDAIDALGIARFGAQKRPAPTPLPESATEDLKELVRLREHLLGDLGDRLRQLHRAVDLGFPEFTKHIRSLESQLAIAILSRFPTARAFQGLSPKKLAKLRYDDHHEVGQELANALVCTAKNSVGRHHSDIYQLDIRYTCEDVVALRKRLRELACDIERKLNSLELGKLLTTISGIGTQTAACLIAELGDPARFRDAGALASYVGVTPRLRQLGKRRFSGTPLIRLGNARLRKALWMPILTAVRFNPWLRAYYSRLVAAGKPRKVALVAAMRKLLACVWSIAKHRKPFRLMSSPV

SEQ ID NO: 65995 - protein, 423 aa, unidentified
MPYRIAAIDVHKKMLAVVTADIAVEGEYDFERRQFSTSPDQLRALTEWLVEKKIQEVVMESTAQYWRPVWQTLERYWKAECQKWEGAGPVSGTLHLAQAQSNRGPRGRKKDFVDAERLLKRLVAQELIMSFVPDAEQRLWRTVVRRKYQLTCDRVRLQNQLESLLEEAQLKLSSLVSDLLGASARRMLKALAEGETSPSVLAALADQRLRATQQQLCDALGASKELNQVYRRLLKMALEELQLIEQQMDQLDHEIANLLSHYQDAVQRLAEVPGLGVDSAQQIIAEVGAAAATFPSEKHLASWVGVCPGQEESAGISVSNRSPKGNRFMRRLLNQAANAAVKVKGSIFEIVFRRLLPRLGFKQAIWAIAHRLCRLIWKILHQSVRYDERGPAVSQKSRGARTAKMIRELRSLGYHVDLPANPA

SEQ ID NO: 65996 - protein, 402 aa, unidentified
MEYYTTIGIDVSDRTSKICLMAKSGAKRHILEEATVPTTRAGFTEYLKDKDPGSVLVTFETGTHSRWMNSLIGDGLGFKVHVANPAKLPTVTKSAAKNDRNDARELARLALADPELLHPVRLRREVCQAMLRVEYVRQDLIACRTKLTNTLRGFAKAMGGRIESCSPEKIVSLNRADWPEELRKLISLVEETLESINADVKKSDDEIKRRTCLSPFKEHMPRAQEVYGVGLHTAATFLAVIDCDVSRFKKARDVGPVVGFTPRQDQSGEMEKQLHATKAGNPLLRKLLVEAANVTMRTLSPDTDLKLKGERICAHGGKIAKGKARVAVARGIAVTMLALLKHPEREYVPLTENGAEELARLREQVARQGLARANHARKAEAAERPEPRPDRQGAKRKDFSNH

SEQ ID NO: 65997 - protein, 342 aa, unidentified
MVSAVTIGLDLGKSVFQVHGVDAGGAVVVQRRLTRGKLLGFFAKQPHCLVGMEACAAAHHWGRELQKLGHAVRLMPPNYVKPYVKRQKNDAADAEAICEAVTRPNMRFVEIKTCEQQGTLVLHRVRLMLMRQRVQLSNAIRGHMAEYGLVAPVGRNGLQRLIAILGNPDDERVPEVARTSLAPLVYQFGLVNGQVRENDRRVRASARSTELGCRLMEVPGVGPVLASAMVATVPDPTVFKSGRNLAAWIGLVPRQNSSGGKEKLGGITKQGDRYLRQLLVAGALAVIRYAQRHGTKRPWLVRLLARRSPKIAAVALANKMARMIWAMMITGQRYREPVVAAA

SEQ ID NO: 65998 - protein, 369 aa, unidentified
MHVCTVGVSARHPLDQWKVGMAMTIIVEPTRAVTGGVDTHLDVHVAAVLDEIGGLLATQSFAANQGGEHQLLGWLESFGPLTRVGVEGTGSYGASLARLLAASGVDVVEVDRPNRQVRRRQGKTDTLDAIEAARAAQSGRATGRAKSRDGNVEAIRALVVAKRSARTTKTKALNQIRHLGFTAPNPLRERLSGLTAARLAVEAASMRPRAGTDAVTFATKTSMRILGRRVLAIDAELVELDTLLSELVTATAPRLIELHGVGIHTAALLLVTAGDNPQRLRSEASWAHLCGVSPIQASSGKVTRHRLNRGGDRQANHALWRIALTRMSSDERTRVYVERRTADGKSKAEIMRLLKRYIAREVFAILPRA

SEQ ID NO: 65999 - protein, 316 aa, unidentified
MTTSRTRVTGIHVGVDVGKFTLDIYIHERGLYWQVENTPEGIRSALNRIGRYKVFRLVVEATGRYELELVSAAYDRGIPVVIAKPSAVRQYARATEQLAKTDKIDARIIAEYGAVVQPRIRQQESKNIRFLRDLLVRRRQLMEMRTKELNRQGIMGAGRLAASYRRHLKQLDQEVAWVDRQIEKSIDAESLWAERKALLSSVPGVGNVLIHTLLGDLPELGTLNNKQIAALSGLAPINRDSGRSKGKRRIQGGRGTVRVILYMATVSAIQCNPVIKSQYDQLVAKGKHKKVAIVACMRKMITILNAMVRDNCEWAY

SEQ ID NO: 66000 - protein, 350 aa, unidentified
MIAINKDIIATIGVDLGKNTFHICAMNDKGTILLRERLTRAALPKRLANIPPCRIGMEACAGSHHIGRQLTALGHDVRLMPAKYVKPFLKSHKNDYRDAEAIAEAVQRPTMRFVPFKSDEQLDLQALHRVRSRLVGQRTAVINQIRAFLLEHGVAVRQGPGALRLALPSILAQRTDVLSPRIIHLIEGLTGDWRRFDERIADVTREIEQLAKQDQYCKGLMGVPGVGPMTASAMVAAIGDGAVFSRGRDFAAWLGLVPKQISTGDRTILGGISRRGNRYLRTLFIQGARSVLQRSDGWEKKSFGRWLIAASKRLHKNVLAAALANKLARIAWAVLYNAREYDTALAPKAT

SEQ ID NO: 66001 - protein, 454 aa, unidentified
MAQRNAQVVPKPGKSRAAALTITHPNAAGIDIGSAFHFVAVPPDRDDQPVREFASFTVDLNAIADWLIACGVDTVAMESTGVYWIPLFELLESRGLIVFLVNARHVKNVSGRKSDVLDCQWLQQLMTYGLLRGAFRPVEQVCVLRALYRQRGMLLRSQGRHVQHMQKALTQMNIQLTNVLSDVVGESGQKILRAIVAGERDGQVLGAMKNVRVRASVQQIAKSLQGNWRAEHLFALKQALGAFDFVGTQLAECDAEIELQLQRLQVHDGKPAKGKKRGRARNAPKFDLRTQLFRMCGVDLTRIDGVDVTTALAVVSEVGTDMSRFPTIKHFTSWLGLCPGTKITGGKVMSGKTKRVVNRAAQSLRLAAAALRSSKSALGAYFRRMCSRMDKPKAVTAAAHKLARLIYTMLTKGQEYTDQGQDYYEERYRERVLRALSQRAAKLGMQMIPIAQPA

SEQ ID NO: 66002 - protein, 436 aa, unidentified
MTLINFVAANQKYYAFNLLSVFIMVFWSVQYLLQHLLVQTQVSHQLLQPLILILQLPQTPQFRHARPGKFFLPVNGMDYFLPLRLTVRNVLTRRITMNIVFLGIDLAKNVFQLCGLNQAGKPVYTKRTGRKELLQTLANIPACLIGIEASTGAFYWQREFEKLGHKVKVISPRYVRPFVRGQKNDGNDAQAIAVALMQPTMQFVPPKSPEQQDIQALHRARQRIVNHRTATVCQIRGLLLDRGIPIGSAVSRARRAIPLILEDAENGLSSRMRRTIAELYDLFNDLGRRIHFFDKEIETVFRQSEACPRIAKVKGIGPKTATAVVAAIGKGTEFKNGRHFAAWLGLVPRQHSSGDRQVLMNMTKKGDKHLRTLFIHGARAVVRVATNNNDGHMNQWVNQLKERRGFNKTTVAVANKNARIIWSMLRNDTGYQVVCN

SEQ ID NO: 66003 - protein, 378 aa, unidentified
MNRIIKIGMDVHTTNYTLCIFEPSFENKGTVHFVTQVKPNVKNIVRVIDTFKRKNENDELRITCGYEAGCLGYSLYRELKDKGIDCVILAPTTMKTEKGGRKIKNDYRDAKMIAECLAYGGYSAVHIPNELDNSVKEYIRMRDDIHENLKKIKQQIISLMTRNGKQFDGKSYWTKKHLDWIKATAFQEEFLNETLDEYMIEYHHLIDRVEALDKRIEEISTKEEYVEKVQQLQCLIGIKTHTALSLIVETSDFTRFTKGNVFAAYLGLIPGEDSSGEKENRLSITKAGNRHLRKLVVESAQGYTRGQIGFKSKDLKARQSKCSNEVIAYADRCNERLRRKYYRMIARGKSYNVAKVAVARELACFVWGIMTDRMELSK

SEQ ID NO: 66004 - protein, 413 aa, unidentified
MEVMYPRCAGLDVHKETVVACVRLAAGSDTSHMVRTFATTTAELIELSEWLEENGCTHVAMEATGVYWKPVWQVLVDSSCFELILANAAQVKNVPGRKTDVNDATWLAELLAHGLVRASFVPEPAIQELRGLLRTRKQLVREKASHVQRVQKTLEEANIKLESVLSDVMGRSGRAIIQALIDGETDPAKLAALAHWKVRASTETLSEALRGRIKRNHRFLLRLHLQQIQALDAGIAEIDREVDDGLACFRDAVDRLSTIPGISQLSAQVIVSEIGTDMSRFATDAHLRSWAGLCPRNDESAGKRRSTRLRKGAPWLKSMLVQCAWAAIRSKGTYLHAQYVRLRGRRGPKKAICAVAASILTAAYHMLKDGTFYNDLGPTHFDRRRPETQARRLIKRLAELGFSVELKSMATAS

SEQ ID NO: 66005 - protein, 345 aa, unidentified
MECYVGLDVSLKQTSICVVNEKGLVVREGVVDSVPEAIAGFVRSKAPGAVRVGLETGPTATWLWTELARLDLPVICIDARHAKAVLKMQVNKNDRNDAAGIARIMQTGWFKEVRVKDLDSHAVKALLASRALLVKIKRDLENQVRGLLKNLGLVVGHGTFNVFAVRAKELIADRPELTSAVSPLLTARTAIEQQIGELDRQVLKLSRQDAQARRFMTVPGIGPITALCFKATIDDPARFRRSRSVGAYIGLTTRRHASGELDWSGRISKRGDAMLRMYLFEAAGVLLTRVPKWSALKAWGTRLTKRNGLRKAKVAVARKLAVILHRMWVDGTEFNWSNNNKEVAA

SEQ ID NO: 66006 - protein, 341 aa, unidentified
MNIIRIGIDLAKNLFAVHGVDENGKAVLIKPKVPRDRLAALIVLLPPCLIGMEACSGAHYWARRFREHGHTVKLIAPKFVTPYRLSGKRGKNDAADAAAICEAVGRPNMRFVPVKEEHQQIILTLHRTRQGFVEERTATYNRMRGLMAEFGIVLPQKVACLRRTIGEHLEDLPGYANQCIGDLLSHADQLDKRIADFDKAIAKAAREDARSRRLMERPGIGPVTASALLASIGNGHDFKNGRQVAAWIGLVPGQYSSGGKTRLGRITKAGDGYLRSLLVMGARSILSGLGDKQDGFSRWARSLVERRGYWKAVVAIAAKNARLAWAVLHYGEDFRLNPGAV

SEQ ID NO: 66007 - protein, 410 aa, unidentified
MNAVAVVQPLRFVGIDLHKDYVMLGAVDAQQTIVLAPRRCRLFEVEQWRAKYLLATDAVVLEATSNAWTLYDQLVPHVCSVTVAHPLLVKLITAARVKTDSQDTLKLARLLAAGLIPAVWVPPLGVRELRGLVAHRRRMVNLRTQARNRLHAILHRHSLPPPDGGLFAQNQRAWWDSQPLSATERLRARQDLALLDYLAPQLAEIERELLRLSTTAPWAEQVPFLVQLPGVGVLTAMIFLAAIGEIERFPSAKQLVGYSGLGARVHASGQTFHTGGITKQGRRELRAALVEAAWMAVEHSEHWRTTFERLAARTGRQKAIVAIARKLLVVVWHVLSKQQVDRQADAEHVARKFLTWGTQERTATQQGLSRPAFVRQQLDRLGTAADLQTFVYNGQKVVLPPSALKPATVS

SEQ ID NO: 66008 - protein, 373 aa, unidentified
MTMTCRLTNVRDFPDVARHWSAKIEVCVHVQSQPRRGSLVSNVTTVGIDLAKNVFSLHGVDARGVVVLRKTVSRARLASFVAQLPASVIGMEACSGAHEWARRFAQHGHTVKLMAPKFVVPYRKSGKNDGNDAAAICEAVSRPSMRFVPVKSVEQQTMLTLHRVRLGFVEERTATINRIRGLLAEFGVVLPQRAMEVRRGAAASLEQLPAAAARALSDLLAHVRVLDERVNEYECELEQHARRDERAQRIQSLSGVGPISASAIVASVADAHEFKNGRQFAAWLGLTPKQYSTGGKTRLGHITAHGDPYLRTLLIMGARSMLQTALRRTDRLARWALGVRARRGYHRACIAVAAKHARIIWAMLAKNEVLQLS

SEQ ID NO: 66009 - protein, 344 aa, unidentified
MANSSKPEVQVFAGIDVSARELSVAVRCGTEDREAVTTFRNNAAGHKALLAYLLRGNGRARVCLEASGNYSLDLAVTLQAHRQVEVSVVNPRRARRFAESLGERSKTDPVDAGVLCEYAARMPWVAWQPPSSLALRLRAITRAIEALGVMHTQEKNREHALATSRALPVMVIQEMRRHQCYLKHRMERLRREALRLIARDRELDRRFRLMLTVPGIGETSALQILGELVVLSNTLDARQWVAFSGIDPSQFTSGTSVQKRPRISRGGSRHLRRALYMPALVALRREPHLRAFYQRLLSRGKARLQAVVAVMRKLLHALFAMFRSNQSYDGSKLCPIELTTKLAA

SEQ ID NO: 66010 - protein, 343 aa, unidentified
MEYFAGLDVSVKDTSVCIVDDTGRMVREVKVASEPEALLPVLANPLYRFKRIGLEAGPLSQWLFSALAEGGLPVICVETRHMRAALKAQINKTDRNDARGMAQMMRAGLYRPVHVKTLRSQKLRMLLTHRKLLQSKAIAIENDLRATLRNFGLKVGVVGTVKFEARIKELVEKVPDLVMLVEPLLIVRRTLREQIGILHGRLLAIVRDDDVCRRLMTVPGVGPVVALTYRATVDVPARFRNSKAVGAVFGLTPSRYQSGEIDRPGAISRCGDEMMRAMLYEAAHIMLVRLAKWSWLKAWAMKIARHRGMKKAIVALARRLAVIMHRIWVDGTEFRWTREVTAP

SEQ ID NO: 66011 - protein, 346 aa, unidentified
MRKTTTIGLDIAKRVFQVHGVDADGNIMVQKQLSRKDVLNWFAELPSCLVGIEACATSTYWAREIEKVGHVVKLIPPAYVKPYVRRQKNDRADAAAICEAVSRPSMRFVAIKTVEQQEIQVLHRARELLVGQRVQTVNALRAHLAEFGLVFPLGNIGVAQAVAAVEEQSSSLVPPFAVKVLLSLVKQFGGIKEEIRELEKQMQQWHRSNNESRRLAGIPGIGTVTATAIIGAIGNGKQFKSGREFSAWIGLVPKQNSSGGKERLGRISKRGNAQLRTLLVVGATAMLKGSRRDKVPGGTWFRQLLLRKTPRVATVALANKMARVAWVVLAKGETYRDFAVEAAVAA

SEQ ID NO: 66012 - protein, 341 aa, unidentified
MGEISMIGLDLAKNVFQVHGVDASGAVVLRRQLRRGQVVKFFAQQAPTLVGMEACAGAHHWARVIGEQGHQVRLMPPSYVKPYVKRNKNDGRDAEAICEAMSRPSMRFVAVKSVEQQARLVVHTTRALLVRQRTQAANALRAALNEIGLVAAQGVKGLRQLMQQLETPSADIPEVMRGTLLLLAQQWERLDAAERALEREIKKAALADQAARRLIEVPTVGPITASATVAKVTDVRVFRTARDFSAWVGLTGRDRGTGGKHRVGPISKQGDRMLRTLLINGASSYLRQQKAHGMKDPWVRAMLARRPYKVVMVALAARTARIIWALLITGERYRAPLPAAA

SEQ ID NO: 66013 - protein, 424 aa, unidentified
MRFIGLDVHLDFCEIAICEEGRVRSAGRVASSPEGLQILANSLGPEDQVALEATGNALAIARLLEPHVARVVVAATSELRAITEAKVKTDRHDARTLARLLAAGLLRGCWLPDETTRALRRRLARRAQLVRQRTRAKNEVHAVLMRNLKGRPPVTDAFGKRGRAWLAELELPGDERQTVDGCLRQIDFLDTEIAALERAIAEHALASPEIKRLMTVPGVSLMTAATFIATVGEIRRFHDPRKLVSYLGLDPKVRPSGSSPARHGRISKQGASQVRQMLAEAAFVAVSTAGPMRAFYERVRVRRGSQIAIIAVARKLAVLFWHLLTREDDYAFGRPSLTRKKLRALELRAGAERHPGRRGLATKNAYSQRAHRERERELSEQAELAYRRFVADWQASGPAKVGAGATPGRASRGPSKGQAARQTQ

SEQ ID NO: 66014 - protein, 422 aa, unidentified
MDSDASEVDYAAFIGLDWGSEKHSVAFQAAGSKEIETYELKQTPEELHGWLIGLRDRFGGRPVAVAIEQTKGAVIHALLGYDFVHVFRINPLSLSSYRKAFSPGGAKDDAPDADLLIEWVKLHRDRIKPWVPDDAETRALQKLVEFRRDVVNQRVAFTNQLTQALREYFPQALDWAADLDREMACDFLSKWPTLEKIKRAKPDTIRAFYRQHGCRSRERIEERLAAIHTARPLTEDPAVIATSVSMVQTTIRVLRPTIESIQRLDREIAQRFHAHPDAEIFDSLPGAGSALAPRLLAAMGSDRSRFESAAEVQKYSGIAPVTQRSGKHKWIHRRFACPKFLRQTFHEFAGQSIKLCTWARGYYDMKRSKGMGHHAAVRALAYKWIRIIFRCWQDRVPYSDEMYLQALRKKGSDVLNFVSKAA

SEQ ID NO: 66015 - protein, 387 aa, unidentified
MECAVHFLRDHFLLRKVPNKKTAEFTVVNEKGQHMKQIINSSKKVYCGIDFHKNTSTLCALSQDGKQIEPLVTVKTKMLVQYLSNKKEWVIGIEVTGGANDMAEKLKASGHEVILINSNQFRGIGIGGKKTDQRDAVALANALRLGFIPEVHLRTKRSREIKSLLTSREHLVQARVDAINHIRGTLREYGITINAGVESFYSDAFTKINELNNEQIKRALLLIFERVKILKSEEKQIESDLQVFTKDDEKIQKLQSIPGVGPITALMMVAVVDDITRFKNSKLFAAYLGLVPKVSASANMRMMGSITRSGSEMLRRYLIHGARAWMRYSPKEDVNRIWAERLKERRGMNKATVALAHRISRICFAVLRDNTTYKPRLRKEDVNENAA

SEQ ID NO: 66016 - protein, 317 aa, unidentified
MFKYTGIDISKQTFDCSITMENGKVETKKMSNNEKGFEKLKNLLSSEAHVVMEASGPYYCKLATYLHQHNIKVSVVNPLVIRRFCQMRMARTKTDKKDASMIREYGLTEKPSLWQPDEPSITKLKQLNASIELLDKSITASSNQLEAFREMPDTDEELIKTLKKVMEYNMKAKEKLETEMEKIASTFYANTYESLQTIPGIGPKSAAMLIAITGNFKKFENYKQLVAYVGLNPRIFESGTSVKGRGHISKMGTGRLRKLLYLCSWSAKRHNTYCKEMYERLKAKNKPERVIKVAIANKLLRQAFAVGKNESVFINNY

SEQ ID NO: 66017 - protein, 376 aa, unidentified
MREKLRVLGMDVHAETIAVAVAEPDGEVRSLGTIANREDSIRKFIKRLGPPEQLRACYEAGPTGFVLYWALTQLGVDCAVVAPSLVPKKPGDRVKTDRRDALKLARCHRNGDLTAVWVPDEASEALRDLVRQREAAKQDQLRARHRLTKLLLRTGQRPPLGLKAWTERYWRWLAQVHYTQPAQEVTLRDCLNEVEHMSARVKRLEEAILEVVKLAPQATQDLVRGLQALRGIAHISAVTIASELGNISSRFQKARNLMGYSGAFPGEDSSGDRIRRGGITKAGNAHIRRIVVESAWCYRHLPRVGAKLRKRQEGIPAEIIEIAWKAQNRLHKRYMKLSMAGKDQRKIMTAVARELLGFIWAIGVKVEQACQQPIAA

SEQ ID NO: 66018 - protein, 308 aa, unidentified
MLASFPNNASGHKALLSYLLQGTKHVRVCLESSGNYSLDLALALHAHPQVEVSLVNPRRARRFAESLGERSKTDPVDARVLCQYAARMPWVVWCPPTARALKLRAITRAIESLGVMNTQEKNREHALKASQALPSLVIREAQRHQRYLEHRIEQLRHEARRLIAKDAELERRFRLMLTVPGIAETSALQVLGELAVLPENLDARQWVAFSGLDPSQFTSGTSVQKRPRISRGGSAHLRRALYMPALVGLRREPHLRIFYERLVSRGKARLQAVVAVMRKLIHAMFAMFRTNQAYDGAKLCSAELVLSA

SEQ ID NO: 66019 - protein, 405 aa, unidentified
MSDIIALDVSKGHSYCVSYHDGNCTAEFNFTHNKIGFARLRATAKLANNPTFYFEATGVYSRPIERFCKDNKIPYALLNPLELHLKTENLRRIKTDIKDAHKIALSAYDNNYRLMYFQDEKYSNLKEKCRFYEQVEADRKYYKVKMKTALQQTFPEMEQLFTDKASVLALNVTRLYPHPDLVSDLSKTKLKNTMKKETGKRISDTVALNYAEKLLRFAKNSCPSAHVNDPQVDEVKYYATRVIENTIEKRKLIKEMIKLGKKLPEFEIISSMPCIGEMTAAMLIGEIGNFTRFDNSNQLNAYIGIDLMRYQSGRSQKKDHINKRGNPKARAVLYSAVRNMIKQQASAQNHIVDYYYKLKKQPVPKRDKVATVACMNKTLKCLFSMINNNTKYSYTYRSSKPKEML

SEQ ID NO: 66020 - protein, 403 aa, unidentified
MSEVFAGLDWASRLHAVCVIDERGVVRLQCEATHDAAGLVDLSRRLHAAGAERIAIERPSGLIVDALVEAGFTVVPIHPNIVKATRPRYRSHGGKSDASDAYLLADLLRTDGHRFKSLTEQCDDIRALRALVRGRDELVDARIQLANQLRDLLESFWPGAASVFADVDSPIALDFIQRYPTPGSARSLGPKRMAAFCAQHAYSGRRSPDELLERLHAAAQIALGDMETRVKGELALALARILARLVEQIRLITSRIEHEVAALDDGRILMSFPRAGRVCAAQILAELGSVRERFDSEEHLAAEAGVTPVTYASGKAKSVAFRWACNHRLRRAITCLADNSRHASAWAAATYANARARGCRHPHAIRILARAWLRVIWRAWLDRKPYDPASHGGLQGMLKTAEG

SEQ ID NO: 66021 - protein, 358 aa, unidentified
MNSKAFVPSDYDVFAGLDVDKKSISATFTNHQGFIRSLRLPYSAEHLVNHVRKHFPDQKVAFAYEAGPTGYGLYDGIVAQAYPCLIASPSMIPKAPGQRVKTNRLDSRGISENLRGGQLKSIHVPSSLYRELRHLTQLRDTFVSDMVAMKQRIKSLLLMEGLEFPPAPAGSQWSFMVKAKLRKLPCSSTVRFNLDQLLDSLAFNEKQIVKTTQQIRRLCQNDAELSQCIKYVVSVSGIGQIVASQLLARIGDWRELRNVRQLGAFLGLVPTENSTGERTDRGSITHSGDPRLRSKLIQAAWSAIRKDGELREFFRSVCQSHARPVASRVAIVAVARKLTVLISVVLMKQRPYVVRKKV

SEQ ID NO: 66022 - protein, 339 aa, unidentified
MSKVLKNFIGIDISKSYFDAALIKVMHPGQSIHHQFSQCKNGFKKMLDWLKQQDVVLNDQTLFCMEYTGIYNTGLVNFLVEQKAQLWVEMPLRIKRSCGFERGSDDKTSSVKIAAYAFRHQDQIQLWRPLDSSIEKIKNLLAQRDRIVNAITQLTVPVKEMLECGCAGEARQLEKLQKSPLKALQKSKEAIEQLILKVVEQDEHIHKKTKQVQSIKGIGKVTAVTLLAYTKGFTTFSTAKQLACYCGVVPFSKTSGSSVRFRPMVSHHANKKLKKLLHLCALSAIKNDKEIRAYFERKVGEGKNKMCVINAVRNKLIHRVFAVTRDGRYFEENYVRKCA

SEQ ID NO: 66023 - protein, 388 aa, unidentified
MSKPFDLSKSLAALDQDSTLIVVIEMSQSSWLVAARAPGLARDPLKKLAPEPEQLFKLIDRWREESRRAGRVVRRVCVAFEAGRDGFWLARLLRQHDIEAYVIHPTSIPVKRDHRRAKTDRLDTELLMRAFLGWLRGEADHCSMAAIQTLAEEDAKRPTRERESRVNARSRLVNRMKGALARLGIRGFNPKLRKAAEKLEELRTGAGEPLPPNTLAELRRDMAQLRFVADQIKQIEKAREARLEKAPREGAHPMVLMLASIKGVGLETAEMLVAEVLSRKLRDRRAVARYGGLTGSPDESGSRSREKGLARSGNARVRRGMIQLAWRFLMFQKESALAKWFEARTANGPRGVRKTMIVALARKLLIDLWRFVEDGTVPVGVELFDSRA

SEQ ID NO: 66024 - protein, 318 aa, unidentified
MAEITNPTNIGIDVSKDWLDIVVIPSGETWRTQNTEEKMGVLVEKLETLKPERIVIEATGGYERLVTTKLYLAKLPVCRVNPKRVRYFARSIGQLAKTDKLDAKVLARFGELVKPALTQLPSEQEQLLSALLTRREQLLAIFVAEKNRLGTAPSEVRSSLNEHVTWLKKQLKELDKKVDAFINDTPDLKEKDDFLQEVEGVGKRTSAKLIADVPELGACDRKQIAALIGTAPYSHDSGYKKGQRSISGGRPDVRSVLYMATLAATRFNPVIKVFYQRLLKAGKKKKVAIVACMRKLLTILNAILRDRKHWNSALSAVS

SEQ ID NO: 66025 - protein, 304 aa, unidentified
MKITTVGIDLAKHVFQVHGIDERGKTVLRKQLRRAQVAVFFGNLPPCLIGMEACASAHYWGRTLQHYGHSVRLMASQFVKPYVKTNKNDAADAEAICEAVGRPNMRFVPIKSIEQQAILSVHRVRQGFVKARTAQANQIRGLLGEFGLIIPQGICNVAKRVPELLEDAANELPVPFRQLIDRLTEHLKELDRQVKDFEKQIIAWHRSCELSRKLENIPGIGPLAASALVASIADANSFDNGRQVSAWLGLVPRQHSSGGKSTLLGMSKRGNPYLRTLADPRGTLCHPGSAAQNGEHKCLVGQSA

SEQ ID NO: 66026 - protein, 369 aa, unidentified
MGNRITWVGLDAHKRAISVAVLSPGQAAVQEWTVENKLAAVRRLVKTLVRGADGGEVRCCYEAGPCGYALQRQMESEGPVICEVIAPALIPRKPGERIKTDRRDARKLAELLRAGLLTEVQAPTPEQEAVRDLCRAREDAKEDLLRCRHRLGKLLLRRALVYGGKVWTQAHRQWLRTLTFEHASDQAVLADYRLAIEQLEERLKTLEQQLTTAAESEPFREPVGWLRCFRGIDTVTALTLVAELHGIERFQSPRELMAYVGLVPSEHSSAERTRRGGITKAGNCHARRVLIEASWHYRHPPRVAPALQRRRAGQPAAVIAIADKAQQRLYRRQRHLAARGKIPTKVVVAGARELTGFLWAALLHQRLAM

SEQ ID NO: 66027 - protein, 406 aa, unidentified
MSVYIGIDWSEKKHDVLFMNPAGAVLAKLVIDHTPDGFAKFDQQCRNLGFQPADCQIALETAHNLLIDFLWSHGYQQVYVVPPSQVRANRGRYSASQAHDDPRDALLLADILRTDRSRLQPWQPDGLLVRQLRAKISLHRHLLSQEQRLANRLRAVLLCYYPAAITVFSELTAQIALQFVCRYPTPAAAQALSYAEFTHFAQEHSYSHPKQLPTCYARLQVKQPTPAPDTVLVYQAEAVQLAELLLPIGEAKRANLRAVDKLFTQHPDAPIFTSLPGTGDYLAPGLLAKFGDHRERFPTAASVQALAGTCPVTEQSGKHRAVYFRTGCDHEFRHIAQQWALASLEQSPWAASYWQEVRPHCQSASHATRCLANRWLAVAWKLWHSHQLYDEAYHTQQRQARRQPRA

SEQ ID NO: 66028 - protein, 334 aa, unidentified
MALNTLAIDIGKHSFHLFGIDDDAVIVSRKVSRLKLVATVDRLDPKIIAMEACGSAHHWGRMFQEAGRMVRLINPYFVRPFVRGSKNDATDAQAIFEAAGRPTMHFVPVKSLECQDLQSLHRIRDRLVHNRTSLINHTRGLLAEYGIVLPQGAKRFTLQVRQAVVEAELSDLARELFEELLDQLGDLDRRIAHIDKHLIAICRDKAACRRLVGIPGIGPVVATALLAAVDDGRQFGSGRDLAAWIGLVPRQYTTGGKPRLGGIGRRANHYLRRQIVHGARAVMSQAGRRSDPRAEWMKAVAARRGFNRAVIAVANKMARAAWAILVRGEAYAAA

SEQ ID NO: 66029 - protein, 360 aa, unidentified
MKTYYIGADVHSNSTELAIEHNGQIVSRSSVPTSIPSIKEVITSLGGRIHLTFEEGPMAGWLYRNLKDTVEEIVVCDPRRNKLICSDGDADDKIDSAKLASLLRGRYLRAVYHSEDDSRAELKQWVNLYHDRVRDAVRMINKIRARCRMYGIAIPRNVIHDAFKRPQWLADMKNKALAKQLELLWIGYDATASQVRRARRQLCTLSKKYPIIKAWSQLPGIGIVRAVTIFAFLDTPWRFAHKNKLWKYCGVGLQRSASGTDKKGKPKPAKLQLTWAVNRLLKNMILGAVHTAINQNKNTFRDYYERMLYEGIIPSNARHTVARKMLTVMWGMWKANSRFDENKVDAVSKTAGSSSCAAGR

SEQ ID NO: 66030 - protein, 260 aa, unidentified
MNEITRIGMDTSKHIFQLHGVDGDEQPVLRRKLRRREMIAFFEKLAPTHVAIEACGASHHWARLLSGFGHEVQLIAPQLVKPYVKRGKNDAADAEALCEAMSRPTMRFVPVKTAEQQAALMLVGLRDRLVCNRTQLANAIRGYAAEFGLAGASGITHVPALLARIEADVALPSLARELFAMQAAEYAQVQAKLAVVEAKLLAWHRADERSRRLTGIPGIGPIGATLLTMKTPAPEAFRSGRQFAAWIGLTPKDHSTAGKA

SEQ ID NO: 66031 - protein, 315 aa, unidentified
MSDVPCFVGIDVAKAQLDIAVRPSGERWAVPNDASGVVTLVERLQALHPTLIVLEATGGLERVATAALATAGLPVVVVNPRQARDFARATGQLAKTDALDARALAHFADVIRPTPRPLPDAQTQELRALLGRRQQLIGMRTAEQNRLAGTSGRLTQDIEAHIAWLNARIAILDDDLETTLRASPLWRENDDLLQSVPGIGPVCARTLLLELPELGTLTRQQSAALVGVAPLNCDSGTLRGRRIIWGGRAHVRTVLYMGTLVATRFNPRIKAFYQRLLAAGKVKKVALTACMHKLLTILNAMLKHRKSWQAQEVQN

SEQ ID NO: 66032 - protein, 394 aa, unidentified
MKLIGIDIGKNKHFFCVMDQQTGEIISQPVSFSNDKEGFDFLVQKIKSYPKDSILIGMEDTGHYHFALLKYLLDLQYTVALINPKTTDFNRKMQGGITKNDKLDTINICDVLDTPERKKQYRITKVNSFDLYEQKQLTRHHHNLKEEENVYKNRLQKCIDIVFPEFNKLFNSKYGIVYMNILKMFGSAENIANTDIRTIRKCFEIDGRGNRISLTSERLKECARSSIGISSSAEVIQIKHLTAQIELIEEQLTEIDKKIEEFSIQNNSPILSIPGISHFSGTSILAELGDISNYSKPSQIIKFAGVAPLHYESSQFNAQHTAITKKGSKYLRKTLYQIILPVIRHNPVFNKYYQLKISQGKGHRCAQGHCVRKLLRIIYHLLKTNQQFDPQLLR

SEQ ID NO: 66033 - protein, 423 aa, unidentified
MKVLSHIRPEDVLPEIMKNPAQVLFIGIDISSKDHVVRAVLGNKNHLKDKFIFSSSYDDLIHFCEWVHQLKKRYNANHVFIGLEPTGQYWMPVYEFLRDNLPEYGIYEVATRAVCWYRRMNNSNSSKTDPIDAYTIAELVANGKCCRPIQHTALTRNLRETMRLYNEASKRLKQARQQLMAMVQKSFPEALSSVSGSQGIDGIFNILQDSIEPKEITKIPQEQWVELKVRSGLARKKLRNLYSLAQHSLGQINNDNFRHSLWKIQWTSWKNNLQRTNELKNILKNIIDLHEATPFLLTIDGVATITIAAFLAGVGDINQYSSEKQVEKVFGFDFFRWQSGNMDCQPHITKRGYAIGRSYLVLAGERFITYPEPKECYNRRPKKNKKGKPGMPGVIALTAKLIRIMFAVAKTKKPYNASLAFKS

SEQ ID NO: 66034 - protein, 366 aa, unidentified
MGKSSTAFIGMDVHKESIDIGIVDEKEARHYGRVGGDAASLDRVVRKLRSVHGRLVFVYEAGPCGFWIYRRLRAQGLECMVVSPSKTPRNAADRVKTDRRDSLKLARLARAGELEPVYVPDAKDEAVRDLVRAREDAVCMQRQARQRLAALLLRNEIRYAGKTAWTQAHRRWIARLKLPNPAQQVAFEEYVQAVHEGAEPLERLAKAIGAELEHWRWRPVVEALQALRGVSAIHAARIVAELGDLARFESARGLMGYLGLIPSEDSSGPRRRQGSITKAGNSSARRALVEAAHAYAYPARVSWVIARRHTGLPKSVCDIAWKAQLRLCTRFRRLRARGVLKNKAVVAVARELSGFVWAIAREVKPL

SEQ ID NO: 66035 - protein, 351 aa, unidentified
MLIIGCDFHTRFQQIAMMDTTTGELVERRLEHGTGEAERFYAALATPARVGIEATIATQWFEKMLTRYEHVLWFGDAAEIRAAMVRKQKTDTRDARHILDLLIQDRFPRIWVPSVAERDVRQLVRHRHKLVRFRTSVMNQLHALAMGQGLCLRKKLWTTVGRQKLESLTLDPWASRRRRELLELLDQLDPSIEELDRAVITEAESRPEAVCLMQQPGVGPVTALAFVLTIGPVSRFAKSKKLVSYLGLNPSEESSGGRQRLGAISKQGNTMLRCLLVEAAQTAARFDPELRRTYQRLKFRRGHSGVAKVAIARKLAVRLYWKLREAAQPNTAARMQGSPVGPVAGESLSSS

SEQ ID NO: 66036 - protein, 314 aa, unidentified
MGELFVGIDVSKAHLDYAFYEEQTSHRVDNDEAGIARLVAILKERQVALVVVEATGGLEMPVVGALLQAKVPAAIANPARVRSFAKGLGKLAKTDAIDSQILAHYAQSARPRVHELPDEQAQALSAVLVRRRQLIEMLTMERNRLLSVHKSQRTRLQAHIDWLQQELDQFNQDLDQLVRNTPSWKAKDDQLRSAPGVGPVLSTTLLAEVPELGQLNRKEIAAVVGVAPFNKDSGKMRGRRMIQGGREHVRTVLYMATLSAIRFNSVIQTFYQRLKQAGKPFKVAVVACMRKFLTILNAMIKNGTNWIEPQKITA

SEQ ID NO: 66037 - protein, 326 aa, unidentified
MTSLANSILGIDISKVKFDVALMLTGKIRKMHVFDNTPEGFKSLSNWLLKQGVTQVTACMEATGCYGDALATYLHEQGCVVSVVNPAQIRSFSGAQLKRAKTDKADAKLIAQFCQDMQPAQWAPPPLHVRELQALVQRLSALLQMERQEHNRMATAPAVVRPSIETVLGAIQAEIKSVEAMIRDHIDRHPGLKEQSTLLNSIPGIGQATIAKVLAFVGDVQRFDHAKTLAAFVGLNPTVHQSGSSVRGKPHLSKKGNAVIRCALYMPAIVSRRYNPVIKEFADRLKKAGKPNMVIIGAVMRKLVHIIYGVLKSGRPFDPAWHANHA

SEQ ID NO: 66038 - protein, 348 aa, unidentified
MLADQLDYVVGVDPHRDLHALAVVHVLSGAVVFEATVAANSEGYGQALKLVDAHALGRRAFAVEGTGSFGAGLTRFLSGRGERVLEVGRLRRERRSGGKTDALDAVRAARSVLAQDQPATPRAGGERQALQALVAAREGAVNAKCAGLGQLRDLLITTPEPLRSELRPLTQARLLRRLAATRPDTRRDPELRGSMLALRSIARRVLELTAEERALGREIEALTRKLAPQLLDQPGVGPHAAAQLVLSWSHQGRIRSEAAFARLAGAAPIPASTGQTVRYRLDRSGDRKLNRALHMILVTRKRLHPPTIAYIERRLQEGKTRREANRCLKRYLARNLYRLLEHGPPLTT

SEQ ID NO: 66039 - protein, 385 aa, unidentified
MQMILGQSRLAPIGLPFVGFRKLIKGEQSVTAPYDYHIGVDYHKSYSHLVVQDSAGKTLRSGRVKNDRQSLGSFLERYRENSHAVVEATRNWMVMYDWLDDICDDVVLAHPLKVKAIADAKIKTDKIDATVLAHLLRADLVPEAWAPGEKARELRIALRERMFYVRLRTMTKNRIVTVFDRYPEQTAQLKKLGDLFGKTGRQQLATIKVSDIDRIQIDRGLDFIGDIDGRIKQSEVTIRAMTKTNRNVKLLKTIPGIGEFFARLIDAEVDDISRFRNPKKLAAYAGLVPSTYSSGGKTYHGKIIKQGNKWLRWAFVEAVAPAIVTDPQLRSQYEHLKFRGTNKARVAIARKLLTIAFQILSEQRAYERRGSIGEESVSSTISRPS

SEQ ID NO: 66040 - protein, 436 aa, unidentified
MRLRPQQFEERLMSWLTLDVLLLARLLLKLAVGPVLERKGDITMFYVGLDIAAEKHDCCIMTEERQVLKQFVFRNDAEGFEFLKKTLTKLAPTEEIKIGLENTGVYGSNLVQFLRRNGYKTYTFNPLLINKSIQATTLRKTKTDKADAKFLAQYLTWDNSQPDHDVSYHISELKSLSRLRFSLVQQRSKCKTQAKGVLAQVFPELTQVFSDVFGTTARTILSLCPSAQRIAAYPVPQLADLLRTTSRGQLGLEKAELLHALAVHSVGNSSVALELQLQIYLEQITQLSFHICRCEAALRTILAQMDSPITTIPGIGTVLGATILGEIGDIFRFSSPAKLLSFAGLEPSITCSGKSVSAPGRMVKHGSHYLRWAFGQAARCIILRDQTFAAYASKKRAEGKHFNVVCSHVAKKLVRLVFALLKNHSSFIPNYSSLAA

SEQ ID NO: 66041 - protein, 374 aa, unidentified
MNESSTLFVGLDVHKDSIDIATAEASREGEIRHVGTIGGGLAALDKALRRLTSRGHPLHVVYEAGPCGYVIWRHLHAQGLHCEVVAPSSIARPSGDRVKTDRRDAMLLARLARSGDLSAVRVPDDADEAVRDLVRAREDAVREQRNARHRLKALLLRNGIAYAGRSSWTAAHLRWLSTLALAHAPQQIAFQEYLHSITECTARIARLEQALRDALPTWHLSAVVRALQAMRGVQLIAAMTLVAELQDFLRFDSPRQLMAYVGLVPSEHSSGPRRRQGSITKAGNSAARHMLVEIAWHYQHSPRVSPVIAARHEGLPACVTDIAWKAQLRLHAKFKRLLARRVLKNKAVVAVARELAGFVWAIGQEVQRSGSASH

SEQ ID NO: 66042 - protein, 341 aa, unidentified
MGDITTIGLDLAKNVFQVHAVDVAGSVVLRKQLRRGQVLAFFAELPPCLIGLEACATAHHWARELIALGHETRLMPPSYVKAYVKRNKHDVADAEAICEAVRRPSMRFVPLKTAEQQSALMMHRARDLLIRQRTMLVNALRGHLAEFGLVEAQGLHKVARLIAIVMDEMDARVPDIARQVLKVIVSQIEDIQTRIAGLETQVLAWHKSNPVSQRLATIPGIGLIIATAIAATVADPSTFRSGREFAAWLGLVPRQNSTGGKARLGGISKRGGSYLRRLLVNSAHTVLLCSKVAKTDPWLTSLLSRKPRLVVAVALANKTARMAWAIMSRPDSTDTQRSQHD

SEQ ID NO: 66043 - protein, 369 aa, unidentified
MEQITRGVVRGEAVRVGVDLAKRVIQVHAVDSAGHVLSGRALSRDKFLPWCAQLPAGCIVAMETSSSAHHWARKLAALGLDARIIAAQLVSPYRKQGASGKNDANDAAAICETASRPQMHFVPVKTIEQQSMLCVHRLREGMKAERTACINRTRGLLAEFGLVFAQSPAALQAVLGDVLEDASNEMNTLARLVVQRLQAQWREIDTHIAWCDERIAAHARDNDSVKKAATLLGIGPVGASAAVATVGEFKQFRSGAQFSAWMGIVPRQHSSGGKHSLGGITKRGDTYLRSLLIQGAKSAVMTAHKRSDPISQWLVALRERAGWQKAAVALANKNARILWAVMTKGEAFDARHVSTKPKAPTPTPAVISA

SEQ ID NO: 66044 - protein, 365 aa, unidentified
MTEITRAPVARVGVDLSKRVYQVHAVDRAGRVMLVKAMPPQRFFEWCAQLPAGCVVAMETCGGSHHVARRLQGLGLDVRLIAGHFVTPYRMAGKSGKNDANDAAAICEAASRPHMRFVPIKTAQQQGQLALHRLREGYKEERTALINRVRGLLAEFGLVFPKSPEALRRVLADVVEDAANELPGLARLAIQRTHEHWIDIELQIAWCDDRIAEHVRADERAKKAAALLGLGLVTASAIAASVGDFKQFANARQFGAWLGLVPSQNSTGGKASLGRITKRGDDYLRTLLIQGAKSAVMTAHKRSDRISQWLVQLKERTSWQKAVVALANKNARILWAVLTRDAAFDPDHVPPVPAARISPKLQPAG

SEQ ID NO: 66045 - protein, 435 aa, unidentified
MEEVSDEPLYRDRVCGIDIGKAGMAATIRVPSDKDPARRAAETRSFGTTRREVLALADWLRSWQVPAVVMEATGDYWKGPFYRLEAEGFECVLADAKQVRHLPGRPKHDPGDSRWLAACFERGAVTSCFVATGEFRIIRLHTRYRRDLTDERTREKQRAEKLLESAAIKLSSVVTDLHGVTGRDIMDHLIAGERNPKVLAQLARARARRKITELEQALEGAEFFTPGHAALLAAMLARIDRVNAEIARLSEVIETLLEPYEEQLQQAESMPGWGRRAAQDAVAETGTDMSRFRTGAHLASWAGRTPLDNSSGKRKGKAKSKKGNRYLGGLLGETAVAAGKTQTREGARYRRLARRRGKAKALVALGNTQLNVYHKLLSSPGMRYQDLGPDYYQRRAEVSRQVRHHVGKLGALGFDVTLCRIPEPEPAGPGTTQAA

SEQ ID NO: 66046 - protein, 319 aa, unidentified
MQDILETCCGLDVHKETVVACLLKGNRNNKPEAITRTFSTLIPSLEELKTWLEEENCRHVAMESTGVYWQSVYNVLESAFDGTIVLIVANARHMKNVPGKKTDMKDAEWIATLLRAGLLQGSFIPSQPIRRLRDLNRYRKSIVEEITSQKNRIEKHLQSCGFKLSTFLTDIFGVSGRAIIDHLARVGSISPEEVDPLVKKRARNKLNDIKQAVNGDMDRLQRDFLTILLKRLDESLEHLQLIEQKIDEELLKYEQQLKQLDGIPGINKIAAAAILAEIGIDMAQFKTAEHICSWAGLSPGNNESAGKKSPPVHSVGIPI

SEQ ID NO: 66047 - protein, 407 aa, unidentified
MQVLYPRCAGLDIHKDVIVACVRCVSAPEHHEVQSFCSTTKGLLALSDWLAVHGCSHVAMEATGVYWKPVWHVLEGSFELVLGNAAHIRNVPGRKTDVNDAMWIADLLAHGLIRSSFVPPATIQELRDLTRTRKQLTREIAQHCLRIQKVLEDANLKLGSVLADVLGGSGRAILKAIISGEDDPVLLAALAQGHARRKTSELREALRGRVTSHHRAMLALHLRLIDALEHALTDLDAAVGLALTPIRQHVQLLRTIPGVGDLTARVLVAEIGVDMTRFPDSAHLISWAGLCPRNDESAGKRRSTRVRKSGTWLKTALVTAAWAAVRTKNSYLFAQFNRIKARRGSKKAIIAVAASMLTAAWHMLRNGVEYADLGADYFTRHDMRSTVKRLLKRLTDLGYPVQPASSS

SEQ ID NO: 66048 - protein, 402 aa, unidentified
MQVDDIDVFIGIDVGKSEHWATALTTAGECLHDRPLPNDEARLREVYEHLGEHGRLLVVVDQPATIGALAVAVAQDMGITVGYLPGLSMRRIADLSPGSAKTDQRDAAVIASAARTMPHTLRSITSSDEDAAALSMLTGFDLDLARQVNQVSNRIRGLYTQIHPALEGVLGPWLEHDSVLEVIATWPTPAALRKAGRARIDAKLKANGCRRHAAWAQAIVEALSKQTVTVAGTDAAGVVLPHLARQLIALHTQRADIAAQVEALVEAHPLYPVLTSMPGVGVRTAAVFLAGTLGKTFTTGAHLASYAGLAPVTRRSGSSIHGEHVSHGGNKRLKRAMFLSAFASLRTDPVSRTYYERKRAQGKRHNQAILALAHRRILTLHAMIRNGTLYNPQPAQPLTTTA

SEQ ID NO: 66049 - protein, 459 aa, unidentified
MNRKQRREMMRKIQSEDLRLEVIHPDAAGIDIGNESHYAAVPPGRDSQPVRRFGCTTAELKAMAAWLRHCGICTVAMQSTGVYWVAVFDILEETGFEVFLVNARDTKNLPGRKSDVQESQWLMKLHPYGLLRNSFRPSREIRVMRTYWRQRNDLVQSASRHILRIQKALTQMNLQLANVLTDISGATGQAIIKAILAGERNPHKLAEFRDPRVKASEEQIAQSLEGNWQPDLLFLLKQEQDGYEFCQRQIAECDRQLAQYLQQREDRSQGAPLPEEKRKGRLKKKRGNKPRFDLRKGLFRMTGTDLTRIDGIDVMTATTVISEAGYDMSKWKTENHFVSWLRLCPDNRISGGKVIGKGRLPTNNPISIALKMAATTLRQSKTYLGAQFRRLRTRLGAPIAIKAMAAKLARLVYRMLRYGMKYVDQGAAFYEAQHRQVQIKQLKWKAAKLGFQIVQAPAA

SEQ ID NO: 66050 - protein, 417 aa, unidentified
MNPHPKSIPIQRYIGIDIHKHYLMIGGQNRHQEWTLRPRKVQVSRFRDWAEKNFQPGDAVVIETTGSVWDIYDIVSPLVNRTLVAHARKVRQIAEARVKTDKEDIKRLITLLIADIVPEVWVPPMYVRELRSLISFRWRLTKQITMSKNRLHSVVQRFNLDPPEGGLLTDKNRSWWERQTFSDLTGFEVERDLEIVKTLEGQKEAIDQKLAELSNTEPWSSDMVYLMQIPGIGLIFSMVILSAIGDIKRFSHPKKLVGYAGLGAGVHDSGKKHQGKSITKEGRKELRWALVEAAWRAVGSDPYWKAQLKRLEKRMHRNKAIVAIARRMLVSIWHILTKREPYRHFDEETIAYKMLIWSWAMDEKSRDGMTPQQFAKYGLLRLGVGKDLERIVRGGAPRRIAPAEEILALKPELAPPR

SEQ ID NO: 66051 - protein, 411 aa, unidentified
MDAIVERVSGVDVGQAMVVATVLVGGAHQRPTKATRRFRTVTRDLLAMREWFQEHGVTHVALESTGVYWQPVYALLEDAFEMIVGNAHHIKNVPGRKTDVKDSEWLANLARHGLIAKSFVPPKPVRQLRDLVRYRRKLVESRTAERNRLLKLLETANIKLASTMSDVFGVSGMLMLRALLEGRAQPSEMARLAKGQLRQKTEDLELALDGRLEDHHRFLLTLQLRRLDRVESDIAQLDARIDEALAPYQEQHERRLQQIPGVGRVQAAVLVAELGTDMRVFRSAKHAAAWAGVCPGNNESAGKHGGTPVRKGNMHLRSALVEAAIAASRKKGSYLRDKFYRLRARRGVKRAAMAIAHKILIAAYHILSDGAAYRDLGDAYLDGLEKRRTTRNLVRRLERLGYEVTIGPKVA

SEQ ID NO: 66052 - protein, 449 aa, unidentified
MSDIPTSSIQPEFVALIGIDWGDKKHAWALQAGDSTKIEKGEIEHTPEAIQQWAAELRRRFPSGRLAVALEQSRGPLVFALSKYEHLTLFPIHPSSAAEYRKVFRPSGAKSDGPDAVLHWDMLARHRDKLRPLNPDTPETRALQLLTEDRRQLVNERTRYSNRLTANLKSSYPQLLQWFDDLYAPVTLDFLEQWPTLEELQKAKPGVWSKFFQEHRCRDAKNQQLLAAIPTAVTATTDFAVVTAGRAGVCAAVRLLRNLNQAIQEYDRQIDQLAKGHPDFALFQSMPGAGKVLVPRLIAAFGTQRDRYQRAAEIQQYSGIAPVTEASGQQRWVHWRWSCPKFLRQTFHEWAAQSIAQCDWAAAYYRVQREDKNKSHHAAVRSLAYKWIRIAFRCWKDRQLYDGSKYELALKTRAKATPEPKQPSSFPLPLRWISCAGFQKLAEKNEENT

SEQ ID NO: 66053 - protein, 374 aa, unidentified
MLCGFSQGKRLKKGGVIMAYIGVDLHSDKFTAAFRDKMNKDTLKSYYLDKYEIDNFKKSLKKDDYIFIEASTPTFAFTDLLKDTVKKTIVIDPFKFRAIADSRKKTDKIDARQLARMGKYHVEGDKKFLPEVYVVEKRIRKLRSLFTTYRLLNKEITMIKNRIHSLFKQNLKPYSKTHIFNEIMAGLKPIDLDEEYKIQVEVLFDVLSKLEEEKAKIKEKILLTGEPFIKDIDILVSISGISVFVALGLISDYATVDRFQNVKQFSKYLRSTPKSEESNKKVRTGKTQKNGRKLSIELMLQSINHFRRESLFIDRFYWKLKKGKGGCKARIAVVRKMFVAIYFMLKEREYYRYMNKKLHDKKIREYKRFLVKNK

SEQ ID NO: 66054 - protein, 401 aa, unidentified
MPRQGFIGLDGAKDTFTAAFLIVDALSGQILHEQIATFSDDHPGWPRFLATWEPLHADFWWIGLEASGPYSALLEAHLLRLHRPNVSLHRLSPLQVRDFARARSRRRTQTDRLDACTIALFLRQPLTVQALPAPLQDHTPLRALAHLDPHRAQELTRTQNQVRQLLHFLFPELERAYARFPKALRALLRHFPSAHAIAQAPLQDLHALLPPRHRLDLEALQALARASFGLHDPIRAQTLPLLLDRWAFLETLRARCFAALQQAVRPHHPQAWRLLRTIPGIGPRRAALFLALTGPLDRFPDRKALIADAGLDVTLHPSGRFAGRCRLSKRGDPLLRHVLYLIAAALKRYTRPFAQAFAYYRHPGRAVRETLVILSRKALGMLDPLLRHQVPFQDLPQPAPV

SEQ ID NO: 66055 - protein, 366 aa, unidentified
MKKYTVFHSVTAAPAVAKSKVMRSGSLLKIGLDIHREKFVAVAQYDHATARPPQHFAPAEFVPWVEARLREGFQVHVVHEGCGFGYGLYRALLEAGASCYVIAPQKLDEANTRVKTDGRDSHALCLRLDRYLAGNKNSLAVIRVPSEEEERARHWGRQREQLVHHRQKLEAQGRSLLIDHGLPAPARWWRPQSWSRLDKLLPVWILSHLELYRPMLLALDQQIRTLTAELEKAAPVALPKGMGALSTVVISREICDWQRFNNRRQVSSYTGLCPGEYSSGAKRVGRSITRHGNSRLLAALVELAWRLVRYQPGYHAVQKRLTVLAKGARATRAHRKKAIVAVARQLAVDLWRLHTGRCTPAVLGFK

SEQ ID NO: 66056 - protein, 397 aa, unidentified
MYIVGIDIAKRKHEAAVIDGEGAVIIKPFSFTNNCSGYNRLLAMLAKAKLPLDEVSFAMEATGHYWLALFTRLQKEGFRVQVINPVQTNSIRSFYIRQAKTDPRDALLIAEVIRFGHFSESTLHPENIYELRELCRGRHAIVSMQADVKRKVVALLDQVFPEYETAFANMFGDTSMAILQTCPTPKELSEMRLEELCHLIEVSSHKRFRMAKAQELQALARNSFGFAMAGDVFSTMIRLYAKHLDFLKQQVREMDRKIAEIMETLDTPITTITGIGLTLGAYILSEIGDISRFSSAAKLAAYAGIDPTMRQSGEYNGVRNRMSKRGSPYLRHAIWLAASSAVLHDPALKLYFQKKRDEGKPYMASVGHACRKMVSIIYAVMRDNKAYKPCIPNEISA

SEQ ID NO: 66057 - protein, 318 aa, unidentified
MKTIKQYVGVDISKDYFDVALPREISYQHHQLANTPKGFKELIRLLPSDALVVMEASGYYYLQLAFFLHKEGIQVSVVNPLVIRRFCQMRMVRAKTDKKDAQMIAEYGKAEQPDTWEPPKAYMLELKQMQAVTNQLKKQQSALQRQKEALECCPVRSQAALRSIDASLQTNSNEQEQLEKEMLELIQQHHEQIHQNLQTIPGIGKKAALLLIALSNGFTKFKTAKQLCSYLGVCPRIYESGKSVRGKAKITKMGASSIRAILYLCSWSAVKYNKACKELYERLVEKGKPKMVALIAVVNKLVRQAFAIATKGIIYKEI

SEQ ID NO: 66058 - protein, 368 aa, unidentified
MGKFITYVGLDVHKKTIAVAFADEGDSEVRSYGVIDSDLSSLDKIVRKLVSRGVEPRFVYEAGPCGYGIYRHLKEQNIECMVAAPSLIPKKSGDRIKNDRRDAKKLARLYRSGELTAVHVPKSEDEAMRDLTRAREDSKTAERKARQQLNAFLLRHGLIYSGKSNWSLAHWRWISDIKMEHEAQQFTLQEYVDTARSCSERVERIIEKIRLLAGQWRFSPVVEAIQALRGVSLVVAATVVAEIGDLRRFDNPRKLMAYLGLIPSEHSTGEHTKRGGITKTGNGHARRMLTEAAWSYRMPARVSRRLRDRQQNLPEKVWKIAWKAQVRLCKRYQRLIARGKLSKVAITAIARELAAFMWAIFRTVEVGA

SEQ ID NO: 66059 - protein, 430 aa, unidentified
MYNKNYISVGIDVGSAFSFMTIVAPDGSVIQKPFKITHNKPDSLEKAVSAIKKAEELHSLESRTFLESTGIYHFPLFCYLVDCGFHVSIINPIITHSANNTSIRKVKNDKVDSIGIAKLGLSGDIPVSQFPAKLVLEIRSLTRKYYDLTDERSAHINKLKGDLHTVFPQYLDIFCDVTGKTSTMILRQYGTPDKILRGHKKTMIEKISKASRKGLSKAAERYEKLCAAATAAKTFGCQIDSIYFNISLTLDLIEKLDSALDSILQRIHQLVTFNKSEKFIQQIKWLDTIKGVGFLTAVTIMCEIGDFSAFRNPKQLFAYFGLDPEVNQSGKFVGAEMHMTKRGSRIARRAVFAVALASIRTKRNGEGINPYLREYYEKKSGQKPKMVALGAVMHKVCNIIFAVLRDEKEFELRSPEEHCRQYQRPALQAA

SEQ ID NO: 66060 - protein, 361 aa, unidentified
MNATTVAVDLAKSVFQLAVADEHWRVVETQRLSRTQFERWFSNRDVSLVIMEACGSAHHWARWLGSLGIEVRLLPAQYIRAYVKRNKTDAADAAALLEAARASDIRPVRVKSVEQQALQGMHRIRSLWMGTRTSRINALRGFCREFGIAIPVGARTGIEAISRVLADPSTAVPDLIRGTAKLLVEEIRLLEARIAQLERELTAIAKLSPACTTLLSIPGIGLLTATALVAATSGDVSHFKDARHFASWFGLTPKEYSSGSTRYLGRISKRGDRYLRMLLTHGARSVLRAAKVADAAGREVCGVRRWALQVQSRTNHNKAACALANKLARICYATLRDKEPFGEQTVRLGKKISRESFAMPA

SEQ ID NO: 66061 - protein, 368 aa, unidentified
MTSILYIGMDVHTTNYTLCSYTLETQQPFGRMQVEPDYKQILKYIGKMKEAWGDDIEIVCGYEAGCLGYSLYRSLTEQGVNCVILAPSTMSSAPNERKTDMRDAEKIAKCLAYGTYSPVYVPTQGDEAVKEYIRMRDAHKANLKRIKQQIIALCHRYGKQYTKQSHWTRSHLAWLKAQRFNEPILQETFEEYLIQYHQAVEKLERFDKRILELSGKEEYAEKVHKLVCFNGVREHTALSAIVEIGDFSRFPSADHFAAYLGLVPGEHSSSTNIRRTGITKKGNSHLRTLLTESAQCYSRGQIGRKSKALKARQEGNEPAVIAYADKANERLKRKFKRINFSRPHNVAATAVARELACFIWGMMTGHIN

SEQ ID NO: 66062 - protein, 328 aa, unidentified
MKNYQEVIGIDVSKNKLDAYGHNRGSHREFSNDVAGYKALLKWAKVKGQRVFFCFENTGHYSLKLAMYLASKKQVYVQENPVVIKRSSGVIREKNDVIDAIMIARYGWLHREELSPSELKDNELLEVGRLLALRDQLVRNRTGLKSTLSELKKLLSSSSTDTCCKTLVSSITHLTSQINKIEKQLKTLIKTSEALSQNYKLITSLKGIGLVVGAQLLYHTNNFKRFDSWRQFSSYCGTAPFGHSSGSSIHKKRKCHPMGDRQMKSLLSMAACTAIQYDSELRHYYKKKREEGKLKMIALNNVRNKLLSRVFAVVKRGTPYVELHKFAA

SEQ ID NO: 66063 - protein, 393 aa, unidentified
MDVAYTRACGIDVHQKSVSVSLLIGDFDTNRPKRTNCKYDTTTNSLKELACWLDDNDAQVATMESTSQYWRPVWQILSRYSHVNLKLVNPQKIKRMPGRKTDKKDAEWLVDLTRIGMIEPSYIPELSTIELRESTRLRKNLIQQLTVIKNEIHNILQRSNIKLTSYLSDIFGVTGMKLMNLLLNGEAINVDTITPLMHGRMKATAEEIVEALNGRLSKNDRYLIDIQLNLYDALVRSISEIEAHIQEQTNSFEELRIRLMAIPGVSDHTAAIIMAEIGTNVDAFENEQAIAAWAGLCPGSYESGGKKYSSKTNRGNKYIKAALAQSAMTARLRRASDLANFYYRLAGRIGAVKAVIALAHKLLRIIYVMIRDGVEYDECKLKSRPFPLEQPTF

SEQ ID NO: 66064 - protein, 538 aa, unidentified
MVAALSWKGERPDPAGEIVKFRRPGRATLNSTRKVSMKSKPQDKTNKTTNHPTQRHWHEMNRKQRREMTRQIQSEDLSLEVVHPDAAGIDIGNESHYVAVPPSRDSQPVQRFGCTTAELKVMAAWLRQCRIRTVAMQSTGVYWIAVFDILEEAGLEVYLVNARDTKNLPGRKSDVQESQWLMKLHTYGLLRNSFRPSQEIRTMRTYWRQRNDLVQSAGRHIQRMQKALTQMNIQLANVLSDISGVTGQAIIKAILAGERNPHKLAEFRDPRVKASEEQIAQSLEGNWQQDLLFVLKQEQDGYEFCQKQMAECDRQLNQYLEHGEDRSHGASLPEEKRKGRLKKKKGNAPQFNLREGLFRMTGTDLTLIDSIDVMTATTVISETGYDMSKWETENHFVSWLRLCSDNRISGEKIIGKGRLPTNNRATIALKMAASNLTTERYLSRSAVSSIPNQARCPLRDQGHGRQAGPLGLPHAALRDEIRGPRSSLLRASTPRDTDQAPQGQSRKARIPSHPNTGGGLTVSGEECRFESYRADQRK

SEQ ID NO: 66065 - protein, 368 aa, unidentified
MNEPITYVGIDAHARELHLAMLRWDRAEPSEWTLPNEPRAIERLRRRLEREAPGPIECCYEAGPTGYALQRRLTAGRVHCRVIAPSLIPERVGDRIKTDRRDAHKLAQLLRADLLTAIQPPSEEAEAARDVIRARDDARIDLMRSRHRLSKLLLRRGHLYPRTPWTDAYRTWLAHLEWPHAAERHVVRDYQLAIAHLEARLAELDRAIADLALTPPYHAAVAALRCFRGIDTLIAMTLLAELYDLRRFPHPRALMAFVGLVPSEQSTGERQKRGGLTRTGNTLARRMLIQAAWQYHHHPRLGEKLRMRRAHQPAEVLAIATKAEQRLCHRYRRLCARQKPKSLVIAAIARELVGFIWATLQLPVTHRA

SEQ ID NO: 66066 - protein, 448 aa, unidentified
MSKGKTKNEKVKRISQLAVINPTAAGIDVSDTEMMVAYPINSEQLEIRVFGCFTRDLHSIAKCLKENGTTTIAMESTGVYWVALFLLLQEYGFEVYLVNAKHVKNVTGRKDDESDAEWIQKLHSCGLLSASFQPDNMERTLRSMVRHRKNLVQTSSTYINRMQKAMELMNIKLHTIISDIDGKTGLLIIEAILTGERDPEVLADLRDKRIKASREDIIKSLEGHWTTEHLFELRQCYQLYCTHRQMIEECEREIEKQLVEQIALKNEGIIPDIPKVKRKVSGKHKAPFNLTAYLKEILGVDVTEVFGISELSALTILSEVGRDMTKWKTEHHFTSWLGLTPNTKISGGKVISSRIKKKKHHAGQAFRIAANSLYNSKSPLGDYYRRIRAKAGAAKAVVATARKLAIIYYKMVANKEAFNPKALQDYHQKYKEKKINQLKKKLALLEAA

SEQ ID NO: 66067 - protein, 428 aa, unidentified
MEITRNARKINLNHIVDVSVDVHRDNLCFFFEIDGTEFSDVCRNRTCVIRKRLLAYADIAKEHGRKGLRVICEPTGQYQNKLMRMARRLGFLTCYVNAESVAKFRVVETNDSNKTDKKDPRVIGTLGKLNKVIRFRMIGEQYLMLRKLHKIYDECDVAITSFRCRIHKLLVELFCDYSFKKDFLYSRSGRALVQEYGCNPYRIVSAGWDSFCQNMKKEASGIRVTTLERLWKDAENSCLNDMPPGYVEVLEGYLGDLLDDYYRMKERKEKITKEMIAILEKLRKDDPLIPPPTPNVISEKNLARLLAETGPLSDFENWRKLMRYAGLNLRTRQSGTFQGQHKISKKGRRLLRKVLQCIALPLVKKGRLYGDYYHKKKEVNKMPGNKAMTVIARHMLRKIYGWYRSDQAFDEERFFVCRSRYRKLKKAA

SEQ ID NO: 66068 - protein, 388 aa, unidentified
MNAVLPRVAGQTAIQTQLGAIFVSLELSRSSWLVTSLSPGGGEKMSKHSVRAGNVAGLQERFSSLRQKARARTGQDFPIIAIQEAGLDGFWVHRALIDEGIESWVVDAASIATSRRRRRAKTDKIDGEALVRALLAYKRGEPRVCAMVRAPAPEEEDRRRISRERKTLAGERTGHVNRIKGLLYSQGVSGYEPLRRDRRARLDELRTGDGRPLPQYLKAQIGRELDRLELLLQQIKAVEADRDALVTPGQADNPISTQVATLMGLRGIGPEFANVLHSEGLFRHFDNRRQVAAYSGLAPTPWQSGSVDREQGVSKSGNPRLRTTMVELAWLWTRHQPESALSKWFRERTKTDSRRKATIVALARKLLVALWKYVTAGVVIEGAVMKAG

SEQ ID NO: 66069 - protein, 455 aa, unidentified
MKRKRTYSSVDVEKVDMLPIVQLLTVGCIVAVDVAKTKFVAALATAAGEVLRILRFEHPRQTLAFLRVIEGLQAAKLAPRVVMEPTGTYGDALRQQCHARGVQVEMMSPKHTHDLAEVLDGVPSMHDPKAAVALAQLAKLRPGKVWTPDTTDKRELRALVDRRGPMLQTQALYFGHLEGMLARHWPELDGLVKVHVQRSWMALLQRYPGPHLVAAASKEAAATLRTASFGQLAAATIESVIDSARTTLGVPMVGEEEQRLRFLVERIEYETRAIDAVDVEIAKHVDRDPVMSRLAVVVGPACAAALFSYLGSLAAYDRACALEKAVGINLKVKSSGEKDGKVHITKRGPAQVRRLLYLAVLRLIQSDPIVAAWYRARSSYGDKNKQRAVVAVMRKLTHALWHVARGAQFDAAKLFDVRRLKLSETTPASSATSSMQAPSPPFKRRQQGGEPQARA

SEQ ID NO: 66070 - protein, 480 aa, unidentified
MAAPKRPTTLIVAPLLAQESLYVGIDIGKQGHVAGFVSITLLARHERFEGCPVLTFANAREGFRQLVDRIRTYVPLEQCVVLMDKTGHDHMALHDDLLDLDVSVHVMHVQARPRGLLKTDKRDALGLANHLYNQLEKGIQVSDKTQLVRRALPATEAATLLRSLVRHRYELVHESTRRTNKLTALCDQLFPAYTQVFKDPHGACALAIRASFPTPHAVATAHVTALTAVRVGSRPSNAGLAALQRLAAQSIGVTNAARQRSLVFEQAQLIRALRLIREHLDQLDGEIAQIVARSREGHILTSIPSIGAVHAAAIIAAIGNIDNAPTAATLKSYVGWAPHVTQTGVTADRARLSRAGTRTMKEMMFLIVARAIRHGGEFACLYERLVPVTCAYDERTRSYKGKMKVVGRVAGQMMTLIYALLKTDADRLARSPAGGEEPAPMLYDPVVHHAHCHGTYRSSKPRPTPSTVIALPKGSPLSPA

SEQ ID NO: 66071 - protein, 342 aa, unidentified
MEHYAGIDVSLEYSSVCVVDGAGKIVREGKVASEPEALIGWFGSLGQSLARIGLEAGPLSQWLYAGMRQAGLAMELLETRHVRTALATMPVKSDRNDARGIAQLMRLGWFRPVHCKSIGAQEMRAVLTARKLVQSKLLDVENSVRGILRGFGLKVGKTTPRSFAGRVEELVSNHASLKMIAAALLGVRAVLLREFKALEKQVRAMARSDARARLLMSVPAVGPIVALTYASAIDDPARFKSSKRLGAHFGLTPKKYQSGETDYSGRISKIGDATVRAALYEAAHIMLIKPIKGCSQLKSWAMRIARRSGMKKAKVALARKLAVILHRMLANATPFNAAAAAA

SEQ ID NO: 66072 - protein, 405 aa, unidentified
MDAAIPSRVAGLDWASRLHAVCVLDPDGQVRARFEVPHTGSELGGLTRRLVRLGVGQVAIERPDGPVVEALLAAGLEVVVIPGRQVKALRGRYGTAGNKDDRFDAYVLADALRTDGHRLAPLVPDAPETTALRVVSRARKSLVATRVALANELRANLEISFPGAATLFSDVDRPIALAFLRRFPSVTQAAWLTEARLAAFLRRMGYPGRKAAAELLRRLADAPAGLTGPEGEARATVTLGLVAALDTVRVQIDEFEGEVVERLGTHPDAAIFTALPRSGRVRAAALLAEIGDCRARFPDAESLTSLAGAAPSTRQSGKHKKVVFRFACDKKLRAAVMDFAGDSRHDNPWAAHLYQQARARGHRHAHAVRILARAWLRVIWRCWQDHTPYDPARHGSYQRLTAQQA

SEQ ID NO: 66073 - protein, 400 aa, unidentified
MRAVFGIDVSKASSEVAILVNGEKVHGYTMSNDALGFAQLLGDLRTVHKPEIIFEATGVYSRRLQAFLDEHGYAYTRLNPLEAKKQLDSLRVRKTDQIDAEKLAQSQFVLNRKPTYVQEEVYQNLRALSRFYQNLTEDIVRAKNRLHKVLQVTFPELETILSTPSGEQYWNLVIAFPCKDFVLDLSKNELSESIRQSTSKRISDKRVAYLAEKLIALANQSYCAVKKTSPMLEEVRYYGRELLRLSEQRQTVLDQMVELAQPLPEYDILLSIPGIAETTATSIIGELGDIRRFQSANQINAFIGIDLRHYESGNFLAKEHITKRGNPYARKILFKCIHNIASASHTKPCHIADFYEKRKRQSQTTSTKPHTIASIHRLIRTMYYLITHNKLYDYTSTQNR

SEQ ID NO: 66074 - protein, 340 aa, unidentified
MVEITRIAVDTSKSVFTVHAVDAQARPVLRRNVRRQDLVTFFAKLAPAEVVMEACGGSHHWGRVLVGLGHRVRLIPAQYVKPFVKRGKNDRNDAEAICEAAGRPGMRDVGIKSAESQGRAMLLSVRELLVRQRTQMVNALRGHAAEMGLVAAQGDKGLAALRAEIAGDAALPKPAAEALQLLGSEVDRIEARLAEADKRLMAQLKADAAGRRLADIPGVGPMIALSFVLRVEATQFASGRHFAAWLGLVPRENSTGGKQRLGGISRAGNERLRQLLVLGATSVIRHAKPGRSGASAWLLALLERKPRKLAAVALANKMARVIWAMLTSGETYRRQTPVAA

SEQ ID NO: 66075 - protein, 418 aa, unidentified
MTMTEERRWYAGVDWASESHHVFLTDDRGAKVGERIFRHSGEGLAEMAAWLLSASGAAAPGRINVAIEVPHGPVVETLLERGFSVHAINPKQMDRFRDRFTLAGAKDDSRDAEVMASALRTDPRCFRELAIADPVVIELREWSRIAEDLGAERNRLTNRMREQLWRYFPAMLEFESDLGAEWLLDLWEAAPTPAKAARIRETTIANILKRHRIRRFDAAQLLDALRKPPVQVAAGTTEAASAHIATLVARIRLVNRQLKDAHQRLDVLTARLIPTAEIEPGQRKQHDVEILASLPGVGRTVLATLLAEAFDALQRRDYAALRSLTGVAPVTKRSGKSCIVIRRQACHDRLGNAMYHWARVAVQHDTKSRAKYAALRSRGHSHGRALRSVADRLLNVACAMLKTGTTFNPALAVQKPSC

SEQ ID NO: 66076 - protein, 351 aa, unidentified
MNIIGCDFHTRFQQIAMLDPTTGEITEHRLEHENGVAEKFYATLPHPARVGIEATINAQWFERMLRRHQHELWIGDAAEIRASRVRKQKTDSRDARHILDLLLTNRFPRIWVPSPSERDVRQLLRHRHKLVGYRTSVMNQLHGLAMSQGLCRKTKLWSRIGRKELEALTLDPWASRRRQELLQLLDQLNPWIEDLDQAVQKEAECRPEVLHLMKQPGVGPVTALAFILTIGPVSRFQRSKQVVSYLGLNPSEESSGGKQRLGSISKQGNSMMRYLLVQAAQTTSQFDPELRRDYQRLKFRRGHSAVAKVALARKLATRLYWKLREAAQPLPPARMQGSPSLPMVEEIPSIS

SEQ ID NO: 66077 - protein, 368 aa, unidentified
MRMSVGVDLHKKQFTVYWRVEGQPERSEYERYLTNEEGYRQFEQKLRTVASVALAVSVAVESTGNTRYFKNRVEALGIAVVVVNTLKFKVVNESVKKTDRHDASTLAEFLEKDMLPVARLCSQESEELRRLVKARSSLVRTVVAVKNQIHGLLLSLGIESKRGELQSKKERRRVQSVLAAQHMTGAAVDPLFETIDRLTAEVKKLEAVMEELVADDPVVELIRTIPGAGLITATTIRAYVDDIRRFESSKQLAAYAGLTPWVQNSAEREQHGRITKRGPNELRTALVQVVLGMVRNKRRTGAYRIMLKYSQMKPQKGSGRTIIATARKLSEIIWHMLHEGQPFDEARMKSPELRRKAIEMRAAALDVA

SEQ ID NO: 66078 - protein, 362 aa, unidentified
MEEAGTRHVGIDLGKRTYETAIVGKNGKTAAGNGKTCAAGRQALYRKLRPGDKVALEAGNMAFVMAKEIEAAVGCKVYVLNPSRLAVIYKSMKKTDKEDALKLAHILEDFREERLPTVAVPSDEEMERRKLLSSYRREQGSRTRAINRLHALFVSQGITTMRRKDLARAAARGLSVERLVGLEREEAEHLLECLSLCEKRLAALDARMKESAVGDEAIGRLQTVPGVGPKVAFAFVAHVLASRFENAGQVSNYLGLAPRVRMSGEMVRYGGITKRGNGYVRALLVQAAWALIRSRGGGALKARFGHMTAEKGLGRKKSAVAVARRMAELLYALLRDGSEYEARPFMGGRLGGEELAATALRE

SEQ ID NO: 66079 - protein, 419 aa, unidentified
MGNSKTKKIKIINRKTMIAALDIGKGFHYAYFRSPNGNDIQPFPFCNSRKDFDKFWARLSQFKRDHNLEDVVIGFESSGPYAEPLFHYLRRKPVKLVQINPMHSKRIKELTGNSPNKTDKKDPRVIADVISLGHALTLVVPEGSAAQLRRLTQARERTLKKRTAAINQLQDLVFIIFPEFLSIMKDIATKTAFYLLKRYPAPEAIVSLGLESLAAEIKRVSRGRLKRKRAEELFNAAQMSIGVSEGKRGILLEIEYLISQIGSDNKFISDLEKQMEEHLAEIPYSQSILSIKGVSIVTVAGLIGEVGDFRKFNTISEVMKLAGLDLYEISSGKHKGQLRISKRGRSLIRKLLFFASINVVRSKGIMHKPYQQMLDRGMPKMKALVAISRKLLGLIFALVRDNTVYIENYSNGHHFKLAA

SEQ ID NO: 66080 - protein, 404 aa, unidentified
MKGPIVSIDVSKGKSDYQAFKDLNVKYTGSRSIKHNKEGFDEIVNLVREMEKKLETEVCVVYEATGVYHRVLKKVLEDNNIKQFIINPLLSAKTRKNDSLRSPKTDKLDPKSIAKTYYSHSLHNSHKQETIYHELRELSRYYEDILVHIRKDKVAFRAQLDIVFPGYDTLYDDLYGPVALAVIEKYPHPEMLQKKKINTVSKVIQNKTCHRQAVSDTMADKAIEYSKTIYSGCDKDDIEVLILQRFIKKLNEDMAEAERTIGEMIKLAQELPDFSIIKSIPGIGDNLAARIIAELGDMTRFKKKNELVAFAGLDPRISESGQNDGDHMHITKKGNKRLRCLLYLAVTCSIRLKRDDNSIKDFYIKKKQQSNPMCSKAAKTACASKLVRIIYSMCKTGELYQYNK

SEQ ID NO: 66081 - protein, 330 aa, unidentified
MDHVAIDWGAKQSQICVRAGSGEIIDARRVPTAQLAEYLARRPPSRVVIETSVQSFAIADQARQAGHQVRVVPATLVRLLGVGERRTKTDRRDAEALSQASCRVELPSVHIPSTEARQRKAMCASRDAMIRTRTLLVNAARAALRADGRSVRGTPETLPARLRSVDGERPQHLLSLATVLETLNAEIGQADRALATVAKSDELCRRLMAVPGVGPVTAVRFKATLDDVSRFPTAHAVQSYLGLVPGEYSSSERQHRLGITKAGSAPLRAALVQAAWSARRCRRQPLMVHWSLEVEKRRGKRIAVVAMARKLAGVLFAIWRNNEEYDPTRA

SEQ ID NO: 66082 - protein, 351 aa, unidentified
MRTSQKITGIVTTIGIDIGKNTFHLVGFDQRGAIILQQKVSRSQLERRVANIPRCLIGMEACSGSHHIGRQLAEIGHDVRLIPAQYVKPFLKGHKNDYRDAEAIAEAVQRPTMHFVTIKTPEQMDLLALHRVRSRLVGRRTGVINQIRGFLIERGITVRQGPMPLRKALSEILSSDTGALSPRMVGLIADLAQDWRRLDERIAAVSAEIEALAEQDDSCQRLMTVPGVGPIISSAVVAAIGNGTGFKQGRDFGAWLGLVPKQESTGDRTILGKISKRGNKYLRTLFVQAAHVVLERRPSAAMRGLWPWAEQASKRLHRNMLAIALANKLARIAWAVLARGGTYQPRITHAA

SEQ ID NO: 66083 - protein, 342 aa, unidentified
MEKIATVGLDIAKSVFQVHGVDAAGEVLVRKRLSRARVIPFFAKLPRCLVGIEACSTSHHWARELIALGHDVRLMPAQYVKPYVKRGKNDAADAEAICEAVTRPTMRFVTVKTPEQQSVMMLHRVRLMLNRQRTQLSNATRAHMSEFGIVAPVGRIGLERLLAIVADKDDERIPPDARLCLEMLGAQLAIVKEQILENDRRIRASARYTEVGRRLMEIPGIGPLLASAFVASVADPRLFKTGRDLAAWIGLVPRQNSSGGKERLGGISRAGNQYLRQMLVVGSMAVIRHAERHGTKRPWLIELMKRRAKKVAAVALANKTARMVWALMTSGEHYREPQVAHA

SEQ ID NO: 66084 - protein, 342 aa, unidentified
MEDVHMSEVHVLAIDLAKRSFQLCGTDRGGAVLFNRTVSRSKLEQILRAQPPCIVAMEACATSHYWGRMGVACGHEVRLIPPIYVKPFVKRQKNDAADAAAIAEAALRPNMHCVAVKSAEHQARAVAFRAHQCFVGQRTQLINALRGHLAEFGLVVAKGPANLKSLVDMMKDESVDVPEAVRDVVQLFLDQIEAITSKIEDLALRLKKATKENDEMRRLCTVPDVGPVTAGAVLAFAPDLRAFSSGRNFAAWLGLVPRQHSTGGKTRLGAVSKMGQNDIRRLLIVGAMSRIRWIVRKGVLPDNWLGRILGRKPRMVAAVALANKMARIIWAMMTREQNYRMA

SEQ ID NO: 66085 - protein, 340 aa, unidentified
MDTVSLIGIDLGKHCFHLHAQAASGHMVFRKKLTRNQLFSLLGNVPSCTVVMEACAGAHWMARRIQGLGHQAKLISPRFVKPFLRGNKNDFADAQAICEAGSRPAMRFVSPRNETQQTLSALHRVREGLIRDRTGTVNQIHGFLLEFGVSLPKGMAVIRRLPAVLAAHELPPRLIALLERLQAHFKYLDEQIGELDRELVQQLGEDERSQRLLEIPGIGPVTASVLATELGDARQFASARQFAASIGLVPRQYSTGGKPTLLGISKRGDKNLRRLLVQCARSVMQRIERRTDRLSVWIRDLLTRRHSNVVACALANKLARIAWAILAKGTHYLCEQAAAA

SEQ ID NO: 66086 - protein, 363 aa, unidentified
MTSTADKVHTGAVVEVTGGVDTHKDTHTAAAVDTAGRVLGSAQFPADPAGYRSLLSWLQAFGTLLLVGVEGTGAYGAGLARFLSGQGVAMVEVDRPDRKARRQQGKSDPVDAEAAARAALAQVRTGTPKQRNGRVEALRSLRVARRSAIAQRADTQRRMKALIVTAPEVLREQLRSVSDRQLIQMCAGMRPDRRRAADPDIATKIALRSLARRHQALTVELADLDELLAPLVADISPALLTLKGVGTDVAGQLLVTAGENTERLTSDAAFAMLCGASPIQASSGKTSRHRLNRGGDRNANSALWRIVITRMGTDQRTKDYVARRTTEGLSKPEIIRCLKRYIAREVFTALTPASAVNHLPSAA

SEQ ID NO: 66087 - protein, 340 aa, unidentified
MSEVTTIGLDLAKHVFQVHGVDAEGATVLRKQLRRAQVLTFFSRLPPCLVGLEACATAHYWARELRALGHEVRLMPAQYVKAYVKRNKNDAADAAAICEAVMRPTMRFVPVKTADQQAAVLLHRGRERLVRQRTGLVNALRGHLAEFGVIAPQGLRNVGKLIAIVRDEGDGRLPDLARQVLAVLAAQIEQLEAAVAALEKQLIAWHKSNPVSQRLASVPGIGPIIATAIAATVTEPSGFRSGREFAAWLGLVPRQNSTGGKNRLGRISKRGNQYLRRLMINGASANLLRSKATNADPWVIGLRRRRPSLVVAVALANKTARIAWAVMHRQENYRRVAAAA

SEQ ID NO: 66088 - protein, 326 aa, unidentified
MSRIQEKKTITTATSPFIVMGIDVSKDQLDVYVSPAGNHHSFKNDAGGVAELVNVCRDHDADLVVLEATGRYHRMAHKTLHDAGVRTAVANPARSRNFARSVGRLAKTDRIDAQVLAEYGERVRPPASTPPSKQQAKIAEITVARRQIVDEMKILKQQQTQTLDDLVIAQIAARISLSQCHCKDLEQLLAELIEEDDGIRRKHEILTSIPGIGLTTAATLISELNELGGANAKQIASLSGVAPMNRDSGSFRGKRKIGGGRKPVRDVMYMAAVVAIRWNKDMAAFYQRLKKAGKPFKVAITAVMRKLLILANTLLSENRLWSETQP

SEQ ID NO: 66089 - protein, 356 aa, unidentified
MDKVISEGAARVGVDLAKRVIQVHAVDAAGRLLTNRALARDKFIEWCVRLPAGCIVAMEASSSAHHWARKLVALGLDARIISAQLVKPYRTQGASGKNDANDAAAICEAASRPTMRFIPIKSIEQQSMLCVHRLREGIKEDRTACINRIRGLLAEFGLVFPQGARELQATLSEVLEDATNELGSLARLTLQRAQAQWHELDEHLAWCNERIAAHGKANEAVKAAATLLGIGPVTASAVVATVGDFKQFKNGAQFGAWLGLTPRQHSSGGKNNLGGITNRGDTYLRTLLIQGAKSAVMTAHRRQDKISTWAAALRERSGWQKAVVALANKNARILWAVMTRGVAFDPNHLSVLPTTT

SEQ ID NO: 66090 - protein, 466 aa, unidentified
MKSFYLGIDVSKGYADFMIINSKKQPVTQGFQLDDTFDGHRSLYNILGRFLAKHPDSTIFAGMESTGGYENNWYSSLIEFQGSLNIQTARLNPLGVMHNSKADLKKNTTDKISAQNIAEYLVAHPEKAVYQKDDQLAGLRKQWGFIKTLTKQCTQFLNQLNSLLYTAGPELLHYCQDGMPDWILKLLIQYPGAATLKNARVKIVAKIPYVSTKKAQQIIAEAKRSVASATDPVTQQLIKATAGQVLHLKKTIADQTKQMIDQCQLHEVELLKSFIGISDSSAIGLIIEIQTVKRFANAKKLASFFGLHPVYKISGDGIGGIKMSKQGRKEPRRILYMIALVAIQHNPLLKQIYEKHQKQGKHNMVAMGICMHKILRIIYGMLKHNKAFNPQIDIANRQRNPRHENDRAEKTTNRRFQDYDAKAPVTRRQRKKRLERERSNSVTSSKSGITTPVPLANIIADLLPKL

SEQ ID NO: 66091 - protein, 466 aa, unidentified
MKHNRRRRPGKPRVSPSVLERINPNVAGIDCGSAEHFVAVPPDRDPTPVRSFPTFTSDLHRLADWLIACRVTSVAMEATGVYWIPIYEILEARGVEVHLVNARHVKNVPGRKSDVSDCEWLRELHSVGLLRGSFRPTDAIVALRAYLRHRQTLIESAGAYIQRMQKALAQMNVQLPLVVSDITGVTGLRILRDIVAGHRDPAQLAEHRDHRCRASTADIIAALTGNYRPEHVFVLQQNLELFDACQTQLAACDTAIEAHLHTLTAPLAAPTTPLPTPRVTKKPRDNEPRFEIRTPLHQLTGGVDLTQIDGITSYTALKLLSEIGTDMGRWPSEKHFTSWLTLAPNNKISGGRLLSSRTQPSANRAAAILRMTIMSLGRTQTALGAFYRRVAARIGKPQAITATARKLAILVYRALNGELVYCDPGADAYDAQQRTRVLRRLRQRAATLGFELVSRETGEVLGEVVS

SEQ ID NO: 66092 - protein, 338 aa, unidentified
METYAGIDLHSSNNFIGVINDKDKILYGKRHANRLDDVLRALDPFKDSLKGVVVESTFNWYWLVDGLQEHGYRLHLANPSAIQQYEGLKHTDDPWDSFWLAHMYRLGILPEGYIYPKEHRAVRDLLRRRLLFVRHSTAHILSLQSMISRNLGFKMSNNELKKLKPADIESLFDCSNLVFMANNSLAAIEFLKKITKGIEKKVKSQVKLRKEFEMLLTIPGIGNILGLTINLEVGDIGRFPKVGDYSSYCRCVESKRLSNGKKKGENNKKNGNKYLAWAYVEAAQFARRYCVKAQSFYQSKEAKTKPVVAIKALSNKLSKASYYIMRDQVAFDEEKLFG

SEQ ID NO: 66093 - protein, 424 aa, unidentified
MSKRKYHAESLDQVEIGGIFKKINSDKVIVAVDVAKEDFFASVAGEDGVVVKTIKWQHPTQTLLFLEFLQALGDPSRVEIALEPSGGYGDSLRWQLYTRKYEVYRVSGKAVHDYREVFDGVPSSHDAKACALISELHARGRSKKWTFATDSQREFKARTTQLNAYDKAYKQNVNRLHAVVCKHWPELAQIIDLRCSTAQTLVHHYGGPQAVLQNSHKARDLMQRVGGHLLQKEKIDAVINSATSTLGVPQLEAEREVVQNLAGQVLHYRQLKAKEEVKIRKLIKKTPPAKEMADAIGKTTAAIIIGATGNPASYKSSAAFVKALGLNLRESSSGKHHGAHHITKRGSSLARKYIYLAVLRLIHRNPIVRAYYEKAVATRGGKQTMKVLIGIMRKLAASLYHVAQGHAFDASKLFDVRRLELKAS

SEQ ID NO: 66094 - protein, 428 aa, unidentified
MPYKIAGIDVHKRMLAVVVSDVEVDGEYAFERRQFGSNPAQLRLLADWLLEQQVEEVVMESTAQYWKPVWAALERYWTPTCKKREGAGSMSGTPHLAQAQSNRARQGRKNDFADAERLVKRLVANELTLSFVPVPEQRLWRTVRRTKCQLTRNRVQLQNRLEALLEECHIKLSSLVSDLLGVSARRMVQALADGETDPAALAGLANYHLRATQEQLRDALGACQELNPVYRRLLKLALEELQLIEKQISQLDQEIADLLRPYQDQVQRLAEVPGLGVDSAQQIIAEVGPTAATFPSAGNLSSWVGACPGDDESAGVSHSHRSPKGNRQMRRLLNQAANAAVKYKGGIFEILYRRYVPRLGHKQTIGVIAHRLCRLIWKILYQGVRYEERGPDVRKKSQRYRAARMIRELQSLGYRVEQANSQSADVPA

SEQ ID NO: 66095 - protein, 350 aa, unidentified
MFNYIGIDVSKATLQVYIPITDENISIDNSKKALISLYAKLKKYYKKDISNLAIIFEPTGSYSALLKRFCADKNIYAFIINPRQSANFAKALDNRNKSDIIDAKMLYKFHVMIDESELAIPIINNAHEELSEMLTYYKFLQKQRVGFSNHLEALSSKNGSNYIVKELKKEIKQLKEQEGNMIIKMKSLILSDEIMIQKFENITSIVGIGDRAAIALIHLFNSYPDANRQEITALSGLDAIENTSGTSVQRRTRISKKGNAIYRSMLFMPVLSAIQNNPYMKLFYDRLKVNGKHSTSAQIAVMRKMILIAHSLYKNNIKFDKRVYEKGLGWKEKDVGNFDKVAWFKLLLTW

SEQ ID NO: 66096 - protein, 347 aa, unidentified
MTIVGNPDAVVGGVDTHADVHVAAVVNHLGGVLGVESFSTTSHGYRQLVSWLRSHGELVLVGVEGTGSYGVGVSRYLQREGVTVVEVDRPNRQTRHRQGKSDPVDALAAARAALSGSATGSPKTRDGNVEAIRVLMIARRSAVDTRIETLNQLRHVVFTATPEIRTKFTGLTAIGLVNKATALRPREGDDPVRYTTLVTIRALGHRIQYLREKSKRLNGMLRPLIRQTAPTLLEVYGVGYDTAAKLLVAAGDNPERIRTEAAWANLCGAAPIPASSGKTKRHRLNRGGNRQANSALYHVVITRMRHDQRTRDYVARRLTEGKTMGEIARILKRYVAREVFKHLPHPA

SEQ ID NO: 66097 - protein, 460 aa, unidentified
MPHPKSRRRNEAPVVHQSAAGIDVGSRFHVVAIPSSCSAEPVKKFSSFTGDLKRLRDWLCQHNIKTVAMESTGIYWIPIYEILEQAGLEVFLVNARHVKCVPGRKSDISDAQWLQQLHSWGLLKASFQPSEGVANLRSLLRLRDGLVKSRTSHQQHIQKALMQMNLQLHHVVNDVMGKTGRLIIDAILAGERDPSTLAAFRDRRCKNHESVIAEALHGHFREDHLFELAVAVHMFDEYSAQIVKCEATAHELLDKLARAKEALPEALTEGKVKSKRKSDYSFDPTSYINALTGADLSGIYGLGPGNLLTIVSECGTDMEKWPTAKHFTSWLGLAPQNKISGGRVLSSRTRPGSSRAGSAFWMAALIASRSQTAIGAFSRRLAIRRGKPKAHVATARKIAELFYRAVRHGGCYVDPGSADYEEKQKRLAIASLERKAGMLGFSIVESQISSPKALAIEGVT

SEQ ID NO: 66098 - protein, 333 aa, unidentified
MEHWIGIDVSSATLDFALLDEKGTHLESAQVGNERKAVMKLMGAWRERYGMMPERSLICMEATGHYTLMLLNMVVAQQWRAWLAHPNDILQSMGIKRVKNDKVDALRIAQYARTFHEKARLFTAQNLKLDRLKHLITRRNHLVRSRARHRTHITDLNRYMDRQLRTEFDRIDKRQIKLEDQLVAHVDALILAEIRTDPQTERQYDLLRTIPGVGPQLAAYLVACTDGFARFNTPRQLSCHAGVAPFERSSGSSVRGRTQVSHQADKSLKTLLHMSALVSVREPGELRQYFERKRAEGKKPILVVNAVRNKLVHRVCAVIRNNRPYERRPITTT

SEQ ID NO: 66099 - protein, 316 aa, unidentified
MDVLGIDISKADFHGCLIQGKKQAKNSFPNVPVGYRRLRTWLRNRGCTKVHVCMEATGAYWEGLACALHEAGLEVSVVNPARTVHFARSQLRRTKTDRVDAEMIAEFCKTQNPDRWSPPAPEILEIRGLLSFRAQLLDDKLRLSQMISQIHVSKELHRLYSTQVKTLNASIAAAEKQLKTVAKTHRTLHRQVQKLTGVKGIALLTALEIIAKLPVERLRDAKAAAAYVGLTPRERQSGTSIHGQPHICKTGNASLRRALYMPAIVATRFNPILKAFADRLKAKGKPAKLVVVAVMRKLVVLAFAILNRDLKEVAMT

SEQ ID NO: 66100 - protein, 339 aa, unidentified
MKYTPVGVDIAKHLIQVHFIDEDTGEVIDKQLRRQDFLMFFCNREPCLIGMEACRGSQHWGRELTKLGHKVRLLQAHFVKAFVMGNKNDVMDARAIWMAVQQPGKDIAVKTEEQQSVLVLHRSRRQLVKFRTMQINSLHGTLLEFGKTIHKGRAAMERELPEALERMKERLPPYLITVLENQYNRLNELDSLIEDIEKKLTSVARQNETCKRLLDIPGVGPLIATAAVATMREASAFKSGREFAAYVGLVPKQTGSGGKIRLLEISKRGNTYLRALFIHSARAAALLPKEPGPWITELKKRRPTSVAIVAMANKLARTVWAIAAHGSKYDKNHVSIRSY

SEQ ID NO: 66101 - protein, 415 aa, unidentified
MYYGLDVHKDFIQVCRLSADGKQREDFSIRATAEAVEAFARTLTRKDQVALEVTFHTWIIYNILAPHAGRVVAVNATQVQAIASAKIKTDKVDAHTLAQLLRADFLPAVQMPSSKTWALRQLVSHRRLLLKQQTATKNTIHGILHRRLLPIPQGWNPFAQKTRLWMRGLTLPSTERFMLDNALALLEQIETRVAEVDEQLLQQARISESAKLLITIPGVNVTVAIGMLAAIDDVRRFPTPQKLGSYFGLVPRIRQSADRCYHGDITKAGNSTARSLAIEAAQILARSSSPLAATYYRVRHKRGHNVAVTALARKLVHVVWHVLSKREPYRYAPIPRTRIKLLRVTVDHARSRCVPQTLEAVYAEAGLPPLSAASSGERRAAANNRRTRTRLDKASGKSSASRKMQREAKTSLTNS

SEQ ID NO: 66102 - protein, 316 aa, unidentified
MAEEGVFVGIDVSKAQLDIAICGEADTLSVSNDPAGIQQLLEFLQPRTPALIVLEATGGFENPAVAGLAAAGLPVVVANPRQVRDFAKATGQLAKTDRIDAQILALFAARVQPPIRPLPDEAAQALDAFVARRRQLIQMLVAEKNRLGFAQATVRKGIQKHIRWLERQLQDVDEDLDSMIRHSPIWKAKNDLLRTVPGVGPNLSRTMIAELPELGRLNRKEIAALVGVAPLNRDSGKLKGKRMVWGGRAPVRAALYLSIWSASRWNPLIRPFYERLRASGKPPKVAQVACMRKLLTILNAMVRDGRPWNPDFQHSC

SEQ ID NO: 66103 - protein, 322 aa, unidentified
MCKIIGIDISKQTFDVGFMKESIWQHFVFENSEKGFRELLKKVEVNDWLVMEASGPYYLQLALFFYKENKKVSVLNPLIIRRYSQTRLYRAKTDKKDAQTIAEYGVQYDLKQWEPESEEISKIKQLYTALELINKEIHQSERQLESFISSGILDKDLESTLKSIIKFLKNKQNKLEKQIKFNAEKNYKPTLDRLKSIPGIGTKTAIMLTVITGDFEKFENYKQLIAYVGFSPRLYQSGTSVRGKGHICKMGKSQIRKLVYLCSWSAKKCNKGCVEMYNRLKEKGKPERVIKIALANKLLKQAFSIVKNQTYYTENFVEKACF

SEQ ID NO: 66104 - protein, 345 aa, unidentified
MKITTVGIDLAKNVFQVHGIDERGKAVLRKQLRRAQVGVFFANLAPCVIGMEACASAHHWARTLQGFGHTVRLMAPQFVKPYVKTNKNDVADAEAICEAVGRPNMRFVPVKNIEQQAILSVHRVRQGFVKARTAQANQIRGLLGEFGLIIPQGIYNVAKRVSEILEDASNELPVPFRHLIDRLTAHLKELDRQVKEFEQEIIAWHRSSEFSRKLEKIPGIGPLAASALVASIADARSFKNGRQVSAWLGLVPRQNSSGGKPTLLGMSKRGDAYLRTLLIHGARSAILAAKNKVDNTQGWLTNLLTRRHPNIAAVALANKNVRTVWAILAHGGEFRPDYVPTRMAA

SEQ ID NO: 66105 - protein, 341 aa, unidentified
MKKFIRVGVDLAKNYFQIHALASEGDPAVTRKLKRSKMHEFFSQIEPCLIGMEACGSAHYWARELKAMGHEVLLMPPAYTKPYVKRGKNDAVDADAICEAMSRPGMRFVPIKSAEQQATLMLHKTRELLIKQRTMSVNALRGHLSEFGIVAAKGIGRVDELLDLADSDATLPVAAKAGVNVLAQALEGLDTAINALENEIANADAQNEMVMLLDKVPGVGELIASVIAATVPDPSVFKSGRDFAAWLGLTPRQNSSGGKQTLGSITKQGNRYIRKMLVLGATSLLNVVGKRKGALRDWIVGLLAKKPARLVTVALANKLARILWAMMKTGECFRTEMFAKA

SEQ ID NO: 66106 - protein, 400 aa, unidentified
MRVVFGIDVSKASSEVAILVNGEKVHGYTISNDAIGFARLLGDLRTVHKPEIIFEATGVYSRRLQAFLDEHGYAYTRLNPLEAKKQLDSLRVRKTDQIDAEKLAQSQFVLNRKTTYVQKEVYQNLRDLSRFYQNLTEDIVRAKNRLHKVLQVTFPELENILSTPSGEQYWNLVIAFPCKDFVLDLSKDELSESIRQSTSKRISDKRAAYLAEKLIALANQSYCAVKKTSPMLEEVRYYTKELLRLSEQRQAVLNEMVELAQPLPEYDILLSIPGIAETTATSIIGELGDIRRFQSANQINAFIGIDLRHYESGNFLAKEHITKRGNPYARKILFKCIHNIASASNTNPCHIADFYKKRKRQSQTTSTKPHTIASIHRLIRTMYYLIMHNKLYDYASTQNR

SEQ ID NO: 66107 - protein, 337 aa, unidentified
MKLKRIGVDWAKQVFQLHGVDSHEQAVCRKQLKRSQMLDFFRRLEPCTVAMEACGSAHYWARELRTLGHEVRLIAPQFVKPYVKSGKNDANDAEAICEAASRPSMRYVEVKSAGQQASQALHRIRSRLIRARTALVNEIRGLLGEFGLVEARHGVAATRRLTQTALDAQNGLPGQMRELLAELSGELDEHDARLSRLDDMIQRQAREDERVGRLLQVEGIGPITATALVSAVGDARQFSSARQFAAWLGLVPRQHSSGGKERLGAINTRGDSYLRTLLIHGARAVLRHCQDKADRRSQWLRQRVCRRNPNIATVALANKNARIVWAILSRGEGYRPG

SEQ ID NO: 66108 - protein, 411 aa, unidentified
MSNNLFVGIDIGSSKNVSVFLDDAGQRIGKALSFANNYEGAESFMASLVQIAKPRLPITISIGFEATGIYDWQLKSFLFSHPLLTEFNPKLYQINPKQIRNFKKIYPDLSKTDNIDAFVIADNLRFGRLPQPVTVDYSYFALQRLTRHRFHLMESITAEKTRFLTNLFFKFSNYSKDAPFSNIFGKASSAVILEFCSPEQIASMPVEDLAAFIAEKGKNRFSAPINIAQELQAIIKLSYRLPDPLKESVNFILASSLGTIRMLESQVKAIDKTIERELKPIKHTLLSVDGLGPVLVAGIIAEIGDISRFHDHAALAKFAGLWWKQHQSGNFEAEETRLAKSGNKYLRYYLVEAANCLKIHNTIFKAYYAKKYAEVPKHQHKRALVLLARKLVRVIFSLLRSKKIYELPKTN

SEQ ID NO: 66109 - protein, 367 aa, unidentified
MVHPDYTIGCDAHKHFSLFALLDEKGDLVQRTRVGHVPGAIAAFLSQFPEGTPVALETVGNWYWIVDEIEEAGCLPLLAHAAKAKVMMGNIHKTDKLDAHGLATLLYLGKLPSVWIPSADVRDERELPRTRMTFSQHRARVKNRIHSTLAKYALSLNTDSDIFTPKWRPELEGALQRLPKETARCVRQQLQILDAIQEHISQLEVRIVERIQATPTMQLIQTIPGPAKILAIIIDRELGSIDRFPAPKHFASYCGLVPKVSSSAGRAHYGRMVRQCNTYLKWAFIEAANVIVRQRHHPNWRHKYVVHLYERTRRRKGHSVAVGATARYLAEATYWVLKKSEPYREPPHWGSGREEIPVSLSQGQVRA

SEQ ID NO: 66110 - protein, 340 aa, unidentified
MEKRYIGIDLHRNRFTCCIRLENERTYVTEWELEDLGKFVKKLRANDEIAVEITGNTRLFFDAVAPHVARVVVVNTNQFKVIRQSVKKTDPHDARALALYLSKNMLPEVRMKDKEHGQLASLTQTRDTLVKLRTALKNKINNILSARGLNLAKEALSSEKKLNEVVELPFDEIVRIELRVIVEQIRSLNKSIAELEKTIGEEGSKLEGHQGLSSIKGIGKITGAILLSVIGDVNDFADEGHLASYFGIVPRVSNSNETEHSGRIHKRGTKLGRTALVQSALIAANYSPYLKRFYEQVKARRGAGKAIIALARKFLGIIYRTLKNKWVFEDFPNFVLAEAS

SEQ ID NO: 66111 - protein, 340 aa, unidentified
MTITTVGIDLAKNVFAVHCIDQNGKAVLVKPKVSRAALSELIAGLPPCVIGMEACSGAHYWARLFRQYGHDVRLIAPKFVSPYRMAGKTGKNDAADAIAICEAVQRPHMRFVPVKDESQQAMQCLHRTRQGFIQERTATYNRLRGLISEFGVIAPQSTDALRHVVSDQKETLPVQVRLCIDDLLTHVTNIEEKIAEYDRVLSRVAKTDHRSQQLMELKGVGPTTASALVASIGNAHDFKNGRQLAAWLGLTPSQYSSGGKSKLGRITKAGDAYLRTLLVQGARSVMVGAENRTDPFSRWVCSLIGRRGYWRAVVAIAAKNARLCWASLHYGDDFRLYSTT

SEQ ID NO: 66112 - protein, 439 aa, unidentified
MNNHTIQSNSQLPLVPAPIDIWIGADWADQAHVLAIRTRSGATRTCSLEQKPELLDQFFLGLRQEHPQSRIGVCIEQTRGALIYALMKYDCLVIYSINPRSLADFRRAFCVSGAKSDPSDAQLLCEMGCKHQERLRPLQAEDACTRKLRLLVEARRSFVDRNTSVLNEFGAVLKCYYPLMIELFEGNLDSQMACDLLKRWPHLAALKQAKPATLRAFCYAHNCRGKQRIEQRLEAIAKAVPLTEDPAIVEPLQLQALALAELLCVLAKQIKSYDERIQRVFNEHSEAWLFRELPGAGLVIAPRLAALFGTQRANWPNALDLLCRTGVAPVQKQSGNQCLVQFRWARPKFLHQTVVEFAKCSLRFCPWAKLLYEDQLAKGKSRFSAIRMVAFKWIRILWRCWTQRVAYHETTYVLGLQRRGVKLYQSLYGNPAGEPVNNP

SEQ ID NO: 66113 - protein, 309 aa, unidentified
MKEQVVYLGVDVAKAYLDAAMESEKRRLANDGTGHRQLINWIKQMETNVQVICEPSGGYERMLIQALVGAQVKVSLVQANRVRQFARAAGILAKTDSIDAEVLCAFGEAMRPQTLSASKLAQEQLRELESQRRHLSRLLVMEQNRGARLGDSSVRRLNRSLNKQIQKQIERIDLLINEHIAGSQELSAKAHKLTAISGVGPRTAALLLAQMPELGQLNRREVAALVGVAPFNRDSGKLHGKRTIFGGRRHVRHGLYMAALVAARHNPILRAFYQRLRAAGKPAKLALTATMRKLLIVLNSALKPDPLYA

SEQ ID NO: 66114 - protein, 431 aa, unidentified
MNSSLNNDHTQNTYAAFIAIDWADQKHTFSLQVAGQAKKETGTLEQKPEIIGPWVAKLRERFGGRPIAVAVEQSRGALIHALLAYDFLVLYPIHPTTVAKFREAFKFSGAKSDPLDTDQILEILTKHLELLKPLNPDTQETRLLGRLVADRRNAVELRTSHIQALLASLKEYFPQAIELVSGNLTSRLAGDLLKKWPTLESFQQAKPSTIKRFYYGHNVRSPEVIETALKLAISAQPLTTDSAIIESSRRVSEMHSQMIQALNPVIDAYDQRIEKVFHDHPEFPLFSQLPGAGPVMAPRLSAFFGTDRSRYAKAQNVQTFCGISPVTKSSGKTRVVYFRRACPQFQRQSFHEFARLSVASCQWARNYVDYYTGKGKKYNTVVRSLAFKWIRILFRCWKDRTVYDDNKYMEILKKRGSIFATLHLEQKNENC

SEQ ID NO: 66115 - protein, 415 aa, unidentified
MKTYSELSHFGGLDWAKHQHHVCVVDKEGQIVERFCIEHSGSGWTQFKERVCKYPGLGMSIETSQGAVVEQLLGSGVTVYPVHPKAAKEYRKRQAPSGTKDDELDSWSLADALRMDGGHWRALSPQDPMIEELRLLCRDEEELIEQRTALVNQLQAALQEYYPAALEAFEDWTLAHTWEFIATFPTPQQLAGATVHRRRAFLHTHKLWRPGTADKRLEIFARADEFCGGPAVTRAKSRLALSLVKLLQAVQKQLDEYRAAIEKLFAEHPDHDVFGSLPGVGPKLGPRLLGSIGADREQYPDAQGLQCVAGSAPVSFKSGQIRRVKIRWHCDRFLRHTVHLWANCSLKTCAWAAAYYKAKREAGQSHACALRCLAQRWLKILWKMWQTHTPYDPEFHARNQQRHGSWVLQLNPKKA

SEQ ID NO: 66116 - protein, 344 aa, unidentified
MEQIIRIGMDTSKSVFQLHGVNAAEQPILRRKLTRKEMVKFFQKAAPTSIALEACGGSHHWARLLRSFGHEVKLIAPQLAKPYVKRGKNDAADAEALCEAMSRPTMRFVPVKTAQQQAALMLVGLRERLIRNRTQLANSIRGFAMEFGIVAATGMCRIEPLLERIAQDPSLPVLARKVFAMHGDEYRGLLHEIKKVEEELLDLHRADECSLRLAQIPGVGPVGATLLMLKTPDARLFKSGRAFAAWLGLTPKDHSTAGKTRLGVITRAGDEMLRSVLVVGATSLLQQVRAGRSRHASQWLTGLLQRKKPKLVAVALANKIARIAWKLMVSGQTYRRMEEQPQAA

SEQ ID NO: 66117 - protein, 407 aa, unidentified
MEAIYIKCCGVDVHKKKLVACLRSGRKSEIREFGARTKDIKELVNWLKESECEMVAMESTSVYWKPLVNIFEMKQLEFMVVNAKDFKSVPGRKTDVADSEWLAQLLQHGLLKSSYIPTREQRELREACRYRKKIIEERARGLNRLQKQLEGANIKLSSIVSNIEGVTSMNLLDYVLNNEDEIDEAKARELIISRISASVEEVVEAMDGIMTDFQKRLMKEVIEHLNGLALRIRKMDELIDEYMADYYDAIKQLDEIPGIGKKSAEVILAEIGLEMSRFPTSSHLASWAGLCPGNNESAGKKKSGRSRKGNTILKTTLIQSAKTAAKNKQSFYYAQYQRLSVKRGKKRATVAVAHSILISIYHMLSENKGYVDLGADYYNQFNTEKKANSYLKKLAALGYQVEVKEVA

SEQ ID NO: 66118 - protein, 342 aa, unidentified
MEEVTIIGVDLAKNVFQVHGAAADGSVVFRKKLSRLQFARFMTDHPACDVAMEACPSAHHWARELSAYGHHVRLIAPHYVQPFIKRQKNDAADAEAIVEAALRPTMRFVEPKTAEQQARAVAFRTREQLVKQRTEAVNALRSHLYEFGYIAPVGIGYVQRLTRVVEDPEADIPDLARDICRMLIEQIAQLTDRINALKARIAAMSNEAEMPRRLQTMPGVGPITALAVETFAPPMEQFRRGRDFAAWLGLVPRQHSSGGKQKLGKTSKMGQRDIRRLLITGAMAVIRWALRRGSPKGSWLARMLEREPPTVVAVALANKMARGIWAMLTRNEDYRGPVLIGA

SEQ ID NO: 66119 - protein, 337 aa, unidentified
MQIATIGVDLAKHVFQVHGIGPDGSVVLRHRLRRSQAIAFFAKLPSCLIGMEACATAHHWAREFRSLGHEVRLMPAHYVKAYLKRGKNDVADAEAICEAVTRPTMRFVAIKSKEQQAVLVMHRTRELLVRQRTQAINALRGLLAEFGIAEPQGLRHLGRLRAHLEDDTVPEPGRKILELLVEQVAETDRRVEQIENEIRAWHRANPVSQRLAKIPGVGPVIASAIVATVADASSFRSGREFAAWLGLVPRQRSTGGKQRLGRITHQGDAYIRRLLITGAQSALQRSKAVKEDAWIRALMSRCARLKVAVALANKMARIAWALMAKGDVYRRPAASAA

SEQ ID NO: 66120 - protein, 348 aa, unidentified
MTVYIGVDFHARQQTVSYLTTEDGEIQQLVLAHEEPAKVRAFYEQFASQQVVVGFESSGYAAWFEELLEELGCEIWIGHAADIRRFARRRQKNDRRDAALILDLLVAGDFPRIHRYSAASREVLQQLRYRQKLVKMRTMVVNGLLFMASSRGVTLRSQLQSKRGQARMRQLALPAPLAQQRDELCQLLLELSGKITTVQAWLESRAEQDVRVQRLRTQHGIGPLTGLCLAATLECPERFANGRKVTAYAGLDPTEDSSAERRRMGAISKQGSRLLRFYLVEAGQVAMRKDADLARVYQRLLRRCGHAKAKVAIGRRLLVRAFIMLRDEIDYAEFQRRGVAARSSRGTA

SEQ ID NO: 66121 - protein, 392 aa, unidentified
MMISVGIDVSKDKHDCFIFSSEGEVLADVFTIPNTMDGFHSLLQQIWKCSNSQDKIKVGLEATGHYSYNLLGFLLDNGLATYVLNPLRANLYRKSLSLRKTKTDRVDARTIASMLLSDAGLKPYTDTAYHNEELKSLTRYRFDKVKERAKLKSSIARLVCILFPELEKLVPSLHIASVYALLEEFPGAKQVAAAHLTRLKALLETASKGRYKRDMALEIREVARNSIASPLPAKSLELQHTIRLIRELDNEIAEIEEQIQSIMDELHSPITTIPGLGFRMAAMILAEVGDFTRFDSPDKLLAYAGMSPSTYQSGQLKNCYPHMEKRGSRYLRYALYNATKYVCHWDPTFADYLTKKRAEGKHYNIAISHAAKKLVRLIFAMEKSRQPYCSAA

SEQ ID NO: 66122 - protein, 408 aa, unidentified
MLWGERRGQWHHRRSSESTERPMPQPNDLSRSLVIFEQDATLIAVIEMGQSSWLVAGIVPGVERLPLKKLAVDESALLNLLHRWCEEAVQGGRRIKRIAVAFEAGRDGFWLARWLRARGIEAHVIHASSVAVSREHRRAKTDRLDTEMLKRAFLGWLRGERDHCKMVAIPTIMDEDAKRPNRERESLVGEQSRIINRMKATLTRLGIRGFNPKLKKAAERLEGLRTPEGEPIPPNTLAELHRDMERRRLLRDQIQQIESARLDRLDQAAGEGAHAMVRLLARVMGIGIETADMLVHEVLSRNLRDRRAIARYAGLTGSPDESGKRRREKGLARSGNARVRRGMIQLAWRFLMFQKDSALAQWFRDRTENAHGSRKTMIVALARKLLIALWQFVRAGVVPEGIVLRPAQ

SEQ ID NO: 66123 - protein, 447 aa, unidentified
MTKIRISLLLIVLQLPMKGGDNMKNNILSTLFVGIDVSSKTNVLCALDFQGNKLLNLKASNNNPGAEYMAKSILECLNSNSLKYAVIALESTSIYSIHVANFLSSHDDLALFEPKIYCLNPKTIANYRKSFVDMNKTDPLDAYIIADFAICERIKSSPWRGSQFLALQRLTRHRLHLVECITREKTYMVSNIYLKFSQLAVLEKDDKPFSNNYGTTSAAVLTEFLSLDDITYSSIEDLVDFVKEKGKNRFSDPQETAKLLQKAARDSYRLDKVLYEPLNVSIASSFNLIKAFENEVKTIDKAIEKNIKGINTTEYQSLRSIPGIGPVLASGILSEIGSIGAFNSHNALAKYAGLTWRVNQSGDYTSDDTNMTKTGNKYLRYYLIEAANSVKNNSTEYNEYYNKKFGEVTIHQHKRAFALTSRKLVRLIFGLLTKNQIYSSDKVGKIQ

SEQ ID NO: 66124 - protein, 340 aa, unidentified
MTITTVGIDLAKNVFAVHCVDQNGRTVLVKPKVSRAALPELIAGLPPCVIGMEACSGAHYWARLFRQYGHEPRLMAAKFVSPYRMAGKSGKNDAADAQAICEAVRRPHMRFVPVKEESQQAMQCLHRTRQGFIEEKTATYNRLRGLISEFGIIAPQSTDALRHIASEQKNSLPLQVQQCVDDLLEHINRIEDNIAEYDRLLSRMAKADHRSQRLMELKGIGPTTACALVASIGNAHDFKNGRQLAAWLGLTPSQYSSGGKSKLGRITKAGDSYLRTLLVQGARSVLTGAEKRTDSFSRWVYSLIERRGYWRAVVAIAAKNARLCWASLHYGDDFRLYSAS

SEQ ID NO: 66125 - protein, 379 aa, unidentified
MKSITLYLGLDVHKDSITIAIAEPGPKGEIRHFGNISNDLGRLEVALGRIRKAHPDARLEVAYEAGPCGFGIARRLKQLKLPCLVAAPSLIPKQPGSPFKTDKRDARLIARLLRAGELTGVYVPEPTDEAMRDLCRARTDAVDDLRRCRLRLKAFLLRHGYRYHGKANWSASHMRYLRELVFPHPAMKAILEEYLQGIDAAHQRVQRIETSMLTLLETWRLKPAVQALMAFRGFQLVAAMITVSELGDIHRFPHPRQLMTYLGLVSTEHSSGDRQHLGGISRCGNGHQRWILTECAEHYALPPKVSKELARRQEGQPPEVLALSWKAQLRLHLRFTRLLGRKLHRNKAKVAVARELCGFIWALLRTQACYTQPQAATAN

SEQ ID NO: 66126 - protein, 402 aa, unidentified
MKEDIAKAISQQTAAALDGAKGWSRYGAFVGLDVHKDTIAVAIAMPGRDEPVYRGEVAHEPKALKKWLDRLNDEFGGAVLLFCYEAGPCGYGLYRQLLAAGHDCQVVAPSLIPKKPGERIKTDRRDALKLARLLRAGDLTAVWVPDAEQEAMRDLTRARDDMKSQERKARQQLNAFLLRQGHHWPSGKKRWTKIHFNWLESISFEQPWLQIVLQEYVDAVKAATQRVDDLTDQLMRALPSWSLAPVVDALVALRGIDKLAATVLLAELGDISRFDSPKQLMAYLGLVPSEHSSGGRRRQGAITLAGNGHARRMLVESAWSYRFPARQTMHLKHKAQHASEQAKAIAWRAQKRLCGRYRQLSQAGKNIKLVCVAIARELVGFIWDIVRHEMPRLEVQVAPAGR

SEQ ID NO: 66127 - protein, 427 aa, unidentified
MNDSTYKPTLCVGADVHLDEIVLRAVDKALGHEVLERFRVTNNQPGAQSAAATIAQVAAEQGYARIEIGWEATGMLWIPFHRYLSTEPLLQPFELELICFNPKLVAKFKDGLVLRSPKNDDRDAFDVAARIRFGELPVTYVPSDFWQGLRRLTRYRYRLSKTLSQEKMRFQSYAFLKASDWKRVKPFSNVLGATSAALLTEFTVAELQDMTHDQLVDLITRRGRGRFTDPTATARDVRQALRTSYPIDPRMDQMVTDSLAAMWDHIRYLDRSMKRLDKTIARYIDPIPNPIITIKGLGAVITAGILAEIVVVLRFEEQKHLAQYMGLTWRKSSSGGFVSQNTRMTKVGNVYLRYYFIQGANLLRQHNLEYKAYYWRKYQEVSKYQHKRALVLTARKLVRLVHALLTKNVPYVRPRTTDPGQEDDRFQ

SEQ ID NO: 66128 - protein, 427 aa, unidentified
MTRKDFNRGYVKRQRICETTLIVGLDIGCEFNMMCMMNAKGKVLGEHKVHNSREGFEFFRDVVDKAAKRNRLWDVLVGFEPTGTYWRKIAFYAKELGFEVRFVRTTALKHQRELDESAPLKTDRRDAYTIANIIREGKCIDSVIEDGIYRELRSLVNLRENAVSDGTRLKNALRTFLEDFFPELSRLYSSMSAKGLLAILQTCPFPADVLNYGEKRLAELISKSSRSKKIGESKSSKIYAAAQESIGLKRVGSSDRLRLEFYLKGLRKSAEDLKAIDAEMARLLKEIPHAQYILSIPGIGMVTAGIILGEFGNLDNFQGAKQGIKYAGYDPTGKESGKHVGRRRISKKGRWRLRKTLYLSSMRVVRAIPEFKEYYTRKIDGTSGSGRKLARKEALCAVIIKLIRLIFAIVKDGRTFEYREKSKLLAA

SEQ ID NO: 66129 - protein, 429 aa, unidentified
MRTESTPGARGPVFCGVDTHADSHWLCVLDWRGRKVLSRQFPADAAGYEALAGAIAAAGEPACVAMEGTSSYGAGLTRHLASLGMPVREALSPARMQRRRPGQGKCDEADAERAARAAMSGSKLGTPKSQDGWVDGVRCMLAARSGAVKARTSAINTARSLLTTAPEGLRSRFRGMGGPRLMEELPSVRAEGALGAALGALADLWEAARDAALDMERAIEASLEENCPALLAMYGCGPVSAAKLAVAAGDNPGRLRSEASFAAICGACPIPASSGKTVRHRLNRGGDRQANSALHEIARQRVMRDPETAEYAERARGRGKSDREVMRCLKRYVAREAYRALMHPHEIRRPGDASELVAARRAAKVSQARAASILGTSEKYISMLERGQRELKPIRRAYEAWVEAGLPLDWDRRAFEAERKMDSKKHLAK

SEQ ID NO: 66130 - protein, 320 aa, unidentified
MSKIESFVGIDVSKSELQMAIRPKGKPMSFANTEDGIALLIDCLKPLCPRLVVLEATGGLEISVVNALAVKELPVVVVNARQIRDFAKATGRLAKTDRIDAEVIAQFAEALRPPLRPLKDEQTQRLHALNTRRQQLVAMTRSEENRLSSAPKWTQKEIQTHLKWLKKALEKMDRDISDLIKGSPIWREKNAILRSFKGIGPVTSATLLAALPELGTIGSKPLSALIGVAPLNRDSGQLRGKRTVWGGRDNVRSVLYMASMVAIRFNPVISAFYTRLRESGKPHKVAITACMHKIIIILNSMIKNQRYWHAPLSEKCLKDS

SEQ ID NO: 66131 - protein, 349 aa, unidentified
MSPKLNSGIAVIGIDIGKNSFHVVGLDRRGAIVLRQKWSRGQVETRLANLPPCLIGMEACVGAHHLSRKLTLLGHNARLMPAKYVRPYSRGQKNDFRDAEAIAEAVQRPTMKFVATKTAEQLDLQALHPVRQRLVSQRTGIINQIRAFLLERGVAVRQGLRFLRAERPRILATPCDGLSPRMVRVLEELACDWRRLDERIEGLSSEIEVLARRDAGCKRLMSVPGIGPILSSAMVAAIGTGDTFTKGGDFAAWLGLVPKQISTGDRTILGKISKRGNRYLRVLFVQAAWAVLIKPKSWARHGLKPWLEAAKKRLHHNVLAVALANKLARIAWSLLAYGRVFEATKIQAA

SEQ ID NO: 66132 - protein, 346 aa, unidentified
MQATIIGFDIAKSVFQIHGEEPCGKKVLSKRLKRAAAEQYLASLPPTMIGIEACGSSHHWGRLLTEMGHEVRLVSAAYVRPFVKRNKTDARDAEAICEAIQRPSMRFVPVKSVAQQSGRALINARTMLVSQCTQLINAIRGMLAEVGVIAATGQKGFGQLAALLDRADASVPASLLPALRPLLQQWRTAGAAADAIETQIIADAKAHPTMRLLMSIPGIGALTAHAIVMAIGDGKRFKSGRDFAAWLGLTPLMYASGNRTRVGHISCKGDSGLRRLLVLGASALTRQAKSRDASSAQEHWLHGVLARRPAKVATVAQAAKNARIAWAVLTSGRPYQAKRCATTVAA

SEQ ID NO: 66133 - protein, 317 aa, unidentified
MENNAIKFKMIGVDVAKLKLDIAFDDKHIITIDNQKDSFKQLLKLIADATQVCFVMEATGGYEKPLSNFLLAQGIAVCIVNAKRVRDYAKAIGRHAKNDRIDAQVIRLYAEMAQPKQLEQRSTGAHQLEAQMKRRDQLIKQRTMEKQHLEAANDADSIRSIKKFIKAFDKEIERIEVNIKKLIETNKALQDLRKQLTQVDGIGEVTISILMAQLPELGQLSNKQISALVGVAPFCKDSGTMKGRRVVWGGRASIRSVLYMATLSAIRYNKPIRTFYQRLVANGKLKKVALVACMRKLLVILNAMVKKGSEWDPDYVN

SEQ ID NO: 66134 - protein, 438 aa, unidentified
MSNKVIFNLDELFISVGIDVGADFSWMSIALPNQQFVGKPYKILHISIDSLTTAVSKIKEAEELYSLESRIFLESTGIYHYPLFCYLRDKGFNCSVINPIITKNSTNINIRKVHNDRFDSKKAALVGLKPDLKVSLMPSDLALNCRNLCREYYDLMDNRSAYVNKLQGELRMAFPQYLGIFSKVTINTSLTLLETYTSPSAFLKADKQEIIDIIKSTARFGLTYAQNKYNAIIQAATDANQFGYIIDSNIKRIRLYISFIRKYDEEINSILESLHELVDANEDSDFVKQIHLIETFKGAGFLSAVSIMGEIGDFSAFSKPKQLFAYFGLDPAVKQSGKFEGTKVQMSKRGSAIARRVIHTLTLQSISISRNREAKNPVLREYYLKKCDSKPKLVAMGAVSHKVCNMIFAILRDNKPFKIIAPQEHIKQYNSAKCDIAA

SEQ ID NO: 66135 - protein, 341 aa, unidentified
MEEYIGLDVSMKETAVSVRRDGKRVWRGKCASDPKVVAALLRKHAPVARRVVFETGPLSVWFYHALTAEGLPAICIDARHAKAALDMAANKTDANDADGLAHLAEVGFYREVRVKGFGSMLTRTLVAARTRLVRIKTELSNQIRGMMKTFGLIVPAGKGSTFEANVRALLADYAELASIMLPLLEVWRNMRLRAAELGRQLVADARKSEACQLLMSIPGVGVVTATSFATAIEDPDNFKKSRSVGAWLGLTTRRYQSGEVDYDGHISRRGDTHVRSLLYEAATVILTRSTAESTLRTWGLALRERVGFKRAAVAVARKLAVTMHAMLRSGEMFDRTAGVVA

SEQ ID NO: 66136 - protein, 455 aa, unidentified
MAKQKRQTKMKVQVNALEHINPHAAGIDVGAEEVYVAVPPDGDSESVRAFPTFTADLRRLAEWLNACRIETVAMEATGVYWIPLYEILEAEGFEVCLVNARHLKNVSGRKTDVLDCQWIQQLHTYGLLNPSFRPPEQIVAIRSLVRHREMLVRYRSAHIQHMQKALTLMNVRLTNVLSDITGVTGLKIIRAILGGERNPKQLAQLRDERCKKSQAEIAKSLEGHYKREHLFALKQAVELYDFYDQQLKACDAELEAMYQEFDPPEDPGTPPPKPHTQKRRKNQAYFDLAPALYRLSGVDLTQIDGVDELTVQKVLSEIGTDMSKWPTVKHFTSWLRLCPNNKITGGKVIQSGVQPTKNRASVALRIAAASLKTSDSALGAYFRRMRARLGTPAAITATAHKLARIIYFMLKNRLPYHDFGSDYYEQQYRTRMLRNLNRRAAMLGFRLEPAVQGVS

SEQ ID NO: 66137 - protein, 454 aa, unidentified
MAPRHKKTKKKIVAQLPTLHPHAAGIDIGAREIWVAVPPGSDPKPVRAFDTFTDDLLKLRDWLLACGVQTVAMESTGVYWIALFQILEAAGLEVCLVNARHCKNLPGRKTDVQDCQWLQYLHSVGLLRASFRPPEHVCAVRSLLRHRSRLLRCAADQVRLMHKALTQMNVQLQHVISDLVGVTGEAIVQAILAGERDPLMLAALKDPRIKASRDTIARSLHGDWRPEHLFTLNQCYQTWQHYQKQITATDAQIERQLATWDARVDVQAQPLPAPRTTHRTPQRNEPQFDARTECYRLFGVDLTQIPAFQSPTALLLLAELGPDCAHKFPSAKHFSSWLGLCPDNRITGGKIMSSATRDVKSRVAEALRLAAQSLWHAQNYFGELYRRWKARLGTPKAITAMAHKLARILWHLLKFKVPFNPEIFRKEEEKMRRKKLARLQNTAAALGYRLVESQ

SEQ ID NO: 66138 - protein, 413 aa, unidentified
MLFAGDDWAEDHHDVEIQDETGRKLAARRLPEGAAGIAALHELIAGHLGHNGDPGQVVVAIETDRGLWVQALVAAGYQVYGLNPKQVARFKERYNLSGAKSDAADAHALADMVRTERHQLRAVAADTPEAEAIKVIARAHQTLVWERTRHTLRLRSALLEFFPAALAAYAGLGLTGADTLELLVKAPDPASAARLSAAQITAALKRARRHNAAVKAGAIKDALRMQHLIQPTAITAAYAASIRATASALITLNEQISELERQVEAHFRQHPDAAIYLSQPGIGTVNGARVLAEFGDADGRYSSARARKNYAGSSPITRASGRSKIVLARYVRNDRLADALQSQALSALTGSPGARAYYDKQRERGLGHNAALRQVSNRLVGILHGCLKTGTLYDEATAWPDHHATRHASRLAA

SEQ ID NO: 66139 - protein, 368 aa, unidentified
MDVLYQSCAGIDIHQANIVVCILHGPLTSTRPKHEMATFDTTTKGLRACHDFLSQFHVEAVGMESTGVYWRPVWRALCDDFELILAQPAHIKAIPGQKTDKKDAHWIAKLTRIGLLPRSFVPDETIQELRELTRQRKHYVESRNRETNRIHKILQSGGSKLTTYIEDIMGLSGRNLLQLLVDGTPITPRIVHQSVYTSLKKKVPQLLEALDGYFSDHHRFMLKQSLEIYDFYQKQIELLEERINVYLSQYEKHVEILDSIPGIDVITASVIISEVGVDMSQFPTAGHLASWAGLCPGNNESAGKKRSTKIRHGNSYLKKYLCQAAFAARNQKGSPLADRFYQIQSRRGSQKATIALAHQLLKIAYILL

SEQ ID NO: 66140 - protein, 410 aa, unidentified
MDVLYANCAGLDIHKDTVVACSRRVSAGKVIRDVRTFKTTTSDLLALSDWLASQGATHIVMEATGVYWKPVWNILSDGDFALILANAAHVKNVPGRKTDVNDATWLADLLAHGLIRASFVPDAQTQEQRGLLRTRKQLTRERTSHVQRLQKTLEEANIKLDSVISDVIGASGRAMIEALIAGETNPLRLASLASSRIKASPAVLGEALRGRVRRHHRFLLRLHLQQIDALDRAIAEIDKEVEANLAPFRDLIPVLTSIPGIGELAARVLLAEIGTDMSRFPTAGHLISWAGLCPGNDESAGKRRSTRMRKGAPWLKTTLIQCAWAATRKKTSYLAAQFHRLRARRGPKKAVGAVAASILTAAYHMIANGAFYQDLGADHFERRAKPNQIKRLVAKIQSLGYNVELKPLAA

SEQ ID NO: 66141 - protein, 474 aa, unidentified
MAARRLLTRGPNPLEPPEAQPQTVPVGKRTALKVQEKVAPRRAGIRATCRSCSAAARARSEGGALVRYYLGVDWADQTHAVWVVDERGTKLTARAVPHTAEGLSEWGRELDEWRAQGIELWAAIERPEGRVVDFLLDHGVVVYPVNPKALDRARDRFRQSGAKDDPFDARVLADFLRTDHAHLHALQPSSEAAQELKLLTEDYHRQVRQQTRLVNQLTITLKAYYPRALEVAESTTALAREFLQAYPTPEAVTALTKRQWQRWARAHHLSETRTRALWEVLQQPQLPVPAHVVRPKARLMRTLVAELAAVVAAVGEYREAIEDFFASMPTAQWVRTLPIGDHGITAPTLWARLGDAPERWESFRHLQAQAGAVPLTKRSGKQRVVQFRFACDKALRYVVDHVAFLSLRSCEWARAYYDQQRARGHSHRQALRALGAKWLKIIFVMWQRQASYDDQYHLASMARQQLRQPQKKIA

SEQ ID NO: 66142 - protein, 412 aa, unidentified
MEVLYACCCGLDVHKETVVACVRIQEPRGRAKTTVRSFGATTAELLELHQWLTEQGCTHVAMESTSVYWKPVFNLLEGSFEVLLANARHIKAVPGRKTDVKDCEWIADLLAHGLIRASFIPPAPIRELRDITRHRKSLIRDKATLANRVGKLLETANIKLSNVVSDVLGVSGRAMLAALIAGERDPKKLAALARGRLIPKAEQLAEALRGGFSSHHAFLLEQLLKQIDHLAELIAACDARVVDLCQAHREPLQRLRTIPGVAQRTAEVLLSEIGLDMTRFPTAGHLASWARMCPGNNESAGKRRSGATGTGNNWLRTTLLESAWAASRSRKTYLGAQYRRIARRRGPKRAATAVAHSILVIAFYVLRDGVEYRDLGPDYFDRANAAKLTKYHLRRLAELGYELPQPRAQPGA

SEQ ID NO: 66143 - protein, 421 aa, unidentified
MTPPNEVVWAGIDTHTDTHTIALLDERGRPLGAETFTADPDGYDRLIGMLPGPGRVAAVGVEGTNSFGAALARRLTAAGYEVREVLRPRRSVRRRDGKSDPLDAVAAARSVMAGDGTSLPKSSDGWVEALRHLNAQRSQLVSAMTAIPDSTNGLLAAAPEPIRERYRGLRSETRMNRLAECRPAGGLVERSVLAALKSAAKAWKALKRQAGLLEERMRLILEEHARPLLDMYCAGAVIAATLAIVAGDNPERIRSEAAFAKLCGVCPIPASSGRTNRHRLNKGGNRQGNMALHRIAIVRLRYHKPTRDYMAKKTREGKGKLEIIRCVKRFIAREAYRALISIRNGEVGRGTPAERGAKLRELRVSRNITQQQIGEALCVPSSRISEIERGARDLPELEQRAIQWIHSTTNPKQHTQTLDNV

SEQ ID NO: 66144 - protein, 398 aa, unidentified
MTESSDYESVQVFIGVDVGKDTHHAVAINRSGKRLFDKALPNDENKLRSLISDLKQHGQILLVVDQPATIGALPVAVARSEGVLVGYLPGLAMRRIADLHAGEAKTDARDAAIIAETARTLPHALRTLKLADEQIAELSMLCGFDDDLAAQTTQASNRIRGLLTQIHPALERVLGPRLEHPAVLDLLQRYPSPEKLASLGEKKLAAQLCKLAPRLGKRLAADIAQALAEQTVVVPGTNAAAVVLPRLALQLITLRKQRDEVALEVEQRVLAHPLYPVLTSMPGVGVRTAARLLTEVACRAFASAAHLAAYAGLAPVTRRSGSSIRGEHPSRRGNKALKRALFLPAFAALRDPLSRAYYTRKMSQGKRHNQALIALARRRCDVLFAMMRDGTFYTPQGS

SEQ ID NO: 66145 - protein, 349 aa, unidentified
MNYVGLDIHARNFNISVLSKDNMIIFETELPTSADNLRSVIGAIAEPKCVVLEESTVAAWAYRTILPYADQVIVADPVTNAWISKDENINDAEAARKLAQLLRAGYINPVHHNTQHNQLFKELVQLYHDTSAEVARFKNKLKAKFRQHGVNCTGTQVYSDKGRQRWLEQLEDAGARYQVEFLFNTIDHLQAQKDRLRRDIAKRAKAFEAIGRFQQIPGVGLIRAATFFAIIDTPHRFANKRKLWSYCGLGIAKQTSDQMSGPQHLTRRGNPMLKAMAKGAAVTAIGPRDNRFAVQCRALLIKGVRPESARLTVARAIISTLWAMWRKDEEYIPGKRSVAGFDAQTKQGG

SEQ ID NO: 66146 - protein, 317 aa, unidentified
MNNPDSFLGIDIAKDWLDVAWLSGQTLRIDYTDEAVAGLTERLLADPPSLVVMEATGGLETAVASALAAAGLPVAVVNPRQVRDYAKARGRLAKTDRIDALILAAFAAAIRPQVRELPDEHTRALGELLARRRQLVEMRVQEKLRIQRASALQKASLREHIAWLDERISRLDIDLTHALRTSDAWRDKDDLLKAIPGVGSLTRATLVALLPELGTLTRRQIAALVGVAPFNRDSGKHQGDRVIWGGRAQVRRALYMAAVSAMRCNPVIRAFYKHLRSQGKPAKVALTACMRKLLVIMNAMLKHHSPWSPELDLQHSC

SEQ ID NO: 66147 - protein, 343 aa, unidentified
MQVSAIGVDLAKNVFQVHGVDSAGKVVITRQLRRKQVIDFFSKIPACLVGMEACGTAHHWAREVSKLGHTVRLMPPSSVKGYVKRSKNDAADAAAICEAVTRPSMRFVPIKSADQQALLMLHRTRDLLVRQRTQLINALRADLAEFGLVAATGREGLAQLAAIITDESNREALPFAMKQALQTIIDQLAALELQIGTLDRAIHAHHRDNDMSCRLETVPGIGVIGATAIASTVADAGDFKTGRDFAAWIGLVPRQHSTGGKERLGGISKQGDRYLRRLLVIGATAVVRQARQHPQKHPWIMRLLARKPAKLVAVAVANKMARIAWAIMAKGGYYRAPELAAAA

SEQ ID NO: 66148 - protein, 490 aa, unidentified
MVRGSGQRRAAGQCEGPVLVDSVGSLVPKRPHMSMVLEDLPRESWIVAIEHERQTSAIAQSSPSPGTGHGLEHPALARRGREMAAMEIQHERCAGMDISKRDVKVCVRTPGVRHRTFDKEITVWAATTPQVRALSEYLLQQRVSLVVMEATGNYWKPFYYPMEAELNVMLVNAQHAKNLPGRKTDVSDAQWLAELGAHGLVRASFVPPEPIRELRELTRARATSARERTREIQRLEKLLEDAGLKLSSVATQITGVSCRAMLAALIAGERDPAILADLAKGRLRNKTAALTEALEGRFTSRHAFMTRERLDRIDAIEASITRVEQQIASAITIAGYDPAVTLLRTIPGVSTTVAHVIIAETGADMTRFPTAAHLASWAGLCPGDNESAGKVKSSQIRPGNTYLKAALGIAAMAAARNNGTYLQARYKRLAARRGPMRALVATEHAMIISVWHMLTTGETYNDLGTDFHNPNNPPKPDAEQSHNSNTSATR

SEQ ID NO: 66149 - protein, 421 aa, unidentified
MPNIEIGVDSMVKENFIYVGIDLHKETHTAVMIDCYNQKLGEITFPNRPAAFLKLVTKVKKCNTDGKEVVYGLENAYGYGRALAVWLIDKGYLVKDVNTAISHRQAKHRGAMYRKSDSDDAKAIALATLNMLDKLPDACPNDAYWSLGQLVHRRDNIMKQRTRLVNQLHEQLCIAYPSYKQFFNDISRPTALYFWEHYPSRKYLKGKSVEDLRAELVPVSHNKCSTKTCEKILDAVASDKVKNNAYQDARDMVTLSIVSDLQHYDSQLAEVDKMLEQMYKMLGCTLTTISGVNVITAVKILAEIGDIKRFSNANKLAQFAGIAPLHLSSSGKGKDVATKQGNRRLQATIYFLAIQMVQVSSKGTPRNPVVRAYYEKRKAEGKTSQQALICISRRLISVIYGMLKNGTEYRMPVVENAGENR

SEQ ID NO: 66150 - protein, 372 aa, unidentified
MNQNILYVGLDVDDTQYHGSAFNKDTGEVIDFKCRPTLKGLLQQLDRTARHFPGCTISLCYEASYVGYCLQRDLISHGVHCDVVSPSSIPSPRGKAVKTDRIDAGYLAQFYANDLLTIVQPPDEEQEQDRDMLRSRQKLLQQQTQLRRHMQAVLRRSGLHYKAETGNKSHWTKHHYGWLARTIDGLSGSLKVNLTLLLRELTGLNQVLVEYGQQIEVLASTARYQESVQALTCYKGIKNIFALTMITEIGDIKRFPHPRKLMSWIGMDIREYSSGGKHHRFGITKQGNRYLRTAFVEANQRGYRTARINKDLKARRKNTAPELINIADRCLRRLNKKGNRLLLAGKHPNKVKVACAREMVGFVWESLNKVAA

SEQ ID NO: 66151 - protein, 331 aa, unidentified
MSMHVGLDVGSRTTAMGWRNDGRFAGACNIDQTPAGRKAAVNKLLELKPLSVVMEATGIYYLDLAMELAAAGLPVSVINPKSFHNFAKLMLKNSKTDAIDAQLLAEYGERMSPRLWTPPTAIQLELRAIGRHINRLTCHRTRAKNELHALKATQTTLTMLIEDEEEAIEAFDKRIERFRLAGRALIDNCPTLSAQFGHMIAAPGMGEISVFAALAELTTLPVTLKSAQVSRHAGLDVRLTQSGTSIDKPGRISKGGNAYLRSAMYMPALTAIRCDSNVKAYYEALIGRGKRKMQAIVAVMRKYLTGLWACMQAGEDFDTAKLFSAKDLAKA

SEQ ID NO: 66152 - protein, 375 aa, unidentified
MNQFIKYVGLDTHKDTIAVAIADAAGGKPRFYGEIANTPTALSKLMKDVSPNGEVVSYCYEAGPCGYGIYRQISGLGHDCAVVAPSLIPTKPGDRIKTDRRDSENLARLHRADELTPVWVPDQEQEAMRDLTRAREDMKHLERQARQRLCAFLLRHGQRYDGGKSKWTQAYWRWLEQIKFGHRVQQTVFQEYIDSVKQQQQRVADLEQAMHEALADWTLAPVVEGLMALRGCRLITAMTVVAELGDITRFDSPRQLMSYLGLVPSESSSGPKTRRGGITKTGNGHVRRVLVEAAWCYRFPARKTAELQRRAEQTPEEVQAIAWKAQKRLCGRYQALNKRGLLPQKTCIAIARELTGFIWAIACEVMPVNPTKANT

SEQ ID NO: 66153 - protein, 484 aa, unidentified
MPFLPTAAQALRERFIGLDLAKRETQLSVLNTAGEEIAVKRFLTRREQFQQLADELNANDTVALEVTTNAFAVVRLLERSGARIILSNPIKTRVIAEAKIKTDKIDARVLAELARVNYLPSVWLPDSDTEALRHFCSDRRSLVDRRTELKNTVHSVLHRNLIPVSHSDLFGTGGQKWLESVLADQDDEAATNIPLDPIDRLRVRALLLELERLEQSLKELEGCIAAFIAARPALRAQLDHLLSIPGVSLVVGAGLLAAIGNVQRFHSPKRLAAYFGLVPATYQSGDPRRKHGPITKRGRAQARWLAVEAAEHLRKAPGPMRALYTRIYRKRGHNVAVTAVARKLTELVWYLLIRESDYLYQLPRLADEKRARVRFLARRRVGLRTPSAARKLSGRTALYGSGIAGRSFKTKIVRHAAKQAEDLYAAIVGNTHQPKAAKSIETESPNFDPTRPRTVDWELLLRQAATDLLEDHSNSSHRKEKRNH

SEQ ID NO: 66154 - protein, 396 aa, unidentified
MPTMTYSTATQLTPSEQTHQAHHEVTGGVDTHKDTHTVAALDASGRLLGHREFAATPAGYAGLLGWLRGFGQLVRVGIEGTGVYGAGLAGYLQGVGVELVEVDRPDRKTRRWQGKSDPVDAEAAARAAQSGRATGIPKTRGGQVDALRALRTARRSAVAARAEAQTRMKALVVTAPDPVRTALRGLGDRQLVEHCATRRPDRAAAGDPATATVLALRALARRHQQLTAEIDEFDTLIGPLVAAINPALVALSGVGADVAGQLLVTAGDNPHRLRSEAAFAMLCGVAPLPASSGRTHRHRLNRGGDRQANAALYRIVLSRLRWDPRTRAYATRRTTQGMSKPEIIRCLKRYIAREIYTALLAPGPSSVPALPSTVPEESTWSARSAARTNDVDTDKR

SEQ ID NO: 66155 - protein, 312 aa, unidentified
MDEAGVTVGIDVSKDRLDVCVLPHGEAFAVPRDGEGLLALTEQLVGLRPKLVAVEATGGFEATVAAAVAGAGLPLVIVNPAQVRAFAQAIGRRAKTDRVDAEVIARFVEAVRPEVRALPSAAGQLLSDLITRRRQIVQMIGAEKQREKRQAQPRLKRSIARLVAALTKELTEIDRQIDDEIRGSPAWRAKEDLMRSMPGVGPIVSRTLLAELPELGRLDRRQIAALAGLAPWTRQSGKWKGKSFIGGGRASVRTALFMAALVASRHNPQLRAFHQRLIDAGKPKLVALTATARKLLTILNTMVRTQTPWSHA

SEQ ID NO: 66156 - protein, 322 aa, unidentified
MLYVGIDVAKNKHDVTALNVPGKTVLKPLTFSNNKAGFELLDLSLRQLNQDCLIALENTGHYAFNLLNFLHEQGYKVYTYNPLLIKEFAKSLSLRKTKTDKKDAHGIALKLLSDPNREQFQHDNRQVELKILARHIHRLKRKQSDWKKQSDWKVQYTRCLDIIFPELDKIVGKHSEYTYQLLTCYPNPQKRLEAGFDKLIEIKRLTASKIQDILSVAPHSIGTTSPAREFEIIENIKHYKRLIDKAEKCVNDLMAEFNSVITTVTGIGNRLGAVILAEIQNIHAFDNPAQLQAFAGLDSSIYQSGQIDLAGRMVKRGSPHLR

SEQ ID NO: 66157 - protein, 401 aa, unidentified
MPELWAGTDAGKAAHHCTVIDTDGTKVLSRRVPNNEPELLELIGDVLALAEDGPVTWAVDLNAGGGALLIALLTSHGQRLLYIPGRTVHHASRGYRGDGKTDAKDAYVIADQARMRRDLQPLQEWDEIAMDLKILTARRYDLAADRTRAINRMRAQLLEYFPALERTFDYAASKAALILLTGYQTPAGLRRVGPSRLATWLKNRKVRGAQAMADAAVAAAQAQHTAVAGESTAAAVVNTLARSVLALDEEIAAVDAKIAARFQEHRDAEVILSMPGMGPLLGAEFVACTGGDMDAFGTAGRLAGVAGLAPVPRDSGRISGNMRRPHRYHRRLLRVFYLSAQIAARFCLTSKTFYDRKRAEGKSHKQAILALARRRLDVLWALIGDQRTFEAQPPQQGLAAA

SEQ ID NO: 66158 - protein, 342 aa, unidentified
MKKIFIGIDFSKLKFDAAIFQTESKSIVSNEVFDNNHSGYIEFLKWVKGNTVCQQSNLLFCGEHTGYYSANLSTFLYDSGHDLWLVSGLQMKLSQGIKRTKTDRMDACKIAEYAYRYQDKVLLFQPISNALEQIRDLLSYRERLVETRKVLSTSAKEMKRVKNTASCDFIYLDSLDYIKSLSKSIRNCENRIEALINEDIALSTNYKLINSVVGIGLVNATLILVATSNFSTFSNARKFGCYCGVVPFEYSSGSSVRGKTRVSKLANQHLKTKLTLAAQNSIRHDPELKDYYLRKRNEGKCHWLVLNNVKNKLIHRIFAVVRDGKMYSKQYLHPLKSALLEC

SEQ ID NO: 66159 - protein, 340 aa, unidentified
MLYVGLDVHSKFTMVCVLNSDGKVIERQCLRRIEQLLDFLQRLPAFAVCYEASCGYGWLYEALSKVAARVVVAHPGRLALIYRSKRKHDRIDAERLAKLLYLGEVPTVHVPSAEVRSWRELINFRRRLIQTRTRAKNGVRALLRSVGVTPPSRPGLWTKRGLDWLKGLDFSQPLSALKRDLLVDEIQNLSAQVLRVERELARFSQTHPVVEQLQSIPGVGLRTAEAMVAFLDDPHRFPHAKAVGAYFGLVPCQDQSGSHNRLGHITREGAPVVRQLLVEAVWQAVRHSATVQAYFERLQRNDPDRKKIAVVGTAHYLARVMWAMLRDGTLWRETVTAAAA

SEQ ID NO: 66160 - protein, 413 aa, unidentified
MLKIVYPICCGMDIHKNFVVACIATTDDQGVTTYKKKRFSTFTNDLRRCASWLAENNCTDICMESTGKYWIPIYNALESSCRIVLAHPKYVKAIPGKKTDEKDAKWIADIFKHDLVAGSFIPPADIRQLRDLMRYRWKLTNCTVGEKNRAQNCLTVSNIKLDDVFSDVFGKTASAITDRLLKSNKPFDVTPYLSRRIKTPVEKIQAAVDGEVCAEQAEKLRIIRSHMNSLDLCKANLESLILSTAQKFLPQLELVMTVPGIQSYSAIGIISEIGVDMSVFPTSKHLCSWAGLTPQNNESAGKKKTTRISRAGAYIKPLLVQCALAVCKSNKHPEIKNRYLSLKKRRGHKKAIIAIARMLLTAIYNILKKNEPYNPELYLRCNNTPPEHRAVSVEEAIFILQRQGYLVTPSAPG

SEQ ID NO: 66161 - protein, 343 aa, unidentified
MNYYAALDVSLRSVHLCVMDEKGEIRSEGQVDSEAEAIDTFLRKLELEITTVGLEAGTLTQYLTYGLRDAGYQVVCMEARQVKVALSAMRNKTDKNDARGIAQLLRTGWYSPVHVKSIESHQIRALLSSRKAVLTKCVDLENEIRGLFKVFGIKLPPSLGHGSFDRAVRETIETDRALCHALLPLLDARLVLYQTFRELDNRTRHMAHQDPVCQRLMTTPGVGFVTALTFKAAVDDPTRFKRSRTVAAHFGLTPRRFQSGEMDNPGHISRAGDPEVRCTLYVAANAMMTRSSRWSPLKVWGMKLAKQRGHKRAVVAVARKLAVILHRMWLDDTTYRWSTEGAP

SEQ ID NO: 66162 - protein, 402 aa, unidentified
MNAISVGIDVSKGESMVMAMRPLGEVVLKPRKVQHTAGELKELARLLKGLGGEVRAVMEATGRYHEPIAEALHKADIFVSVINPKLIKDYGHNTLRKVKTDKADARKIARYGLEYWDKLLGYKPTEAVRSRLKQISRQLTLYTQMKTQLKNNLIAILDQTFPDANKLFDSAAKPNGHQKWVDFVTTFWHCTCVACMSEAAFIERYRRWCKRFGYHFGTNVEDIYRASRGQAVLLPRSTDTKLLVTEAARQLTAISSTVELFRAELLRLAQSLPEWPIVASLYGAGVTTGPQLMAEIGDVRRFSSRKALIAFAGIDPGENQSGQRESQNGSTSKRGSAHLRRTLFQVVETYVKRKPQNHPVYLFYAQKRAEGKKYYVCTTAAANKFLRIYYARVKEYLETLDA

SEQ ID NO: 66163 - protein, 412 aa, unidentified
MTHPQHTHFAGFDWAGDHHDVIIVDSAGVLVADFRFDHSAAGWQQWRDQIAAWPHLGVAIETSFGAVVEQLIDSGVTVYPVAPSSAKGYRQRKYPGGTKTDRHDAWALAGALRTDGHAWRALSAKDPIIEELRMLCRDEIALIEERTALVNQARQAAREYYPVVLEAFEDWTLPSTWAFIESFPDTQALLKAGRRAWQKFFHTHKLHRAEAVQRRIATLEAAGQWRIAEPMVKAKRLYLLTKTRQLRALHIQLEEYRRRIEAVFASHPDSGMFGSLPGAGAKLAPRLLGEIGSDRALYADAHSLQSVSGTAPVSYQTGKLHKVQMRRACNRHLRHTMHLFSDLSRAQCAWAKVYYDGLKSRGKTHAQALRSLGQRWLNIIFRMWQNHTRYDPELHTRNQLQHGSWVLQHTPS

SEQ ID NO: 66164 - protein, 370 aa, unidentified
MLNTTTFVGLDVHARSIKAVALDAMTGEVRSATFGYDAAAVAEWVGSLDPAAKCVYESGVTGFDLQKKLTALGVDCVVGAVSKMIKPSADRKRKNDRNDAEFLARMLSVGNVVEVWVPDDECEAARDLVRALDDAREDLKRCKQRLSKFLLRHGLVFSETNAKGQRKKNWTAAHWAWIRSISFPEKADDDVLAYYIDATRQAMEDKARLERLVEAEASKPRWKRRIDSIRCLKGIDVTSAADLVFEAGEFSRFKNARSFAAWIGLTPSEHSSGESVRQGGITKAGNKHLRRVLVESAWHYLGCSPHSKDLAKGQAPDPGARRHAAKGVRRLVGRRAAMLERGVHKNKANVATARELACWCWAIGCMVESA

SEQ ID NO: 66165 - protein, 372 aa, unidentified
MKSVIYVGIDVHKDTYYLSSFLPEKNLIFAQTEMKANSKNVMKYLDKVSDMNDGAVVLSGYEAGPTGFKLCRDLIKWNYNCVVMAPTSIAKTVKDKKVKTDKTDSILLAKSLAFHSFKQVVLPNENIEALREVVRMRHFVQKQCKRARQAFLAFLLANGFSYPYGGKDTYWSKKFMLWVNTIHFNSEYLNFCKEEYLAEAVRMIQRVKALDKKLEELQENEEIKENVRALKCISGINTLTAMTLITEVGDFSRFKTAGHFASYTGLCPGSHSSGLTDRSTGITKQGNRIIRRLLIESAKAIRRSSPQKSSVLLKRQQGVSSEIINYADRASTRLRRRIRRLDNNGLNHNKVSAACARELACFVWGMMTNHIA

SEQ ID NO: 66166 - protein, 328 aa, unidentified
MQGKVSSERTAMATVYVGIDVCKEWLDIHLHPLGRSFRVTNDTAGLRRLKRELDALDQMPPSALHIVMEATGKWHRAVQRSLHADGFYVSVVDPLRARLFAKACGFLAKTDRLDARLLAIMGEALKPAQTPPQDQALEALQELVNARSAANGERTALSNRMKTAVTAFLRKELTRRLAALDTHIARLDAEIERSIGAEPEMRRRLDILICIPGIGAVTAASLIAGLCELGACSGKQAAMLAGLAPLACESGERAGHRAIRGGRPAPRNAIYMAALSASRHNPDLAHFAERLKKAGKPNKVVLVAVMRKLIVLANTLITKNRIWTPNPP

SEQ ID NO: 66167 - protein, 432 aa, unidentified
MKDNPSKKNQPQPALLIGIDWADQKHDVYTINPQGRGNPQGRGALEQLEHTPEAIDAWVTEKLQQAKGQPIAILLEQSRGPLVHALMFRKNVILYPINPKQFARYRESYSNAGCKDDGTDAKLLARMLRERIATLRAWTPDDEQTRSLARLCETRRKLVDERTRLTQQLIAQLKAYFPLLLKLASSSSISPLTLELLKRWPDPRKLKRADRKVLDRVLGEHGSRNEEKRREVIARIRSAALLSSDRALIESAAIMARCWAKQISSLQKAIDELGLKIETEMKNHPDASLFTVLPGAGKAMAPRILTAFGSQRDRYANADEVATFSGIAPVTKQSGKSRTVHRRYACPKYLRQTFHEFADHARKWCPWSRAYYKAQRSKGMKHHAAIRKLAYRWIRILFRVWKDRTPYDPDLYLATIKRKNPAIIPFLETTKI

SEQ ID NO: 66168 - protein, 395 aa, unidentified
MFIVGIDIAKRSHEAIIIAEDGQVVRKAFSFRNNCTGYNLLLEQVRRLTLVKSQIVFAMESTAHYWLALYARLLKDGYAVMVLNPIQSHSLRELYIRKAKTDARDSLIIADLVRFGRCKASNVPQDKILALRELCRSRAYLVDMAADLKRKLIALLDRIFPEYESLFDSVFSKASIAVLSKYSTPQKAKNAHLGKLTDILMESSNGHFGEWKAHQLKEAACSSFGIDDSDGVYSTLLGMFLEQILSLTAQADSLEKQISVFFQEFNNPLTSIPGVGTVLAATILSEIGDITRFSSADKLLAYAGLDPSVKQSGEFKSNQNRMSKRGSPYLRRAIWLASTVAVHRDPMFQTYYEKKISEGLHYMNVIGHVSRKMTAVIFAVLRDGQPYQPILQSAG

SEQ ID NO: 66169 - protein, 347 aa, unidentified
MNFYRRPHKHYCGVDLHSRTMYICIVGQEGAVLLHRSLPCDPVRFLLAIAPFREDLVVAVECVYSWYWLADLCAREGITFVLGHALYMKAIHGAKAKSDRIDSEKTAVLVRGGLMPQAYAYPADMRATRDLMRRRLLFVRQRGSLLAHIQITHHQYNVAAPGKRITYRSNREGLGQTFEDPSVRHSIAADLALADHYEVTIGELELAVLRQARTHDPNALVLLMSVPGIGKVLALTILYEIHDISRFPTVRDFASYSRLVKCERSSAGKSLGTGGNKIGNAYLKWAFSEAAVLFIAKSEQGRTVLKRLERKYGKPKALAVLAHKLGRAVYYMLARKRAFDPQRFVAA

SEQ ID NO: 66170 - protein, 366 aa, unidentified
MEVTTIGIDLAKSVFAVSGGDRRGKVVLRRQLRRAQVLEFMSKLGPCVVGMEACGGAHHWARALTRLGHQVRLMSPALVVPYRKGHKHDRNDADAVLEAVSRPSMRFVAVKTIAQQDLLALHRVRARLLKQRIALSNQIRALLHERGVTARLGAAGLRAAVAAALAADHHELSAELRQVIAELMDELRQLELRIKAFDQRLERAAQSDERCRRLREVPGVGPKIATALVATVGEAREFRSGRELSAYLGLTPRQHSSGGKTVMLGISKRGDRYLRTLLIHGARSLLYRNRRATHPRARWAARLSAARGPNVAAVALANHHARVLWALLNRGDHYRPDRQPGSLPAPPSATGERARAGKLLLHKARS

SEQ ID NO: 66171 - protein, 347 aa, unidentified
MLIIGCDFHPGFQQVAIFDNRTGEMREKRLQHRAEAEEFYRSLRGQQVRVGMEACGHYPWFERLLEELSFELWFGDAAKVRASVVRKQKTDRRDAEHLLHLLIEDRFPKIWVPSLEVRDVRQLLVHRHKQVQARTRTKNQLQSMALSHGVQKKYKLWTQTGRTELEQLPLLPYAAERRRGLLEALDGLEAEISELDRRVGEEARQRPGAVRLMTHPGVGPVTALAMVLTLGPAERFGSAKQVGSYFGLIPSEESSGGKQRLGRISKQGSSFLRFLLVEAGQTAARLDPQLKRFYKRLAVRKNRGLAKVAVARKLATRLYLMLREDWTYAQLCQAVMQVSPSHSVAGE

SEQ ID NO: 66172 - protein, 353 aa, unidentified
MTEYVGIDWAYRRAAWCAMSAGGVISAEGFTPADEDGLAKLVLRLGSDVKACLEMMSGAVWVRDRLRSAGWQVEVADARRVKGVAPLACKTDRVDARVLAELCRRDLVPALWIPSLEERELRERLRRRMHLVRLRTSAMNRIFGLGTQWGLRLSAERLRRQGALELLAQRGVPAVWQRSIEEALAVIDLLEARIAPLEAELAPIARADRDVALLVTIPGVGEMLALTLAAEIADVSRFPSPGKLVGYAGMAPGVKQSGQSSRSGLPLSKAGSRTLRWAAVEAAQHAWRESNPWHQLYSDVAKRSGKNAAKSAVARKVLIASWHMLSRCEPFKPSRPRGGARTVPASSISVLAA

SEQ ID NO: 66173 - protein, 352 aa, unidentified
MQNNNVPLTIGIDLVDKFHEICILNGAGEVISEDRIENEVSTLNEYLDNFRYPKNVLVALEAGTHSPWISELLTMRSFKVLVGNPRKLQMIWQSDFKTDKRDALMLARIARFDKNLLSPIKHRSKKSQCHLAIIKSRNNLVQCRTKLINSVKGMLKSQGIKITAAHTSLTFGRRVMDFVPKEMYSSLAAIIQTINFLTRKITEFDRNIEELCTALYPEAEVLKQIRGVGSLTALTFILTLEDPDRFKKSRDVGPFLGLVPRKDQSGSQDKQLSITKAGNVYLRQSMVAAAHYILGPFGTDCDLRRYGEKIADKAGGKTGKKKAVVAVARKLSVLMHRLWKTQEEYKPFRKSA

SEQ ID NO: 66174 - protein, 313 aa, unidentified
MEQALVVGCDVSKQWVDVCCLDQARMRTQRVSNEPASLKRWAQSLPKGSRVGMESTGTFHLALACALVQAGHTVYVINPRWIHAYARAVGQRGKTDRSDAALIARYVQAEAKNLHSYEPPSAEQAQLRRLLLRRQELVKLRSATKQSLGGEAAMVLKEFNRLVRKLEKKIRDLIDAQPSWCELAKRLRQIPGVGPLVAAHLVQVLTRFAFARADAFIAHTGTDPRPNDSGQKRGRRHISHHGDSALRQMLFMAAMGAIKRPEWRGLYETYRQRGLPSTGALIAIGRKLARVAWHTFKHPEPYDPSKVRVAIAA

SEQ ID NO: 66175 - protein, 356 aa, unidentified
MNEASWVGLDVHARSVVAGVIDEASGEVRSLRVTPGREATVAWLKTLPAPVRVVYEAGPTGYGLARACAGAGISCVVAAPSRIRPGADRVKTDRRDAERLARLLRLGEITPVRVPGPEEEAARDLVRAREDARGDLMRARHRLSKLLLRYGAVYDATAWTRAHDAWLRRQRFQSGPLAIVFDECYGRMLDAKTRRDALDVAIAELAATPPYVDVVERLVCLRGVSTLTAFALTVELGDWSRFRPESLGPFLGLTPSENSSGERRRQGGITKTGNAHARRLLVEAAWHHRRPPRLSVTLERRRTGKPLAVRAQADRSARRLHGRWHALEARGKPRTIVVVAVARELAGHCWALATME

SEQ ID NO: 66176 - protein, 436 aa, unidentified
MKGGQLRFIGLDVHLDFCEIAISEQGRVRSGGRVPSSPEGLQVLADSLAPDDHIALEATGNALAIARRLGPQVARVVVAARKELRAISEAKVKTDRHDARTLARLLAAGLLDGCWLPDEKTRSLRRHLSRRAQLVRQRTRCKNEVHAVLMRNLKGRPPMSDLFGKRGRAWLGELELPSDERQTVDGCLRQIDFLDGEVGLLEKEIAQHALASEDIQRLMTVPGVSLTTAATFIAAVGEIDRFPSPRKLVGYLGLDPKVRQSGSETARHGRISKQGGAQARQMLTEAAFVAVSTPGPMRAFYQRIRARRGSQIAIVAVARKLAVLFWHMLTRQEDYAFARPSLPRHKLRELELRAGAERHPGSHSLEHRSGYHQRPNRERERELSVQAEIAYRRLVSDWKAAGPAKLGAGATPGRASSRPSLRQAARQAPKPQRPAL

SEQ ID NO: 66177 - protein, 367 aa, unidentified
MSSVASAAGLIHLGMDTSKNTIMVATLLPGEESPVTDRVANEEAAVRRLVGRFADRSVLRAWYEAGPGGYELYRLLASMGVACQVVAPSLIPKGSSDKVKTDRRDSRRLARLGRAGELTPVRVPSPAEEAVRDLVRARGAVLEDRKRAQQRLTAVLMRHGRIWRGASYWTAAHRAWIAAQRFGEPPLAAAISYYRATLAVREAELAAVEAELIPWAAREPLAGPVARLGCYRGIAELGGLTLAAEVVDCRRFPAARAFMSYTGLVPAEYSSGERTRRGHITKAGSEPVRTALTEAAWACRHAPAIGAGLRRRQAGASPETLARSWTAQRRLHARYGHLVQDAGKAAPEAAVAVARELAGFVWAEMTA

SEQ ID NO: 66178 - protein, 384 aa, unidentified
MFKHNILFIGLDTHKVATEVAYIEDQRGAEAIHLGRILSNKQSIKKLVRQMESKYPHATLHFVYEAGPCGYWIYRYITSLNHCCYVIAPSLIPKKPRDKIKTDERDALKLAKLLKSEDLTPIYVPEPEDEAVRDLSRLRQTAMEDLKDAKYQLKAFLLRNNILCKTKDNWSLKHLRWLTELILPTPCQQIVLQEAIQTISERTNRLKRLDNEFEHNVKKWRYYPVVKAIQAMRGVKLLVVTGVIAELGDLTRFNHPRKLMSYLGLVPSEHSSGSKRHLGAITKCGNGRARRLLVEGAHGYRYEANISKEMQLRQEGLSKEIIDIAWQAQLRLCRRYQKFMHRGKHRNVVVTAIAREMIAYIWAILREVVLSPVNKKLRIARMPS

SEQ ID NO: 66179 - protein, 396 aa, unidentified
MSNPQIFRLMRRVCGLDVHKDSVFLCILHDSGEIFEKVFGVLTHELRDMRRLMQSHGVTEVTMESTAVYWIPIWRVLEPYFRLKLVNPYFIKQLPGRKSDVKDAQWIAECTLKDLVRGSFVPPERIQQLRQYDRRIFDLDAEIVRKLSKLDAVMQRCNIRLSNYVSNTDTKSYKDVVGKLCEGVTDPEVLIKEIYGRIIKRHGRETILAALTGVVSDAEKDTMRQLRNELDLAEKHKQECMDKMLHICQIYYPNELKRLMTIPGIKERAATSLIAEIGVDMTKFQTAAHLASWSGLKPRNDESNKKIKSRRITHGNVYLRKTIIECAWGASRTKDCFFSRFSYRQTVVRRKNRMKVLVAVARKLLIAVWHVLHDETDYKDFEINNDCDTSVEENNG

SEQ ID NO: 66180 - protein, 324 aa, unidentified
MTASAECLSSPVFVGVDVAKKAWDVQLLPAGRSLKLLADDAGRMALLAELTPLGSCLVVMEASGGYERELAAELVAAGHRVAVVNPRQVRDFARGVGLLAKADALDARVLAQFAMKAEFRLLEQLPEKQGELDALVTRRRQLIELRTMEKNRLGQASCRATQKSIARILDATGKQLRDVDRLILKLVESHDDWRRTAEIVRSVPGVGQVTSATLVAELPELGKLDRQAIAALAGLAPYNNDSGALKGKRSIRGGRASVRCALYMAALSGMRYNPLLKRFAIRLRKLGKPAKVVITACMRKLLTVLNALVRNRTPWNPELHQQTS

SEQ ID NO: 66181 - protein, 395 aa, unidentified
MFIVGIDIAKRSHEAIIIAEDGQVVRKAFSFRNNCTGYNLLLEQVRRLTLVKSQIVFAMESTAHYWLALYARLLKDGYAVMVLNPIQSHSLRELYIRKAKTDARDSLIIADLVRFGRCKASNVPQDKILALRELCRSRAYLVDMAADLKRKLIALLDRIFPEYESLFDSVFSKASIAVLRKYSTPQKVKNANLRKLTDLLMESSNGHFGEWKAHQLKEAACSSFGIDDSGGVYSTLLGMFLEQILSLTAQADSLEKQISVFFQEFNNPLTSISGVGTVLAATILSEIGDITRFSSADKLLAYAGLDPSVKQSGEFKSNQNRMSKRGSPYLRRAIWLASTVAVHRDPMFQTYYEKKISEGLHYMNVIGHVSRKMTAVIFAVLRDGQPYQPILQSAG

SEQ ID NO: 66182 - protein, 341 aa, unidentified
MDKELYFGVDVSKKTLDLAYYDGETIDWKNAHIKVSNDDAGFKKIGSWVAKVGKDFDTFLFCMEYTGLYNQNFRLWLESKEYIYGMVEPRKMHRFEPDLDDDQRSLDRIKTDELDAFRIAIYCEQNHKKILRNPSKLPSPVYFKLKRLLAERKQNTKQSVLYKQQLHDICAYDTDLSVERKKLLLKNMQENQKAIDKEIDSYMNEDTSIRKNYNLLTSIPGIGRIIALETIVLTENFTAISNPRKYACYIGIAPFKKESGTSVRKKTGVSKKGFSEAKADLSIAVLSAIRNNPSIRDYWIRKRKEKCGGIVLNAVKFKLVLRMFAVIKRGTPYVETDAYKN

SEQ ID NO: 66183 - protein, 363 aa, unidentified
MIIIGVDYHPSFQTIAFLDQETGECGERELNHSDGEAEKFYRELQQRGVSVRVGVEATGHSRWFERLLAELGIEVWIGDAAKIKTMRVRKQKTDREDARLMRKLLLENRFPRIWVPSPENRDLRQLLWHRHRLVQMRTRIMNQLQAVAMNEGYRWKKKLFSAQGRALLEKLSLAPWASRRRKELLELLDQLDPKIAELTAAVEREANKRPEVVRLMTHPGVGALTGVAYVLVIGTPARFPCGKQIGSYTGLIPCEDSSAGKQRLGHLSKQGNALLRYLLGEAAQAAARCNPDWRRRYVHLAMRRHKNIAKAAMARKLAVRLYWMWRNSWDYSQLVEFGSHAGKLGTGHGVEQSVVHLIGHPAP

SEQ ID NO: 66184 - protein, 412 aa, unidentified
MEVIVERCAFLDVHRDTVMVCARTPDGHGGRREEVTEFGSTTSQLLALADWLAQRRVTLVGMEATGVYWKPVHWVLEAAIAEVWVINARHMRNVPGRKTDVADAVWGASLLEHGLVRPSFIPPEPFRALRDLTRYRKSVIEERARESQRLHKVLEDAGVKLSSVASSVLTKSGREMIDALIAGQRDPEVLAELAKGRMRSKIAQLQDAMAGRFNDHHALLCRAMLARIDQADATIDALGVRIDELLGPYEAAVSLLVTIPGVARRSAQVILAEIGADMSRFPTAGHLASWAGMCPGNNESAGKHRSGRTRHGSKWLRKALIETGQAAARTKGTYLAAQYAQIRGRRGPQRAAVAVGHSILVIAWHLLSTGEPYNDLGGDYFDRRRNSTARQRRLVAQLEAMGHRVTLEPAAA

SEQ ID NO: 66185 - protein, 354 aa, unidentified
MNSVRYVGMDVHRDTISVAVLDESGRLMMQSVLATRAGAILDFIHGVRGTLHVTFEEGTHSAWLYDVLVRRVAKLVVCNPRKNALMKSGSKSDAIDARKLAELLRAGMLSPVYHGETSALEVQQVARSYSQLTEDTTRVMARLKAVFRGQAVSCAGKKLYGKRHRGEYLAQLGGGLRRRAEHLYQELDALQPLRHEVRRELIVECRKHAAARWLQSVPFLGPIRAALLIGRVQTPHRFRTKRQFWTYCGLGLETRDSGQYRMVNGQVERRRRPVLIRGLNWNHNHAMKNLFKSTATAASVREGVWREFYLGLLDKGMRPEMARLTLARKIAAITLKIWKKGETFDAEHLKLQAA

SEQ ID NO: 66186 - protein, 337 aa, unidentified
MKKFFIGIDFAKTKFDVVVLCKDDLVSRGEHNQFCNTKDGVKQLEKWLRLACGNDVITECVICGENTGVYSMLAAKMLTRDGYTVCLESALRIKRSMGISRGKNDKKDARDIAEYAARHYDKLVVYQEPSQTSEALRTLFTQRRLLVKQKSDLQRRNKELTGLYKDNPLLKKMLASDKRIINAIDAEIEKIEAHMKSIIEGNPEVKKVYDILTSMKGIALVNAVALIVYTDNFKRFDYDARRICSYWGIAPFANQSGTSINGKPHVSHFADHYLKSLLSQAVVCAIRFCPDISNYAQRLLARKKHISIVHNNCKNKMIHILVAMVKNGTLYGEMQKN

SEQ ID NO: 66187 - protein, 356 aa, unidentified
MPETNPAEVIIGVDTHKHAHAAVALTALGARLGTITVPANRRGYQELETWARSFGPVRAYGVEGSGSYGAGLSRFLQAGGHTVLEVNRPNRQLRYQHGKSDPLDAEGAARAVLSGQADARAKPGTHAVEMIRHLKVARDTAVKSRTQAMITLKALIVSAPDALREQLEGLAGKMALIRHLAALRPGALTSPTASAKAALRALAQRWLTLDAEIKAHEAHLDALTAACTPILRTAYGMSTGTAAEMLILVGDHPDRIRSEAAFAKLCGACPIPASSGKIIRHRLNRGGNRQANAALYRVVIVRMRSHPPTLAYVRRRMGEGKTKLEIIRCLKRFVAREIFGYLCGAKTLPTAPMTAS

SEQ ID NO: 66188 - protein, 364 aa, unidentified
MNSQNISIDRNNAIYIGIDVHRYQHTAVAANRFEEEMGELTFPNTPTGIDGFLRWMQVVDDGQKSRIIGIEGTNGNGRLLRDRLTPVYAHVYEINPIYTKQRRDHGTRGDKSDPVDAKLMIEVLTRKLDELPIVTKQDNSAPMQALSELVAFHDDLTRSQTRLKNQLHRLFYDIDAISETNRSQTFSKKQLRHWLAKTTRPSTPINHNTQRLILRSKIHQLLELEKTRQITDSEINQLLSQLNRNLITLPGAGIITVAKIVSAVKGIGRFTNIRQFVKYAGIAPVERQSGKTRKHKQAKGGNRQLNTAIYTIALTQLRCNTKAKEYFDKKIVEGKTKKHALRCLMKRVACIVYGMMKGGEVYRG

SEQ ID NO: 66189 - protein, 344 aa, unidentified
MEEYIGLDVSLKETAISIRRGGKRIWRGKCKSNPDSIITLLNKHAPDARRVVFETGPLSIWFYHALTDAGVPAICIDARHAKAALDMAANKTDANDADGLAHLAEVGFYREVRVKGYDSMLARTLVAARTRLVTICTELSNQIRGFMKTFGLVIPSGKGATFANNVRMLLDGHQSLSRIILPLLKAWYGTREQAAELSRQLIAIARASQSCRLLMSVPGVGVVTATSFVTAIEDPENFKKSRSVGAWLGLTTRRYQSGEVDYDGHISRRGDAHLRGLLFEAATVILTRSSADSSLRSWGVKLRERLGFKRAAVAVARRLSVIMHAMLKTGQLFDRAIGMDPAKG

SEQ ID NO: 66190 - protein, 428 aa, unidentified
MNLSTQNDRIAFLTEEWMLVGIDVGSTKHFARAFTNRKIELSKKPFEFMNTDEGFESFKKWIADQLKTSGLKYVMAGMEPTGHYWFNLAHFIKEHGMVVSHVNPAHVKKSKELDDTNPSKNDRKDPKTIAGLMADGRYTLPYTPENVYARLRDLSSFRYRETEQLTRSKNLFARWISIHFPEYSSVYNDTLAASGLMILKEAPLPEDILRLGAEGVNQIWRNGKLRGSGLKRAEKVVEAAEKSIGYTSCAMTARFEIQDLLEDIERHSSRLEEIERMIEDALKEVPNVDKLLEIPGVGIKTVASFVAEIGDVSRFEDAKAIQKLSGLAIVSDDSGKHNGQSSISYRGRKHLRYTMYLGAISVICHNDQFAEIYRYYRERKNNPLKKLQAVIAVACKLIRVFYAILTKGISYDGDRMSADIRRLAVQPV

SEQ ID NO: 66191 - protein, 322 aa, unidentified
MQGKALKAKAETAVYVGIDTSKAWLDVYLHPIGHAFRVPNTKEGLRQLCRELTGLGVALIVVEATGKLQRLAHRMLSQAGFPVAVVNPYRSRKLADVLGQLAKTDKIDARVLALYAQLINPQATPVPNKVLAELQELVLARQALKADETASINRLAAAECSYLKTQFKRMIANIARQIAGLETRIKTLIDSDARLRHRYDILISIKGIGPTVAATLVACLSELGVLNRGQIALLVGVAPVNCDSGEMRGQRHIKGGRAHVRNALYMAAVAAIRCNPGLKAFYARLKKEGKAAKVALTAVMRKLAVLANTLIHEDRHWEPIHA

SEQ ID NO: 66192 - protein, 343 aa, unidentified
MEIRSVGIDLGKTTFHLVALGDNGKVLLKKKFTQKQLIAFTANLQTCLIGMEACSGAHFLGRTLREQGHDVKLIAAQFVKPFVKSNKNDFIDAEAIAEAVERKNMRFVPIKTDDQLDLQALHRVRDRLIARRTSVINQLRAFLLERGLVFAKSPARLRERMPEILENADEYLTSRMRSLLALLWNEWKDLEQQLVDLNQEVERIASSDAACTRLRQIPDVGPFVATAIVAAIGNGAAFRKGREFAAWMGLVPKQHSTGGKAKLYGISKRGNRYLRKILIHGARAVVLRSKRDRIAMGEWMTALEARAPRNVLIVAMANKLARIAWAVLSSGQDYRAVQEPVAA

SEQ ID NO: 66193 - protein, 456 aa, unidentified
MSHCTANKKAASAFVRRNSIPTTGAVAKALFNSAIGIDVHHDILVCAYQYCNRESDEITTEVCSFGTTASELAKFTDWCRNRHPEQILMESTGVLWFSPYEALESVGFTNRQLSLINARDFKAIVGRKSDKQDAERLALYARIGNVRSSFVPAKCFREMRTVSRLLSKTTDEQSRARSRYLKTLNFIGCRASSVFSDVRGKAATAILEVLAKGTREQLIDAIKIHGRRLRKSATEILDALDFAVSPAMAMQLRIQKQHMEALSQTCEELYALLKVMQANYQPWINRLMTVPGIKERAARVIFAEVTNDLSSFPDAAHLASWVGVCPGTMESAGKRYSGRAAKGNRYLRRILVECSQAIGLMRKGALYSLFQAFKERKGTRRAVVAMAHHLVKIIYCLFTKGGNFEAQSTDALTKVRKQKYLSAVANIKKQNFEILTSGSLVDKATGAITTVDPMSV

SEQ ID NO: 66194 - protein, 347 aa, unidentified
MALTIVETPITGGAGTHADVHVAAALDPVGGLLGVAEFPVTPAGYARLLGWLSGFGTVCLVGIEGTGSYGAGLARHVATSGIRVVEADRSDRQDRRRQGKSDPLDAVSAARAAQSGRARGAPKGRDGSVEAIRALMVAKRSARAERTQTNGQARSLIVTGPDDLRTRFARHTVAALVAETASLRPRPGSTVGYATRIALRELGRRAQFPGGQLERLDELIVPLVTARAPGLLALHGIGPDTAALLLIAAGDHPARLRSEAAWAHLCAAAPIPASSGKRTRHRPGPGGDRQANHALWRIVITRMSSHPPTRAYVERRTAEGLSKTEIIRCLKRYVAREIYPRLRAAAD

SEQ ID NO: 66195 - protein, 359 aa, unidentified
MSSVTTFVGLDYHQDSVQVCVLDSSGKQLTNRSVENDAAIIERVATRHGRPARVAIEACCGAANLAEELVTRRNLPVQLAHPGYVARMKQSPDKTDLADAHLLADLVRVNYLPRVWLAPQSIRALRRLVRHRAQLVRRRTDVKLRLRAVLRENRLRCEDMRAWSKAWLAWLTNVAELSDSDRWVMEDHLAELASLGERIQAVEKRITEATADDPVVAKLLSLPGVGLVTAVTLRAEAGRFDRFDTGKQLARFCGVTPRNASSGARQADAGLIKAGNPELRKVLVELGHRLIRMRDVHWAKLAAGMLLRGKPKNIVVAAVANRWVRWLHHELRRDESVVSTSAQARQKGSAPSAFTVAST

SEQ ID NO: 66196 - protein, 370 aa, unidentified
MKKIIMYVGLDVHKNSIEVAFADAGRDGEVRSYGKIDGNLTALDKVIRKLEAKGAELHFAYEAGPCGYEIYRHLSSNGYDCIVVAPSMIPRQSGNRIKTDRRDAQMLARLHRAGELTSIYVPALEDEAMRDLTRAREDARSVERKAKQRILAFLLRHGYRYSGKTPWSKAHFRWIAILKMPHPAQQIVLQESLDALSECTDRVNRLTEQIQRLLPQWRMFPVAKALQTLRGVSLIVSTTTIAELGDLTRFASPVELMSYLGLVPSEHSSGEKTKRGSITKTGNGHVRRVLVEAAWAYRLPARVSTALHLRQEGMPPNVCAISWKAQLRLCNRYKRLLERGKANQLIITAIARELCGFMWAIANEVETPSA

SEQ ID NO: 66197 - protein, 400 aa, unidentified
MLSIGIDGSKGKSTVCGMKPGGEIVYAPFEVQHTREGMSELVSLLRSSGEEVRAVLESTGSYHCPVVAALLENGIFVSVVNSLRMKRFCSQSIRKVKTDRIDAMQIALYGLAYWQELQPTKLPEDTYRELQLLARQYYQMTSLLIKAKVDFNAICDQVLPGMQELMSDHAGRHKLSDFVLRYRHTTHILEMGETRFRKDYCKWAEKKGYRNCERMAALIFATAQNGIPVLPNAPSTQIVITEAIRVLHTVEASRDAILTQMQALAKTLPEYSLVREMPCIGDTLAPRLIAEIGDVRRFHSKRALIAYAGIDAPPYQSGKFCANNRHISKRGNRYLRKTGYEVMQSYVMHKPANDPIFTFIEKKRGEGKSGKLAMVAGLNKFLRVYYGKVTELYRSLPAIE

SEQ ID NO: 66198 - protein, 411 aa, unidentified
MVKENFIYVGIDLHIETHTAVMIDCYNQKLGEITFPNRPADFPKLVTKVKKCNTDAKEVVYGLENAYGYGRPLAVWLIDKGYFVKDVNTAISHRQAKHRGAMYRKSDSDDAEAIALATLNMLDKLPDACPNDAYWSLGQLVHRRDNIMKQRTRLVNQLHEQLCIAYPSYKSFFNDISRPTALYFWEHYPSRKYLRGKSVEDLREELVPVSHNRCSTKNCEKILDAVASDKVKNNAYQDARDMVTLSIVSDLQHYDSQLAEVDKMLEQMYKMLGCTLTTIPGVNVITAVKILAEIGDIKRFSNANKLAQFAGIAPLHLSSSGKGKDVATKQGNRRLQATIYFLAIQMVQVSSKGTPRNPVVRAYYEKRKAEGKTSQQALICISRRLISVIYGMLKNGTEYRMPVVESAGENR

SEQ ID NO: 66199 - protein, 343 aa, unidentified
MQSISTIGLDIAKSVFQVHGVDAAGQVVVRRQLRRRHVLAFFQKLPPCLVGIEACASSHHWSRELQALGHTVRLMPPAYVKPYVKRQKNDATDAEAICEAVTRPNMRFVPTKTVEQQSCLMLHRARHLFIRQQTAVINSIRAYLAEFGIVAPVGRRGVEQLLEVVADKVEDRVPEVARMCLAALGVQLRALKAQILEFDRRIIAWHRSNTTSKRLDAIPGVGPALATALVASIADPKAFRSGRDFSAWVGLVPKQSSSGGKDKLGSISKQGDRYLRSLFTAGALAVIRYAKIHGTDHRPWLTRLLARRPTKVAAIALANKLARMAWAMMARNERYQEPAAVAA

SEQ ID NO: 66200 - protein, 386 aa, unidentified
MKTVAGLDVHKDSVYLCILRENGEKIERVYGVLTPQLDSMRDFMAENEVSEVAMESTSVYWIPIWRVLVDSFELKLVNPYFIKQLPGRKSDVKEAQWIAECVMKELIRGSFIPPPLIQQLRLYDRRIFELNAELVRKYSKIDAILQRCNIRLSNYVSNTDCKSYKNVVKRISEGVTSPQELLMLVHKRIINKHGEDTILAALTGVVSEAEIDMLAQYVAESALLEDNKNKCIEKMREICNREFEEQMKNLQTIPGVSERSALTVLAEIGPDVNAFPSAKHLVSWCGFNPRNDESNKKIKSNKITHGNRFIRIASVQCAWAASRTKDCYFSKFYAFHTQVRKKFKLKVVVAVARKILVCIWHILKFNVSYKDFEPQKSVDKDCTQLA

SEQ ID NO: 66201 - protein, 412 aa, unidentified
MRVIIERCCGLDVHQETVVACLLIGAPGDRPTKEARTFRTVTRDLEALRDWLAAAGVTHVGMESTGVYWRPVYAVLEEHFDLIVGNARHIRNVPGRKTDVKDAEWIADLVRHGLIAKSFVPPRPLRELRELLRYRRKLTESQAAERNRLLKLLETANIKLASIMSDVFGVSGRAMLRALIEGRASVEAMADLARGQLRRKRSDLILALEGRMEEHHRFLLATQLRRLEAIEQDIAALDLRINEKLEPYRMPHALLMQIPGVDWLVAAVLIAEIGVDMSVFLSVYHLSAWAGVCPGSHESAGRQKSGRARKGNVHLRTMLVGAAVSAARKRGSYLKDKFHRLKARRGAMRAALAIAHKILISAYHMLAKGLPYRDLGEAYLDQIGQSRTVANLKRRLERLGYRVTVERTTQAA

SEQ ID NO: 66202 - protein, 454 aa, unidentified
MNTSKKSSDKKDQKVSSISIINPNAAGIDIGDKMHVVAVPDGRSERNVREFGTMTCDLELIVTWLKECNIDTVSMESTGVYWKPLFSLLLQSNIQVYLVNARHVRNVTGRKNDQQDAQWLQQLHSFGLLKSSYLPEEEQEGLRALVRYRHTLIQDSSRFVLRMQKSLELMNIKIHTIISDLMGKTGKAIIEAIVNGERNAENFIPFIDHRIKTDKATIVKSLQGNWRDEHLFTLRESYRFYTFYLQEIKACDVAIENQLIHYEAFIQDGNIEEQQSQPASKFKKTSKNGPGFNMVHYLQRIHQVNVMAIYGLSDISALEILAETGTDMSKWKNEKHFVSWLNLCPNNKISGGKIISSNILKKKPNLANQAFRTAANSICKNNHWLGDYFRRMRSKGGHKYAIVATANKIATIYYKMLSLKKEFNPVDLVAYQEKYKTAKIAYLERKLQQLKNTA

SEQ ID NO: 66203 - protein, 388 aa, unidentified
MEARTMSLPPAASHDDAERCFFAIELSKKSWIVAVNTPLSDKISRYTLKACDWKELLKLIERNRTRVARELKKRVDVVSCYEAGYDGFWLHRLLEAHGIRNYVIDPASVQVDRRARRAKTDRVDVERLLRSLMAYLRGEPKVWSVVHVPSVAEEDDRRLHRERSRLISERIQHVNRIKGLLAIHGIYDYQPMRRDRMQQLKGLHTTDGRQLSPRLKAEIVRELQRLELVLGMIETIEAERDAIASAKTKVEHSNAKKIQDLVKVKSIGPEFATALVSEVFYRSFDNRKQLAGYVGLTPSHFQSGPMCRDQGISKAGNTMARTTMVELAWMWLQHQPGSLLSVWFHNRVGKLKGRIRRITIVAVARKLLIALWRYLETGLVPDGAILKV

SEQ ID NO: 66204 - protein, 387 aa, unidentified
MLGTEIKAKFLPRDYDIFAGLDVDKKHIDVTFTDHAHLMKSMKMPYNADHLLSYCRRHFPNQGIAFAYEAGGTGFGLYDQLSAAGLTCLVVAPSMVPTAPGQRVKTNRLDSKKLSTALRGGELKSIYIPTTPYRALRQLVQLRDTFVRQTTQSQQRIKALLLLEGIDFPESRERWTSAAWAALQSLSCSTMVRFKLDRLISMATFAAEQARQTTRELRRFCKEDPELAHTLALLCSAPGIGGITATHLMARVGDGSFLHNLHQLPAFLGLVPCEDSTGDDVNKGAITKAGDRRLRAKLIEAAWRAIRQDFELQQFYERIYTRHPKPMASKKAITAVAAKLCRRLAWVLKNQKPYVAQKASGAMKKEQTASLQGIPRPSPEANAPCVL

SEQ ID NO: 66205 - protein, 411 aa, unidentified
MRIVGLDVSRSVAEIAYLEDGTLHAGGRTGLRRDELERFAAKLHATDHVVLEATGNTTAIVNVLRVHVARVAIANPLQVRLIAEARVKTDKIDAAVLAQLYASGFLPEVWMPDEHTLALRRQIARRSQLVRQRTRLKNEIHAVLIAHLIERCPATDLFGKKGRAWLGVQPLPLDERLGVEQRLRELDRLGEDLREVEQALAQATIDDARLRVMLTITGVNTTVAIGLLSAIGDIERFPNPEKLVSYFGLNPSVYQSGPTPARHGHITKRGRSYARAMLVEAAWGATQAPGPLRAFFLRVRDRRGQQIAIVATARKLAVIVWYVLTRDEPFAWDRPALTAHKLRALELQAGMPAQHGSRKGSAAAYSLKSVRQQERAVAEQSERTYQRLFNRWKQSRPKSDSAPIRWPEART

SEQ ID NO: 66206 - protein, 434 aa, unidentified
MTLINFVAANQKYYAFNLLSVFIMVFWSVQYLLQHLLVQTQLSDQLLQPLILILQLPQTPQFRHARPGKFFLPVNGMDYLLPLRLTVRNVLTGRITMNIVFLGIDLAKNVFQLCGVNQAGKPVYTKRTGRKELLQTLANIPACLIGIEASTGAFYWQREFEKLGHKVKIISPQYVKPFVRGQKNDGNDAQAIAVALMQPTMQFVPPKSPEQQDIQALHRARQRIVNHRTATVCQIRGLLLDRGIPIGSAVSRARRAIPLILEDAENGLSSRMRRTIAELYDLFNDLGRRIHFFDKEIETVFRQSEACQRIAKVKGIGPKTATAVVAAIGKGTEFKNGRHFAAWLGLVPRQHSSGDRQVLMNMTKKGDKHLRTLFIHGARAVVRVATNNNDGHMNQWVNQLKERRGFNKTTVAVANNNARIIWSMLRNETEYQVV

SEQ ID NO: 66207 - protein, 476 aa, unidentified
MGKGSGTTRGDRRRNARRERLRAMLPRDGAVIGIDLGDEKQAIAAVDHDVRVLARKTARVKAFRLGEVLDWAVAQDRGKGFTSVAVACEPTGARWLQVQRLCAERALPLVCIQPLVSHIAREQQDYTTHKSDESDCVMIARLATELHCYIPEELDEAWAQLRHLGRRRAQLITSATASVQRVRDFLSVAWPVAPEACKHPFESVTWLAAMQVVTSRCGGQPEKLAAIGLAEFTALVRQAVAGWGGHRPAGPVCRAVFAALTSTEGVVVSHRRGLLRRCADELGDLRRIRAQLRAVEADMVAVLGELGLSRLADIPGLTAVGAAAILAETGDPRRYDSSSSLVKHAGLSPSGNASGAFEGQAHISRRGRPGLRLTVWRAIWPLLIHNSVMAAKYAAMIAAADAAAAQAAQAQSGTGSRQGSAAAAARARRAKARVACAAALLRWIYSIVVHDTGWDPDVASGAASCQHAPRCRAEAA

SEQ ID NO: 66208 - protein, 338 aa, unidentified
MVYGAIDLHMRYSQIRVIDAAGAVVRDQRVPTTRERLGTAFAGVGRVRVVLEAGTESEWVAGALEAAGHEVIVVDPNYAPMYGEVHRRVKTDRRDVTALAEANRRGWYRAVHRVSAAQRATRQVLRTRRQLVQTRSGAVALVRALLRQDGYRLRSCAAEQVPAQLPSLALPAPLAATLAPLVQLITVTTTEIAALEAGLQQRAARDPVMHTLQTVPGVGLIVAWTFRAQLDDLTRFRHAGQVSAAIGLVPREDSSAERRHRGHITKAGPRELRSLLVQAAWACWRSRQSGTLRAWAEQLAARRGRRIAVVALARRLSRILYAVWRDRTSFDVKKLAAA

SEQ ID NO: 66209 - protein, 494 aa, unidentified
MAAVMIGVDPHKGSHAAVAIGAAEEPLGELRVRASAAQAGRLVAWAAGWPERTWAVEGARVLGSLLAQQLVAAGERVLDVQPKLGARVRLLAAGDTSKNDPDDARPVAIAALRSSSRREVKPDDHAAVLKVWSKRHRDLGRTRTQVACRLHAVLCELVPGGLSTGITAAHAARVLESVKPSDTIALARCELAAEFPDDLRRIDAQMHDTRKRLTPAVRAPGTTTTGIFGAGPVIAATAIGCAADVSRFASRDHFAARNGTAPIEVSSGNRKIYRLSRRGNRRLNHAIHMAAITQIRHPPSDRRACYNRKLAEGKTRKEALRSPKRRISDAIFARLQADARRAAAAASTGGPGGQPGSDSVASAAGSHPEHRLFGQATPGPEPTLRSRRDPHSKKTTSRATREQEFCAPARVGAVATGTARATSAAQSRSSRGCPRCHGRCSRGIRPRSRAARREPLLPQPWRAGDGRRRRRRPCRSSPCQCGCRADPRGARIRS

SEQ ID NO: 66210 - protein, 358 aa, unidentified
MAKRTTKSQNGKQTVLTAKDRVFVGMDVHKKSYHAAVRVNGREVITRVLAPTAEAVLGFLEPYRSGHLHVVYEAGPTGFALVRALREAKVSADVIAPSKTPQTPAKANKTDRLDCRQLAFYDEKGMLKTVAVPTTEEEADRQVIRLRDQVVDARRRIKQQIKSFLLQHGVAQPAGLANWSKESVERLLQLPLVAPLRFCLDAMVAELKDFDERLGQVNREIERLSQAPRHAEAVTRLRKYSGVGVITAMQYRTEVFRPRRFANERQVAAYLGLAPRVSESGERHRTGPLLKAGHGRLRALLVEAAWVWIRSDETAKATYKRLLQNTAQPNKAITGMARRLAIQLWRTLVPPEERRGAA

SEQ ID NO: 66211 - protein, 465 aa, unidentified
MTPHRHQYSKTRRTSPSLLKRINVNVAGIDCGSTEHYVAVPPDRDATPVRAFKTFTSDLHRLADWLAACRVTSVAMESTGVYWIPLYEILEAHGFEVVLVNARHVKNVPGRKSDVADCEWLRELHSVGLLRGSFRPTAAITVLRAYLRHRETLVESAAAHIQRMQKALGQMNLQLHVVISDITGVTGLRILRDIVAGHTNPQDLAQYRDHRCHASEAEIAAALTGHYRPEHLFALKQNLELFDTYQRQLADCDAATEAHLQTLAAEAAAPTHPLPAARSTAKPRRNEPRFDIRSPLHQLTGVDLTQLDAIGPYSALRLLAEIGTDMSRWRTENHFTSWLTLAPKNNISGGRLLSSRTQPSANRAAAILRLAAMSLGRTETALGAFYRRLAYRVGKAKAITATARKLAILVYRTLKDGLVYQDPGAAAYDAHHRTRVLRRLRQRATALGFTLVNLETGEQLERVVS

SEQ ID NO: 66212 - protein, 356 aa, unidentified
MTNTTKYIGMDVHKESISIAVRNAAGKIVMECVIETKANMILQFIEGLSGDVHVTFEEGTWAAWLYDLLRPHVTKLLVCDPRRNALLQEGNQNDRVDARKLAELLQNNQLRSVYHGDHGLRTLKELVRSYLTITQDLTRVMTRVKAIYRSWAIPCSGKQVYGTRHRGEWLGKIVEVGVRQRAEFYYRQLDELRLLRQQVRRDLLAESKKHKAWKQLCEIPSIGPIRAAVLLGILQTPHRFRTKRQLWTYSGLGIEVHSSADHQVVKGQLQRKKKHVEVRGLNENCNHDLKNLFKGAAVVASTKSGPFEKFYAALLTKGMRPEMARLTLARKIATIVLIVWKRGVCFDANHLKPQTA

SEQ ID NO: 66213 - protein, 376 aa, unidentified
MVDRWAFPHSETGWVTTLDRLARHGSAAEVPVIIERTSGLIVDRLLAAGHPVVPVHPTAFYAARPRWGASGAKSDPGDSYKLADYLRTDGHRLRRLTPTDPGLHELQALVRLRDDQVRARTAATNQLTAILDTYWPGPKQLFMSLASQIALAFLTDYPTPTSAAHLGEARMAAFCRRHAYRGGKSPAELLSRLRAAPVAPVGLPPATLAAMVTAQVTVLKTLQTVISDVERRIAVRVVAHPRSDLFENLPGVGMINLAQLLAEVGPILDRVDSAEQAATECGAAPVTRSSGQTRGVYFRWAANTRARKAITSFAHNARMQDDWAAALYADARARGKRHPHATRIVARAWLRVIWACWQTNTPYDPLDLPPEAGHLG

SEQ ID NO: 66214 - protein, 424 aa, unidentified
MENTAARKRKQVPEGYLIIGVDPHKKRHAAVAITQDFTTRDKFKFDNTREGLETMLCRARMEMVKSGCRGVMFAIETGGHYWRNVSYFLDEQSIPFRFINQFTLKRRREGKDLNRRKNDYRDSEVAAQLLCTGEFTESKLPQGVYAELRAAHNAYRRLVKERTRITNLVKGLLDALFPEFTQVFKDPCALTALSVLYICPIPRVITGMTEDEFVATIEAQHKGRRLMRRKLRALHYSARTSIGIDAGARSVSSEIAFLVDKLELIRQHICIIEGTLVSLVDETEEGKYLLSIRGLNYIAVAGLLAELGCFKAYRSAKQMIKMAGSNPTESESAGKKRSRTPMSKQGRPVLRYCAWTSVIPMLRFNSDFRAWAKQRRERPVHANPLGGREVVGAALNRLLRLAFAMVKNQTYYQITKSELTLVAV

SEQ ID NO: 66215 - protein, 455 aa, unidentified
MVRKARRASQSQKLPASLKHVHLNAAGIDVGAESHYVAVPVDRDSQPVRSFSAYTPDLNKLADWLKACGVDTVAMESTGVYWIPLYEVLERRGFKMYLVSPQHLRRVPGRKTDVLDCQWLQELHTFGLLSGAFRPEDIEVALRSYMRQRAMLVSYASQHIQHMQKALTQMNVLVHHAVEDITGVSGMRIIRSIIAGERNPVTLAAMREAGCKKDAATVARALEGNWREEHLFALRQAVELFDSYQAKVHDCDQQILTHLKTMEDHSDSGTGTPPEPAGKSPRKNELSFDGAAEAYRISGTDLAKIPGIGGHTALKILSEIGTDVAHWPTAKHFASWLTLAPRNRISGGKRLSQRKAPANANRVAQALRLAAFSLHKSHSYLGAFYRRMAARAGKTKAIQATAHKLAILVYNALKYGTDYVEKGARYYEESYRDRVLKNVSRRAKEMGYRLVKEDA

SEQ ID NO: 66216 - protein, 438 aa, unidentified
MSNKVFFNLDDLFISVGIDVGADFSWMSIALPNQQFVGKPYKILHNSIDSLTTAVSKIKEAEELYSLESRIFLESTGIYHYPLFCYLRDKGFNCSVINPIITKNSTNINIRKVHNDRFDSKKAALVGLKPDLKVSLMPSDLALNCRNLCREYYDLMDNRSAYVNKLQGELRMAFPQYLGIFSKVTINTSLTLLETYTSPSAFLKADKQEIIDIIKSTARFGLTYAQNKYNAIIQAATDANQFGYIIDSNIKRIRLYISFIRKYDEEINNILESLHELVDANEDADFVKQIHLIETFKGAGFLSAVSIMGEIGDFSAFSKPKQLFAYFGLDPAVKQSGKFEGTKVQMSKRGSAIARRVIHTLTLQSISISRNREAKNPVLREYYLKKCDSKSKLVAMGAVSHKVCNMIFAILRDNKPFKIIAPQEHIKQYNAAKCDIAA

SEQ ID NO: 66217 - protein, 326 aa, unidentified
MSYPALGIDVAQATLAVSLMVGEGQWQHGNFSNDLKGFGQLKRWVQRQVDQALWVCLEATGRYSDAIALYLVAENWVEQVSVVNPSRIHAYAQSQMRRSKTDKADAMLLAHFAATQKNEPWRPPSAQQQALQELMRHRDNLLDSRQQVRNRLKAGVRHDEVQRQLQEQEQLLTRQIDEVEDEVEQLIRHDEALLLRFKLLCSIPGVGPILAAHFLAEVPDITRFEDADQLAAYAGLVPSHSESGASKKKSKLAKTGNVHLRTAFYMPALSAARHNPLIAAFVARLQANGKSKMTIVAAVMHKLLRLAYGVLKSGRPFDPDFAKTCA

SEQ ID NO: 66218 - protein, 339 aa, unidentified
MRVTTIGLDLAKNIFQVHGITKDDEVAFNRPLRRAQLLPFFSKIEPCLIGMEACSSAHHWARELTKFGHDVRLIPPIYVKPYVKRGKSDAIDAEAICEAVTRPTMRFVAIKTVEQQALLSLHRARALLVRQRTQLINGLRGMVAEFGVYIARGLAQVIGFAEDILAGEVLDLPAIANEVIHNLCEHLMALHLRLRWYEDRLKLVAKEDARVRLLRTIPGVGAVTASAIIASIGDGHQFSNGREFAAWLGLTPANKSSGGKEKLGRITKMGDQYLRSLLVVGMTSLVRQTKSHPERASKWLVSLLERKPARLATVAMANKTARIVWAVLTRNQPYTPHTA

SEQ ID NO: 66219 - protein, 313 aa, unidentified
MELFVGIDVSKAVLDVAIVPTGEKWSVANSSDDVGQLVRRLKEAKANLIVLEATGGLERRAVAALAGAGLPVVAVNPRQVRDFARATGKLAKTDAIDAAVLALFAERIRPDLRPIKDAEAQELEALVVRRKQVVEMITAEKNRLSAAPPSKQVRTAIGRTIEWLQKQLDENDRDLEKAVKSSGAWREKDDLLRSVPGVGKVLSRTLLSLVPELGTLTHKQIAALIGVAPLNRDSGTLRGRRCVWGGRAQVRQVLYMGALVAARFNPVIRAFHQRLLAAGKLPKVALVACMHKLLTILNAMLASKTRWAPEIAA

SEQ ID NO: 66220 - protein, 482 aa, unidentified
MKKEKANQAERPKRLTHRRRKELARRIWSDKPGLDVVHRDAAGIDIGSREHYVAVGPDRDAEPVRVFGCFTTDLRRMAEWLKKCRIKSVVMQSTGVYWIPVYDVLEQYGFEVWLVNAQDTKNLPGRKSDVQESQWLLKLHTYGLLRRSFRPTPEIRGLRTCWRERGEYVQQAGSCIQRMQQALTEMNIQLATVLSDLSGETGMSIIRCIVAGERDGKRLAEFRDPRVKASKQTIAKSLEGTWLPEQLAILQRQLGDWDHIQRQIAACDVDLQAMLQQIPTAKVQHQQALAAAAAPVDKRKRKKNGKSSKNEPKFNLAAELQRVTGVDLSRIDGIKAMTIMTVISEAGLDMSKWATEDHFVSWIGLSPRNDVSGGKVLKRKTRKVKSRLATALRTAATTLRKSDSYLGAQFRRLRGRLGPPKATTAMAAKQARLVYRMLKYGQEYVDKGAVIYEQKYREQQIRFLQKKAAQNGFALVPAQKHA

SEQ ID NO: 66221 - protein, 341 aa, unidentified
MSEYVGLDVSMKETAISVRRGGKRIWRGKCPSDPSMVAEVLRKRAPAAELVIFETGPLSVWFYHALRAEGLPAICIDARHAKAALDMAPNKTDTNDADGLAHLAEVGFFREVRVKGYDSMLIRTLVAARTRLVKITTELSNQIRGLMKTFGLVVRRGKGGTFEAEVRRLLADQEELARIILPVLETWRSVRARAAELGRQLLASARQSEPCQRLMSIPGVGAVTATAFTTAIEDPANFRKSRSVGAWLGLTTRRYQSGEVDYDGHISRRGDAHLRGLLYEAATVILTRAFAESDLRTWGLKLRERIGFKRAAVAVARKLAVIMHAMLKSGEPFERGTGVTA

SEQ ID NO: 66222 - protein, 339 aa, unidentified
MTVKTVGLDLAKDVFQVHGISVTGRRIFNKKIKRAKLLAFFETLPRCIVGMEACGSAHHWGRELRKLGHDVRLMPAAYVKPYVKRGKTDAIDAEAICEAVRRPTMRFVEIKSEDQQAVLAIHRTRDLVVRQRTQVVNMIRSILREFGHILPSGIEAVSAFARNHGTDAQLEMPEIADGILGVMCHQLNGLNVRINGLTKLIEQHAWLNANARRLMHMPGIGPITASAVVATIGDARQFRTGRDLAAWLGLTPLNKSSGGKERLGRITKKGDRYIRKLLIVGMTSRALMAKNKPEKADIWTAEMLAEKPFRLATVAMANKSARIIWALLTKQEEYRQPVA

SEQ ID NO: 66223 - protein, 345 aa, unidentified
MQIKSIGIDLGKTTFHLVALGAHSQVVIRKKFSRQQLLTYAANLPSCRMGMEAGVGSHFLGRALREQGHEVRLIPAQFVRPFVKSNKNDYSDAEAIAEAVERENMRFVPIKTEDQLDLQALHRVRERLVSRRTSVINQIRAFLLERGISFRKGPASLRRQMPEILENADERLTARMRRLLDFLWQEWKHLQLQIESLSEDLEKIANSDAACVRLQQIPGVGPLVATAVVSAIGNGAAFHKGRQFAAWLGLVPRQWSTGGKPKLLGISKRGNPYLRKMFIHGARAAVLRVKREGSCLGQWMSGLETRAARNVVIVATANKLARISWAVLSSGNDYRPMHRALRCSS

SEQ ID NO: 66224 - protein, 460 aa, unidentified
MNRKQRREITRKIQSEDLSLEVVHPDAAGIDIGNESHYVAVPPTRDSQPVRRFGCTTWELKEMAVWLKQCAIRTIALQSTGVYWIAVYDILEQAGFEVYLVNANQTKNLPGRKSDVQESQWLMKLHTYGLLRNSFRPSQEIRTMRTYWRQRNDLVRAAGRHIQRMQKALTQMNIQLANVLSDVSGMTGQAIVKAILAGERNPYQLAALRNWRVQASEEEIARSLEGNWQEDLLFVLRQEQDGYEFCQKQMAECDQRLQQYLQQQEDRSHGASLPDEKRKERLRKKKKGNAPQFDLRAELFRMTGTDLTQIDGIDVSTTMTILSEAGWDMSKWKTEHHFVSWLRLCPDNRVSGDKIIGKGRLPTNNRVTNALRMAASTLRLSNTYLGAQFRRLRTKLGAPVAIKAMAAKLARLVYRMLRYGMQFVDRGADFYDAQHRKLQINYLKRKAANLGFQIIEAPAA

SEQ ID NO: 66225 - protein, 316 aa, unidentified
MYVGIDVSKEHLDAATEDGTWRVRFANDEKGQAELARELAATKPALVVLESTGPYQLELTLVLAAARIPFAVVNPRQVRDFARAVGILAKTDKIDALVIARFGATVKPTTEPLPDTEALELEALLTRRRQLVGMIASEKNRLQALLGPLKDGAAAQSIRDTLSHLIKQLNKLERDLQKRLERSPMWKAKEDLLKSVPGVGKVTAMTLAIDLPELGTLDRKKIASLAGLAPLNRDSGKMQGKRAIWGGRSTVRTVLYMACVAALRCNPVLSELYRRLTKESRKPPKVALVACMRKLLTILNAMVRQGRPWTPTPANP

SEQ ID NO: 66226 - protein, 378 aa, unidentified
METTNWNERKYFGALDWASDHHDVVVVDKTGATVYKSRIQHTPAGWQKLRDELVSFLPLAIAVETNHGMAVEQMIAFGYEVYPVNPKSSTRYRDRKAPSGVKDDELDAWSLADALRVDGHGWRRLMPDDPLVVELRLLTRDEVSLISQRTSFVNELQAALRDYYPAALAAFDDWTRPNLWEFIETFPTPEILQTAGKKKWEKFLRTHKLWREDTAEKRLAIFENATALQGSPGAVAAKSLLAVSVVKVLIMLQAQLDAYRARIEERFGQHPDHNLFGSLPGTGTKLAPRLLGEIGDNRLRFDCAEGLQSYAGTAPVTFQSGQIERHRVRRACAMQLRSTIHLWVNLSRQKCAWAEAYYQAHREKGQSHACALRCLGQR

SEQ ID NO: 66227 - protein, 419 aa, unidentified
MFKIFYKNCCGLDVHKTWIYACIGITDADGKTEYHEARFSSFSKGLRKLAKWLQKYDCKLVCMESTGKYWIPVYNILEKTCDVTLAHPKYTKPQKGNKTDRKDAKWICDLFMCGMIKPSFIPPASIRQLRDLVRYRSKLTNMLTGEKNRAQNCLTVSNLKLDDVFSDVFGKSSRSITEYILDHPGEAFDVTPFVDSRCKTPIEEIQAAVDGSVSKEQAAKLRQCLDHIDELTAHKQKIEEEILQIAEPFSAYLDLLRTVPGFDSDKMTAITILSEIGYDMSVFPSSKNLTSWAGCCPRNDRSAKHTKSTRISRAGAWIKPLLVQISNALIRSKKHPEFSERYRRIKARRGHKKAVIAICRMLLTAIWNILSKLQPYTPDGFINDRPADKKKTMSTAEAIKLLKSRGYIIKDSPDDPLTA

SEQ ID NO: 66228 - protein, 408 aa, unidentified
MEVLYARCAGLDVHKDQVTACRRSVDDGKVTQEVQVFSTMTSGLLALAEWLIEAQCTHIVMEATGVYWKPVWHVLEESFELVLANAQHVRNVPGRKSDVSDAMWLADLLAHGLVRGSFVPPTPIQEMRDLTRTRKQFVREIVQHTQRIQKTLEDANIKLGSVISDILGASGRAFLAALINGETDPEKLAKLAHPRLQVGRRQLVEALRGRITPHHQFLLQLHLAQIDALEKAVRDLEARMGDALAPFRDQIETLKTIPGVSDTVAQVIASEVGFDMTRFPSAGHLISWAGLCPKMDESAGKRRSTRVRKGAPWLKTTLVTAAWAAARKKTGYLRAQFLRIKSRRGAKKAILAVAASILTAVYHMLRDNRPYRDLGSDHFDQRDKRQVAKRLLKRLGDLGYEVEVKAAA

SEQ ID NO: 66229 - protein, 346 aa, unidentified
MNNSLATWVPCGIEVSARTLLVALGPAERPAALREFPNTAAGHQAVLRFLEPTGAAGRVVMEATGLYGLDLALGLHQAGVELMVANPRAVRHFAHALMERSKTDLLDAEVLRQFAARMPFVAWRPPSPAALKLVAVARRLEALTDMLAAEKNRLHAASLSEALPVIVRRDVERSIQNHPRAIQRLTAAAQEFVFSDPSLARRYELLLSIPGFGATSALHTLAELALLPPHLDVRQWVAQAGLDPREYTSGTSVHKKVRISKAGNKHLRRALYMPALVAVRHDPHLRAFYEHLLARGKTKMQALVATMRKLLHAIFGIFKHDQLFDGQKVYPALDNPTTVLQEVACA

SEQ ID NO: 66230 - protein, 321 aa, unidentified
MTYVGIDVSKATFVVAYSSAKSSKTKTFKNTTKGVHEFIQTLSASEHHCVLEATGNYSSLLVYLLSQVGITVSLENPLKIKNFARVMLSVTKTDETDARLIALYGEKMQPAPYRLRSDAILTLKQKRTVIRQLKKQLIATRNLKGSMEALPFFDPKCKKAIEKTIAFLEKQVKNLEEELAVLAQCEYKKQMDLLISIKGIGVTLAAALIMATGGFTYFDNAKQLTRYLGLSPTYQQSGTSVNVKGHINRNGDSSLRGQLYIAAMASLRCNAECKACFDRLRSNGKPGKVAVVAVANKLVRQAFAVVTQEKPYVDGFKSEKP

SEQ ID NO: 66231 - protein, 349 aa, unidentified
MLADELDYVIGVDTHRDQHALAVVAASTGAVLAQTVVAASAHGYAAARLFADKHAGGGRVWAVEGAGHYGAGLTRYLSEHGDTVVEVRRQPRGERRLRGKDDTLDAIRAARAGVAAETLARPRAGERQEAMRVLLLARRSAVDVRRVALVQLRSLIVTAPEPLREELRRLPPGRLLRRCSRFRRSDSRPAGQQAIVLTLRSLARRIEAATTEADELEREMLQHVRALAPDLLDEPGVGPIVAAQLIVTWSHPGRVRSEACFARLAGVAPLPASSGQTIRHRLSRGGDRQLNRALHTVILHRRQHDPATRDYIARRIAEGKSARDATRILKRYLARHLYRVMQNAEPAMT

SEQ ID NO: 66232 - protein, 342 aa, unidentified
MNHYVGIDVSLEASSLCVVDANGKIAREGKVASEPEALIAWLKEPKLELTRIGLEAGPLSQWLYAALHQAGFAVELLETRHVRTALKTMPVKSDRNDARGIAQLMRLGWFRPVHCKSMAAQETRALLTARKLLQTKLLDIELSLRGILRGFGLKVGPVTPTRFEERIRELVAGHPSLETIANSLLAARGALRREFHRFEKQVRASARADKRARLLMSIPGVGAIVSLTFTAAIDDPARFKSSKQVGAYFGLTPTKYQSGETDIDGRISKIGDAWVRAALYEGAHILLTKPLRGCTALKSWAMKIARRSGMKKAKVALARKLAVIMHRMLADGTSFRNAATAV

SEQ ID NO: 66233 - protein, 382 aa, unidentified
MSNIIFQAKPEVVQRRLDNYLFIGMDIHKDNHTACLTNCFGHELMTIEIENSKDDFKVLVKEVERLSEEKKLSPIFGLEDCYGSGLRIANFLKSCNFEVKTVPPATVDRKRKYNTHPEKSDSLDALGVAKVLIEKIDSLPDYSIAKEAKLSKQLREIVNDRDTIVKERTKLKNQLHVLLHRSYGSDYKKMYSNIFALKAMKYWKSHPFPKKKDRDDTIDYDDTLKNQIRRKINRLLAIWEDLKEIDQDLKKLIGQTDQKLETMNGCGRVLVGKVLAEVKNIDRFSSSNKLAKYAGLAPRKKSSGKKDRDVKDRSGNRRLNNAIHRIALTQIGKNGNDYAKKYFQKKIASGKSKIQALCCLKRKLVDIIYMMLKNRSAYCYSE

SEQ ID NO: 66234 - protein, 410 aa, unidentified
MKSAVITAVGVDVSKSKSTVAVRRPGGEIVMHSFDVRHTNSDLKKLVSTLKKLGGDIRVVMEHTSMYWRPIALTLKKAGFFVSAVNAMLIHDFSDNSIRKLKTDRADALKIANYALTFWDTLPLLNDEEETRLLLKMQSRANERITATATVLRNGLIALADQTFAGVNLAFDPNTKNTDGHEKWVDFFLRYWHRDCVCQYSMEVFTESYRGWCKRKNYKFRTATAHKIYIMAQECVATLPKCESTKTLIGQACKSLNAVCEARHNTQLEMQRLVALLPEYEIVMQMEGAGPVTGQALMAEIGDVRRFKNKKALVAFAGIDAPPFQSGAFESKSRHVSKRGSPHLRRTIFLVSNIILTLSNPENAVFCFMGKMLRGKTLLCLYCCRKRKVLAHLLCSRERVPSLSSSSGCL

SEQ ID NO: 66235 - protein, 346 aa, unidentified
MEQITTIGLDLAKQVFQVHAADAGGVQIFNRKLRRAEVLRFFEKTPACLVGMEACGSAHYWAREISALGHDVRLIPPVYVKPFVKRGKTDAADAEAISEAVSRKTMRFVPVKSADQQAAAIVLKTRALLVNQRTQVINALRGHLSEFGIIADAGTTKVAGLISIVRDETDLRLPKAARLALMEVASQIDALRAQIEKLEQAIVATVRRDDDARRLVTIPGVGAIIAASVRALVPDPGGFKSGRHFAAWLGLTPKPHSSGGKERLGRISKMGNTALRSLLVVGATAVLRHARGNPRASRWITALLARRPYKIVAVALANKMARIIWALLVKGGRYQENGARNQMATA

SEQ ID NO: 66236 - protein, 430 aa, unidentified
MKCSTQNAKIEALTEKTLVVGIDVGSEFHYARAFDYRGIEYSKRPFKFSNTEAGFTEFRAWILHIQTEHGKEEVVPGMEPTGHYWFNLGKDLQDNGMKPVLVNPHHVKKSKELDDNDPSKNDRKDPKVIARLINEGRYSYPYLPDGIYAELRAVSNLRFQVQSELTRTENRIARWFSIYFPEYRDVYGKVDAKSGMMILKEAPLPADIETLGVEGVNKIWRDAKLKAVGIKRAKTLVSAAEHSIGSKEGARGARLELRMLLEDYESRAARLQEIMTVIESLVRQIPMAEKLMEIKGVGIKTVSGFLAEVGDISRFDNPKQLQKLAGLAIRENSSGKHKGETTISKRGRKRLRYLLFEAAMSVVGKNAEFAELHRYYTTRPVNPLKKMQSLMAIACKLIRIFYAMLTKKADYDSEKMLSDIRRPERYLQAA

SEQ ID NO: 66237 - protein, 410 aa, unidentified
MDQIDDRVAGLDVHRDMVVACVRLGAGRGAKVRKAKFSTTTAGLGELAGWLADFGVTTVAMESTGVYWKPVYYALEDLFERVWVVNAHHVHNVPGRKTDLSDAEWLADVIAHGMVRPSLVPPPPVRELRELTRYRKTQIAVRAQEIQRLEKVLQDAGIKITSVASKVLGRSTRAMIEALISGERDPAVLADMALTRMRPKRDQLQEALSGRFGAHHSVVARQILDHIDFLDRSIDTLNEEVLTRLGPFDEAVSLLMTIPGVGRATAEAFVAETGADMSRFPTAAHLAAWAGVAPASHESAGKRRPAGTRHGAPWLRQALIEASHAAARSKGTYLASQYRAIAARRGPNKAAVAVAHSMIVSAWHMLTNHTPYNDLGADYLASRRNPETESRRLLRRLENLGYKVTITPAA

SEQ ID NO: 66238 - protein, 414 aa, unidentified
MESVYRSVAGIDVHKKMLAVVIRRQRGEAVEYGKRKFGTTRTEIQHLEAWLGAAGVSEVVMESTAQYWCPVWYGLEPHFRLHLTHPLKTRAPRGRKSDFRDAQRLADRWCSGDLEESFIPGSEQRAWRWLTRTRVQLKKKLGVIHSHVEGLLEQGGIKLSAVVSDLFGVSGWTMLEHISQGVTDPEVLARQARGTLRKKTAKLKEALAGRLEPVCLLLLRQHMDQVRLLRRQVEEINLALAEAMQEHVVALHRLTKMPGVDLYAAQELVSEIGPKAAAFASAEQFASWAGVCPGSQESAGVNYSHRSAKGNRYLRRLLCQIAWAAIHTKGTFFASLFARLKPRIDGKGAAWAVAHRIAKVVWLILHQQVEYHEKGSAPPNERTLVRKFKRMLKEFGALGLDVRALLDQQLPATT

SEQ ID NO: 66239 - protein, 343 aa, unidentified
MEITTIGFDLAKHVFQVHGVNASGQAVVRKRLRRTEVLPFFASADPCLVGMEACATAHHWARELTMLGHTVKLMPPAYVKPYVKRGKNDATDAEAICEAVTRPNMRFVPVKSTDQQAVLMLHRTRALLVRQRTMLANALRAHLAEFGIIVAQGLRSVGALIGKIFGEGVETAALPPLARIALQPLAGQFLQLHPQIKALEGEIVAWHKTNEESRRLETIPGVGVLTATAIAATVTDPSHFRSGREFAAWLGLVPRQNSSGGKQRLGRVSKMGDGYLRSLLFVGATAVIRFARSKSSPGTVWINRLLARKPAKLVAAALANKMARIAWAVLARQEAYRAPALAA

SEQ ID NO: 66240 - protein, 345 aa, unidentified
MQVITFGIDLAKNVFQIHGVDAAGHTVVKKQLKRDQLAPYFANAAPATIGMEACSSAHYWARKLQSFGHEVKLMAPQFVKPYVKSNKNDANDAEAICEAVARPNMRFVPIKDVEQQAVLSLHRVRQGFVAARTAQANQIRGLLGEFGLVIPQGIAHIARRVPELIEDASNELPGAFRLLIQRLLDHLKELDTHVDELELQIVKWHRQSSASSKLAQVPGIGPITASALVASLGDAKNFVNGRQVSAWLGLVPRQHSSGGKQNLLGISKRGDSYLRSLLIHGARSAIYNGKEKTNPTCKWINEIVSRRNNNVAAVALANKNARIVWALLTHDREFRPDYTREPVGV

SEQ ID NO: 66241 - protein, 340 aa, unidentified
MTVIIGIDPHKASHTAVAIGCDERQLAEIKVRATCQQIDRLLAWAEPLGERTWAVESAGGLGYLLSQQLVGAGEQVLDVPATLASRVRVLGTGRSNKNDPNDALSVAIAALRSPGLRSVEPANHREVLRLLAKRNHEIGRLRNIVVSRLHAALANLSPGGISKELNASDAVRLLGDFDPVTPVQQTRCDLALELLDDVKRLDVQLKESHKRIKTAVKASGSSLTELYGVGPILACELIGYTGDVRRFTTRDQFASYAGVAPIELSSGGRIVHRLSRRGNRQLNHAIHMVAICQIRQKDSEGRVYFEKKAAEGKTKREAIRSLKRHVSNAVYRQLLIDAQK

SEQ ID NO: 66242 - protein, 393 aa, unidentified
MYLVGIDIGKLKHSFCLLEKETGEILVEPVFFENNRDGFNALLSSFKHLPQKDILIGMEDTGHYNLALLKFLLDRNYKVALINPVATNLTRKMQGGISKNDKLDTLTICDVLSSNQRVKSYRISKYSSFDLYEQKQLTREHHNLKEEENQLSNRLQKCIDVVFPEFNSLFKSKYGIVYMSILKEFGSADAIAHADIRTLRKCFDTGRGKHISLTAQELKEAARNSIGFPSSSEATQIKHLVARIELIKEQIAEIDKKIEEFSIQNNSPILSIPGISHFSGTSILAELGDIHNYSKPSQIIKFAGVAPLTYESSQFTAQHTAITKKGCKYLRKTLYQIITPVIQYNPVFRKFYLLKIAQGKGHRCAQGHCVRKLMRVIYHLLSTGTQFDPALLR

SEQ ID NO: 66243 - protein, 461 aa, unidentified
MRETLGTGEPEYAAYVALDWADREHAWVLEEAGGGKRESGKLKQTPESIEAWAAGLATRFGGRPIAVGLEQSRGALIYALQAYGHLELYPIHPSTSANYRKAIFPGGRKNDPVDADLLLDLLTRHRDRLRRMRPDQEETRKLQLLTEKRRQLVDEQTSETNRVTDLLKSYFPQALRWLDDLSSPLAVAFLQRWPTLQQVQAEEADCVRKFFYEHGSRSKERIELRLKEIQEARPLIEDRAIIEPAILMVQALLEVIAALRRGIKTLQDACAAVFASHPDAEIFASFPGAGPVLAPRLLAAFGSQRDRWENVVEFQSYTGIPPITEGSGKSLDIHFRWRCAKFLRQSFHEFAEQSIQQSEWAGAFFHHQRHVNHLDHQAAVRSLAYKWIRIMYCCWKKRTPYQESFHQERLLKRPRSSENPTTTAAVQKKSGAPTNGRPGSNRVHFQFKKVAGFCKLSAATS

SEQ ID NO: 66244 - protein, 429 aa, unidentified
MNSKNTDAAPAFVACIGLDWGDQSHALALHDPTTGQTEASTLTHSAENLHRWLDQLETRFGGRPVALAIEGTRGAIFPVLLARPWLHVFAVHPVTSARYRTAFTPSGAKDDLPDAQVLLELLQRHRDKLTPLTRADAATRELAGLCEARRDLVDRRTQLLNQLVATLKKFYPQTLTLVGENLASPLALDFLTKWPDLITLKTARPATVKAFYYTHNVRRPETVQTRLDFIQNARALTTDDVLVSVAVRQLRVLVEQVRVVQKHVAGFDAAIAKAFAAHPEAALFRDLPGAGAVLAPRLLIAFGTERDRYPDPASLQKYAGLAPVREKSGGALWTHWRWHAPTFLRQSFIEWAGQTVKYCPWAKAYYEQMKAKDKGHWAILRALAFKWVRILWKCWQDRTPYDQVRFLKQLAHRRSPLAQALSKTQPASP

SEQ ID NO: 66245 - protein, 369 aa, unidentified
MKKNSICPKRSKRSGIRKGSITIGMDLGDKTSHYYVVDSEGEMVRESTVATTKKGMQQRFGGLPRCRIAIEVGTHSPWVSRLLSGLGHEVIVANARQVKLISDSTRKDDRLDARTLARLARIDPELLRPIRHRSEKVQGDLMQIRVRSALVDSRTDLINTARGLAKSIGERLPSCDADQMGVGKLAGMSSVVVEALTPLLEEVEGLTVRIKASERKLEQLAGAEYPETELLRQVSGVGPLIALTFILTVEDPNRFGKSRDVGCYLGFRPRRSESGQSKPQLGISKEGDVYLRKLLVQGAHCILSQPSPDTDLKRWGLKLAGKGNKNAKKRALVAVARKLAILLHHLWVSGEVYEPLLNSNRQEKSKAAA

SEQ ID NO: 66246 - protein, 354 aa, unidentified
MSQKPNTGIAIVGIDIGKNSFHIVGLDQRGAIVLRQKLSRGQVEARFANMLPCLIGMEACVGAHHLSRRLKALGHDARLMPARYVRPYSKGQKNDFRDAEAIAEAVQRPTMKFVATKTADQLDLQALHRVRERLVSQRTGIINQIRAFLLERGVAVRQGLRFLRAELPRILATPPDVLSPRMVRVIEGLAGDWRRLDERIDHLSGEITALARQDAGCERLMSVPGIGPIISSAMSAAIGTGDGFSKGRDFAAWLGLVPRQISTGDRTILGKISKRGNRYLRVLFVQAAWVVLIKPKSWERHGLKPWIEAAKKRLHRNVLAIALANKLARIAWSVLARGRAFEVRKVDEVAAQPV

SEQ ID NO: 66247 - protein, 319 aa, unidentified
MNTTIKASRRNNERHVGIDIGKDTLDVYIYERDKHWQTSNTLAGIKTLISQLSRYQLTRVLVEATGGYERKLVEACAEKGLPIIIVPPIKVRQFAKAQGIIAKTDKIDARLIAQFGVAMQPEVRTLPSKKIRLVRDLLARKRQLNETRTQEINRLQKAPKVLMPSHRRLIKLIEKDIAWINERLEKEVSAITEWQRTYDIVSSVPGVGDGVAYTLLGELPELGQLTNKQIAALSGLAPYNRDSGSMKGRRRIKGGRAPVRTVLYMGMLSAIQHNPVMKQFYNRLVAQGKHKKVALTACMRKMMTILNAMVRDDKEWKMI

SEQ ID NO: 66248 - protein, 343 aa, unidentified
MNSTTIAVDVAKAVFEVAVSEHAGQVRERHRFSRERFRRYLGEQPPATILMEACGSAHYWGREAQTRGHRVVLLPPHAVRPYVVRNKTDRTDAKALLEATRNDEVRPVPVKSETQQALAALHRLRSTWLATRTARINTVRGLLREFGVVIPNGARHVVPALGLLEDADVGVPSLLRPALAEAAREIRELEGRIRTVEHQLDAVAEQTPVVSRLCSIPGVGLLTATALVAAVGDVQRFPSGRHFASYLGLTPRERSTGQHRHLGAISKRGDAYLRMLLIHGARAVLCHAKTKTAPTPDRLRAWALHLERFRGHNKAAVALANKLARIAWAVWKYDTDFTAAPTA

SEQ ID NO: 66249 - protein, 439 aa, unidentified
MRLFVGDDWAEDHHDVEVMDEAGKVLAKRRLPEGVAGIAQLHELIGRHLGEDADGAEVVAGIETDRGPWVTALVTAGYRVFPVNPLQASRYRERLGVSGAKSDAGDAHMLADMVRTDSHQLRPAAGDSAEAEGLKVLARTHKTLIWERTRAVQRLRHQLREYYPAALEAYDDLDAPDTLELLGKAPDPARAAKLTRAQVSAALKRARRRNITDKATAILAALRSPQLGQPAAVTAAYAATVRSLIAVITVLNEQVKILQRQVEENFGRHPDAEIYQSQPGMGAVLGARVLAEFGDAPHRYADGKARRNYAATSPITRASGKEEGRRRPVHPQRPARRRAQRPGIHGPESIARRPRPLRRAPRPRHRAQRRPETARQQARRHPARVPENPHPLRRGHRLVPPAKPPSVFRSGLTLKLLGCLSARGRRGGGPGAPTAGAPT

SEQ ID NO: 66250 - protein, 427 aa, unidentified
MNETDAIRIEEFRQFKKEIRGSREYLVVGIDVAKEKHHAFFGTAMGKTILRGLVFENNLEGFRKLLEQSEALRVQEQLSKVAYGLEPTGNYHKPLGEHLIKCGKLVVLVSGVALKRNRELLDGRWDKHDVKDAANVADLMVQGKCLFYEYPDSQLRDLRVLLSLKRRLRRHEHGYRVRIRNHLVAQYFPELDRVWGHSESESLAIVRWCLDPSVVAGLDLGEFVRRVSARDRGVRQRARLERIWNLAVDSVGCEMPEAVSVECKLMVEGLRRLREEIGEVLEEIERICLQFPEYPYLLSIPGFGPEISAQVLGAIGDPHRFRNAKEVLKMAGLDLSADRSGKTAESARPVISKKGKAHFRYMLYQAALIASIRNRHFMNYYTAKLVGRQQERGIKTKIRVKLAAKLLVIAWTLMKKKEPFDPRHLTN

SEQ ID NO: 66251 - protein, 345 aa, unidentified
MTEAYDGRQVVGMDLHRRRSVLVRMSMDGRKLETVRIENSPAALRAVLARCGQRPLVVLEATYGWYRAAGVLAEAGAEVHLAHPLGVRAFSYRRVKNDERDASDLADLLRMGRLPEAWIAPAEVRALREVIRYRHKLVQQRTSCKDQVHAVLAKLGVPVTHSDVFGRGGGLWLDQLVLPEPYAAKVASLRALIGVLDGEIARLGQRAAGMLAAGPGYAAVRELDGIGPVLAAVIIAEIGDVTRFRKPGQLCSWAGLTPRHYESDTKVIRGHVSKQGSRMLRWALVEAIQHQPAGTRPQQAKEAILARRGKEARNIAKTAAARVLLTQVFYALRDGHVRRASHPAA

SEQ ID NO: 66252 - protein, 360 aa, unidentified
MKYYTKQHHYYCGIDLHTKKMYVCIMNQSAEIVYHKNHIADPENLMSVIKPYIEDIVICVECIFTWYWIADFCEEHTIPFILGHAYYMKAISGAKTKNDKIDSQKIAALLRGGMIPMAYVYPQRMRATRDMFRRRIYFVRRRADLLSHIQNTNTQYHFDSIKKGIMSLTESYKSELLERFSDPVLKLMISTDINIIDSLTHQISKIEYQAMKSARHFDPLSLMLLKTIPGIGDVLALTILYEINDINRFSRVQNFASYCRVVKCQRESGGKQFGSKNTKIGNPILKWAFSEAAVHFSRYCPEFTQKLNKMQNKFGNGKTFSITAHKLARTVFYMLKKRKPFDVKTFCNEKTAKQVSLASN

SEQ ID NO: 66253 - protein, 279 aa, unidentified
MEISTIGLDLAKNVFQVHGVDREGNVVVRRALRRAQLLSFFAKLPPCLVGMEACGTAHHWARELIKLGHDVRQMPAAYVKPYVKRGKTDAADAEAICEAVTRPTMRFVPVKSSEQQAALSMHRARDLLVKQRTQLVNMMRALLAEFGINIPQGVRLALEMARKIVDGEAPAVPSEAAKIVGRFSQQALDTHAQCQEIDRDLLAWQRTNDTARRLMSIPGIGPIGATALAASVTDASQFRSGREFAAWLGLTPRQPSSGGKERLGRITKMATNTFARCLL

SEQ ID NO: 66254 - protein, 447 aa, unidentified
MKKKKTRELAIVHPHACGIDVGSKFHAVATGLGDGDIEKFGVYTEDHEKLIAHLKEKEVLHIAMESTGSYWQSLFSALQKSGFVVDLVDGRQTKSYKNKTDFKDARAIYQLHSLGLLSSCFLPDDLTERIRTFYRYRGQMLEESTRYVNRMQKSLRLMNFRLDNVVSDIMGKSGQAIIRGILDGEEDGLELAKMANSRVKRSRSEIAAGLMGHREPEHMYVLKDCFEAYHSVHERIKILDEKIRCLVEIAAEAMPKKTRKKARVQKNQINIGLENLSYTYYGVDLFAVKSVSFNLVMTLISEVGWGIMEFPSSKSFVSWLRIAPNNKISGGKILSSRTPKGKNTLAIAFRNAANTVAQHKEGYMKAFFSRIAYKKGRAAAITATARKLATIVWNMIYYQKEYTPVSEEEVERKIKQKVVKNIKHRMKKLGITLEEITTHSSLSNIHL

SEQ ID NO: 66255 - protein, 416 aa, unidentified
MKKTSNSETSSKRAGKAAKAQGRVQRDTKDVMAELVAKLSEKLAAKPAPTNAPEERPHSELGPNRDRLTVGVDLGDTWSNYCILDLDGEKVMEGELKTTRQDFAEFFQALSGARVVMEVGTHSAWARDEVEGCGHEVLVANPRQMEGPKRRKRKNDRIDAQRLARVGRMDPQSLFPVQHRSAAVRQDLVMVRARAALVDVRTQLVNTTRGLVKGVGARLPKCATGSFPSKVADALPAEVREVLLPLVRLVEAINSSIQDYDEKVEKLAKEKYGHTDLLRQVKGVGALTSLAYVLTLEDPARFAKSRDVGAYLGLVPKQEDSGDRQPQLRITKMGDMMLRKLLVGSAHYIMGPFGPDTDLRRYGLRLCERGGKNAKKRAAVAVARKLAVLLHRLWVSGEVYAPLHQAPTTVSAKAAA

SEQ ID NO: 66256 - protein, 339 aa, unidentified
MAEVSTIGIDLAKKVFQVHGVDREGRVVLRRAVRRRQLLAFFAKLPACLIGMEACATAHYWARELGKLGHEVRLIAPAYAKAYVRRNKNDAADAAAICEAVSRPSMRFVTIKTQAQQAAAGLHKVRELLVKQRTMLINSLRGMMAEFGVVAPSGPHHIGELVAVLADPEDGRIPSPLHEALMRVVAALQSIEGQLEGVEKQILAWARTSQTARHLLTIPGYGPILSSAMAAIVVAPAAMRSGRDFAASLGLVPRQEGTGGKVRLGPISKRGNGYLRRLLVNGAMSVLQSKRAKRDPWLVKLLETKKRKVAAVALANKMARIGWALMTRQEDFRAMAVAA

SEQ ID NO: 66257 - protein, 437 aa, unidentified
MKKFKALQSKRQFIRNKVVVGIDPAKNKFQGVILDQNGIMQGPSFTFNANHQGLHHLLWDKLNQRIEKFNTQNLVFAVETSCNLWQPLCFYLRGCGYSVLLVSPLTTKHSRPLISHDFSRTDPKDALLIASSARDGYFDFYQDFTPHSNAMHRLSITYDKLRRNYVQTRLRIRAFMEQLFPEFFEVLNLDTDTGKYLIKRYFMPGHFIKMDIDEESEKIMKISQQQHGRNTLQKLKELARESIGITLGLEEILAAQLTLTCWITLLETVEGQMKNVMKELIGLAKETPYFQPIVSLKGISDKLAALFIAETRDLSRFSHYQQIEKHAGVNIKQSQSGDYVGARHISHIGNRRLRWIIYRMAEETCRYVPEVRMKYLKRQLKRKIYRKNIIACVSPLLKLILVLIRENRVYENRTEHLKELQELEAAYEKNKKQKQAA

SEQ ID NO: 66258 - protein, 343 aa, unidentified
MNYVGVDLHKKVITACVMDANRKIVREVKLHPAEPHRIVGFFESLGEYEVVLEATSSYYWFVELLGPTASEVVLANPAKMRVIAESTKKTDKLDARTLAEFLARDMIPRAYMPTPRQRRHRALVRHRRWLRGEATALKCKIRHVLSDYNADRRDLFSAGCGEAYLKTLKLNDADRFVLADLWRALEGVEKRLKRAAAKIKAFAEKAPRAEAEARALVKTAPGVGTVTAEVVLCELGDVRRFRNAKAVCAYAGLAPAVRQTGGKKSKDGHITKQGSGLLRWALVEAAWRLVGSSVQWARTYQRIKKRSGAKRAIVAVARKLLCVLYAMLRDSKPYHSAAATAAA

SEQ ID NO: 66259 - protein, 303 aa, unidentified
MKRAQSNTKKKSIKSGRKAPRADPRKPVVAGGVDTGKDWLDAAIHKGGGAPLRRPNNAQGRAEIIAFFQQHGVVRVGIEASGSYEFEMVDAMREAGLAVCVLQPAQVRAYAKFLNLRAKTDPIDAALIARCAAAQDEVRQAPDPRLAPFAEHLTFIEQIEEDIARLRTRGDRFRNPRFIAELRQEIARQTKRKRAELAQLRQAVRAHADLAKKLDLLISIDGLGERTALTLVVRMPELGRVTREKASALAGMAPFTQKSGRWEGEAHVEGGPRQGRKGAVRRSASRRPALEQRTRRLLQTPQK

SEQ ID NO: 66260 - protein, 449 aa, unidentified
MPRTKKQPVSLPVIESNAAGIDIGATQIFVAIPADRDPEPVQCFPTFTVDLERLADWLVRCQIQTVAMESTGVYWIPLFQILEKRKIEVRLVNAHHVKNVPGRKTDVEDCQWLQHLHAVGLLRGSFRPDDEICAIRSLWRHRDNLIQLATIHLQHMQKALDQMNLQIHHVISDLAGTTGLAIVDAILAGERDPGKMAHLRDPRIRASEETIMKSLVGDYREEHLFALRQSLKSYRHYQEQIQEVDLQVKQMLQQLPPKVAEGEKPPQGDKTRKVPWRNEPPQLRDDLYRAFGVDLTAVPGINSLTAQMLLTEVGPDLFRFPNAAAFCSWLRLCPNPKISGGQILSSRTRPTKNRAALALRMATQGLCRSNTFLGDYFRRMKARMGTPKAMTATAHKLARIVYHMITTQQEYDATVFQQQEQRRQHQKAARLHMQARELGFQLVPLNSVP

SEQ ID NO: 66261 - protein, 342 aa, unidentified
MKNMMIGVDLAKNVFQVHGALPTGEVQFRKKLTRKQFPAFMAQQRPGMVIFEACGSAHFWAREMEVLGHEVKLIAPQYVQPFVKRQKNDAADAEAIVIAARQPEMRFVDLKTVEQQSCAAVFRGRERLVHQRTADVNALRALLYEHGYVFPVGMSHLNRMTALVEDETVNLHALIRAECLDLLVQIAEKTARIIERTTKLKTLATQSDRARRLQTMPGVGPLTAVAVEAFVPDMAQFKTGRDFAAWLGLVPKQHSSGGKERLGRMTKAGQADIRRLLIIGAMSRLNWLGRRTIVEGSWLSRMLTRKPKMLVAIALANKMARQIWAMLTKNEDYRDPAMAVAA

SEQ ID NO: 66262 - protein, 344 aa, unidentified
MTTSYIGADVDCKMTALAVERNGEIVRRNRVPTDIVSLRDFLGTVRGPKVMVIEEGPMSGWLYRSLRTEVDQFVVCDPRRNKAIYADGDKTDPLDAGGLAALQRGGYTREVYHTQDEDRLALKEIVALYHDRVQDAVRQVNKLRGQARGCGLRIPSRVLVRAKVRAEWMGTLQPAALGERLSILWQGWDVVRSQAKLAKAQLARRAKAYPTIAAWQEVPGVGLIRAATLYAYLDTPFRFGSPKKLYKYCGLGLKRTASGTDKNGRPKEGRLCLYRHANHRLKDSLLGAAISAVSWNDNPFRRYYRKCLQEGMTESNARHAVGRKILRVLWGMWKTNSRYEESLV

SEQ ID NO: 66263 - protein, 357 aa, unidentified
MITKVQRNRINFKGKTVNIGIDMHKHYWSITALVEGQTVMAVTLAKPNYDSLRKLFAQFEGNYVRIAYEAGPGGFDLYDRLTADGIECIVAPPSLIPTESGSRVKTDKKDSYKLAKLLESNMLKKVWVLSPEERAHRQLVRTRWQIVNHPSDVMRQIKSLLLFHGIEIPFPSHQQWSSPFTRWLHDLDDQYLNRSLKALVDLFDYLSAEKKRLTHDVIQLARDQKYSHRVRLLKSIPGIGALSAMEILVEIQDISRFKTADEFAAYLGLTPSQYSSGEHIRMGHITHAGNHRVRTTLIESSWILIAKDLQMRWKYEDIKRRRGAKRAIVAIARALSLRIRKMLLDQVPYEIGFRKAA

SEQ ID NO: 66264 - protein, 327 aa, unidentified
MQGKVSPEPNAQTRVYVGIDTCKAWLDVYVHPIGLAFRVANSREGLGQLKRRLAGLLVVRIVMEATAKLHREAQRNLADSGFSVAVVNPLRSRLFAEALGQLAKTDKVDARMLALMGAMLEPKAKPPAPETIDTFQELVRGREAFVQARTALLNQLGDASATLLKQQIRRQIRTIEAAIERLQKEILHIVKADPGLARRYDILLSIKGIGPVTAVAILANFPEIGTCNAKQTAMLAGLAPIANDSGDRTGSRSIRGGRNELRTGIYMAAVAAATSNPSLKAFYARLLAAGKLPKVALTAVMRKLIVLANTLIREDRLWEPKHAPTRA

SEQ ID NO: 66265 - protein, 385 aa, unidentified
MGCGGVEGDLPSSDAGMLAVPVPTRRVVGRARSMRRSLVSIVGGLDLHRQQITFDYLDTDTGQVSVGQIPAADRRQLRAWLARRFADRQDRDQIEFSVEGCTGWRYVTEELAAAGMVAHLAEPAETADLRGRKKRAKTDRADARHQRDLLVQGRLPECWIPPVEVLEARALLGCYHDLRRDHTAWVQRIHAVLFHQGATACTDLGTSGGRAALARVAVEQLSPAGRTQVAAAVLMLDATEAQMEILHRQLLATARHMLGPKVLVERLYGVGPITGLALTCWLGGAGRFSSARKAVRFAGLDITVYSSAGKRSPGRLSRQGPPVLRWCLYEAGKTYARPSAPDYAYYAAVKKKIDGKRAALSEARKLIRQAVHILTDLGDDAFAYV

SEQ ID NO: 66266 - protein, 371 aa, unidentified
MLRPCQQAKLARGAKDEERAMSYKLDSGIAVIGIDIGKNSFHVVGHDKRGTIMLRQKWSRGQIEARLANLPPCLIGMEACVGAHHLSRKLQMLGHDARLMPAKYVRPYSKGQKNDFRDAEAITEAVQRPTMKFVATKTAEQLDLQALHRVRERLVSQRTGIINQIRAFLLERGVAVRQGLRFLRAELPRILAAPCDALSPRMLRVIEDLAGDWRRLDERIEILSSEIEALARQDKNCERLMTVPGIGPIVSSAMVAAIGTGDAFSKGRDFGAWLGLVPKQTSTGDRTILGSISKRGNRYLRTLFVQAAWVVLVRIGPKHWHRYGLKSWIEAAKKRLHHNVLAIALANKLARIAWSVLACGRAFEASKIQAA

SEQ ID NO: 66267 - protein, 334 aa, unidentified
MDKVTTVGIDLAKRVFALHGVDASGRVVLRKTIRREQFVETVAKLPPCLIGMEACSGSHEWARRFQGLGHSVRLMAPVFVAPYRKSGKNDGNDAEAICEAVSRPNMRFVPVKSAEQQALLALHRVRQGFVEERTALINRLRAVLTEFGVVLPNRTQWVRRDAVAVAEPLPVLARQAVEDLRAHLVQLDERIGAYDRQLEQQAVQSEAAKRLMQIRGIGPLTAVAIIATVGSARDFASGRQFAAWLGLVPRQNSSGGKSRLGHISRRGDAYLRMLLVQGARSVLNTAARHTDHLSLWALSLQARRGMHKALVGIAAKNARIAWALLSKDQTLRAV

SEQ ID NO: 66268 - protein, 349 aa, unidentified
MTTYVGMDLHSTNTVLGMVDEDGKRIYRKKIPNHYALISKELQPFKKKIKGVVVESTYNWYWLVDQLIEDGYKVHLANPSAIKQYEGKKYVNDQDDAFFLAELLRLGILPTGYIYPKKERSVRDLLRKRLMLVRQRTAHILSFESFYCRNTGLRMSCNDVKKLNISDVDHMFESDYQVLSAQANIATIIFLNERIKEIEKRVLDFMKPMPQFQKLLTIPGIGNILALTISLEVGEIDRFKKVGNYSSYSRCVSSGKYSNGKKKGENNRKNGNKYLSWAYVEAANHAKINCLYAMKFFQRKSAKTSNIVAIKALAHKIARASYYVMKNQEDYDIERIFGPIKKQAAAVNQ

SEQ ID NO: 66269 - protein, 343 aa, unidentified
MKVTTIGFDLAKNVFQVHGVDERGHVVVRKQLRRDQVAMFFANLPACLVGMEACGSAHHWARKLQSFGHCVRLISPQFVKPYVKSNKTDAADAEAICEAVARPNMRFVPIKTLEQQAVLSVHRVRQGFVKARTAQANQIRGLLTEFGLVLPQGITNVMCRVPQLIDADTELPASMRPLIARLLENMKTVDRQVKELEAQIKAWHQGSELSRKLEKIPGIGALAASAMVASIADARSFKNGRQLAAWLGLVPRQDSSGGKPKLLGMSKRGDRYLRTLLIHGARSAIVAAQRKAKPNVWLSGLLTRRHPNIAAVALANKNARTIWALLAHEREFRPDYMPRPATA

SEQ ID NO: 66270 - protein, 316 aa, unidentified
MYLGIDVSKLTIDCCLIADGQNHQKKFQNNKVGFEQLTKWLQSHKVSDKLHCVCEATGTYYEALAEYLYLRYTITVENPRKIKGYAIAELQRSKTDTQDAKLIAQYCQDRKHKLKAWQPPAKEQKQLQEIARYLDYLKQQRATEKAKHHEAPDYIKSHIQTTISNLTAQIQTVKKQLLQFYKDNPSYNNLRKRLKTITGIGEQATAVLLSTYKRHEFKNAKQFTAYLGLDPRKYQSGTSVNGKSRISKIGSSEIRKSLYMPAVVAYRCNAFPEFVGRLKNKGKHIKLILIAIMRKLAVIAFTLLQNGQDFQVERYK

SEQ ID NO: 66271 - protein, 384 aa, unidentified
MNKHSMIFIGLDTHKEFHEVAYCEEQRGASPVHYGRIPSSKASVKKLLRQFESKYPGATLHVVYEAGPCGYWIYRLITSLGHCCYVVAPSLIPKKPGERIKTDRRDALKLVRSLKSEDLTPIYVPEPEDEAVRDLSRAREAAMKDLKEAKYQLKALLLRNNIRYEGTANWSKKHLRWLTELILPHPAQQIVLQEQLQTIEERIRRLERLDNELTHHVHQWRYYPVVKAIQAMRGVRLLVAVGVVAELGDLHRFDHPRKLMAYLGLVPSEQSSGGKRHLGAITKAGNGRARRLLIEGAHSYRYPANVSTELQLRQEGLPKDIVDIAWKAQLRLCKRYQRMSKKGKHYNLIITAIAREMAAYIWAIAKEVVLTPVNPKLRLSRVPA

SEQ ID NO: 66272 - protein, 372 aa, unidentified
MKMKVRCCNDSPNFIDERLVREQRIMSNVPVYVGLDYHQDSIQVCVLNPQGQVLLNRSAGNDASELARIIQPLGVVQRVGIEACCGAADLGEELVQQLGWNVSLGHPAYIAKMKSSPDKTDYSDGRLLADLTRVGYLPVVWLAPANIRELRQLVNHRQRLADHKRSLKLQVGAILREQRVKIGKDHGARWGKRWTARLREQVEIVEMAGLSEHVRWIVNDLLEEIAAMEIKIKKAEARLERATRDDPVIAKLRRQPGIGPVTAWVLRAWIGDFNRFKTAKQLSRYCGLSPCNASSGNRTADAGLINGCNKLLRMTIVQAAHRLIRTVERWRNLARSMEKRGKPACVIVAAVGNRWVRNLHQAMKSPTEGAAA

SEQ ID NO: 66273 - protein, 340 aa, unidentified
MGEITTIGLDLAKQVFQVHGIDADGTTVLRKQLRRSQVLSFFSRLAPCLVGMEACATAHYWGRELAALGHEVRLMPAQYVKAYIKRNKNDAADAEAICEAVVRPTMRFVPAKTAEQQAALLLHRGRERLVRQRTGLVNALRGHLAEFGVIAPQGLRNVGKLIAVVRDVGDARLPDLARQVLEVLAAQIEQLEGAVAAVEKQLMAWHKSNPVSQRLATIPGIGPIIASAIAASVAEPGGFRSGREFAAWLGLVPRQNSTGGKHRLGGISKRGNQYLRRLLINGASANLLRSKATKADPWVIGLRRRRPSLVVAVALANKTARMAWAMLRHGTNYQPALAAA

SEQ ID NO: 66274 - protein, 326 aa, unidentified
MTHPVALTRKVTVTQTICGVDVCSSTLDASIRPSGEASSFANNPDGIDALATFCRRHSVTLVAMEATGGYERQAFALLDQQGIDVAILNPRSVRQFATGMGRLEKTDRIDAGIIAWFAEVKRSRRSVMASASQRHVRALVTRLRQLTALRTSQLNQKRLITEPIVQASFDELLNLLKRQIDDLAQQIARCVDQDPLWRELNATFRSIRGVADRTVARLYAELPEIGTLSNKTVSKLAGLAPLANDSGKHQGKRFVRGGRAPVRDILFIVASVAARYEPDFIAFQQRLKDAGKPPKVVRIALAHKLLVRLNAKARDIRNAQKYTLAA

SEQ ID NO: 66275 - protein, 365 aa, unidentified
MVISVVAGIDPHKYSGTVAVLSMAGVLLACESFDISADGLTRLLLVLSETGTRVERIGVEGSSGLGLPVVNALRAAGYDVREVQASRTNDRRRRRTRAKTDITDAQAIAAETLADPGLPPARKHTHRPSPAWETLHVLRAQRESLVLQRVRLLTEAEPVLCSLPVEVRDQLPSTSRVSAALVKLSTMDTTAMARADQARTQWLAATLGSINTITADIKRIDKQIPGLLAELGCTLTEIVGIGVVTAMTLLTEVGDPTRFATEAQFARWCGAAPVPVSSGEGHGQPRHHRLDLAGNRQVNSVLHIVHVTQARMHEPARAFMTKSTTAGKTLRAARRSHKRQLANVIIRHMWNDAKVTRDVPLSTAA

SEQ ID NO: 66276 - protein, 387 aa, unidentified
MGAVLIGVDPAKRSNTIEVINASEKTLATGRFDNSTVGYREMRALARKWPDRVWVIEGATGVGLHLAQRLVSDGERVLDVPAKLSTRVRAMDTGHGRKNDPADAHAVAVVGLRSPGLRKVSLDDETVALKLMSERRRDLVRSRTQAVNRLHQILMQLIASGAPKALSVAQAKALVATVRPRDAVGKARRQLAVDLIDDVVVFDRKIKAMEARLSEAVAATGTHLTEIVGIAAVTAATIIGEVGNVSRFATSNHFATYTGTAPIEASSGEVVRHRLSRAGNRRLNSALHIAAMANKRHDPRGRAYYERKLAAQKGHMGALRSLKRQLSDVVFRVLLEDQARANPGGQMGATLTASAVDQIPKANTSDKPQPGFTAEATPTRRPTKAAS

SEQ ID NO: 66277 - protein, 344 aa, unidentified
MTNIQHKETVHEAKPDLFAGIDVGAEELILVIRKNGKPFDPQKFANTPADRTRLVKKLVKLPGIIVCLEATGVYHFDLSLALHDACVLLMVVNPKAAHNFAKVLMKNSKTDAVDANTLAEYAARMDFVAWTRPSDEQIALRSFARRINALTGQKAAAKNHLHALTATSETPKAVLKDAKLAITQLEKRIDRLTAETLILIDKQPELKRILTLLIGIKGIGNTSAIALMGELLLLPPDLSHREWVKFAGLDPRAFDSGKSVHKKTRISKAGNRHIRAALYFPALSAKQHDKHVKAYFQHLMDNGKTPLQGVCAVMRKLLHAIHGMLKHNEPFDNTRFYAIPISAE

SEQ ID NO: 66278 - protein, 340 aa, unidentified
MKQVSTIGLDIAKHVFQVHGVDALGAVVVRRKLRRDDVAAFFSALPPCLIGIEACATGHHWARVLLALGHKVRLMPASYVKPYVKRQKNDATDAEAICEAVGRPTMRFVPVKSEEQQSVLMLHRVRELLIRQRTMLVNALRGHLAEFGIVTRQGIVGVGMLIAWVEDDGQNLIPPLARSALLSLIGQLREVHERVGEMDRQIHAWHRSNELSRRLETIPGIGPITASAITATVTDASLFKSGRQLAAWIGLVPRQNSSGGKDRLGRISKQGDPYLRRLLVVGAHAVLRFSRKARVPPTQWAAELLARKPYNVVAVALANKMARIVWALMMTGRRFETAAL

SEQ ID NO: 66279 - protein, 422 aa, unidentified
MSKTGLYPLYNLILRSDKFMNMNAVGIDVSKGKSMVAILRSYGEIISKPFEVKHTVSGIRSLIEQIQSIDGESRIVMEHTGRYYEPLVRELSKADLFVSAINPKLIKDFGDNSLRKVKSDKADAVKIARYTLDSWTELRQYSLMDEIRNQLKTMNRQFDFYMKHKTAMKNNLISILDQTYPGANTYFDSPAREDGSQKWVDFSATYWHVDCVRKLSLNAFIDHYQKWCKRRKYNFSRSKAVEIYEASKELVSILPKDDLTKLIIKQAVEQLNTASQTVEQLRTMMNEAASKLPEYPVVMAMKGVGKSLGPQLMAEIGDVSRFTHKGAITAFAGVDPGVNESGSYEQKSVPASKRGSSTLRKTLFQVMDVLIKTKPQDDPVYLFMDKKRAQGKPYYVYMTAGANKFLRIYYGRVKEYLSSLPE

SEQ ID NO: 66280 - protein, 395 aa, unidentified
MFIVGIDVAKRNHEVTVITSAGQVVCKGFRISNTCTGYNRMMERLGKLTNLKSPFAFAMESSAHYWLALYTRLKKDGYQVVILNPIQTHTMREMFLRKSKTDAKDSLVIAEVIRFGRYAASDVPQEKLLALKELCRSRAYLMDMASDLKRKTIAILDRVFPEYETLFDSVFCKTSLAVLTKYPTPDKLSRAQLGKLTEVLQKSSNGRFGEWKAREIKELARGSFGVADCEGVYSTMIQLFLEQIHTLLETCSSLERQINELLLQFGTTLTTIPGVGTLLAATILSEIGDISRFSSADKLAAYIGIDPAVNQSGEFVGSHAHMSKRGSPYLRRAVWMASMIAVQRDPMFKAYYEKKASEGLRYMNIIGHVTKKMTAVIYAIMRDNKAYVPVMPVVA

SEQ ID NO: 66281 - protein, 409 aa, unidentified
MQVLYPRCCGLDIHKKTVVACVLLTEPDGTTRRFVRTFGTMTVDLLALGDWLSLHEVVHVAMESTGVLWRPVFNVLEEGRTLLLVNAQHIKAVPGRKTDVKDSEWLADLLRHGLLRPSFIPPPPIRVLRDLTRYRKKLVELRTQEINRVHKVLETANIKLGAVASNVVGVSGRRMLEAIKQGESDPQVLAELAKGRLREKLPALRLALDGRVQAHHQLLIGELLDHLDYLDRAIHRVEVNIAALVAKEEKAVELLLTLPATGPVTAAAIIAEIGTDMSRFPSAAHLASWAGVCPGNKRSAGKQLSGASTKGNKQLKTILCEIAATIARTPDTYLHALYQRIARRRGKPRAMMAVAHSLLVSIYYMLRDQKSYEELGSDYFDQLQAQHLERHYVRRLEALGFQVTLTSAS

SEQ ID NO: 66282 - protein, 351 aa, unidentified
MTMVGGFDVHRKQITFDYVDDDGLVRFGEIRPATRKTLRGWLSEHCPEGDAEFALEGCTGWRYVVDELAAAGVAAHLGDPAEIAVARGPKKRAKTDRADARLLRTLLLQGRFPESWIPPAHVLEVRVLGRLYCTLMDERRAWQQRIHAQLFHQGCPPIRALLTEAGREALARVELSAAGRQYVDSALRRIDELSAEIGPLRTQLVNFAKHQAGCRALQAHYGIGWLCAAIMWAEIGDARRFASSDRLVRFAGLDVTVYSSDRKCAPGHLSRQGSPELRWAAFEAAKCAARRGSPDYGYYHKLAAKHDGHNGKNPTLAVERKILRRCYHTLRELGDAALGLPDTQPHQEVAA

SEQ ID NO: 66283 - protein, 352 aa, unidentified
MTAVMIGVDPHKASHTAVVISGAEEPLGELRVRASAAQAERLLAWAAAWPERTWAVEGAGGLGHLLAQQLLSAGERVLDVQPKLGARVRLLDTGNVNKNDPDDARSVAVAALRSPGVREARPDDHAAVLKVWSKRRRDLASSRTQVACRLHAVFCELVPGGVPKKIIAAHAARLLGSITPPDAVAAARLELAAALVEDLCRIDGQLRETRKKLDTAVRASGTSLTGLFGVGPVTAATIIGEVRDVSRFTNRDRFAAYNGTAPIEVSSGGRKVHRLSRRGNRRVNHAIHMAAVTQIRQKHSEGRAYFDKKLAEGKTRKEALRSLKRQVSDAVFTRLRADARRTQAQVRDPGGQ

SEQ ID NO: 66284 - protein, 291 aa, unidentified
MAKARTLVGLDVHATKIVAAVLDAESGELQCFRMSGEVEAAAAFCAGLPVPVRAAYEAGPTGYGLARKLAERGVQCVVAAPSKIPRASGDRVKTDRRDAEHLARLLFAGKLHPVRVPDDEEEALRDLVRAREAVRVDLMRCRHRLSKLLLRHGIRFEDGKAWTQRHRDWLATVSLKWPAAQTTLSDVQGAIDALCHRREQLEREILQFLPGSPWAAQAGRLRCLRGVDTLTALGLCAEVGDFERFAKAEQLMSYLGLVPCENTTGEQRRLGQITKTGSRHARRLLIEAAWH

SEQ ID NO: 66285 - protein, 350 aa, unidentified
MKVTTIGIDLAKNLMQVHGVDEHGKVALRKQLRRSQVMDFFAQRMPCLVGMEACGSAHAWARRLIKLGYTVKLMAPQFVKAYVKTNKNDAADAEAICEAVRRPNMRFVPVKTEEQQAVLSLHRARQGFVRQRTAQANQIRGLLAEYGIVIPQGIRHIGKCLPEILEDAENALPGLFRQLLRQLGEHLKTLTQLVEEMEQQIQRWHGANEASQKLAAMPGIGAITATAMVASVGDARNFSNGRQFAAWLGLVPRQHSSGGKPTLLGISKRGDRYLRTLLIHGARSVIEAAERRTKPVALEASTQQRSWLQALVLRRNKNIAAVALANKNARVIWALLAQDRHYQAGYAGAA

SEQ ID NO: 66286 - protein, 411 aa, unidentified
MNPVYGVVAGIDVHKRMLAVVVAVWKEQEIEYRQRKFGTSYGEVEELAEWLGQQHVSEIAMESTAQYWRPVWIALEGRFRLHLAQPRSTLAPRGRKSDFADATRIVRRLLAEDLTLSYVPDREQRQWRTMTRMRVRMSTQQVRLRNQMEGLLEEGRIKLSSVVSDLLGVSGRRILWAMLRGTSDPQQLAALASYKLTTPVAQLQEALRGELDAGQRFLLQMLLEQWEQLATHIEQLEIQMTQALQVWESATHRLLEIPGISHVAAQQILAEVGPEASAFPAPEKLASWAGVCPGTQESAEVSYSSRSAKGNPMLRRLLTQCAWAAVKVKGSIFEQKFRTLLPRLGAKPAIWAIAHRLLRVVWKVLHDKVSYVERGLLDPQALERRRKRYVRQLRKLGFAVTLTPVESQLAT

SEQ ID NO: 66287 - protein, 389 aa, unidentified
MLIQRIAPVAETEFASIFVALELSRAKWLVGVGTSQRWTVRRHQVEGGDLDGLLALLRRLSAGEEKRTRLPARVRVCFEAGRDGHWLHRALTSAGYDVYEIDPASVAVDRRARRAKSDGVDVDKLVRTLARLSRGELDACRVVEVPSEAEEDAKRPHREYERLVKEQTAHRNRVKALLFAQGVRDFDPMAPDRLERLAALPIMPRLKAELSRECRRLAAIADDIAEVEAEMAAVIVPPKTASPARAARSTPSAMQAKAAQLFKLKSLGVHFSTVLAGEVYYRTFQNRRGVGQYIGLAPSPFQSGDMARDQGIAKAGNGRARKAMIELSWLWLRHQPDSALSTWFRERVGDRKGRVRRIAIVAMARKLAVALWRYLETGLVPEGAVLKRA

SEQ ID NO: 66288 - protein, 361 aa, unidentified
MLSMRRVGLDVHARETTAVLLDVVSGELRVQRIAGRPEQVLAWLETLEQPFRAVYEAGPTGYGLARRAAERGLDVVVCSPGHIRKHPGDRIKTDRRDAERLARLLVANELKLVRVPEPAEEQLRDLVRAREDLRVDLMRCRHRISKFLLRRELYYPHPGSAWTGRHRDWLTSLRFDDEASELTFVDLLHAHDSMLGRRERLERALAELAERSAWAETIARLRCLRGIDTLSAVGLQAEIGDFHRFAHPKQLAGFLGLVPSEDTTGERRRQGAITKAGSKHARRLLVEAAWHYRLPPRISTTLERRHRGQDPRAIDCAWRCQRRLYQRWQRLDVERGKRRTICAVAVARELSTFCWELGTQT

SEQ ID NO: 66289 - protein, 300 aa, unidentified
MKENNSKKQSKKESKCHKQIAPKDGAREKFPFYIGIDLGDKNSEICVFDEDGEVSKRLRLRMKEAEFQCYFASIPRSAVAIEAGAQSRWVADTVERCGHKVYVSNTRKVPYISQSDDKDDPGDAYKLGELAYLKPRLLHPIQHRSQAVQTDLSWIRAREALVESRTQLINTIRGISKAFGERLQKCSVESFTAKRAEQIPEAIRGRVAPLLEMVDQLNERIRNYDEMEEHIARTRYPKYWLLDQVDGVGVHTALSYMLTIGDPGRFERSRLVGCFLGMRPKRQESGEQQPQLGITKAQRR

SEQ ID NO: 66290 - protein, 429 aa, unidentified
MNYNTQNAKIASITEKTLIVGIDVGSETHYARAFNWRNYEYSKKPFAFSNDEAGFSSFKEWMDDIAEKHGMVAVIPGMEPTGHYWLNLGAYLQEQGMKPVHVNPHHVKKSKELDDNNPSKNDRKDPKTIAGLVNEGRFSYPYIPTGIYAEIRNLSNLRIQTQEEITRIKNRIARWFSIYFPEIKDVYRNPDAVSGLMVIKQAPLPCDIKELGVDGVNKIWRDARLKGAGIKRATTLVTAAEHSIGNTEAPRSARKEIRNLLNDYEIYKNRMDELMEEIEKTLSEIPYIDKLMEINGIGTKTVSCFIAEVGDIGRFDNPKQVQKLAGYAIVADSSGKHNGESRISHRGRKRLRYALYEAAISVIGKNKEFKEIHSYYRTREKNPLKKMQSVIAVACKLIRIFYTILTKGVDYDGKKMLNDIVRPEIQPAA

SEQ ID NO: 66291 - protein, 336 aa, unidentified
MNEITRIAIDTSKSVFTLHGTDASGRAVLRRNLRRHDMVPFFERCPPMEVVLEACGGSHHWGRVLAGLGHTVRLIPPQYVKPFVKRGKNDRNDAEAISEAAARPDMREVTVKSADQQAKAMLLSVRELLVRQRTQLVNALRGHAAEFGHVGRLGREGVAKVLADVAEDAEVPTPAKDALALLGHEIGRLDARLADVDAKLVAQHRQTPTSKMLAEVPGIGPIGALSLVLRVDFTQFKSGRHFASWLGLTPREHSTGGKMRLGGISRAGDERLRQLLVLGATAVIRQAKPGKASAWLIALLARRPRKLAAVALANKMARIVWAMMTSGEAYRQPATA

SEQ ID NO: 66292 - protein, 392 aa, unidentified
MYIVGIDIGKNHHEASIVSPEGKQIGRSLRFATTHKGADSLMSFIFKNIGNSPCVFGMEATGHYWYPIYSFLKAKGYTIYVINPIQSDSLRKMYIRQTKNDSIDSFLIAEVIRFGQFTTTSMADESILAMRQLCRYRDSVISSRTEIKLRISTIMEQIFPEYEKQFSSLWLSTSMGILEKYLTPENIENAPIDELFEIIKDKSHNKLTMKKAISIREAASDTFGIKIAQDAFSFQLKQLIDRMNFLDKQIEALDCQILEYYEKFDCYLHTIPGIGMIAAATILAEIGDINRFKSSSALVAFAGIDPTVRQSGEFSSTHNHMSKRGSPYLRHAIFLAATTCSFHNSPLNAYYKKKRDQGKHHLTATGAVARKLTTVIYAVLRDSKPYEPKKFC

SEQ ID NO: 66293 - protein, 402 aa, unidentified
MTYDYVIGMDACKYFHHACVLDIDGTQVLSKRINQNEQSLRALFSAFSAYDHKVLVVVDQPNNIGRLTVTVAQDIGIDVRYLPSLAMRQLSRIHAGNAKTDIRDAYIIAHAAKNLPESLRSVDRVEEAFLQLKVLNGIDEDLARSYTRLINQIRSALVGCYPQFEQALRGQIIHRKWVLHLLARYGGPTKIKRLGKAKAAAFARRYKARNPEPVLDAIFAAISEQTVTIAGAHYAEMGVAMSAKDALLKLEHRQQIEKEVIKLINDIPHTQFLLSMPGIGPKTAAQILMTAGDMSDFPSAGHLASYAGLSPRTNQSGTSIMSNSLNRAGNKKLKNALWQSSFASIRSHERSRQFYERKRREGKRHNAAVVALARRRLNVLYAMMRNHEHYHDPAPSQEDLAA

SEQ ID NO: 66294 - protein, 338 aa, unidentified
MIVIGLDVHKQSVAAVAVDEAGRPLAEKAIVVGSDELLGWAARLDAQRLWAAEDCRRLTGWLERQLLSVGEPLVRVPPKLTVPERRAGRTRGKSDPIDALAIARAALREPDLSRPRQGEQVHREIKLLVDHRDDLVDQRRRTQQRLRWHLHQLDPTYEVPLRRLDRASHLNRVARWLARREQELQVRLARELVSTIRALNRAIEELDQELEQRTTQVAPALLDLPGCAGITAAKLLAEIGPIDRFKTDAQLARHGGVAPLEASSGRTQRHRLDRGGNRQLNAAPYRIAITQARYYAPAREYLERKRAEGKSRREAIRCLKRQLARAVFNTLKTSPALT

SEQ ID NO: 66295 - protein, 322 aa, unidentified
MTRIICGVDISSASLEARIGRDGAASSFANTAEGIAALAAFCLTHQVELVAMEATGGYEQKPFALLAEQGLPVAILNPRAVRRFAEGMGLMEKTDAIDAGIIAWFAEVKRCPAQSPASASHQQLRALVTRLRQLTQVRTAQRNQRRLVTDAAVQAGFDELLAVVDRQIKELETAIAALISEDPLWRQLDPVFRSIKGVADRTIARLMAEMPEIGALPNKAISKLAGVAPLARDSGKHQGKRMTRGGRASVREILFVVAGVAGRYEPDFIAFQQRLSAAGKPGKVIRIALAHKLLVRLNAKAREVRRQLAGASVHSAPVPVTS

SEQ ID NO: 66296 - protein, 354 aa, unidentified
MNKVNQLSFAGQTIYCGLDAHKTNWKINCRMEDMEIASFSQNADAVLLKKHMSSNYPDAEIKVVYEAGFCGFGIQRSLKELGIECIIVNAADIPTTDKERKRKDDKRDARKLSRELAEGSLKAIYVPQPSMEHARSLVRQRHRLVQDQTRCKNRIKHLMMFSGLSTQSAQERWSQKYVKELLHLDCGTEQLKSALYLAVEQYQHIRKLLKEATVLIKNLSKQEPFATVQKYLQSIDGIGTINGMVIQTELQDIYRFKTLDSLCDYAGFVPDISSSNDIVKIKGITHRCNGFLREAIIESSWMMIRKDPAMLMKYKEYRRTMKENKAIIRIGKHLLSRIRHVWKNKIEYQRGVVA

SEQ ID NO: 66297 - protein, 348 aa, unidentified
MRFYTKSHKHYCGIDLHAKKMFVCILDADGAVLLHRNIATSPEDFLKVIAPFRDDLVVGVECMFAWYWLADLCSREGIDFVLGHALYMKAVHGGKVKNDKIDSHKIAGLLRGGMFPMAYVYPPEMRATRDLLRRRCFLVRRRADLFGHVRSTAIQYNLPEIEVRMTYEGPRSMVPDHFPDPEVKKIVQIDLAMIDAYDDVIGALEWELEKTSRRQDRRTLMLLSSIHGVGKILSMVLLYEIHDINRFESVQDFASYCRLVKCPHESAGKKKGTGGAKIGNAHLKWAFSEMAVSFMRHNPPGKQLVERLAQKHGKGKALSILAHKLARAIYYMLKNSVPFNREKFMATA

SEQ ID NO: 66298 - protein, 428 aa, unidentified
MNYNQNNKIAQITSQTLIIGVDIAKFKHVARAQDFRGLEFGKPLYFENARDSFDIFVEWIKEIQDQQNLNKVIIGVEPTGHYWLNLAYYLKETNLKLVVVNPAHVKKTKELDDNSPTKNDVKDAKVIAQLVKDGRYAEPNIPEGIYADLRIARKIRDQLSVDLQAVQGQIHNWIDRYFPEFLTVFKDWEGLSALQILKLNLLPHELVQLPDQEILTHIRKAVKRAVGISRITELKKAASASIGIREGSDLAKLELSTLLDKYELITRKFEQLEVKRDELLEPIPGVHQMLAITGVGKDTIAGFFAEVGDLRYYSHPRQIIKLAGLSLMEHTSGKHKGQTRITKRGRKNLRALLFRVVMPLVAKNSAFKALHEYYTKRPDNPLKKMQSLIALCNKLIRVLFAMGKKQFEFSEDRMLRDIPHMAVLPKVA

SEQ ID NO: 66299 - protein, 387 aa, unidentified
MTVRTVTNLPAVTHGETVRCLFAIELSTMSWVVAFNTPLSEKISRRTLTGCKWKRLLELIEEVRARVSRETGRAVEVVSCYEAGYDGFWLHRQLEAHGIRNYVIDPASLQVDRRARRVKTDRIDTDRLLRSLMAYLRGEPKVWSVVRVPSVAEEDARRLHRERDRLVSERVQHVNRIKGLCALQGIYDYNPLRPQAMARLEQLRTAQGGAFPPRLKSEIMRELQRLEMAVEMIATLEAERDAIVDDEASTHLNAKKIQALHKLKAIGPEFATVLVGEIFHRDFNNRRQVASYVGFAPSPFQSGNVAHDQGISKAGNRKGRTTGIELAWLWLRYQPDSDLSVWFRARVGTTKGRIRRIAIVALARKLLVALWRYLETGLVPRGAVLKG

SEQ ID NO: 66300 - protein, 343 aa, unidentified
MKLTRVGIDLAKNVFQLHGVDRHGKTIWKRRLKRDRWLSALLDKVEPGCEIGMEACGGAYHWARELQSQGYTVKLIPPQFVKPYVKSNKNDANDAEAICEAMSRPNMRFVAVKSVEQQDIQATHRIRADLMTQRTAKANQIRGLVAEYGLVAPQQLRALRAAIPGWLEDAENGLTDHFRSLLHGVWVDLLALDDRVLELDREIERLANSNEVTKRLQQLRGVGPMVATALVATVGTAEQYHKGRQMAASLGLTPRQCSSGDKQRLLGISKRGDVYLRSLLIHGARAVVSQAKHRDDRLSRWVTGIATRRHPNVAAVALANKTARMAWAMLRNETDYYPDFAIR

SEQ ID NO: 66301 - protein, 334 aa, unidentified
MKSDTVHVGVDVSKEKLDIYVPAKKEGSRPLTKEVDNNINGFRELRNLARKAKATVCVEPTGGYELELIAFMHKFDVPVAYTDALRVRQFARAEGSLSKNDAIDAALISRFADKIGVRVLEAQEVEAVELKRKAKFRQTMVDSRTAMVNRLETEIDPEMKALLKEQIRLAGRIIDKAERLCLDTVKKNDRMNSLKERFTAIGGVGDITAISILSSLPEIGTLSDGKLNRLVGIAPEEKQSGTKEWQRRIWGGRKDVRNALYMAAVASIKWNAILGGYYHKKRAEGHPHKWAIVPTMRKLLSLLNRIARDPGFIPMPEPESTKQNANVGRRKKAA

SEQ ID NO: 66302 - protein, 344 aa, unidentified
MTKYAALDVSQELTAVCIVDETGRITAEKKIATCPETINSWLSKNAPDLVRVGMETGPLAVWLWNELHDRGIPIVCMDARHAHAALKMRPNKTDRNDAAGLAQIVRTGWFKHVRIKSRDCYEVRSLLAAREALVRTRVRLENEIRGLLRTFGVLFGKAGGGFALRAEEIVAGELDASAPMRVIVETLMQARMAILDRIKVFDRQVLMIAKKNPAARLFMTAPGVGAITALSVASVFDDVERFKRSSSAGAYLGLTPRRYESGEVSRNGRISKHGNQMTRKHLYEAATTLLTRTKAFSTLKAWGLKLAKVAGLKKARVAVARELAVILHAMWKTSTPFRWSAVAA

SEQ ID NO: 66303 - protein, 313 aa, unidentified
MKEEKTFIGIDVSKEKLDVGVRPQVDFMTFANTEDGISLMTDFVKSKQPELIVLEATGGLEMAALRSLIVARLPAVCVNPRQVRDFAKAMGVLAKTDKIDAHVIARFADSVRPEIRPLKTEETERLDAFNTRRSQIIIMLTAEKNRLTTASKWTKKDVEKSIERLEKALVKINREVENLIKKSPHWRHMDKILQSVPSVGPVMSLTILADLPEIGTMNRRQIAALVGVAPLNRDSGKYKGRRAIWGGRARIRSVLYMCVISGICHNPKIKAFYNRLISSGKKHKVAITACMRKLMIILNTMIKNDTCWNESGC

SEQ ID NO: 66304 - protein, 419 aa, unidentified
MRNRLSTRPPAAMSGREVKRMFCGWDWGSTIHGVCLLDDDGVTIKTWMVKHTDTEVAALFAELAQLGDPALIPVAIERGEGLVVGLIARAGHPVLMVEPAAFKASRPRWGAAGAKSDAADAFMLADYARTDGHRLRRVEPLAQATRELAALVRARTSLVEARTAASNQLWAILAEHWPGAALVFQKLTSQIALAFLADYPTPRSASLLGEGRMHQFCRRHSYRGGKSPAELVSRLRAAPASADPIAERVLETIVRSSIAQIGLLNAEITGLERQLADTLATHPKTALLKTLPRVATVSLAALIAEIGPLMERCENPEQVAAMCGAAPVTKASGKSRNVGFRYTANKPARVAITSFADNSRHCSAWAGDSYRRARARGARHPHAVRILARGWVRVIWACWTTDTPYDPSRHRGEQRLLAA

SEQ ID NO: 66305 - protein, 401 aa, unidentified
MQYIGVDIAKHTHVAASELDDGAPHGRPFSFPNTEKGFAGLLQRFDELGATPDDCLIIMESTGHYWMALWEFLDAHGFKVAVVNPVLTDAFRKADTLRKTKTDGIDALLIAEFARFKRLGPSRISPEAAEGLKQLTRYRHHLVAERTSLKNRLTAACDRIFPELASLFSDKHGATAMALVREIGSARAIAATDIRTIERVVRTASRGHHGRAKAEEVKHAAKHSVGCSFAEGALSFEAKHIAALIGHLDAEIDALDEEISRAVDPEIDELLRSIPGIGPVCAATIAAEVGDPDRFGDPRKLMAYAGLDSSTCQSGKFKGDEQHMSKRGSAPLRNALMTAADRARMRDPYFGDYYGQMRSRGKHHYVAVSGCARKLCGVILAVLRERRPYERRPSIQSQDRG

SEQ ID NO: 66306 - protein, 345 aa, unidentified
MNHTRIGIDLAKNVFHMIVLGPEGNVIKRRKFSRAQLAEYVSQLEPATIAMEACGSAHHWARRFREYGHQVMLLPPQHVKGYLRGQKNDYNDALAIAEALSHGAIRSIPVKTVEQQDDQALHRIRQLRIKELRSLVNQLRGLLSEYGIVLPQGKQALRAQLPLLLEDAENGLTPGFRALLNREYRRLRFLIEDVEWFDQQLLHQSKEDDVCKRLKALPGFGPVVSSAVKGWMGNGRQFKRGRDASAALGVVPRQATSGDKIRLMGITKRGDKYTRSLVVHGARAVVREAHKKDDPLSRWISRLVETRGYNKATVALANKLIRIAWVIVARGETYSPKPVAQVAHA

SEQ ID NO: 66307 - protein, 399 aa, unidentified
MFVGWDWGNTAHDVTVIDTAGGRLDRWAVPHTEAGIARVLAKLACHGDPGELPVTIETTRGLVVDRLLAAGHPVIPVHPNAFHAARPRWGAARAKNDPGDSFKLADYARTDIHRLPALAPTLRETLELQALTRQREDQLALRVAAVNQLAALLDAHWPGGKTIFTQLNSTIALDFLDRYPTARTAARLTAARIEAFCKRRGYSGRRSGTELLDRLRAAPTSASRLGEPILTQLIRAQVTLVRALQAGIEALDTSIGDTVAAHPYANLLADLPRIGVLNLAQIIGEVGPILERVTSFDQLAAETGIAPVTRASGKSHTVAFRHATNRRARQALHTWLDNSRRGDRWAAGRYAEARARGQRHPHALRTLGRAWLRIIWACWRTRNAYNPDRHDTEKQPIAA

SEQ ID NO: 66308 - protein, 464 aa, unidentified
MAKKRKKSTKSPITAPALDILEQITPNAAGLDIGSEEIYVCVPVNRDEESVRVFPTFTVDLIALADWLAACHIETVAMESTGVYWIPIYEILEARGFEVYLVNARHLKNVPGRKTDVLDCQWIQQLHTYGLLRASFRPSEEICALRAVARHRDNLIRYRSSHIQHMQKALQLMNVKLTEVVSDITGVTGMSIIRAIVAGERDPHQLASLRDSRCAKSEEQIAKALQGNYKPEHVFVLKQALAQLDFYQQQIRECDAQMEAMYAALPPSDPDDRCSPAPKPKTGKARKNQADYDLAGHLYQILGVDLTAIDGLEALTVQAIITEIGTDVSPWPTVKHFTSWLGLAPHHDKSGGKVLRSRTKKTQNKANLAFRLAAQSLSRSQSAIGAYFRRIRAKHGPAKAITATAHKLARIVYMMLKNRVAYADPGVTYYEQQYRERTIRTLTRKAATLGFDLVPSTAAVAEVS

SEQ ID NO: 66309 - protein, 325 aa, unidentified
MTTNHPFLAIGVDVGKRSLEIALGPDVPKTTLLRNHPDDIASWLAQLDPHTCAIALEATGPYHLDLCLQAHQAGFAVFVLDGLRLSRYRDSIGQRAKTDACDARLLARYLAHEHPRLRPWCPPPTAYRRLLGLLRRRAQLVRTRTRLEADQRRSTDDPLLHQAYEPLLAALRTTIATLERLILRTLEEADWLDHAQRLQAIEGIGPLTAAALTTAFHRGTFHSSDAFVAFLGLDVRVRESGSRRHRRRLSKQGEPEMRRLLYLSAMRMAQHPRWQPLVERYRARGLAPTQIFVILARKLARIAFAMLRDGSTYQPPAMPQPAANT

SEQ ID NO: 66310 - protein, 340 aa, unidentified
MDKTLPTVGIDVSKLSLDVRVDAQERPRRSPGHLANSGEGFLQLQGWFQEHGMPRVHACLEATGTYSDAIARFLFEQGHQVSVVNPARVAAFRTSEGIRTKTDRHDALVLARFCAQKRPALWSPTPASVQQLQVLLGRHEEVQVTCRQERNRLENHRLDPLTRQEIQQHIDWLQRQSAHALQRADTLLLDHGELRQACAHLDSIPGIARLTAMRLYSVFFDQQRFDGAAKLVAHAGLCSAKEESGTSVHRKASISKKGNALVRKWLYMSALAVKGCNPDFRQWAASLKARGKSGMCIVVAIMRKLLHLVHGVLKAGEDDDARKAFPSHYGRPTPPVEEAA

SEQ ID NO: 66311 - protein, 428 aa, unidentified
MSDRKITRREQFCQIQSEITGSDQYLVVGIDVAKDKHHAFMGTATGKTLLKKLIFENDLDGFRRLLQRCEAARVQNGLAKIVLGLEPTGNYHKPLANHLIANGYHVVLATGKAVKDNRRLLDGRWDKNDSKDAANVADLVSRGRCLYYDAGCAQINQLRDLLSLRRRLKKEEHSVKMRIRNTLLAKYFPELDRFYSACESESLAIVRWCLDPAKLAGLDFDRFFAMVTGSRRGLAQKLRLQKIHQLAAQSVGCPMGPAAEFEAALLVQKLKQVREQIKQVEDLMQQVAGDFDEYQILLSIPGFGPYVAAVVLAAIADPLRFESSHQVVKLAGYDLCANRSGKSSDDALPVISKNGNAQLRYGLYQAAFIASVHNPHFSAYFTHVLGGRQRERGIKTKMRVKLAAKMLIIAWTLMKKKEPFNPDYLHIE

SEQ ID NO: 66312 - protein, 412 aa, unidentified
MEVLYRRCAALDVHKQTVVACVLTSTSTGKAAQEVRTFGTMTRELEALAGWLRERAVEQVALESTGVFWWPVYNILEEAGLPVTLVNPRYTKAPPGQKTDKGDAAWLADLLRHGLVRASFIPPADIRALRELTRYRANQVRARAKEVNHLLKTLESANLKLANVATDPVGVSGRAMLAAVAAGEDDPAALAQMAKAGLRNKLDELEQAFIGRVRPHHQVLIRASLDHLRFLERTIEQLDREVERATLPFAAQVAALDAVPGIGPVAAAAIIAEIGVEMDRFPTEGHLASWAGVCPGNKQSGGRRLSSATTKGNAWLRRILGEVAWAAIHERGSVFRARYYRLKPRLGVQQALVAIMHQLLKVIYHILKTGEAYRELGADYYQPADPQRTARRLARRLERLGYTVTLSPAAVA

SEQ ID NO: 66313 - protein, 449 aa, unidentified
MNNGNGVSRGDRNRNARLARLRELVPVENAIVGIDLADKKQMVVVTDHDSRVLARRTFRCRAWDLGVALDWAADRATAKGFAGVTVACEPTGHRWRVLGQLAADRAMPFVCVQPMLTSWARRSEDLTHDKTDEKDAVLIARLTAQLRCYVPEPVEETWGRLRHLGARREQLIVEAVSQIQQIRDLLECVWPAALEVARQPFRSRTWAAAMWVVLDRDGGDFDRTRRLGPARFETAVRREITKRGGQKPCLRIVRNLFTALADPAGVIAHRRGALERVQLLLEDWCHNQHKLVDAEQRMTVVLDELELTQLVTSITGLSAVGAAAILAETGDPRRFATARGLVKHAGLAPREKLSGNYVGRTKLTGQGRPRLRVAAWRAVWGAQRANPVYAARYRHLTTREHNKLKPTQAQTVIAAAILRQLHAVVTTGQAWDPDIATYGRRQAAAPMAA

SEQ ID NO: 66314 - protein, 320 aa, unidentified
MPQNGRIVGLDVAKLKADGCIRSLQLRLSQPSTPEGRAAMVAWLRANDVATAVMEASGGYERSWAEALREAGIAVRIVDPKRVRHFAKSAGCLAKNDAIDAAMIAWFAETFPEMPTQPHDPDREELDALVTARKALVELVTQLGNPGEHRQPRAVRRAYAAILRNIATQLARLEAAIATKLAATARFAARVDIIESIPGLATQTAAGLIAWLPELGHIGNKAAAALLGAAPYDDDSGKHKGERHIKGGRQEIRNLLYMATLGAATKHNPVLKAYYQRLRAKGKPAKVALIACMRKLIVILNTMLARGEKWDPARCRATLA

SEQ ID NO: 66315 - protein, 385 aa, unidentified
MKKDSKRKTSRKAVAGKMSSRQICNLAAKQRLTVGLDLGDHTLRYCILDEAGEVASEGSLAMREAELSSLFGKMPSSRIALEAGTHSPWVSRKLKVLGHEVIVANPHKTKLITQSVRKNDRLDAQKLARLARADPKLLSPIQHRGEEAQADLGVIRARAELMEVRTSLINSARGLVKPMGCRLRACDADQVGISLAEGLPEAVKKVVGPLLSSVEMVSAQLRKYDQTIEAMTERYPEVKLLTQVYGVGKLIGLTYLLTIEDPERFAHSRDVGAYVGLQPKQRESGKSQPELSISKSGDELLRRYLVQAAHCILKKGGPESDLRMWGLKKAEGGKKAKRRAVVAVARKLGVMLHMLWVTGQVYDPLYNRKKAAEMGGGRGKTKTAA

SEQ ID NO: 66316 - protein, 343 aa, unidentified
MNISRIGIDLAKNVFQLHGVDRHGKTVWKRRLKRDQWLKAVLSQAEPGCEIGMEACAGAHHWARELKSRGYIVKLIAPQFVKPYVKSNKNDANDAEAICEAMSRPNMRFVTVKSIEQQDIQATHRVRSELMSQRTAKANQIRGLVAEYGLVAAQTMCALRAAIPCWLEDAENGLTEHFRSLLHGVWTDLVALDDRVRELDRGIQKLANSNEVTQRLQQLRGVGPLVATALVATVGDARQYHRSRQMAAAIGLTPRQHSSGGKDRLLGISKRGDVYLRSMLIHGARAVVSQAKHRDDRLSRWVIGIATRRHPNVAAVALANKTARMAWAMLRNETDYDPDFAIS

SEQ ID NO: 66317 - protein, 370 aa, unidentified
MLDTTTFVGLDVHARSIKAVSLDVMTGEVRAATFGYDAGAVAGWVRSVDPRARCVYESGVTGFDLQKRLSGLGVDCVVGAVSKMIKPSADRRRKNDRNDAEFLARMLSVGNVVEVWVPDDECEAARDLTRALEDARDDLSRSKQRLSKFLLRHGLVFDERTPTGRRKGNWTRAHWSWIESIRFAEGADNDVLAYYVDAVRRAAEEKARLEGLVEAEARKPRWRKRVDSLRCLKGVDTATAADLVFEAGEFSRFRNARSFAAWVGLTPSEHSSGESDRRGAITKAGNKHLRKTLVEAAWHYLTCSGRPKDLAKGQAPDRGARRHAAKGVRRLVERREALLARGVHGNKANVATARELACWVWAVGLMAEEA

SEQ ID NO: 66318 - protein, 355 aa, unidentified
MVGMVVVGVDAHKRTHTLVAVDQVGRKLAERTVATSSDGHLQAVRWAAQWPQPQVTFALEDCRHLTRRLEQDLLRAGHRVVRVPTRLMATARRSGRQPGKSDPIDALAVAQAALREPDLPAAHLDGPTRQVKLLADYRADLVVERTMLCNRLRWHLHELDPELHVPSRGLRRYKVIDELAARLAGVDGTVAQIAQELLGRCRELTVRINQLEGDLRDLVRVLAPGLLAIPGCGVLAAATIVGETAGASRFRSRHAFARFNGTAPIPVWSGNTVRVRLNRGGNRTVNWALHMIAVTQARGVGPGQAYVERLLGAGKTRTEALRLLRRRLSDVVFRVLLADEHRQATTEPAEAPIAA

SEQ ID NO: 66319 - protein, 404 aa, unidentified
MYNAVGIDVSKGKSTVAVLQPGGTVIRKPFDVSHTSQNLNELADYLSSLDGTTKIVMECTGRYHEPMVKALSEAGLFVSIVNPHLIKNFGNNSLRKVKSDPADARKIARYTLDNWTELRQYSGMDNTRTQLKTLNSQFSFFMKQKVAAKANLIALLDNTYPGVNKLFDSPTREDGSEKWVDYAYSFWHADCVRKIGLKAFTERYKSFCKKHHYIFQQDKPEKLFNASKELVTVFPKEKTYKLLIQQSIQQLNLASEHVERLRREMNELASTLPEYSTVMGIYGVGKTYGPQLIAEIGDVSRFTHREALTAFAGVDPGVDESGQHKSKSNRASKVGSARLRKTLFQIMTTLLQNAPEADPVYRFLDKKRSQGKPYYVYMTAGANKFLRIYYGKVKECLRNLEQTE

SEQ ID NO: 66320 - protein, 479 aa, unidentified
MFEELFSKPEVEMGRFIGGDLQAEFMHRLKGVDPGRCLVVPVDVGKSMAMSLVADHYGEIVTPSFEFDLTETGVAELIAAVSTAERSRSAVVVRVGVEAAGHYHRTTVARLRKAGLEVVELNPGAVKQARAQQLLRALKSDARDLGAMAELLTRGSGRPPEERDQALSSQVAWTAHRRRKVKARSALTNQVLAQLDLIFPGLQGCFTTGVLTTKAGRVIVEELTEPGRVKRLGDEGLRRFVARRGVRLTRSKAAMVIAAARNALSLPEEELRARSAVFGADIVLLDYLDTMIAEADQQLSEVIDATPAAILTSLPGVSVIRASNYGAEIGDPWRFRSAEAAYRFSGLVPASYESAKKARSGQHISREGSVELREAILELGKGLSSFDPDFADYKRRLVSDGKKRSIAAVAVGHRAHRLAFSMLRSQQPYDQAHWARSVATGRSVMANAPNGTHQNDVTCPSPPITLIEDLIEHKHALLR

SEQ ID NO: 66321 - protein, 371 aa, unidentified
MEQPTRFIGMDVHKETIVVAITAAGEVGKATPHGTIPNTTTALEKLVKRLRQAGTGPLKLCYEAGPCGYGVYRTLTRLGEDCLVAAPSMIPRRSGERQKNDKRDAASLAVLHRGGLLTSVWVPDAAHEAMRDLVRARLAAVRAVRTARQQLSAFLLRHERRYTAGRQPWTRTHRLWLAEQRFDQPAQQIVLEECIEAVRLAEQRRDRMDAHLRAELPNWSLFPLVQRLCALRGFDAIAAAGAVAAMGDPARFIKARDFMAYLGLVPSEHSSGQRRRLGAITKTGDVRARSVLIEAAWSYRFPARIARAKLPAIEGVPETVRQIAWKAQTRLCQRYRKMIARGKPKPLVVTATARELAGFVWAIAQLPDAIE

SEQ ID NO: 66322 - protein, 404 aa, unidentified
MNMNAVGIDVSKGKSMVAILRPYGEIISKPFEVKHTVSGIRSLIEQIQSIDGESRIVMEHTGRYYEPLVRELSKADLFVSAINPKLIKDFGDNSLRKVKSDKADAVKIARYTLDSWTELRQYSLMDEIRNQLKTMNRQFDFYMKHKTAMKNNLISILDQTYPGANTYFDSPAREDGSQKWVDFSATYWHVDCVRKLSLNAFIDHYQKWCKRRKYNFSRSKAVEIYEASKELVSILPKDDLTKLIIKQAVEQLNTASQTVEQLRTMMNEAASKLPEYPVVMAMKGVGKSLGPQLMAEIGDVSRFTHKGALTAFAGVDPGVNESGSYEQKSVPASKRGSSTLRKTLFQVMDVLIKTKPQDDPVYLFMDKKRAQGKPYYVYMTAGANKFLRIYYGRVKEYLSSLPES

SEQ ID NO: 66323 - protein, 403 aa, unidentified
MRFFGGVDWGSREHAACVLDEEGKVVAERMFAHTPAGLQELGDWIVKHAPEQASIAIEVPRGPVVEALVDRGLEVFAINPKQLDRFRDRFGPSGAKDDRRDARVLADSLRTDGRAFRKVVAAAAWLVELRELSRMRDELVIERVALTNGIREQLGRYFPQMLEVIDEVDTSWAMALLDVAPTPAAARTLPRAKLERVMAGVRRLTVDEARTRLRGRGFHVTPGTIEAASRHMKMLLRRLVLIVQELRDCDAAIEATFEGLTKGEAENDDLGQQSEQRDVAVLLSLPGVGRTILAALLAEAWEALRTRNYHALRVMSGAAPVTKRSGKQLAVVRRLSRNKRLEQAVYHWARCSTQHDPTSRSKYAALRARGHSHGRALRGVADRLLGVACAMLQSGTTFRAEPA

SEQ ID NO: 66324 - protein, 401 aa, unidentified
MISVGVDVSKGKSTICILKPYGEIVCSPFEVQHEEGAMEAFVDMLAKLDGEIRVVMEATGIYHLPVLTFLHDKGYFVSVINPFAMKKYAKDNSIRGAKTDKLDSMMIANYGIEKWYKLQKYEGDEETYAELKLLGRRYRHYMELHVKALQELTHILDYVMPGIKKMFNSWNEANGKDKLSDFVEKFWHFDLITSKNLEEFTEEYLAWAKAKKYHCSKSKAETVYELACNGIPTLSSNTPSTKMLVQEAVSVLRAIDSSLTLILARMQSLAKSLPEYSIVREMGGVGDVLAPKLIAEIGDVRRLHSAKALIAWAGIDPPPYESGQFIGSKRKITKRGSSTLRKVGYEVMRVLKSHPAPKDDAVYNYILKKEAEGKSKKHAKIAGLNKFLRIYYSRVMEVYQK

SEQ ID NO: 66325 - protein, 430 aa, unidentified
MNYNTQNAKIAAITEKTLVVGIDVGSESHFARAFDWRNYEYSKRPFEFSNSEDGFISFKAWMDELAEKHGKTEILPGMEPTGHYWFDLGIYLQNNGMRPVHVNPHHVKKSKELDDNNPNKNDRKDPKTIAGLINEGRYSYPYIPEGVYAEIRTASNLRFQAQAELTRVQNRIARWISIYFPEYKDVYKKTEAVSGFMVLRQAAVPEDIKALGVEGVNKIWRDAKLRGAGLKRAKTLVEAAERSIGGQEGLRAGRREIKDLLDDYEVYKKRLDEIMVLIEELLQEVPYIDKLLAIKGVGIKTVSAFVAEVGDIGRFDNPKQLQKLAGYALVENSSGKHQGETRISRRGRKRLRYALFEAAMSLVGKNEEFSELHHYYTTRSKNPLKKMQSLIAVACKVIRIFYVILTKGVDYDGAKLLGDIRRPEEFTQAA

SEQ ID NO: 66326 - protein, 347 aa, unidentified
MKQIAVIGIDLAKNVFQVHGADAAGNAVLSKKLSRAQMIEFFSKITPCLIGVEACSSAHYWGRRLTEMGHTVKLMPPQYVKPYVKTNKNDARDAEAICEAVTRPNMRFVPIKTVEQQAVLALHRVRDGIVKQRTALSNQIRGLLAEFGIIVAKGSKQLNACMTQLLSDPNSTLPVNLQKTFSSLFQELINLTARVKEFDKQIESHVKATDECLRILQIEGVGVLTATAVVASVGDIRNFKSASQFAAWLGLVPRQNSSGGKTQLLGISKRGDTYLRWLLVHGARAALSYAKRTEKLTAWQQAMLQRKSLNKVVVAMAHRTARRIWAVLAKDCAYDPLHHQRHAMVVA

SEQ ID NO: 66327 - protein, 349 aa, unidentified
MRIIIGCDFHPGYQVIAMMDMETKELLEKTLSHENKEEVRAFYAALPRPVLVGVETSGQSQWFEGMLAELGQELWIGDAKKIRKAADRKQKTDRRDALLVLQMLLEGRFPRIWVASAEERDVRQLLLHRAKLVRMRTQVKNQLQALALNQGVQRKWKLWSAAGRKELQALAMLPWAARRREELLVLLDQLEASIGELDRTVAEEANTRAAARRLMTHPGVGPVTALAFVLTLGPPSRFARGKQVASYFGLIPSEASSGGRQRLGHISKQGNSFMRWVLVEAAQSAVRHEPELRRWYQRLAHRKCRALAKVAVARKLAVRLYWMLRGEMDYAQLIQGSCAGEPGSSRGCS

SEQ ID NO: 66328 - protein, 317 aa, unidentified
MIIGIDPHKMSHTANAVDPATNSTAASLRVDASLAGYRDLMRWAKQFPDRRWAVENARGLGRHLAQWLVARGEVVFDVPSTATARVRELSRGSRRKTDVIDAAAAASVAALHGDATVVTSEDHTTVFALLEERRANLAAQRVRIANQLHAVLRDLTPGGAALAITAKSAATLLRSVRPESLAERTRKELAQDLVRELRAADTSLADIEARMTVALDEHGTRLREIDGIGAVTAVRLIGRTGIASRFASEHAFATYAGVAPIEIASGDHTRHRLSRSRDRRLNSAIHLIAVTQVRIATASDAPTSTRRSPKARPATRP

SEQ ID NO: 66329 - protein, 460 aa, unidentified
MSKKRPKGKRAEPAPKVDWKALEIVHPDAAGIDVGGSEHWVAISPDRDPKPVRSFGCFTADLREMAAWLVEKGVRSVAMQSTGVYWMPVFEVLEQHGLEVYLVNAQHTKNVPGRKSDIQECQWLLKVHAFGLLNNSFQPTDEIRVARTLWRHRGNLVAEASSTIQRMQKALIEMNVQLSNVLSDLSGVSGMRIIGAILKGQRDPAQLAALVEPEVKATPEDIAKSLEGNWRDELLFVLKQQVELYRLYQEKIGDCDVQLRRHLESLGSRVDPRTQPLGPKPKGKRGSRNAPEFDLRTELYRITGIDWAQINGIDVLTAQTVMAEAGDDLEDFDSEKHFTSWLGLCPTNETSGGKILKRRTRKVVNRAAVAFRNAASTLLRSDSYLGAQYRRLRTRLGAPKAITAMARKLACLYYRLIKHGQQYVDKGTAYYESRYREQQIRVLTKKAKKLGFQLVIQQTA

SEQ ID NO: 66330 - protein, 354 aa, unidentified
MLIIGCDYHPGFQQIAYVDTDTGELQERRLVHRQEAEEFYRALKQQQIGVRVGMEASGQARWFERLLAELQFELWIGDAAKIRTKRVRKQKTDRQDAQLILGLMLENRFPRIWVASWENRDLRQLLWHRHRMVQMRTRLMNQLQAVALNEGIRRKKGLWREAGRKQLQSVTLAPWASQRRHDLLELLDGLSPRIAELSERVEEEARKCPVAQRLMTHPGVGPLTALAFVLILGQAERFGCGNQVASYLGLVPEEDSSGEHRRLGHISKQGNSLLRFLLVEAAQVTVRSDPEWRRKYFHLALRRGRKIAKVAMARRLAVRLYWMWRKEWDYARWKKFSPHAGQPGTGVGVQSNTE

SEQ ID NO: 66331 - protein, 302 aa, unidentified
MDLCIGIDVSKAHLDLALMNASGAVLGTERITNESKAIRALLKRWHKQFGVTKANALFCLEPTGHYGYLLVEELMRAGLPTWLAHPLDIKHSIGSTRGKNDRIDAQRIADYARRHHDKARLLGPGSLRMNKLKQLLTCRRQLVTDKRRHQVRIKDLNRHVDRSLRALFDRLSQERIEQIDTQLEKIEAAIVDHIHADPRLREQYVLLLSVDGVGPVLAAHLLACTEGFTRFATARRLACQAGVAPYEHSSGSSIHGRTRVSPQADRVLKTLLHMAALGVIARAGELQDYYKRKRAEGKALCW

SEQ ID NO: 66332 - protein, 342 aa, unidentified
MNYFAGLDVSMEETSVCVVDERGSLVREARVASDPLAIATWLGRLDLTLERVGLEAGPMSPWLYTGLRERGVPAVCIETRRMRGATLLMAVKTDRVDARAIAHAIRVGWYTAVHVKSAASQELRLLLRNRKTLLEHRVALDNEIRGTLKAFGIKLGRVSEGRFAARVRTLMEERRRELLVMVEPMLAVRETLRRSYAVLHRQLLAVVRTNPVCRRFMTVPGVGAVVALSVMTGIDDPRRFSRVRKVGAHFGLTPRKYASGEVDRNGAISKCGDELVREALFQAAHTLLTRVQRWSALKAWGMRLAKRRGLRRATVAVARKLAVVLQRMWLANEDFRWAAQAA

SEQ ID NO: 66333 - protein, 419 aa, unidentified
MKSASNTANSTLPEYAPNDVTAGIDWARDDHAACIVDGRGRKVATTVVEHTSSGLRDLVAVLGRHGVGEVAIERPDGPVVETLLAAGITVVVISPNQVKNLRGRYGSTGNKDDRFDAYVLADTLRTDRARLRPLVPDTETTVALRRTCRARKDLVAHRVAVANQLRAHLRNVLPCVVGLFATIDSPIALTFLARFDTQDKIDRLTVKRLADWLAKQGYSGKVDPAILHQHILDAPRGPTGAHGTSQTPITAGYVALLRTLLAQIRQLGTQIDAQLGAHADAHIFTSLPRSGRIRAARLLAEIGDCRAKFPTPESLTCLAGAAPSTRQSGRLRTVGFRWACDKQLRDAVVDFAGDSRRANAWAADLYDRARARGHAHAHAVRILARAWLHVIWHCWQDGIAYNPKAHHALQRVLTQNRAA

SEQ ID NO: 66334 - protein, 404 aa, unidentified
MYFVGIDVAKEKHYVCILDDTREIAVKPFWIYSDILGLRDLVKRLAELSLNNDDFIIGVESTGAFSENLYEYVTDADYKVILLNSYQTAKYRDFSTMKKIKNDSIDALVIAELLASDKYKESYISNDDYQSLKVLGRLKKSLSDKIKTIQREISTVMATVNPEITKVFPNIFSKTALAIINAYPTAVDIQKATPKKLTKIFRHIKGNNFNEEKAKFLIELSKSSIYAGRAQESRALMIRTNIKILELLSQEKDEIEAQINSLLYNKIETIDSSIENIKTIPGVSDKTISAVLGECGDIKRFTSAKSFIAYLGLYPTQYQSGNSFAVGRLAKRGIPIAKHALYMAAVASVRHNTELNKLFHDKVSLGKSKKEALIIISKKLATIIYSIFKYNKPYQAKRVFIPHR

SEQ ID NO: 66335 - protein, 361 aa, unidentified
MSQSSWLVGGLVPGLAREPQKKLSPEAAALLALLERWRAAATKAGRAIARVCVAYEAGRDGFWLARWLHAQGVECYVIHPTSIAVSREHRRAKTDRLDLELIKRAFLGWLRGEKKHCSMAAVPSLEEEDARRLNRERQSLTHEASRIVNRMKASLARLGIRNLNVKLPGAAARLERQRTGEGAALPPLTRAELCREMARLALIRVQLKEIDAVRQAQLRHAPAAYRGKVKALSQVYGLGAATADMLTVEVFSRALRDRRAVARYAGLTGAPDESGKKRREKGLARAGNARVRHGMIQLAWRFLKFQPDSALVRWYRAQTASGRSDIRKAMIVALARKLLVALWRLTTTGEVPLGLRLQPAG

SEQ ID NO: 66336 - protein, 342 aa, unidentified
MGKSIQKLSSVTRVGLDLAKRVFQVHAVDANGEIVVARKLDRGRLVSFFSELPRCVVAMEACPSAHHWGRQLLALGFEVRLIPPAHVKPYVRRNKNDAVDAAAICEAAGRPGQRFVPVRSVENQAELMRHRVRELLAGQRTAALNALRGHLTEIGVVAPQGARHAYDLKRLAVDGFDEYGEVVVPDCVRVALRPLVSQIDALDEAIGAIDKEIAMAVKADETAKRLMTIPGVGPVTASAIIATIQGLPPRLCSWGATPRLGRITKMGDRYLRKLLVVGACATLRHRKGHNDALRLWASGMLERKTVKYKFKLTAVALANKVARIVFVLMRRGGQYDGRPVAA

SEQ ID NO: 66337 - protein, 341 aa, unidentified
MLLFSYYVGLDVHRKSISFCVKRADGTVVREGKIAATREAIGEWAGTFDAAWCCGLEATICSHWIYEQLKQYAARVQMANPAKLKAISAAKRKNDALDARTLADLLRADLFPCCYVPPMEYESLRCYLRERALLVRARVMFKNKTAGLLIQRGVPYETKKLHGKRYFGALLEDHAGLVEDLKPLLKFNRTQIERLEEMDDVITRQLIHEPLLKERVQRLKAIDGVGDLTALCWAVEVGEPSRFPNERHAISYCGLCAAERESAGIHKRGPLSKQRNAFLQTTLIEAAHMAIAHNDKLRSIYDAQCQRGPKNRATLEVARRLVRWLLAIDRQYFAALKTAAA

SEQ ID NO: 66338 - protein, 322 aa, unidentified
MSEPILGVDIAKKKFDVALLVNGKLKHKVFTNDQGGFAELTVWLTKQGVDHVHVCMEASSTYGDELAIYMHDAGHTVSIVNPARIKGFAQSELMRTKNDKVDAGLIARFCLAMHPEPWTPALPEIRQLQALVRRVDALINMRTQELHRLGTARDTIEHSIREHIAYLDKQIDTLKQQVAALIKNDPDLKIKRDLLKSIPGIGEATIAAILAELPVFERCDHVQKVVAFIGLAPRQFISGSSIKGKPRLSKVGHARLRKALYMPALVSIQCNPIIQTFYHRLKGKGKNGKVIVCGVMRKLVHLIFGILKSGRPFDPNYTPHCA

SEQ ID NO: 66339 - protein, 415 aa, unidentified
MPGRDDVATSQNNKRRQLQGLPVLRRNVGGIDLGSERHWVCAATLDGSGREIASFGATTPELLRLAEWLKARHVESVAMESTGVYWIAPHEVLEAQGFEVLLVDTRQLARVPGRDKKTDPTDCEWIQRLHSCGLLRGSFRPEEAVCMLRTLVRDKANLVGERGDWLRRMQKSLDQMNVRVHRAVSDIDGATGMAILRAIAEGERNAQKLAQLRDPRCSKTEQEIAEQLSGHWREDHLFSLQQALKMYDAVQERIAAYEKEILRKLGDMEREEHHEPTAPPLPNANKAKKIKKRGQEAKRQALYRISGVDITQIDAIGVETVEVVLSEYGCDLSRFPTEKQFVSHVTLAPHVPKSGGNPARRKNGTAPVRVLRLPCVWRHSPCATARPLWGHTTVSWRNGSAETLPCSQPPGSWPR

SEQ ID NO: 66340 - protein, 350 aa, unidentified
MIIIGVDFHPGFQQIAFGDNESGEFQEKRLAHREEAESFYRALASTGQKVRVGMEASGYARWFERLLSELDIELWIGDASEIERKRARKQKTDREDAEHILQLMLKNDFPKIWVANWENRDLRQLLWHRHRVVQMRTRIMNQLQAVALNEGLSCKKRLWRGNGRAQLEGFQLGPWASRRRRDLLELLDRLSPTIAELSQAIEQEAEKCPEAQRLMSHPGVGALTALAFILILGQADRFECGKQVASYLGLVPLEKSSGTRRRLGHITKQGNSVLRFLLVEAAQATTRKNPEWRSRYLHLALRRGRNIAKVAMARRLAIRLYWMWRERRSYQQTKNFGSHAGQPGNPYGVQ

SEQ ID NO: 66341 - protein, 344 aa, unidentified
MKQYVGLDVSQKSTNVCIVDEEGRQLWTGKCLSTPEAIATVVRERAPLAERVGLETGPLCVWHYHGLKAREIPVLCIDARHAKAALSMQLNKTDENDAAGLAQIMRTGWFREVHVKSFNAHLQRSMLQSRLQLVNMRRDASNQVRGALKVFGIVLPPGRLSTFDRLAREHLGGREDLSAFIEPLLAAWRAFGEQVALLDKRLRKAANEHLVVKNLMTAPGVGPLIGMAYVATIDDPKRFAKSRNVGAHLGLAPRRFQSGEMDCQGSISKCGDALLRHYLYEAAGVLLTRSRRSSSLKAWGIQLVKRIGKSKARVAVARKLAIILHCMWRTGEAFRWDSGTEVTA

SEQ ID NO: 66342 - protein, 337 aa, unidentified
MSVYVGIDVHRKRSQVAVVTEDGTVELNKNVVNGSEPMLRLIGDLPAGTPVAFEAAFGWGWLAGLLEDYGFEAHLVHPLRCKAIASARLKNDKVAAAILAQLLRADLLPEAWIAPPAVRQLRALLRHRTGLVRLRTQQQNRIHAVVADFGYDRSGSYLSGPGRGWLAGLELPAASREIVTDCLAVIDGLAPLTDRIDGELRQHAKADPRVKVLTTLPGVGQFTALVILAEIGDITRFGSARKLASWAGLTPTVRGSDLTVRHGHISKQGSAWLRWVLNQAAQTAKRSPEFAGTYATIAQRRGKKIATIAISRKLLTRAWHLLSQLEPAEASTPPRRP

SEQ ID NO: 66343 - protein, 363 aa, unidentified
MRKRIKTPGRTTIGLDLGDRVSDYCVLDGEGNIIEEGRIATTPGALTQRFGTSVPVRIAMEVGTHSPWASRLLKGLGHEVLVANARKLRMIFENRQKADRVDARLLARVARFDAQLLSTLEHRTENVAVDLAVIRARDALLSTRTRLVNHVRGAVKSSGARVARCSTERFASAARLQLPDSLRQSLSPVLDVIAEVTAKIGELDAHVEKLAAEKYPDTRLLSQLPGIAALTALTFVLTLERPERFHNSRAVGSYLGLVPARRQSGKADPQLRITKEGDMYLRRLLVQAAQRLLRRTATDCDLRRFGLRLAERGGKNAKKRAVVAVARKLAVVMHRLWRTGEVYEPVREALAPVSSTPICSSAA

SEQ ID NO: 66344 - protein, 341 aa, unidentified
MKTKTFVGLDVHRKLVVATAVNSLGRRIRQSSFGPNPKELRRFLTRLPKPTKVVLEACSVWERFYDAAVSTGAEVVVSHPLKTRLIAEASIKTDKVDSAALANLLRLDSIPLTFVPPPEIRALRRLYLERDFYARTKSSIMRHAYARLAERGVDYGKGALQHRPQREKLREHGIPEFDRAIDSMDDLERKCKELDAEIHAAFLKSEDAQLLKTIPGIGELMAVGIAGFLCPIDRFPNVDKLTSYVGLCPTTHQSADTLYHGKLKKDVNRSLRALLVAASWTHRVHAPKGEVARLVRRVVRRKGKMRGTVAGAHKLLRIIYAILKQRRPYLPRAPEGFASGQ

SEQ ID NO: 66345 - protein, 340 aa, unidentified
MNTTVIGLDIAKQIFHVIGLDATGKQIEKKTLRRSKLLEYFANHSPCIIGIEGCASSHHWARELKKLGHEVKLLPAHHVKPYVRGNKNDYNDALAIAEASRIPEMREVRTKTIEQQSIQALHRLRRGAVADRTKLSNQVRGLLAEFGIIMNQGISTLRKRLPEILEDAENELHWLFRDALALKYEQLCQLDMLVNQLTTFIENEAKQHVQIKQLQSIPGFGAIVASTFFSVIGDGKSFSKGRDVSASLGLVPRQHSSGGKNTLLGISKRGDKYLRSLLVHGARSVVNHAHKKDDALSLWVTRLVNTRGKNKATVALANKLARIAWAVTTSGKPYQKNFAI

SEQ ID NO: 66346 - protein, 360 aa, unidentified
MCRVGKPVSSLLSFLTLRINIMTIQSKKIVQELKSRFAGIDVGAEELILVIRKNGTPYKPQKFTNTPADRARLVKKLSNLPGIIVCLEATGVYHFDLSIALHDAGVALMVVNPKSSHNFAKALMKNSKTDAVDAETLAQYAERMDFVAWTRPSDEKIALRSFARRIDALTRQKAAAKNNCHALSVSRETPKAVLRDVKLAISQLEKRINCLSKEVLVLIGKHPELERAFLLLTGIKGIAQTSAIALMGELLLLPPGLSHREWVKFAGLDPRAFDSGKSVHKQARLSKAGNRHIRSALYMPAMSAKQHDPYVKAYFQHLVDNGKRPLQALCAVMRKLLHAIHGMLKHDKPFDNTRFYAIPA

SEQ ID NO: 66347 - protein, 412 aa, unidentified
MQVVWQCCAGLDVHKKTVVACVLRTEADGRILKQVRTFGTMTTDLVALRDWLRAQNVEQVALESTGVYSWPVFAVLEEGGLVPLVANPRLVKAVPGRKTDIKDSEWLADLLRHGLVRGSFVPPAAIRALRELTRYRTTLVRERAQEVNRLHKLLELANLKLASVATDILGTSGRLMLEALADGEMDPTVLAALARGRLMKKHTALLTALDGRLRPHQRLLLRAILDHLAALERLIARLDQDIAAALLPFAGAVALLRTIPGVSATAAAILVAELGVEMSRFGSAPQLASWAGVCPGNRQSGGKRLSGATTHGNVWLRAILNQIAWAAVRTKGTSFGARFRRLAARGGVQKAMMAVMHHLLIVIYHVLQEQEPYHELGPNYYRPQDPQRRARRHVRQLEELGYTVSITPTEAA

SEQ ID NO: 66348 - protein, 432 aa, unidentified
MNRLQVGIDFSQKKADFCLLFPDGQPLEPHVSFANSCSGYSSAKQLLIDALDTYAFDGVDVSGEATGYLWLPFFLQLAADPDLTLRDTNLFLLNPRWVKWFKKCFAEDDKCDEKDPFYIAERTRTRRPDVAWSPPDCLPLRFYTRLRFHIVQNLAREKCYFSAFLFLKASSYRCIKPFSDVFGVTSRLVLTQQPTLDELADLPVEDLASHLCDLSGNHLPDPLNNARKLQRVAQESFHLDPSLTLPVQRILDLTIDHIRFLEAQLEQADHWIATELENYPVIAQLATIPGVGPVFSSGLGAEIGGIQRFLQGHKWDKKRKRYRPRNLRDAEDAVAKIAGLWWPRADSGDFEAQDRHMAKSGNRYLRYYIIQAGNLMRLHIPEYAKFYARKYKEASKHHHKRALVLTARKSVGLVVGLLHRDEPYRSKEDRRT

SEQ ID NO: 66349 - protein, 316 aa, unidentified
MKTEPVYVGIDVAKASLEVAVHQSADRWTVEYTDPAVATLVARLTALTPSLIVLEATGGLEVPLVGVLAAGGLPVVVVNPRQVRDFAKATGRLAKTDTLDAAVLAHFAAAVRPPVRPLPDAATQGLAALVTRRRQLVDMLTAERNRLSCAPKVLHQELQAHIRWLERRITGVDADLDQAVRTSPIWRAQEDLLRSAPGVGPVVARTLLAQLPELGTLSHKTTAALVGVAPLNRDSGRFRGRRQVWGGRAAVRAVLYMGTLAAVRCNPVLRAFYLRLRAAGKLPKVALTACMHKLLTILNAMMKHQQRWDPNYAQTT

SEQ ID NO: 66350 - protein, 429 aa, unidentified
MNYTQNAKIEQVTDKTMVVGVDIGSQLHYARAFDNRGRELTRKVFSFRNDIDGFNSFNSWMEKLMAGNDKTDVLISCESIGHYWFALAKYVEDHQKKLVMVNPFSVKKIKELDDNSPKKTDAKDPKTIAKLVVDGRYSIPYMPVGIYAEIRDLVYSRDRIMKQHTIAANRIQRWLAIHFPEYLGIYTRFDAASGFAVLEKAPMPKDVITLGVDGIRKIWHEKKLCGRGVTEDRAKTLVEAVHNSVGIDGGYGTKSELFMLLEEHRLWTSQLEAVNNVLEKMIRKVQCVEKLLAIKGVGLVTIAGFIAEIGDIRRFKSPKQIQRYAGLELVENSSGKHKGKSKISKRGRRKLRKILYQVMIPLLARNAEFRDIYDYYITRVKNPLKRRQAMIAVSCKLIRVFYAVLTKGLDYDHMKMKSDIHRDSNLIAA

SEQ ID NO: 66351 - protein, 371 aa, unidentified
MNKSSTPVFVGLDVHKESISIAYAADHRDAEVASLGAIGTRQCDIDKMVRKLQSKSANLVFVYEAGPCGYWLYRYLTEKQLTCWVIAPSLIPKRPGDRVKTDRRDAMELARLMRSGDLTPVYVPAVGDEAIRDLSRAREDVIGDLKSAKFRLKALLLRQDIRYEGKAHWGPAHLRWLSEVVCPTPAQQIVFQEYVRTVSDHHERLQRIETELHDQVRAWRLFPVVEAIQALRGVQFTVAVTVIAELGDLTRFTNPRQLMSYLGLIPSEYSSGSQRRQGGITKAGNTHARRALVEGAWAYRYPAKVSRHLQQRLEHLPKAIQDISWRAQVRLCKRYRQLLARGKHVNQVTVAVAREMAAFIWAIAKQTPMAN

SEQ ID NO: 66352 - protein, 372 aa, unidentified
MHVCQTRCRSRAGAPVDRSSLGPLRLTGSGIAGGLCVKARTVAWTRLEVRIHKGGMLHMQNEEVFVGIDISKDQLDVHMLPKGMRTTVKNDAQGIVSLIEILRAENPMVIVMEATGGYEISVAAELGVASLPVAIVNPAQVRDFAKGIGKRAKTDAIDAYVLAQFAQTVKPTPKPLPTDDETQIKELVTRRRQLVDLRASEKNRFRRVRSNRVRKSIQTIIAALDKEIKDIDKDIDGLVRKSPLWRETEKLLRTFKGVGPVTARVLMAKLPELGHVSRQEISRLVGLAPLNKDSGKKKGKREISGGRAGIRATLYMAAVSAIKSNVVIKPFYERLSAAGKPFKVVITACMRKMIIILNAMLKKKQPFQVVFS

SEQ ID NO: 66353 - protein, 423 aa, unidentified
MQRTIGLDISRDTAEVAVLRAGISEPQRGHFPARPANIRAFAEKLGPQDQVVLESCTNALAFQRILCQHAGRVVVSNPLKTRVIAEAKVKTDKVDAEVLARLLAADFLPAVWVPDPLTDQLRHLVFHRQGLVTQRTQGKNRIHAILHRNLIAPEMTDLFGKAGRAFLATVELPPSERQLLQADLRTIDFLNQEIAAADQSMAQVVQHDTEVQRLLSVPGISLTSAVGLRAAIGEVHRFKAPGNLVSYFGLNPSVYQSGLKAYTGHISRRGRSHARSVCVEVAHQLAKAPGPFHAFFQRLLRRKPYNVALTAVARKLVVLVWHMLTRQEDYRYAPAALTRDKRAKLQRLATGQRAARSQEPVPDRRLDRAPARQAEAEYLRFLDDRFGPQGPAGIEHPNRVASRAASRDKTTPTRKNTRSKENQ

SEQ ID NO: 66354 - protein, 346 aa, unidentified
MEHYVGLDVSLKLTAICIVDRTGKIQREGIVPSDPEAIAAFIESHSSNVARVGLEAGATSTWLWTELNKLRLTVICIDARHAKAALKMQINKSDRNDAVGIARIMQCGWYKEVRVKDLDSHAVKALLVSRALLVKIKRDLENQIRGLLKNLGLVIGRAKMNVFAARAAELIQDRPELTAAIVPLLKTREVIERQIADLDRKVLRLARNNTQVRRFMTVPGVGPITALCYLATIDDPTRFRKSRSVGAYAGLTTRRYRSGEIDWTGRISKCGDAMLRTYLYEAANVLLTRIAKWSALKSWGMRIAKRSSLRKAKVAVARKLAVILHRMWVDGTEFNWSSKEVAAHVA

SEQ ID NO: 66355 - protein, 526 aa, unidentified
MVARTKIRKTTGTKKRFIGRPNGQVQERVQAVGPEHFGIVAVDCAKRRSKWMLCNFYGKVLVEPTTVEHTSGEMLAMTQLVAETCRSEGLADTVVAVEMTGIYHKPVYRAFRKAGFDTRIVHPFASNHFRRALHPDTKTDDHDLEAIFHAAIKGYGLATLPLGEAYALLQAASRHRHNLVKQRSRLMVQVRSLLHQTMPGFADLFEEDSLFRKSIAIPIALQFSSAEAIRRAGVSEISRDLHENKIRFQVRTIERIVAWAGTASELSELAAIYTQQWQQLNELRRLYDEQVDTAEREMAGFLAKTPYVLLLSVTGINVVSAARLAGEAGPIEHYASARAINGRAGLYPSRYQSDEVDRADGALVRQCNRKLRGAAMLVAENLIKCHPYYRGLSALWMQQKVDPRDRHCRIANRAMRMVYQLVGGRQLWRGKGVDRECLLAKLHEFHRVHNTPLDQAIRDLEAACAWLPKSAYAEDAKPLAKLARTKHHGPQHISELMIPLLIRLGVSIDGHHGELESNTSEARSSD

SEQ ID NO: 66356 - protein, 344 aa, unidentified
MTNIQHKETAHKTKPDLFAGIDVGAEELILVIRKNGKLFDPQKFANTPADRDRLVKKLVKLPGIMVCLEATGIYHFDLSLALHDAGVLLMVVNPKASHNFAKVLMKNSKTDAVDANTLAEYAARMDFVAWTRPSDETIALRSFARRINALTGQKAAAKNHLHALNATSETPKAVLKDAKLAITQLEKRIDRLTDEALVLIGKHPELKRILALLIGIKGVGETSAIALMGELLLLPPDLSHREWVKFAGLDPRAFDSGKSVHKQTRISKAGSRHIRAALYFPALSAKQHDKHVKAYFQHLMDNGKTPLQGVCAVMRKLLHAIHGMLKNNEPFDNTRFYAIPESNG

SEQ ID NO: 66357 - protein, 412 aa, unidentified
MNLVYERCAGLDVHKKNVLVCASTPDAQGQRHKERRTFSTMTPQLLRMRNFLKDLGVTHVAMESTGSFWKPIFNILEGHLEVLVVNAQHLKAVPGRKTDVKDAEWIADLLQHGLLRPSFVPPAPQRELRELTRYRTSLVEERSRIINRLQKTLEDANLKLASVASDLMGRSARDMLAALLAGEVDPSVLAELARGRMRAKRDLLEQALQGLLKPHHRFLLSEQLADIDALDEAIEHMSAEIAQRLRPYEALLQRLETIPGIKRRLAEVILAEIGPDMSRFPSARHLASWAGMCPGNNESAGKRLSGKTRKGSPWLRSALVEAAHAAIHCKDSYLATQYQRLVIRRGGKKATIAVGHTLLVIIYQLLSQDKDYEELGGNYFDEWDRQAVQKRLVRRLEKLGYQVTLEPTSPAM

SEQ ID NO: 66358 - protein, 342 aa, unidentified
MTKILKQVAGIDVAQNELVVSLGRIDQSLYKDIYAYKTFANKQSGFAALLVWIKKHTDHEVTVRYVMEATGVYHEKAAYYLSDQGFEVSIVLPNKISSYMKTLEIKTITDKTASKAICQFGLERGLDLWQKPKNIFRDLKQLTRERDQIVADRVIAKNQLHAEQAEAFPNDRSICRANQRIKLLNEQEREIKQEIAQFVKTDNELHKKINLITSIPGVGSLTAVIVIAETNGFELIRNKKQLVSYGGLDIIRKDSGTSIKGKPRISKKGNRHLRKAIHMPALAAIRNDERFKTIFVRLVSKHGIKMKAAVAVQRKILEMIYTIWTTERPYDKEYLQKAQLPA

SEQ ID NO: 66359 - protein, 343 aa, unidentified
MKISITWRFIVGIDISKKQLDVYLLDRQTDLGYTDQVPNTDKGFEQLASWLADHGADRSQTKLISEHTGRYGEHLLRWTTINQWPHAVVKTTALKQVGNEHHRKTDAFDAEDLADYGVRFSDKLSLTKAPKPAIGQIKRLQAERRAMVDRRAALRSKLTEADIHDADMERLMDMWTQQIGLLTEHITEIEARTKELINQDTAIKNRYRIMRTAPGIGKVLGPLWLSLFAGRQTLDARKISSRFGFAPHPHQSGSSVKRAEQSSGFGNSEVRRVMHQAALSAKTHYPHYRKYYQEKRAEGKEHLLVINNIINKLIRLYCAMWNNRTVYDPGYIQKNEHKWKKSA

SEQ ID NO: 66360 - protein, 365 aa, unidentified
MHTLNSAATLIPRTTTEAPRDHMYYIGLDVHKRTISYCVKDAAGHVHQEGKIGSTRCELDAWIKTVPQPRMIAMEATIFTGWIYDHLLQHAEKIKVAHPLMLRAIAAAKKKNDRIDASKIADCLRCDFLPECHMASTAIRDRRRTLRYRSLLVRQMVQMKNRVSGLLLETGVSYNKSRLHKVGYFADLMSTNEEVNESIRPLLKISREHIVRTQRLDYALVSSLERDPLLAERLKRLRTVPGVGPITALTWALEIGDFTRFRSIKQVISYCGLCGDERSSADKVMRMPLSKQRNKHIQHVLIEAAKLAPRECHELAMVRERELQKGNPNRATLAVARKMVSYMLAVERRKQEFVPAENFKGTTAA

SEQ ID NO: 66361 - protein, 385 aa, unidentified
MANVTRFVGLDVHAKLIAVAVADGGRDGEVRSHGTMPNDPEAIRRLIKRLQSDGHKLRVCYEAGPTGFGLYWQLTAMGIDCTVVAPTLIPQKPGERVKTDRLDAIKLARCHRAGELTSVWVPDKEHEELRDLVRSRDGVRKHLLAARHQLAKFLLKHAVRSPEGVRSWTSRHLAWLRTVHFDSAGLDHIFQDHFNEVDHQSSRLRLAEAAIDEAIKAGPPEMSEMVAALQMLRGVAKTTAAALVAEIGCFSRFDGADKLMSYVGVVPSEYSTGGPAKRSQGGITKQGNGHVRRLVTESAWNYRFQPITNARMKACEKGVDPKLLPELKRISSDAQQRLCGRYRHLLLCGKNKHVTVTAVGRELLGFVWAIGVTVEQNYKNSSKAN

SEQ ID NO: 66362 - protein, 364 aa, unidentified
MNEVLNTNSVVVGVDVHKFNHMAYAMDCFGQEKGLLSFSNLKLPEFNSFLYSLGGKENTIVALEDTNGYGIKIVESLVTEGFKIRYVPGILTERDRKQSIHRDKSDLFDAKRVGKVILTKYEETLPARENIATLKERMLSTELDLLLTERKDLVSSKTILKNQLHALVHQLLGDNYMFDFKKGFTKRKIPVYQKLIKEKQKTGELKNNPLTRSILRRLERLDLVHDQILSIDKEVLKVSSNKKVIEALRQSIIGCGQTTAATIISQIMTINRFSSSAKLAKYAGIAPTQKSSGRKTKLKTSPFGNRILNRAMHTIALYQISKKETEGRIYFERKVSEGKTKLWALRCLKRQMINKVFNVLKHAN

SEQ ID NO: 66363 - protein, 424 aa, unidentified
MKVTYQTCCGVDVHKSFLVATIIKTTAGIEPSYQKKRFSTFNNSILDFKSWLLENECHDVCMESTGKYWVPVFNLLEDQINVTIANPKWVKAVKGNKDDTKDSKWIGDLFRLGLVKSSYIPCRLIRILREYTRYRYKIVSCRSSEKNRYQNALTVCNIALDSVVSDIFGKSSSSIIDYLLEQSGTTINHEEIASKLLKSLKSKEDAVIESIEGYQMTDAQKYRMRLIRAHMDYITAEINDIDKQIESLISSDPDYDKAIRLLTTIPGVKRDSAITIISEIGIDMSQFCNSKRLCCWAGLTPSNNESAGKKKSVRITRAGVYLKPALVQCAHAAVKSAKSPYYKTKYESLVKRRGKKRAVIAIARMILIAIYRMLSTGEVWNPSDLYKIDMPAPLAEKQKAKAIKQAKKLLQKEGLLPPDEPLAS

SEQ ID NO: 66364 - protein, 369 aa, unidentified
MRSHTLWFVEWTISPYMEFTMIARRDAACFVGIDLHKDTLTACAITAKTGEITYRKIACVAREKVREFLSGLPRPSVVAIETVGFYRWLWTEAEPIVDQVLLADARGARALAGRRIKTDREDAFNVAELVMTGRLPLAWAPPGQVQRLRDWTRHRNSLSRDHARGLHRVKSIMNRLNRPGPARMDAAGLQRYLLASVERIEADDLTMLWQHQRRLVEIEQDISASERRIVDLMKAPEFRPLRAILESIPGVGLITAATAIAEIGDFSRFPDSKAIGRYAGLTPIGYSSADKHRLGRICKTGSPDLRWALQQAAWTAIRCDASIKKNWLKISKTAGKKAAAVAIARKLLVLMWTLVRKDEPYKAREPLAA

SEQ ID NO: 66365 - protein, 360 aa, unidentified
MQETLTRVKTADKLFIGMDLHKNTSTLCVKDKEGKEIILKKILTDKNSVREFINGVKEQSQDLSLVMEPVSQWYYYADLIENMDVDVHLAHPMRVKAIAAARVKTDKIDAGVLCDLLRGDLLPEAYFSSVDVRSWKEQCRFRASLLTLRTQVKNKIHAILFKHALKHNFSNLFGKGGRAWLESLKLNEPFKTNLDKYLFLADQFTELISQSEQTIQSTVTNNPQANLLISIPGISYCSALTIMGEIGDINRFNSAKKLQGYAGLVPSTYSSGDKQIHGRITKQGSKWLRWIMIEAAYHQERCKRIPGFGSYYVSMKKRRGTKTAAVATARKLLAVVWRLLKDNRPYEVNAPHSWKSGTLA

SEQ ID NO: 66366 - protein, 369 aa, unidentified
MGDRITCVGLDVHKDGIVVAVAEDGLRGEVRDYGRIANTPAALRRLADKLGREGVALRFCYEAGPCGYGIQRQLSGDGHECIVVAPSLIPKRAGDRVKTDRRDATSLARLHRAGELTPVWVPDPGHEAMRDLVRARLDAVHALRRARQQLSGFLLRQGCHYGRPAWTKLHRRWLAGLKFEQAVHHIVLEDYIAAVEAAEARRDRLTAQIAAMLPDWTLAPVVAALQTMRGMALVNAATLIAELGDLSRFANPRQLMAYLGLVPSEHSSGASVKRGGLTKAGNSAARRLLIEAAWCYRFPARVSRELRLRQEEQPRPIREIAWNAQLRLCARYRKLARSGKPANVVTAAIARELAGFVWAIARRVPPTVS

SEQ ID NO: 66367 - protein, 344 aa, unidentified
MELYVGMDVSLKETSICVVNGIGEIVCEGKVSSEPEAIAAFVKAKADGAVRIGLETGPTSTWLWHELRALGLPVICIDARHAKAALSLQVNKSDRNDAVGLARIMQTGWYKEMQVKSLPCHEVRAVLNSRALLVKIKRDLDNQIRGLLKNLGLRMGRVGEKAFEQRAGELIGENRLLHDAIQPLLDVREIVCGKIAGLTREVMTLAQQNDESRRLMTVPGVGPMTALAFCAAVDEPSRFQRSRSVGAYFGLTPRRFASGEVDWSGRISKCGDAMVRCYLFEAAGVLLTRVPQWCKLKAWGHRLWKRVGFKKAKIAVARKLAVILHRMWRDETEFVWSATPASAE

SEQ ID NO: 66368 - protein, 470 aa, unidentified
MKCKPIHVRLKRRKKNRPSKTQQCINTTAQPDAAGIDIGADEIVAAVPPDRDAVSVRTFSSFTGGVHELRDWLLACGVKTVAMESTGNYWVTCFDVLEQAGIEVYLVNARHVKGVPGKKTDVCDAQWLQQLHAAGLLKKSFRPAQDILPLRYLMRHRAGLVSELSRQVLLMQKVLTEMNLKIHHVFSDLDGVSAQAIITAILAGERDPATLAALRDRRCKSSEQTVISALQGDYRPEYLFVLAQCQSQWLYQLKALAELDERIEVLIKGIAPLPNDGDDAAEGAPPPALKKGKPPGKNTLRMDLQTEAARFYGVDLGAIDGVGSGLLGVMMSELGTREQILNAFPTPAQFCSWMGLNPANDISGGKVLKAKTRSVKNRLADAFRLCALGLANAKGLMGQYSRRIKGRLGKAEGITATAHKLARVVYAMIATGRPYDETEAFKITPQNRKKQLNKLEKQAEALGFQIVAIP

SEQ ID NO: 66369 - protein, 327 aa, unidentified
MPEIVTIGLDIAKNVFQLHGVDRTGKIVLRRALRRSQVPGFFSTLPPCLIGMEACATAHHWARTFMAFGHDVRLIPPAYVKPYLRRQKNDAADAAAICEAVTRPSMRFVPVKSPQQQSTLMLHGARDLLIGQRTALINALRGHFAELGIVVAQGVRNTHQLIDYLQDEANPDFPGAARTALQPLATMLLGIETQIAKLDKAILAAHRSDPVSTRLAGIPGIGPIVASCLSASIPDASLFQGSWEFAAYLGLVPRQHSTGGKPRLGSISKMGNRHLRKLLVVGAHAALYSMKSGKTRTALADWARSLLAKKPFKVVAVALANKMARIA

SEQ ID NO: 66370 - protein, 345 aa, unidentified
MLEESHDTEEIVQRVAALDIGKAELTCCVRVPGQGGSGRRLQEVRPYQTMTRSLLVLVDRLAELGVTRVVMEATSDYWKGVFYLLEAHGFQTWLAGARDVKHLPGRPKTDTLDAVWLCKVAERQMLRPSFVPPPAIRQLRDVARYRIDLVAARTAEKQRVEKLLEDAQIKLSVVASDIFGVSGRAMLAALIAGERDPKRLAQLARARMRTKLASLEEAFTGFFTDHHAFLLARMLARVDALSDDIAALDAKIAELIDPFTQAVDRLDEIPGVGRTTAQVILAEVGPDMTRFPTAAHLVSWAKLAPAVKESAGKRKGRGATGRGNRYLRRGRPVHPGHRLASAGRP

SEQ ID NO: 66371 - protein, 408 aa, unidentified
MLLLLVGDDWAEDHHDVEIMDPAGRTLAKARLPEGIAGLARLHALIAGQLGDDAEQVEVRIGIETDRGPWVAALTAAGYTVYPVNPLQAARYRDRHAVSGAKSDAADAHTLADMVRTDAHQLRPIAGDSPDADAVKVVARAHKTLIWERTRQTQRLRHALREYFPAALDAFDDLDAVDTLELLAKAPDPTAAVRLTRAQISAALRRARRRDVDTKTTAIRAALRTPQLGRPAVVVAAYAATTRAAVAVLATLNAQITALEAQVGAHFRRHPDAEIILSQPGMGPVLGARVLGEFGDAPGRYADAKARKNSAGTSPITRASGRRKTVHARHVHNDRLVDALMLQAQSALQASPGARAYYDRQRARRLDHNPALRQLANRLVGILHGCLKTRTRYDEATAWSHHNQQTAA

SEQ ID NO: 66372 - protein, 410 aa, unidentified
MAIPNSLSAASALVAIDIASRRHHVLIQPVGKKRYRLSITNDKTDHDRLAQHLRELGSDVIVAFEATGNYHRTLAHHLGQAGFELKLVSSVGLARTREALHNSWDKNDPRDAQVILHMLSNGLTQRYYDPLVEGINDWQELSKTHEAVSSMKTETLHRLKTHYYPLYFPEVDRFRHNSRSEWFFRWLHAFPTPGSITALSQQDFLEAAWPLLGRKVSKRALLSDIYETARSSVALPVDVDSAAVQMYRLVIQQMCELIRHRDAIERQAQELLGNHPDYQRLRQLPGVGPIHALTILAEAGDLRRFAHYRQFLKFCGFDLATHQSGRFRGQSKLSKYGNARLRRTFWLAGQVAVRQRENDFRDKFVRYIARDPFNRDLRRKALTAVAAKMARVAHALIKHGTDYRPFYGRR

SEQ ID NO: 66373 - protein, 353 aa, unidentified
MIVLGADMHKRSHTIAAVDAVSGELLGDKTIPVGDRGFSVALDWADGLEDERVWALEDCRHVSGAFERFLLVHGERVVRVATRLMAGERRGGRDRGKSDRIDAVAVARATLREGVDRLPVAELAGVELDIRLLVDHRERLVRMRTALYNDLLWHLHDLWPEQSLPGCALLSKKWTTRIGRRLARAEQTARVRIARDELRHLRELTHTIDALEAEIAALVAQAAPQLLAEPGFGPLTAGKLIGEIAGAQRFANDAKLARAGGIAPIPISSGKTNRHRLDRGGNRQINTAIHRVAVTRARCHSETKAYIARKRAEGKTNRDAIRCLKRHLARRIWHLLQPPTPTPTTPLTINLLT

SEQ ID NO: 66374 - protein, 337 aa, unidentified
MKYSGIDLHSNNSVVTVTDEEDRVLVEKRLPNDLEKIIALLSPWRDELAGVVVESTFNWYWLVDGLQAEGFKVHLAHVTAIRKYDGLKHSGDESDARYLAHLLRLGILPTATIMPTELRSVRDLGRKRMQLVRSRSSHILAVENITAREFGARISSRQVKTLTVESIDKMGLREEVALAVKTNVVVITTLSEQITLLEKRLQEKVKPRAEYRLLTSVPGIGEILAMVILLEAGSIDRFAAPGNFASYARCVGSERTSNGKKKGEGNTKNGNKYLAWAFVEAANFALRYCAEAKRFYERKKARTNRVVAIKALAHKLARACFHMLKEHKPFDIARCFA

SEQ ID NO: 66375 - protein, 340 aa, unidentified
MNATTYGLDVAKRVFQMYWVDAQTGEVVNRRFGRDELIRFLAQRPAGRVALEACGSGHWWARKIKAVGHEVVLLHAKFIRPFVQTNKTDAADARAIWTAVQQPEMRTVAAKTEDQQAMLSLHRMRALLVKFRTMQVNQLRGLLYEFGATFRAGRVAGLAEIRARMAELEDALPGMMIYSLRDQLKRIDALEQDIDRLEQQIGAWLKQEAACRALAEVPGIGKLTATALVATMGDATTFKSGREFASFLGLVPRQSGTGGKIRLGSISKRGDPYLRTLLIHGARSVMCHAKAPTTWQREIQARRPANVAAVAMAHKMARTAWAILAHGQGYQKDYVSVKPT

SEQ ID NO: 66376 - protein, 314 aa, unidentified
MKTMTEKQYIGIDISKTKLDVCAPWWATTKTFKNSPKGLQKLFRAIKSKPISCHLVCEATGGYEGLLLLTAWKHDVTISRVNPRKVRHLAIAMGFLAKTDPIDAFVITESGKMLKPKPTPEPTKTAQQLGVIVRRREFLMRQLTREKNAKEKASDTFILQDINASIASLSKRLAHFDEAIAKLIDADEVLREKRRRMEQVTGIGPGTSRLLLAALPELGSISDKEVSALVGLAPMNCDSGTRRGKRIIQGGRANVRRGLYMPALCAARHNPTLKAFYDRLCSAGKAHHVALTAVMRKLICLLNRILADPDFNPA

SEQ ID NO: 66377 - protein, 341 aa, unidentified
MKDTMIGVDLAKRVFQLHGATMAGEVKFRKKLTRDQFRVFMAAQPAALVVFEACGSASYWAREMEALGHRVRLIAPQYVRPFVKRQKNDAADAEALVVAARQPEMRFVAPKTAGQQAKAVLFRGRERLVRQRTELVNALRAVLYEYGHIFPVGICHLKRMEAVLEDPHCDLPALVIAECQDLLAQISEKTERIEVKTKTLKVLAAETDTTRRLQTMPGVGPLTALAVEAFAPDMAQFKSGRDFAAWLGLVPRQHSTGGKARLGRISKAGQSDIRRLLIIGAMSRITGRARHKVSTESWVGQKLLAKPKMLVGIALANKMARQIWAMLTKNEDYRDPSLATA

SEQ ID NO: 66378 - protein, 316 aa, unidentified
MISYFVGLDVSKATLDMGFFPESVPQFQVKNDPEGFAQLIACLNELEVERVLLEATGGYERAVLKALRLEGLNVVRVNPRRCRDYASAMGKIAKTDKIDAQMLARFARDFEGLPQVEPNQDREELGELIKLRGNLVQHRDDDKRRVKQTTSATAITVYTEHIAYLNDQVKALDKAIEHASNVLDRQTARRLRSVKGIGVISCGTFMAYLPELGTVTGREIAALAGLAPYNKDSGKKSGPRKIEGGRYRVRSAAYMSIWSMIQHVPEVRTRYEALIARGKRAKVAAVACMRVLLVRLNAMLRDGAEWKAPKPQVPAT

SEQ ID NO: 66379 - protein, 353 aa, unidentified
MTASTDPVIYVTAGADTHRDTHMIAALDQRGAELGVREFATDPTGHDDILDWLETFGTIVRIGIEGTGTYGAGLCRFMQRHDIDVVEVTRGDRQERRSHGKSDPVDAVAAARAAQSGKAVAQPKTRTGSVEAIRALRLVRRSATRDRTGAINQMRALVVTAPDEIREAFRGVTIHQLVTRAARLRPANPTTVDGATKFALRELARRVQALDTEIARVNAVLSPLVATTAPGLIARHGIGTDTAATLLVTAGDNPERLRSEASFAHLCGSAPIDASSGLIKRKRLNPRGDRLANEALWRIVMVRMSTEPRTRAYVARRTLEGRSKREIMRCLKRYVAREVFRDLNDLVQPLDKQ

SEQ ID NO: 66380 - protein, 322 aa, unidentified
MSEPVLGIDIAKQKFDAALLIGGKLKHKSCKNSTEGFELLSQWLRKQGVARLHACLEATGSYGDELALYLHEAGHTVSIVNPARIKGFAQSEMIRTKTDKIDSGIIARFCLAMKPGFWIPPSPEVRALRALVRRAESLIDMLTQEKNRLGTAHESVIPLIKEHIDYLKKEIEEVRRQIADMIDRDPNLKRKKDLLASIPAIGKVTIASILAEVDDLERFTHVRELVAFIGLAPKETLSGSSIKGKPRLCKTGHPRLRRALYMPALVSLQCNPLMIAFYRRLKEKGKNGKVIVCAIMRKLVHVIFGVLKSGKMYDPNYKPAFA

SEQ ID NO: 66381 - protein, 366 aa, unidentified
MARKAQSLFGYQISYDIRISCELGKEATMKKYIGMDAHSSICVFSVVDEKGTEVNQAKIATNGLLLVEYIRSIKGSKKLVFEECELSAWLFETLHGEVDELIVCNPTRNQQYKKAKTDKLDAQNLARLLRGGFLTPVYHDGSKTEWLRALMSGYQDVVDTGVSVKNRYKSLFRKAGLPARGTKLYDDSSLLEDLPRPDQRFVGHSFYRLLEALEKEREQYVAAIGKLGRTFPEIKLLKGIPGIGDISAAKIIAQVISVQRFKDKHKFWSYCGLVRHRMESGGHVYGSRRGWGNRTLKCVFKMAAKSVLTGENELRAHYDELRAKGTSDKSARNAVSRKLAAITLSILKTRRPYDETRILSQAEQAG

SEQ ID NO: 66382 - protein, 353 aa, unidentified
MLPNSQLRKETLQMKFIGMDAHSRTSTFVVLGKSGRVLRRAKVDTSESGVLGFVRSVKGRKRLAFEEGVMSQWLYLLLKDEVDELVVCQPREKEGAKTDEIDAGEIADLLRVGRLKAVFHEDSDLMHLRTLVSGYGDVIGEIVRAKNRYKALYRQVAISTSVARFYESTEMLGLLDDDVRRYVACTLFEQLGLLEEQRRGYLERFDANVRKYKPIKLLTSIPGIGPVRANQIVAVMVTPYRFPTKYNLFAYAALTKHNRESDGKQYGKKRARGPGVLKNVFKSAALSSIRSNTAFRRKYDAMRDAGKDDRIARGAVAKKIAATTLGVWKSGKKYNDKHMEVTRRRDRDCHSGA

SEQ ID NO: 66383 - protein, 322 aa, unidentified
MIIIGIDPHKSSITAAAIDPSGCQLAVRRFIVNAGTARQLLAWAAQWPERRFAIEGANGLGRGTAQILVARGESVVDVPSTLAMKVRVLSTGGGRKSDPADAFAVALTGLRQENLRVVVAEDQTTILRLLAERREDLGHERARLLNRLHRLLRELLPGGVEPGLSADKAAAALRTIRPATATDAVRRELTKELLADLRRIDSSIKSNEAQTRTALDASNTTLQEIPGIGVVLAAKLLGHVGDIARFPSASHFASYTGTAPLEISSGNHNRHRLNTGGNRQLNSVLHTVAVCQSRDPGPGRDYYLKKITEGMGCGMYFGPVFI

SEQ ID NO: 66384 - protein, 349 aa, unidentified
MGEITTIGLDIAKNVFQLHGVDADGQIVLRKSLRRGQMQPFFEALSPCLIGMEACATAHHWARTLIAAGHDVRLIPPNYIKPYLRRQKNDAADAAAICEAVTRPSMRFVPIKSQDQQATLMLHSARELLISQRTALINALRGHFAELGIVAPQGARNVRQLIAILEDERYSPQAVRTALAPLATVLIEIEGQITKLDKALLAAHRNNDVSIRLATVPGIGPVIATCLSASVSDAKLFEGGREFAAWLGLVPRQHSTGGKPRLGSISKMGNRHLRKLLVVGAHAALYRMKKGTADTPLANWARGLLSKKPFKLIAVALANKIARIAWAIMARNVNFQSERVLRCSDLVPA

SEQ ID NO: 66385 - protein, 372 aa, unidentified
MSNVNMYIGLDVHKDSIDISLVEGDRDAKVRFQGTIGGDLADVEKAVRKIRKSHSLAVFHFVYEAGPCGYDIYRHLTRAGHDCMVVAPSMIPKRSGDRIKTDRRDSIMLASLHRAGELTAVHVPREEDEAMRDLVRAREDAVKAERVGKQQLKGFLLRHGVKFAGSGDWKASYMKWLASVKMPNPAQQIVLQDYIDAVTNGTERIRRLTAQIRELLPSWEMEPVVNAFQAMRGVALIVAVTVVAELGDLNRFDNPRELMSYLGLVPSEHSSGKTRRIGGITKAGNGHARKVLVEAAHTYRFPARISKELLERQAGLPKEVRDIAWKAQVRLCARYRKMVAKGKKNQIIICSIARELCAFMWAIARELKTVTA

SEQ ID NO: 66386 - protein, 370 aa, unidentified
MTDSVEFIGLDVHKKSISVAIATQGRGAPVRYYGKIPNTFTALDGFIRKRNRPGRQLRFVYEAGPCGYVIYRHLTRKGIDCSVVAPSLIPKKSGDRIKNDRRDARNLACLHRAGDLTKVYVPCAEDEAMRDLTRGREDARIVSRQAKQRLNSFLLRNGYHFPGKTHWSKAFFGWLADIRTPHAAQQITLQEYIDAVAQSVERVDRLTDQIRLLATEWRMAPVVQALQACRGVSLITAVTFVAELGDLQRFESPRMLMAYLGLTPSEYSSGDRIRRGAITKAGNRHVRRVLVEAAWSYRFPARQTRYLLRRQRGLPEDVRQIAWKAQVRLCTRYRRLSARGKQVQTVVTAVARELIGFLWDIWHQVPVTAK

SEQ ID NO: 66387 - protein, 385 aa, unidentified
MGEAVRPTTRNGDKHMKTTDKYVGLDVHKDTTVIAVANDGREGEVRLYGSISSDLKALENVLRKLGGEGVCLHVVYEAGPTGFVLCRRLKQLEIDCIVVAPSKTPQSKGPRQKTDRRDAIQLARLHRAGELTAIHVPDEVDESIRDLTRARADAVHDLTRAKQRLKSFLLRQGYRYPGSANWNDAHQRTLRKLTLPLPALRSVLEEQILAVEQATQRVSRLDELLAVQVPQWRHYPAVQAVMCLRGFQLIAATVIVAELGDVRRFAHPRQLMGFLGLVPKENTTGDTRRLGAITKAGNSQARWCLIESIQKALLPPKVSARLSQRQEGQPALYRELGWKIQVRLHKRGWHLLHRGVMKAKINVALARELAGFLWDLLRQVPVPAS

SEQ ID NO: 66388 - protein, 378 aa, unidentified
MSKVRFIGLDVHADTIAVAVAEPNGEVRSLGVISNRLESVRKTIKKLGPVHQLRVCYEAGPTGYVLYWQLTQLGVTCEVVAPTLIPSKPGDRVKTDRRDAEKLARCYRAGDLTPVWVPDAAHEALRDLVRAREDAKQDQQRARQRLGKFLLRHGCKPPQTIKKNWTQKYMEWLKAHVHFDQAALEATLQDYVYEVDRAAERIQRLDKAIDEAIRVAPPEIRTVVESLQALRGIAQLAAVTIVSELGSLSRFNSPRQLMGYSGLVSSEYSSGNRVVRGKITKTGNAHLRRIVVESSWCYQHRPNICGYLLKRQKALQLDPEIKAIAWKAQCRLHKRYKHLAARGKNKPQIVTAIGRELLGFIWAVAVKTEAGLKTQTAK

SEQ ID NO: 66389 - protein, 424 aa, unidentified
MNFKMQDKQNQLIERISDTHLIVGVDIAQQFHVARAVNFRGIVVGDPLTFVNNEEGFVKLQNWIEKLKRLKNLDSTIVGMEPTGHYWKNLSKWLVKQKIEVVTVNPHLVKRNKENRDNTQSKSDKKDALVIADMVKNGYYSFVRPSSESFEILRVLISNRDVIVKRLVSSTNQIHRWVDIVFPELRQVFKDVTCKGAIATLRLFPTPIEIASLEPLDVMRGWKSLMQRQPGPKKAQLLINLAKSSIGTGQALDAYKFHLEQLLEEYDLAIKQLERVEQQVKEVLNKIPFASKLLMIKGISEISLAGILGEAGDLSGFSHGNSLLRHAGLHLAEASSGKWKGQIVLSKRGRSRLRRFLYLATMSLVMNNPEFKAIHAYNVKVKKMKKMKSIMKLVGKLARIFVGIAKRNESYCASKLQETIPLAA

SEQ ID NO: 66390 - protein, 376 aa, unidentified
MRPRTRMGICTLEDYHLPISGQAIVMETQRNKVCGADIHKKFLVATTLSRDGTKVTKRFGMTLDDLLKFKSWVIENQCEQVAVESTGSYWIPIHAVLEDSVDLIVANAYKIKHTPGRKSDLIDSEWIAELCLNGMIEPSRIFPKEDRELRRLTRSREGYVNDMTREKNRIHHALESCGIKISSVLSDIFGKSGRYLLNCLLDGVELEKMIKGIPVKSIRNKADQIREAVRGSLETTQIILIRGGLEQIASIQRRIDELDREIKNRIASREEDLKIAMSIPGIGFTSAATILAEIGDFKDFAKAEQLASWAGLVPAVYQSADKLVTGSITKHGSKHIRRILVEVAKAISQTNKSKLKRFFRRVQAKKGYNVATVAFA

SEQ ID NO: 66391 - protein, 394 aa, unidentified
MSAQALGWDIHRKFSKVSLVEKTAEGEFRVVERARLEHIDRDAMRRWLSRLPAGTAVGLEAAFGWPWVADLLVDLKLDPHLGHPPALKVLAQHEAKTDRCDGDRLGKFQLQGIFPESYMAPPEIRQIRERTRYRMALSSIRGAMKNRIQALLHRFGILHNFSDLFGKQGRRFLEQLELPPASRAVLESALEVLDEVVRHIEDIEKWLVKNIEEDEIVRLLQTIPGIGLILAYVIRAEIGEMSRFPTAGHLRSYAGTAPVSDDSADRHGARHCSPACNHTLRWALIEAVTGVLNTKGTRGQRLRRLHMRLTHGGKCNKNQAKVALAGQLAELVFIVWTKRTPYEETPPARPGSIRSVPARGPHEKENQVSANMRPDQSRHPIARRGTLRAGQAHL

SEQ ID NO: 66392 - protein, 344 aa, unidentified
MDHYAGIDVLLECSSVCVVDASGKVVREAKVVSEPEALIGWFGSLGFELARIGLEAGPLSQWLYAAMKQAGLAVELLETRHVSDAFKAMPVKSDRNDARKIAQLMRLGWFRPVHCKSTTAQEIRAMLTARKLVQSKLLDLENSLRGILRGFGLKVGKTTRTKFAGRIEELVKGHPNLQTIGQALLRARAVLLAEFNGFEKRVRAMSRLHDKARLLMSAPAVGPIVSLTFACAIDDPSRFTSSKQAGPHFGLTPKKYQSGETDYTGRISKHGDASVREALYEAAHLMLTKPIKGCSELKSWAMRIARRAGTNKAKVALARKLAVIMLRMLKDNVPFNPAAKAATA

SEQ ID NO: 66393 - protein, 412 aa, unidentified
MPGLLFVGDDWAEAHHDIEIQDESGRRLIHRRLPEGIAGIGQLHELISRFAGDDDDPAQVVIGLETDRGPWDAALLAAGYQVFAVNPYSVSRYRDRHVTSGAKSDPGDAKVLADLVRTDRDQHRPIAGDSQLAEAVKVLARAHQNVCWMRGRTANLLRSTLREFYPGALQAFDELAGSDALAVLAIAPTPAAGRRLSQSKIGAALRRGGRQRNVETKADQIQEALRAPQLEQPPLVADAFGASVRAYVGILASTVTNLQELEGELETSFGRHPDAEIVLSQPGLGTILGARVLAEFGDDPDRYVTAKARKNYAGTSPITRASGTRRVVLARYAVNDRLRDALHLQAFAALNVSPGARAYYDSHRTAKAGHHQALRALSNRLVGILHGCLRHGTCYDEATAWPDHSQDQPAAA

SEQ ID NO: 66394 - protein, 385 aa, unidentified
MRTAVGKAAERSEAGFPTAAGDRSIVPRSRKTVTKLDRRRLSGTIPNSRQSRRSPSSSHPQVRDKSMEGSFTSFVGIDVSKASLDVYLLPEERRQRVSNDKPGIQELLSTLPAAGSCLIVVEATGGYHRRLVADLANVGHQIAVVNPRQARDFAHGLGIIAKTDPIDARSLAHFAKHVQPRPVAPVSEKQAELQELVTRRRQLIDLRTAELNRKETASSKNVRKNVQQLVDQLRKQIEQIEKEILHLIEEDDDWTEKANLLGTTPGVGQISIVTILGHVPELGQLNRQKISALIGVAPFNRDSGRFQGKRSIWGGRAAVRSVLYMAAITARTHNPVIREFAKRLEAAGKPFKVVITACMRKLLVILNAMIKNKTEWSPKNCLANA

SEQ ID NO: 66395 - protein, 375 aa, unidentified
MNDHSEAFVAFDTSKLRNAVAIAEPGRSGEVRFVGEIENSGAATAKLVRKLAAKYERLTFCYEAGPTGYGLYRQITSLGHDCVVVAPSLIPTKPGDRVKTNRRDALSLAKLLRAGELTAVWVPDPRHEAMRDLTRARGAGSEDLRRKRQQISSFLLRQGLHYPDKRATWTKAHMTWLASQKLEHAEQRIAFEEMLFALRQAQERIARLEQAIRAAVPDWSLAEVVTAVMAMRGFDLIAASAFLAEVGDLSRFQTPRELMGYLGLVPSESSTGDTIQRGPITKAGNRRARRTLVECSWSYQHPPRVGKEKLAKVAAAPPAVREIAWKAQCRLSARYRTLIRKGKGANVAVTAVARELAAFIWAISREVTAAPAVAR

SEQ ID NO: 66396 - protein, 373 aa, unidentified
MRVLYERCAAIDVHKDQVTVAARSPGEGPAGRDTQVRKFRAFYGVLAEMARWLVSLQVTHVAMEATGMYPMPVYHALMEQGRFEQVLVCNAAHVKNVPGRKTDATDAVWLAELLECGLLRGSFIPAEKVKAVRDVARYRKKLVHERTAESQRLGGVLQDAGIKLDSVASSIGTVSGRAMIEALIDGERRGTVLAELAKGRMRAKIPDLSLALEGRFAEHHALMCRLHLEHIDHLEDMIARLDTQLEQMMIPFTSERDLLVTIPGIAAKAAAAIISEIGVDLAEFFTSDAHLASWTGLCPGNHESAGKRKHGRPHKGNQHIKPILVECAWSAVKTSGRLKARYHRLVLRFGGYHNPSAKKKAIVAIAHTLIVII

SEQ ID NO: 66397 - protein, 330 aa, unidentified
MADHLNNKPYRAWIAIDIAKDFNAVLSETNEGKRQHFRMANSAQDHDRFIDFLKSLPSPCIIGFEATGNYHRALGHRLVSEGFEVCFISSLASARYREVMFNSWDKNDPKDAAVLLELLKQEITQRYVDPLIAGHHDLQELSKTYYQVTLSRTRLQHSILTHYLPLYFPEMGKWWNSTRSAWWINYLLHFPIPSAVTKHSQETFCEIASPIVGRKVNKAAKLIELYETAQHSIGLPIEEDSLACKTFQIQLRRYQEINDCRTELEKTAQAVLANNPDSVILQSVPGIGPINALTILAEGGDLRRFNHHRQFLKYCGFDLAKNQSGNYRIQ

SEQ ID NO: 66398 - protein, 323 aa, unidentified
MNKGIKYFGIDISHLVFDVTDSDGNYYQFKNNVSGFKKFTKLLSSDSHCVMEATGYYHYQLAYYLLESGMKVSVENPLAVKRFIQMKLSKIKTDKSDSKLICEYAKQVELELWQGNSKHQIECLQMIRLLSVYTKQSTMLKNKLHGEAVLGNPSKVVVASLKRSLKQVQKELETLGVKLLILVKQVHQDVLTRLKTIPGIGNKTAVMLVVLTDGFDRFSSASELCSYAGLTPVIRQSGSSVKGRPRISKIGNQKLRNLLFMCSFNACKYNKACRELYERIVAKGKSKKLALIAVCNKLLKQAFAIAKSGLIYDQTYRSTLMRT

SEQ ID NO: 66399 - protein, 407 aa, unidentified
MDVVIERACGMDVHKDNITACIMTPEGKEIQTFSTKTVFLIQLVDWIKQHRCTHVAMESTSVYWKPIVNLLEAEDIEFLVVNAQHMKAVPGRKTDVKDAEWIAKLLRHGLLKASYIPDRNQRELRELVRYRRSIIEERARQHNRIQKVLEGANIKLGSVVSDIMGVSARDMLNAIAEGEEDPEKLANFARRTMKKKKEELELALRGYINPHQRLMLKTILKHIDFLTEQIEMLDKEVAQRVSKYQEDIERLDSIPGIATRMAEQILSEIGTDIKKQFPSAAHMCSWAGLVPGHNESAGKRKSAKTKKGNKYLRSALTEAAHSVRGSKNYLGALYRRTASRKGKKRAGIVVAHAMLRISYYLLTREEMYVDLGEDYFDKQKEQSIVRHSLRRLESLGYTVTLKEPEAS

SEQ ID NO: 66400 - protein, 348 aa, unidentified
MAHFVGLDVSVRETSVCVVDDAGKVILEQKVPTEPSDIIALLSSLGATYGRIGIEAGPLSQWLFNALTAAELPVICVETRHMKALLTAQQINKTDRNDARGIAQMMRVGLFKPVHVKTLVAQEQRMLLTSRKLLQRKLLDVESDLRGTLRNFGLKVGVVSGGRYEARVRELVAGFARLAAIAEPLLSVRRVMRQQLAVLHKMLLDTVRDDPVCRRLMTAPGVGAVVALTYRATVDQPQRFVHSRAVGAHVGLTPKRYQSGETDYDGGVSKCGDALLRTVLYEAAHSLLTHSGKWSWLKAWGVRVAQRRGMRRAIVAVARRLAVVLHRMWVDGSEFRWSKDSAAVPAGA

SEQ ID NO: 66401 - protein, 314 aa, unidentified
MLNQDEKSYIGIDVSKSILDVFVKPFNKHMQFKNNEAGIAKLITKLKAFPNLVIAMEATGGYEKLAAKMLVKEKLYVSVANPRRVRDIAKGFGKLAKTDKIDAEMIALFAEKVQPAMNVQHDENQEKLAENSARRRQLIEMITMEKHRLDKANEELKKSIIRVIKLLEKELARINETMESMIKENAAYTQKNDLLQSINGVGQIVAAEIIANLPEAGNLSAREITALAGLAPYTRDSGTLRGKRTISGGRSSVRRILYMAVLTAMRFNKKIKEFYERLRNAGKPPKVAITACMRKLLIIMNAMIKNNEPWRMSV

SEQ ID NO: 66402 - protein, 339 aa, unidentified
MMNITTIGLDIAKSIFHFYAINQTGKLVKKKQLKRHQLLDAMANIPPCVIVMEACGGANYWAREFIKLGHQVKLIAPQYVKPYVKGNKNDYNDAEAIAEASQRSNMRFVPIKSIAQQDIQNFHRQRELIKKSRTALVNQVRGLLAEYGFVINKGVTAIRQSLPEILGDADNGLSDLSRECFSELLDSLRVLDQDFKRCEQRIKSLIQNNAVCQRLNDILGIGPLTASATFAAAGDGKDFVNGRHFSAWLGLVPRQHSSGGKTVLLGISKRGNTYLRTLYIHGARAVLRHSATKTDRFSVWAQAVLARRGHNKACVAVANKMARMAWVIMAKGETYRLAV

SEQ ID NO: 66403 - protein, 326 aa, unidentified
MEHELHYIGIDTAKEKLDVDVLRPDGRHRTKQFANTTKGHDELVSWLKGHKIDHAHICIEATGTYMEPVAECLYDAGYIVSVINPALGKAFAQSEGLRNKTDTVDARMLAEFCRQKRPAAWEAPHPLERALRALVVRHQALTDMHTQELNRTETAREVQRPSIDAHLLWLEAELKRLEKQIKDLTDDDPDMKHRRKLLESIPGIGEKTSAVLLAYIGLKDRFAHARQFAAFAGLTPRRYESGSSVRGASRMSKAGHVSLRRALYMPAMVATSKTEWGRAFRDRLAANGKKGKVILGAMMRKLAQVAYGVLKSGVPFDASRHNPVAA

SEQ ID NO: 66404 - protein, 402 aa, unidentified
MNIQDVEVFVGIDVGKAEHWATALTGDGKKLFDKALPNSEDRLREIYQRLGEHGRVLVAVDQPATIGALAVAVAQAMGIMMGYLPGLSMRRIADLTPGNAKTDAKDAAVIAEAARTMPHTLRSISTSDEDAASLSMLTGFDLDLARQVNQTANRIRGLYTQIHPALETVLGKWLEHDSVLEVIAAWPTPADLRKAGRARIDAKLKAKGAKRHAAWAQAITDALGKQTVVVAGTDAAGVVLPHLARQLIALHAQRRDVAAQVEALVEAHPLYPVLTSMPGVGARTAAIFLAETAGRTFPTGAHLASYAGLTPVTRRSGSSIRGEYVSHAGNKRLKRAMFLSAFASLRSDPASRAYYERKRTQGKHHNQAVLTLAHRRILTLYAMIRDGSLYDPQPAQQLPTAA

SEQ ID NO: 66405 - protein, 410 aa, unidentified
MKSAVITAVGVDVSKSKSTVAVRRPGGEIVMHPFDVRHTNSDLKKLVSTLKKLGGDIRVVMEHTSMYWRPIALTLKKAGFFVSAVNAMLIHDFSDNSIRKLKTDRADALKIANYALTFWDTLPLLNDEEETRLLLKMQSRANERITATATVLCNGLIALADQTFAGVNLAFDPNTKNTDGHEKWVDFFLRYWHRDCVCQYFMEVFTESYRGWCKRKNYKFRTVTAHKIYIMAQECVATLPKCESTKTLIGQACKSLNAVCEARHNTQLEMQRLAALLPEYEIVMQMEGAGPVTGPALMAEIGDVRRFKNKKALVAFAGIDAPPFQSGAFESKSRHVSKRGSPHLRRTIFLVSNIILTLSNPENAVFCFMGKMLRGKTLLCLYCCRKRKVLAHLLCSRERVPSLSSSSGCL

SEQ ID NO: 66406 - protein, 347 aa, unidentified
MKEQNNRSEFTIGLDLGERRHRFCALNGKGEVVEEGSVLNDRASLARLTARYGGALAVMEAGAHSPWVSRYLEGLGWEVIVSNPRKVRAIYQHERKSDRRDALMLARIGRMDRALLYPVRHGSEEAQQDLLRIKLRDSLVRARVALINSVRFSLKSLGYGVSNPSSERFHKVAMESLPEAVREMIAPSVQALAELSARIAVLEREISLLARTKYPQTLWLQQVPGVGAITALYFVLKIEDPKRFKNVRAVGAYTGLCPRRDQSGESDPQLRISKRGDAYLRRLLVSAAQYILGPFGPQSALREYGLRLAADGTTRAKKRAVVAVARKLCVLLLSLWKNQTPYQPYPA

SEQ ID NO: 66407 - protein, 309 aa, unidentified
MKQSVVYIGIDVAKAHLDVAWAGTFRRLPNERSGHAALVRWIKQSTTPVQLICEASGGYEQALLESLEKSEVKVTLVQAVRVRQYARAAGILAKTDRIDAKVLAAFGSAMQPQPTSPLSAEQKRLRQYEAQRRQLSRILVAEENRLAQLSCTELRTLSRSLSSKIKTQIKTLDRGISDLIAQDQTLCVKAQKLTAISGVGVRTAALLLAQMPELGQLNRRQAAALAGLAPFNHDSGSVRGKRAIFGARPALRSGLYMAALSAARFNPILSSFYQPLRTKGKPHKLALTAVMRKLLLALNQTLKPLPCSA

SEQ ID NO: 66408 - protein, 412 aa, unidentified
MELIVERPAALDVHKAQVTACVRVPDERGQREERVAEFQTTVRGLLGLRDWLAAHRVEQVVMEATGVYWKAPWAILEDDFECLLVNARHVKQVPGRKTDVSDAAWLCRLAEAGLLKASFVPPKPIRQLRNLTRYRKTQIQERAREVNRLHKALEDAGIKLDCVAADVMGKSGRDMLDALVAGTTDPEVLAQLARRQMRKKIPALREALEGHFDAHHALWIGAILAHIDFLDEQIDRLSDAIEEQLRPFAPAVELLCSVVGIQARGAQCILAEIGVDMSRFASARHLASWAGQCPGNDQSAGKRRSGKTRNGSKWLDFALEEAAMAAIRVKANYPAAQYHRLKPRRGHKRALGAVKHSLICAIWHMLATGETYRDLGPDYFINRDPARQTKRLIRQLERLGHHVTLTEEAAAA

SEQ ID NO: 66409 - protein, 404 aa, unidentified
MNAVGIDVSKGKSTVAVIQPFGVLVAEPFDVFHTDSGLKELASFIKSLSGETRVVMEYTGTYYEPVANALHDAGIFVSVVNPLVIDDYDTNRVRKVKTDKLDALKIASYALDKWIKLRKYEPAETIRKTLQIMNRQCIKLNKILVMQKNSLIALLDCCFPNANTLFTSPRRVSDGHEKWVDFVMKFPHVDSVAKLTLSAFKTKYKSWCKKERYNYSESKAEQIHAYARTIVSTLPMTETVRKMVSDAAKLLNSTLEALGTLHSEMDTLASQLPEYETVMNLYGVGKVFCSQLIAEIGDVTKLKSNKSLVALAGIDPPPNQSGKDDPKSRRISKRGSPALRKTLFLIMTIYLQNQPADEPVYQFLDKKRAEGKPYKVYMIAAVHKFLRIYYARVKEVMPTQCSYS

SEQ ID NO: 66410 - protein, 317 aa, unidentified
MSTTMIWLGIDVAKDAIDVAYGRTGRVERIVRSAARLQEWAATVPRHGCAVVEATGGYERAVATALRAQGVPVCIVNPRQVRDFAKATGQLAKTDRIDARVLAHFGEALQPRITVALAEDVQALRAMVDRRRQLVEARTAEKNRRKQAPEAVIGSIDDHIEWLDKQIDTLDRAIADAIQSQTVLCERIAQLRTAPGFGMVVATTLRAHLPELGTLNRKRIAALVGLAPFARESGTCRGHRVIWGGRAEARAMLFLAAQSAARWDPTLRAFYVRLVEHGKPKKAALAAVARKLLTAVNAMVRDQQPWRSPAAPQPSCC

SEQ ID NO: 66411 - protein, 400 aa, unidentified
MTQPLWAGVDAGKSDHYCVVIDGDGKRLLSRRVTNDEATLQELIADIAALADGGEITWAIDLNAGGAALLIALLIAAEQLLLYIPGRTVHHASGGYRGEGKTDAKDAAVIADQARMRRDLAPLRAGDDIAVELRILTSRRTDLVADRTRAINRLRAQLLEYFPALERAFDYSASKAALILLTGYQTPDGLRRAGAARLAAWLRKRKARNADGIAAAAIEAANAQHTVVPGQQLAAAMVARLAVEVMTLDTEIGDTDAMIEERFRRHRHAEIILSMPGFGIILGAEFLAATGGDIAAFGNPDRLAAVAGLAPVPRDSGRISGNLKRPRRYNRRLLRACYLAAHIAIRTDPASRAYYNRKRTEGKRHTQAVLALARRRLNVLWAMLRDHKTYQPTAPNAAAA

SEQ ID NO: 66412 - protein, 375 aa, unidentified
MVCRKRAQGLKERRLAMKKCNRRVERQVCGLDLGDRYSRLCVLDAESGEIVEDGRIATTATALKQRFSSGPAMRVAIEVGTHSPWVSRLLTECGHEVLVANPRKVRLIYKNRRKNDAIDALYLARLARLEPALLAPIQHRGEVAQRDLALLRSRDALVRARTQLINHVRGAVKSIGKRLPRSSSEAFATKAGLTLPPELKTALEPVIEVITALTAQIRLCDKRIEKVARTYPETERLRQVKGVGPITALAFVLTLEEPARFATSRAVGPYLGLIPAQRESGDSKPEMHITKEGDAFVRRLLVGSAQYILGPFGEDCDLRRHGFKLGARASKKDKRRAVVAVARKLGVLLHRLWASEQPYDPLFNAKRAARTSAAA

SEQ ID NO: 66413 - protein, 348 aa, unidentified
MDMTIVEAGRTIVGGVDTHLEAHVAAALDPIGGVLGVQSFVATPEGYKALLEWMGAFGTISKVGVEGTGAYGAGLGRFLRRAGVEVIEVDRPNRQARRTKGKSDPADAVEAARAVLSGRVSGAPKTRDGNVEAIRALLVAKRSAREARLRALHQMRQLSYTGPDQLRSRLKGLSITELVAATAAMRTRASGDPVVYATKVSLTSLGRRVLCLEHELAGIDELLSHLVTTCAPEMLRLFGVGIDTAATLLVTAGDNPERLRSEAAWAHLCGVAPIQASSGKVTRHRLDRGGDRHANQALWHIVMTRLATDPRTREYMERRTKEGRSKREVIRILKRYVAREVFKQLRHT

SEQ ID NO: 66414 - protein, 388 aa, unidentified
MRSVALDLGVRETSFCEVSQGVVIARRTVRDVARLSDTLGPGTKRARVAIEACREAWSVHDQLHAWGHDVLLVDTTRTRQIGLRQHGRKTDRIDAEVLARAVEHGGIPVAHLLSPARRELRDVLGVRRALVETRAQYITTVRGLARSRGERIGTCTAADFIAKVHKADLRAETRAVIDPLMVAIGAIAVQLAATDSRLDELALKEPAIQRLTTVPGVGAVVAAAFVSVIDEAKRFESAHHVESYIGLVPREMSTGGKQKLGAITKHGNAYLRALLVQSASTILRTCDPDDPLRRWGRTILDRRGRKIAVVAVARRLAGILWAIWRKGTTYDPAWLATSSARGLAGSAQQAASTADAMALAAKKAHNRKRDRARMLRIAQSCRNQEVET

SEQ ID NO: 66415 - protein, 459 aa, unidentified
MNRKKSKSKVDRTMPMVHPNAAAIDVGATMHMAAVGADRVLEPVRSFGTFTADLDQLAKWFVECGVETVVMESTSVYWIPIFELLDARGFAVFLVNARDAKHVPGRKTDVSDAQWLQRLHSFGLLRASFRPKGQIAELRAYVRQRERLLEYAASHIQHMQKALTEMNLQLHHVVADITGTTGLRIIRAILAGERDPEALACLRHYSCHSSVETIAKALTGSYRAEHLFALDQALALYDAYHEKASACDVRIEAVLKELIIHRGHDHGSAPPVSRRRNRTDQANALAFDVRASLFGLLGKDVTTIDGLGPYLSLKLIAECGDDLTSWPSAKHFTSWLGLAPSNKVSGGKMLSSRTRRSGGRAAALLRLAAVTVGRTDTALGAFYRRLSSRIGKAKAVTATARKIAVLFYNAVRHGMDYVDPGASSYETRYRTRVINNLHRRAKTFGFVLQPLEPGAGAVS

SEQ ID NO: 66416 - protein, 324 aa, unidentified
MTRRCFGLDVHREFAQVAIWQDGVVRHAGQIVATPEGLRLFADSLAPSDEVAIEATCNTHAIAKLLEGRVARVVVSNPQKTRAIAEAKVKTDKVDAEVLAQLSAADYLPGVWLADDHTHALRRQVARRAHIVRQRTRLKNQVHSILHRNLVPRCPAADLFGHKGRAWLAEQPLPPDEHRAVGALLRQLDFHAEELRVIDAELGRAGLASAEVKRLMTIPGVDATVALSIVAAVGDFGRFPSPEKLVSYLGLNPRGRQSGGQPASHGRITKQGRAHARGMLVEAAWAAAKTPGRCARSLSACGRGAGCRSRWSPPRASWPACAGS

SEQ ID NO: 66417 - protein, 345 aa, unidentified
MEQISRIGMDTSKHFFQLHGVDAAEKVVLRKKLRRKEMIAFFKALAPTVIGIEACGASHHWARLLRSFGHEVKLIAPQLVKPYVKRGKNDAADAEALCEAMSRPTMRFVPVKSIEEQAALMLIGVRDRLIRNRTQLSNAIRGYAAEFGLTAAKGIAHLTPLFERVQVDESVPALARELFAAQAEEYAELQAKINDVEAKLKAWHKADECSQRLAKIPGVGPVGAALLKMKTPAPQLFKSGRLFAAWIGLTPKDHSTGGKVRLGVITRAGDETLRSVLVAGATAVIQQVQRSGRGSPWLVELLKRKPPKLAAVALANKIARIAWKLMVTGKSYNPKLAPAAQAVTG

SEQ ID NO: 66418 - protein, 386 aa, unidentified
MPATSPLNDAPTAAAAEPATVLVSFELSQTSWVLTVCSPIDGKLSRHTIAAADTVRLLSVLAGHRLRTERKAGVPARFIAIQEAGLDGFWLHRFLCAHAIESHVVDAASIAAPRRRRRAKSDRIDGETLLRALAAWLRGEPRVCSMVVAPDVANEDRRRLSRERGELIRERTSLTNRIKGLLASLGIHGFQPLKADRHAALAALRDPEGGVPPSHLMAQLQRLVARIELLLEQLRAVEKERDALLAEDATTEASVSALLLKLRGIGPEFATVLSAECFWRRFANRRQVACYAGLTPTPWRSGSIRREQGIGEAGNPRLRQTMVEMAWLWLRYQPGSALSQWFQASVRGASSRGRRIMIIALARKLLIALWRYVTQGLLPEGAACRA

SEQ ID NO: 66419 - protein, 353 aa, unidentified
MRKMQEHIVKSNRIFVGLEDSKRTWKLCVRCDRMVVHETSMPADYDNLRSYLKGRYPGCEIKVMYEAGFHGFWLHDLLEADGIDCIVTPPNKVTQEKDNKVKTDKRDAHRLSKNLENRDYVSCHVPDRERREDRQISRTLDQIQKDIVATKNRIRRFLDYHGLNGGLKNVNWSLSDYMNLKSLGLSHSMKVSLDTYLRLLEELEDMRRGLQKELKSLCEKERYREMVNSKKNCSGVGWLSAIRFTLEWGELSRFKTRKKFASFTGLTSREYSTGDTIRRGRITGQSYERIRSWLIQCAWRAIRIDPVLLAKYRAVLKNSGSKKKAIVAVARKLALRMRAMELTHETYCIGVIE

SEQ ID NO: 66420 - protein, 413 aa, unidentified
MSHVVAGIDVHKKMLAVVLVDAAEQELQFQRRKFGTRDSDLRVLATWLAELGAQEVVMESTAQYWKPVWQMLEGQCHLELAQAQSNRGPRGRKSDFKDAERLVRRYLADELILSFVPDPEQRLWRSLSRTKARWTRDKGRLQNRLEAMLEEMRIKLSSVVSDLLGVSARRMLRAIADGEKDVECLAGMADPNLRASQEQLCDALRSVSTIDPRYRTLLKQFLDQVELQERHIRELDKQLAESLKEHADGVERLAAIPGLGVDSAQQIIPEVGPKAERFATAGNLCSWVGTCPGEEESAEESSSDRSPKGNAPMRRILNQAANAAVKAKGTVFEAHYRRIVGRDPKKHNKAIWAVANRICRLVWKVLHDGVTYEERGQRPNTKAVRHRAAKLLRELKALGYRVAVQARPDQAVA

SEQ ID NO: 66421 - protein, 347 aa, unidentified
MRFYNRQHRHYCGIDLHVKTMYVCILDSAGQVLVHRNMPSTPEAFLEVVAPYREDLVVAAECMFTWYWLADVCAAEDIAFVLGHALAMKAIHGGKAKNDKIDSHKIASLLRGGLVPQSYVYPAAMRPTRDLIRRRLHLVRKRGELLAHIQNTRAQYNLPAFERRLAYPANRDGVSAHFADPSVRKSIDVDLALIDQYDTLIVDLELTIVREAKRHDADAFHRLRSVPGIGKVLALTILYEIHDVTRFDRVQEFASYARLVKCVHQSAGKKLGTGGAKMGNVHLKWAFSEAAVLFLRHTKDGKKLLAGIEKKHGKGKALSILAHKIGRAVFYMLSRGTVFSMEKFLAA

SEQ ID NO: 66422 - protein, 328 aa, unidentified
MEVVITRCGGLDVHKATVVATVRVPGESGRRRVVTETFGTMTPDLIALREWLQAFGVTHVALESTGVYWKPVYYVLEDAFELLLVNMRELKHVPGKKTDVKDSDWLAQLLECGLLRRSFVPPPPIRELRDITRYRVQQTRERSREVNRLQKVLEDAGVKLTSVLTDIMGASGRAMVEALVAGTTDPRVLAELARGQLRKKLPALQRALVGRFRPVHAFLLEQILAKIDYLDEVLERLTTEIDRRVAPFEPMLTALDTIPGIDRIGAISLVAETGGDMTRFPSAAHLCSWGGMCPGHDESAGKRRSGKTRKANRYLRSTLIQAGVAASH

SEQ ID NO: 66423 - protein, 316 aa, unidentified
MQTPYVYVGIDVSKARLDMAVRPSGAPLSVAYDATGVTTVLTQLTHVQPVRIVVEATGGLEWPLVRALVDRALPVIVVNPRQVRDFAKATGQLAKTDTLDAQVLAHFAEVIQPALRAIPDPQTQELAALLARRRQVLAMQGAEQHRLDRAPDRVRKRIEAHLRWLRAELARLDTDLDDRIHQSPVWREREDLLQSVPGIGPVMSRTMLAELPELGVLNRKQIAALVGVAPFNRDSGRLRGHRTIWGGPAPVRTALYMATLVATRWNPVIRSFYQRLRAAGKAPKVALVAAMRKLLTMLNAMLHAGTPWQPVVAQEA

SEQ ID NO: 66424 - protein, 378 aa, unidentified
MAQSTTIVAFDQHAATTLAAVLPPGHRTPALHPMTSEVATLGRFVERLRRQGPVQCCYEAGPCGFELQRYLGGRQVPCEVIAPALIPRRAGDRIKTDRRDAGQLAVLYRAGALTAIHIPTEQEEAARDLLRCREDIRADLLRARHRLSKFLLRHGRRFTATRAWSKRHDIWLRAQTWPVAALEQTHRAYLRTVDEAVARLRAVEEDLRALLDLEPLRSRARRLRCFRGVDDLTALTIAAELGDPARFPTAPSLMAFVGLVPSEHSSGTKQAHGAITKTGNAHLRRVLVEAAWAYRHHPFVGQTLAHRQRGAPADVVAHAWTAQQRLHRRYARFAARGKPKQHVVTAIARELTGFLWAVLVPSADRPSLERRILGASMR

SEQ ID NO: 66425 - protein, 407 aa, unidentified
MFAGIDWAADEHAVCVIDAGGRVAERFTIAHTADGFERLVRRLARHGDPAELAVAIERPDGRLVDRLLDAGHPVVPVKTTAIKAWREAEVGSGAKSDPGDAQVIADYLRLRRLDLRELQPFSAETRALRAVVRTRSDLVDARIAASNQLAAMLAAFWPGAGELFADVWSEIALAFLERYPTPTAAAHLGEGRMAGFLRKHGYSGRRSSAELLERLRSAPAGLADGPESEARRDAVLAMVRLLRALNRSIRDLDRSVVAHLDEHPDAIVFRSLPRAGQVSAAQMLAEWGDCREAYDGPEAVAALSGMAPVTRRSGKHLAVGFRWACNTRFRNAMATFADNSRHASPWAATVYGEAVGRGADHPHAVRIVARAWIRVIYRCWIDRVAYDPARHGAAHRLQDGRSVVVAA

SEQ ID NO: 66426 - protein, 460 aa, unidentified
MIRVGCDWRTIEVKAEPEEIPDTEHELVLERVCAVDVAKDSGKVCVRVSSRAGRRVSKVWDVAARSGAVAELAEQLVEEGIEKVTVESTSDYWRIWFYLLEAAGLSVQLVNARDVKNVPGRPKTDKLDAVWLAKLTEKGLLRPSFVPPAPIRELRDYTRLRIDLTRERTRYWQRLEKLLEDALIKVSAVASTLDTLSVRDMLEALIAGERDPRRLADLARGRMRVKHGALVEALTGRFDDHHAELTRMLLDQIDALSTQIATLTTRIDELLTVMQPHTRADEPHTPGGAGTVADGARESTTIERLDEIPGISPGLAQIILAEIGLDMSQFPTAAHLVSWAKLCPRTIQSGAIQRGGKTGKGNPYLKGALGEAAAAAAKTNTFLGERYRRIVKRRGKLKALVAVARSILVIIWNMLHDPTARFRDLGADYHATRINTERRTRNYVTQLMAMGYRVTLEPAA

SEQ ID NO: 66427 - protein, 429 aa, unidentified
MRQIALDVHQGFCEVAIREDGVTRSAGRVATGRETLELFAQSLCPSDEVVMEATGPAMEIARIIMPHVARVVVANAQDVRAISHARVKSDRFDARTLAELLSAGMLEPVWVPDTVTSGLRRRVARRAALVRQRTRAKNEVHATLARCLLGRSPFTDLFGKQGRAWLDEQELGEEESETVAGCLRQIDFLDGEVAQIDQKLAQWASSSEDARRLMSVPGVGAGVAVALMAAIGDISRFSSPRQLVAYLGLDPKVRQSGDEPARHGRISKRGNAQARSVLVEAAWVAVRQPGPLHAFGERIRARKGSQVAAVAVARKLACLAWQLLTKEEDYAFAQPSRVRRKLRQVELDAGAPPLQTRHGGQRISASPAERDAERELTERAESAYRRLIADWKATGPGKNTGAGATHGHASQKPSKRQATRQAQAQTPAL

SEQ ID NO: 66428 - protein, 439 aa, unidentified
MTTPSLPVLDPTAAAIDVGSEQLHVSVAGGRPKVFGTTTGQLHELRDWLKAQGVRSVAMEVTGIYWLCPYEVLEQAGLQVVVVNGKYVKNLPGRKSDMSDCQWQATLHAHGLLKPGFVPPAHIRRLQDYLRVRTDHITMAGSHEQHMQKALDRMNLKIHEVISDLTGMSGLKMIEAIIGGQRNPVALVALCDPQVQKNKVGRLRPALEGTWKEEHLFALRQAYELWQFYQKKIAECDQAIEKVLKEMAGPEDPAQPAPPTTKRGGVNAPQIGGLHSLLWRLCGNKDLTTLPGVADYVLLQLLGEVGTDLGKNWQTEKHFTAWLGLAPGSRQSGKRRGNQKRGRNRAGRLFCVIARSVGRSVDKALGGFYRRLKGRRGGLVANLALARKLAELFWRLMVHGIGYVEQGLKKYEEKVAQTEQRLLQKLAGKYNMVLQPKTA

SEQ ID NO: 66429 - protein, 344 aa, unidentified
MLQYVGLDVSLAEVAICVIDENGAIEFEGTAPSEPDAIVDWLLEHDVHPEKVGLEIGGLARWLYSELAERGLPMICIDPRRLRALTKTMPVKTDRNDARAIAQVIRVGWYRPVHIKSPVGQELRMLLANRKTLLVKYGDIENEMRGTLRAFGLKLSGRIASGQFEPRAMELVEDRPRLAAMVRPMLIARSALREQCAVLHKMLLDAVARDDTCRRLMTVPGVGAVTAVTFLAVIDDPSRFQHSRDVGAHLGMTPRKYASGETDRNGSISKTGDALMRTTLYQASLALLTRSKRWSTLKAWGMAVAKRRGLRGAIVAVARKLAIVMHRIWADGTEFRWTREEAIA

SEQ ID NO: 66430 - protein, 350 aa, unidentified
MLIIGCDYHPGFQQIACVDTDTGELSEHRLAHREEAEAFYRGLKPRNLSARVGMESSGHSRWFERLLGELQFELWIGDPAEIRTKRVRKQKTDRQDAQLLLRLMLEDRFPRIWVPDAENRDLRQLLWHGHRMVQARTRIMNQRQAVALNEGICCKKRLWREKGRQQLESFRLAPWASRRRHDLLELLDRLNPTIAALSQAIEQAVEKCPAAQRLQTHPGVGPLTALAFVLIIGKPDRFECGKQIASYLGLVPLEDSSGNRRRLGHITKQGNSLLRFLLVEAAQVTARSLPEWRSKYVHLTMRRGRKIAKVAMARKLAVRLYWMMRKEWDYEQLKKFGSHAGQPGHRDGVK

SEQ ID NO: 66431 - protein, 343 aa, unidentified
MECYVGLDVSLKQTSICVVDQTGAVVREGVVDSDPEAISVYVRSKALNAVRIGLETGPTSTWLWTELKRLGLPVICIDARHAKAVLKMQINKSDRNDAIGIARIMQTGWFKEVHVKDIDSHSVRALLASRALLVKIKRDLENYVRGLLKNIGLVIGRAKFNVFAVRAEELIEGRPELIAAIRPLLVARTAVEQQVSELDRKVMKLARHDAQVRRFMTVPGIGPITALAFKATIDDPARFARSRSVGAYVGLTSRRYASGEVDWTGRISKCGDAMLRSYLFEAAGVLLTRVPKWSAVRAWGVRLAKRNGLRKAKVAVARKLAVILHRMWIDGTEFNWSKQEIAA

SEQ ID NO: 66432 - protein, 374 aa, unidentified
MNTIYIGVDFHARQQTICYLKTETGELVTCELKHQDKDQVRAFYKQFQGPVIIGLEASGYSPWFEAMLEQLGCEVWLGHATEIRRRARWRQKNDRRDAELILDLMLHDEFPRLHRPAPESREVLRMLRYRQKLIKIRTMSKNSLQALALQSGLAKGSRLFTKTGQQELSAAVMSPVMQWQREHWWQLLEPLNQQLLETMAWCKAQSQGDVRITRLRTHPGIGLLTSLCIVHTLQPVSRFRNTRKVAAYAGFDPVERSSAERKCFLGISKAGSRVLRYLLVEAAQTAVRKDEDLKRFYKRLAERRGRPKAKVAAARKLLIRAYIMLRDEIDYAEFRRRAVAARLARRGQRPNVPEVLIGQPASAERQEPSSLTAK

SEQ ID NO: 66433 - protein, 347 aa, unidentified
MNDGISVGRRFVGVDLHLHRSVIAGLDEVGKQLGWVRIDNDPAVLVREVRNAGGRGCPVAIEATYGWYWAVDALAAAGFEVHLAHPLGMKALRKRKRVKTDPADAYELANLLRLGSLPEAYIAPPDLRELRELVRHRRQLVKLATAVKAGIRALLAKHNIRLSATQLESDTATGLLDALALPGTYAVRLASQRRLMLVLADEIAAVEVDLHARLRNHPGYRNLLTVKGIGPVLAATFVAEIGDVTRFPTAGALCCWAGLTPRHYESDKTVHRGHISKEGDPLVRWAAVEAVQRQCEPTVKAVKDEIVARRGKGARNIAKVAAARRMLEVVYYVLRDGQARCLTAAAA

SEQ ID NO: 66434 - protein, 510 aa, unidentified
MKKLSSEPPAQPIVAFVGIDWADQKHDIVWSAATSAAATEHQVVANRPEALSRWVTEMRQRFGPHGRIAIFLEQSRGALIHHLMNYEGLVLYPINPLQMAHYRKAIKVSGDKHDRLDATLLCQFGRLHLDGLKPWQPDDALTRKLALLNEDRRQAIEKRSALANELKSALKIYYPLALELLDNDTSTLLAADLVLHWPTLEVLQKQSQSKLRRFFYAHNCRREQKMLQRLELIQQAQPMIRDSAIIEAAALKVQLLAQQLKSLLPYIALYEKQIAQLFDSHPDGFLFSDLPGAGPALGPRLLTAFGSNRDRFGSSTEAATTFGIAPIRDSSGKRTPKQPGTVCYRHACPKFLRQSWHEFAACSIRSCPWADAYYDAQRAKGKSHHTAVRALAFKWIRIAYACWEKSHPLRSQPLRACPRPTRFTLRPYHRSITGQKIPHFLLTDQLRRLCTLPFHPGSQQLWSFSKTNRNTALRNPGSERISPACFSSIVRRTNLANAGSFRSSPVAPSL

SEQ ID NO: 66435 - protein, 363 aa, unidentified
MTYYQGLRYNSPVDLKIKFMKQKYVIGIDISKSKVDCAVIDFGYELKLEKEVFNKEKTLDAFLKTIAKQLQISQEELLVCCENTGIYNRPLEVVCTRLGITLWVEHALKIKRASTDMRGKDDKKDALRIAHYAVRYYDKMVPYQEPSEIVKQLNILTKARDTMLSQKVALENQLREAKTHDTFEYELLARAFKKSISILSKSIKEIEKQIGLLIQKDEQINQNKQLITSIPGIGNQGAINLIIATNNFQSFKSAKHLACYAGVVPFKNQSGTIVKKERVSKMANKTIKKLLHLSAMAAIRSDKELKGYYLRKVAKRKNKMSVLNAVRNKLVQRIMSVITRKQAYLSQEDYFYQKRNNFDCLLT

SEQ ID NO: 66436 - protein, 384 aa, unidentified
MITKEAEEIAFKFKHNKSGFQILNSYIKPGTIIIFETTGVYSAQLTTYLKNKKVKFYELNPLEAKLRMASLRRNKTDKNDSFKLALLGKTQLAEIKNHCNKQSNSLYESLRILSLRYKQLIKCRTRILNFLRSSLELTFPELNQIFKKAYAVLALQVFRMYCHPDFLVGLTLKEMTTRVYQSVSRRIHKDVIQSYCAQVWLAAKDSYPAVPADSLEIEIISEYCDEIESYNKEIAYIQSKLIKTAVGLDDFKVISSIPGAGQLNSALLLGFTGDIARFDNYKQLNAFLGLDLNRYQSGKYGKGDTINRRGSSQGRAVETDMIRSMLRNQGKIQNHLVDYYYKLKKPPFNKHDKVALIACANHLNRTIINLVHTHQLYNYSKAIH

SEQ ID NO: 66437 - protein, 392 aa, unidentified
MDSPPPRHHSATVAFEEANGSEGETMKKHSSKNDSLSSTDVELCTTISVDLAKQVFQLAGEDAAGRVIYEDRIKSRQSFHDFLLKLPATVTVLMECGPGAQAWARLLQAKGNAVRILPAQRVAEHRSGAKNDRNDAHAILRAGRDISIASIPIKSTTALAIQALHRIRRGNIKRHTALGNQIRGLLLEHGVSMPQGDTAISNHVPRALEDASLPLPDLLRELLDELLTDWLSLGQRIAGLSKRLETTAQEDQVAQRLITIRGVGSIIATAIVAKQTEPSRFASGRMYSAFFGIVPDEHSSGNKVRLGKMSKRGDGYIRSLMIQGAHAVLTQLRPDSDEPDDRRLLRWLSRLGRKEAAIRLANRNLRIIWALLQSDQVYQRKPNNNAKTAVSH

SEQ ID NO: 66438 - protein, 407 aa, unidentified
MGITCGIDWSESHHDVALIDEHGTVVARTRIDTGATGFHVLLALIAEHGGSVDDTPIALETDKNLLVVALAKAGFTVYPINPRAVARYRERYGQAGGKSDPGDAAVLAHILRTDRHLHRPLPAVSEEGRAVKALARQHQEAIWALHQTVSRLRSVLLEFYPQALQAFPNLKHKAALTVLAAAPTPAAGQRLTRGRVVALLRRSGRGNHPALVEQILTDLHTPALGQPPRVEEAYGHTVRGLVAIVIAMGQAVDDLETELAREFDQHPQAAILRSVPGLGPVLAARVLGEIGDDPARFDNPQGLRAYAGTAPVTIASGRLRYVKARKVRNKRFGDACHWWAYTMLTKSAGARAHYDRRRAAGDHHNAALRNLANKLLGRLWWCLVNNQPWDEHGAWPDHGHTENPTAA

SEQ ID NO: 66439 - protein, 426 aa, unidentified
MTQSAPDTFAALVGIDWADAKHDVCLQAAGSAKRECFQLEHTPEAIDAWVTTLRTRFNGQPVAVCLELNKGPLVFALRKYDFLILFPLNPLTLARYREAFTPSRAKDDPTDAELQLELLLTHRDKLRPLNPQSPTMRALAQLVEHRRRVVGDKVRITNRLTSTLKNYFPHALQWFQDKDTLLFCDFLSRWPTLKAAQLARRSTLATFFRDHHVRSSDVIDTRIHAIHAASPLTIDEGVIAPHALLVQALVSQLRVTLQAIETFDNAIAQRAQSHPDFPLFQALPGAGPVFASRLLVAFGEQRDRYASAAALQRYAGIAPVTERSGKKSWVHWRLQCPKFLRQTFVEWAAESTRHSFWAQVYYQQQRDKGKAHQAAVRALAFKWIRILFRCWQDHTPYDESVYLQALKRRRAPLLHNLAKGGRCIIE

SEQ ID NO: 66440 - protein, 353 aa, unidentified
MLTIGADFHKRTTSFHVLDENGQCIKRSKIINETQNLRKFIKSLPEGRSLAMEATRSWGLFYEQTHDLVDKFYLGHPKKMEALTTSEIKNDRNDAELIAKLAYGKLLPQAHVSSLIIRELRDLMHFRHFLVNQRRGIRNQIQTLLDRNLWPTERPTAFKDPFCKKGLIWLKSVKLSERERFILDEALKTFEDLSAKIKNFEEFLQSQKIDLPLLKYLQSVPGFKSGGINAYNILVEISDINRFHKSKGLVYYAGLIPQERSSGDKHRVGGLVKNANMHLRTALIESTFAAIRQDPVLKAYYKKVKAQNNSSAAVIATARKLACAIYYILKEQKVYDPKQLVPSVTACHSSDAC

SEQ ID NO: 66441 - protein, 321 aa, unidentified
MEQMQSNTKVAGIDVGKGRLDGAVHGLEDQIVVANTATGISELIAWLKAQEVGRVGMEASGGYERQAMAALHDAGFEVVLHQPLEVRLFARLKRLKAKSDRMDARLIAMATAQVEAVRAAQDPRLHDLSERLTAYEQVTNQAGELKTFMEHVTLKDVARALRAQIASLDRLKQKLIDEILKRIRAHPDLSRRLQLLRSLPGVGPVVAASLVVRMPELGAMTRGQAASLLGVAPFDRDSGQFKGMRFIAGGRSRPRRLMYLAALAAKRCDDGFKAFATRLLDRGKPPKVVLVAVMRKLIEAANLVLARDRPWEKAVPKPGCP

SEQ ID NO: 66442 - protein, 264 aa, unidentified
MEEVSIIGVDLAKNVFQLHGASADGAVLFRKKLSRPQFARFMGEQPPCIVAMEACAGAHHWAREMTRHGHQVRLIAPHYVKPFVKRQKNDVADAEAIVEAALRPTMRFVEPKTAEQQARAVVFRTREQLLKQRTEAINALRAHLYEFGHVAPVGIGYLPRLAEVVDDPKSGLPELARDICRTALEQIGHMTARIDALKAMIATMSKEATMPRQLQTMPGVGPIGALAIETFAPPMDQFRRGRDFAAWLGLVPRQHSLGGKQRLG

SEQ ID NO: 66443 - protein, 351 aa, unidentified
MKNHKYVALDVHKASVTMGVRDGAGKCVGHAVVQTKAETIKELIAGLSGTIHVTFEEGTQSAWLYDLLKGRVAECVVCDPRRNKLLESGSKSDHIDVDKLSELLYLGGLRSVYHGDHGTRALKELVHNYESLVKDQTRVKNRLKAIFRGRAISYEGAELYELKERQQWVSKLNERGVRQRTEQLYEQLAALEPLVVAARQKMLRESRQQKASKNLQYISTLGEISVAELIGTVDTPYRFRSKRQFWTYCGLAVVRHTSSDYRFEQGELQRRRKSGPTRGLNQNYNRRLKKIFKTAALTGSHTGPFKPYYERLVQRGLSPELAQVTLARKIAAVTLNLWKKGERFDPKKLQS

SEQ ID NO: 66444 - protein, 449 aa, unidentified
MTQRQDEKFQGFPVVHRRAAGIDVGNASHWVAVPPDVSDSAVREFGTFTVDLQAIADWLIRCGVTTVAMESTGVYWIPLFELLESRGLKVCLVDTRRLKSVPGRKSDYQDCQWLQKLHTFGLLSSAFRPDDQVVKLRSYLRHRAMLIRYASHHIQHMQKALQQMNVKLSNAISDITGTTGLAIIRAILGGERDPQKLATLRDPRCRNDAQTIAKSLEGHWREDHLFELAQSLDLYETYRQKTQQCDLEIERCLGEFPDVSDGQPLPPQKGHGHRNAPTFDARTHLYRICGVDLTAIDGIEANTALKLLGEIGTDIRRWPTAKHFCSWLGVCPKQKKSGGKVLSSRSRSSGNRAAAALRMAVQSLEHSASALGAFYRRMKARLGAPGAITATAHRLARVIYALLRYGQPYVDQGQEAYEKQYQQRTLENLERRARKLGFRLSPAIAPAPT

SEQ ID NO: 66445 - protein, 342 aa, unidentified
MQMTTIGLDIAKNVFQVHGIDASEKVVVRKQLRRGQMLAFFEALPPLLVGMEACATAHYWARELTKLGHQVRLMPAKDVKAYVKRNKNDAADAEAICEAVRRPTMRFVQVKSAEQQSQLMLHRTRDLLMRQRTQVINALRAHLGELGITAAQGKAGLTELLAIIAGSADERLPTEAHASLMVLAAELQVMRTLIASIEKRIITHHRSDEASKRLRSIPGIGLVGATAIVATITDPKAFRSGRDLAAWIGLVPRQDSTGGKHKLGPISKQGDRYLRRILVVGAHAVLKLVRQKPEKYPWLTQLLARKPFKVVAIALANKMARIAWALLVKGGPYRARALVATA

SEQ ID NO: 66446 - protein, 452 aa, unidentified
MARVVGLDIHKTVVQAAIVDAKGVLQSQERFGCSRGELELYARTHLRRSDRVALEATTNTWGVVAILKPFVKEVVVSNPLRTRAIATAKVKTDKVDALVLAQLLRSNYLPRVWEPPQAVQEARAVTGRRAALIADRTAVKNRIQACLRERLIMSPGRQLFSARGRAWLAALEIDELARVAIQSDLRIIDAIDSELELVDTTLLKKSADNEDVQLLVTLPGVDVAVAQTVLAALGDISRFPDGDHAASYIGIVPSTRQSANHCSHGSITKQGNTRARWLLVQAARHVGKHPGPLGAFFRRVAKKRGYNIAVVATARKMVVIAWHMLTRREPYRYALPIATQAKLRRIRTAAGVDRRKGPRHAKPRPQRPGGTRRIPSLPEVYASEALPALQPARPGETRMLKTKRLTATVDGLNKEQWRRVATSPSRAQTADKRRGRLARPADRKPPTNAVQA

SEQ ID NO: 66447 - protein, 407 aa, unidentified
MDIVIERACGMDVHKDNITACIITPKGKEIQTFSTKTVFLLQLVDWVKQHSCTHVAMESTSVYWKPIVNLLEAEDIEFLVVNAQHMKAVPGRKTDVKDAEWIAKLLRHGLLKASYIPDRNQRELRELVRYRRSIIEERARQHNRIQKVLEGANIKLGSVVSDVLGVSSRDMLNAIAEGEEDPEKLANFARRTMKKKKDELMLALKGYINSHQRLMLKTILKHIDFLTEQIEMLDQEVAERVSTHKEDIERLDSIPGIATRMAEQILSEIGTNVKEQFPSAAHMCSWAGLVPGHNESAGKRKSAKTKKGNKYLRSALTEAAHSVRGSKNYLGALYRRTASRKGKKRAGIVVAHAMLRISYYLLTRKEMYVDLGEDYFDKQRQQSIVRHSLRRLESLGYSVTLQAPEAS

SEQ ID NO: 66448 - protein, 384 aa, unidentified
MQSVAARPEALSAIRSDLGAIFVSLELSRSTWLITSLSPGGGEKMSKHSVRGGDVAGLLERFAQLQKKAQARTGRNFPIIVIHEAGLDGFWIHRVLQNEGIESHVVDPASIATSRRRRRAKTDRIDGEALLRTLLAFKRGEPRVCAMVKAPTPEEEDRRRLCRERKVLTNERVQHVNRIKGLLFCQGITGYKPLRRDRRRRLDELRTGDSRPLSKHLKYQISRELDRLELLLEQIKAAETERDAVLVATPAPAAMLLDIKGIGPEFAAVLYSEGLFRHFANRRQIASYAGLAPTPWQSGSVDHEQGVSKAGNPRLRTTLIQLAWLWLRHQPQSALALWFKERVMRNGGRLKKTTIVAMARKLLVALWKYVTAGVVIEGAAMKAH

SEQ ID NO: 66449 - protein, 346 aa, unidentified
MNYVGLDVHARQSTFHILDENGKKVATRAVHGTERTVIKELAKIKRPMSICYEASCSYGFLHDQLCAIADHVVVAHPSKLRAIFSSKRKNDRVDAAMLAKLLMLDMVPAVHVPCPDVRAWRRMITHRRSMVDDRTAMKNALRALLRTLGVEAPRSLWSKKGLAWLAGLEFDNTLDAIQRDEMVERLGTLQRAIRRVEDELNKTGRAHPGVALLMTIPGVGPRTAEAAVAYIDDPTRFRNNKTVGAYFGLVPCQDASAAKNRLGHITADGPAVVRRMLTEAAWQGIRRSPRIRAYYERIARGKDNRKKIAVVATMHYLIRVMHAMLLNGEQWRAEPARRSHAADRAA

SEQ ID NO: 66450 - protein, 352 aa, unidentified
MNKVLLQSVGIDIAKDKFDVCFMEINSEHTFVKGTTSFNNDSKGFETFFYWCSKRNQANASLIFVMEATGVYYEDLCYFLYSKNEKVSVVLPQKVKYFAKSLNIKTKTDQVDAKLIADMGLERHNTLQLWSPPSKQFKEIRDLTREFCRLKKSKTAIASQVHALRIAHNTSKDALRIALKHLAFTGKLITELDSILLKTVKKDNQLYDKITRIAEVKGLGILTIVKVIAETNGFLLFDNIRQLVSYAGLDVVQHQSGAHEGKTNISKKGNAHLRAALYMPAVCAATHNVTLKPFYNRLNEKFNHKKQSLVAVMRKLLILIYTLWKNDQEYNPKHQWDGKKKREVAFSLVDSH

SEQ ID NO: 66451 - protein, 344 aa, unidentified
MKHYVGLDVSLKETAICVVDENGVIIREGKAFSEPEAIVTWLNESGLPIAKVGIEIGGLARWLYGELRAAGLHAVCIDPRRLRGVTKTMPIKTDRNDARAIAQVMRVGWYTVVHIKGGLSQELRMLLNNRKTLLIKQIDIENEIRGVLRVFGLKLSGRISQVTFEQQTNELTDGHPRLAAMLRPMLVARAALREQYGVLHKMVLEIVRRDPTCQRLMTIPGVGALTAITFLTTIDDPDRFQHSRDVGAHLGLTPRKYASGETDRNGAISRCGDVMLRTILYQAALALLTRTQRWSALKAWGVRVAKRRGLRRAVVAVARKLAIVMHRIWADGSEFRWTRQEATA

SEQ ID NO: 66452 - protein, 335 aa, unidentified
MKFSFFIGIDVSKNELDFAVMQGKSLLFHREILNTPGAINALLKELGKQAGFSLNKAVFCMEHTGIYSNYLLGCLHKKKAGICLEAASQIRSSLGNIRGKNDKIDAIRIAQYAYKNREELRLWEPKREAICQLAHFTAIRSRLVETKKMLKTPLKETGIFLSKGTAKKNTALCNSTLKAIEADLKKAEKAIDELIKADDELRRLFGLVTSVNGVGRVTAAQIIMTTNEFKDINSPKKFACYSGVAPFTKESGLFKGKSRVSHMANKKVKTLLHLSAIVAIRYNPEIKQYYQRKVNQENKNKMSTINAVRNKLILRIFACVNQNRNYENNYQKAVA

SEQ ID NO: 66453 - protein, 320 aa, unidentified
MPQNARIVGLDISKLKADGCIRSLQLDLSQPSTPEGQAAMVAWLRANAVGTAVMEASGGYERGWAKALREADIKVRIVDPKRVRHFAKSAGQHAKNDPIDAEMIAWFAETFAAAPAQPYDAEREELDFLVTARTALVKLSSQIGNHREHRQPRAAHSAYAAILRSVAVQLAKLEGVIAAKLAATARFAASAQIIESVPGLATQTAAGVIAWLPELGQISNKTAAALLGAAPYDDDSGKHKGERHIKGGRQEIRNLLYMATLGAATKHNPVLKAYYQRLRAKGKPAKVALIACMRKLIVILNTMLARGEKWDPSRCPAARV

SEQ ID NO: 66454 - protein, 339 aa, unidentified
MENNNNPYYKHYLSIDWSQQDVSIARMRAGSNQPETKLFPSDIKKIKEYLKGLQGKKILTIEETTGSHWLYVELLESVDKILICDPYRNSLLKEGAKNDKIDARKLCLLLRSGLLKEVYHTSNEDYKIRKLASAYIALVKSGVRIKNQNSALYRGEGLKYKKDKIKKGEEILSFVEGQQKRAIKLYEEEKKKYEEVFKELKKKNEVIKMLCQVSGIKETSWVKIYSVVIDARRFENKYKYWAMCGLVKHDRESGGKNYGKKNPRYSRILKNVYKSAALAAIGGNNDIREYYEVLLQKGYPIAEAKNQIARYIAKVTYAVMKNKKPYKAYQWRELNKQKS

SEQ ID NO: 66455 - protein, 354 aa, unidentified
MSKVKQLDFTGKIIYCGLDVHKTNWKVNARMEGIEIAAFSQNPDEVSLKRHFEKNYPGSILKVAYEAGFCGFEIQRSLNSSGIDCIVVNAADVPSSDKDRKRKDDKRDARKLSIELSKGNLQGIYIPDKQMQAARSLVRQRYRLVQDQTRCKNRIRHLLISNGIKITEKEERWSMKFINIVKQSDFGSALLKASVDFAIEQYLQIRHILKEITLSIRALSKQEPFLKVQKFLQSVDGVGLITGMVIQTEIGEINRFKHFDSLCDYVGLVPDIYSSNDQTIVRGISQRGNSFLKEAIIESSWVLIRKDPAMLMKYNEYRSRMNANKAIIRIAKHLLSRIRFLWKNEQVYVKGLVQ

SEQ ID NO: 66456 - protein, 324 aa, unidentified
MTAIDQFAAHVGLDWADRKHDVCVQFKNGERTFHVIKHTLEALDTWLNELHQKVKGRIAIALELKKGPVVYALQKYPFVTVFPVHALSLARYRQTFWPSGAKDDPQYAELALDLMLRYPQKIKAIEPDNTDIRLLLQLVEQRRQLVEDKRRFVNRLINTLKQYYPQPLEWFSHRGSLLLCELIIRWPSLQQLKRARRDTVRHFLNAKGGRATALTEQRVASINNAIPLTTDPSVIEANALMATALATQIKVVSEIIKTYDERIETLFDTLPDAELFKSLPGMGPCMGPRMLAALGDNRDRFNSAEEIQNYAGIAPVTERSGQKS

SEQ ID NO: 66457 - protein, 389 aa, unidentified
MQPLLYCCCGIDVHEAMIETCIIKGLEDEPEIIRKRFGTKPENLKGFAAYLMENDCYSIAMESTGVYWRPVYEAIEDNCAYIENLVVTNASHMRNVPGRKNDEDDAEWIATLLRHGLLSPSFIPERVFRSLREASRLHKKFVGEKSRYTNRTTKLLEAHGFKLSLVLSDVLGVSGRNILNVLAKKGSLSVQDVADCLRGRTRHTPEEIHAAVSGSLTPHEQSMLSLLLLKFDSANRDIENIKSIMLEMASPYQRVLDILCSIPGIGILSALMILAEISATPHMYFASAAKLCSWAGLVPRNDESAGKVKSRRIMPGNPYIKSVLCQAAWASVKVRDNPFRDWFWSHRGKLGQKKAIIAVSRKILSVIYALLRDDVFFNPNFCLKTIKNR

SEQ ID NO: 66458 - protein, 343 aa, unidentified
MQTITTIGFDIAKSVFQVHGVDAGGQVVIRRQLKRRYVLAFFQKLSPCLVGIEACASAHHWSRELQALGHTVRLIPPAYVKPYVKRQKNDAADAEAICEAVTRANMRFVPTKTPEQQSGLVLHRARHLFIRQQTAVINAIRAHLAEFGIVAPVGRHGVEELLNVVADPNDKRVPEMARACLLAFGAQLRGIKEQILEFDRLIRAWHRSNEMSMRLDEAPGVGPVLATALVAAVADPKSFRSGRNFSAWIGIVPKQHSSGGKNRLGNISKQGDRYLRGLFVAGALSVIRYAKIHGTKHRPWLTALLARRPTKVAAIALANKIARMVWAMMARGERYKEPVALAR

SEQ ID NO: 66459 - protein, 459 aa, unidentified
MHRDKPAVSTWEGLKVIHPNAAGLDIGSEEIWAAVAPGRTAEPVRKFGTFTPDLHALADWLTACGVDTVVMESTGVYWIPVYEILEARGFQVHVVNARHVKNVPGRKSDIQDCQWLQGLHSVGLLRGAFRPEGEIVALRAYLRHRAALIEHRAAHIQHMQKALQQMNVQLTQVIADITGVTGLAIIRAILAGERAPQQLATLRQPGCKKSAEQIAKALTGNYRAEHMFALKQALALYDFYTAQLTDCDAEIERQFANLKPVSADLPPLPPSAKRDSHSKNAPSYDARSLLYRLTGVDLVAISGLNASTVQTIISEVGTDLRAFPSEKHFCSWLGLAPHNDISGGKRLRSRTLKTDNRAGQAFRLAAQSVAKSPESAFGAFYRRMKARLGAQQAIVATAHKIARAFYHMLTHRTPFHDLGGEEYARRARERELKNLEKRAAKLGCSVIKNPADVALAGSF

SEQ ID NO: 66460 - protein, 412 aa, unidentified
MEVLHERAAGLDISKKDAKVCVRVPSKRAGYYSNTITTYGSFTNEILRLRHDLEQAAVTVVVMEATGDYWKPFFFVLSETLNVELVNAKQAKNIPGRKTDVSDARWLAELAAHGLLRSSFVPPEEIRQLRDLTRTRTNLTREQTREYARMEKNLEDANIKLSLVASSLTTKSAHAILTAMVDGERDPHVLAGLAHVSMIKKAPELVEALTGRFSDHHAFMVKLHLDRINELDASIARINDRIDTVMEPFLPAREALSMIPGLSKISSENILAEIGIDMSVFPTSGHLASWAGVCPGQNESAGRVKSTKTRPGNKYLKGYLGAAALSISRSNTTYLAVKYRRIQARAGTLKAAVAIEHTLLVIIWNMLSTGELYADLGTDYRQTRDPNRIRDRAIRRLEALGYDVEVTPNAAA

SEQ ID NO: 66461 - protein, 376 aa, unidentified
MSKVQFVGLDVHAETIAVAVAETGGELRSLGVIPNRLESIRKLVHKLGPVQHLRACYEAGPTGYVLYWQLTQLGVACEVIAPSLVPTKAGDRVKTDRRDAEKLARCYRAGELTAVWVPDAAHEAIRDLVRAREAAKKDQLRARHRLGKFLLRHGRRPEGIKAWTQKYREWIKSHVRFEEAALEATLADYLEEVDHVAARIVKLEKALDEAVRQAPAEIRVVIEALQALRGVAQTTAASIVSELGSISRFPSPRQLMGYSGLVASEHSSGNRVQRGGITKTGNSHLRRVVVEAAWAYQHRPNVIGFLLRRQKSLGISEEAKEIAWKAQQRLHKRYKAMAVRGKNKNQIVTAIGRELLGFIWAIAVKTEKQHKLAPVA

SEQ ID NO: 66462 - protein, 356 aa, unidentified
MSQKLNSTIAVIGIDIGKNSFHVVGHDKRGAIVLRQKWSRGQVEARLANMQPCLVGMEACVGAPHLSRKLQVLGHDARLMPAKYVRPYSKGQKNDFRDAEAIAEAVQRPTMKFVGTKTVDQLDLQALHRVRERLVSQRTGVINQIRAFLLERGVAVRQGFRFLRAELPSILAKRTDVLSPRMSHLLEDLAGDWRRLDERIEHLFREIEGLARQDQGCARLMSVPGIGPIIASATVAAIGMGDAFSKGRDFGAWLGLVPKQISTGDRTILGSISKRGNRYLRALFVQAAWVVLVKVGPKHWERYGLKSWIEAAKKRLHHNVLAIALANKLARIAWAVLNKGRAFECTKTYAVAPQAA

SEQ ID NO: 66463 - protein, 419 aa, unidentified
MKENRSSETKLGRVGKPRGTEKKHGPVQREVSEVMAELVLKLSQKLEPQPERAREKEGRRECVPGPNRDRLTVGVDLGDQWSNYCILGLDGETLAEGQLPTTRQDFAEFFQSMATARVVMEVGTHSAWGRDVVAGCGHEVLVANSRQMEGPKRRKRKNDRIDARKLARVGRVDPQSLCAIEHRSAEVRQDLVAVRARDAVVAVRRDVINTTRGLVKALGARLPKCSSQSFSKKVEGSLPTEVHEVLLPLVRLVETLSSCIKAYDERIERLATEKYPHTELLRQVKGVGSLTALAFVLTLENPKRFAKSRDVGAYLGLVPKQEDSGDRQPQLRITKMGDMMLRRLLVGSAHFILGPFGPDTDLRRYGLRLCEPGGKNAKKRAVVAVARKLAVLLHRLWVSKEVYEPLRHTPPPATEHAAA

SEQ ID NO: 66464 - protein, 340 aa, unidentified
MKITVIGLDLAKSVFQAHGVDEGGRTALVKKLHRKQMLPFFSNLPPCLIGVEACATAHHWARTLSAMGHEVKLMPPSYVKGYVKRGKSDALDAEAICEAVQRRSMRFVPTKTVEQQAILMAHRTRSLLVRQRTMAANALRAHLAEFGLVANPGIANLAKLSEKALAEPDGLPAYARRALAILVRRLVELTEEIGALDRELGAWHAQNEASQRLAAIPGIGVITATAIAATVTDPKQFRSGRQFAAWLGLTPQQQSTGGKTRLGGISKQGDRYLRRLLVVGATAVMRHAKDKATRLADWVRELLAKKPFRLVSVALANKLARIAWAVLTSGDTYRPQAPAA

SEQ ID NO: 66465 - protein, 357 aa, unidentified
MEKRLKQSLGIDVSKLNLSLSLGFLNERLVKEFKSRPDVSNDPKGYKMLLKWIKTSVDPDVELLVVMEATGVYHQGIAHYLYEHGHSVCVMQSGRVKRYAQSLDQRSKTDALDSRMLSMLGLERNIRLWHPPSEELQELKGLSRERSSLLNDRTMETNRQGAIASSVHSNVRALKRHKIRLKLLNTQIEAVEEEMRSLIADNEELKRKLEYLTSIPGVSFISAATVIGETLGFESIVNAKQLASYAGYDVVLRESGNYKGKTRISKKGNSHIRAVLHMPSMTCVRCNPTLKQFYNRLKPNKAKPLVALVAVQRKLLILMYTLWKNEQFYDAEFEIKKQQKHEALAARDNNLINQSVS

SEQ ID NO: 66466 - protein, 401 aa, unidentified
MKYGVGIDVSKGKSTIAILSIAGEVIETPFEINHDFEGLNLLEEKLKDIPREDLKIVMEETGTYHLPILSYLIDKEYFVVAENALKIKKYLDRGLRKAKTDKKDSLKLAEYCCDNWYKLNQVRENDEIYDNLRLLSRQYLSQISVQVKQKINLSNLCDLIFPGYYQLLDENNFILGLETFKKYYHPEIIKNKKQSQFVNEIDKLAKKLGHKGAGITLANKIYTLANKTVCPRPNNEYAQLSAISCADALILTIKTTTSIISEMDKLARELPEYNVISEIPGCGKKLTARIIAEVGDIRRFKNAGSIIAYAGLDAPPYQSGQFEATNRHISKRGNKYLRKTGYEVMKSIKSSCKTGNELYDYIVKKENEGKIKKVAKIAGLNKFLRMYYGKVKKKYKELEIW

SEQ ID NO: 66467 - protein, 370 aa, unidentified
MKPITSYVGLDVHKSTISVAVAEEGRRGEVRHHGAVENRADVMIKLVERLGRRGERLQFCYEAGPCGYGLHRLLSGRGHDCVVVAPSLMPKKPGDRVKTNRRDAAMLARMHGAGELTAVWVPDAAHEAMRDLVRARATAARVLTKARQHLTGFLLRHGKVYAGPRAWTVAYRRWLTTVRFDHPAQQIVLQDYIHAMEDAEKRIARLVEQIEQLLEHWSMAPVVKAIQAMRGVAFINAVTIVAEIGDFARFSNPRQLMAYVGLVPSEHSSGDSVRRGGITKAGNSQARRALIEGAWTYRMQARISRKLHDRIEELPQGIRDTAWKAQVRLCARYRRLVAKGKPTVVVTTAIAREMIGFIWAIARQVQVQTA

SEQ ID NO: 66468 - protein, 402 aa, unidentified
MNAVGIDVSKGKSMVAIMRPFGEIVSAPFEIKHTASGINSLVELINSVEGESRIVMEHTGRYYEVLAHQLSEANLFVSAINPKLIKDFDNDSLRKVKSDKADAVKIARYALDKWQNLKQYNVMNELRNQLKTMNRQFGFYMKHKTAMKNNLIGILDQTYPGVNTYFDSPARSDGSQKWVDFASTYWHVDCVRKMSLNAFIDHYQNWCKRKKYNFSQSKAEEIYGKAKELVPVLPKDAITKLIIKQAVDQLNSASTTVESLRTLMNETASKLPEYPVVMAMKGVGTSLGPQLMAEIGNVSRFTHKSAITAFAGVDPGVNESGSYEQKSVPTSKRGSSDLRKTLFQVMDVLIKTHPQDDPVYQFLDKKRAQGKPYYVYMTAGANKFLRIYYGRVKEYLASLPES

SEQ ID NO: 66469 - protein, 334 aa, unidentified
MILEPNQYSRVIGIDVASKKLDVHDSAGKLNKIVINDELEIARAIASKIESPTETLVVCEGTGGYEDHLVDVMHDHGINVAVVNPRQVRDFAKGHGFLEKTDKIDAAIIAKFGRDVRVNLLTPPTPEEKCFRALFRRRMQLRTLLQQEKNRLRSCSDNFVRKLIEASVQSINTEFKLVGKKIGEQLKERAKTDSRIENWLLVEGVGVITVAMLVCELREIGKLSRGGIAKLVGVAPFANQSGLGDKKRRPRGGRTKARCVLYMAALSASQHNPRLKPFYQRLLNKGKPKKVALIAVARKLLTILNDMARHDRAWDPEFSHEASAKNAAALLSLN

SEQ ID NO: 66470 - protein, 338 aa, unidentified
MRTKPKPNAATYGIDIGKKVFHVVALDAEGHPIQRAKFSRETLLRFFEAAEPALIGMEACAGSQWLARKLTGMGHNARIIPAKFVKPYVKSNKSDTLDAEAISEAVTRPTMRFVQVRSEEQVDLQALHRIRDRLIRNRTGLMNQARAFCIEYGLAMRTGAGGFHADIRHHLANEENDLSNAMRALFNDLLNDLAHIERRVAELTKEIEAIAHSDETVRRLLTIPGIGALGATALVAAAGDGRQFRKARDMAAWLGLVPAEHSSGGKQTLLGISKRGNGYVRRLIIHGARSCFLHLHRETHALGRWLSALEDRTHRNKAVVALANKLTRIAWAMRRPDA

SEQ ID NO: 66471 - protein, 345 aa, unidentified
MGNMYYIGLDVHKKTISYCVKDGSGRIHAEGKIPATRFDLDLWMKTLPQPWTVAMEATLFTGWIYDHLRPHAAAVKVAHPLMLRAIAAAKKKNDHIDANKIADGLRCDFLPECYMASTQIRERRRTLRYRNLLVRQTVQLKNRISGLLMEAGVSYNKQKLHKVGYFRELLKTNQDIDESLRPLLQLCRETLVRLQKTESALIRSLARDRFLVERVERLMTIPAVGPITALTWALEVGEVSRFSSIKKAISYCGLCGAEKSSGEHIQRTPLSKQRNKHLQCVLVEAAKMAPRLSPELALLYDRERQKGNANRATLAVARKLVAYLVAIDRRQKDFLVVEKQNHAAA

SEQ ID NO: 66472 - protein, 419 aa, unidentified
MSFKILKNNCCGLDVHKTWIFACIGITDSHRRTEYKQARFSSFTKGLQELCDWLAKYNCTDVCMESTGKYWIPVFNVLEKNNIWVTLSHPKYTKPQKGNKTDRKDAKWICDLYMCGMVKPSFIPPADIRQLRDLVRYRFKLTCMITSEKNRAHNCLTISNFKLDEVFSDIFGKSSRSITEQILQHPGETFDVAQFVDGRCKTPIEEIQAAVDGAISTEQAVKLRQCLNHIDELEKHQAEIEREIFRLSDKYEEVLNLIRTVPGFDKNPMTAIQVLSEIGGDMSVFPTAKNLVSWAGCCPRNDQSNQKIKSTRISRAGSYFKPVLVQVANALIKSKKHPEFTTRYRRIKARRGHKKAIIAICRMILTAIWHILTDLKPYTPEGFLESRPVNDSKILTTSQALNLLKQRGYVIKDDIVSVP

SEQ ID NO: 66473 - protein, 330 aa, unidentified
MQYLGIDISKNKFDCCIFLNNQKKKTKVFDNNHSGFIKLNEWLQKLEIEILELVAVMEATSIYHENLAYFLYSNNIKVCVANPARVRKFAAGISVLTKTDEVDAEVLVKYGELAPYNMWQPDSDQLRLLKQLILRRDAYTSELNREKNRLDQAYSNNTNSKLIEIIQVDIENINNRIQYLDKLIDETIDDDISLKQDLCLLESIPAIGKRTALTLLTLFKGKTFTNAGQAAAFCGLVPLQKQSGSSIRGVSKISRSGSSKIRSKLYMAAVVAIRHNPHIKIVYDRLLRNGKAKMAALCAAMRKLIHIAFGVLKHQKPYNENLIGFAKIPC

SEQ ID NO: 66474 - protein, 399 aa, unidentified
MRQHLWAGIDAGKSAHHCVVIDADGKRLLSRRVVNDEQPLGELIDAVTGLAEGAELTWAIDLNHGGAALLIAMLANRDHRLLYIPGRTVHWASGTYRGDGKTDAKDAAIIADQARMRRDLQPLRIGDETAVELRILTSRRTDLGCDRTRAINRLRAQLLEYFPALERAFDLCANKAALILLTGYQTPDGIRRLGVTRLQAWLRKHGARASARVAATAIEAAKAQHTTVVGQQLAAAMVARLARQVMDLDIEISEIDAMIEARFRRHRHAETILSMPGFGVLLGAEFLAATGGDMTAFDSVDRLAGVAGLAPVPRDSGRVSGNLKRPRRYDRRLLRACYLAAQVAVFHDRASRTYYQRKRTEGKNHTQAVIALARRRLNVLWAMLQTGTPYRPEIRGVAA

SEQ ID NO: 66475 - protein, 393 aa, unidentified
MICVGIDVAKDKHDCVILNSEGKVLAGVFTIPNNADGFDTLLQKIHGCTSPDDKIKVGLEATGHYSYNILGFLLNQGLPTYVINPLHTNLFRKSMSLRKTKTDRVDAKTIAAMLMSNVDLKSYTDTAYHNEELKSLTRYRFDKVRERAQLKQSVSRLVTILFPELEKLVSTLHMSSVYALLIEFPGAKQIAEAHLTHLKSLLKDASKGRYGRDMATEIRDAAKHSIGSVMPAKSLELRHTIRLIRELDSEIEDIEAAIEAIMEELQSPITTIPGMGFRMAAMILAEIGDFSFFDSPDKILAYAGMSPSTYQSGHLSLAGTYSHMEKRGSRYLRYALYNATKYVCHWDPGFAAYLAKKRAEGKHYNVALSHAAKKLVRLIYALEKSRQPYRRAA

SEQ ID NO: 66476 - protein, 412 aa, unidentified
MEVLHPHCAGLDVHKDTVVACVRHMVNGSVEREVRTFKTTTKELLALSDWLAGEGCTHVAMEATGVYWKPVWHVLSDGDFVLVLANAAHVKNVPGRKTDVNDATWLAELLAHGLIRGSFVPDRQTQEMRNLLRTRKQLVRERSSHIQRLQKTLEDANIKLDSVISDIMGLSGRRMVEALIAGETDPNALAALAHRRIKASPAELEAALRGRVTDHHRFMLRLLLQHIDAIDAAISQIDQEVDAQVEPFRTAVQLLTTIPGINELSACVILAEIGRDMGRFPTAGHLISWAGLCPKNDESAGKRRSTRMRKGAPWLKTTLVQCAWAAARKKASYLQAQFHRLRARRGAKKAIGAVAASILTAAYHILKNGTLYQDLGPNHFDKRAQGKQVHRLVNRLRNLGFAVQITPVEAAA

SEQ ID NO: 66477 - protein, 348 aa, unidentified
MIWIGVDAHKEVHQAIALSEDGVVGELTIPNTAAGWASLLDWASRWPERIWAIEGAWYLGRGLAQHLARADERVHEVNGRWTARRRRGMRQRGKSDRLDAHSVAQLLREEAATLPRVFAEEDPAATVQLWSREQERLAEDKTRVVNRLHDLLLLCDPEYKTKLPALTTQAAIPALRAYQVPGDGLLARERERLVRAHAAQLALLDEQERELRATLERVSKTRYSPLRQIEGIAALTACALIAELGRPRPGFREEHLAAFGGLSPLETSSAGAVRHRLNRGGNRRLNMLFHRIVFTQARIHAPAQAYLARRKAQGLTAREARRALKRHLVRRVYRACVECFTGFKAVAA

SEQ ID NO: 66478 - protein, 336 aa, unidentified
MIHVGVDLHQRFCYVTAVDASGKKLAQRSVVNERGALQSWFGALPGPAQVVVEACGFWPAFQRDVAPLVERLVMVHPARVKAIASARLKNDRVDSQTLAHLSRCDLLPEAWMADTATQQLRLRVRLRVSLGQQRARLKNLLQAVLHQEGFRKPVSDLFGKRGRSWLAGIELSGAGRRVVDAYLGLIDELDTAIAVATRELEQMAEQDARARWLTTVPGIGGYSAMVILAEIGDIARFSTKRSLASYAGVVPRVRESAGKRSHGAITRAGSETLRWIMLQVAQVAARYAPAARAYFQRLRRTRCAQVAKVALARKLLTVIWALLRHGVCYDDAVFSA

SEQ ID NO: 66479 - protein, 371 aa, unidentified
MGESSKTLFVGLDVHKDTIAVAYAPNDRGADVVSLGTIGTRQCDIDKLTRRLESKGATLVFGYEARPCGYWLYRYLAQRGFSCSVVAPSLIPRKPGDRVKTDRRDAVTLARLLRSGDLTSIYVPSVADEAIRDLSRGREDAVGDLKRSKVRLKAFLLRQDIRYEGRANWNAAHLRWLARVVCPTPAQQIVFQEYVHTVTEQSERLRRLESELHTAVKTWRLYPVVEAVQALRGLDLTGAGTLIAEVGDLTRFDTPRKLMSYLGLTPSEYSSGAHRRQGGITKAGNGHARRALVEGAWAYRYPAKVSRHLQLRLEHVSPDARAIAWKAQVRLCKRYRLLSARGKHVNQVVVAIAREMAAFAWAIARTVPVAS

SEQ ID NO: 66480 - protein, 386 aa, unidentified
MKTIGIDVAKDSHKVCILNEQKEKLRTFNFKNSHLGLLEFNKILSKYDKEFIIGFESSGIYHHGILHHLRKQYNNIAVLNPKRIKAHRKSLGYEFKTDKIDSYIIADYLKERDLTNNILPEKYPLLKQLCRTRTKLVQQKTRLKNRIRGDMHILFPEYAKCFDNLFCNASLAFLKKHIDPKKISKLTEQRIRDILVKTSKVVSYNHAKKILYAAKDSFGIPKEGLDIEIRLGIENLELIEKQIHLLEYKIEYQFDRIFNPLADIKGMNKIYAAAIIAESGDIGYFKNRDQYYNFTGFVPRFSQSGKFESKFNHINKCGSSYLRHYFFQAAISLKRHNSYFRGLYAKKILEKKSSDEAHVYCAKKLCHIVFRLLKSQTKFCPEKLVH

SEQ ID NO: 66481 - protein, 339 aa, unidentified
MKYIPVGVDIAKHLMQVHFVDEHTGEIIDKQVKREKFLEYFSNREPCLIGMEACGGSHHWARELQKLGHKVRLLKDRFVKAFVMENKNDVMDARAIWLAVQQPVQSVAVKSEEQQATLGLHRMRQQLVKFRTAQINALHSLLLEFGETTHKGRAALAKEVPEALERLKERLPLYLINMLDEQYQRITELDEHLDHIEKQLQAIARQNETCQRLLNIPSVGPLIATAAVATMGDASAFKSGREFAAFIGLVPRQTGSGGKIRLLGISKRGDKYLRTLFIHGARAAALLTKEPGPWITELKKRRPASVAIVAMANKLARTMWAIAAHGRKYDKNHVSIRPD

SEQ ID NO: 66482 - protein, 355 aa, unidentified
MSQGKYIGMDVHQATISVAVMDAQGKLIMECLLETRAATIVEFIRGLHGTLSLTFEEGTSAAWLHDLLKPYVSRLVVCDPRKNALLKDGNKSDRIDARKLAELLRGDQLHPVYHGEHGVRTLKELGRSYLTITQDVTRVMNRIKALYRSWAIPCAGATVYSSRHRAEWLAEIAEPGVRVRAERLYQQLDLLQPVRLEARRELLAESHKHSAVKLLRQIPSIGPIRSALLVALLQTPHRFRTKRQLWAYSGFAVQTHDSGEYRSVRGKLQRNRERMTVRGLNDNHNRDLKNLFKSAAISASTRPGPLRDFYLARVEKGMRPTMARLTLARKMAAISLTVWKKGVEFDPQLLQRQAA

SEQ ID NO: 66483 - protein, 333 aa, unidentified
MKKNYFIGIDVSKRKLDVAIYGKKGKLKENHLVIQNELTGFENLINWLKSKNISSSYVFICMEYTGLYSFEFQFFLEKMNICYCMESGLRIKKSLGITRGKDDIIDAFRIAEYCYEKRENLVPTVMPSNEIFALRRLISERKRYIQILAKQKVIAKEIAKYESEIAQKRTIETIGFIEKKITEIEDDLLKTININSSIKQNYDLLTSIKGIGFVNAINTIVYTNNFTTFSSPREYACYIGVAPFPNRSGSSIHGSTSVSKLGNINLKAELTQAALTASRWDAGLKNYFNRKMKEKGGGSHNYGIVLNAVKFKLICRMFAVIKRQTPYIELSFN

SEQ ID NO: 66484 - protein, 328 aa, unidentified
MSKERFEVGVDVGQSEVWASLGSGKPRKFKHDETGVKQLYRWAKEKSGELLLHFCMEATGVYSQSLAVRLLGCGRCEVSIVNPAQIAAYAKAQMRRSKTDQIDAQVIWAFAQAQQPRCWQPERQAIQELAALVTQADALQKTQRSWKNRQHAHQYRPALPSMVQQTSTVVEETLKQQLEMVQKEIHRLCQNDAELKRDVNLLCTIPGVAELTATRLLAYGKSALTERSPKELTAHAGLAPRHRQSGTSLNGRSRLSKQGDARIRCMLYMPTVTATIFNPIIKYHYQRHLANHKPPMVALMASMKKLLLMAQAILISQQPFNPNLKPLT

SEQ ID NO: 66485 - protein, 455 aa, unidentified
MPRRRPSTRPVTMPILHPHAGGIDVGATEIYVCVPLDRDPQPIRRFGTFTEDLHALADWLTQCGVTSVAMESTGVYWIPLYQILEVRGLAVCLVNARHVKNVPGRKTDVQDCQWLQYLHSVGLLRASFRPPETVCAVRSLLRHRATLIQLAATHTQHMQKALNQMNLQLHHVLSDVTGVTGLAILDAILAGERDPQVLARHRDGRIKASRETIAKALVGDYRPEHLFTLRQSLASYRHSQCLIAECDGEVETLLGTFASQIDPAAHPLPPAPAARRTPHRKTLRFDLRAELYRVLGTDLTQVPGLQTPTVHTLFAELGADLSAFPSGQHVASWLGLCPDNRISGGKILSVQTRHVKHRVAQALRLAAQSLSRSQSVLGRFFRRMRAKLGAPKAITATAHKLARIVYHLITTRQPYQESRLAAADAAHRRHSESRLRAQARALGFQLVPVSEQAVS

SEQ ID NO: 66486 - protein, 400 aa, unidentified
MISVGIDVSKTKSTICILKPYGEIISSPFEIQHTEKELTEVSNMLLRLDEEVRIVMESTGNYHYPILTFFPKKGLFVSVINSLAMHKYATCSLRAAKTDKIDSIKIANYGIDNWYHLQKYELQENEYHQLQILGRQYAHYIEMRVKEYLYFYSILDQTLPGIKKIIKSQNNDNFERDKLVDFAENYIHFDNISKMSESAFIEDYLNWNKKNGYQPSTTKALEIYNYAKNSIPTLDSQNPITSIMVSESVRVIKKINKTLNVILAQMNEYAKRTAEYSIVRNMGGVGNKLAVRLIAEVGDIRRFHSSKALIAYAGIDSPPYQSGQYLGLNRRISKRGSALLRSVGYEVMQSLKTHKPSGDAVYLYILKKEQEGKPKKVAKIAGLNKFLRIYYARVMEVYNS

SEQ ID NO: 66487 - protein, 400 aa, unidentified
MMTPDDIDVWVGLDVGKSAHHAHALDRDGATLYDKPVRQDEKAIRSMLEHLSRRGRVLLVVDQPNTIGSLPLTVARDMGIAVAYLPGTAMRRTAQLLPGDAKTDRRDAHVIAWAALKLPETLRDAGPDDETLAALKLLAGHDEDLAHESTRHVNRLRSLLLQTHPAFERALKGERITRDATLALLERYGGPMGVKRAGIEDVKDWAKSNGLRAGRIIDDMFKAIGEQTVTVPGTLMAETIIPSIAHDIKTIRDRRREVGRQVEKLLEDHPLLTVLTSMPGIGVRTASNILLGIGGDIANFKSAAHLAAYAGIAPAAGQSGTSIKGERPSRRGNKRLRNALWQSSFVASTKHPPSVAYYKRKREQGKHHNAAIICLARRRCDVIYSMLKNGALYQEPALVA

SEQ ID NO: 66488 - protein, 339 aa, unidentified
MQTLTTVGIDLAKNVFQVHGVDQVGRTVLRKRLRRAEVTAFMARLPSCVVGLEACCGAHYWARVLEGLGHQVKLIAPQFVKPYVMSNKNDANDAEAICEAVRRPHMRFVHRKSIEQQDVQALHRVRSRLIGSRTSLVNQIRGLLAEYGVVLPQSIGQVRRGLPTVLEDASNELSTLGRRLFNGLYEQLVDLDKRIEEFDEEIARLFRSNSVCQRIGEIEGVGPLIATAMISAIGDGRSFKNGRQLSAWLGLVPRQESSGGKTRLLGISKRGDSYLRTLLVHGARSVVYRAGSKADRRSHWIADKQRRLGTNRACVAVANKNARIIWAMLANEQRYLKST

SEQ ID NO: 66489 - protein, 382 aa, unidentified
MQASSMSTPTAGHYGTIFIAIELSQKTWLVTLHSPDRDRISRHKLEGGDHAGLLALIDKVRARATEKLGSPPRVVSCYEAGYDGFWLHRLLEAAGITNFVFDAASIAVEQRSRRSKTDRIDGELLLRTLMAYLRGEPRVVRIVRVPSVEQEDARRASRERDRLVQEQTAHTNRIKALLRLVGMAVGNPRRRDWLAWLERQRDWQGQPVPPHLLAEVKREHARLMVLRDQLAALEQAQAAQDVTVPAPMVERRNQLQRLKALGPAFCTTLVNEVFYKDFRNRREVASYNGLAPSPWKSGGIDREQGISKAGNHRARLKAIELAWLWLRHQPDSALSCWFRARTANAGKRARRIAIVALARKLIVALWRYLTTGLVPEGAAMKA

SEQ ID NO: 66490 - protein, 341 aa, unidentified
MEKATIIGIDLAKRVFQVHAAAKDGRPVLRKKVSRAQLLGFLAKQPPAVVAMEACATAHDWGRAIRGLGHDVRLVPPIYVRPFVRRQKNDAADAEAIVEAASRPTMRFVALKTEEQQARSMIFRTRDLLVRQRTQLVNALRGHLAEHGIVAAHGLAQVKVLATAMRDTGSLHPLVCELGQRYLDHIGRLDVEIAELDKRLRRSCKDDETAKRLQSMPGMGPITAAAIEAFAPPMATFKRGRDFAAWLGLVPRQHTTGGKPRLGRTSKMGQRDIRRLLIIGAMTVVRWAVRKGAAKGSWLARMLAEKPRLVVAIALANKMARSVWAMLSKGEDYRGSALAPA

SEQ ID NO: 66491 - protein, 346 aa, unidentified
MNSVGIDLHRKRSHIAALDETGAQLLSRRIVNDPQTFLALLEDLGECRIALEATYGWEWLADVLHDAGYELHLAHPMRTKAIASARVKTDAVDARTLAHLLRADLLPEAYIAPRELRDLRDLLRHRVALTRMRTALKNRVSAILAKHGIAAPYSDMFGVGGTQFLAELELHESPRRRLDSHLALIADFTREIDATSGEIDARAKADPYVAVLCQIRGVGRYIAMLIIAEVGDIDRFQTARRLCSWAGLTPTVRSSDGRARLGHISRQGSPPLRWALVEAAQHAARGGGPLRADYERIAKRRGKAVAKVAVARKILTLCFYGLRDGEIRCLAPRAKARTVRPVAVSP

SEQ ID NO: 66492 - protein, 414 aa, unidentified
MKLFVGIDVSSQELEACLMNPDGEKLDTLKVNNDLQGASHLRDRIVAAADKLSASEIHIGLESTSVYSWHPAMYLHQDPALKARNAKVFTINPKLISKFKEAYPDLDKTDRLDAWIIADRLRFGRLTMTVVMQEQYIALQRLSRMRYHLIHSLTREKQYFLQNLFYKCNAFTSEVESSVFGHAILEMLSEKYSLDDIATMDVADLADYLKEKGKNRFPDPEHVARCIQKAARDSYRLSKVVENSIDLVLGVSIQTIRSIQAQLKELDKAIERILDGMTGAKRLRSIPGIGNVYAAGILAEIGDIERFDNQAAVAKYAGLTWRRHQSGSFEAEDTKRIRSGNRFLRYYLVEAANSVKNREPEFGEYYRKKYQEVPKHQHKRALVLTARKLVRLVDALLRNDQLYTPRRKVNSAKG

SEQ ID NO: 66493 - protein, 342 aa, unidentified
MNIIKVVGIDLAKNVFQVCVWLTDNSIAWNKKVSRQKLLDTLRAFPPNTLIAMEACQGAHYWGRTLQAMGYAVRLIPTQYVKALCKNQKNDANDALAICETSCRPGIHFVPVKTVEQQDIKALRSARQLVVEQRTALVNQIRALLVEQGSVIPAGIQQLRHALPDILEEGNNALSFVLRRLLHSLQEDMQRFDVRIYDMDKEIQAVSSQQSGYAHLLTIPGVGPLIAAAFVSEVNAEQFQNGRQLSAWCGLVPRQYSSGGKNRLSGMTKQGNRHLRTLIIHGARAVMRCCQKREDVLGGWLRKLIARCGFMKATVALANKLVRIIWRILKDDVDFMMKKAVN

SEQ ID NO: 66494 - protein, 402 aa, unidentified
MNAVGIDVSKGKSMVAIMRPFGEIVSAPFEIKHTASGINSLVELINSVEGESRIVMEHTGRYYEVLAHQLSEANLFVSAINPKLIKDFDNDSLRKVKSDKADAVKIARYALDKWQNLKQYNVMDELRNQLKTMNRQFGFYIKHKTAMKNNLIGILDQTYPGVNTYFDSPARSDGSQKWVDFASTYWHVDCVRKMSLNSFIDHYQNWCKRKKYNFSQSKAEEIYGKAKELVPVLSKDAITKLIIKQAVDQLNSASTTVESLRTLMNETASKLPEYPVVMAMKGVGTSLGPQLIAEIGDVSRFTHKSAITAFAGVDPGVNESGTYEQKSVPTSKRGSADLRKTLFQVMDVLIKTHPQDDPVYQFLDKKRAQGKPYYVYMTAGANKFLRIYYGRVKEYLSSLPES

SEQ ID NO: 66495 - protein, 324 aa, unidentified
MKRSIKYVALDVHQATSVTSVRDEGGRVIARTVLPTESRVLVEYFRTMRGTIHVTFEEATQAQWLHDLLVPVVQRVVVCDRRGKSQQGNKGDQPDADELSDLLRCGGLRAVHHGSADRAKLKELARAYENLVEDSTRVMLRLKALFRARGIKTPGTRVYRGDQRREWLKRLDDPGARFRADALYAELGVLQELRPKAKTAMLSEARKDRAWAVLRTIPYLGPVRVALLLARLQTPWRFRTKRNLWAYAGLAVVTRTTAEYEMEGRGRCAAGDDRCRRGDSIGITIGWCRPCSKAQRPPRQADPETYRSGIMAYSRTGCARNSLE

SEQ ID NO: 66496 - protein, 350 aa, unidentified
MREAVYIGIDVAVKFCVLVVVNAAGQVLHRGRVATTELELQKAVAPWGRRAQVAIEQGELAGWVCRTLAPGVGRIVVAEPKHLAWIFRDPNKNDAIDAEKLAQLLRLGQIHEVYQAQQDDRWVFKRLVQHYEAMTYRQSVLKVQIKSQLRQEGVLVRGESVFEPAHRQELLGRVKSEAIRGIVKDQFEALEALLELQRKARRRMAQFGRRYPELRRLQTIPGFGPICACRFVAYLQTPGRFANKRKLWRYARLAVVQRFSGGVPLGRAHLDRSGCGSLKDVSRKVFQGAIRRREPNALKQFYVESVKKTGNEKHARLSTQRKIFSIALSLWRNQTEYEEKGLSSAERRTG

SEQ ID NO: 66497 - protein, 409 aa, unidentified
MLFVGDDWAEDHHDIELMDASGRVLARARLPEGAAGMARLHAMIGEQLGDDAEDAGVAVGIETDRGLWVQALVAAGYEVFGINPLQAARYRQRHSVSGAKSDPGDSHVLADMVRTDSHQLRLVASDSEGAQAVKVVARAHKTLIWERTRHVQRLGHQLRDFFPAALEAFEDLDAPDTLELLAKAPDPASAAKLTTAQVSAALKRARRRNISDKTAVIRAALRGDQLTQPPAVTAACAAVIRSLVAVITTLGEQIKVLEKQVDAHFSQHPDAEIILSQPGLGPVLGARVLAEFGDDPHRYASSKARKNYAATSPITRQSGKKKTVMARYVHNDRLRDALDGQAFAALNASQGARACYDAHRAAGAGHRAALRHLANRLVGILHGCLKTRTLYDEAAAWPQIASQEIKTAA

SEQ ID NO: 66498 - protein, 420 aa, unidentified
MSDPEQWWQQHRVFGAVDWASEKHSVIVVNQAGKIIEEFEIEHSALGWKKFREKLQAYGSIPFAIETSRGAAVEQLLEAGMIVYPLNPKSAQAYRERKAPSGAKDDWLDAWSFADALRVDGHGWKALRPEQALIKELRLLCRDEVSLIQQRTAFIEQLRHALAEYYPAALEAFEDWTSVSAWMFLERFPTPHELAKAGKRKWQNFLHSRRLWGSNEGTRRMEIFARAIEFAGSLPTVKAKSLLALSLVQMLFAIEKQLAIYRQRIEELFARHPDHELFGSLPGAGPKIAPRLLSEIGDDRQRFDDVQALQCLAGTAPVTKRSGKKRKYCHVHQRWACNKHLRHVLHLLADKSLSRCVWAETYYQFHRQKNQSHASALRRLANRWLKIIYKMWLDRTPYEPELHHHNQLKHGSWILQLKQP

SEQ ID NO: 66499 - protein, 367 aa, unidentified
MEKVTSTKFGCYYYDPGEERMNKPEYYVGIDVASVQFTAAAGCMDQKWKIVVPAVEFPNDYDSFGQFLHWMQAHKLHPDNAIVCMEATGVYNEVFAHFLVVNHYTVAIEPPLKVKRAFAPVGHKTDPVDSCQIAEYAYRYYDELSPWQPRNEVLEQIQTLLTTREQFSTQCAAHHNALKALKRKKVRTPLAEKAHQDAICELRQHIKTLEKEIERLIDQDPDFRNMVNLLLSVPGVGLLLAAHMLVLMQSASQPPDAKQLAAFIGICPYEHKSGSSINSKPTSRHYGPPALRKLIFLAALSVRTHRQQFKLYFLRKIAEGKPKKLVINNIANKLLKIICAVVRSGTPFVPNYHSINPGLLKKALTVS

SEQ ID NO: 66500 - protein, 360 aa, unidentified
MSHERTFVGLDVHAWSVVGHALDGLTGEVWQRKLSPDPVGILAWVSGLPQPVKVAYEAGPTGFGLARFLRGHGVACSVAAPSKLQRPSGDRVKTDARDAEHLARLVKLDEIVEVTVPSVQQEAARDLVRAREDVRGDLMRARHRLSKLLLRQGILWTGGQAWTGRHDVWLRSQRFDLAGRQLAFDSAYETMALTLDRRNRLDTAIIEMAEHSEYTDLVHRLGCLRGISTLTGFGLAVEVGDWTRFSGSTIGAFLGLVPTEYSSGQTRSQGSITKTGNSHARRLLVEAAWHHRKTYRNPGQVMRTRWDLAPAVARVRGHQGNQRLHQRWEGFTVRRKKPVIANVAVARELAGWAWSLAVME

SEQ ID NO: 66501 - protein, 383 aa, unidentified
MRSVALDLGVKETSYCEVSRGLVVGRRTVSELQGLEDLLGPGSKRATVAIEACREAWYVHDVLRAWGHEVVMVDTTRTKQIGMRHHGRKTDRIDAELLARAVEHGGIPVAHVLSPARRELRDILGVRRALVETRAQYITSIRGLARSRGERLGSCAADDFVAKLAKTQLRAETLQTIDPLVSALQRVCVELARTNARLAELARQEPAIERLTTAPSVGLVVAAAFVSVVDEARRFEGAHQLESYLGLVPRETSTGGKRKLGSITKQGNGYMRQLLVQSASGLLRVGDADDPLRRWGRELVARRGRKIAVVALARRLAGILWAMWRRGTVYEPARLGLRAPSRQDATVEALGMKTAGKKAHYRSRDNARALRTAQNADRKEADA

SEQ ID NO: 66502 - protein, 345 aa, unidentified
MNNYDHYIAVDWALHNMAVAHMTSQNQKIKVVDVASDIKELKAFLMSLRGSKALCFEETTPSHWLFVELKDLVDEIVVCDPYRNHLLSEGAKTDKIDARKLVQLFAAGLLKPVFHSLDPLMYLRKLVHAYQCVVQAGVRLKNQRSALLRGLGLDRDESVPSDRIESFIDEGLQCGIKNYEIEKKRYEAEFRKLRIKMNQIKLLQTIPGIGLIGAIKILAIVVDPRRFPHSGHWLSYCGLVKHDRISGGRSYGKKTPRHNRTLKSVFKTAALSCLDPRIGLYDKVLGDNTGVLKRYYNSLIDKNKAPFNARNATARRIAVLALGVLKSNQPFDDRWRSYELAQPAL

SEQ ID NO: 66503 - protein, 351 aa, unidentified
MKVTTIGIDLAKDVFGLHGVDGEGRVTFKRRLVRSRLLEFLSQLPRCLVGLEACSSAHYWAREIERLGHRVRLMSPRFVKPYRKSDKNDANDAEAICEAVTRASMRLVPIKSEAQHEVQALHRVREQLLKSRTALVNQVRGLLAEHGVVAPHGIARARRLLLGILADPERHGLSGLFRETLQEMAERLRFFDERVGAYDDRIERVFKEDERCRRLAKVEGVGPLVATAVVAAVGNASEFKSGRELSAWLGLVPRQHSSGNRSQLLGISKRGDRYLRTILIHGARAALRRADHQRDQRSRWAMRIKLARGYNKAAVALANKNARIIWALLTRGENYRPAAISVASAGSVESV

SEQ ID NO: 66504 - protein, 403 aa, unidentified
MPGHEHLPGGAMRISVGIDIAKATHWVTAIDADGVVHIDRKLENRPSAIAALVDELAGLGDSPRIGFDVVGGIAAPAEAMLAEAGFALVHVPGLAVNRARQGTVGGEQKSDPRDARIIAEQVRIRQDLRPIEPATELDLELRLLVGRRRDLVEAQTQRIARLHDLLVSIFPDLERSLDLTTKGPLVLLCKFVTPAELRAAGKKRLIRHLKAAGGLPNVEALADRALAAAAEQTIAVPAERITARLVKELAAEALATRTRVISLDRELDDLLDRHPDAALIRSLPGMGAVLTAELIAEAGSLSRFRSADALAAAAGIAPVLRQSGKTRFLRRPTGGNKSLKRIFYQSAFCSLGQPDSRAFYDRKRREGKRHHQAVIALARRRINVLWAMLNNRQPFQHNFKLAA

SEQ ID NO: 66505 - protein, 421 aa, unidentified
MQVLYERCAAVDVGKDVIAVAVRLPGDGPDRRATHKRTFKTFYGVLREAARWLSSLGVTHVAMEATGIYSMPVYHALIEHGEFTQVLVCNAGHVKNVPGRKTDLADAEWLVRLLECGLLRGSFIPAADIKAARDVIRYRAKIVQSRTSELQRLGGVLQDAGIKIDSVASSIATKSGRAMIEALIDGERRPAVLADLARGKMRSKIPDLAMALEGRFGDHHALMCRLHLDHISHLDAMIAKLDAQIEAMMQPFRAQRDLLTTIPGIGPLAAAAVLSEIGADVSEYFPDAAHLASWAGLCPGNHESAGKRRSGKPRHGNQHLQPVLVECAWAAVRRDGYLKALYHRHVMKWGGYRSQTAKKKAIIVVAHAILGVIWHVLAGGTPYDELGADFFTRRLDPERETRRLIAKLEALGHQVSLQPAA

SEQ ID NO: 66506 - protein, 347 aa, unidentified
MRTDVIIKQIVGIDIGKDSFYACYKVKSDSNKVIIKGTKSFDNTTAGMRSFYDWCLKRNKTPNSPIIFVMEATGVYYEELAYFLHHNKKLVSVQLAQKIKYFAKSCNLKTKTDKVDSVMIAQFGIEKNLIGTDLWAPPSKDFKIIRDLSREHTNLVKAQTGAKSQLHALNTAHNTYKEVLKLKGKEIKFYQNQISLIEKEIVRLVESNPDLKDRIAKIETIKGIRFLTVIKILAETNGFLLFNNIRQLVSYAGLDVVEKESGKYRGKTKISKKGNARIRSALYMPAMSASLHNINLKEFYNRVNAGRTIKRQGLIAVMRKLLILIYILWKKNERYDENYLKVPMVTG

SEQ ID NO: 66507 - protein, 342 aa, unidentified
MSITREPEQLKGPRRPNTSAGILSLYGEEEQMATRSGTYVGIDVSKDRLDVAMLGERQARQVDNTSQGIAQLAEWMQELQPELIVVEATGGYQRAVVETLFWAGLPVAVVNPARVRQFARACGLLAKTDKLDAQVLAVFGQRVQPRRYVGKSEAEKQLSALLVRRKQVEEMLKAEQNRLRTISPSLHGSLERMIAVLKEEKKRLDEEIRGLMNEQKAWQEQMEILDSAPGVGVVTTATLLADLPELGTMDRKKIAALVGVAPMNFDSGRKRGYRKIKGGRTDIRSVLYMSTLVATRHNPLIRTQYQHLLKRGKLKKVALTACMRKFLTILNAMVRDRQPFRA

SEQ ID NO: 66508 - protein, 417 aa, unidentified
MDVLVTRCAGLDVHKKSVMAAVRAPGPDGKRLQVVREFPTFTRNLVQLRNWLVSQGVTEVAMEATGVYWQPVWHVLEDMPGVELKLVNAEHVKNVPGRKTDVSGAAWLAQLLECGLLRGSFIPEPAMARLRDLTRYRKKLVEERAREVQRIQKLLETAGIKLDSVATDILGKSSRRMVEALIAGERDPDALAELALTRMRAKLPALRLALEGRFSEHHALMARLYLDHSDHLSKAIDRLDAQVVSETAPFAQQIDRLCTIPGMGRRVAEVVIAEIGVDMSRFPTAGHLASWAGMCPGNHESAGKRRSGRARRGNDDLRTALCEAAWAASHTKDTYLSAQYRRFVARFGKSNGGETKAIFAVGHTMLVIIWHVLAHSGNYEELGFDYFEKRNETEAYKRRLVHQLEKLGLKVTVEPAA

SEQ ID NO: 66509 - protein, 389 aa, unidentified
MKIYVGIDIAKLNHFAAAISSDGEIIIEPFKFTNDADGFQLLVSKLESFDKNSLIIGLESTAHYGDNLVRYLVTELYQVCVLNPIKTCQMRKNNIRKTKTDKVDTYVIAKTLMMQDNLRFVSFFDLDMMDLKALGRFRQKTIKQRTRLKIQLTTYVDQVFPEIQYFFKSGLHQHAVYALLKEAPSPKEIASMHMTHLANLLKVNSHGHFTKEQAKELRVLAQKSVGANDSAISIQITQTIQQIELLDSQLEKIEAEMTDIMKFNDSVIMTIPGIGYINGGMILGEIGDIHRFSNPNKLLAFAGLDPTVYQSGNFQAKTTRMSKRGSRVLRYALVNAAWNVVRNNATFKAYYDAKRAEGRSHYNALGHCSGKLVRVIWKMLTDNVEFNLK

SEQ ID NO: 66510 - protein, 398 aa, unidentified
MGKLECVGIDVSAKSLAVASRGQSGHIHVREIANTPAGHKTLCKGLGKGPSRVCLEATGIYHLDLALALHRAASVEVMVANPRAVHDFAGALMTRGKTDASDAEVLLAFAERMPWQPWRPPSSTCFELRTLCRHTVSLRQQLAAEKTRMARAKASESISVWVRDDIGEGIGQLEERIEKLQAAALRLVANDAVLATQLRLLRRVPGIATTSGIQLLSELCVLPADMTAKQWVAHAGLDPRRHQSGSSIDKAVRISKAGNRYVRRALYMPALVALHRDPHVGAFYDHLLERGKARMQAVVAVMRKLLHAAWGMFRSGSTWQGKCFYAGLVETCDSVPRPSRSPEPPAERRPPIAHKEAAPSGAVLDKGAVGCDGRGAIHGREAPSACILPLSGASAVVG

SEQ ID NO: 66511 - protein, 350 aa, unidentified
MIIIGVDFHPGLQQIASVDTVTGEFEEKRLAHREEAEKFYRDLASRGAQIRVGMEASGYARWFERLLAELQIELWIGDASEIERKRARKQKTDRQDAQHILQLMLKDDFPKIWVASWENRDLRQLLWRRHRLVQARTRIMNQLQAVALNEGLQCKKRLWRASGRQQLESFRLGPWASRRRRDLLELLDRLSPTIEELSQAIEQEAERCPEAQRLMTHPGVGPLTALAFVLIIGQAERFQCGKQVASYLGLVPLEKSSGKRRRLGHITKQGSSIVRFLLVEAAQAAVRGNPQWRSQYLRLLMRRGRKTAKVAMARRLAIRLYWMWREKQDYRQSRSFGSHAGQPGNRDGVH

SEQ ID NO: 66512 - protein, 382 aa, unidentified
MDTVAVVGMDLHRDFSKAVMMTEEGKVIESRNVWHDTREEMAELFGEFDPGTEVVMEASFNWPWIADLAEKAGLKPHLGHAMRCRELAKGMSKNDRKDATFLARLWLAGDIFPEAYLAPREVRARRSRFRTRALLVKIRTEVKNSIHGILHKNGIRNDEVTDLYGKKGRKWLKGLELSPEAREEMEAKLAVVDDVDKHITRLEEKLWAELPTDPRASLLQTIPGVGRLIADGFLAEIGEIGRFPDRRALASYAGVLPMDNRSAGEEHGKRTNPRCAKFLKLMAIEAVRGSVRTSGRMRSLFERVRAKNPDKPGKAVVAVARELMEVVHIVLSRGVPYEEAPVRPGSKEGVVTGHSEDRRTRGPRRASQVGRSAGPEKIQAAK

SEQ ID NO: 66513 - protein, 322 aa, unidentified
MSIKRILVNQIDTNLEYEVIGIDLAKNCVSAILLTTDGEIFGIDRLDYQELEKSAQELSPTIFAMEPCTEMNYMVQKLEDWGHHCIVISGKNVKDYVESHFSNQKTDLNDAQALAFLTKDTQLRTVKAKDPEQLKYASLTTLREQYVKQYRQTMVSLKGICQVWGLSISKGITGKARLKDMIEDHAAFPAELRTALVGMVVHAQTVQKNLKSVTKILEELAKKDKACQLIQTVPGLGTICSCRLRATVGDIKRFEHPKDFPAYFGLAPRSMATGHNEKKGKITHRGDKTMRSLMVQGAGNVINQATKGNLNSKQLTKWILKK

SEQ ID NO: 66514 - protein, 360 aa, unidentified
MAKARSLVGLDVHATKVVAAVLDAETGQLQSFSMSGESEKAAAFCAGLPRPVRAAYEAGPTGYGLARELAKHRVECVVAAPSKIPRASGDRVKTDRRDAEHLVRLLLAGKLHAVRVPGGEEEALRDLVRAREAVRVDLMRCRHRLSKLLLRHGIRFDDGNAWTERHRQWLAQVALDWPAAQTTLLDCRGAIDALVHRRDGLEREIIALLPACPWTVQVARLRCLRGIDTLSAVGLCAEVGDFARFARAEQLSSYIGLVPSENTTGQQRRLGSITKTGSGHARRLLVEAAWHGRQRPRIGKALSDRQDGQPPEAVAIAWSAQQRLHRTWTRLEARAKRRTIIAVAAARELAGFCWAICQIE

SEQ ID NO: 66515 - protein, 310 aa, unidentified
MDRIIVGIDVSKDRLDVAVRPSGEAFAVSRNAAGIEQLVARLRKLSPHIVALEATGGFETVVVAALGAAGLPGAVVNPAQVRAFAKALGQRAKTDPIDAGVIAHFAEATNLEPRPLPDEQTRLLADLVARRRQIVAMIGAERQRQQRLTAPRLSKSIARLIKALEKELASLDADIGDAVQGSPAWRAKEELVTSVPGIGPVISRTLVADLPELGQIGHKQITALVGYAPFTRQSGKWRGKSFIGGGRTAVRAATFMGAMVAKKHNPVLKAFFDRLVAAGKPKLVALIAVARKLLIILNAIVRDNRPWQNA

SEQ ID NO: 66516 - protein, 323 aa, unidentified
MNKDIKYFGLDISYLVFDVTDSNGNYYQFKNNEFGFKKFTKLLNSESHCVMEATGYYHYQLAYHLLESGIKLSVENPLAVKRFIQMKLSKIKTDKSDSKLICEYAEQVDLKLWQGSSKNEIECLQIARALSVYTKQSTMLKNKLHGEAVLGNPSNVVVRSLKRSLKQLQKEIKSLEDTLLIFVKQTHQDLLTRLKSIPGIGPKTAIMLVVLTGGFDRFSSASELCSYAGLTPVIRQSGTSVKGRSRISKIGNQKLRNLLFMCSFNACKYNKACRDLYERIVAKGKSKKLALIAVCNKLLKQAFAIAKSGLIYDDTYKSTLVKN

SEQ ID NO: 66517 - protein, 426 aa, unidentified
MFVDSSDDEQIIERVAALDIGKAEVVCCVRLPAQGDGKRRVQEVSTHSTMVPSLCELANRLVGLGVTRVVMEATSDYWRPPFYLFEAHGLEPWLVNAKDVKHLPGRPKTDKLDAVWLCKVAEKQMLRPSFVPPADIRRLRDLTRYRADLVGVRTAEKNRVEKLLEDACLKVSVVASDIFGVSGRTMLNALITGQRDPKILAAMARSRMRIKIPRLEEAFAGLSLGTFDDHHQFLLATMLARIDAVTADIAALDTEIGDQLAPFADAVARLDEIPGIGTTAAAVIIAEIGVDMSRFPTPAHLSSWAKFAPGVSSSAGKTKGNGSTGHGDHYLARVLGEAAVIVGRTDTFLGARYRRIARRRGKKKAIVAVGRSILVIIWHLLSDPDTRFCDLGSDHYDRHVNTTAKRRSHIRQLEALGYKVILEPAA

SEQ ID NO: 66518 - protein, 487 aa, unidentified
MNSIFRKRNPDVQKLFDSAGRPEKVMCIPFDYAKKTHTAMVCNGRGDCLRGAFNVENNRKGIDYLLGIVKGLCRKHTINITHVFFGGEDGGAYSFNFIHALVSRGFLVLGINSQQAKKERESTTASSDLIDTVGVAGMMLKMRGRTIGEATAQVHSIKRLRRQRGALLKAHSACAHRVYRVVDELFPGFLDVELSGVMPFGKASLWLMDENFSAASILARQRPALVRHLRERQLRDPEGAADKLKELAQIALPPPECMIPALQRSLHEEMAVYGLLDSSMNSLDTDIAKLLAHTPGTMLTTIPGIGLSWAPGLYAELGDPLRRRNVHSMAALGGIVPRSKQTGGPEKPAVTGHRGKNCSAFLKHILMSGAVSISQYGHPEMRQAYQTDKDMGRDARARLAQRLLRASLYLIDNQSFFLPPSLHRGATRDQLREYYAQAWPKVLIKWRDSGAIKDAVAEGSPLRRWRDMAQELYGLELDLTSPQTGRK

SEQ ID NO: 66519 - protein, 351 aa, unidentified
MLYAGFDLSRKRLDYCLLDREGLEVDTGASPPDLDGLACLVGKLTRHGHPIRGAIESMTGARFVHDQLERAGFEIEIADAAKVKGLAPLACKTDKIDAWVLAELSRRELVPAIWLPDPEVRGERERARFRLYLVRKRSSLKNRVHATLMTHGHACPVSDLFGRSGRELLARLALPGPWAGTVAASLRLIDELEREIAACERELRELGAEHRYVPLLTTVPGIAWVLAYTIAAEIGDIGRFSSPRKLAGYTGLCPRVYQSGESDRRGPLSKNGPRYLRWALVEATTHACRHPLYRERYERTRRRLGRQRGPRVAQVDLARRLSEAIWHMLTHDRPFAPAGAAQALASTKALG

SEQ ID NO: 66520 - protein, 397 aa, unidentified
MIAIGIDVSKSKSTIAILNGDGTIRVKPFDVHHVADELQALVDYIKMTSEPPTILMEPTSHYHYPLLKAFQEADLPVCLINPYQMKKYGDTELRKAKTDKRDSLRIAQYALEKSYSLVPYTPADQKYDDLRFLSRQYGQRISTLTVAKVQLLSLLDETMPGITTILPLKSRDPDNCVLLRFIKRFKSFDVIRKMGKTRFLDSYQVLVKKTNDRFAGAKGLKIYELAFNSITTRGENPLSAMTQDQCVDLVSTSQKAADEINLQMRIIAETIPEYKVLRSMAGVGDRLGPIILGEIGDIRRFHSGKALNAYAGNDAPPYQSGQFESRNRHISKRGNPALRKACFEVMQALKLTKPQDDPVYLFMLKKEQEGKPYNVAKMAAVNKFLRIYYARAMELYK

SEQ ID NO: 66521 - protein, 427 aa, unidentified
MPHRIAGIDVHKRMLAVVVSDVEVADEYQFERRQLGSNPAQLRALAEWLLEQQVQEVVMESTAQYWQPVWGALEQYWKPPCQKSEGARPRSGSLPLAQAQSNRARRGRKRDFLDAERLVRRFVANELVLSFVPDPEQRLWRTLMRRKYQMTRNRVQLQNQLEALLEEAHLKLSSLVSDLLGASARRMLRALADGETNAVALAALADYRLQATPAQLQDALGACAGLDPTYRRLLSMALEELQLLEKQIGQLEQEMADRLRPHQDAVQRLAEVPGLGADSAQQILAEVGATAATFPSAGDLASWVGACPGDEESAGRSYSHRSPKGNRQMRRLLNQAANAAVKLKGSIFALLYRRYVTRLGHNVTIGIIAHRLCRLIWKILHQGIRYEERGPAASEQSKRQRARRMIRELRSLGYRVELPNPQPAVPA

SEQ ID NO: 66522 - protein, 332 aa, unidentified
MLYCIGIDVSKASLNIHISKNSQDLKIDNTVAAVKKLYTKLKKIYKKEVEELIFVFEPTGSYSELLRKFCADKSIQCFIINPKQFSNYAKALGVEVKNDEVDARVLAQAIVLAKPSQIKVPVYDKDVEQIKELMSFYKFTSKQTAQLKGHLESLVAKAGDSFSIKELKKSIKASKEREKRIIEQVHQLIQANPTYKKSYENITSIMGVGQIGGIALLHLFLKYPEANQRQITSLTGLNPVYRQSGSSLQSSYRISKSGSVFYRGALFMGVMTAVRYDENFKAFYERLKANGKHTTQAQIAVMRKIIIVAHSLYKNDAKYVKKVGTLEVETMD

SEQ ID NO: 66523 - protein, 347 aa, unidentified
MRFYTNQHPFYCGIDLHARSMYVCIVRHDGDVLLHRNMKAAPEPFLKAIAPYREGLVVAVECLFTGYWLADLCAQEGIAFVLGQALYMQAIHGGKAKNDRIDAQKIAVLLRGGLLPQAYVYPAQMRATRDLLRRRIHLMRKRAELFAHIHNTNSQYNLPEIGKKIAYKANRDGVAERFADPAVQKSMEVDWGLIAHYDQWLTGLELAITKAAKHHDANTLYLWQTVPGIGQILRLVLLYEIHDIDRFPRVQDFVSYCRLVKCAKESAGKRLGTSGKKIGNAYLKWAFSEATVLFLRNNPVGQKHLARLEQKHGKGKALTILAHRLARAVYYMLKCQTAFDMKKFLHG

SEQ ID NO: 66524 - protein, 340 aa, unidentified
MVLIGIDPHKATHTAVVIDDAEHELARIKVKADRSQVAALLEFADEYRPRRWAIESAGGLGFLLAQQLVRAGEDVVDVPATLAARVRLLGSGRGSKNDPNDALSTAIAALRDPHLRTVMVEDHAMVLRLLADRHQDLTSLRTQAVCRLHALIAAMVPGGVQRRISADGAASRLRTIHPDNTVEAARKEMALELVADVRRLDKNIVEVKKRITTAVAASGTTVTEIYGVGPIVAALLIGHTGDITRFPTKGHYASYNGTAPIEASSGRVVRHRLNLRGNRQLNHALHMAAVTQISRDNPGRAYYLAKIEDGKSTKEARRALKRKISDAVFRQLRADARPQT

SEQ ID NO: 66525 - protein, 465 aa, unidentified
MNRSTASASRASNRLLVGDDVSSVRNDVCILAATGEVLLNHQPFVNDLAGYVALRDTVLDVFQRAEAAGVDFAGEATGWYWFHTFYALAHDEELNGLDLHLSLFNPRLTHAFKKAMARRDHSDPKDARVVAERTRFARAEHPPVLDDTWLGRRLLTRHYYHLSHALAAEKTYFSTFLFLKASAYRQLKLFTDVFGVTSSALITQYSTIQELAALPLAELEGLLKTLSHHHLPDVEEKAHRLHAVAVNSFPVPPNMLEPLNLVLRSTLAHIRFLEQQLAETEAAIECAFANVPELGWLMSIPGMGLILATCLLAELCPFDRFFEGTAIDRKTGRPRARNARDAEAAVAKWVGLWWPRNQSGTFEGEITRMPKDGNRYARYALIQLANCLREHSAEFAAYYSRKHAESKTHAHKRALVLSARKAIGLIVALLHTGQLYRVPEPYREILSPHQARGQAAASSTAATDP

SEQ ID NO: 66526 - protein, 402 aa, unidentified
MKKVCGLDVHKDSIFCAIYNGENYSQVKEFSTMTPNIYSMGEYLQSEDVEDVALESTGIYWIAVWDLLYEMGFNLTLVNPYFIKQMPGRKSDVKDAQWIATLLHKGMMRGSFVPPPVIQELRVYSRKQGKLKQQVTRVLTVMDGILVKSGIRASSCLSSITTKSFQCIVEALIAGWSDPGYLVSLVYGNRKNKQSGKLKEALTGNLKAHHRQELSWAKQEYEMYQVQISECLSEMRRICDEHFSVMVKLLQTIPGISQVAAMTIIAETGGDMSVFESSDKIVGWAGLRPRNDESAGKYKSTATTKGNKYLRSILVQASWAASRMKGSFFKDKFQRLAMRKPRKKALIAIARKLLVVIWNVLQYAKEYNPTLVPVQDPVKMKARLAYHKKEYEKAANLLNITV

SEQ ID NO: 66527 - protein, 321 aa, unidentified
MTYVGIDVSKATFVVAYSSAKSSETKTFKNTTKGIREFIRTISPEENHCVLEATGNYSMLLVYLLSKAGFTVCMENPLKIKNFARVMLSVVKTDEIDARLIDLYGERMQPAPFKLRSDSLLLLKQKRTVLRQLKKQLTANRNLEGSLKVLPFIDSKCKKVLEKTIKFLEKQIEEMEEELTSLAEIEYKKQMDLLTSIKGIGATLAAALIIATGGFTYFDNAKQLTRYLGLSPTYQQSGTSVNVKGHINRNGDAYLRSQLYIGAMASLRCNTECKACFDRLRSNGKPGKLAIVAVANKLIRQAFAVVAHEKKYIDGYKSVKP

SEQ ID NO: 66528 - protein, 369 aa, unidentified
MFTERTSVGLDVHARSVAGAGLDTETGEVWEKRLLPVSRDIVSWLHQLPAPVAVTYEAGPTGFGLARDLTAAGFRCEVAAPSKIRRAPGDRVKTDGRDALLLARLLRMDDLTAVTVPSVEQEAARDLVRAREDCRSDLMRARHRLSKLLLRHGLVWDGTNAWTGAHDTWLRRLRADTSWSAGTRSAFDAGYETVVATRARRDRLDTQIAEMAADSEFTPIVRRLGCLRGISTLTGFALAVEIGDWTRFSGASIGAFVGLTPSEHSSGSTRSLGSITKTGNSHARRLLVEAAWHHRSGYRPGKTMHDRWALAPANAQARGDAGNRRLHRQWLRFTARQKRGTIAAVAVARELAGWCWSLATLDREDLVTS

SEQ ID NO: 66529 - protein, 371 aa, unidentified
MTSIIYVGMDVHKESYSLCCYSMETQTFFSECTLPAVPKNIIAYLKRVATRQDHPCEFRCGYEAGSLGFSLYSFLHEADISCVIMAPTTILRNGKKVKTDRLDAQQLAQALAFGGYRAVHIPTEEDGQVREYIRMRGFYKEQLKKTKQVITSFCLRHGLVYSGTKKYWTAVHRNWLQHLQLPGLLQETLEEYISAYDSLMQKLERVEQRIEEVAHQDSYQESVGHLCCFRGIATMTAMTTLVEIGDFHRFATAKQFTAYLGLVPGESSSGGSIRRLSLTKAGNRIVRTVLIEAVQSYTRGKVCLKSKAVRARQKGQPAEIIGYADKATHRLMKRWYTMQARGVSHNVAKAAIARELACFIWGMQTGRIGLQ

SEQ ID NO: 66530 - protein, 329 aa, unidentified
MSNCIGIDVSKATINVHISKTNQDLLLDNNLKSFRSLFSKLKKIYKKDIENLIFIFEPTGSYSEPLRKFCSDKNIQCFIINPKQFSNYAKALGEEVKNDINDARVLSKALTLAKDGEVKIPVFNDDVEHIKELMSFYKFTKKQTTQQKNHLESLTSKDGDKFSIKELKKSIKESQAKELRIIEQVQTLIDSTDEYRIAYENIISIKGVGQIAGIILLHLFLKYPEANQRQITSLTGLNPIYRQSGSSIQSGYKIAKSGASLYRSVLFMSVLSAVQHDKNFKAFYERLKSNGKHTTSAQIAVMRKIILTAHSLYKNNSKYDENFNSQKVS

SEQ ID NO: 66531 - protein, 404 aa, unidentified
MYPRCAGLDVHLRTVVACIRIAEGRTLRQEVRTFATTTSGLLALSDWLSAEGVTHVVMESTGVYWQPVWHVLEGTFELTLANARHVRNVPGRKTDVNDSMWLADLLAHGLVQGSFVPPAPIQEARDLTRTRTQLTREIAKHTQRIQKTLEKANIKLETVLTHVLGVTGRAIIRAIIEGQTDPDALLALRRGKIKATVDEMREALLGRPTESHRLLLRIHLHQIEELEKSIDLIEHRLEEVLRPFRREFELLLTIPGVSTTIASIILAEIGADMSRFPSSAHLVSWAGLCPGNDESAGKKRSTRLRKGDTWLKTALVQGAWAATRKKNSTLRAQYYRLKPRRGGKKAAVALAASMLTSAFHMLTRAVPYAEAAPITDPRRQKETAKRLVFRLKHLGFDVQIRPAA

SEQ ID NO: 66532 - protein, 322 aa, unidentified
MSVTVLGIDIAKQKFDAALLVDGKTKHKACKNSAEGFETLMVWLEKQGIQKVHACLEATGNYGEDLAIYLHEAGHIVSIVNPARIKGFGQSELIRTKTDKIDAALIGRFCLAMKPGPWIPPSPEIRSLRALVRRVDSLIDMRSQEKNRIGTAHESVIFLIKEHIAYLNQEIEKIRQQIADLIGQDPNLKRKHDLLDSIPGIGKATIPHILAELDDLEKFDHVRQLVAFIGLAPKETLSGSSIKGKPRLCKIGHARLRKALYMPALVSIQCNPVMIAFYNRLKDKGKNGKVIVCAIMRKLVHVIFGVLKSGKKYDPNYKPAFA

SEQ ID NO: 66533 - protein, 312 aa, unidentified
MKTDDSVGIDISKDFLDIHRLRSGKVARFPNAPSGFRSLSKWLGRDIPTRVIFEATGPYHRCFELAFSGKLPLVKVNPLQARRFAQACGTRVKTDAVDARMLASMGRALTLEPDRPIDGKQQELKELFSARGGLIRDRSRLLNRLKTQSLALVCRQTKARIDQITRQLKVLRFDIDARLQDCPQRARAQTILRSIPGIGEIAAAAILIEMPEIGTLQKKRPASLTGLAPMTRQSGKWRGKASIQGGRKHLRDALYMPALVAARFNPDMRKKYEAMIKQGKPQKVALTTIMRKLIELANTLVKHDREWVQKSA

SEQ ID NO: 66534 - protein, 402 aa, unidentified
MAYDFVIGVDVGKYFHHACVLDPQGRQVLSKRINQHESSLRKLFGQFIADNASVLVIVDQPNNIGRLTVTVAQDMGADVRYLPGLAMRQLSRIHVGNSKTDVRDAYVIAHAGLNLPDALRSVDRVEEVFIQLKVLNGIDEDLARAYTRLINQMRSALVGTYPAFEHVLRGQMIHRKWILHLLAKYGGPTKIRRIGRTRLAAFARSHKARNPEPVIDAMLAAIHAQTVSIAGAEYAELGVAMSAKDALAKLENRKEIEAQVLKLIQDIPQTEILLSMPGIGPRSAAQILMTAGDMSDFPDAAHLASYAGLSPRTNQSGTSIMSSSPNRAGNKKLKNALWQSSFASIRFHERSRQFYERKRKEGKRHNAAVVALARRRLNVLFAMMRSGELYRDISTVREAAAA

SEQ ID NO: 66535 - protein, 368 aa, unidentified
MEEDSTFVGLDVHKESIAVAMLAPGERVVSWQVPHEPTAVRRLAKRLQDAARGPVEACYEAGGSGFTLQRQLQAAGVGCTVVAPSLIPVKPGEHIKTDRRDARKLAELFRARLLTPVHPPTPAEEAVRDLCRAREDLKMDLCRAKRRLGTFLLRRGLVYRRARAWGWWHRNWLHGLRFELPIDQSVFDHYLGEVEHLEERVRTLDGQVEAVAAQAPYREPVGWLRCFRGIDTVTALTIVAELHGFHRFSGPRPLMAYLGLVPMESSSGERHRRHGLTKAGNAHVRRVLVETAWHYRHRPGIGSKLRQRRIGQPAWAIALADQAQQRLCRRYARLAARGKPSTKIIPAVARELVGFLWAALYLRKEAAR

SEQ ID NO: 66536 - protein, 349 aa, unidentified
MSHKLNAGSAVIGIDIGKNSFHVVGLDRRGAIVLRQKWSRGHVETRLANIPPCLIGMEACVGAHHLSRKLTSLGHDARLMPAKYVRPYSRGQKNDFRDAEAIAEAVQRPTMKFVATKTAEQLDLQALHRVRERLVSQRTGIINQIRAFLLERGIAVRQGLRFLRAELPRILATPCDALSPRMLRVIEDLAGDWRRLDQRIEDLSSEIEVLARRDVGCERLMGVPGIGPIISSAMVAAIGSGDAFTKGRDFAAWLGLVPKQISTGDRTILGKISKRGNRYLRVLFVQAAWVVLIKPQSWDRHGLKPWLEAAKKRLHHNVLAIALANKLARIAWSVLARGQAFEASKIQVA

SEQ ID NO: 66537 - protein, 312 aa, unidentified
MDAVIVGIDVSKDRLDVAVRPTGESFVVSRSGAGIDDLVGRLLALAPKLVAIEATGGFETIVAAGLAGKGLPVVVVNPAQVRSFAQALGKRAKTDPIDAAVIAHFAEATKPAPRPMPDETTRMLADLVARRRQIVEMMAAEGQRARRITDNRLKKSIARLHKALQKELTELDASIDDHVRGSPVWAEKEDLLASVPGIGKTIARTLIAELPELGQLDRRQVAALAGLAPWTRQSGQWRGKSFIGGGRKSVRRVLFLGAMVAARHNPILKQFRDKLVAAGKPKLLAIIAVARKLLTILNAILRDQTPWNPKNA

SEQ ID NO: 66538 - protein, 350 aa, unidentified
MAIIGCDLHSRYQQIAMLEFSEGEIVTRRLEHENGEAQEFYARLPKPSLIGIEATGYTQWFERLLARLGHELWVGDPAEIRARALRRQKTDTRDAEHLLDLLLGKRFPRLWVPTPEERDLRQLLRHRDQLVRMRTSVRNQLHFLAMSQGVCRRGKLWSPAGRRELAELGLDSWASRRREGLSQLLDQLEPKIADLDRAVEAEACRRPAVLQLMTQKGVGPVVGLAFVLTVGPVERFCNSRKLVSYLGLNPREDSSGGRQRLGHISKQGNSLLRWLLVEAAQTAARLDPELRRKYLRLKFRRGANVAKVAIARRLAVRLYWRLRQARAEASPVRTPGSPAHSMVGATPSTL

SEQ ID NO: 66539 - protein, 335 aa, unidentified
MKHYAGIDLSMETSHVCVVDADGCKVAAQCVDSTPEAISALLERHGPVERVVIETGRMTPWIARGLHELGVAIVCIDARQAHQSLKAMKANKTDPHDAAGLAQLARTGFYKEVHVKSPTSHGVRSVITARAHLVEARVRLDNTIRGLCATFGIRPGAGQGERFLARVQAAIAVPGLGEAVASLLRARTGLVDEIRRMDRELKAISIASPACQALMSIPGVGVQTSAAFAAAVDEAGRFKRSRTAGAYFGLVPRRHQSGELDWTGRITKQGDGTVRKLLYEAANSILTRTRQTFALKIWALKIAKRRGLKKARVALARRLAVIMHAMLRDGTLFEA

SEQ ID NO: 66540 - protein, 387 aa, unidentified
MGKVIIGIDPHKRSATIEIIDDREQLLAQGRFGTDRDGYQTMLKLGRQYKDRIWAVEGCNGIGRHIAQRLVADGETVMDVPAKLSARARMFAIGQGRKTDPVDAHSVAVVALHTRGLRQVIVDDTAVALRLLVDRRDTLGRARTDLLNRLHQQLLELVPGGAKRFLSAPQARALLNIVRPRDVVGRTRRQLASELITELAVVDKKIKAANVQLTELVATTGSTLLQLNGIGPSGAARLLGDIADISRFASSGHFASWNGTAPIDASSGDQQRHRLSRAGNRRINRVLHIMAIVQLRNDTEGRAYNRRKLAAGKTPMEAIRCLKRRLSNVIYQQMIKDATAVGTDPGGQTGASLKSSAASSIPTAGTSEKPLPGPAKTHFRTSLLAAS

SEQ ID NO: 66541 - protein, 401 aa, unidentified
MQQQAELMSGRVVIGMDPHKRSVTIEVMTAEETVVGGGRFGTDQAGFAAMLDCVNRLRPTVTDRVWAVEGCNGIGHHVAVRLLAAGEQVVDVPPKLSARARVFATGQGRKTDATDAHSIALVGTRMTGLRRVVDDEQLAVLRVLADRRRSLGEDHTRITSQLHHLLLELIPGGAKKDLSAAQAKALLAKVRPRDPAGKTRRRVAAELIGDLERIHTRKKAADKELRELLAATGTTLLDLHGIGPSGAARLLVEVADITRFPDRGHFASWNGTAPIDASSGDHVRHRLSRAGNRQINRTLHLMARAQLRNPTEGRRYYDRRKADGKTSMEAMRALKRRLSDLVYKTMLDDAITQTPRTGPGGQRGNDSDSSATGSQPQHRLFGQATPGPVENHPKPLLPKVS

SEQ ID NO: 66542 - protein, 344 aa, unidentified
MEPSMTEITRIAIDTSKSVFTLHGTDDVGRAVLRRNVRRRDLIRFFERLPPIEVVLEACGGSHHWGRTLTVLGHRVRLIPPQYVKPFVKRSKNDRNDAEAISEAASRPGMQAVPVKSTEVQAAAMLLSVRELLVRQRTQLVNALRGHAAEFGMVAAKGNKGLAELRSEIAADEALPEAAGHALQLLGQEIDKIEARLAQIEKTLIAQHKTNAQSRRLAEIPGVGPMSALSFSLRVDASQFQSGRHFAAWLGLVPKERSTAGKQRMGAISRAGNERLRQLLVLGATAVIRFAKPGRPGVSAWLIALLGRKPRKLAAVALANKMARIIWAMLTSAEPYRHPAPIAS

SEQ ID NO: 66543 - protein, 324 aa, unidentified
MDKDGKAEITRKLRRSELISFFERQQACTVILEACGAAHYWARMLSALGHDAKLIAPEAIKPFVKKGKKNDAADAEALCAAASRPGVKFVPVKTIEQQGILALHSARSLLVKQQTMLVNAMRGLATEFGLTVPQGIGKLRELVALVDADESVPEPARLVTGELLEHCNVLAESIKTFEDAIVAHARRDYTARRLATIPGVGPVTASIIAATVADIGVFKSARYFAAWLGLAPRQHSTGGKTRLGRITKAGNREIRTLLVLGATSMVRRAAHWNSAAGIWLRAVLQRRPVRLVTVALANKMARIAWALMTRKEVYHPKGHILVPA

SEQ ID NO: 66544 - protein, 427 aa, unidentified
MHYNQNEKIMSITEKTLVIGIDIGKEVQYARFFDYRGMELSKIQSFENTLEGFKTFEELIKSIANKNDKDNIIVGLEPTGHYWFNLGNFLRNIGIKIVLVNPFHVKRSKELDDNSQLKNDLKDPKVIAKLVIEGRFSEPYIPEGIYSDLRIAMDMRQSLGKNLNIIKNKVGQWLDKYFPEFNDAFADWQGKAALISLTKFSTPEEIISVGVQQIFVEWKMKIKQGLGIKKAVMLVEAAKNSVGITEGLGMAKKELKLYLDQYELYIAQQEQLETEIEHLALQIPGVKEMLTINGVGIMTAAGFVAEVGNIKRFTHPRQIQKLAGLGLIENSSGKHKGKTSISKRGRSRLRALLFRVIMPLVSKNDEFKMLHKHYTTRKENPLKKKQSLILLCCKLIRIFFAIMNKQIEYNPQKLISDIGIDILPKAA

SEQ ID NO: 66545 - protein, 305 aa, unidentified
MLTAEADKRKTKVVVNTAAGVQALLAWCAKHGAQPAQLHAILEPTGLYHEQAATALPQVRVSLVNPAQARDFAKALALRSKNDALDSYVLARYGQTLSPALWHPAPLHARQLRALLTRREALSKDLLRELNRKEKSQFSPSAPLVDGSIDKAIAFLREQIKQIERAIDQHIDNHPDLKQDCELLNSIPAIGPQAGNAILAVMHNRHIDSAQSLAAYLGVVPVQRQSGSSLNSCARLSKAGPSQVRATLYMAALVGTRHNPHIRALYQRLLKAGKSKKAALGAAMRKRCILFRLLPDWRCTGTTPR

SEQ ID NO: 66546 - protein, 400 aa, unidentified
MLSIGIDVSKGKSTVCGMKPGGEIVYAPFEVQHTREGMSELVSLLRSSGEEVRAVLESTGSYHCPVVAALLENGIFVSVVNSLRMKRFCSQSIRKVKTDRIDAMQIALYGLAYWQELQPTKLPEDTYRELQLLARQYYQMTSLLIKAKVDFNAICDQVLPGMQELMSDHAGRHKLSDFVLWYCHTTHILEMGETRFRKDYCKWAEKKGYRNCERMAALIFATAQNGIPVLPNAPSTQIVITEAIRVLHIVEASRDAILTQMQALAKTLPEYSLVREMPCIGDTLAPRLIAEIGDVRRFHSKRALIAYAGIDAPPYQSGKFCANNRHISKRGNRYLRKTGYEVMQSYVMHKPANDPIFTFIEKKRSEGKSGKLAMVAGLNKFLRVYYGKVTELYRSLPAIE

SEQ ID NO: 66547 - protein, 386 aa, unidentified
MKPTSQMTLDVYFRQCVGIDVSKDKFTACLYMYDRAGDVGCCTKSIDFANTKSGFNQMVRWSRREAVKERPLTYLMEPTGVYYEHLAYHLHKIGQTVYVVLPNKARKFCEAEGIKTKTDAMDARCLALLGCVSRRLKPWSPPAPIYRELRQMTRFHADLCEVRTSVANRMEALDHMEGMARSVHKNCERLLQEIDMLMEKNNKAIMEKVAEDKELLAKVKRIATAKGLREPTIVCIIAETEGFHYIENRKQLVSYAGLDVKAKQSGKDDPKHCISKKGNAHIRTALYMPALVAVRYNRQIKAAYGRICQKHPNGKMIGITAAMRRLLLLIYTLWKNGEEYDETRDTTHTPRKNEPELEYGPNDCIGRIDNEPADWDVADENGEPPL

SEQ ID NO: 66548 - protein, 485 aa, unidentified
MPRRKQASPLAAKTPSAAKTKPVKAKPSKDASARRNESLRITHPHAAGIDVHATVHVVCVPAQDAPPPPENQPPNVPSNVRHFGACTADLEMLADWLQACGVTSVAMESTGVYWVPLFELLERRGFEVLLVDPCQTKHVPGRPKSDVLDCQWIQRLHSYGLLAAAFRPCDQVVVLRGYLRQRQMLIAYASHHIQHMQKALEQMNVKLPEVVADVTGLTGMKIIKAILAGQRDPLELAKHRHERCKRTEAEIARALYGNWRAEHLFALKQAVELFEFYQTKLRECDDQLQAQLQTFADKSAGQTLKPRKQGNVPNKPRFDVRTSLLRMSGVDVTVLEGIEESTALVLLSETGTDMSKWPTEKHFTAWLGLCPQHKGSAGKIKSRRIRRGANRAARAFRMAAQGSHHAKNAMGAFYRRIQARSGGGKALIATARKIACRYYRLLKYGQQYVRQDMAAYEELYRLRLVKGLARKAAELGYQLLPTTKA

SEQ ID NO: 66549 - protein, 332 aa, unidentified
MSIIGCDLHSRYQVIAMLETETGEVSTRRLEHEGGEAKGFYAGLGKAALIGIEATGYTQWFERLVAELGHELWVGDPAEIRARAVRRQKTDTRDAEHLLDLLLTKRFPRVWVPTPEERDFRQLLKHRDKLVKMQTSVRNQLHFLAMSQGVCRKQKLWSARGRQELEELGLGPWASRRRQELLALLDGLGPRLEELDRAVKAEATRRCEAVRLMEQQGVGPVTALAFVLTVGPVERFASSRKLVSYLGLNPREDSSGGHQRLGHISKQGNEMLRWLLVEAGHTAARLDPELRRVYQRLKFRRGGKVAKVAIARRLAVRLYWSLRRYAAGSHVR

SEQ ID NO: 66550 - protein, 343 aa, unidentified
MRLYIAFDVHASSSVLGVVDEEGRRVFSKKVRNDPASVVQLVKRLEGEVAGVVVESTYNWYWIVDVLKAAGHQMHLANPSKVKKYEGLKHSDDRHDAFWLAEMLRLGVLPEGYIYPKEERPIRDLLRKRGHMVRLRTSLILGLESIITRNYGIRPRAKDLQATSEDRVSPLLEGDEYILFAGMRSKDAIDNLTKNIKEIERAVRDRIQLREEYKKLLTMMGVGEILAATIMLETGPISRFPRVGNYVSYCRKVPTMWLSDGKKKGKGNRKNGNRYLSWAWSEAGNAARRHYLCARRYFDRKAQKTNIMVAHNALDHKMARAGYYVIRDGVDFDAERVFGRLGR

SEQ ID NO: 66551 - protein, 339 aa, unidentified
MELCCGMDLHSSNTVIGIIDEKRKHLIDRKLPNDPELIRNFLKPYKPELKGIVVESTYNWYWLADLLQEDGYRVHLSHPVANEQYNGLKHSNDKHEAFWLAELLSLGILKEGYIYPRQVRSLRDVLRKRAHLVRLRSGLLVSLQHMISRNCAVKVKTGDMKRLREDVISPLLIRDEALLLAGQTSKGVIDCLTRQIDKIERWALKRLRREGVFIGLMTLPGVGDILGMTILLETGPISRFREVGNYASYCRKVSSQWTSNDKVKGRGNIRNGNKYLAWAFSEAAEHARRTNEACRRFYDRKLRQTNTKVAHNALAHKLARAAYYIMKDHVSYQEEKMFA

SEQ ID NO: 66552 - protein, 338 aa, unidentified
MPLYGGIDLHANNSVVVLLNEQDQVIYQRRLSNHLPTILEQLAPYHSDIKGMVVESTYNWYWLVDGLMEADYRVHLANPVAMQQYSGLKYTDDHSDARWLAQVLRLGVLPEGYIYPKAARAVRDVLRKRAHLVRQHTANVLSVQNILARNTGSRFSAKRIHEFTKADLEGLLPEANQVLAVTSSLALLDCLSQQIKTLEKAVTQSLKHTPAYEQLLTVDGIGMILAQTIGLETGDIGRFPTVGNYASYCRCVKSTKISNGKRKGQGNVKNGNPYLEWAYIEAAQFAIRFNPTVQRFYQRKHAKSHLRVARKAVAHKLSRACYYIMRDLVPFDVHKAFG

SEQ ID NO: 66553 - protein, 343 aa, unidentified
MQIHSVGIDLGKTTFHLVALGAASKVLMKKKFSQKQLLAFTANMQTSLIGLEACSGAHFLGRAFRQQGHDVRLIPAQFVKPFVKSNKNDFVDAEAIAEAVERKNMRFVPIKTDDQLDLQAMHRIRDRLVSRRTAVINQIRAFLLERGMVFAQKPAKLKAGMADVLENAENALTPMMRNLIGRLYEEWKAVEEQIDELTDSLEQIAANDAGCCRIRKIPGIGPVVATAIVAAIGNGAAFRKCRDFAAWLGLVPRQYSTGGKARLLGISKRGNTYLRKILIHAARAAAMRIKRDRYSIGAWMNALEARAPRNVLVVAMANKLARIAWAVLSSGEDYRPVASLAAA

SEQ ID NO: 66554 - protein, 429 aa, unidentified
MTKTYILKTQTVPADRSAVETYLAPPPPSKGKIIGLDCHPDTFTAAFFVGQTPHDARKIGSRENLSLDALLKWAAAELTPQDIILMEAGSNSFELCKRLGNLGLKACVLESCHVGKHAKTYADNDKMAAARIALVYLAGNAPCVWVPDEQSRERRELLHAYRKAVDEHTAATNSIKSYLNGRGLRLCKHSLDEKTTSQWILDQADWSGLQKNILTEHLANITESKERRKRLYRLIAAEMAADPKMMRCMKVLGVGIVSAFALLAVIGDIGRFHSPEKLVAYIGLNPGQRQSGKGKDIRLGVGRRGRGDIRNLLIQGAHAIMRSGRNTPLGQWGWKLFTRKGNRNVAVAAIARKLLVQVWHLLHGNPPLALESDTSFRIKLQKLAVALGSTLRTGIGLGKTLEDSVKTLISRCQTHAEPSASPCETPQPA

SEQ ID NO: 66555 - protein, 425 aa, unidentified
MNLLILKGVPMSLKIVYKICCGIDVHKTFVVACIASTNDKGVTSYESHRFSTYTSGLKTLLQWLLKRNCKDVCMESTGKYWIPIYNILENDCSIVLAHPKYVKAIRGKKTDKKDAKWIADLFKHDLVAGSFMPPADIRQLRDLMRYRFKLTCFQSSEKNRLQNCLTVSNIQLGNVVSDTFGKSAQAILDKLLENPADTSFDLEPLVYKSLKKKLPELRDAIDGYITPEQVGKLKVIKAHYESLESRKAELEELILALAAPYQQELAILQTAPGIRSDFTAIGIISEIGTNMEAFPSAKHLCSWAGLTPTNNESAGKKKSVRVSKAGCYIKPLLVQCANAVVTSKKHPEIRNRYLRLKKRRGHKKAIIAIARMLLTALYHMLKNGETYNAELYRKSDLPLANWEITVEQAIIIARNQGYKIKSVTA

SEQ ID NO: 66556 - protein, 388 aa, unidentified
MNYVGIDISKYKHDCCIITELGDVINEGFTFTNNAEGFGKLQKELERCGKDDVKIGFEATGNYGINLKLFLEAIGYEYMEINPLLVKEYIRSNTLRRTTTDKLCAKAIAGYISEKKYRPHPTSFYSKFALKQLARLRSSLVTGRSRYLIQITNVLDCIFPEFKPLFGNKFSVTALYILANYPSPEAIANMNSRSYDILRRKSRGKFSMDKFVKLKTLAKNTVGVFDECYRTELEMLLDLHSQIDGKIDELETKITEIIEQINPPTLSIIGIGAISAAVIVSEFGDFFRFDNPNKMLSFAGLEPGYFQSGTSEHNGRMVKRGSSALRCTLMNCSRSVRLHNEVFAAYYQKKINEGKPYNVAINHVAKKLVRLIFALETKGEIFDAAKLR

SEQ ID NO: 66557 - protein, 339 aa, unidentified
MKLYSGMDLHSNNTYCGITNESGKRLIGHRLPNEPKVILGFLEPYQPDLEGIVIESTYNWYWLVDLLQENGYRVHLSHPSGNEQYRGLKHTDDRHDAFWLADLLRLGCLREGYIYPKQRRPLRDLLRKRAHLVRLRTSLLLSAQNSVQRNRSLHVSNEDLKKLTVDLLSVHLEGDEALWLAAKASKELIDAFTHRILRIESWILKHLGPQVGFGYLLTLPGVGEILGMTILFETGPIQRFPDVGNYVSYSRLVASQRISNDKVKGKGNQHNGNPYLAWAFSEAAEHARRHYPKCRAFYNRKLQQKNATVAHCALAHKLARAAYYILRDQVVFDETKLFS

SEQ ID NO: 66558 - protein, 317 aa, unidentified
MKKTEAKDYVYIGVDVSKEKLDAYRPSTKKNETFSNQEADIETFCKSLKRSKAPVMVVVEGTGGYESLLVRMLTKHKVAVAVVNARQVRDFANGIGMNAKTDTIDAYVIHRFAEVVKPSPKAMVSEQEQKHSALVTRRAQVIDLITQESNRLKQCWDERSKESIRKTLEFLRNEAKAIDKELQAMLALDEANKRKLEILDSVKGVGAVTQSMIISKLPELGKLNRGQIAKLAGVAPINRDSGTKEGKRFISGGRSYVRRILYMATLSAIRYNATIRAFYHQLKSRGKLSKVAMVACMRKLLTILNLMIKTDQVWQTK

SEQ ID NO: 66559 - protein, 310 aa, unidentified
MVEKVFVGVDVSKDSLDVAIGPQKEIITFGNDQKGVDALVKKLKRIDAHLTVFESTGGYELLAASCLAEAGLAVVIVNPRQVRNFAKATGILAKTDAIDARVIARFAEAVKPEVRPLKDRQTSELTALVTRRRQIIEMIVAEKNRIRLANKRNKKDIEAHIRWLKKRLDKIETDIGKMIQSSPIWRCKDDILQSVPGIGPVTSARLICDLPELGVLSSKKIAMLVGLAPLNCDSGKYKGRRRIWGGRAAVRSGLYMATMAAIRCNPAIKEFYRRLIAAGKCHKVAATACMRKLLVIVNAMLRDQTLWQQN

SEQ ID NO: 66560 - protein, 358 aa, unidentified
MPFAGVDAHKRYSRVVVKDEAGSVLCRASLQNDVGSFQSFFGAIGGPTRAVLEAGRDWGVIYDLLEGIGVEPVLANPLKTRAIAEARIKTDTVDATILADLLRADLIPVVHVPSKGVRAQKNLLRQRLWLVQLRTRIKNRVHNILDRNHVGPPPVADLFGKAGRRFMDQLCLPAPDDRLLKAHLELLDLLQSQIAKSEEWIDEALGERPEVATMRTLPGFGKVLAAVVALEIDDVHRFSHPGNLCAYAGLVPTTYASGGKVRHGRLLPGCNRWLRWAFVEAAWVAQRHSAYCHAYFERIKRRKGANCAISALARRLCEIAWHCLTGSRPYEERKMTATTELARSPSKVPGRLGTAQKD

SEQ ID NO: 66561 - protein, 397 aa, unidentified
MAETLGGTRVAEGEHGPGLGVRRRSIDKGAPSASAQREFEQHLPGYEPVHEAERVLRCRDFQGRQGSHMITRIQIGVDVSKAWFDVHMFIRGEDFTARYPNNPSGFKAFKEKVQSIGARKVHVCMEFTGGYETPLALFCKECRYIVSIVDGARIHHYGRSFTSTGSGSDKKSAYLLARYCKERSPEEWFQVPDEYRKLRELVRHRERLIGSKTEWTSRSGFAVEDALVSAQRKTVIEVYKELLKATEERIQVHIQSHANLKKAMKLLISIPSIGFVSAARILGESGPIENFLSARSYALYAGLLPIFRGSGTNTPPGKLPVYGNKELRSALYFPAIVSKRTGKGVGGFILKLCTKEDTAKMSAIVAGMRKLSHVIYGILNSGDSYDSSKLENPPKER

SEQ ID NO: 66562 - protein, 343 aa, unidentified
MEAYAGKQFVGIDLHRRRTVIVRTTEGGEVLEAVRIVNDVQRLAAVMDRAGHCPEVVLEATYGWYWAVDALQAGGASVHLAHPLGVKAFEYRRVKNDFRDAQDLADLLRMGRLPEAWIAPPPTRELRELVRHRAKLVGLRSHCKAEVHAVLAKCGVQVLMSDLFGLAGTELLDGLELPAPYAARIASLRQVMDDLDFEINVFAGIIRGRMAHEPGYTAVQKIPGIGPTLGAVLVAEIGDITRFASASKLTCWAGLTPKHHESDTHVRRGRITKQGSRLVRWAAIESVKTVSKASEVGVLRERVADRRGRNIGSVAAARRQLELVFYALRDGHVRALEHLPRVA

SEQ ID NO: 66563 - protein, 397 aa, unidentified
MYIVGIDIAKRKHEAAVIDGEGTVIIKPFSFTNNCSGYNRLLAMLTKAKLPLDEVSFAMEATGHYWLALFTRLQKEGFRVQVINPVQTNSIRSFYIRQAKTDPRDALLIAEVIRFGHFSESTLHPENIYELRELCRGRHAIVSMQADVKRKVVALLDQVFPEYETAFTNLFGDTSMAILQACPTPKELSEMRLEELCHLIEVSSHKRFRMAKAQELQALARNSFGFAMAGDVFSTMIRLYAKHLDFLKQQVREMDRKIAEIMDTLDTPITTITGIGPTLGAYILSEIGDISRFSSAAKLAAYAGIDPTMRQSGEYNGVRNRMSKRGSPYLRHAIWLAASSAVLHDPALKLYFQKKRDEGKPYMASVGHACRKMVSIIYAVMRDNKAYTPHIPNEISA

SEQ ID NO: 66564 - protein, 345 aa, unidentified
MNYVGIDLHKKTIVLCVVDQDRKVTHRRTFACCQTEAVRDFFRGLGPFRAVVEATASYEWLVALIDPLAERVVLAHPGKLRVIAESDQKTDRHDAYVLAEYLALGKIPEAFRPAARQREHRALVRHRRHLKRSVTALKNKIRRVASDYNADRKDLFTAAGWAALESVGLRAADRFVLGQLRAAWQHLEGQLKELAGRLKEFAAAAPAQEAEARAKLATIPGVGPVTVDVVLSELGDVRRFHSVKAVCAYAGLVPAVRQSGGKKAKELGITKAGSPLLRWALVEAAWRVVRQSAAWRRVYERIKKRAGGKRAVVAVARRLLVVMAAMLRDGTNYDLLRVGEPPPSP

SEQ ID NO: 66565 - protein, 375 aa, unidentified
MTDATIAQTEPVLIVIDIAKARHEVLIAIPGKKRRRRLTVLNQLGDAGFEVKLVSSVALARTREALNNSWDKNDPKDAPVILHMMQIGNEQFYQDPMLCGTNDLQELSKTHDIVSRSKTELWHRVLTHYLSLYWPEAERFHRSSRSDWFFAFLERYPSPHFISAMGQEAFIADAWKVVGRKVSKERLLADIYQTAMSSVGLPIAPDSDAARMFRLVLSEGRSLIAQRNEIEDRAVELLKDNIDYQLLTSIPGIGPINALTILAEAGDLRRFQHHRQFLKFCGMELATIQSGTFRGQTKLSKYGNARLRRTLWMAGQVAIMQRTNSFRDKFERYISKDRQNTHLRRKAYTAIAAKMARTVHGIIKHGEPYRPFFEG

SEQ ID NO: 66566 - protein, 343 aa, unidentified
MKLSRVGVDLAKNVYQLHGVDRSGKTVWKRRLRRGQWLQALVDKVEPGCVIGMEACTGAHHWARELQSRGYEVRLIAPQFVKPYVKSNKNDANDAEAICEAMSRPQMRFVTVKSVEQQDIQATHRVRTELKDQRNAKANQIRGLVAEYGLVAPQTLLALRKAIPCWLEDADNGLTDHFRTLLHGLWSDLVTLEDRMTELNKAIQKIADSNEITQRLQQLRGVGPLVATALVATVGTGEQFNKGRQMAAAIGLTPRQYSSGDKQRLLGISKRGDTYLRTLLIHGARAVVSQAKHRDDPLSRWAISIAKRRHPNVAAVALANKTARMAWAMLRNETNYDPDFAIG

SEQ ID NO: 66567 - protein, 373 aa, unidentified
MEEFIKYIGMDVHGKTIAVAVADSRSSEVRFIGQIVNTPEAITKLVDQLKASDARLSFCYEAGPCGYGIHRQLLLLKHDCQVVAPSLIPKKAGDRVKTDRRDALMLARLHRAGELTAVWVPDGEHEALRDLTRARGDIKDLERRARQRLLAFLLRHGRRHEGKSHWTQAHFRWLETVKFEHPVQQIVMQEYIDTVVSCGKRVLALDKQIEQAAAKSVVWPVIEALMALRGVQLLTATITVAEIGDLKRFAKAAQLMAYLGLVPSEHSSGERQRRGGITKTGNSHVRRVLVEAAWTYRFPARKTRTLQKRAERCDEKVQAIAWDAQKRLCHRYRHLTDGGKLKVQATTAVARELAGFIWAIGQAVPTPVAKTGQ

SEQ ID NO: 66568 - protein, 401 aa, unidentified
MKRLSGGIDVGSGSHHIIIIDEEDNFLYNQKVDHKLNEFTESINLFKQIEKQEGGKISFALEGKNGYSAPLDRILLDQGFTLYNVDNLKLKRFREAFAGEWRDDERDALMLSKMLKLKDYINSEREKVFIKIEKPSLVSESLKLLSRHQQTLINEKVRLVNRLGKKLLEVCPQILELGKLKNKKTIAILARYPDFSKYKRITLKSLLKIKGIGKIQAPFLLKRLNHIEYMSGLTDIYKTIILSYAQRILELQREIKDIDKKLDEIGEKSKEVKHLKTIPGVATKLASRLVGEIGDINRFPSEKQLAIYCGVACVDNNSGKVIKAKAVYKANKICKQTLITMAGCSIRSIHQCKAYYLKKRTEGKNHNHALRCMARQLIKVIYKMLTEDREYIVRKELKKVA

SEQ ID NO: 66569 - protein, 420 aa, unidentified
MTVDLERGYTSKEPCGLKQYLNLLRRSIFMIYVGIDVAKDKHDCFVTSSDGKVLFPVFTIQNNREGFDDLFSKIQSVSSEVSNIKVGLEATGHYSYNLLGYLIDKGLPTYVINPLHTNLYRKSLSLRKTKTDKVDARTIAMMLMSDVNLKSYSDTSYHNEALKSLTRYRFDKVQERARLKQSVSRLVTILFPELEKLVPSLHSASVYALLSELPSAGKIASCHLTHLTKLLENASKSRYRREKAIEIRDAARISIGSNMPAKSLELRHTLRLIGELDSEITEIESEIKQIMDQISSPILTIPGISYRMGAMILAEIGDFSRFDSPDKILAYAGASPSTYQSGQLKSSYSHMEKRGSRYLRFALINAAKYVCHWDETFGAYLQKKISEGKHYNVAITHAAKKLVRLIYAMEKSGMPYIKTA

SEQ ID NO: 66570 - protein, 444 aa, unidentified
MSDTLPNELPESEWAAFAAIDWADQKHFWKLVAAGSQQPEQGELENTPEAVEDWAQALNQRFGGRPIAVCLEQSRGALLYMLVKYPHLVLFPVHPTTAARYRETFSPSGAKGDPGDTASLLDLLLRHRERLRRLQLETVETRLLQLLIEQRRRMVDEKTRQSLRLMACLKMYFPQVLKWFDDVSSPLVSALLERWPSLSELKRSHPGTLRKFFHEQNCRSQDRIEERITAIYQATPATLDAAVLEGEAMRARGLVALLTALRRHITELDQRIEQLVASHPDRTLFASLPGAGRVLVPRLIVAFGTRRERYDNAFQMQCYSGIAPVKEASGKSEWIHFRWACPKFLRQTFHEYASHSLPKSEWARAYYRLQREHGKSHHAAVRALAYKWIRIIFRCWKTGTPYDEPTYLQSLQKRNSPLGTARGSATAIGWKQVGGFRKLSENPS

SEQ ID NO: 66571 - protein, 363 aa, unidentified
MADCLTLGSNETVFSEVAIPTLRLSRTVASIFEYVSTRQRNPRNLIMNNLTKTLKIIGVDVAKAKLDLALSSDRFITIDNNEQAFKTFLEGIDVPFNQLLFVMEATGGYERAFESYLLKQSIKVSIVNPKRIRDYAKAMGKLAKNDKIDAAVIREYAKIGKLIYSTQRSPQEQKLRGLLNRRKQLLKHLVVEKHYLETTTDKEALLSIKSMIKLLQGRLDKMDEKIQSSLDQNTSYQHKKKLMTGVIGIAEQTASTLLIKLPELGRLTNKQIAALVGIAPFCNDSGQYKGKRMIWGGRKEVRTALYMPMLSVIQFNPKIRAFYQRLVNQGKVRKVAVIACMRKLLTILNSMIRNNTEWNTNYV

SEQ ID NO: 66572 - protein, 350 aa, unidentified
MAHRNLPRPAAVYGIDIGKNVFHVVGLSRDGTPVQKVRFRRDTLLQFFARADPSIVGMESCAGSQWLARKIRALGHKIRLIPAQFVKPYVKSNKNDIIDAEAIAEATTRPTMRFVTVKEADQVDLQALHRIRDQMVGSRTRLINQMRAFCLEYGVPLRQGAGLFKLDLPQALNDENNDISAAMRRLLGDLYADLQRLEERIRQVTKEIEAIADREDVTRRLMTIPGIGALGATALLAAVGDGLQFRKARDLAAWLGLVPRQYSTGGKPTLLGISKRGNRYVRKLLVHGARSCFRHLDRTRDRLGNWLDGLEARMHPNKAVVALAAKMARIVWAVLNKPGALYERRDPAFA

SEQ ID NO: 66573 - protein, 405 aa, unidentified
MSVHHGAPVTSSTIVVAVDVGKCSAALSVTDAARRRVLGPVGFGMTRFGLAAVVERIGAVVGPSTQVKVGVEAAGHYHRPVLDYAWPPGWQVVELNPAHVAEQRRVAGRRRVKTDAIDLEAITELLLAGKGHPVGATPMILGEITAWAGHRSRRVAVRTATKNQLLGQLDRALPGLTRALPDVLGTKIGRLIATEFTDPARLTGLGESRLIRFAAVRDVQLRRPLAQRLVGAAREALTTADAAVARRVLAADVAMLADLNTQIGETQAELAALVPRSPLATLTTVPGWGVVRVANYAAALGDPRRWPGPRQIYRAAGLSPMQYESAGKRRDGTISREGSVALRRALIDLGLGLWLADPAATAYAAGLKARGKHGGIITCALAHRATRIAFALVRDHASYDRSRWN

SEQ ID NO: 66574 - protein, 320 aa, unidentified
MSNASTYIGVDLHKKTCFITVMNQAGNIKKQTEISTDTEKVAKFFSRHTKAQVAVESTMNWIPFYENLESLGCSVVLSNPLQTKAIASARIKNDKVDSRVLADLLRTNLLPTAYIQPREIRDLKELVRQRVNYVELRTRIKNKIHSVLFKNNLKHDFTCLYGKAGIIWLKELILRDIYRQELDRYLVTLDLLDRQIQQMSDEIMATAKTDYDCKLLMTIPGISYFTALVIKSEIGDIARFPNARKLCAYAGLIPSTYASADKIRFGRITKRGSKWLRKSLIDSITSGSRHVSRLGFFYRKLKKAKGPARPRWPRPENWLR

SEQ ID NO: 66575 - protein, 388 aa, unidentified
MQVVAAESEAPISIRTDLCAIFVSLELSRSTWLVTSLSPGAGEKMSKHSVSASDTAGLLKRFADLQQKARTRTGRTFSIITIQEAGLDGFWIHRLLQGEGIESWVVDPASVLTSRRRRRAKTDKIDGETLVRTLLAYKRGEPRVCAMVKAPTPEEEDRRRICRERKTLTAERVTHVNRIKGLLFAQGIGDYEPLRRNRRGRLEELGTGDGRSLPAHLKAQISRELDRLEIILAQLKAVGSERDAMLEPAKEGPPTPASLLAQLKGIGPEFAAVLWSEGLFRSFNNRRQVAAYAGLAPTPWQSGSVAHEQGVSKAGNPRLRTTMIQLAWLWLRHQPDSAFSLWFRERVQRNGGRGKKIAIVAMARKLLVALWKYAVHGILIDGTKTKAA

SEQ ID NO: 66576 - protein, 361 aa, unidentified
MSDPTANNEETKVTVGLDLGDRHIQVCLVDEAGEVIEEARLATRPQALRRRFCGADQLRIVLEAGHSPWVSRLLAELGHEVIVANPRKLRLIYTNDSKSDRVDAEYLARVGRLDPTLLAPLRHRGAETQVDLALLRSRNALVRARTRLISHARGTTKSLGARLPACSSESFAAKAGACLPDELRPALDPVLAVIAGLDAQISALDARIAEMARQRYPETALLTQVPGVGTLTALVYVLTLEDPQRFPRSRSVGSYLGLRPRQRDSGSAQPQLRITKAGDEHLRWLLVGAAHYILGPFGPDTDLRRWGLALAAQGGQTGKKRAAVAVARKLSVLLLRLWVTAEVYEPLRNARLRGELLAVPS

SEQ ID NO: 66577 - protein, 425 aa, unidentified
MNYKQNEKINQVKESTLVVGIDIGSTTQYARAFDWRGIELGKVFTFSNSREGFEAFKAWMQHLQDKYRKSDVIVGIEPTGHYWFDLGAYLEDEGILLVMVNPYAVKQTKELDDNSQSKNDRKDPKVIAKLVTEGRYSAPYTPDGVYADLRIMVANRKRLIREMTQIKNRFARWFAIYFPEYTDVFGDYEAQSSMLLLKKVCTPEAIVELGAEKINQIWRDAKLRAVGMKRATTLCETAKRSIGLKKGSSAARYEMKLLLEDYEYKKAQLDAVMEEIEKLCRKIPESEQMLAIKGIGVITVAGFLAEVGDVRRFESPRQIQKLAGLSLRENSSGKHKGQTTISKRGRSKLRAVLFNAAIPLIAKNPEFKSLHEYYTTRANNPLKKKQSVIAISCKLIRVFYAILANGVTYDLQKMLSDIHRQPQAA

SEQ ID NO: 66578 - protein, 388 aa, unidentified
MNVGADKSEPLTAIHTDLGAIFVSLELSRSSWLITSLSPGGGEKMSKRSVPGGDFAGLMERFAQLQEKARLRTGQSFRIIVVQEAGLDGFWIHRALQNEGIESHVVDAASIATSRRRRRAKTDKIDGETLVRALLAYKRGEPRVCAMVKAPTPGEEDRRHLCRERKALTAERVRHVNRIKGLLFSQGISGYQPLRRDRRQRLEELQTGDGRAFPQHLKALVNRELDRLELLLKQIKTVEAARDALLAVGQTGKPAPAAMLLDIRGIGPEFAAILWSEGLFRHFENRRQIAAYAGLAPTPWQSGAVDREQGVSKAGNPRLRTTLIQLAWLWLRNQPRSALSVWFHERVSRNGGRLRKTTIVALARKLLVALWKYVTAGVVIEGVTMKVA

SEQ ID NO: 66579 - protein, 389 aa, unidentified
MLDEKGQQNGSLRVDHTPEGLARLNSFLESITGSEQKEQMACIIETNHGLLIAFLLEAGWPVYPVNPRTVERRRGASGAKTDALDAYLLAKTGRADLADLRRLTPDSELVQELKALTRDQDALIQMQTRLVNQLTATRVTSYPVALQLFAGALQQHSSLIFLQSYPTPQVAMDASVEQITAVLKNAGHSRAQQVVPQIFETLHQPHLTADALTTRTKSRLMLALVAQLLPLVQQIADYGKEIQRLFLMHEAYLVFRSLPRAGKRLAPRRLAEIGDEHSRYADAKSLQALAGTSPVLFQSGNYAKAHRRLGCIKPLRNALHQFARATSQQEGWAKDDYQRKRAEGKSHSVALRALANVWVRIIFAMLTSHEPYDPATFETAQHRHARRLA

SEQ ID NO: 66580 - protein, 430 aa, unidentified
MKFNRKHRINQRIERISPQHLVVGIDIAKETHVAGAVNYRGIEVDHTCSFTNDRVGFEKMMHWVTQQQQRLGLTRVILGMESTGHYGNALARWLQDHGQEVVQVNPATVKRNKENRDNRPSKNDAKDALTIADSISRGYYHDWSWHEGTYRKLRCVVNEYEALSTDLTAIGNRLQRLLDEGFPEFLRVFKKWNGPRAIATLKAFPLPEDLKHRTIEQVIEGWRTTAMSRAGGKRGREIAARLLAAARASVGVTDIAPELRRNIQRLLEQRERLLADQEQVMNEILALLGQLPEADLAALKEVGISPWLTAVILANTGPLSQYAHGQQILALAGLNLCEDMSGKRKGQIVLSKRGRRQLRKYLYVAMIGLVANHEAFRAWHDHNVHTRRIKKQTSIFKLIGKLVRMLVALARNGESFDAGKAQALKLRTAA

SEQ ID NO: 66581 - protein, 348 aa, unidentified
MDKITAVGLDLAKQIIQVHGIDAAGHVVLRKAVRRERLLALLAQFPLCVVGMEACSGAHHWARQFKQLGHEPRLMAAEFVRPFRKSLAAKNDANDAEAICTAVVQPNMRFISIKSVEQQALLSLHRIRQGLIEERTATINRLRGVLAEFGVVLPQSVPALQRALPTVLADAERLPAVVQRSLQLLLEHLRELELRLAEFDRQIAQHAKSSAPAQRLATLPGIGPLTASAVVATVGNAQDYRNGRQFAAWLGLVPRQYSSGGKCKLGPITRRGDAYLRALLVQGARSTLQAALRRAPARHDRLSAWIVQLAQRVGYHKTLVAIANKHARIIWALLAREQTLDLARTTTH

SEQ ID NO: 66582 - protein, 474 aa, unidentified
MKPDTPESPLRGHARKPTKLVPSAELLRKLNLNAAGIDVGSASHFVAVPADRDPKPVREFRSFTADLHRLADWLVACRVDTVAMESTGIYWIPLFEILKDRGLEVLLVNARHLKNVPGRKSDVLDCQWLQELHTYGLLRGSFRPEPPIAALRTYLRHREVLVEYAASHTQQIQKALTLMNLQLTNVLSDVVGVTGMAILRDILAGERDPKVLARHRDARCKATEAEIVASLTGNYRPEHFFTLRQTVELYDVYHEKIAACDRQLEALLATLAKEEPKTPASSLPPARTRKKPRNNEPSFEIRSPLYALAGADITQIEGIGPYTALRVLGEIGTDMSPWKSAKHFTSWLTLAPRNRISGEKLLSSKTPPSANRLAKLFRQAAVSVGRTQTALGAFYRRLAARIGKAKALTATARKIAAAVYAVLSRGRLHLDPGADAYNLRYRARTLATIRRRAKDFGFQLVPATQTPPPAGEVS

SEQ ID NO: 66583 - protein, 407 aa, unidentified
MQEATQHDAVDVFVGVDVDVGVDVGKGQHHAVALDRNGKRLYNKALPNDEVKLRALIAELKTHRRLLFVVDQPSTIGALPVAVARAEGVLVAYLPGLAMRRIADLHAGEAKTDARDAAIIAEAARSMPHTLRSLRLADEQLAELTMLRGFDDDLAAQLTQTSNRIRGLLTQIHPALERVLGPRLDHPAVLDLLERYPSPSALAAANEKTLANRLTKLAPRMGKNWAAEIVQALNEQAVIVPGTQAATIVMPRLAQQLAALRKQRDEIAAEVERLVLAHPFWPVLTSMPGVGVRTAARRLTEAAQKAFATAAHLAAYAGLAPVTRRSGSSIRGEHPSRRGNKVLKRALFLSAFAALRDPVSRAYYSRKIQQGKRHNQALIALARRRCDVLFAMLRDGTIYPPKSAPDA

SEQ ID NO: 66584 - protein, 401 aa, unidentified
MNAVGIDVSKGKSMVAIMRPFGEIVSTPFEIKHTSSDINSLVKLIKSIEGESRIVMEHTGRYYEVLAHQLSEANLFVSAINPKLIKDFDNDSLRKVKTDKADSVKIARYALDKWQNLKQYSVMDELRNQLKTMNRQFGFYMKHKTAMKNNLIGILDQTYPGVNTYFDSPARSDGSQKWVDFASTYWHVDCVRKMSLNAFIDHYQNWCKRKKYNFSQSKAEEIYGKAKELVPVLPKDDITKLIIKQAVDQLNSASITVESLRTLMNETASKLPEYPVVMAMKRVGKSLGPQLMAEIGDVSRFTHKSAITAFAGVDPGVNEWVSYEQKSVPTSKRGSSSLRKTLFQVMDCLIKTKPQDDPVYAFIDKKRAQGKPYYVYMTAGANKFLRIYYGRVKEYLMSLPE

SEQ ID NO: 66585 - protein, 318 aa, unidentified
MNVIGLDISKDTIDVTLITAKGGMDYIKIENNHEGFEKLIAWIKTKRVRKIAISMEATGVYYEQAAEYLSAVYTVYVINPLKIKDYAKSQFCHTKTDKADSKLIADYAKRHLDKLTPFRPSENPTLYKLINLLQQLKQQKHESQNRLHTAKDPFIRSTHETIILLLSKKIDETSKRIDSTIKQQKSLNAEYQNLQTIPAIGKDTAAILLRHLTDKTFRTANQFVSFAGLSPKIEQSGSSVNKKGGLSRYGHRQLKRALFMPALVAYRINAFPQLVKNLEAAKKSKMVVIVAIMRKLAKIAYYIHKTQKPFDKARHQTV

SEQ ID NO: 66586 - protein, 408 aa, unidentified
MELLNPRCAGLDVHQATVVATVRVPDDAGRRSVTETFGTMTADLLALREWLHAYGVTHVALESTGVYWKPVYYILEDAFTLLLINMQELKRVPGRKTDVQDSEWLAQLLECGLLKASFVPPSAIRELRDLTRYRVQQVQDRAREVNRLCKVLEDAGVKLTSVVTDIMGASGRAMLRALVAGTTDPVVLAALARGTLRRKLPLLQRALQGRFRAHHAFLIEQIFAKIDFLDATLDRLTAAIDRQVAPFEPMLTGLDTIPGVDRIGAISIVAETGGDMRRFPSAGHLCSWGAMCPGQNESAGKRRSGKTRTGNRYLRRTLIQAALGASHKKGAALQARYHRVKRHRGHKKAVVAVAHQILEIAYYVMRDSVTYDELGADYFDRRHADRAVRRHVRQLEALGFHVTIEKAA

SEQ ID NO: 66587 - protein, 351 aa, unidentified
MIMVGCDFHTRFQQVAMLDPTTGEVIERRLEHETGEARSFYASLCEPARVGIEATVSAQWFEKVLREYHHELWVGDAAGIRAMRVRKQKTDSRDALHILDLLLTDRFPRIWIPSPAERDVRQLVRHRHKLVRLRTSVMNQLHALAIGQGLCRKQKLWSKVGRLELEALVLDRWASRRRHELLQLLDQLNPWIADLDRAVMQEVQSRPEALHLMREPGVGPVTALAFVLTIGPVDRFQRSKQVVSYLGLNPSEESSGGRQRLGSISKQGNSMLRHLLVEAAQAASKFDPELRRDYQRLKFRRGNSRVAKVAIARKLAVRLYWKLREAAQPNTAARMQGSPANPVADESLERP

SEQ ID NO: 66588 - protein, 345 aa, unidentified
MPIVGGLDIHRKQLTFDFLDTETGEMKRGQVAPADRAHLRAWLARFAGRDDVAFALEGCTGWRYVAEELAAAGVVAHVAEPADTAFARGRKRHAKTDKTDSRHLRELLAEGRLPECWIPPPVILECRALLELYHDLRAGHTAWVQRIHAVFFHQGAPALGDGALRTGKDLAAVRAAAAAHLSPAGQLQVAVALEVLEALDARMHQVRHQLLSAARHLTGAKVLAARLYGVGPVTALAMTCWLAGKDRFSSARKAVRFAGLDITVWSSDRKGPPGRLSRQGPPVLRWAVYEAGKTHARSSAPDHRYYAQVKDRQDGKRAALSEARKLLRQACHILAELGDDALSAA

SEQ ID NO: 66589 - protein, 417 aa, unidentified
MKIVHPICCGVDVHKSVIVATVAATGKDNVTTYETKTFSTINADLARFSEWLKSRSCFHACMESTGKYWIPVFNTLEADGVGVVLTHPKYVRAIKGKKTDKKDSKWIAGLFKHDMVRASFIPPKDIRALREISLYRFKLVATRTAEKCRYQNCMTVSNIGLASVLSDPFGKTATDIMGHVLTSDVFDEAHASKLIHKTAKKKTGLILESVRGCRIEPDQRFKMNEARAHMDYLDNAAVRAEAELFTRIQPHWHLVEHLSANLPGVSQLSATMILAETGADMSVFESAKHFTSWAGLAPANNESAGKKKSVRISKAGQYLKPLLVQCALAAVKSTREPYFAAKYQKLKKRRGHKKAIIAIARMMLTCIYHMISTGEAFNPSDYEECRLATVKKDAKTRQSLWQAVDKVENRGCPGSHF

SEQ ID NO: 66590 - protein, 355 aa, unidentified
MCAKKTGSLEDLAVVGIDIGKDTFHLVGFDRSGQLVIRKQIKRLALNATFEQLPRCIVGMEACLSAHFVSRTLRSMGFEPRIIPAIYVKPFNKGQKNDYNDAEAIAEAALRPNLRTVSEKDQDQLDLQALHRVRARLVSRRTATINQIRAFLIEQGITVRSGLRALKNSFETILEQRRDEISPRMRGILIGLYGDWLWLDKRIGDVSGEIEEISRTEENCANIMTIPGIGPMISTAMVAAVGKGEAFDRGRDFAAWVGLVPRQFSTGGRTILGRITKRGSRYLRMLFVQAAKVIMMRPHRWSDFSFGPWLTEAVARMPRNKAAIALANKLARTAWSLLRHGTQFDAPRDAAMEAI

SEQ ID NO: 66591 - protein, 407 aa, unidentified
MEVLYPRCAGLDVHAGSVTACARVASGPQITYEHRTVPTTTRGLLELDEWLTGHGCTHVAMEATGVYWKPVWHVLEAHFTLVLANAMHIRNVPGRKSDMNDATWIADLLAHGLIRSSFVPPAPIQELRDLTRTRRQLVHEIARHVLRVQKTLADANLKLTQVISDIVGVSGRAILNALVAGETDPDRLVDLTRGRLKASRAELLDALHGRVTDHHRFMIKLHLSQIDALETAVATIEARIGDALGPFRAAVSLLTTMPGLSETTARVLIAEIGTDMSRFPSVGHLISWAGLCPRLDESAGKRRSTRTRQTTPWLKPTLINAAWAATRKKDSYLRAQFLRIKSRRGAKKAILAVASSMLTAVYFMLRDGVEYHDLGAHYFEYRNKEQLTKRLLQRLRDLGVAVEVKAA

SEQ ID NO: 66592 - protein, 307 aa, unidentified
MANTVKKITLGIDVAKDKHDIYNWQTGELTTLANEPSVIKAWLKDFHGPVQIAIEPTSHYHLVMIEEAHALGYEVYPINPRQLVHYRQAVNVRNKTDPLDAWLLARYLEREGNQLRPFKPQDPRAQRLWQLILRRATVVKSRQQLRQSLAEVRLPIKALLTQFQQLLDRIDRQVIALIRELGWWSDYLYCFSIPGIGLGNASALVAAYHRGAFASSDAFICYLGLDVRIRESGYYKGKRKLTKRGEPELRRLLFCASHPARKCHRFAEYYQRQLEKGLSKIAARVILSRKLARIAFALMRKEEMFIK

SEQ ID NO: 66593 - protein, 483 aa, unidentified
MKRKSIPSSRGPKTSRPSKSKKQAWKVVHPHAAGIDIGATEHYVAVPPDAVAAGESTVRSFGCFTQDLDALVEWLKACGVDTVAMESTGVYWIVPFQKLEAAGLEVVLVNAHTLKHVPGRKTDVQDCQWIQQLHTYGLLRASFRPDELTCRLRTLVRHRANTVSSGAEYILQMQKALTQMNVQLHHVVSHLTGETGLRILRAILNGERDPLILVELRDPQITRSTKEEMRKALVGDWRPELLFVLKQSLRGWEFCQEQMRECDGQIEQLLKEMPSAVAVKTPAARPQPDPLASTNPRPKGKQSRKRNDPEKDLGPELARICGVDLTAAHGLRLLTVLTLVSEIGVDVSKWRSAKAFVSWLGLCPNNKISGGRILSSRTRKVINRAANAMRMAAVGVGDTDTWLGSFHRRMRAKLGPAAATTATARKIGTVVYHLLKHQEPFIDRDLMAYEAKVYRHKLARIKKQAAALGYALVKTDEEKQLTE

SEQ ID NO: 66594 - protein, 370 aa, unidentified
MKTTDKYIGLDVHKDTITVAIAEGVRLGEVRQYGKISNDLHSLEKLLPRLGGENVRLHFVYEAGPTGFVIHRWLLKRDIDSIVVAPSKTPTEKGPRQKTDRRDAEQLARLHRAGELKAIHVPDELDEAIRDITRARSDAVDDLRRAKQRLKSFLLRHGYKYQGKADWSDAHRRYLRELVLPIASQKAVLEECLMAINDATNRLQRFDDLIAAQVAQWRMYPAVQALMCLRGFQLTAATILVAELGDVRRFDHPRHLMGYLGLVPKEHTTGESRRLGSITKAGNCHARWILIEAVQSSFLPPKVSSQLSTRQQGQAKLYRELAWKTQVRLFKRGRHLLSRGLMKQKIIVALARELSGFVWDLLRQVPQPKG

SEQ ID NO: 66595 - protein, 460 aa, unidentified
MEHVPVIGIDLAVTAASELAVATGATIEASRKVASTPKGLTEGIAKAAKGRSVAIVVESTAMAWLIAAVAALRSGVDHTLYRVSGRKSAALRAFYRSHTKTDHIDARVLARMPAVDDSLLSFSLPMPAELALKRLVVARHRLTTESTKLQNRVRSMLHWAAPGVLKAAGGTVSAGVVAVLSRWPNLASLAKARSATIALQGEWGSERAEEVRAAAAESVAFYEGFVDFSAVGLELEISLAQLGFLGSQVEALEERIAALHAQLYPKDRLVSVPGVGPVVAGVIRAVVGDLSRFANLASFRAYTGLVPREDSSGEVRRRGRISKAGPSVLRWALYLAADAARQCDPALADLYRRLMVERGRTPTQAVCAVASHLAGRIYAVARAGRDYVWRDLEGNEITKEQARAIAQSLRVDPETRARLRARREGGPRTPYARQPEVPQDVTQPSGDKLIDAALELASKR

SEQ ID NO: 66596 - protein, 801 aa, unidentified
MVVVGADVHKRTHTFVAVDEAGRKLGEKTVRAVTAGHAEAVMWARERFGAEVVWAIEDCRHLSARLERDLLGLGQQVVRVPPKLMAMTRKSARTRGKSDPIDALAVARGFLREPDLPVASHDEVSRELKLLVDRREVLVAQRTATINRLLWRVHELDPEHAPKARSLDLDKHRRILGDWLITQPGLVAELARDELADITRLTATINALATRIGARVRPIAPALLAMPGCGELTAAKLIGETAGVTRFKSEAAFARHAGVAPVPVWSGNTAGRVRMTRSGNRQLNAALHRIAVTQIRLDGLGQVYYRHRLATGDSTPEALRCLIGGVSPLRLGTGLAVAPRSCRGMASLPSQRLMASLSTATLDTPRPSTGVRDMPDPGPNNEEPAKGLDTAESTTDSEGRQGMSYVGWDWASRTHDVTVLDDDGHRQARWAFEHTESGWISTLHRLRCYGEPHELPVIIERTSGLVVDRLLEAGHPVVPVHPASFYAARPRWGASGAKSDPGDSYKLADYLRTDGHRLRRLEPVEPGLRELQALVRLRDDQVRARTAATNQLAATLDAHWPGPRDLFRSLASPIALAFLADYPSPQAAAHLGEARMGAFCRRHAYRGGKSPAELLARLRAAPAAPIGLPAATLSAIVAAQVDLLRALQAAITDIERVIADRVAAHPRARLLEQLPGVGIINLAQLLAELGPILDRVDTAEQAATECGAAPVTKASGKTTGVYFRSAANKRARKAITAFAHNSRMQSRWAATLYADARARGKRNPHAIRILARAWIRIIWACWHSGVPYDPTAHQARQRIAA

SEQ ID NO: 66597 - protein, 401 aa, unidentified
MVSDFMKGRYNLMKIFVGIDIAKLNHFAAAISSDGEILIEPFKFTNDADGFQLLVSKLESFDKNSIIIGLESTAHYGDNLVRYLVAEFYQVCVLNPIKTCQMRKNNVRKTKTDKVDTFVIAKTLMMQDDLRFITFFDLDMMDLKALGRFRQKTIKQRTRLKIQLTTYVDQVFPEIQYFFKSGLHQNAVYALLKEAPSPKEIASMHMTHLANLLKVNSHGHFTKEQAKELRVLAQKSVGANDSAISIQITQTIQQIELLDSQLDKIEAEMTDIMKFNDSVIMTIPGIGYINGGMILGEIGDIHRFSNPNKLLAFAGLDPSVYQSGNFQAKTTRMSKRGSRVLRYALVNAAWNVVRNNATFKAYYDAKRAEGRSHYNALGHCAGKLVRVIWKMLTGEVEFNLE

SEQ ID NO: 66598 - protein, 344 aa, unidentified
MDYYVGLDVSLRSVAVCVVDHDGKAVLERSVPCEIEDIADCLLAFRPTELRLGFEAGAMSQFLFFGLQAVGFNVVCMEARQVNAALSAMRNKTDKTDARGIAQVLRSGWYNPVHIKSREAHAVRALLSSRKAVQRKCIDLANEIRGLFRIFGIRLPPRVEQSSFDERVRPIIEADPDLSHALMPLLDARIALHQAYRELDRRVKQIASHDEICMRFMAIPGVGPIAALTFKAAVDDPNRFTSSRTVAAHFGLTPRRYQSGEMDNPGRISKAGDPDVRSALYGAANAMLMRSIAGSDIKSWGLRLMKRKGRRRAVVAVARKLAVVMHRMWADNTEFHQRSLEGSV

SEQ ID NO: 66599 - protein, 481 aa, unidentified
MGNRAGVDWASEKHDVRVCNAAGDELLASTFAHNEAGLGSLCRVLVQMKVELVAVERPDGVLVDRLLDAGLRVLALHPNQVAAARARFRASGGKSDHFDAFVISELARTDSHRFRVLEPDSDQTKALKALTRAREDLVTARTALVNQLRAELDRFWPGPAELFSSLDSLISLAFLKRYPAPLDAQKLSAVRLAKFLANQHYSGRKTPEELLAKLRTAAVGCAGETEAQAGRAIVLALVATLETLGKQVKQLDRQIALAVRAHPDGAIFLSLFKGADTVLTASVMLAEIGDCRARYPTHESLSGDAGQSPVAVESGKHKVAHFRWACNKRLRDAFCTLADSTRHWHPWAQAVYARAIAKGHDHQRAIRTLGRAWSRVVWRCWQDGVPYKLARHHAAQQYITVIIPSPSGDCVDVPATQRMAGDALPQPPAWTLALLRAACAQRNLHCQNSGARARAVKSGARQGPSAASRVAAALDGPNALR

SEQ ID NO: 66600 - protein, 388 aa, unidentified
MIYVGIDIAKLNHYASAIDSDGVVLIEPFEFLNDNAGFYTLLSKLNSFELDDIIIGLESTAHYGNNLVSFLVTKGLHVCVINPIQTATLRKNNIRKTKTDKVDTLVIAKAVALMDHPRFVTLYDIALMQLKNLGRFRMNLVKQRSRTKIQLTAYLDQVFPELQYFFKSGIHQKTVYAILKEAPSATQIASMHLTHLKNLLVSNSHGHFKKETALELRVLAQKSVGTADRSLSIQITQSIAQIELLDSQLDAVESEMKDIVTSLDSVIMTIPGIGPINGGMIIGEIGDINRFSKPRKLLAFAGLDPSVYQSGNFIAKKTKMSKRGSSALRYALMNAAHNIVKYNQTFKEYYDSKRAEGRGHYNALGHCAGKLVRIIYKMLKDDVEFNLD

SEQ ID NO: 66601 - protein, 395 aa, unidentified
MFIVGIDVAKRSHEVCMITSDGQAVQRPFSIRNNCTGYNLMLEKIRKHTNIKSQIVFAMESTAHYWLALFTRLRKDGYHVILLNPIQTSAMRDMFIRKIKTDAKDSFIIAELIRFGRYAESNVAQDRLLALKELCRNRFYLVDMAGDLKRKLIALIDRVFPEYEAQFDTIFCKSSVAVLKKYPTPQKLSNAHLDKLTELLWNSSNGHFGEWKARELKELARNSFGVEDCDGAYSTLILLMLDQIQSLSGKADALEKEISRLFQSFDTTVTTIPGVGPIIGAVILSEVGDISRFSSADKLAAYIGVDPSVNQSGEFQAAHAHMSKRGSPYLRRCIWMASQVAVQRDPMFRAYYEKKAAEGLKYMTIIGHVTRKMTTVIFAILRDHKVYEPVLPTAA

SEQ ID NO: 66602 - protein, 424 aa, unidentified
MGKKKSSAAGLQALYARVCGLDVHKKLVVACVRILDSKDGTVQSTLRKFGTMTADLIELRGWLTELKVRHVAMESTGIYWQPVFNLLESHFEVWVVNAQHIKKVPGRKTDMKDAEWIAQLLQCGLLRPSFVPDRQQRELRDLTRQLTKLVQQRNAVDNRIQKVLETANIKLGSVASDVLGVSGRKMIEALLAGEKDVTVLADLAQRQLRGKIPELQRALEGELTEHHRFLLRQLLGQYDFLEKEIASVSERLGAVAPSSFRAAVEQLDAISGVGERGARALLAETGTDMSRFPTHKHFASWAGRCPGNHESAGKRRSGKTPAANRHLDAVLTEIAHAAVRSKNSYFKAQYHRLAGRRGKKRAIGAVKHSLLVTVYFMLRDNKPYKDLGVDYFNKLNPQQRIRYHVRRLQELGQEVELSPTAEAA

SEQ ID NO: 66603 - protein, 355 aa, unidentified
MNNEKYVGLDVHQATISVAVLDSTGKVVMESILETKAATLLQFFAGLRGRLWVTFEEGTCAAWLYDLLKPHVAHLVVCNPRKNALLKDGNKSDRIDARKLAQLLRGDHLKPVYHGETGVRTLRELARSYLTTVKDLTRVMNRLKAVYRSWAIACAGRDVYYARHRAAWLDKLPHPGVRRRAEQLYQHLDLLQGLRQQARRELLVESRKHLATARLRQIPCLGPIRAALLVALIQTPHRFRTKRQLWAYGGLALETRISAEYRYLEGQLRRSKKLLSIRGLNRDHNHDLKALLKAASLAASVRPGPFRDFYQTLLAKGIQPNLARLTLARKIAAIALTLWKKGEAFDAEKLKPQAA

SEQ ID NO: 66604 - protein, 403 aa, unidentified
MNNVAGIDVSKGKSMVSVLRPFGEVVAKPFSVGHTGSELKELADYLKSLDGETRVVMEHTGRYYEPVARFLHEEGVFVSAVNPKLIKDYGNNTLRKVKTDKADSRKIARYGIDNWAELRQHTPMDTIRMQLKTLNRQQSLYTKTKTMMKNNLIALLDQTYPGVNALFDSPVREDGSQKWVDFATTFWHVDCVRNMSLTAFAERYRKWCKRHGYNFRQSKAVEVHTGAQDLIAMLPKDALTKTMVRQAIDALNAVSASLERLKAEMQALAAQLPEYTVVMAMHGVGDSLGPQLMAELGDVTRFTHRNAITAFAGVDPGADQSGTHEAKSTRVSKSGPPELRRALFLVMDCLLKTQPQDDPVYRFMDKKRAEGKPYLVYMTAGANKFLRIYYGRVKEYLASLEEN

SEQ ID NO: 66605 - protein, 335 aa, unidentified
MKSWSVTVLSENSVLKRFVQPPDPDALHRFLTRNYPDANYHSVYEAGFCGFWIHERLTALGIENIVINPSDVPTTAGERIQKTDAVDSAKLARSLRAKELKGIYTPDSTSLEIRSLIRLRSTITKDVARQKNRIKSHLRFLGYEIPAEYCNRYWPQRFIVWLRELDMKTQSGRQSLDFMLDLLENLRKEKLQMTRALRALSRTEQYEKPLELVMSVPGVGQQVGMALLAEIVDIKRFKDAGHLSKYVGLVPMCHDSGEHQGIGDITIRKHSFLRTLIVEASWVAIRQDPAMTLAYECHCKRMKPSKAIIKIARKLVNRIYFVMKWQTPYVNCVVS

SEQ ID NO: 66606 - protein, 310 aa, unidentified
MDMITVGIDISKDRLDVAVRPSGEMFVVERKGAGLEVLVERLQALSPHIVALEATGGFETVVTAALAAAGLPVVVVNPAQIRAFAKALGQRAKTDPIDAAVIAHFAEATKPEPRPLPDEATRLLADLVARRRQIIEMMVAERQREKRLSVPRLRKGIARHIKVLENELKSLDDDIGGAVRGSPAWREKENLLESVPGIGPIIARTLIAELPELGQLGRKQIAALAGLAPFTRQSGQWRGRSFIGGGRTAVRTALFMGAMVAKRRNPVLKVFFDRLVAAGKPKMVALVAVARKLLTILNAILRDNRPWQTA

SEQ ID NO: 66607 - protein, 430 aa, unidentified
MEIVYPRSCGVDVHKSFIVAVICISESVKPKYIKKRFSTFNNQLIQFRDWLIENNCQNVCMESTGKYYIPVYNALEGHISNVVVANPKWVKAIKGEKDDNKDAKWIADLFKFGIVRSSYIPEKDIRILREFTRYQYKLVNMRSSEKNRFQNALTTGNCKLDIVFSDIFGKSASAIVDTILSNNPYTSEDILSKVHAGCKASHEDILSAVEGIQLNQFQKARIRIVQKHIEYLDSLLDEIQHHIDLMVANYEEYIQLLCTIPGINRKSAITIISEIGTDMSQWSSHRKLAAWAGLAPGCNESAGKKKSVKISKAGVYLKPCLVQVAHAAVKDKNCDYYADKFNKISKRRGKKRAIIAIARKILIAVYHLLKTGEVFNPTDMADVETTKKQRIEYVKNNLRNAFNQLSRTGLSEAEILQLIRKESTNSPQIE

SEQ ID NO: 66608 - protein, 456 aa, unidentified
MPRGQRRTTRAVTTPVLHPHAAGIDIGATELYVCVPLDRDPQPIRRFGTFTEDLLALAAWLAQCGVTSVAMESTGVYWIPLYQILEERQFEVCLVNARHVKNVPGRKSDVQDCQWLQYLHSVGLLRGSFRPPETVCAVRSLLRHRDSLVQLAATHTQHMQKALTQMNLQLHHVLSDITGVTGLAILDAILAGERDPQELARHRDPRIKASPETIAKALVGDYRLEHLFTLRQSLASYRHYQQLIGECDGEVQALLGDFASQIDPAVHPLPPSPSARRKPHGPAPRFDLRAELYRVLGTDLTQVPGLQTPTVHTLFAELGADLSPFPSGDHFASWLGLCPDNRISGGKVLSVKTRRVKHRVAQALRLAAQSLSRSQSVLGGFFRRMRAKLGAPKAITATAHKLARIVYHLLTTRQPYDESRLAAVEADHRRRTESRLRTQARALGFQLVPVTEQSVS

SEQ ID NO: 66609 - protein, 432 aa, unidentified
MNTAPYDLVIGLDRSDRKADLHLIRVADRHRHSQTIDTSPEALWQWLLQLRQEYPQGRIALCLEQPAAHLMPYLETYEWITLYPINPLTLLKYREAFVTSRAKDDTKDALYLAELLVTHHDKLKPWAPEDESTRAIQQLVYHRRSVVNERVALTNRLKDLLKQYFPQALVLCGDDLWRPLATRFLLKWPSLQAVRKAQTEKLKEFYHLNGSRSAKLMEQRLALIDKAVPVTDQAAVLDSFILRVELICRQLQDVVTTIKTFDQRITAAFEAHDDHEIFSSLPGAGPVLAPRLLATMGSQRERFESAAKLQNYTGIAPVTKQSGGKCYIHRRYLCSKFHRQSFHEYAKESVLWCRWAAAFYLQQRTKGCYHHAAVRALAYKWQRVIWRCWQNRKPYEEKTYETALRRAKSPLVKLFDQVELGKNPFKNTVNKY

SEQ ID NO: 66610 - protein, 450 aa, unidentified
MAQGNGLRRGDRNRNRKIAALREVVARDRAVLAIDLGEDKQAAVVIDHEGRVLARKVVTVKAYQLGGLLAWAAGRAARAGFAGVTVACEPTGHRWKALMGLADEAGHGFVCVQSLAVARAREGDDYTRDKTDHRDAYLIGKLVIRLDCYLPERADAQWARLRHLGARRSALVTDVTACMQQAGDLLGCAWPAPPGAAARPLESVTWLAGMTVITSRCCGHPARLRKMGYDRFKAAIRRELPRWGGKLVYGPVARRLRDALAETGGVAAQRPGALERLHLLLEDWRDLRTRLAATEQRMLTVLDEPGLTALAASIDGVWALSAAVILAGTGDMTRFTSGRAVVKHAGLNPSEHTSATLKGQTRISGRGRPGLRAAAWRAAWAGLRHTTVLRAKYAHLTGRDTSRLAGGQARVACAAAVLRWLWAVITTGTAWDARIAAGQLIPGPVTAAAA

SEQ ID NO: 66611 - protein, 351 aa, unidentified
MDQISRIGMDPSKHIFQLHGVNPAEEPVLRKKLRRKEMFAFLEKLAPTVIAIEACGASHYCARLLQSFGHSVKLIAPQLVKPYIKRGKNDAADAEALCEAMSRPVLGLDPGMRFVPVKTAEQQAALMLVGVRDRLIRNRTQLSNAIRGYAGGFGLTAAKGKAHLAPLLERIHADESLPGLARELFAAQAKEYAQLQAQIDEVDAGLMAWHHADECSRRLTKIPGVGPIGAVLLTMKTPEPELFRSGRQFAAWIGLTPKDHSTAGKVRLGGITRAGDEGLRSVLVVGATTVIQHAQRGGRPSPWLAELLKRKSPKLAAVALANKMARIAWKLMITGENYAAKAAPARLADAA

SEQ ID NO: 66612 - protein, 460 aa, unidentified
MSKIWGIDVSKNFIVAFDGEKVYKISNDELGLLNELFKPNDIAVMEQTGAYGVRYAEILSSLGCKVLFADGKEFKAFRHGNIRKKSDTLDAKYLRQFFLDPQKRRHCYEYNPRMVYTRALVRQHIRNKKDLVMHMNRLKQYLAVIFPEKEYYDLPKNRFLKALDQIEVELYNSIHPFTDLALSELRKLREAYNALKQIEKELSNIAQNHPDYEILKTFPHLSDITIATLIAYYWDINRFNNVDAFIGYTLMGVKYEQSGQKKDAKTDKARTEIKGNFYMVFMQAHKQNSPLRPLTELVQFLCSGRGSYKKRYIKFLDFLFRLIYIALKERTDFKTTLKRRIYNIETDFQLKRLKNQYTKELIQIQRSLTTHFEILRLAECKDISSPSSKEGESVKFISKASHNIEEGANESKTEDSSNKGGCNNKDSGGNRTQKEYCQGDTEHLSTNSERGSRQGKRRRT

SEQ ID NO: 66613 - protein, 336 aa, unidentified
MKHYCGIDLHSNNHVIVVIDEEDKRVFERRVSNNLSLTIKALSPYQDGLQGIAVESTFNWYWLVDGLEAEGYDLQLVNTAAVKQYDGLKYCNDHSDAFHLAHLMRLGILPTGYIYPKEQRAIRDLFRRRISLVRMASTQLISVQSQIWRSTGTRVSSNELRKLEFTPQGLDRHTHQAVHAGLSVYQSIQQEIDALEQSAYQAIKLKKGFEILQTITGVGKILGLTIMLETGDIRRFASPGKFASYCRCVDSRRISNGKKKGTGNAKAGNKYLSWAFSEVAHYAVRFEPLAQRFYERKKAKTNGIIAIRAVARKLARATWMMLRHQQPYDARLMFPG

SEQ ID NO: 66614 - protein, 391 aa, unidentified
MEVMVETCCGIDVHQKSIVCCILDGPLDTNKPKKQHRTFGTTTKKLREALTWIQSENVTHVFFESTGQYWVPVFNIFYDSNLTLILANPQHIKNLPGRKTDLNDAEWIAQLGRCGLIQPSYIPCEEVQQLRLLTRRRKSYTERITQCKNEIHNILQRANIKLTSYLSDIYGLTGMALLEMFINGEVITEETVLPKIQGRVKATVDQLVEAMDGKLSIEDRFLLGQSLEHYRHLVNQVEEITAVIKQYVLERFEREYSLLIELPGVSAIVACVILSEIGPNVEAFQSQGNLASWAGVCPGSYESAGIKKSSHTTQGNKYLKSSLFQAGGTAGRSKDEAFHNLYARISGRSSKMKAIIACAHKLIRIIYKILSTGEHYDAKKALGLRQQARAN

SEQ ID NO: 66615 - protein, 369 aa, unidentified
MTQCIKTRFVGLDVHKDTIVIAVAELGREAARVVATVPHEWKALRKVLDKLGPRSQVACCYEAGPTGYGLARALIAAGWACDVIAPSLIPKKRGERIKTDRRDAVKLAQNHRAGELVAVFIPDEQTEAIRDLERARGAAKKAERVVRHQLSKFLLRNGRRYPGKTTWNDAHHTWIAKQTFAEPAQQYVLSDGLAAVEGATLRASQLTARLREVTAGWSREPLLKALQAMRGVEFVTAVTLVAEVGDFRRFATAQDFMGYVGLIPSEQTSGNHRRQGPITKTGNAHVRHVLVESAWHYRRQPRMSKALRERSAGISPQVCAIAWKAQKRLHGRLNRLIGRGKNKGEAVTAVARELAGFVWAISRECPCSA

SEQ ID NO: 66616 - protein, 458 aa, unidentified
MKIKSIYPARNSSQLREVLGKYSPGELLYAPIDVAKYNHKACAVNFFGDILTPAFEFSNNAHGVKFFISKITEAARNAKAKKIFIGLEATGHYHQNLTLHLKSLGYEVAVINPFDSWKERLNKSSKTDKIDLGSIAKSLISRKFSSSTVPEGVYYNLQRATRTRRKFVNRRTSSKNIITGLLDNLFPGLWDKEDTIFSDRWGKASLSVLEHYPTPQMVLRLGEKRLTRFLKKGTTKLGEKTARKIISAAKVALTRSPYEQTMDILALRSHLQAYRLYEEIIFHLEKEIAYLLVQTPGTYLLSVPGISVTYAAEVTAEIGDISRFAYANQIISLAGTCSKKDQTGEHDPQNLPISKKGNKFLRTVLNQAGLSLNTWCPDFNAYYSRKVEEKKGRCEIARTATGNKFARLAFALMKHESLYHPHSFNTLVQDPGNYYLLSLWRNTEEVKGFLFREDPSSE

SEQ ID NO: 66617 - protein, 360 aa, unidentified
MRTKVSENLFKDQPFYVGIDYHKKSWKVTILSETYEHKTMSMNPDPELLASYLHRNFPGGTYHAVYEAGFSGFGTCRRLNQLGIDCKVIHPADVPTSQKERLQKTDKADSRKLARSLKDDKFNFIDVPDPKLEADRALVRQRFRVMKDLSRTKNRVKSLLFQFGIDIPERFTSAQTRHWSKVFLRWLTELPIQLQSVKNVLDNYISIGKMQREHLLMLNRQVRELSRTDDYKNNYLLLLSIPGIGVTTAMLMLTQLGDIKRFNGLDELCQYIGLVPSMYGSGDKLQTGKMIHRGRKELKIMLIEASWEAVRNDPAMMAKFHELIKKMPNNKAIIRIARKLLNRIHRVLITREKYELGVVK

SEQ ID NO: 66618 - protein, 426 aa, unidentified
MAYRIAGIDVHKKMVAVVVADVDVAGTWQFDRRQLGTSPAQLRGLADWLVEREVVEVVMESTAQYWRPVWEALERSWQPRMQQTDPAPRAGTLHLAQAQSNEGPRGRKRDVPDAERLVKRLVAHELTLSFVPDVTQRLWRTVARRKYQSTCNRVQLQNRLECLLEEMHIKLSSLVADLIGPSARRMLRAIANGDTDPGAVVALGSRRLHATPDQLRDALGACTDLHPVYRRLLALTLDELEVIERHIHQLDEELAQLLRGHQDAVERLAAVPGLGVDSAQQIITEVGPTAATFPAAKRLASWVGACPGHDESAGINHSHRAPNGNRQMRRLLNQAANAAVKAKGSIFQLVYRRLVVRLGHAQAIGAIAHRLCRLIWKILHDGVTYEERGPAVTKHRAQRRAAKMIRELRSLGYRVERDLPPASALA

SEQ ID NO: 66619 - protein, 405 aa, unidentified
MTDQKVIPKRFIGLDVHKYYLIAYGVDQQLNVLLPTQRVELSRLENWIRKTLTEQDALVLEMTTNTWELYDELSPHVHSVTVVHPPHVALITRAQVMNDKIAATILARLLAKGLLVGIWVPPQEVRELRALVAQRSKMTRLATQAKNRLQAILQQRHLAGPDGNPFGEEQNQWWEELPLSKLEKVNLQSNLHTLRFAQEEVKRLSKLMDELAAQDERATRLIHLPGFGVVTTLTVLSAIGEISRFADPKHLVGYAGLGTRVHDSGMTTRTGRITKAGRKDLRTALVEAAQIAANTHPHWKAELARLEPRLGRNKAIVAIARKLLMAVWFVLSYQTTDRYAEPLLVARKLIQFGYRIRKHNRPAGQSNAQFVRQQMDRLQLGADLHEVPSGSKKPIPLPPSTLLLK

SEQ ID NO: 66620 - protein, 458 aa, unidentified
MKIYLGGDASKGYTDWVMISETKKKLLDNFQLDDTFEGHHQLYNAIKGCVEKYPKAEIYAALESTGGYENNWLNTLKSYQKEFNIMVARVNPVGVSHDSKASMNRNVTDAVSALSIAEYLINHPDKIRYEQDETWKSLRRHWNFVEMQKKQRVQTINQLDMLLYSANPILLSYKTDKLADWLLEVIIQYPTANLLAKAKAEKLSKIPYLSLEKAEKIIASVQKSIASATDKDTGVLIKQIALQIRMFDQTIDSQMSLIEKELVSSDIDILKTFKGIDTTSAIGLVLEIGAVERFERVKSICAFFGLNPKFKQSGDKIIGVRMSKQGSKKMRKILFNIAFGAIVHNPLIQEIYQRKLSEGMTGMAAIGVCMHKILRIVYGMLKNKKGFDAQIDKQNSNRSAIKQTEKNQQKDAYILKNRRFQDYDKNAPISKRQTKKRKEHVLSQCEITSQGAGSTCSS

SEQ ID NO: 66621 - protein, 330 aa, unidentified
MKTWNVVLGVDVSKKTVDICWAEQKLFIKIDNNSEGFRKFKKWCKEKGIGLQDVFIVLEHTGGYEYRFMQFCESESIDYKRVPGLEIKQSMGMCRGKSDKADAFRISEYGEGKIKRLIPDKPLDNRFLNLKQLLSLRKKIVRESAGYKNAAGERKHMYEPGDTDMLLRISQEKIEANTRYVQQIEARIIEMIKSDESMYLNYRIITSIKGIGPVNGWMTIAYTENFTSFPDGRHYAVYVGVIPFEHTSGTSKKGRRRTSNLAQKELKQELNQAAKIAIQHDRELGSYAERKLKYKEYGLVLNNVKFKLILRMFSLVKRQEMYVENYRRSA

SEQ ID NO: 66622 - protein, 343 aa, unidentified
MQVSTIGVDLAKNVFQVHGVDSAGKVVIIRQLRRKQVIDFFSKIPPCLVGMEACGTAHHWAREVSKLGHTVRLMPPSYVRGYVKRSKNDAADAAAICEAVTRPSMRFVPIKSADQQALLMLHRTRDLLIRQRTQLTNALRAHLAEFGLVAETGREGLAQLAAIITDERNHETLPSAMKQALQAIVDQLAALELQIGTLDRAIHTHHRANDMSCRLETVPGIGVIGATAIASTVTDPSDFKSGRDFAAWIGLVPRQHSTGGKERLGGISKQGDRYLRRLLVIGATAVVRHARHCPQKHPWVMKLLRKKPAKLVAVAVANKMARIAWAIMAKGGYYRAPELAAAA

SEQ ID NO: 66623 - protein, 433 aa, unidentified
MYTPHPHDLIIGLDRSDRQADLHLIDTRTGQHRSQTIDTAPEALREWLLQLRQEHPQARVALCLEQPAVHLVAFLEAYEWITLYPINPITLQKFREAFVTSRAKDDTRDADYLAELLLTHHRQLKPWAPEDSQTRAVQQLVLHRRAVVDERTALTNRLIALLKQYFPQALVLCGEDLWRPLATRFLLKWPSLQAVQKAKPATLKAFYYLNGSRSAKLLEQRLALVAKAVPVTDETALIDSFVLRVQLIGRQLQLLQQTLANYEKRIAQHYVAHPDRGIFASLPGAGAVLGPRLLASLGSQRERFQTHRSLQCYSGVAPVTKKSGGSCRIHRRYLCPKFHRQSFHEYAKESILWSRWAAAYYLQQRTKGCPHHTAVRGLAFKWQRIIWRCWQNRTPYQEQTYQAALRRSNSPLIALLDKVQLGKSPFKNPVNNS

SEQ ID NO: 66624 - protein, 344 aa, unidentified
MSSVTSAVVFVGLDYHAASVQVCGLSREGKVLLNRSCKNDWRAVAQAVREHCGPEVGVQAAIESCCGAASLADELIGRAHWSVDLAHAGYVARMKQSPDKTDFSDARMLADLERVGYLPRVWLAPEEVRELRRLVRYRQSLAKERKNLKLQIGATLRELRQKPPANANPWTKAWLAWLESSAELSPNARHITSRRLIRLAALAREIRQTERLLARQTADDPLVQKLITLKGIGLVTAVTIRAEIGRFDRFRTGKQLARFCGLSPRNASSGQKQADAGLIKAGNQALRVTLIEAAHRLRRCDERWERLAAQLARRGKPTSVIIAAVANRWVRWLFHQVQPPSLAA

SEQ ID NO: 66625 - protein, 352 aa, unidentified
MNEKYVAMDVHKASVAIGVRDGAGKYIMESIVETKASTLLDFVKGLRGTIHLTFEEGTQSAWLYDLLKPHVAKCVVCNPRKNKLLEEGNKGDRIDVQKLSQLLQTGMLRPVYHGDHGTRALKESAHCYESVVRDRTRVKNRLKAIYRGRGISCEGDGVYNVAKREQWLAQLAERGVRQRASNLYRQLESLNALVAETQQQLLGESRKHQAASILRSVATLGPISVAMIIATCDTPHRFRTKRQFWTYCGFAVVTRSSADHYFENGELRKRRKPALTRGLNRNYNRRLKKVFKSAAISGSRQGPFKPFYDQLLARGLKPDLAKLTLARKIAAITLAIWKKGERFDPKKLEVNS

SEQ ID NO: 66626 - protein, 365 aa, unidentified
MKQVYGCDGHKTYSVFVAMDEAGQRGPAVRVEHDRAQFHRFLKILPSGSPIALESIGSWYWMVEEMEQAGHVPFLTHRRKAKLMMGMINKSDKLDAGGLAQLLHNGTLPKIWIPPGELRDQRELPRMRMAMARVRTMLKNRIHADLAKYAIYIEEVSDIFGVRGRALVEQHLAVLPPYTRQAVQTQLALLDQVEEQIRLTEKRIKAVIKETAAMQLLMTLPGFGPILSIVVALEVGDVNRFARPEKLASYGGTVPRLEQSGKRRVHGPVRPDVNRYLKWALIEAANMVVLNQRSWPDRHVVRLYRRIRERRGHAKAVVAVARHLAEATYWVLKKGEPYREPTQHQLLSSTRKEARASHESLRLVH

SEQ ID NO: 66627 - protein, 367 aa, unidentified
MENVITYVGLDVHKKMIVVAMLIPGQPVPLRWDCPNERGKVRRTLERIRREAVGAVQMCYEAGPCGYALQRQVAEFDASMKCMVVAPSLIPHKPGERIKTDKRDALKLAEYLRSGLLTEVRPPTAEEEAARDLCRAREDASEDLRRCQHRLSKFLLRRGVAFTKGKKAWTRSHRLWLCGLKFDNTCTQSVFDDYLLAVEQTEARLLGLQIRLTELSQAEPYAEPVGRLRCFRGIDTITAMTIVVELYAFGRFRSARGLMAFLGLVPGEHTSSDKVRRTGITRTGNGHVRRLLIESAWHYRHRAMPGAALKKRRLGQSAQAIAIADKAMLRLNRRYTRMVARGKSGALTVTAVARELAGFIWATLRVA

SEQ ID NO: 66628 - protein, 350 aa, unidentified
MDKKVLKQSAGIDVSQKELVVCVGRLYDDWSVDLYGHKSFGNTLKGFQLLVSWVKKMTDAALGVRFVMEATGVYHESLAYFLDDHGYDQSIVLPNKISNYARSLDVRTVTDKTASEAIARFGLERKLDNWRRPKEIFKRLRQITRERDQVVTARTIAKNQLHAEEAQAWPNAGSVSRIKQQIKLLNRQDKEIKEEIAALIKTDEAVKGSVDTISSLPGVGNLTAAIALAETNGFELIRNKKQLASYAGFDVKEKQSGTSVKGKSKISKRGNRHLRKAMHMPALAAIRHDERYKAIYTRLVSRHGIKMKAAVAVQRKLLEMIYTLYKTNTLYDKNYLQRNELKKEANVEMG

SEQ ID NO: 66629 - protein, 457 aa, unidentified
MAKRRRKAMSRKFKITKLPAELQHINLNAAGIDVGSERHLVAVPEGRDVVSVREFGTFTSDLEALATWLKKCGVTTVAMESTGVYWIPLFEVLERRGFEVKLVDARHVKNVSGRKSDVLDCQWIQQLHTYGLLAGAFRPPDEICVLRSYLRQKEMLTQASSMHIQHMQKALQQMNLLLHNVVSDITGATGMKIIKAILAGERDPQVLSRNRDERCKHSATTIAKSLVGNYREEHLFALRQAVDLYETYQTKIADCEQAIIKELEKQPNVSDDEPPPADKETQARDRIRAGVDVRDMLYQKSGVDLFAIPGLAADTLLILASEVGFDMRPWKTEKHFSSWLSLCPGTRRSGGKVLDSKTKRNPNRAAQAFRMAASSLSRSTTALGAFYRRIKMRTSGQQAVTATAHKIARIYYAMLTKGASYIELGQQAYEQRYKQRRLDQLKNQAKSLGYQLIPCAS

SEQ ID NO: 66630 - protein, 428 aa, unidentified
MNQVDRIRLEEFRQFRKEIRGSTEYLIVGMDVAKDQHVAFFGTATGKTLFRRLVFDNNIEGFEKLLVQVEALKVQHVHGKVVFGLEPTANYHKPLGEHLIRCGHKVVLVSGVAVKENRKSLDGRWDKNDDKDAANVADLVSQGKCLFYEYAAMAVRDLRDLLSLKRRLKRQEQGMRVRIRNGLLAKYFPELDRYYERSESGSLGIVRWGLDPSVIAGLEYGQFVQRVAPGKRRLCQESRLQAIWKLAVDSIGCEVGSVVEFEAQVMVEGLKQIREVIQATEEKIEEICSPFPEYSCLRSIPGFGPDVSSKVLGAIGDPFRFQNGQQVLKLAGLDLNAERSGKTSGAAVPVISKKGKADLRYALYQAAFIASTKNQGFMVYYTHKLRGREREPGIKTKMRVKLAAKLLIIAWTLMKKKEPFNPDYLKLE

SEQ ID NO: 66631 - protein, 386 aa, unidentified
MAHSTNIAPPSVDYDQTLILAIELSNKSWVVAAQVPGLSQTKAKRTIEPNKNDLLATIDGYRIRAAAAGHSVKRVITSYEAGWCGFWLARWLMAHDIEVHVVQPSSVPVDRRMRRGKSDGIDAELLLRTLLAWLRGEPRVCSMVPIPDEADEDARRCVRERSELVSERVGLVNRIGAVLATLGADDYDPLLQSRRRRLTELRTALGDPIPPNALGKIARLLTRLELVLAQIAELELERDAIARTDAPDQAGKMIQQLISLRGIGVQSATVLVREAFVRRFANGKALGSYAGLTSTPYSSGGIDREQGIGKAGNRRLRTAMVELAWLWQRYQPGTAQAVWFRERVGSTGRRLRKVMVVALARKLLIALWRFVIDGVMPEGAVTKPSI

SEQ ID NO: 66632 - protein, 359 aa, unidentified
MKSEEKNNTSFFENILLFIGIDVHKLKWVVTIRTYDLELKTFTMKPSAEELERFLLKNYPGAEYRIVYECCFSGFWIYDYFSEKGYKIIVTPTNRIYKDGSTIKTDKIDSRKLAFQLSRQLLREVVVPVKRVREYKYIFRIYDKQKMRQGQILRQIKAFLEQKNHPLKWSKWNKGLLEKLKELKFEDKLFDLKFGNLLKEYGYVVEQIKDSEKIISEIKEDEQLGKRIELIEKINGIGIISAVRMSVYLFDRKDRFESSERLNHYLGLTPSERSSGDKITRGRSGMCGNRQLRSIIIQLAWMTVRKDGALLEKFDRVYKKSGSKQKAIVASARKLMTKIYAVIQKEEEYRINIRSCKAA

SEQ ID NO: 66633 - protein, 366 aa, unidentified
MRKHHHFGTFDAVRRGHPLHHYAGIDVSLELSSVCIVDAKGKIVREAKVASDPDALVAFFKQLGFRVVRIGLEAGPLSQWLYAGLAQAGFEAVLLETRHVKAALSAMTVKTDRKDARGIAQLIRMGWFRPVHCKSPGSQEVRALLVARKQLLGKLLDVELSIRGILRGFGLKMGVVTRKTFEARARELSSGQTMLETVVGAMLTARAALQSEYAKLHKTMLVIVRDDKICRRLMTAPGVGPVVAITFKTAVDDPTRILKSKAVGPLFGLTPKKYQSGETDVTGGITCVGDTMVRTALYEAANILLSRVTRFSALKRWAVEVAKRRGLKRAKVALARKIGVILHRMWVDGTDFRWTKAELGSGVAAH

SEQ ID NO: 66634 - protein, 322 aa, unidentified
MARVQGKTTTELPQHFAGIDVSKAHLDIRLSRERRAHRFPNDPAGFAALAAHLGAASHLIVLEPTGRYHHAIWKALAAAGHRVAPINPLHVRRFAESEGELSKTDALDAAVLARMAAERRPVAKAPPGEEQLRIKELMTSLANRTDRRAMLKAGRKEVRDPLIAELDEAEINLLNAAIDTLKAEIAGLIEADPERARSAEILVSIPGIGVSSAHRIIADMPEIGTLNDKQAGALLGAAPRACESGKRKNRRRTKGGRRHLRAALHMPAIAAARANPDLKAFRQRLKARGKPGAVITTAILRKLIVLANALVAQNRLWEPKMG

SEQ ID NO: 66635 - protein, 395 aa, unidentified
MFIVGIDVAKRNHEVTVITSAGQVVCKGFRISNTCTGYNRMMERLGKLTNLKSQFIFAMESTAHYWLALYTRLKKDGHQVVILNPIQTHTMREMFLRKSKTDAKDSLVIAEVIRFGRYAASDVPQEKLLALKELCRNRAYLMDMASDLKRKAVAILDRVFPEYETLFDSAFCKTSLAVLAKYPTPDKLSRVQLGKLTEVLQKSSNGRFGEWKAREIKELAHGSFGVADCEGVYSTLIQLFLEQIHTLLETCSSLERQINELLLQFDTTLTTIPGVGTLLAATILSEIGDISRFSSADKLAAYIGVDPAVNQSGEFVGSHVHMSKRGSPYLRRAVWMASMIAVQRDPMFKAYYEKKASEGLRYMNIIGHVTKKMTAVIYAIMRDNKAYVPVMPVVA

SEQ ID NO: 66636 - protein, 346 aa, unidentified
MYNDNLIAIDLSKSSFQGCLLDKNHNERFNRKFTRNKLTEWLSRQQPLTVAMEACGSAHHWARLVERMGHRPLLVPTRTVARYREGHKTDATDALASGVAARQPKTRFVAPKTIEQQGMQGVERIREHFSDQRTATSNMIRALLYEFGLTIPKGIRAFKRTVVELLEDAENDLPMPLRMQLIESWEYYLELETRLKAAEKARDQVIAHHECCQQLQQLQGVGPVNSLGLYLTLGDRGSSFGHGREASACIGVTPKQYSTGGEVTMLGISKECANKRLRSSLIQGARAVINSLRKRDPKNGLEIWLKALMVRRGEGRATVALANKTIRLAWAMLHYGEDFKLHGNMA

SEQ ID NO: 66637 - protein, 358 aa, unidentified
MTGTMTWAAMDVHARSIHAAALDVLSGELTRRRFDSGRVEPVVAWLGELAGPVHACYEAGPTGFGLYRAATAAGVRCEVIAPSKTPRASGDKIKSDRKDAEHLLRQLMAGALTPIAVPTASHEAARDLARAREQVRGDLMRCRHRLSKLLLRHGRVWDQSTWTQAHQRWLGAQRFEHVNTELAYLDNLAACEGLLSRRVALDERLSHVARDPEFWPIVSRLRAFRGIDTLSALVIVLEVGDFARFGRAVQLGSWLGLVPSRQQSGETDTHGPITKTGSRYARRILVEASWHYLRAPRIGVTLAARHDGLPDHVLAWRAQHRLHRVHRRLRAHRKAPNIAAIACARELSCFLWAAATAP

SEQ ID NO: 66638 - protein, 321 aa, unidentified
MNKDKEIYGIDISKCTFDVYSHESGHCQFKNDEKGFMAFIKTLDKSSLVVMEATGYYHYRLAQYLYKKGIAVSVVNPLSVKRFIQMKLAKVKTDKSDAKAIFEYGQINDVPLYTALTDVQSECLQLFRLLDNYLKKRTATKNKLHGEETLGIPSKFVYRSLKRDLKHLNKEVTALEERLLELVKQEQQHQLTLLKSIPGMGVKTALFLIVLTDGFSKFETASQLCSYVGITPTIKESGSSVRGRSRISKVGNKKLRNLLFLCAFSACKHNKACREIYERIVSKGKSKKLALIAVANKLLRQAFAIAKSGRPYDENFVSRLV

SEQ ID NO: 66639 - protein, 374 aa, unidentified
MENTVTYVAMDTHKKQHKIALHYPCQEEIVEFTINNTVHDINKMVKKIAKEAPRKVEFCYEAGVCGFTLKRRIEQHDCHCSVIAPSLIPRKPGERVKTDRRDAKKLLMLSKAGLLTEVHAPDEHQESARELTRQRETAKENLKRIRHQLLKFLTRHGYVYSNGHHWTQKHIDWLRTIEFTESMLKSVFENYFSEMIYCIGRLENLDKEVELLANSAEYKEVVGHLRCLHGIDTLTAITIITEIFNFGRFESPRHLMSYLGLTPSENSSGDQQKKGAITKTGNKRIRRLLNEASWHYRHMYAPSAILKKRRQGQPQWAINIADAAGRRLSKRYRHLINNGKMPCKANIAVARELAGFIWFLVTQYQTRKNAKDAA

SEQ ID NO: 66640 - protein, 345 aa, unidentified
MKKIIKQVVGIDVAQKELVVSLSRMDEQITVEIFAHKVFANNPKGFTALMGWVEKLTDAQVYLSYVMEATGVYHERLAYFLEEKGQAVSIVLPSKISNYARTLDVKTVTDKTASDAIARFGAERKLDKWKRPKAIFKKLRQLTRERDQVVADRTVAKNQLHAELAEAEPGKSSVDRIKKKISFFDKQEKEIMTELKVVMSVDDELKRLVALICTIPGVGLLTAIIVLAETNGFELIRNKRQLVSYAGLDVREKQSGTSVRGKPRISKKGNRFLRKAMHFPALSAIRHDEKYKAIFARLVSKHGIKMKAAVCVQRKMLEMIYTVFKKQEAYDRMYYMRQAEVQAGA

SEQ ID NO: 66641 - protein, 416 aa, unidentified
MVSRGSGWKLLFVGDDWAEDHHDVCLQDAAGRVLAARRLPGGVAGITRLHELVAGHQDGDDPSQVVVAIETDRGPWVRALVAAGYRVYAVNPKQAARHREVVAVSGKKDDAFDAAALADMGRTRRHQLREVAADSDEAEAVKVAARAHQKLVRERTRQALRMRSALREYFPAALDAYAPLTLTGPDTLELLAKAPGPAAAARLTIAQISAALKRARRHDVAGKARQIRAALREQHLGQPEIVTEAYAAGVRASAAVITVLNEQVKVMEAMVESLFRRHPDAGIYLSQPGIGVITGARMPGEFGDAPGRYADARARRNYAATSPLTIASGKKKTVHARFIHNDHLVNAMHDQAFAAISASPGARAYYDELRSREIDHTGALRRVANRQAGILHGCPKTGTGYDEHTAWGHRSQPAAA

SEQ ID NO: 66642 - protein, 355 aa, unidentified
MDSVKYIGMDVHKEAISIAVLNSSGKLVMECVIETKAITILQFVQGLRGSLHITLEEGTWAAWLYDLLKPHVTKIVVCNPRRNALLKEGSKSDRIDARKLAELLRSNLLRPVYHGEHGVRTLKELARSYLTISKDLGRVMSRLKAIYRSWGIPCTGKQVYAPRYRAEWLAKITEAGVHRRAEFYYQQLDALRPLRQQVRQELLAEARKHSAWKLLREIPSIGPIRAALIIAILQTPHRFRTKRQLWTYSGFGIETHSSAEHRYIKGELQRSKKQISIRGLNRHHNHDLKNLFKSAATIAAAKPGPFQEFYDALVAKGIKPEMARLTLARKIAAISLVVWKRGVSFDAEHLKPQTV

SEQ ID NO: 66643 - protein, 318 aa, unidentified
MKMTQSITAVGIDTSKAKLDVAVHGRTECWQVDNALAGWRHLAAEFRGIGVTRIGIEASGGYERDVVGYLRQQGFSVIVLQPIQVKAYARMHLRRAKNDKLDAVLIAACAATIEQLRIEPDERLAKLAVDLTFVEQTEEDIARFKVRLEHVSEARVRRMIEADIARLKLRREAELLRILKALRVHDDLALRFDLVLSVPGIGERTALALIIRMPELGRISREEAAALAGVAPFDDDSGTHKGQRHIAGGRARLRRSLYAAALPAAFRWNKALIDLYRRLTARGKAHNAALIACARKILIYANAVVARGTPWVDKPATT

SEQ ID NO: 66644 - protein, 378 aa, unidentified
MSGTPTALVDSINPSLFVAFELGWKTWKLASTVGLGQKLRISTIPAGDQKAVMREFSTALDRFGLAADSRVVSCYEAGRDGFWLHRFLTHIGVENIVIDSASIEVSRRSRRPKTDRLDAKKLVTMVVRWDLGEKPWSVVHVPSVEGEDSRQLHRELKTLKKDATRHINRIKGLLANHGIRINTIPKNLKPWLEEQRLWDGSPFPNGVAVRVLLEHDRLRFIRSQVLAIEKERRRLLVECKTKDAQVAHKLHRLGAIGVNGAWTFSTELFATREFKNRKQVGSLVGLTPTPFDSGGTNREQGIDKAGNKWVRSMAVEIAWAWLRFQPRSALSLWYQRRFGAGSKRLRKIGIVALARKLIIALWHWTEHDVLPKGAILKA

SEQ ID NO: 66645 - protein, 392 aa, unidentified
MRISVGIDIAKEAHWVTAVDADGVVRIDRKLANTPAAIAGLIDELKQLGGTVRVGLDVVGGIAGLVEAMLADAGLALVHVPGLAVNRARQGTVGGEHKSDPRDARVIAEQVRIRQDLRPIEPASELDLELRLLVGRRGDLVAAQTQRLSRLHDLLVGIFPGLERALDLTTKGPLVLLTRFVTPAELRAAGTKRLIRHLKAAGGLPKVEALAERALAAAAEQTIAVPAERMSARLIRELATEALATRTRLASLDRELEELLDRHPDAALIRSLPGMGAVLTAELIAEAGSLSRFRSADALAAAAGIAPVLRQSGKVRFLRRPTGGNKGLKRVFYQSAFCSLGSPDSRAFYDRKRREGKRHHQAVLALARRRINVLWAMLNHRQAFQPNFKLAA

SEQ ID NO: 66646 - protein, 351 aa, unidentified
MTNYKIGCDAHKKFSQFAIRDEAGRLCQQRRIEHEPGAIREFLSRFPEQTPVALECVGNWYWIVDEIEAAGCIPHMANAGKAKVMMGNIHKTDKLDAAGLATLEHLGSLPKVWIPSSEQRDRRELPRTRMALKKHVVGLKNRIHATLAKYAVQIDAKDIFVGDGRRALDEALSRLPTETRYCTEQELEVLDSIEEQIKILEKRIKQQNAQTPSIQLLKSLPGFGDILAIVVDCEVGDIGRFDYCEHFASYAGVVPKEQSSGGKIRFGRMLAESNHYLKWAFIEAANGVSSHRNAPNWRNKHVVRLYERISSKKGHTKAIGAVARHLAEAAFWVLKKGEPYREPKPHLPKQA

SEQ ID NO: 66647 - protein, 347 aa, unidentified
MKIIGCDFHPSYQQVAWLDTETGEVREATLAHENGEARRFYESLRGPVRVGMEAVGNTLWFERLLAGLGHEVWIGDAAHIRSLVVRRQKTDRRDAVHVLELLTSDRFPRIWVPGPEQRDTRQLLFDRHKLVRLRARVKNELQHLALNQGVRRKRKLWSTAGRQLLESLPLDGWTAQRRQDLLQLLDQLHRRIGELDRAVEAEAARHPAAQLLQTHPGIGPVTGLAFVLTLGPWQRFRCAKAVASYLGLNPREHSSGGRQKLGAISKQGNPLLRSLLVEAALSAVRGDAELRRAYRRLAQRKHTALARVMVARKLAVRLYWMLRSNQPYAPRPAVRMPGSPSHSVVAV

SEQ ID NO: 66648 - protein, 462 aa, unidentified
MTKRRKKAKSRSFQITKLPAQLQHINLNAAGIDIGSERHLVAVPEGRDEVSVREFGTFTVDLEALAAWLKTCGVTTVAMESTGVYWIPLFELLERRGFEVKLVDARHVKNVSGRKSDVLDCQWLQQLHTYGLLAGAFRPPDEVCVLRSYLRQREMLRQVASQHIQHMQKALQQMNLLLHNVVSDITGVTGMKIIKAILAGERDPRVLASNRDDRCKQSRATIAKSLVGNYRAEHLFALRQALDLYAVYQAKIADCDEAIIKQLEKKPDLSDDQPPSGDRYVQARDRVRGGIDVRELLFKKSGVDLFAIPGLAADHLLTLASEVGFDMSPWKTEKHFSSWLGVCPGTKRSGGKTLDSKTKRNPNRAAQAFRMAAASLSRSRTALGAFYRRLKARRSGAQAVTATAHKLARIYYAMLTKGANYIELGQQAYEQRYKERRIAHLKIQAKSLGFQLVACTADESSF

SEQ ID NO: 66649 - protein, 366 aa, unidentified
MKKVSTVAAKQSRNNSQQKLTIGLDLGDRNSWYCVVDEAGQIQLEQRVRTTAKALQEVFGAMPRSRIALEIGTHSPWISRLLSELEHEVMVANARKVRLIGESRKKDDRLDAQTLARLARIDPELLYPVKHRSAQAQADLMMIRARAGLVRARTGLVNTARGLAKSYGERLRSCNVRNMNAEKAEGLSPELQRALEPLLAAIEEVSTRICEYNERIETLAQASYPQVALLKQIKGVGTLIALTFLLTLEDPHRFPKSRDVGCYLGLQPGRRNSGQSEPQMHISKEGDPYLRTLLVQGAQHILGPFGIDCDLRRWGLKLAERGGRNGKKRAIVATARKLAVLLHHLWVSGEVYEPLRNRNCMTAAAA

SEQ ID NO: 66650 - protein, 342 aa, unidentified
MKIKQIGIDIGKTTFHMIALNEANDVVFRRQFTRSQLIRFFTNRADQHLNVAFEAGSGAHWLAHQLIALGCEVLLLTPECVKPFAKAQKNDWNDALAIAEAAHRPGRHAVGLKSHEQLDMQALHRVRQRLVTSRTALINQVRGLLRERGLVFRSGRAQFEAFVRDRLVTGDVDLNPVCRALFAALAAEYETLNSRLADIDRELEVFAKTNPVCRALLPVPGVGVIVATALYSAVANISDFKTGRDLAAFLGLVPRQRSTGGRTVLLGISKRGNTYLRTLLIHGMRSAFYNRQKRDNEMSAFMERLNVRGLHTNKIVVAGANKAARIIWAVLSKNTSYQSRSA

SEQ ID NO: 66651 - protein, 326 aa, unidentified
MKTNLVLGIDVSKSELDFAEMADSLKQQGCIDNKLRCIKKHLSQYDKDTVRIVFEPTGTYSDKLEQVLIEMGFVYHRVNPSQSHHFALSIGVVNKTDRQAAITLAKMGKALDLPIYHPPSQSVKKRKGLLKALANLVTEQERYKNRLHAEIQLVQPDNDLVSLYQDLIKIYEDKITNLQKKLVDQEDSKFQANKKLGMSVCGIGEVNAVWLLTFTNNLENFDVDKRVVKFLGLAPSSHRSGTSVNKKYGVNKSCAGKIKGNLFMGAKSAIRFNPACKDLYQRLRNKGKNYYQAMIAVMGKLVRQFFAVVKSGVPFDKEYHLKFQKI

SEQ ID NO: 66652 - protein, 370 aa, unidentified
MRKSVLYVGLDVHKMSMDVAIAEAGPGAEVRFYGQIGGDLDSLDRVIRKLRATGAQLQFAYEAGPCGYVVYRHLTAQGWPCLVAAPSLIPRRPGDRIKCDRRDALSLARLFRAGELTPVKVPDPDDEAMRDLTRAREDAVSVERRAKQRTGAFLLRHGRRYPGKTTWGRGHWRWLLQQVMGHPAQQIVLQEYLDAVRQASARVQRLTGQIQELLPQWRRAPFVAAYQALRGVSLIVAATMAAELGDLSRFNNPKELMAYLGLVPSEHSSGASVRRGRITKTGNGHARRVLVEAAWAYRLRARVTRPLLQRQEGLPENIRQISWRAQLRLCARYRRFLARGKAKQTIVTAIARELAAFIWATGQALEPLTA

SEQ ID NO: 66653 - protein, 337 aa, unidentified
MRITTLGIDLAKSVFQLHGVNEAGEVVLRRQLRRAALLAFLSELPACRIGMEACASAHDWGRRISAMGHDVRLIAPAYVKPYVKRQKNDAADAEAICEAVLRPGMGNVPIKSEEQQGCLMLHRSRDLLMRQRTMLLNAMRSHLAEFGIVLPQGPARIIAFMKGLRESGHPDLPDGAVLAMDVMSSQLDVLATGIHAIERKLLAWHRDNAVSQRLETIPGVGLITATALAASVGDPEAFRSGRHFAAFLGLVPRQTSSGGKERLGRITKMGNSYLRRLLVIGATSVVRRAGACTTGTGAWLRHLLERKPARLVTVAMANKTARIAWAIMAHGEEYRAA

SEQ ID NO: 66654 - protein, 322 aa, unidentified
MVEAVVGVDIAKKKCDVALFMNGKFKHKTCLNNRQGFEELSQWLKRQGVERVRVCMEATGTYGDELATYMHDAGHTVSIVNPARIKGFAQGELLRTKNDKVDAALIARFCVAMNPVVWTPPPLEIRRLQSLVKRADALIVMRTQEQNRFGTAHETIESSIKEHIGYLDQEIEKLKRQIAEHINSDPNLRTKRDLLSSIPGIGEATVAFILSALHIFEGVDRVQKTVAFIGLAPREVISGSSIKGKPRICKIGHARFRKALFMPALAAMRYNPVMIDFCNRLRKKGKNGKVIVCAVMRKLVHVIYGILKSGKPFDPNYKPNFA

SEQ ID NO: 66655 - protein, 333 aa, unidentified
MEHWIGIDVSSATLDFALLDGKGTHLESVQIENDRKAVRKLMGQWSKRHGVEVGKSLICLEATGHYTLMMLNLIVGQQWHAWLAHPNDIQQSMGIKRVKNDKVDALRIAQYARTFHEKARLFTAQNLKLDRLKHLITRRNHLVRSRARHRTHITDLNRYMDRQLRTEFDRIDKRQIKLEDQLVAHVDALILAEIRTDPQTERQYDLLRTIPGVGPQLAAYLVACTDGFARFNTPRQLSCHAGVAPFERSSGSSVRGRTQVSHQADKSLKTLLHMSALVSVREPGELRQYFERKRAEGKKPILVVNAVRNKLVHRVCAVIRNNRPYERRPITTT

SEQ ID NO: 66656 - protein, 335 aa, unidentified
MDKITTVGLDLAKSVFSLHGVDAQGRTVLRKTVRRDRLMELIAALPPCLIGMEACGGAHEWARQFQHYGHRIGIMMARFVAPYRKSSKNDGNDAQAICEAVGRPNMRFVPVKSAEQQAILSLHRVRQGYVEQRTATINRIRGLLAEFGIVLPQRAAEVRRAAVVLAEQLPILAREAITDLRAHLTHLDARIAHYEQQLTSLNRECEPARRIMTMPGIGPLTASAITASVASGHEFSNGRQFAAWLGLVPRQHSTGGKTRLGRITKRGDAYLRTLLMLGARAVLQSAAQKSDRLSRWAVALRERRGYHRAVIAIAAKNARIIWALLTSESSFVPVN

SEQ ID NO: 66657 - protein, 377 aa, unidentified
MADRITYVGLDVHKEGIAVAAAEGGLRGEVREYGRIANTPAALDRLAGKLGHEGVWLRFCYEAGPCGYGIQRHLSARGHECVVVAPSLIPKRAGDRVKTDRRDAASLARLHRAGELTAVWVPDPGHEAMRDLVRARLDAVHALRRARQQLSGFLLRHGCHYGRPAWTKLHRRWLAGLKFEQPVHHLVLEDYVQAVEAAEARRDRLTAQIAAMLPDWTLAPVVAALQTMRGMALVNAATLIAELGDLSRFANPRQLMAYLGLVPSEHSSGASVRRGGLTKPAPGGEQGAGNGAARRLLIEAAWCYRFPARVSRELLLRQEEQPKRIREIAWKAQVRLCARYRKLARTGKPANVVTAAIARELAGFVWAITRSVPPAAD

SEQ ID NO: 66658 - protein, 357 aa, unidentified
MESQEVKYVGVDCGKKSIEVVRINSENSLERRQFSTTESGINNLLQWLTLNDIVGLEAGSQSFRIAKSILNKGVQVIVLNPGNLATIYQSLKKTDKEDSLKIARLIQRHPIEELPTVPIPNDEEEDNRRLCSEHENWTKQLTQGKNRLHSLFTQAGLTQITKKHLRTKANREISVALLPSRYQKEAERILKVLDLVEQNLKLIEKEIQEALKKNKAYVQTIMSMPGIGMITSLAIMSYMGDCKRFSSAKQAAYYAGLVPRVDISGDTVRYGRIINRGCHSIRRVIVQAAWSLVRCQHGGKVKEFYQRLYLKKGAKKSIIATSRKMIEVLYVMIRTGKLFDSMPENGINRKLTQYGLM

SEQ ID NO: 66659 - protein, 333 aa, unidentified
MDHCAIDLGGKKSQVCLRSPDGRVLLEARYDTLSLPDFLRQLPHSRVILETAAEAFRIADAAKTAGHEVRVVPATLVRTLGVGARKTKTDRRDAQMLSEVSCRIDLPSVHIPSARSREWKTICGMHDALISSRTKLINNLRGWLRGQGLRLSSGSAETLAGRIAEIESLPEYVASQVAMLALLTEKIRTSEQRIEDLAKSDELCKRLMTVPGIGPSTAARFVAAIDDIRRFESAHKVEAYLGLAPGESSSSERQQRLSITKAGPSTVRWVLVQAAWSLQVRCRSLAARPLQLWTAEVAKRRGKRIATIALARKLAGILYALWRDGTTYELRPQ

SEQ ID NO: 66660 - protein, 327 aa, unidentified
MQVIGVDVSKEKLHCAWLRDAARRQVRPKSVANTADGHAALLAWATRVTGAAAAELHVVLEATGVYHEAAATFLHDAGCHVSVVNPLQVKRFAESLGVRTKTDRHDGLILALFGDARRPAAWTPPPGEIRQLKALLGRLAALEQDFARELNRLETARAEPAPDAVLVSLQTMLDVLAAEIARLRRQIDDHLDSHPELKEQRALLESIPGIGAKLSLWFLALFRSRTFASARQAAAFLGLVPVEFQSGSSVLKRPRLSKAGDARWRARLFLPAMVAARWNPLVRAQYQRLLAAGKSKMSALGAAMRKLVHIAFGVLKHHKPFDPNVAA

SEQ ID NO: 66661 - protein, 414 aa, unidentified
MDVLHERCAGIDISKRDAKVCVRTPSPRRKGTFTQQTATFGATTNAILDLREHLLGAGVTLVVMEATGDYWKPFYYLLAEELNVILVNARQVKNLPGRKTDVSDAAWLAQLGSHGLVRASFVPPQPVRELRDLTRTRTQLTRERAQVAQRLEKLLEDAGIKLSAVVSDLMGVSGRAMLQALIDGQRDPHILADLAKRRMRSKIPELNQALTGRFREHHAFLTRLYLDQYDQLSGAIKQLTVRIEEAMSPFRPALDLLDTIPGVNQAVAEVIVAETGGDMTRFRSAQHLASWAGLCPGHHESAGRVRSTRVRPGNPYLKGALGMAAFGAARTKGSFLQARYKRLTARRGPIKALVAVEHSIIIAVWHMLSDNVPYHELGGDYFTRRDPERAARRAVSRLNDLGYRVTLDPMEAAG

SEQ ID NO: 66662 - protein, 315 aa, unidentified
MTNHPKRRKNIHVGVDVGKYFLDIAIHEKGLHWQVPNNPDGIKSLLRRLAHYSVKCLAMEATGRYEFELAQAAHQKGLPVAIIKPLRIRRFAGAINQLAKTDKIDAAVIAQFAAMTEPAATPKKSENLIAIRNLTARRRQLIGMRTQEINRQKIMGEALADSCQRILDGLNAEIELIEAQLAKQVEAQAQWQEKQQLLKTAPGVGNTLIYTLLADLPELGSLNNKEVGALVGVAPINRDSGRQRGKRRIQGGRANIRTVLYMATLSATQCNPVIREFYQRLLKQGKHKKVAITACMRKFITMLNAMVRDKSVWAY

SEQ ID NO: 66663 - protein, 370 aa, unidentified
MTDNSHNGKMLLVAMELSNSKWRLAFSGGDKVRQKVIEARNRSRFLDELGQAKEKFGLKDAPVLCCYEAGRDGFWIYRWLKSEGIGCLVVDPASIEVNRRKRRAKTDRLDAESLVRLLRRYKDGDRYVWSVIRIPDEQQEDELRLHRELERLKKERTAHRCRIKSLLVLHGISVSGSLSRLDQKLDELICWNGKPLPEALRSELHRESERLSQVSEQIKLLEKQKLEKLKAPQTHADRRAAELIRLNGIGEVSAWVLAKEFFGWRDFKNRREVGALSGLTPTPYDSGGSCKEQGISKAGSPRVRRVMIELAWSWIRFQPESELTKWFEKRFAHGSSRMRRVGITALARKLLVALWKYVEFGMVPEGAIIR

SEQ ID NO: 66664 - protein, 411 aa, unidentified
MRLFVGDDWAEDHHDVEVMDAAGRVLGKARLPEGAAGMARLHELTGQHLGDDPDAAEVVIGIETDRGPWVAALVAAGYTVYAVNPLQASRYRERHGVSGAKSDAGDAHMLAGMVRTDSHQLRAVAGDSAEAEGIKVLARTRKTLIWERTRQVQRLRHQLREYFPAALEAFDDLDAPDTLELLAKAPEPARAARLTRAQVSAALKRARRRNITDKATAVLAALRSPQLGQPAVVTAAYAVTVRSLIAVITVLNDQVKALQGQVEADFGRHPDAEIYQSQPGMGAILGARVLAEFGDDPDRYADGKSRRNYAGTSPLTRASGKRKVVAARFIHNDRLVDALNAQAFAALNASPGARALYDELRARGIEHNDALRRLANRLVGILHGCLKTRTLYDEATAWSHRQNLPQSSVAA

SEQ ID NO: 66665 - protein, 388 aa, unidentified
MNRIIKIGMDVHSTNYTLCAMEPTIGAEDRIFGEIQVAPDYKEILCFIESLKMKLGFFDDYSIECGYEAGCLGYTLYHQLTGAGIKCVILAPSTMLTQQGQRIKTDRRDARLIAQCLCYGGYHPVYIPTGEDDAVKEYVRMRDDHKLALKKLKQQINAFVLRHGHQYAGTKWTIKHLIWLSKLELHPMYRETLNEYMTSYEEQEAKIERYDKRIEEIAAEARYKDKAEKLGCFLGIRTHTALSLIVETGDFKRFAKGNTYAAFLGLAPGEHSSSTSINRLGISKTGNAHLRCLLIEAAKSICKGAIGHKSKELRSRQNGQSAEVIAYADKANTRLRSKYYRMIRHGKKKNVSVAAVARELACFIWGMMTGNIGIISGTSTSALAVSQG

SEQ ID NO: 66666 - protein, 324 aa, unidentified
MTDYVGIDVAKDQLVVCLLTAEGSAESRMDNTRKGFNQLHHWLKKQQATHAHICLEATGIYGIDVAQFLHDKGYPVSVVNPARIKGFAESQMRRSKTDRLDAAVIAAFCRALQPESWTPPAPAWYELRALLRHLDDLHQTRQQQVNRLEAATTELVREQLQQHIAFLDEQIAQLRQQITAQLSQHPDLQRQVELLTSIPGIGNLTALRLLAEIRSFTAFEDVRQLVAFVGLDPTRHESGRTVRGGRSISRKGQATLRAALFLPALVAKRHNPLLRAFAQRLEAHGKLPKQIIVALMRKLLHLAYGVLKSGQPFDPHFGQLPLTP

SEQ ID NO: 66667 - protein, 413 aa, unidentified
MRRLIDRCAGIDVGQALLVVCVRVVTEQGELDEEIRSFGATTPDLEALRDWLTAVGVTHVAMESTGVYWKAPYYMLEDDFEVMLVNAAHLKHVPGRKTDVIDAQWIAEILSYGLLRPSFVPPRPFRELRDLTRYRKALTRARTGEVNRLHKVLEDAGVKLATVATDVMGVSGREMMRALIGGVADPQVLAELARARLRAKLPELRRALTARFREHHAFLLARMLAHIEALEHDIEVVSERIAELIEPWQGQVMILDSITGVGSRAAEVILAEIGPDMSRFPTAGHLASWAGRCPGQRESAGRRGSAKPRKGSPWLADVLTECAWAAVKTKDTYLSAYYRQVMRRQGKQKAIVAVTHKILVIAWHLLSSGALYDDPGAAAVRKTTEEQQRRRAIRQLEALGLEVTVRLREGDAA

SEQ ID NO: 66668 - protein, 348 aa, unidentified
MRPYTNTHAYYCGVDLHARSLYVNVLDNAGTTRLEQDLPASPDAFLDTVKPYRAGLVVGCECMFAWYWLADLCERERIPFVLGHALAMKAIHGGKAKNDRLDARKIAGLLKGGFFPMAHLYPKAKRDTRDLLRRRSFFVRQRAQLIAHVQNTNAQYNLPPFDKKLTYKGNRSAAIADRFEHPSTKLSITADLALVENYDTQIAALENHLVKSARIDDPATFAFLRTVPGIGPILGLVMLYEIDAIDRFAEVGNFLSYARLVTCTHESAGKVKGVGGRKIGNAHLKWAFAEAASLMLRSFPAAKSWMLRQSKKRGAKKAHAILEAKIGRAVYHLWRKQVAFDAAKFLAS

SEQ ID NO: 66669 - protein, 353 aa, unidentified
MRTYYVGMDVHRATIAIVVLNGAGKVVEQLVVETSATRVRRYLKQLQGRVYVTFEEGTQAQWLYDVVQPLVTEVIVCDPRHNKLLKAGNKSDRIDAQKLAELLRNGSLKAVDHRDHGVRALKELVRNYDCLVSDTTRVMNRLKAMFRRQAIACGGHEVYRQDRREVWLGKLTERGAKERASSLYRQLAALKALRHEAKLAMVREARRGAAYVWLMSVPRLGAVSVAQLLAVVGTPHRFRTKRQFWTYVGLAVVTSSTADMEVVDGVLRRSRRPVATRGLNRNHNHLLKRVFKNAATSACQSEPFKQHYELRLQQGMDPALARLTVARQLSAITLSLWKRGEKFQAERMKRQAA

SEQ ID NO: 66670 - protein, 408 aa, unidentified
MEVLHARCCGLDVHKKTVVACLLTPGLGGKPLREVRTYGTTTRELLALVDWLAANGCTHVAMESTGSYWKPVHNLLESFFELLVVNAHHLKAVPGRKTDVRDSEWIADLLQHGLIRPSFIPSRPGRELRELTRYRTTLVRERASEVNRIQKVLEGANIKLASVASNVVGVSGRAMLSAMVAGVVDAEVMAEMARGKLRNKIGTLKEALHGRLGSHQRFLLGAQLRHVDELGQLIDEVSAEVEERLRPSQEDLTRLTTIPGVGRRTAEILLSELGADIARFPSARHLASWAGICPGNHQSAGRSGTGRTRKGSPWLRSALVEAARAAGRGRTYLGAQYHRIAARRGANRAAVAVAHSILVIVYHMLSDRRDYHDLGGNYFDERHREQVSRRLTRRLEALGYSVSLSPAA

SEQ ID NO: 66671 - protein, 388 aa, unidentified
MLPVINALEVQKGKPAMKKNITELENPRRRVARKNKQRELTIGVDLGDKASRYCVLDREGNVLFERSTATTKRGLAQAFANMGASRIAMEVGTHSPWVKRLLESWNHEVIVANAHRVRLITESTRKDDRLDARKLARLARVDPELLSPIRHRSEGAQAHLVMIRARAALVEARTKLVNSARGVTKSFGERLESCDPDQMRVKCLVRLPSSLQSALQPLVTAVESLTRQIHEYDNQIAQIARREYPETARLRQVTGVGELIALTYVLTLEDPQRFRRSRDVGGYLGLRPKRRDSGASRPQLRITKEGDVYLRMLLVQGAQYILGWHGVDTDLRRWGLKLAARGGKNAKKGAVIAVARKLAVLLHRLWITGERYEALRQNQAASSLPVAV

SEQ ID NO: 66672 - protein, 312 aa, unidentified
MAHIICGVDVSAETLDARIGRDGVWQQFARTSEGIAQLALFCKTHQASLVVMEATGAYERLPFAQLWAADMPVAIVNPRSVHQFAQAMGALEKTDKIDTGMIAWYAETKRIEPTPPASNNQQRLTTLVVRMRQLIELRTAQNNQRRLVDDADVLASFTAVLSTINQQIRSLEAKVIALIDADPLWFALDAAFREIKGVADRTVARLMAHVPEIGTLSGKAIAKLSGLAPIARDSGKKTGKRPVRGGREAVRSVLYIVAEVVRRHDPDFKAFHATLRAAGKPAKVVRIALARKLLVRLNAKARDVRKALAQPA

SEQ ID NO: 66673 - protein, 370 aa, unidentified
MPDTTTFIGLDVHARSIKAVSLDVMTGEVRAATFGYDAGAVAEWVRSVDPRARCVYESGVTGFDLQKRLSGLGVDCVVGAVSKMIKPSADRRRKNDRNDAEFLARMLSVGNVVEVWVPDDECEAARDLTRALEDARDDLSRSKQRLSKFLLRHGLAFDERTPTGRRKGNWTRAHWSWIESIRFAERADNDVLAYYVDAVRRAAEDKARLEGLVEAEARKPRWRRRVDSLRCLKGVDTASAADLVFEAGEFSRFRNARSFAAWVGLTPSEHSSGESDRRGAITKAGNKHLRKTLVEAAWHYLTCSGRPKDLAKGQAPDRGARRHAAKGVRRLVERREALLARGVHGNKANVATARELACWVWAVGLMAEEA

SEQ ID NO: 66674 - protein, 354 aa, unidentified
MKPSQATGDSEMNATAMNVVGIDLAKLVFQAYWIEPETGEIRNVQIKRAKFLDHFVNRKPCLVGMEACGGAQHWARELAKLGHEVVMLPAKAVKAFVSGNKSDAIDARAIWMAVRHGGIKHVALKTEAQQAVLALHRMRQQQVKVRTMQINELRGLLTEYGEVFGKGRAPLARGVAGALERLSARLPQVVIDSLLEQWQRVDEADRQITQIEARLKSLLKADKNAQRITKIPGVGLLSATAISAAMGQPSAFKSGREFAAWLGLVPAHTGTGGKTRMLSISRRGDTYLRTLLIHGARAVLANGKQPSTWLQQIIQRRPKNVATVALANKMARTIWALLKHDREYEPGWLSKAPI

SEQ ID NO: 66675 - protein, 351 aa, unidentified
MNEQEVIGYSVYVGIDWADKKHDVCICPRDSDTREFDVIRHHAKAIDAWVKDMHQRYGGRIAIAVELSKGPIVSALQKYDFIDIFPVNPASLAKYREAFQPSKAKDDPTDAELAVDMLLRHPEHFKVLKPQSVEMRALATMVEQRRRLVNDQGRITNRLRSALKQYYPQVLEWFEHIDTPLFCAFVKRWPTLTQARRARANTLKQFFHEHHMYREEVVERRRRAIKAASPLTLDKAVIMPYRMQVLVLVEQLELMFKAIGQFDDAIAKLASQHPDYALFEPLPGAGPSLTPRLMVAFGEQRERFSSAGDVQKLSGIAPVTERSGQKHWVHWRSVPDLYAPDVRGMGSTNDQ

SEQ ID NO: 66676 - protein, 415 aa, unidentified
MAKVMEAVIRCCAGLDVHSKTVATCVRSVDDQGKIHAEVRTFGTMTRDLLSLCDWLTEEGVSHVAMESTGVFWKPIYNILEEQFEILLVNARHIKNVPGRKTDVKDCEWIAQLLQCGLLRGSFIPPRPQRELRDLTRMRTQLTQEMSRIANRIHKVLEDTNIKLGVVATDILGVSGRQMIQALIAGETDTVKLADMARGRLRDKIPLLEQALVGKITEHHKFMLKALMDQLIYLESQIERFNQRIEEAARPFDKAITALIPMPGYERASAQSVIAEIGPDMNPFPTDDHLCSWAKICPGNNESAGKRKSGAAGHGNRWLRATLVQVAWAASHKKNSYFQAQYRRLAGRRGKKKAIVAVAHSILTVTYYILKLERSYKDLGGDYFDRISRDRIRRYHTKRLESLGYEVLLTDKEAA

SEQ ID NO: 66677 - protein, 409 aa, unidentified
MRIIGLDIHRAFAEAVAWDDGKLKRLGRVDMRRHLLEAFAKKLSREDMVVIEATGNAASVASVIAPHVKKVVIANPKQVRIIAHAKIKTDTIDASVLAQLYASGFLPEVWIPDEPTQVLRRQVTRRNQIVRQRSRLKNIIQSILHSHLIPSCPHADLCGASGRAWLFHQVLPEDERLAVERHLREFDRLREDLKVIERDLARSALADESVKRLMTIPGVDMVVALAIMAAIGDVGRFEQSQKLVSYLGLNPSVRQSGPGPAYHGRITKQGRGHARGMLVEAAWAAARAPGPLRAFFLRVRARRGQHVAAVATARKLAVLIWHLLIKDESYVWARPALHAKKVRDLELKAGYRAERGQRGAACAYNVKSHRDQERRWVEQAEAAYARFVAGWNPRGPKPARTGAANEVRR

SEQ ID NO: 66678 - protein, 343 aa, unidentified
MKITTIGIDLAKNVVQVHGVDEQGKAVLKKQLRRHQVAPFFANLSACLVGMEACSSSHHWARQLERLGHQVKLMAPQFVKPYVKTNKHDAADAEAICEAVSRPNMRFVPIKNGEQQAVLALHRARQGFVKARTAQANQIRGLLGEYGIVVPQGIVHIAKRLPAILEDGENDLPGSFRQLLARLGDHLKELDRQVGELEQQIQHWHRENEASRKLEQIPGIGPLSASALVATIGDAKQFENARQLAAWLGLVPRQHSSGGKPMLLGISKRGDAYLRTLPIHDARSVVRVTGGKVDEGQRWLVQLIGRRHTNVAAVALANKNARIVWALLAHDRDYRADYAALFA

SEQ ID NO: 66679 - protein, 411 aa, unidentified
MEVLFTHCAGLDVHKKTVVACVLVPDPKGGVRKVTRTFATTLAGLEELARWLLGFGVTHVVMESTGVYWKPVYNVLAPQCEVWIVNAQHVKQVPGRKTDVSDAEWLAQLMRLGLLARSFIPDVEQRDLRDLTRYRTRLAQERATAANRLQKILEDANIKLAAVVSDIQGVSAQAMLEALIGGETDATVMADLALGRLRAKIPALTEALTGRVREHHRFMLRELLDHLAHLGECIETVNVRIRELTAPHEALILRLMRIPGVKRHTAEVILAEVGSDVTPFPTAKHLASWACLCPGNDISANKRRSGKTRHGQKWLRAALVEAAWATTRSKDTYLAAQFQRLRSRRGDKRAAVAVAHSILTIVYQLLANPEAVFTELGGDFFIKKNVEQERRRAVKRLETLGFQVTLTPVSA

SEQ ID NO: 66680 - protein, 367 aa, unidentified
MENHNIVWVGMDTDAKKNQIALYRGWDKELAAEWEVGMDAKGIRRLIERLKQEDGEIRCVYEAGPCGYELYRRLRKAGMQCDVIAPSLTPRKPGDRVKTNRRDARNLARLYRAGELTVIDVPDEKQEALRDLTRAREDVREDLTRRQHRLSRFLVRQGCHYQDGDKWTQKHWAWIRKIHFQDSNAQTVLEEWIRAVEQSQEQLKTLDSKIEENAQKPEYANKVQRYQTLRGVKTVTAMTIVAEVWDMRRYGTAPQFMGSTGLVSSEHSTGDHERRGKITKAGNAHLRRILVEAAWQYRHRASASKAIKSRRKGQPSEVVSIAERADQRLNRKFRRMVDRYNKRPGTTAVAVARELAGFIWAIGQIQS

SEQ ID NO: 66681 - protein, 348 aa, unidentified
MDYYAGIDVSLECSSVCVVEANGKIVRESKIASEPEALIAWFGSLGFGLERIGLEAGPLSQWLYAGMREAGLAVELLETRHVRKAFETMPVKSDRNDARGIAQLMRLGWFRPVHCKSLAAQEARALLTARKLIQSKLFDVEMSLRGILRGFGLKVGPTTPRKFAGRIKELVAGQATLEVVAAALLAVHEVLRREFAGLEKRVRLAAREDARVRLMMSAPGVGAIVALTYVSAIDDPGRFKSSKGVGAHFGLTPKKYQSGETDITGRISKIGDGSVRTALYEAAHVILTRPVKGSALKSWAMRLAKRAGMKKAKVALARRLAVILHRMWVDGTRFAFTAPKDPVAVTAA

SEQ ID NO: 66682 - protein, 360 aa, unidentified
MTGTMTFAGLDVHARSTHGAAIDVLGGELRRVRFGPGSEPVVAWLGELPQPVYACYEAGPTGFALYRAAVEAGLRVDVIAPSKTPRAPGDRIKSDRKDAELLARLLLAGQLKTVTVPSATVEAARHLCRAREQVRSDLMRCRHRVSKLLLLHGRVYPEPTAWNARHRQWLARQRFEEPATELAFLDTLAAVDGLVARKRALDERLSRLALEGDWWPTVARLRCFRGIDTLTAFVLSLEIGDFARFDNPRKLSSWLGLVPSLDQSGESRRQGAITKTGSGYARRLLVESAWHYLRQPRIGATVANRQQGQPAHVLQIAWRAQHRLYRLHARLRARGKPANISTVAVARELACFLWAAAVAE

SEQ ID NO: 66683 - protein, 350 aa, unidentified
MSNHMFAAADVHAATTTFAVLDASGKFVMETVVETKAESLLSVVKSITGAVHLTFEEGTHAAWLYDLLKPHVAELLVCDPRKNRNNSGNKSDRIDARQLARWLRSGDLSPVYHGQDSTRILKELVRGYENVVADSVRTKNRLKAIYRSQGESTSGMDVYKCEKREEWLSKLQSSGLRSRAEWLYSQMESLDDLRGEAETAVLREAKKHRPCSLVKSVPGIGPIRAATIVAHVATPFRFRTKRQLWAYCGLAVVTWGSSDWEIDGETLLQKRLPVATRGLNRNHNRYLKNVFKGAVRDARAFRPHLDSLVESGMRESMARLTVARKIAATTLAIWKKGEKFVLSKAVIRSE

SEQ ID NO: 66684 - protein, 367 aa, unidentified
MFTERTSVGLDVHARSVAAAAIDGVTGELVQAKLTPSYEHVRSWLQDLPGPVAVTYEAGPTGFGLQRHLSAAGIRCLVAAPSKLQKPSGDRVKTDAKDAIHLARLLRLDEVTAVAVPSADQEAARDLVRAREDCRGDLMRARHRLSKLLLRHGIVYYGGQAWTGKHDAWLHHEALPQLECRATRMTFDSDYDTVLTVKARRDRLDNAIEEMAADSEFTPLVRRLGCLRGVSTLTGFALAVEVGDWHRFTGNTIGSFVGLVPSEYSSGTSRVQGSVTKTGNAHVRRLLVEAAWHHRARYRVGKTMRDRWDLAPAAARARGDEGNRRLHQRWVRFIERKKRPTIANVAIARELAGWCWSLAVLEDSGLE

SEQ ID NO: 66685 - protein, 344 aa, unidentified
MTIIRIGLDTSKHVFHVHGVDGDEQPALRRRLRRSQVEKFFAKLPPTRIGLEACGASHHWARVLRSLGHEVVLIPPQYIKPYVKRGKNDAIDAEAICEAMSRPGMHFVPIKSRDEQAALMLLKVRDLLMKQRTMLTNAIRGHAAEFGVIATKGPQNLAELLERLGEDANVPAPARELLNSLAGQIAALEVRLEALEAKLKAHHKADPRSRLLATIPGVGPITALSLTLKVPDATVFRSGRHFAAWLGITPREHSTAGRQRLGKISRQGDEGLRQSLVLGATAVIQQVERRIKAQRVSRTDSPWLLQLLARKPEKVAAVALANKMARIIWAMLVSGELYRQPQAV

SEQ ID NO: 66686 - protein, 422 aa, unidentified
MLHDSEDTEEIIERVAALDIGKAELVACVRVPNPNSPGRRAQEITTYSTMTRSLLGLGERLRELGVSRVVMEATSDYWKPVFYILEAQGLDPWLVNAKDVKHLPGRPKTDRLDAVWLAKIAERQMIRPSFVPPPRIRLLRDLTRYRVDLIKARTAEKNRVEKLLEDAQIKLSAVVSDIFGISGREMLAALLAGERDPAVLAQLARSRMRAKIPVLEQAFVGRFTDHHAFLLRTMLARIDETSADIAAVETRIEELIVPFAQAVSQLDEITGVGITAAHVVIAEIGIDMSRFPTAAHLCSWARFAPGVKESAGKNKGRGTTGHGNPYLARVLGEAAVAASRTDTFLGERYRRIARRRGKKKAIVAVGRSILVIIWHLLSDPDTRYHDLGSDFYDHRIGPDRKKRNHIRQLEALGYKVTLQPAA

SEQ ID NO: 66687 - protein, 415 aa, unidentified
MDVLYSCCCGLDVHKKTVVACLVHAGADGRHSREVRTFGTMTDDLLALAEWLRAAGCTHVAMESTGVYWKPVYNILEDQFDALVVNAAHIKAVPGRKTDVKDAEWIADLLQHGLVRPSFIPDRPQRELRDLTRTRTALIDERSAAVNRLQKVLEDANLKVASVATDVMGVSGRAMVEAILQGTTDPATLADLAKGRLRAKRAELERALAGRVSGHHRLLLTTHLAHVDFLDEEIARLSAEIAQRLHPVEEAMQRLDTIPGVDRHTAEVLVAELGTELERFPSAAHVASWAGMCPGNHESAGKRRGGRTRKGSKWLRRTLIEAACGAVRTKQAGRTALAGHYRRLVARRGRQKAIVAVGHRLLLIIYNVLRHGQSYQEPTPTDLDQHRRRRARDRAIDQLRQLGYDVTITPKPTAA

SEQ ID NO: 66688 - protein, 312 aa, unidentified
MSTEYFVGIDVSKDTLDVCVYPTQDTFRVPNSPDGMDELIKRLKPIDPRLIVFEATGGYETLAVSSLAAAGLPVVVVNARQIRDFAKSIGQLAKTDGIDAAVIARFASAVRPELRPLKDSPCQELTGLVTRRRQIVDMIVAETNRLRAATRRNRRDIQTHIRWLQKRLEQIDDEIKRDIQNGPLWRTTDQILQSTPGVGPTTSAMLISCVPELGPLNRKKIACLIGVAPLNRDSGRFKGRRMIWGGRAQVRSVLYMSTLSAIRSNPIIRQFYQRLREAGKCFKVALVACMRKLLIILNAMVRNQTKWRYCPK

SEQ ID NO: 66689 - protein, 317 aa, unidentified
MQDILKQNVIGIDVAKQKLDIYDRGRNRHFIVENSASGIDEFIEQMPDHGSLVVMEATGGYEFQMVTTLLQRGIDCAVVNPRQVRDFIRGCGRMAKNDRIDARQIAFFGEVTRPKLMKKSDENTEKLKALVNRREQVLKQISQENNRLEQTRDKQLRDFIRQAIDFYNSQKKKLDQQIEQLLNQCQSLQPEADIIRSVKGVGVVTTAVLLSQLPELGQLNRGQIAKLVGVAPFARDSGQTSGQRSIYGGRTNVRKAIYMATLVAVRWNDHIKRFYQSLVAKGKPKKLALVACMRKLLTILNAMIKNNQKWGENNLAT

SEQ ID NO: 66690 - protein, 354 aa, unidentified
MLIIGADYHPGFQQIAFVDTETGELQERRLQHREEAEKFYRDLAAQGMKVRVGMEASGHARWFERLLSELQFELWIGDAAEISSRRVRKQKTDRQDAQLILKLMLKDDFPQIWVPSWENRDLRQLLWHRHRMVQARTRMMNQLQAVALNEGLRCKKKLWREAGRQQLESFPLAPWASQRRRDLLELLDQLNPTIAKLTQAIEEEVKRYPAAQRLRTHPGVGPLTALAFVLIIGKADRFQCGKQIASYLGLVPLEKSSGNQRRLGHITKQGNSLLRFLLVEAAQVTVRSLPEWRSKYCHLTMRRGRKIAKVAMARKLAVRLYWMLRKEWDYEQLTRFGSHAGKPGHRDGVKHNTE

SEQ ID NO: 66691 - protein, 403 aa, unidentified
MTMRRRAWVGIDVGKTSHHACAIDETGKVVWNQKVSNEQRTIEQLVTRACKGAEQVRWAIDLTSPMALMLITVLLCAEQSVVYVPGRTVNTMTHAFRGEGKTDAKDARVIAETARLRNDLSNVVLPDELVVELTQLTGYRADLMADWVRGINRLRALLGSIFPGLEAAFDYSTRTPLILVSGLCTPAEIRAAGIDGMTALLVDNHAWPTGIVKSAATAAALANEQPLALPGEAGTAALVKRLAGRLLELDREIKDIDKTITERFRDHPYARIIESLPGFGPGLGAEFLVVTRGDLASFATAGRLASYAGLVPVPKDSGRITGNLRRPKRYNRRLRRVFYLAALSSLRADGPSRRFYDRKRAERLIHTQALLALARRLIDVLWALLRDDREFTPEKPTAAAAAA

SEQ ID NO: 66692 - protein, 305 aa, unidentified
MSQTPNTAIAVIGIDIGKNSFHVVGHDARGAIVLRQKWSRGQVEARLANIPPCLIGMEACVGAHHLSRKLASLGHDARLMPAKYVRPYSKGQKNDFNDAEAIAEAVQRPTMKFVATKTAEQLDLQALHRVRERLVSQRTGIINQIRAFMLERGIAVRQGIGFLRTELPTILATRTDALSPRMLRVIEELAGDWRRLDQRIDGLSGEIEALARQDQACSRLMTVPGIGPIISSAMVAAIGTGDVFSKGRDFGAWLGLVPKQISTGDRTILGKISRRGNRYLRVLFVQAAWVVLVRIKNWERYGLKS

SEQ ID NO: 66693 - protein, 451 aa, unidentified
MKNKSVSMEVINRNAAGIDVGSRSHYVAIGQQREDVREFGVYNEDLSQLLAWLKANQITTVAMESTGNYWQSLFSFLQEAGLEVYLCNGKFTKNIKGRKTDVQDCQWIQKLHSLGLLSSSFLPDLATEQLRTYCRHRTSLLETSAMTTQKMQKYLRLLNLRLDIVVKDVCGLTGLQIIEAVCKGETNPQVLASFRHGNCRKSEEEIAKALQSNGRKDYLFGLQQEFDLYKILQAKMEQCDVAIAKLLSEQIEGDETKRALQAEAKPHKKVNKNTPKNMDLNQLAYQYFDGVDLMRIEGVSHATVIALMSEVGCEGIKKFETSKQFTSWLRLCPNIKISGGKVLSKKIAKGSNRLKIALRLAANTIGNLKDTHLSDFFNRINYRKGRIAAISATARKLAVIIWNMIVKHVPYNPPSQYLFMDQKRKMKLVQRIRNKIAKLDLKPEDVGFAMN

SEQ ID NO: 66694 - protein, 337 aa, unidentified
MNYSGIDLHSNNSVIVVSDETDRVLCKRRVANDLRVVLSTLEPYRQELAAVAVESTFNWYWLVDGLQAAGYTVRLANTAAMKRYEGLKYSDDDTDAAYLAQLLRLGILPTGYICPIEERGLRDLARKRLQLSRSRTQHILAVETNVARQTGARIASRVVKQLTEQTVQELGLSEEVRWALAANVAVIQTLNVQIKKLEEHLGTRVRPRAEFKLLTTVPGIGEILATTIMLETASIERFAGVGNFASYARCVDSKHLSNGKKKGEGNVRNGNKYLAWAFIEAANFARRYCPEAKRFHDRKRAQTNTIVATKALAHKLARACYHMLKEGQPFDVKRCFA

SEQ ID NO: 66695 - protein, 348 aa, unidentified
MKILALDLGKNKSVFVDYTVGGDRAFGKIGTNPRELRNLLQRSVPDRLVIEAGPAAGWVCNLAESMKVPVQVANANDERWRWKTVKEKSDRKDALKLATLWEMDSLPTVHVPKASVRQWRSLIEYRHALVQRRTAIKNSIRSIYERQGLNLPSAKRAWTKAAVEELKKEASAALPEQLWLFQVHCELQQFESIQRQIEAVEEKLEQRAKADGRVEQLKTAPCVGPRLGETVVAILDDPHRFRNGRQVGCYAGLTPRRWQSGESDRQGHISHAGNGLLRQMLVEIAWLGVRRKTWMTEVYEQVRRGSDKRKKIAIVAVARRLLVKLWAMLRDGAEWKEPALAPLPAVTS

SEQ ID NO: 66696 - protein, 426 aa, unidentified
MKFNTQNAKITAITEKTLVIGIDVGSETHFARAFNWRGYEFSRKPLEFSNTEEGFETLRNWIRELKEKQGMDKVIPGMEPTGHYWFNLGKFLQDEGMRPVHVNPHHVKKSKEMDDNDPSKNDRKDPKVIAGLVNEGRYFYPYIPDGIYAEIRALSGLQVLAQSEITRLKNRIARWFSIYFPNYKDVYGNVGAVSGLMILKEAPLPEDIVKLGVEGVNRIWRDAKLRGVGLKRARTLVTAAEHSIGSREAQEAARIELRILLADYERYTAREKELMALIEEKIAEVPYVDKLLEIRGVGLKTVIGFVAEVGDIKRFDDPKQLQKLAGYAIVRSQSGKHKGESHISYRGRKRLRYVLYEAAVSVVGHSPEFRSIHRYYTTRDKNPLKKMQSLIAVACKLIRVFYLILQTGATYNAEKMMEDIRRPAAV

SEQ ID NO: 66697 - protein, 420 aa, unidentified
MNAVGIDVSKGKSMVAIMRPFGEIVSAPFEIKHTASGINSLVELINSVEGESRIVMEHTGRYYEVLAHQLSEANLFVSAINPKLIKDFDNDSLRKVKSDKADAVKIARYTLDKWQNLKQYNVMDELRNQLKTMNRQFGFYMKHKTAMKNNLIGILDQTYPGVNTYFDSPARSDGSQKWVDFASTYWHVDCVRKMSQNAFIDHYQNWCKRKKYNFSQSKAEEIYGKAKELVPVLPKDDITKLIIKQAVNQLNSASTTVESLRTLMNETASKLPEYPIVMAMKGVGASLGPQLMAEIGDVSRFTHKGAITAFAGVDPGVNESGSYEQKSVPTSKRGSSDLRKTLFQVMDVLIKTHPQDDPVYQFLDKKRAQGKPYYVYMTAGEQVSKNLLRTSERISFISSRILIIIIIFRPALVWWSYFDT

SEQ ID NO: 66698 - protein, 412 aa, unidentified
MEVVEDRCAFLDVHRDTVMACARTPDSAGGRREEVTEFGTTTSQLLKLAEWLVERDIALVGMEATGIYWKPVHWVLEDEIDRVWVINARHMRNVPGRKTDVNDAIWGASLLEHGLVRPSFIPERPVREMRDLTRYRKSVIEERGREAQRLHKVLEDAGIKLASFTSKVLTKSGRQMIEALIAGQRDPEILAEMAKGRMRSKIPQLQDALAGRFNAHHARLCATMLERIDHADTIIDELTGQIEALLDPHEAAVHLLCGIPGVSTRTAQVILAEIGTDMSRFPTAGHLASWAGMCPGNNESAGKHRSGRTRHGSKWLRIALVEAAHAAARSKNTYLSAQYHRIRGRRGPRKAAVAVGHSILVICWHLLSTGEIYSDLGGDYFDKRRNSASRQRRLVAQLEAMGLDVALTPAAA

SEQ ID NO: 66699 - protein, 389 aa, unidentified
MSQPFDASKSLTTLEQDNTVIAVIEMSQSKWLVAAVVPGVKRQPLKKLQADEEALLKLLYRWRTEASQTGREIKRVVVAYEAGRDGFWLARWLRTRGVEAYVIHPASIAVSREHRRAKTDRLDTELLMRAFLGWLRGEKRHCSMAAVPAAEEEDARRPNRERENLVTERTRIANQMKAILARFGIRGFKPTLRKAAEKLDGLRTAEGTPLLENTRAELSRHLARLRVVREQIRAIEQERLNKLATAAVEEKGPHAMVRLIARVFGVGVETADMLVNEVFARHLRDRKAVARYAGLTGSPDESGKRRRERGLARAGNARVRRGMIQLAWCFIKFQKQSALAKWFDARTADGRGSTRKTMIVALARKLLIALWRLVMTGEVPEGVILRPAA

SEQ ID NO: 66700 - protein, 327 aa, unidentified
MIFTGIDVSKDKLDIGWLRDVTSGKKKSKVLKNTACGHKQTVDWLLASTQAKAAEIVVVLEPTGIYHEALIYALHEKGFNVFLVNPGKAKKYAESINLLHKTDKKDAIMLAHYGHAQCHALTFWQPEAPEVRELKVMIRRLDALEKDLQREQNRQEATEFSLTSARVSQSLKDMISTLEAEIKRLQHDIDEQIKKHPQLKRNRELLESIKGIGPVMSRELVYLFASKTFKNAKQVAAYVGLIPRIKESGKFKGRTTMSKVGNARIRAKLYMAAVCASTHNPDIKAQKTRLLKAGKVKMQALGAAMRKLIQICFGVIKHQSEYQPQAV

SEQ ID NO: 66701 - protein, 351 aa, unidentified
MGRYGCGKAQHHCTVIDSDTKRLLSQRVDNDETALLKLIADVLELSDGQPVTRAIDLSGNGAALTIALMTDNGQQVLYVPASTVHHASGSYRGDGKSEAKDDFVIADQAPIMRRDLEPLHRSDDIAVDLRILTSRRLDLAADRTRAINRLRAQMLEYFPARERAFDYKTSKAALVLLPQCQTPAVLRRIGKNRLATWLKNRKVRTFRLVAATAVEAAEAQHTAVAGEKLAAAMVAKLAREVMALDEEIADTDALIEGWFRDHPHAEVILSMPGLGPVLGAEFIAHPGGDLSIFASADHLAGVAGLAPVPKDSGRISGNMRRPRRYCRRLLRVFYMSAMVSARSCPVSRAFY

SEQ ID NO: 66702 - protein, 431 aa, unidentified
MTVNATSPFTERRFFMTFKVVRFICGGMDVHKNLIVATIGTTDRQTLITEYIQQSFSTFYSDLIRLKEWFISHDCYDVCMESTGKYWIPIYNVLETELNICLTHPKYVKAIKGKKTDKRDSKWICDLYKCDLVKHSFIPKKEIREMREIARYRCKLVYMRSSERNRYQNCLTVSNISLASAVSDPFGKTATNIMKELMQSEVIEDDKILKLIHKNCKDKDKILDSLQGYHIESDQRFKMDTVMNHIEYLDKQIQACEAELIKRAYPLRDYFQHITHIKGISALSAILIVSEIGTDMNQFESDKQLVNWAGLSPANNESANKKKSVRISKAGQYLKPLLVQCALSSIKDKNSYFGIKYCRIKKRRGHKKAIIAIARMMLVCIYHMILTGEEFNPCDCESLTNPKPKKEPIMTVESALQFLKDSNFDFSSIQL

SEQ ID NO: 66703 - protein, 360 aa, unidentified
MSTYYIGADVHSNSTELAIEKKGKIVARYSVPTSIPAITNVLDSLQGKKYMAVEEGPMSGWLYRNLNDKLDQFISSDPRRNKLIASDGDKDDKIDAGKLASLLRGGFLRAIHHSDDYSRAELKQWVNLYHDRVRDAVQGINKIRARCRMHGIKITRAALRDPASRADWLQKINQNALANQLRMLWIGYDATVQQVKLAKRQLSTLSKKHNIISQWSKLPGIGLIRATTIFAYLDTPWRFKKKNKLWKYCGVGLQRTTSGTDKKGKPKPARLKLPWAVNRALKNVVLGAALSAINQKNNAFRDYYERMVQDGIITSNARHAVARKMLTVMWGMWKTNSRFDEKMITVDAASNMSAVSASSR

SEQ ID NO: 66704 - protein, 399 aa, unidentified
MNAVGIDVAKGWSVVTIMRPFGEVVASPFEVVHTVSELDKLANLLKTLDGETKIIMECTGGYHLPIARALYDRGLHVSVVNPQLIHDFGNNTIRKRRSDKEAAVKIANYGLSNWLELPKYAPDEEIRQSLKAFSRQYSKYVKVKTMLTNNLISLLDQTFPGLKDLFTSPTRKSYGHEKWLDFAARFWHCECVGSLSLNNFTEAYRKWCKRSGYYCVAADEIHKTARQCIAVMPKNDTTKALITLAVTQVNTVAESLATVAREMNRLAALLPEYPVVTQFRGVGKILGPQLIAEIGDVRRFPKKSSLVCFAGLEPTDNQSGKFHGNEEISKQGSPHLRKTLFQVMDCLLQYSPADDPVYQLLDRKRAEGKHYYSYMNAGAAKLLRIYYARVKEHFNNLKV

SEQ ID NO: 66705 - protein, 385 aa, unidentified
MQKHHDDSKACFTAFVQDNTVIAVIEMGFASWLVAGMLPGVNREPLKKIAPDRELLLQLLYRWRDEAIKAGKEITRIAVAYETGRDGFWLARWLRDRGIEAHVIHATSVAISREHRRAKTDRIDTAMLKRGFLGWLRGERGHCSMAVIPTIAEEDARRPHRERESLVKAQTRTINQMKAILTQFGVRNFKPGLRKAAEKISEVRTPEGVPLPPNAAAALRRHIEHFRLINEQIKAIEKTRLQRLRENPADKFNAMVFLLVRIIGLGVETAEQLVHEILSRNLRDRKAVARYSGLTGSPDESGARRREKGLSRSGNARVRKILIQLSWRMLRFQPDSDLVRWFKDRTANSKRSRKPMIVAFARKLVIALWRYVDTGVVPDGFQLAK

SEQ ID NO: 66706 - protein, 334 aa, unidentified
MQNVALIGIDLGKHSFHIHCQDKSGNALLRKKFTRTKLMQFLVTCPSSVVVMEACAGAHFMARRISDIGHDVKLISPQFVRPFVKSNKNDFIDAEAICEAASRPSMRFVQPRTETQQAMRALHRVRESLIRDKVKTTNQIHAFLLEFGISLPTGDAVIKRLSLVLAEHEIPEYLSRLLMKLHAHYLYLIEQITELESELNQSIKADATAQRIMTIPGVGPITASLLSSQLGDGKQFSCSRDFAASTGLVPRQYSTGGKSTLLGISKRGDKNLRRLLVQCARSFMMRLEHQQGRLAEWVRKQLDNKHSNIVACALANKLARIAWAITVLQKEYQA

SEQ ID NO: 66707 - protein, 343 aa, unidentified
MTLKASFKWVNPQDINVLGLDVAKAKIDICFLSSNHSWFYQIANNSQAISQFSQELKALGLNATIPFVLESTGSFHLLLATLLKNDGWNVKEINPIITHQYIKHTVRGTKTDTTDAQLLAKIGLIEGDNLKSFDRDLNIIKLRMLISFLARLETLIQQSKASFNALEKGLATLRLWESQELEKMKEVIKVLEQRAKGLEREILDIQLSPEAQEQVDCLDSIVGISPFTAKVAYALFAHNTFSSKRAMLAYVGLDPRLRQSGTKTWALRMSKRGHPYMRKRLFQSAFCSLQHSSYFKSIYDKHIQRWKHHFIAVLAVAKKMVYIMRALLKNNTQFDHNYYKLTS

SEQ ID NO: 66708 - protein, 483 aa, unidentified
MKPKRVESNKKASCRPTPNNWHAMNRKQRREMTRKIQSQDLSLEIVHPDAAGIDIGNESHYVAVPSARDCQPVRRFGCTTAELKAMADWLKQCEIRTVALQSTGVYWVAVYDILEDAGFEVYLVNAKETKNLPGRKSDVQESQWLMKLHTYGLLRNSFRPSQEIRTMRTYWRQRNDLVRAAGRHIQRMQKALTQMNIQLANVLSDVSGLTGQAIIKAILAGERDPYQLAALRNWRVKASEEEIARSLEGNWQEDLLFVLQQEQDGYEFCQKQMAECDQRLQQYLQRLEDRSHGAGLPEEKRKQRLRKKKKGNAPQFDLRAELFRMTGTDLTQIDGIDVTTTMTILSEAGWDMSKWKTEHHFVSWLRLCPDNRISGDKIIGKGRLPTNNRVTNALRMAASTLRLNHSYLGAQFRRLRTKLGAPVAIKAMAAKLARLVYRMLRYGMPFIDRGAEFYDAQHRKLQINYLKRKAANLGFQIIEAPAA

SEQ ID NO: 66709 - protein, 360 aa, unidentified
MFTERTSVGLDVHARSVAAAAIDGVTGELFQTKLTPAHDHIRSWIQKLPGPVAVAYEAGPTGFGLYRSLTGVGIRCLVAAPSKLQRPAGDRVKTDAKDAVHLAKLLRLDEITAVAVPSVEQETARDLVRVREDCRGDLMRARQRLSKLLLRQGIVYYDGNAWTGRHDIWLRRQRFDHPALQLAFESDYETVLTTTARRDRLDTAIAAMAADSEFTDVVRRLSCLKGVSTLTAFALAVEIGDWRRFTGNSIGSFVGLVPSEHSSGSSRAQGPITKAGNTHARRLLVEAAWHHRARYAPGKTMRERWELAPPAARVRGDQGNRRLHARWVRFSDRKKMPVIANVAIARELAGWCWSLAVMEE

SEQ ID NO: 66710 - protein, 436 aa, unidentified
MRLRPQQFEERLMSWLTLDVLLLARLLLKLAVGPVLERKGDITMFYVGLDIAAEKHDCCIMTEERQVLKQFVFRNDAKGFEFLKKTLTKLAPTEEIKIGLENTGVYGSNLVQFLRRNGYKTYTFNPLLINKSIQATTLRKTKTDKADAKFLAQYLTWDNSQPDHDVSYHISELKSLSRLRFSLVQQRSKCKTQAKGVLAQVFPELTQVFSDVFGTTARTILSLCPSAQRIAAYPVPQLADLLRTTSRGQLGLEKAELLHALAVHSVGNSSIALELQLQIYLEQITQLSFHICRCEAALRTILAQMDSPITTIPGIGTVLGATILGEIGDIFRFSSPAKLLSFAGLEPSITCSGKSVSAPGRMVKHGSHYLRWAFGQAARCIILRDQTFAAYASKKRAEGKHFNVVCSHVAKKLVRLVFALLKNHSSFIPNYSSLAA

SEQ ID NO: 66711 - protein, 331 aa, unidentified
MNIHVGIDISARTSAMGWRQDGKTSGQWEIQHTPKGRKAAVAKMLGLKPLSVVMEATGIYYLDLALELHAAGLPVSVINPKSFHNFAKLMLQNSKTDQIDAQLLAEYGERMAPRLWVPPTADQMTLRAIGRHINRLIGHRTRAKNELHALQATETSVELLIEDEKEAIAGLDTRIERLKKAARDAIAKCPGLSLQFRCMMAAPGVGEASAIAALAELTTLPVTLKSAQVSRYAGLDVRLTQSGTSVNRPGRMSKCGNAYLRAAMFMPAMTAIRCDENVKAFYEALVARGKKKMQAIGAVMRKYLTGLWACMRSGEEFNTAKLFSEKHLAKA

SEQ ID NO: 66712 - protein, 332 aa, unidentified
MDLIHIGIDISKKTLDLSIYGRERRDSGFLHVTNDKKGFSKILSWVKGLKIQLSQVWFCMEHTGEYGYALALFFDEHGITYSMVSGADIKGANPSKKGKNDKQDAAMIARYAHEKRDSLAPSHLNIRPLYELRCLLNERRMYVRQRAQWKAQRSERRLFSTKHRDSRVNRAIKTLSATIREIEEEIRSVIAVNEDIRRNFELIMSIPGIGLINAVNFIVATANFSTFNNARRYASHICVAPFAVVSGTSINKGTHTSKIGRHDLKTELRTTVLAVLKADSEMRKYFDRRKADGKKYNVIANNIMFKLICRVFAVVRRGTGFVETHKYLQKKE

SEQ ID NO: 66713 - protein, 419 aa, unidentified
MSKFSTNQTKKQDGTGTLHIGIDLALEKNVCVITKENGEKIDYFSFPQDRGGYDYFLKRVKMISQKQVESRLIVAMEPSNYFWKLMARELEENGITYHLVNAYTVKKHREGNQLDRSKDDRRDAVQIAELSRNGHYTETKLQKGIYEEIKQYAVAYHQLSRSIRREQHILWGLVGQVFPEYFQIFKNLNGETSRAILISNACAAEIRKMKEDDFLAEVKAAYLGKRQSVTKVQQVYQLAATSIGILEGLQAVQLSIQIRLSNIQRFQMQLNQVTDAMTNCLASLPEAEYLLSVKSLGEVSIALFLAEIGDPKRYKCASQWVKLAGIQPTPNSSGKKQHGRTPISRQGRPHLRTMLYFSCLRMIQYDSHFALLYSKLQRRSKNPLTKMQALGVLMNKLLHILWALIHQQTMYNPAFAQSM

SEQ ID NO: 66714 - protein, 402 aa, unidentified
MDVHRDSVVACTRSAMPDGDVEVAKKRFPTTQEGLAELTAFLMDAGVSTVAMEATGIYWRPVYYALEGLFEELWLCNAQHVKNVPGRKTDLSDAEWLADVAAHGMVRPSFVPPPEIRELRELTRYRKTQVDDRAHEIQRLEKVLQDAGVKLTSVASSVWSVSSRAMIEAMIAGERDPAVLADMAKGKMRNKIDRLEVALEGNFGAHHALLCRQIIDHLDFLDRSIATLSADISARLVPFEPRVAVLTSIPGISATTAQVIVAETGADMSRFPTAGHLCAWAGVAPASYESAGKKRPVGTRHGSLWLRRTLIEAARAAARTKGTYYSAQYSRIARRRGPNKAAVAVAHSMLETAWHLLTTGALYQDPGADYFERRHDPAIEAKRPQRRIEALGFSVTISEKAA

SEQ ID NO: 66715 - protein, 318 aa, unidentified
MAQNGAIVGIDVSKDKLDVALRSAKVAAIFANNGDGHRELLTWLVHHGAAKVVMEATAGYEMACRKFLMTAGLEVVVVDPKRVRHFAKSAGQLAKNDAIDAQMIAWFGEVFDDLTGKAQDDEREELEHLLTTRRALGLMQAKVENWSGHERPKLVQKAYQALLRTLACQIDKLDDAIAAQINGTARFAERAEIIRSVPGLRDVSAAGLIAFLPELGRVDRQAAAALLGVAPFDDDSGKHRGRRVIMGGRRKLRTLLYMPLVGAATRHNPVLKAHYQRLLARGKEPKVALMACMRRLIGILNAMLARGEKWDPSKHALA

SEQ ID NO: 66716 - protein, 409 aa, unidentified
MLLVGDDWAEGHHDVELMDSLGRVLARARLPEGAAGMARLHAMIGEQLGEEAEAAGVRVGIETDRGLWVMALAAAGYAVYGINPLQVARYRERHGVSGAKSDAADAHTLADMVRTDAHQLRPVAADSPAVQAVKVVARAHKTLIWERTRQVQRLRHQLRDYFPAALEAYQDLTAPDTLELLAKAPDPASAARLTTAQVSAALKRARRRDIAAKTTAIRATLREEQLAQPPVVTAACAAVVRALTAVITALNTQIKVMEGQVEAHFRPHPDAEIIMSQPGLGSILGARVLGEFGDDPHRYATGKARKNYAATSPITRASGKRKTVMARYVHNDRLRDALDGQAFAALTASPGARAYYDRQRARGLGHRPALRQLANRLVGILHGCLKTRTLYDEATAWPQHASTQIKTAA

SEQ ID NO: 66717 - protein, 443 aa, unidentified
MSRKKRTHLRGRRGQAFANKIRGIPLDQILCVSLDVHKYFHVVIIHNALGEIVTPSFEIDIFQTGFDHLCRAVDETILRTGAQLVLTGMEPSSHYFENLARHLHKRSQPVTLVNSFAVKKNRDQQMMQYEKDDDIDTASIGDLLQRGEGSPFNPPTGIYLQLQHLDRVRISKVRMRTALQNQIIGHLDRIFPGLIIIGDEAQDRYEPLFATDFWECQTLQHLIRVCPNPHALVAMSPHHLIEAFHARNYRMGPVRAAKIIAYARKVLLPDPELAAIRCHLLPHDIALLEDVERHIAQLERDLYTLLVETPYLAWTKLKGLSDTQVASLAGAIGDPVNYRYAAQVFRRSGLVPGRNDSGTRQRKGKGKKVVKVGDVHLRRALMNGLATLILHQPALRDYCNKLKVSKPAGVARVATARRAMGILWAVLRDQRSETLMLKKGAKM

SEQ ID NO: 66718 - protein, 418 aa, unidentified
MTKKKDNTNLEIIHPVCCGLDIHKKKISACLITVDSSGKAKQQVKNFGTFTKNIKQLKEWLLKNNCPIVAMESTGIFWRPVYNVLEKDMNLILVNARHIKNVPGRKTDISDSKWLASLLRHGLLKGSFIPPADIREFRDLTRLRKKYTETLGDFARRVHKLFETANIKIGSVVSDLFGATGKNLIHLLCDENAKITKNDVANCAKGSLVKKVDELFISIEGYFKEHHRFQLIGLMETITNLENQISVITSKLDEIMSPHQDILDRLDEIPGIDKVAAQRIVSEIGVTLDEFIVMEALACWGGLCPGNNESAGKRKGGKSPVRKHHFKSILIEIAWSAIKKKGSYYKAKYYKLKARRGAKRAIVAIAHRISKAIYRIIKYGERYKELGEDYLMKKMTNEAKVKKLKQQAKKLGFDLVAC

SEQ ID NO: 66719 - protein, 337 aa, unidentified
MNWTYFIGIDVSKLSLDICVLLGKEKVKNATVQNDPKALQTFWKELSKSNPDFITGKIICCLEHTGIYNEHLLSFLSSKKVDICLENPTHIKLSGGLLRGKNDQVDAWRIAVYAYREKDSLKLWEPSRPVIKTLKHLSVLRNRLINAKKILSVPGNEIQGFDKQAAKLMVSLTKNTVKQIDKDLKGVEAKMHQIIQEDPTLKRLFALTTSVGGIGPVTAIAMLITTNEFKNINKPQQYACYAGIAPFEHSSGTSVKGRTRVSHRANKSIKTLLHLAALTAIRYNIDMKNYYTRKVEQGKNKMLVINAVRNKLVHRIFACVNQNRPYEKNLNISLCKP

SEQ ID NO: 66720 - protein, 353 aa, unidentified
MRKMQEYVVRGKEVFVGLEDSKRSWKLCIRSEGVIVQEISMSAEYENLKVYLGRCFPECRIKVMYEAGFSGFWLHDRLQASGIDCVVTPPHTVTEEKANKVKTDKRDARRLALNLEKGDYKSCSVPDREHREDRQISRTISQLQRDITSNRNRIRKFLDFHGLNEGFPAGKFTKGDYQRARNLSLSHPLRVSLQALFDVVDKLEEIKRKLLLELKAISQKELYSKSVEIKSSVIGIGWLTATRLTLEWGDMSRFGSGKKLSSYVGLTSCESSSGERVRRGRITGQGSGMVRAWLIQSAWRAISKGPVLLAKFQAVWKNSGSKKKAIVAVARKLVVRLHSLERTGELYQIGTLQ

SEQ ID NO: 66721 - protein, 412 aa, unidentified
MEEVYECCCGLDVHAKTVVACLVTKGRKEIRTFATMTDELLQLGDWLSSAGCTHVAIESTGVYWKPVFNILEGLLTVVLVNARHIKAVPGRKTDVRDCEWLADLLRHGLLKASFIPPLEIRELRELIRYRQTVVTEHTAVANRIQKLIESANIKLGQVASEVLGLSGRLMLRALAKGEQDVTKLAELAQGKLKNKKAELRRALAGRFTQVQRWVLAEFLTRVEELEVALTRVEVRIGEEVTACADPFVPEAVELLESIPGVGVRTAQTIVAEIGVDMERFPSAKHLASWAGVCPGNHESAGKRKSGQPTQGNKSVRTVLVEAAWAATRAKGTFLQAKYQRLVRRMPKQKALGAIAHRLLVISYHLLSRRVLYAELGSAPLDHQQVERQRRRLVEQLKTLGVKVTIEEAAAAL

SEQ ID NO: 66722 - protein, 409 aa, unidentified
MRIIGLDIHRAFAEAVAWDDGKLRRLGRVDMRRELLTAFAEQLSQDDVVVVEATGNAAAVAAVITPHVKKVVIANPKQVRVIAHAKIKTDTIDAGVLAQLYASGFLPEVWIPDEPTQALRRQVTRRNQIVRQRSRLKNIIQSILHGHLIPSCPHADLCGPKGRAWLIDQVVPEDERLAIERHLREFDRLGEDLKVIERDLARSALADEGARRLMAIPGVDMVVALAMMAAVGEVTRFDEPQKLVSYLGLNPSVRQSGPGPAYHGRITKQGRGHARGMLVEAAWAAARAPGPLRAFFLRIRARRGQHVAAVATARKLTVIIWHLLTKGESYVWARASLHAKKLRDLELKAGQKPARGQKGAAYAYNIKSHREQERRWVEQAETAYARFVTGWNPRGPKKLRTGTATEVRR

SEQ ID NO: 66723 - protein, 481 aa, unidentified
MGRRRTLRYETGLSFAPRRALENVGNVWYAQSARKLTWELPGPRTGAMEPAEQSREQDAPASAGASHKEGAMERVIERGCGLDVHKKTVTACVRRPGPRGEREQQVRTFGTTTGEVLALRDWLEAQGVTHVAMESTGVFWKPIFYVLEEAFVCVLANAAQIARVPGRKTDVEDCRWIAQLLEHGLIRSSFVPPAPIRELRDLTRYRKVLIQERTRDANRLHKVLEDAGIKLASVASDVLGVSGRAMVEALVSGTTDPTVLAELARGTLRKKLPALRQALAGRFRPHHAFLVSQVLAHLDYLDEAIETASARIDEAIAPFAAEVIRLDTIPGVNKRTAEVLIAEIGVDMGVFPSAGHLASWAGVCPSNNESAGKHRSGKTRKGNRWLRGALTEAALAAGPRTAKGALAARYRRVMRHRGHKKAVVAVAHAILVTAYHLLARKTTYQELGRDYYDRRHAERARHHAIQALERQGYRVILEPAA

SEQ ID NO: 66724 - protein, 391 aa, unidentified
MESAQMLQPVFVPREFEVFAGLDVDKTRIAVTFTDHNRLLKSLQMPYSSQHLLNYTRKHFADRRVAFVYEAGPTGFGLHDDLLAAGHRCLVVAPSMVPRAPGQRVKTNRIDSRKLSEGLRGGQLNSIHVPSLAYRHLRHLVQLRDSHVRQMMAAKYRIKALLLYEGIPFPEAPASNQWSARVLQELGTLPCTSAVGFKLNSLVASLYFHKLEAAATQKQIRRFCQQDPELSRSIRYLTTIPGIGWIVASHLVARLGDWRLIRNVRQIASFLGLVSWEHSTGDQVQRGSITRTGDVRLRNKLVETAWTAVRKDPELEQFYRRIYQRHPRPIAARKAIVAVARKLTTRIYSVLKQQRPFRLKTVIAQAPLTPEETACPRGRLDQPQNEGTHGS

SEQ ID NO: 66725 - protein, 596 aa, unidentified
MKRSDKKAKDVRDEEQLTTDDGEEKPVIALPDPLDEVDKDAIIGPALLSQLSTAMLYKLLQQKKVPGRAKIRKVDARAKALTGMVTAGDLKALGIDVPKYATMPPTTNDIYVDVPDFIREHHEMYEKFKPGTGKRIDVPVGGIDVHVDNLTYAIANPGGIVTANFVGNEQNGMLHLARVLRAHGVTCVAMESTAEYWLKIYWFLHAQGIHVLVANPKQTKETQGQKTDLRDAKRIAIAFRDGRLKPSVLCTPEQFQLRKLSREMTERKQQATEEINALKVMCHMFDAPEWIRKLNTSARGCRILSIAPTLTSLEAVLSLLSEEYARGRGLIEDGKVLNAMATELHGFFARLASVAGAVIRFQQHFDQYLHFRTLARDLLFQILQIVEKDKVFMHNLELLLTCPSIDVDTAIPFLIEIVDVRFFWHADALNRWVGLGPRVKQSGFNKRSNGHIYKGGNKGARRTLWLAAKVDHAHHKKGGHPVGEFVARLRSKNKPYKLSVTAGARKLTTVIYHVLTMQKPFQEVYAHLDDEKQARNRERKKQALLKLMKEVPVVDVLESLSKTLPRRCVRFLEVEEKVARKVHAMLGARLEFAAVG

SEQ ID NO: 66726 - protein, 350 aa, unidentified
MTISHYIGFDVHKKSISYCVKTKDGTIVEEGKLRATHDVLRQWAGKRREAWHGAMEATLFSAWIYDTLKPFAAELQIGHPALMKAIGASKKKNDKLDARKIADLVRADLLPACYVAPVEMRELRRLLRYRNLVVGQAVRLKNKMSGLLMEVGAEYSKQQLRGKKYFSELLDTVAEVPESVKDLLRVSRGAMEMFETTQQQLLIRLRQDPLLAKRVALLRSIAGVGEVTALTWILEVSEPRRFSSVARAVSYCGLTSALVSSADKQQRGPLSKQRNAHLQTVLIEAAKLAPRWNPQLAALHEPELGRGNRNRATLAVARKLVAYLLAVDKSGQPFQVRVTPVSASEAAGEA

SEQ ID NO: 66727 - protein, 422 aa, unidentified
MLKEDQQVEEVVARVAALDIGKAELVCCVRVPHPQRRGRRLQEVVTYRTMTRSLLVMADRLAELGVTEVVMEATSDYWKPPYYLLEARGLNPQLVNARDVKHLPGRPKTDKLDAVWLCKLAERGMLRPSFVPPPEIRRLRDVTRYRADLVEVRTAEKQRAEKLLEDAQIKLSVVASDIFGASGRDMMAALIAGTRDPKVLAALARGRMRAKLADLEEAFTGYFTDHHARLLSTMLARIDGLTADITQLEAMIEELVAPFADTVAKLDEVAGIGRIAASAILAEIGLDMSRFPTDGHLCAWARFAPGTKESAGKKKGAGSTGHGNRYLAKVIGEAVAGAAKTDTFLGERYRRLARRRGGKKALVAVGRSMLVIIWHLLSDPDAHFVDLGPDFHAKRTDPDRRRRTYVHQLEALGYTVTLTPAA

SEQ ID NO: 66728 - protein, 416 aa, unidentified
MNAAGIDVSSRKSTVAVLRPFGEVVRLPFDVAHNTEGLASLAEQLKALDGETRVVLEHTGRYYEPVAKALHEAGLYVSAVNPLLIKEYGANSLRRVKTDKADAVKIARYALDNWADLRDYTPMDTIRYDLKTLNRQFQLASKQRTASANNLIALLEQSFPGIRKCFDSPVRSDGTQKWVDFIHTFWHVECVRKQSLNAFSERYRKWCKRHGYIFKQGNAVEVYSLAKNAVVLVPKSEVTKVLVQEAANQLTSISRSVEIYRAEMERLASTLPEYPVVMAMYGVGKSFGPQLMAEIGDVRRFERKQSLVAFAGIDPMPNQSGDKNVRSNKSSKRGSPYLRKTLFNIMGIYLKCSPQDEPVYQFLDHKRSEGKPFYVYMTAASNKFLRRYYAQVRDYLSTLDDLPPVDMDSTGLKPSD

SEQ ID NO: 66729 - protein, 443 aa, unidentified
MSLYSAIGVDIGKDSLTFAFATDSRNRSRWPVRTITYDNPDWHLKVLELIAPDAIICAEPTGWHYLTPLLTVIEQMTTAHLWLASHDASRAARQSAISASKTDEMDARALAYIADRIAHGDPPRNVRAFDSQLEQQVLTLRLYVNKLARLTRESTRLQNQIDAFAHSLWPLLAQRKKTYLRLAERGILTPRQIKNFAVMHIARTTAERKADGWNGQTLRFIDALARDLPDIEVNPVVAATLHELLVTLRANDAQEVATCQVIHAIVQQPPFAEVTRRWMTIPACTLDYCAAFHVATHGQAEQYTADMLKAVTGINPLAYSSGQKDSARQSRKGYRPALNAVWTWAMHLVNPRRAADNPVRDYYTELTARNHAHAFTATRNKLVRNCGNRNPHRPRFLHHPHPAVRQRLAARRSHRHPVPRRRPHLLHPPADERHSRRAGANRP

SEQ ID NO: 66730 - protein, 312 aa, unidentified
MEPLSLCIDISSKRLDCYWSHLNKHQSFENTLSGIAQLLLKIGQEKPVWIVFEPTGGYEIDLAFHLAEKGIAFSMVQPHRLRSFARSCGKLAKTDKLDAKLMATYGIKMTPKSTILGTKAQKELSSFVTRRRQLVDLLSIERQRIDQGRDPLIQEDIKDHCEYLKHRIINLEKQIQDCIHQDINLEEVSQTLQTFRGVGPTSAAVLLADLPELGHIGPKEISSLVGVAPFNSESGNTARKSKIRGGRLSVRCILYMVALVAIRHNTVIKEYYNRLRSQQKPPKLAIVACMHKTLIILNAMTRDHFKNKTVPS

SEQ ID NO: 66731 - protein, 349 aa, unidentified
MNIIWIGCDFHPSFQCIAMLDSETGEYVERKLEHAAGEAQQFYEALQGRRVIIGMEACGNSGWFERMVQAMGHELWLGDAGTIRSLVVRKQKTDRRDAEHILSLLREGRFPRIWVPSPGMRDSRQLLLHRHKLVQMRTRVKNELQHLALNQGVQQKRKLWTQAGRKQLESLPLQGWTEQRRDDLLQMLDDLEARIGKLDTAVVGEAAEYADTQLLQTQPGVGPITALAFVLTIGPVARFARSKQVASYLGLIPAEYSSGGRQKLLGISKQGNAFLRTLLVEAGQSAARYDPELKRAYQRLAHRKHRALAKVMVARKLAVRLYWMLRTHQPYAPARMQGSPSHPVVAGND

SEQ ID NO: 66732 - protein, 358 aa, unidentified
MMNLKYSIGIDVSKKDFHCCLSVIDINQKVTVKSSRKLSNSPGGFKEFLAWIKQHQKEELPLRIVMEATGVYHEQLAWFLHSKGLVLSVLLPNKAKKYLQADGANSKNDSIDARGLAKIGAEKNLEPWAPGSEKLYELRQYTRQHQNLKETINVISNQLEALNHAQFQSSEVIKQLNRTIKLLKQQVAEMEKAMEKLIKTDKFLSLHYENITAIKGINLLSFCVIVAETNGFTLFKNSASLVKYSGYDVIENQSGKHIGKTKISKKGNSRIRRILFMPAFCAVRDDQPQFKNLYERVVERTGFKMKGYVAVQKKLLVMIYHLWKNEQRYNPQLNSLEKIIALEKSRATHDKIPERTFH

SEQ ID NO: 66733 - protein, 391 aa, unidentified
MIYVGIDVAKDKHDCFITNSDGEVLFKPFTITNNLDGFNELYQKIESVTEDATKVKVGLEATGHYSYNLLGYLIDKGLAAYVINPLHTNLYRKSLSLRQTKTDKVDARTIASMLMSDVNLKSYSDISYHNEELKSLTRYRFDKVKERAKLKSSVSRLVCILFPELEKLVPTLHMASVYSMLSEFPGAKHVASAHLTRLTNLLSEASKGRYSKDTAITFREAARASIGSNMPAKSLELKHTIKLIQELDSEIDEIENEIKVIMDEINSPILSIPGINYRMGAMIIAEIGDFSRFDSPDKILAYAGFSPSTYQSRQLDGAYAHMEKRGSRYLRYALYNAAKYVCHWDPTFAGYLAKKRAEGKHYNVAISHAVKKLVRVIYHLEKTKQQYIKVA

SEQ ID NO: 66734 - protein, 442 aa, unidentified
MEVINPKAAGIDVGSRSHFVAIGQAAEQVKEFGVYNEDLHALTQWLLHNKIISVAMESTGTYWQTLFSTLQQAGLQVILCNGKFTKNIKGKKSDVQDCQWIQKLHTLGLLSGSFLPDTATEHLRTYCRHRTNLIDNSADTTRKMQKYLRLLNLRLDVVVNDITGLTGLSIIEAVCKGETNPQKLASLRNGNCRKSEEEIAKALQNNGRTDYLFALQQEYDIYKSLQQKIKQCDVAIEKLINQHINQDEHKKNLKAEDKPHKRVNKNAPKNMDINQIAYQYFNGVDLMAVEGLSHSTIITLMSEVGYEGIKKFDSGKRFASWLRLSPNNKISGGKVLSNKIPKGSNRLKIALRNAANAIGNLKDTHLSNFFKRISFRRGRAAAVSATARKLAIIIWNMIVKAMPYLPPSTYEFLDQKRKRKVLEMKRLIHKFDITSTDLGLQL

SEQ ID NO: 66735 - protein, 335 aa, unidentified
MQIKHFVGIDVSRDTLDLNLVIDGSCQKHHCIPNRTIDIGSTLNKIMKSVGATLDDTIFCMEHTGIYNLPLINWLQSHNGKIWMESGVHIRKTLGLVRGKNDKVDSMRIAMYAYLNRHRIKTWKAPRKLIARIAALLSQRSRLNKAKKQLGTANQEQKLFMDKDIMRSLNTYTQKTIAVINKQILAIENEILSLIKEDEKLNRIYRIITSVAGVGFVTASYILVTTNEFININDPKKYACYSGVVPFEHSSGSSVRGKTRVSQIANKNIKTLLHMAALSTIKKQGDLQEYYIRKVAEGKNKMSVLNAIRNKLILRIFACVNQNRVYEQNYCYKLV

SEQ ID NO: 66736 - protein, 359 aa, unidentified
MASKLKNNKVNFKGKTVSVGIDMHKISWRVTALVEGDTVLAITLANPNYDTFKKIISRFKGNHVRIAYEAGPGGFDLYDKLTDDGIECIVTPPSLIPTESGSKVKTDKKDSYKLARFLESGMLKEVWVLSPEERAHRQLVRTRRQIVNHRSDVMRQIKSLLLFNSIDVPFKGTQHWRGPFMNWLVNLDLGYDSLNRSLKALVDLFNYLSAEKKRITEDILELAKEEKYAKRVELLESIPGIGTLSAMEILVEIQDITRFKTADELAAYLGLTPSQYSSGEHIRMGHITHAGNKRARTTLVESSWILISKDPEMKRKYQRIKNKRGGKRAVVAVARNLSGRIRRMLLDQVPYELNFQKAA

SEQ ID NO: 66737 - protein, 419 aa, unidentified
MGRTVDIVYPICCGMDVHKSFLVACIAVTDERSKTTHYIKRFSTFTGDLRRLAGWLASFNCRDVCMESAGKYWIPVFNMLEKTCNVCLTHPKYVKAIKGKKTDRKDAKWIAELFKCDLVRSSFIPPPDIRQLRDLCRYYVKLTYFTSSEKNRAQNCLTMCNFKLDDVFSDVFGKSADRVVAALLEHGDGNFDIAPLLNRKCKATLEEVQAALDGELNPMQAEKMKLIRQHMDDLRSLQAVLEVLIYQLAAKFQPQIDLLLTVPGISSPLTAIRILAEIGTDMSVFETSKQLCSWAGLTPQNQESAGKKKTTRIGRAGAYLKPLLVQCALAVGKSDKHPELKAKYHALKKRRGGKKAVIAISRKLLTAIWHILSKNEPFNIELYRLADKPPVARELTQEQAFALLRRKGYTIRDEEPTAA

SEQ ID NO: 66738 - protein, 371 aa, unidentified
MNSILYVGMDVHKENYTLCCYSFDRDKVEYRQTVPSDYRLILKYLEQVRRKYPEEVEFICGYEAGCLGYSLYHQLTDHGVKCIILAPTTMGITNTNRVKTDRKDAANIARCLAFHTYSAVYVPDGEDNAVKEYLRMRDDQKLALKKIKQQITAFVLRLGKQYTGGKSLWTENHLKWLRGLDLTLLEKETLQEYLITYDYLTDKLERLDARIEELARNERYGERVRRLGCFIGIKPHTALSLLVEVGDFRRFEKAPNFAGFLGLVPGEDSSGGGRNRLAITKAGNSHLRRLLVESSQSYSRGTIGFKSKELKKRQEGNPPEVVAYADRANERLRRRYYRMTLKNGAKRNVAIVAVARELACFIWGIMTDGIA

SEQ ID NO: 66739 - protein, 334 aa, unidentified
MKELKSCVGIDISKDSFEVCIKQLNDERSVIKATRSFQNDYPGFEKLLSWALSKVSNPIFVMETTGVYHEDLTHFLYSNNQKVSVVLANKMKHFAKSLNMKTKTDKADAQMIAQYGLERPLEWWKPMMPQMKDLRDLCRERLSLKKDLVRSKCQLHGLRHAHSTLDVVLKLKEQQIEFLEKNIQIIETEIIQITEQDKEFNQRVKNIEAIKGLRLLTIVTVLCETNGFTQFNNIRQVVSYAGLDIAERQSGLFKGKTRISKKGNARIRECLYMPALSATTYNEPIKALYQRVVERNPTIKRKGVIAGMRKLLILIFVLWKKNEAYNAQYQWDAC

SEQ ID NO: 66740 - protein, 322 aa, unidentified
MNTFQLGIDVAKAKLDCALRSPDGKLRHKTVSNTPDGFQALCVWLDKQGVGVLHVCMEATGIYWEAVAEFLASREAATVSVINPAQIKAFGVSQMVRTKTDKADAKLIAQFCFERAPAPWQAPSIAEQALRALVLRLDALHVMHTQESNRLLVARPAVKDGIAKHLHWLDQEIAVLIKAIHDHIDTDPSLRDKQRLLDSIPGLGERSIAVLLAYYGTPERFGNARQATAFAGLDPRQHESGSSVKGKPQLSKVGHAFLRKALYMPAMSALYRTRWGQQFFHRLSAAGKPPMLIIGAMMRKLVQVAFGVLKSGKPFDPSLHHA

SEQ ID NO: 66741 - protein, 672 aa, unidentified
MVAVMIGIDPHKGSHTAVAIGAGEQPLGKLRVRASASQAECLLGWAAAWPERTWAVEGAGGLGHLLAQQLVAAGERVLDVPPKLAARVRLLQAGDTNKNDPNDALSVAIAALRSKTRREVAADDYAAVLKVWAKRHRDLSRARNQVACRLHAVLCELVPGGFSKEITAGQAALVLAAVAPAGAVAQARCKLAGQFLEDLRNLDAQLRLTKKKLAAVVGASRTTLTQIFGVGPVIAGTVIGDVGDILRFASRDHFAAYNGTAPIEVSSGGRITYRLSLRGNRRVNHAIHMAAVTQIRNWHSDGRTYYDRKIAEGKTHKEALRSLKRRISDAIYARLQADARQAAAVSAKGPGGQPGNDSDSSAAGSHPGHQLFGQATPGPTASLRPPPGTSPPGHRNRGQRRPAKPLTAKRTRSGRLMSPHRSWAHFGAAAPDGSPGSPGRFTRFRRARMRNASTRRRGRPRPRPAFVLKRGRPEGTPASSRGGARWGLAGGAGITGAHADFHLRDLQVLVELDGDQRAAGLGHVHLVRAVTGVGLDPVDGATRNSLERRRTERRGCRARYGLLVGTDRLGAAGSRRPRVTAARGRRGAAACRGSTRGCAQRAGEDATADDARSQQTHGTCPPFLAPAGVRRVGHGVISFLPWPPTWRPWHQRASATCPLRQNGLCPAYDHFL

SEQ ID NO: 66742 - protein, 387 aa, unidentified
MPASGPRPDLVAVQVNLAAIFVSLELSRSSWLITSLVPGGADKMSKHTVRSGDVAELMVHLAKLRDKAHARAGASFPIIAIQEAGLDGFWVHRVLERAGIESFVVDAASILTSRRRRRAKTDRIDGEALLRTLLAHKRGEPRVCAMVRAPSPEEEDRRRLCRERRTLVAERVAHVNRIKGLLFAQGICDYEPLRSDRRQRLEALRTCDGRPLPPYLKAQIGRELDRLELLLEQLKTVEAERNALLEPANDVAPVAVKALAALRGIGPELTAMLWSECLFRSFRNRRQIAAYAGLAPTPWQSGSVQHEQGVSKSGNPRLRSTMIQLAWLWLRHQPTSELSLWFRERVKRNGGRGKKTAIVALARKLLVALWKFSSSGVVIKGAMMKAA

SEQ ID NO: 66743 - protein, 399 aa, unidentified
MSLDRPFAEPAAIQTQLGAIFVSLELSRKTWLMTSLSPGGGEKMSKRAIKGGDVAALLARLEELRQKALARTGTSHPVIVIEEAGLDGFWLHRVLEEEGCESHVVDPASIAVPRRRRRAKTDNIDGEALLRALLAFKRGEPRVCSMVRPPTPEAEDERRICREREALIEERVRHVNRIKGLLFSQGVRDYAPLRRDRRQRLDALHTGDGRPLCPHLRAQIERELDRLELLLGQIKAVESARDKLLDRLAERPRKDAPAPAGRQPSPVAQLFSLKGIAEELAVSLWTEGLSRPFVNRRQAGAYPGLTPTPWRSGQLDHEQGVSKTGNQRLRTKMLELAWLWPIHQPQSALARWYRQRLPTMTGKAGRKRLTVALARKLFVALWKFVSAGVVIEGAVMKAS

SEQ ID NO: 66744 - protein, 404 aa, unidentified
MHQPLIITIAVERMFSMDVVIEKACGMDVHKDNITACIITPEGKEIQTFSTRTVFLLQMVDWVKQHGCTHVAMESTSVYWKQIVNLLEAEDIEFLVVNAQHMKAVPGRKTDVKDAEWIAKLLRHGLLKASYIPDRNQRELRELVRYRRSIIEERARQHNRIQKVLEGANIKLGSVVSDVLGVSARDMLDAIANGEEDPKKLADFARRTMKKKKEELELALKGYIGPHQRLLLKTILGHIDFLTEQIEMLDQEVAKRLSSHQEYLEILDSIPGIAKRMAEQILTEIGTDVKAQFPSSGHMCSWAGLVPGQNESAGKRKSAKTKKGNKYLRSALTEAAHSVRGSKNYLGALYRRAASRKGKKRAGIVVAHAMLRISYYLLTRKEMYVDLGKTTLISRDNNLSFGIH

SEQ ID NO: 66745 - protein, 325 aa, unidentified
MAKARTLVGLDVHATKVVAAVLDVETGELAFFSMTADVARVAGFCAGLPGPVRAAYEAGPTGYGLARELTRREVQCVVAAPSKIPRGSGERVKTDRRDAELLARLLLAGKLHPVRVPGREEEALRDLIRAREAVRVDLMRCRHRLSKLLLRHGIRFEDGDAWTTRHRQWLSTITLAQPAAQATLLDARGAVDALVHRREQLEREIIALLPGSPWSVQSSRLRCMRGLDTLSAVGLCAEVGDFASFRKPAQLMSYVGLVPSETSSGQQRRLGSITKTGSTHARRRLVEAAWHYRKRPRIGTTLTERQAGQPPEAIAIAWSAQRRLH

SEQ ID NO: 66746 - protein, 400 aa, unidentified
MADGIRWVGLDVHAHESTLAIFDQATGELTTRRVIGRPHELMPWLRGVKRPARMVYEAGPTGYGLARRALAEGIDLCVCAPGHTERPPHDRVKTDKRDAIRLARRLAAGELTMVAIPSVEHEQLRDLIRCREDIRRDLMRARHRLGKFLLRREIYYEGPAAPWTRRHRVWLAGLKFADRASQLTTADYLHAHDVLLARREQIEQELQQLAGDSPWAVTISRLRCLRGIDTLSAFGLCAEVGSFERFGHPDQLAAYLGIVPSENTTGQQRRQGAITKAGSTHARRLLVEAAYHYQRHPGISQALERRQRDQPAEIINIAWRAQRRLHARWRQLKHARGKGNGIVAIAIARELAGFCWELATWQGHPQEAPPTFTTAGDLAQTPSIPPKHKPTNARRTPAAT

SEQ ID NO: 66747 - protein, 353 aa, unidentified
MTNDKYVAMDVHKASVVIGMRNGEGKMIGRAVVETKAQTLRDYVKGLSGTVHLTFEEGTQAAWLYDLLQPLVAACIVCDPRRNKLLESGNKSDEVDVEKLSELLYLGRLRAVYHGAQGTRALKELAQSYEALVKDNTRVKNRLKAIFRGRGISYEAGEIYDYEQREQWLGQLSERGVSERARQLYEQLAQLEEWVASARLQMLRESRKQKARKILEQIPTLGEISVAQLIATVDTPFRFRSKRQFWTYCGLAVVRHTSADYQFEQGELRRRAKPGPTRGLNRNYNRRLKRIFKSAAQTGSVKGPFKPYYERLLARGLNPELAQVTLARKIAAITLTLWKKGASFDREKLVKPE

SEQ ID NO: 66748 - protein, 352 aa, unidentified
MSKITIIGIDLAKNVFHLHAVDSTGRQVKAIKLSRLKLTEYLHRSEPITVAMEACASAHHWGRLCQLLGHEVRLISPQFVKPFVKSNKNDRNDARAICEAAQRPDMHFVPVKTAEQQAVLSLHRVREMLIGQRTATINQLRGLLTEFGLTAPIGRRALHNTIPALLEDLMKISPTFLVSCIKQQWEHLGELDQRIDNVTTQIEMHARQSDVTRRLQTIPGIGPITASALEAYVGNATQFRAGRQLAAWLGLVPRQYSTGGRPMLLGTSKRGDSYLRRLLVHGARAVVASVRSSSNVQKQDKTIMGWLARKHMNVAVVAMANRNARIAWAVITQERNFDRDFRDQLANQLAAT

SEQ ID NO: 66749 - protein, 324 aa, unidentified
MAKRITICAGIDTGKRKLDVAIDGSSSQLQVKNTAEGHRVLLEWLRRHKVKRIGIEASGGYELPVVTELRRKRFVVVVFQPAQVRAYAKFHLQLAKNDKIDAALIAACTAAVKKIHDAPDPRLQPFAEHLTLIDQIGEDIQLYKNRLETCRDPRIQKLWEEEISRLAKRARAELKALVTAIRQHRDLARRLDLIYSVSGAGMPTAVAILVRMPEIGKLSREQVAALAGLAPYDDDSGERSGARHIDGGRKRLRRALYTAALPASFRWNPHLIALYQRLRAAGKVHKSALIACARKLLIFVNTVVARGTPWQKEQPVRATNPAAA

SEQ ID NO: 66750 - protein, 350 aa, unidentified
MPRKFDTAVVTIGIDPGKNTLHLVGLDARGEIVLREKVARTKIVSRLANVPPCLIGIEAGMGTHYVTRELLALDHDVRQVPPVYAKPFRQTHKNDFRDAHAVAEAVQRPTTRCVPPKTDEQLDLQALHRVRYRLVGARTAIINQMRCFLLEHGLTVRQQLHWLRHALPDILAQRTDVLSPRMVRILEDLAQDWRRLDDRIKAVSGEIEALAQTTEACRHLMTIPGIGPIISSAVVAAIGNGIAFTRGRDFAAWLGLVPKQISTGDRTILGRITKRGNRYLRMLFMQAARVVLLRPRNWMKHGFGPWLAAAAQRLHHNVLATALANKLARIAWSVLAQHRVYEARLSAAAV

SEQ ID NO: 66751 - protein, 401 aa, unidentified
MIDTGDIDVFLGLDVGKGEHHATAVTPAGKKAFDKRLPNTEPKLRELFAKLQAKHGTVLVVVDQPASIGALPLAVARDMGCPVAYLPGLTMRRIADLYPGEAKTDARDAFIIADAARAMPHTLRAIDGEDETIAELEMIVGFDDDLAGEATRVANRLHGLLTQIHPSLERILGPRLQHPAVLALLERFGSPAQIRKAGRRRLVTLLRPKAPRMAERLVEEIFAALDEQTVTVPGTEAAALIVPSLAASLTAVLDQRKLLAGRIEELLEDHPLSKVLTSMPGVGVRTGARILIEIGDGSTFPTAGHLAAYAGLAPATRSSGSSIRGEQPSRRGKKQLKRAFFLSAFAALGDPASRAYYDKKIAQGKHHTQALLCLARRRADVLFAMLRDGTFYAPQPSAAVT

SEQ ID NO: 66752 - protein, 341 aa, unidentified
MTIVGGIDIHRAQLTYDYVDLVTGEVHAGRVMPAHRDQLRVWLERFRGVDEVAFALEGCTGWRYVVEELVRVGVTAHVAEPAETAALRGKKSRAKTDRADARHLRQLLVDGRVPESWIPPADVLDARVLVRLYKDLVDERTGWLQRVHATLFHHGVPAVGASLVTASGSDQLAAACLPAAGRYAVDAGMRQVQRLTAEMVPLRQQIISLGSHQRGCQALRQNYGIGPLLAVAIWEELGDCLRFTSSDDAVRHAGLDVTVWSSDGKRTRGHLAKQGPPVLRWALYEAAVYATRPRSPDYAYYRQLREHLEAHIALITIARKLARRCYHTLRNTGPAAFETAA

SEQ ID NO: 66753 - protein, 475 aa, unidentified
MAAVMIGVDPHKASHTAVVISAAEEPLGELRVRACAAQARQLLAWAAAWPQRTWAVEGAGGLGHLLAQQLLAAGERVLDVPPKLGARVRLLATGDVNKNDPNDARSVAIAALRSAGVREVRADDHAAVLKIWSKRYRDLGRARTQVVCRLHAVLCELVPGGVSKAITAPRAARLVASIAPSGAVEAARAELAAAFLEDLRSVDARIRETRKTLAAAVQTAGTSLTGLFGVGPVIAAAVIGDVRTVSRFPGRDHFAAYNGTAPIEVSSGPRKIYRLSRRGNRRLNHAIHMAAVTQIGHRHSQGRAYYDKKLAEGKTPKEALRALKRQISNAMFACLQADARRAAASAKSPGGQQGNDSVASAAGSHPRHRLFGQATPGPGHHTTTASGGPAPGPAPQDRSRAQGKAGHSSIAATPPSAQPQVQVERPQRSEDERPGGAARQRPHSAARKARGQGPLVKPPCPTGTSQAAKRTDGNP

SEQ ID NO: 66754 - protein, 414 aa, unidentified
MALPESAYYVGIDWGSAEHAVCVLTETGRPKTQFTITHTAAGFADLARRLARLGAAEDIPVAIERPDGRLVDVLLEAGHPVVPVKSNAIKAWRDAEVLSGAKSDPGDAMVIAEYLRLRHHKLSPARPFSDQTKALRTVVRTRDDVVQLRVMATNMLSALLDAFWPGAKALFKDVESPIALEFLTRYPTPASAAALGEKRMAAFCTKHGYSGRRTAEELVRRLRAAPPGVTAEHHTEAGQDAVMALVAVLRTLGGVKKDLDRSVDAHLSQHPDGRIFASLPRAGRVNAAQMLAEWGDSRDAYDSPGSVAAFAGVAPVTKASGRMRGVSYRWACNKRLRQAITTFADNSRHDSAWAADIYQRARGRGMDHPHATRVLARAWVRVIYRCWLSHEPYDPARHGAAQHVLPQPELVQVA

SEQ ID NO: 66755 - protein, 409 aa, unidentified
MRVIYRTCAGMDVHKRTVTVCLVWWDAAGQRHQEVRTFRTMTKDLLELREWLRAKGCRIVAIESTGAYWQPVFNLLEDTFEVLLVNPSHIKQVPGRKTDVKDCEWIAELLEHGLLKGSFIPPRAIRDLRDLTRQRGRLMQIRASAVNRVHKVLEGANIKVASVASDVMGVSGQAILKALLEGERNAQRLAELSRGRLRKKKADLVAALEGRFRAHHAKLLARLLAHIEFLDESIAECDAQVEALCRPYALDLERLDGIPGVDRRSAQDLIGEIGVDMRPFPSHKHLCSWAHVSPGNNESAGKRKSGRTGKGNRWLRALLIECAHAAGRSRDTYLGEQYRRAARRRGKKHAAMVVAHSQLEAAYFILRDKVPYHELGAQHFDQINQAQVIRYHVRRLESLGLSVQVTAAA

SEQ ID NO: 66756 - protein, 379 aa, unidentified
MDHAITGTLAKTVLHGALELSKNGWLLALQFSDRAQPSLYPIRGGDTEGLMTKLMAARDRWAKVSGKAPSIVLCYEAGYDAFWLARFLKARGIECLVVDAASVQVNRRARRAKTDRLDVRMLLRALIAWDHGERHVWSVVRVPSVDEEDLRRSHRERDRLVRERTAHINRIKGLLFGQGIRGINVKSKYKTLQIDRLVTGEGRPLPPRLASEITREIARLALIQEQIVALERERDQAPTPCKATEKKRVQLMCLTGIGPAIAAVMTREVYYRQFDNRRQVAGFLGLATSPHDSGDVERSQGISRAGRGQVRGAIIQAAWLWLKHQPKSAITRWFVQRTAGHSGRIRRIMIVAVARKLAIALWRFLEQGLVPQGAMLANR

SEQ ID NO: 66757 - protein, 331 aa, unidentified
MDEVKRFVGIDVAKAALDVFIGSAAAAFSVANDEVGIQELFRQLKPADFVILEATGGLEMPVASALAAAGIAVAIVNPRQVRDFARATGRLAKTDRLDAEVLARFGEAVRPEARPLANEQAQALEALVTRRRQLVEMLTAEKNRRARAPKILHRSIDEHIRWLEKRLSGFDDELAEMIRDTPLWRERDELLRSVPGVGKVLSSTLLAHLPELGALNRKQIAALAGLAPFNRDSGSLHGSRRIWGGRAQVRRVLYMAVVAAVRSNPAIKNFYTQLRARGKYPKSALTGCMCNFLVILNAMLHNKTYWQTPALASSTSALSPFLGAVPGHGCC

SEQ ID NO: 66758 - protein, 403 aa, unidentified
MTREMADYAALVGIDWADRKHDLCLQAAGSEKRERLVLEHRPEAIDEWACALRVRFSGQPVAICLEQHKGPLMAALSKYDHLVLYPINPLLVATRRRGLKPSGAKSDIADAEIILDLLTDNSAKLRPWHPDNARTRQLQALVEARRTLVESRVRTTNALTANLKLYFPQALDCFDDIASGLACDFLTQWPSLGQAQRAREATLTTFFHQHGVRGEDLIAGRIAALRAAMALTTDSGILIPALLRTKTLVAVLRAQLDGISDYDAAITKAFAAHPDAAVFASFPGAGPTFAPRLLAAFGSDRERFASARAIQEYAGVAPVTEASGQSHWVHWRFACPRFVRQSIVEWAGMSIRYSFWARTYYQELRERGKAHTMRRCARWRSSGCVSSFAVGRTASPTMRQSIS

SEQ ID NO: 66759 - protein, 386 aa, unidentified
MQKLNDLSRSLTPLKPDRTLIAVIEMSLSSWLVAGIVPGIERQPLKKLEVDESTLLKLLIRWREEAKKSGHSIERIAVAFEAGRDGFWLARWLRARDIEAHIIHASSVAVSREHRRAKTDRLDTELLKRAFLGWLRGERDHCRMVAIPTIKDEDAKRPNRERESLVGEQSRIVNRMKAALVRLGIRGFNPKLKKAVERLDGLRTPEGEPIPPNTLAELRRDMARRRLVSDQIRQIEDTRLERLEQAPSDGPHAMVRLLARVIGVGIETADMLVQEVLSRNMRDRRAIARYAGLTGSPDESGRKRREKGLARSGNARVRRGMIQLAWRFLMFQKDSTLAQWFRARTENARSTRKTMIVALARKLLIGLWRLVREGVVLDGVVLRPVS

SEQ ID NO: 66760 - protein, 347 aa, unidentified
MRFYPHQHRHTCGVDLHGRNLYLCILDQQGDVRLHKRLRCDPELFLQAIDPYRDDLVVGAECIFCWYWLADLCADQGIAFVLGHALYMKAIHGGKAKNDKIDSRKIAVLLRSGAFPFAYVYPPLMRSTRDLLRRRLHFARKRAELLTHIHNTFTQYNLPRPAGRLTCPANRKELPELFDDPAIRATLKADLSLIDHYDGLIPDLERTVLGQARVHDPDNLRRLRSVRGVGKILGLTLLYEIGEIARFPSVQTFSSYARLIKCGKESDGKKTGTSGAKIGNVHLKWAFSEAAVCFLEHNPAGQNYLQRLRRKHSKGKSLSVLAAKLGRATYFILKQQTTFDMNRFIAN

SEQ ID NO: 66761 - protein, 415 aa, unidentified
MVNEKTLLVGVDAGEKVYDVVILHPGLDYRSNFTVGVKRANRDEIAKRICKSAEKIASTDVRVTIESSTSASHILSKHLANYVWPKGLNVKTNLISSVTPRKLAEAQLIDTKTDGVDSYLTAQCGEYEHLPKIKRTNERLKSLSSAYEFLSKQSASLKMRIRSLLLQLNPSLTAEFKSAHKGNFSLIVASSYESYIKDGKLTDQELERILKEESFNMGKSRRKKFLEIVNEETMKDSLYLINIIREHRTLLSMVEKQLNPLKEVIKKAGMKSHTVKLLTSISGIAEFTASMFVGLVQDIERFPSSKEFIGYIGTYPVKIESGKLKGKSKMSKKGIKILKRLLYTSAMAAINSNKYIEKIANKAVSRGKTDMQAIGIVMTYLAKWIYGVWKSGEAWRQGKEEREMGNSRKIIPRAS

SEQ ID NO: 66762 - protein, 348 aa, unidentified
MKFYNVQKSYYCGIDLHARSIYICVMNKEREVLVHRKLKNNSTDLLLKILEPYKDDLVVGCESTFAWYWLADLCADNSIDFELGHALYMKAIHGGKAKNDRIDSKKITLMLQGGMFPLAYVYPKEKRALRDLLRRRLHFVRLRGELLGHIQIVNYQNNNPALPRLGDRKAIRKDVPALFEDETTRKIVESDLELIEYYDNMIPKLESYILAKTRQLYQKELSILTSARGMGKIIALTILFEVDTIERFCSVQEFASYCRVVKCTHESAGKKYGTGGAKIGNAYLKCVFGEAACLMGRHNPRIQSYLDKMKRKHGNGKGIMILAHKIARAVYYMLKRETVFDENKFLSN

SEQ ID NO: 66763 - protein, 403 aa, unidentified
MEVTKEHLDIHQFLIVGIDVHKDNHALVAANGFNQIFFEKEISNQYSDFQQIVDQIQLIARKENLRPLIALEDSYGYGQALARFFFSKGLEVKTVNPVLTRRERGYMTHPEKSDISDAKGVVKATILEGIGRLPTFRITSESEFSKDLRILVYDRDFLIKEQTRLKNQIHRLLHQSYSGYYDKIFKDPFSKKALKLWQEFPSLLELKRTKRRITKPDWLKKINTLTLLPISNLQENQIKRKVRRLLQIREELKEMDQDLEQLLSNSNQYLETLPGCARILVAGTLAEVKDVSRFNSKDAFAKYAGLSPRPWESGKKKRNKKSLSGNRRLNRIIHQIALSQIGNRGYQPAKDYFQKKIAEGKSKKQALRCLKRQISDVIYPVRSLLNSSLKLKLFSNFYNFWSF

SEQ ID NO: 66764 - protein, 365 aa, unidentified
MGIMHWIGIDDHADKWTIAHLEGTAEKPTNEFELVPNEQGYRKLIGFLKGLDGEVRVCYEAGPCGYDLYRRLKKAGLKCEVAAPSLTPTKPGDRVKTNRRDALKIARNLRAGELTFITVPDEGRESLRELTRGRSAVQKDVVRVRHQIIKLLLRYGQRYREGKAWTTRFWVWLGTIKLAGEYAQIILDEMLVTHEQRTSQLARLDKLIEEAAKKPEYVHYVKALGVFRGISTLSAMVILAEMGDLRRFPTAPNLMAAIGLVPSEYSTGDKTSRYSITKTGNAHVRHIVVEAAWQYQRRSTTGRTITARRKDQPPELVSIAEKCDARLRRKFSRMTSRGKLSTVAVVAVARELVGFIWALGQISHP

SEQ ID NO: 66765 - protein, 411 aa, unidentified
MEVLYQVCCGLDVHKRTVAACLRRSGPKATRTEEIRTFGTTTRELLRLADWLGVAGCTHVAMESTGVYWRPVYQILEGNFELLLVNAQHIKAVPGRKTDVKDCQWIARLLEHGLLRASFVPPAPVRELRELTRYRRQLVQERAREANRVQKVLETANIKLGNVATDVLGASGRAMLKALIAGERDAEALAGLAQGVLRKKEAQLREALVGRVTDHHAFMLQELLSHIEFLDQQIALFDVRIEAQTQPFAAALEQLDTITGVARRSAEQILAELGDDMSRFPTAAHAASWTGICPGHHESAGKRKSGRTRKGNRWLRATLIECARGAVRARDSYLAAQYHRVARRRGDKKAIVAVGHSILIAAWHILRHGVAYRDLGRDHFDRLDRDRLIRYHTRRLADLGISLSASAPAGT

SEQ ID NO: 66766 - protein, 375 aa, unidentified
MSNHSEAFVAFDTSKLRNAVAIADSGRTGEIRFLGEIENTATTTAKLVRKLAGKYERLTFCYEAGPTGYELYRQIKSLGQECLVVAPSLIPKKPGDRVKTNRRDAVSLAKLLRAGELTAVWVPDRHHEAMRDLTRARDTAVDDLRSKRQQISAFLLRQGLHYCAGKKTWSQTHLNWLASQKFEYPEHRLIFEEMMMAMRQAQERLERLEQAIRAAVPDWSLADLVTALMAMRGIDLISATTILAEIGDLSRFQSPCELMAYLGLVPSEDSTGDCVKRGPITKAGNRRARRMLVECAWSYQHPPRVGKDKQAKVAAAPRAVREIAWKAQSRLNRRYRALIRRGKLKTVAITAVAREFAGFIWAVARAATAARAAAK

SEQ ID NO: 66767 - protein, 341 aa, unidentified
MKNKSFIGIDISKNVIDASIFCEGTPIKDFPHAVFNNSRKGFGEMCTWLKKNHVVLSNCLFGMEFTGSYSMELEKFLNARNYQFCMLSTHVVKHYPMGPKDKSDKIDSAKIADFLYRYNGTECVKPYNMPDKTMQRLKALMNERKFLVEQRTCFMNRRQLCITKEDAQLYDGYIKKFSRDIENIELEEQKLLATDDSLLSTYKNLLTIPGIGFVNAINVIVITRNFTAFETARQYASYVGVAPHFRTSGTSVKWRPRPSARCDGQAKADLSMAATVVVQYDAELQSFYNRKLGGKQDSDTKRKALNAVKFKLVLRMFAIGKQNRKWEPLDSKSSNEKLAIS

SEQ ID NO: 66768 - protein, 317 aa, unidentified
MKKRPSRFVGIDVSKDYLDLACRPENTRWRMANDNAGIAQCLAQLRQLKPTLIVLEATGGWQGSLVVALAVSKLPFAVMNPRQIRDFAKATGELAKTDALDAGVIAHFAEAVRPTPRPLPDETTQQIDALLQRRRQLLEMLVAERHRVALAHPAVRDSLARHMDDLQGLINATDEEVAAMICTSPAWREKDDLLQSAPGIGPVLSATLQAALPELGVLNQREIAKLVGVAPLNDDSGKRSGTRHIRGGRAAVRAVLYMATLTATRFNPVIKAFYQRLLGRGKPQKVAITAAMRKLLTILNAMVKTQTPWNARLQNCA

SEQ ID NO: 66769 - protein, 339 aa, unidentified
MQAVTIGLDIAKSVFQAHGVDEAGEVVFRRRLTRSRLLEFFQKQPRCLVGIEACASAHYWARELTRLGHTVRLIPPSYVKPYLKRQKNDAADAEAICEAVTRPSMRFVPVKSVEQQDIMVLHRVRSLLMRQRVLLSNAIRGHIGEFDLVAPVGRAGLERLIDVVADGGDPRIPELARASLLMLVSQLRMVNRQVLENDRRIIAAARSSDVGRRLLEVPGVGPVLASALVASVPDPASFKSGRNLSAWVGLVPRQNSSGGKERLGGITKQGDRYLRKLLVIGAVAVIRFAQRHGARRPWLVRLLARRKPKVAAVALANKTARTVWAIMTSGERYREPLPV

SEQ ID NO: 66770 - protein, 333 aa, unidentified
MGLQEVSTMEKLYAGLDIHSDILYGTVLTQDGTVYAEKKFPNRKKALQTFFNGISSAQVKIAMEACGLWRGVYTQLTALGYDVVLSNPVQTHAIARGKKTDKVDARILADLLRTGYLPEVYIPPDDVLKLRDIARHRVRLVRLRTQVQCKVKGYLHRSGVSFPQGWKKENLTFFRETDPQIADFISIIETTTERIRRVEKEIKSIAHHKSLALLLQTVPGIAAFSSLMILGEIGTIKRFPDPKHLVSYAGLCPGICQSSRKSHPVPKKACNTWLKWIMYVCSGRAAQINKRYMKHFYKKQRTSGYSIARRSTARKMLTDIWHMLDKEEAYDPS

SEQ ID NO: 66771 - protein, 435 aa, unidentified
MNTPNIPESEIAAWVGLDWADQQHVICLQAADWAAVETSVVKQRPESIQAWVAQLQARFPQGKVAIALEQSRGMVLYALMAYEGLVLYPIPPKTLAKYREAFHSSGAKGDLSDAALLLDLVRRHRERFQAWVPDDPSSRQLRLLVEERRKLVAQKTRLTNELTSRLKSYFPQALDWVGELDTRLACDFLQRWPRLDSLQKARPAQLEQFYRRHHCYRSALIQQRLEQIRQAQPLTRDRAVIAATSLMVQALVRLLGPLLESILQFDQQIEALFAQHPDQALWASFPGAGPVLAPRLQAAFGSDRARFQQALELQQLSGIAPITQQSGKSRHVERRWARPKFLHQTFYEYAAQSRLACGWARAYYEQQRARGNKHPAAVRALAYKWIRLLFRCWQNRVPYNEETYLKALARHNPALRLAAEAAQSQMAKKKEKKAA

SEQ ID NO: 66772 - protein, 422 aa, unidentified
MHEERRWFVGIDWASQEHVVTLCDAQGNKIGEREFAHGGTGLSDMIAWLLKASGGEAGEIHVAIETPHGPIVEALLERGFNVYSINPKQLDRFRDRFTVSEAKDDSLDAYVLADSLRTDMHLFRKLIVSEPLIVELREWSRIDEELKAECVRLANRLRDQLWRYYPQMLELADDLSADWIFDLWEVAPTPEKTARVREATVARILKKHRIRRFDAAHVISELRKPALSVAQGTTEAATAHIRLVIAQLRLLNRQLADAGLQLDRLCKKLAEPIARDEGENVPGQRQEHRDVTILDSLPGVGRTVLVTMLAEAPDALQRRDYHALRNLCGSAPVTRRSGKSCLVIRRRACNRRLMNAAFYWAQTATQRDPTSRAKYAALRARGHGHARALRSVVDRLLYVACAMLENRTLFDPSFGEKKATAA

SEQ ID NO: 66773 - protein, 359 aa, unidentified
MQRNKISFKGQKIYIGIDVHAKTWEVCVLTESGYKERHPQQASAKTLFDFLKKNFPDGEYHAVYESGFSGFSTYYALKEYGINCVVTHAADVPTTQYEEVMKTDKVDAAKLARSLRAGDIRPIYIREKENIDDRSVIRIRKTIQKQLSGYKARVKYLLHCNGVEIPERFARPGTHWSRAFIKWLKEDVVLLSSSRLSLDLLVKQVETIRQTLLDATKSIRRLAQTDRYRNNYELLMSIPGIGVSVAMCILTEIYDVKRFRNENQFASYLGLIPTCHNSGEKTASGEKTFRGNKHLGPMIIEAAWIAIYRDYGLGMAYARYKQSMKPQEAIVKIARKMSNIIFSVLKNSRKYEPYRWDKE

SEQ ID NO: 66774 - protein, 435 aa, unidentified
MDVHANLIVGVYQRAQFGKTTIEEQYWNSDAIKSSLKKFALWCKSLAPEIIIMESTGVYWQSLYEQLELVGFTSEQLVVVNARDVKNRRGSKTDRADAVHLAEVARQGNYRSSFVPRKDIRELRCISRAYSQLKNQRKSLVNVLHKQLCQVGCRASSVFSDIRGKMATKILDALIDGYEGDELLKKVKEICKNSRGRLKASPKEIVEALDADMESKVWFSIRKIIEHIRYLDKELEEHLDKLREETKPYKSTLDLLMTIPSVKEITAIGIVCELGDDLSAFESVRKFSRWIGLAPGNNESAGKRYSGKITPGNKYLKTLLVEAASGIGLSKTGYLKEVHQRLKERRGTKRANVAIAHKLCRIIYSVLKNKTAYVEQYKPVLKDHRLEKAVHAVAGLRIVGYACDDITVEDIETGMTSVIFGANKSKLTSNSQLVT

SEQ ID NO: 66775 - protein, 355 aa, unidentified
MNSEKYIGLDVHQATISVAVLDHTGKLVMECVLETKAATILEFFAGLRGTLSVTFEEGTSAAWLYDLLKPHVARLVVCNPRKNALLKAGNKSDRIDARKLAELLRGSNLKSVYHGETGVRTLRELARSYITTTRDLTRVMSRLKAVYRSWAIPCAGRDVYYTRHRKEWLGKIKHAGVRRRAEHLYQHLDILKQLRQQVRRELLAESRKYQITSQLRQMPCIGPIRSALLVALIQTPHRFRTKRQLWAYSGLALETRISAEYCYVEGQLRRSKKLLSIRGLNKDHNHDLKGLFKSAAITASARPGPLQDFYQASLAKGIKPPMARLTLARKIAAITLTLWKKGEDFDAEKLKLQAA

SEQ ID NO: 66776 - protein, 422 aa, unidentified
MTSADEVVYARCCGLDVHKETVVACVRVFEAGGRLNQEVRTFVTTTRGLLELGDWLAERCVTAAAMESTGVYWKPVWNLLEGRATKDGEPITLMLVNARHIKNVPGRKTDVKDCQWIAQLLAAGLLSASFVPDRPQRELRDLTRQRAQLIGDKTKVANRLQKFLEDANIKLASVASDVLGVSGREMLKALIEGKLTPAQMADLARMKLRAKIPQLTEALTGGVTEHHRFMLKTTLDQVEYMEKQINWFDERLEAVMSPLELKAVEKLDEIPGFDKRAAQNVLAEIGTDMNRFPSEGHLASWAGICPGNNQSAGKRKSGRMSEGNKWLKRTLNQTAWAASRTKASYFRAQHQRLSRRRGAKRATMAVAHSQLDVVYHLLKRDTTFQDLGVDYFDRQNSDRLKQQLIAKLQRLGCKVTIEKDAA

SEQ ID NO: 66777 - protein, 381 aa, unidentified
MGKSIAEVRRFVGLDVHAETIAAAVAEKDGEVRTLGIIPNRLQSIRELLPKLGEPGTWRACYEAGPTGYTLYWQLTQLGAECVVVAPTLVPMKAGDRVKTDRRDAQRLVGSFRAGELTSVWVPDAAHEALQDLVRAREAEKRDQLRARHRLGKFLLRHGRRPEKRMSAWTQCYMDWIRREVKFEQFAQRATLEDYLAEVDHQAQRIARLETAIDEAIEGAPATMRAVVSALQALRGVGKMTAITIVAEVGQLSRFARARQLMGYSGAVASEHSSGEHTWRGAITKTGNAHLRRVLVEAAWCQRHAPSLTRTLRARQEGLSAAVQEIAAKARHRLSARYRRLSARGKPKQQVVTAIARELQGFVWAIGVEVERNGLTGPAAA

SEQ ID NO: 66778 - protein, 391 aa, unidentified
MICVGIDVAKDKHDCCILDSEGTTLADCFTIPNNLDGFKRLLQTIKDCTQKSDKIKVGLEATGHYSCNILGFLLDNDLPVYVMNPLHTNLYRKSLSLRKTKTDRVDAKTIATMLLSDVDLKSYTDTAYHNEELKSLTRYRFDKVQERAKLKQSVSRLVTILFPELEQLVSSIHGTSIYALLSEYPGAKQISEAHLTRLANILVKTSRGHYRKDKATHIRDAARTSIGSVMPAKSLELKHTIKLIQELTSEINEIEDAIRKIMDELKPPILSIPGMGFHSAAMILAEVGDFSNFNSPDKVLAYAGCSPSTYQSGKLTNCYAHMEKRGSRYLRYALYTATKYVCYWNPVFTEYLTKKQAEGKHYNVALSHATKKLVRLIYALQKSGKAYLAIT

SEQ ID NO: 66779 - protein, 360 aa, unidentified
MRYSTYIGIDTHSTKNEVCALVIETGEIQNETFSDDPNQIIRWINENDLPRPIRCVYEAGPTGYSLARTLISAGFECVVAATSKLPKRHDRKKNDKIDAEWLARLLSSGAIRETHIPTLQEESLQHLSRLRNETMNDLKRAKQRVASFLLLTKTEYSLTKRRWSKKFREWAEEIEFERPEDTFVFRLKYAEVIRLEERLSYIENHIVRIIEDDERLLTLAKRLMCIYGVGKVAAFTLVCEINDFARFKNGRSFASFVGLTPSEHSTGKRRITGRITKTGNGYLRSIIIECANIYARCIPVVRHEDESVPENVRAKADKCSKRLKKRREYLIEKGLSNNKAKVAIARELCEWVYWIATLPA

SEQ ID NO: 66780 - protein, 315 aa, unidentified
MTTPEYFVGIDVSKAMLDIAVLPGNETWQVEREEQAIAALASKLRQLIPRLIVLEATGGLESPVTAALAAAGLPVVVINPRQARDFAKATGRLAKTDTLDARMLAQFGLTLKPTVRPLRDEETQALEALLTRRRQLIEMLTMEKNRLQSATKAVRRDITAHITWLNKRLKDVDGELTAAIASSDFWRVKDELIRSVPGAGKVLSVTLLANLPELGNLNRRQIAALAGVAPLNCDSGTLKGSRHIWGGRAAVRTALYMATITAIRCNPVITAFHRRLRAAGKKPKVAIVACMRKLLTILNSMIRTLTPWQPQNVVA

SEQ ID NO: 66781 - protein, 459 aa, unidentified
MARHQRKGNGLPAQLAAVNLHAAGIDIGAQEHWAAVSPDSDSQPVRRFGACTADLEALASWLQQCGVQTVAMESTGVYWIPLFELLEAQGFAVVLADAREVQRAPGRPKTDVQDCQWLQRLHTYGLLAAAFRPPEQICVLRSYLRQRAMLVTYASQHIQHMQKALTQMNLKLQHVVSDVTSVTGMAIIKAILSGEHNPTTLAQLRARNCHHSEAEIARALQGNWRAEHLFALQQAVELYEFYHHQIAECDRQIEAQLQTLADHSAGRTLPPAPRPPKRRRNEHHFDARLPLFRATGVDLTAIEGINEHTALVLLSEIGTDMTRWPTEKHFAAWLGLSPLHKISGGKVLSRKVRPSANRAAVALRLAASCLHHSHSALGAFFRRLKARLGTPKAVVATAHKLARLVYRLLKHGEAYVVQGMAEYEHAYRERVVKNLIRKAKELGYQLLPTSEQTAQEAPA

SEQ ID NO: 66782 - protein, 362 aa, unidentified
MAKIRSWAGLDVHAAKVLAVAVDGETGEVSSRRLCGKTCEVVKFCSALPAPTRVAYEAGPTGFTLARALGDAGIACVVAAPGKIPRPAQDRVKTDRRDAERLVRLLMVDGLHPVRVPSTEEEALRDLVRAREDIRGDLMRARHRMSKLLMRHDVVFDGEGKNWSAAHRAWLGRLRLADHAAQLALLDYLGAIDALIVRRGALESAIGELVPDSPWAQTVARLRCLRGIDTLSAVGLCAEVGDWERFERAGQLMSFLGVVPSENSSGDSRRQGAITKSGSAHARRLLVEASWHYRRAPARGLSLRRRQESQSPHVIALSWKAQQRLHRTWQRLDGERGKRRTVVAVAVARELAGFCWAIANAD

SEQ ID NO: 66783 - protein, 347 aa, unidentified
MTTIGLDLHKRESQLCIAHDDGAIQERRIVTSRDRFTAVLGDLASARILLEASTESEWVAQHLESLGHEVIVADPNFAPMYAARYRRVKTDRRDAYTLMEACRLGAYRKAHRSSDARRHVRAQLAVREALVRTRTRYTAIIKSLVRRDGLRVRGSAAHLLQEKITALDPSPQLLEELQPLFEMLVPLNAQIEAADHRISALEKTDPAVALLMTAPGIGAITASAVVAVADDITRFDSAHQFEAFLGLVPGELSSGDKRHIGHITKAGNARVRYLLVEAAWRLIRSKQDDTAALRSWAVGIANRRGKRIAVVALARRLAGILYAMWRDDKPFDAKCIRMPRPRAVALT

SEQ ID NO: 66784 - protein, 391 aa, unidentified
MIYVGIDVAKDKHDCFITNSDGEVLFKSFTIPNNREGFETLFQKVQSVSDDLTKVKVGLEATGHYSYNLLGFLLDKGLPTYVINPLHTNLYRKSLSLRKTKTDKVDAHTIASMIMSDVNLKSYSDTSYHNETLKSLTRYRFNKVQERAKLKVSVSRLVCILFPELEKLVSHLHLASVYALLSEFPSAHAIASAHLTKLTHLLSENSHGRYGKDTAVMFREAARNSIGSNMPTKSLELKHTIKLIHELTSEIDEIETEIKKIMDEINSPILSIPGISYSMGAMIIAEIGDFNRFGSADKILAYSGFSPSIYQSGQLDGAYSHMEKRGSKYLRYALYNATKYVCHWDPTFAGYLAKKRSEGKHYNVAISHAVKKLVRVIYHLEKTNQQYIKAA

SEQ ID NO: 66785 - protein, 341 aa, unidentified
MNKVSTIGLDLAKHVFQVHGIDERGNVVMRKQLRRSAVAKFFADLAPCTVGIEACASAHYWAREIGVLGHTVRLMPPAYVKPYVKRNKNDAADAEAICEAVLRPTMRFVPVKSAEQQANAMIYKVRELLVRQRTQLMNALRSHLAELGIVAAKGVSKLDGLIAVVREHNDARVPSAARHALLELVKQIEALDGRIEPLEEEIVAQVRTNETGRRLMGVPGIGPIVAGALLAMVPDPAGFSSARHFATWLGFAPRQKSSGGKQRLGSISKQGNRYLRSLLILGARNVLCRRKRASAWLAALRGRRPFKVVAVALAHKTARIVWALMVKGGTYRAAAPAVAIG

SEQ ID NO: 66786 - protein, 336 aa, unidentified
MKLMPVGVDIAKNVMQVHFVNTDTGEIFNKAIKRAKFIEFFTNRSPCLIGMEACGGAHHWARQLSRLGHQVKLMPGEFVKAFNIRNKNDTADAQAIWRAVQQPGKAVAVKTEDQQAMLALHRIRSQLMKFRLMQTNSLHGLLAEYGEVMRTGHASLIKNVPDILARLSGRLPAVLIDSLREQLGEVERTDGRIADIERRIRELSRDDPGVKAISTIPGVGFLTATAAVASMGDADAFRSGREFASWVGLVPRQTGTGGKIQLLGISKRGDKYLRKLLVNGAHSVIQNAREPGPWVTDLLKRRPINVASVALANKMARIIWAVLAHGRPYRKEAAHN

SEQ ID NO: 66787 - protein, 442 aa, unidentified
MEILHPRCCGIDVHKASVCACISIKEAGVVEKHKRRFDTTTAQLRELVLWLQQQQVSKVAMEATGVYWKPVWNLLEEEFELLLVNPQHLKSIPGKKTDFKDGERIADLLQHGLLRGSFVPPRPIRELRDLTRMRATLAQERSSIINRIEKTLEDPNLKLGVVASDVVGASGRAMLEAVVRGETDPAVLADLAKGTLRNKIPQLKLALQGKITDHHRFMLRQWLDMLDLVDRKIALLEQQIVEHSRPFEAMIHTWMQVPGLRRINAFSLLAEIGADMSQFPSAAHLASWAAVCPGNRESAGKQSSGKIRSGNPWLRRTLCEAAWAASRYQELLFPSTLPTPGTRARKESRADRRRPQPARHCILVHRSRPTLPGSRLGLLQPPAQASPREDSDQALGKTRSPCHPRTSGKCGIELSGEAFSARIGHFANMSAVPQLTGRRRIP

SEQ ID NO: 66788 - protein, 355 aa, unidentified
MYGLKHQKEKHYMDHFAGLDVSVKETSVCIVDNTGRIVREVKVPSEPEALLVVLKNPAYHFKRIGLEAGPLSQWLYSALAEAGLPVICVETRHMRAVLKAQINKTDRNDARGMAQMMRVGLYRPVHVKTLRSQKLRMLLTHRKLLQSKAIAIENDLRGTLRNFGLKVGMAGTVKFEARIRELVENLPDLAALVEPLLIVRRVLHEQISVLHRRLLAIVRDDAVCRRLMTIPGVGPVVALTYRATIDVPARFKNSKAVGAVFGLTPSKYQSGEINRTGAISKCGDAMMRVMLYEAAQVMLTRTNKWSWLKAWAMKIARQRGMKKAIVALARRLAVIMHRIWVDGTEFRWTRKVVAA

SEQ ID NO: 66789 - protein, 348 aa, unidentified
MNANHYIGFDVHKKSVSYCVKAGDGRIVEEGKVPATRQALRRWAQQRTEPWHGAMEATLFSGWIYDALKPYAAELQMGHPAMMKAIGASKKKNDQLDARKTADLVRCNLLPACYVAPVEIRELRRLLRYRNLVVAQAVRMKNKMSGLLMEVGAPYNKQRLHGRCYFNELVDQLEEVPESVKDLLRLSRAALEAFEATQQQLLARLRQDPLLTARVKLLTAIRGVGTVTALTWVLEVGEPRRFSSIAHAVSYCGLTAALVSSADKQQRGPISRQRNAHLQTVLIEAAKLAPRWNPQLAAVHTRELSRGHRNRATLAVARKLVAYLLAVDKSGQPFQVRAPDAQASERVA

SEQ ID NO: 66790 - protein, 405 aa, unidentified
MNLREKFLYVGMDLHKDTHTAVMVNCWNEKLETFVIENKPSEFGKLEKRINKKAVTLGLSPIYGLENAYGYGRSLAVWLIEKGYTVKDINPALAYDQRKSAPTFKKNDEYDAYCVATVMINQLNTLPDAKPEDNHWTLSQLVNRRDTLINDGIRLKNGLHEQVSKAYPSYRKFFCEIDRKTALYFWKTYPSPASLKNKSVDELYAELKAIASNISKSKAQLILDCVHNDGDTHRDFQDSRDFITQSLVRDLEHQAVGLAQIEVEIEKVLKTFDLKLTTLPGVGIAISSKLIAEIGDIRRFPNADKLARFAGIAPVKFSSAGKGKEESSKQGNRELHGLFYFLAVSMVCVHNKKPNNPVFYEYFCRKISEGKTKSQALVCIMRRLVNIVYGMMKNKTEYRPYAEAE

SEQ ID NO: 66791 - protein, 364 aa, unidentified
MYDSTTTVTVGLDVHARSVRLAAVRADELLEERTLPYDEQAVEQVLRRWPVVRCCYEAGPTGFGLQRFLVERGIDCSVVAPGLVPQRPGDRVKTDPRDARKLARLLAGGLLEPIHVPSRELEAARDLVRGREDARLDRMRDRHRLSKFCLRQGRVLPTSSWTVMRRKWLGEQRFEFAAQQITFDSYVHTVDLVDARIEQLERAIRETAEQEPWRGLVARLRCLRGIETLTALALVTEIGDFDRFTTAEEFMAFVGLVPSEHSSGEKRRQGSITKVGNSHVRRLLVESAWHARRRPKVGYELARRQRGQDAVVVERTWRCQQRLYQRWQRMAGRGKPQQKIVVACARELAGFVWAIATEQPLRNT

SEQ ID NO: 66792 - protein, 368 aa, unidentified
MNDRDHSRLEQFRQLRKEVRGSTEYLIIGIDIAKEKHHVFFGTATGKTLLRRLVFENSVNGFEKLMAYAEAIKTKHALGKMVFGLEPTDNYHKPLAEYLIKCGYNVVLVSGVAVVRNREMLDGRWDKNDDKDSANVADLISQGKCLYYDYPAMPLKDLRNLLSLKRRLKKQEHGTKVRIRNHLLAQYFPEFDKYFEKGGAASLAVVKWCLKPSKIWNMEFEEFIQLVAPRIRRGDQEKRLRDIWEVAIESIGCEAGDELDFEARLMVEDLEQIRESLKKVDEHIEEVCLGFPEYEYLRSIPGFGPDVASNVIAAIGDPFRFENGRQVLKLAGFDLSAVRSGNTSEKAVPVISKKGMHILDMPFTRRPL

SEQ ID NO: 66793 - protein, 346 aa, unidentified
MEYIALDVHKKYTWARVENAEGERLYERRLAHAHGTVKGFVSRWTAGSPVAVETVGNWYWVVDEIEAGGGKAQLVNARLAKLMMGSVNKSDKLDAKGMNRLQRTGTLPTVWIPSASVRDARELPRTRMVLSRQRTQLKNRVHATLAKYGYVVEGASDAFGKKGRKIVEELLLKLPPHTGQALRLILDELDHVTDNLKQIEKQMTETFSPCPQTQWLKSLPGVGDTLAVVIWTELGTMERFSRAEQLASYCGLVPRENSSGGKIRFGAVRRDVNVYLKWAFVEAANSALLNAERCGYGHISRLYQRLKPRRGHGKAKVAVARHLSEASFWMLKKGEPYREPMSSTQR

SEQ ID NO: 66794 - protein, 383 aa, unidentified
MNDLIRIGVDTSKSVFQLHGVNAAEQPVLRKKLRRRQFLEFFWKLPATRVGIEACGASHHWGRELSALGHEVVLLPPQRVKPYVDRNKNDAADAEAICEAMSRPRMTFVPVKTAEQQAALMLVGVRDQLVARRTQLSNAIRGYASEFGLVAAKGNDKIEPLLVRIASDENLPALARELFVRLGDEYARLKPELRKVEARLMTWHRGNELSCRLAEIPSVGPIGATLSVMKVGNPHAFRSGRDFSAWLGMTPKDHSTAGKMRLGAITRAGDEALRSVLVAGATSVIQQVRKGRGRPSPWLVALVKRKPPKLAAVALANKTARIIWKLMVSGERYNPQHTRQRFVPPTDSLAPGARRQGQAACGGDLRSALTALAPGAHSAPPSA

SEQ ID NO: 66795 - protein, 390 aa, unidentified
MQTVADRPEAPNAIRNDLVAIFVSLELSRSTWLITSLSPDGGEKMSKHSVPAGDIYALLARFSEFKQRAFARTGKSFPIIVIQEAGLDGFWIHRVLQNEGIESHVVDPASIATSRRRRRAKTDRIDGEALLRTLLAYKRGEPRVCAMVKAPTPEEEDRRRLCRERKILIAERVKHVNRIKGLLFCQGVSGYEPLRRDRRQRLDELRTGDGRLLPKHLKAQIGRELARLELLLEQIKAVEAERDALFAAAKAAAPAPGPLAMLLNIKGIGPEFAAILWSEGLFRHFDNRRQVASYAGLAPTPWQSGSVDRAQGVSKAGNPRLRTTLIQLAWLWLRNQPQSALALWFKDRVSRNGGRLKKTTIVALARKLLVALWKYVTAGVVIEGAIVKSA

SEQ ID NO: 66796 - protein, 338 aa, unidentified
MAILYVGIDLAKNVFAVHGVDESGKPALMRPAVPRAKLHELLAGLAPCTVAMEACTGAHHWARLFAAQGHTVRLIAPKFVTPYRMSGARGKTDAADAAAICEAVQRPNMRFVPGKSEQQQSQLMVHRARQGYVQARTACINRIRGLLAEFGHVLALKADTVRRQAAGLLEELPGWGNTVIGDLLSELHRLDERITQYDRHIAQIAREDERARQLMQLPGIGTTTATAIVAMIGNGHEFKCGRQFAAWLGLTPGQYSSAGKARLGRITKAGDGYLRSLLILGGRAVLALAKGRSDPISSWALALQQRRGYWRAVVAIAAKNARMAWAALSRGENFKIPA

SEQ ID NO: 66797 - protein, 416 aa, unidentified
MNAVGIDVSSRKSTVAVLRPLGEVVCLPFDVTHDIAGLASLAEKLKAIDGETRVVMEHTGRYYEAVAKALHEAGFFVCAVNPLLIKEYGANSLRRVKTDKADAIKIARYALDNWADLRDFTPMDAIRYDLKTLNRQFQLASKQRTASANNLIALLEQSFPGIRKCFDSPVRSDGTQKWVDFAHSFWHVDCVRKQPFPAFCERYRKWCKLHAYFFKLSNAEEVYALAKRAVVLTPKSKVVKVLVQEAANQLSSISRSVEVYRAEMDRLAAMLPEYPVVMAMYGVGKSYGPQLMAEIGDVRRFERKQALVAFAGIDPMPNQSGDKNVRSNKSSKRGSPYLRKTLFNVIRTYLQCAPQDEPVFQFLNRKRAEGKPFYVYMLAAANKFLRRYYAKLRDYFASLDTLQPVAPIPTILKAAL

SEQ ID NO: 66798 - protein, 392 aa, unidentified
MFFIGIDIAKRSHQAAVTDVSGNIIIKPFNFKNSSLGFNQFLSVLESNSVPKDDCVIGLESTGHYWYPLYFFLVELKFNVKVFNPIQTAAFREITIRKVKNDNLDSIMIADFTRFGRYSETHIPSENMLALKNLSRFRLSVSDICGTLKKRTIVLLDQVFPEYDTVFCDIFGTTSKLLLEKFSTPEEFSEISTAKLANFIHKVSRGRLGREKAELIKAAASNSIGISYAVDTFSFQIKQLIEQIEFMENQLSEIDAEMAKLLALSEYSVITTISGIGPTLGSIIVSEIGDIERFETSSKLVAYAGLDASVKQSGEFNSSQNKISKRGSPYLRRALWMAAFMSLQCDPALYDYYSRLRARGKSHRLATTAVARKLCIIVWAIMKSKQPYSPNI

SEQ ID NO: 66799 - protein, 364 aa, unidentified
MNNITHIGLDVHKDTIAVATLRPGSTSCEERVIPNTPEAIRSLVRRLGDPASCCFCYEAGPTGYDTYRLLDSLGLRCDVIAPALVPRRPGVRQKTDRSDARNLARLHRAGELIPIGVPTPAQEALRELIRVREDLKNDRRIARQRIHSFLLRQGRRYPKGASRWGKGFEAWAHAQAFDLPALQATFSHLLAAEEVRRAQLEAAEAEITRAALEPEIASAVALLRLFRGIDTLTAVTLVAEVGDFRRFRSAAAFMAFTGLVPSEHSSGLSVRHGSITKTGNAHIRRVLVEAAWAYRYRPGIGAGLAKRQEGQPPEAVAYAWRAQCRLSARFRLLSAKKGSNKAAVAVARELAGFVWGLMTERTAA

SEQ ID NO: 66800 - protein, 375 aa, unidentified
MKEKLRFLGMDVHAETIAVAIAEPDGEVRSLGTISNRMESLRKLIKKLGPVEKLRVCYEAGPTGYVLYWQLAELGVQCEVIAPSLVPVKAGDRVKTDRRDAEKLARSYRSGDLTAVWVPDEGSEALRDLVRAREAAKQDELRARHRLGKFLLRSGHRPPSGVRAWTHLHLIWVSQIRFKQVAQESTRLDYLHEVEHMRERVLRLEQAIVEAVKLASPALQEVIQDLQALRGIAHISAVTIAAELGQISRFEGARQLMGYCGVVPSEDSSGKRTRRGSITKTGNAHLRRIVVEAAWSYHRPPAIWAGLRKRQQSVSEEAKEIAWKAQHRLHKRYARLAAKGKDKRKIVTAVGRELLGFIWAIGTRAEATARQRIAA

SEQ ID NO: 66801 - protein, 371 aa, unidentified
MQKKVFYVGLDVHKISISVTVAEDGRDGAVRFIGAIPNTPSDIAKLTKRLSKDGDRLEFCYEAGGCGYGLYRQLLDLGHGCIVVAPSLIPRKPGERIKTDRRDSEKLARQHRVGDLTSVWVPDPVHEAVRDLVRARMDATAQLTRARQQCLAFLLRHGRIYGPNRKNWTLRHRRWLGLQTFEQAPHQVVFQDYVEAVWTAQDRCDQLEARIAAMLPDWSMAPLVGALRAMRGLDTISAVIFLASVGDLGRFEAPRQLMAYLGLVPSEQSSGTSVWRGGITKAGSSEARRMLVEAAWSYRYPPRLASEKVLIVERQEKPVRDIAWKAQVRLCGRYRKLSATGKKPTVVVTAIARELCGFIWAIGQEVAPLPS

SEQ ID NO: 66802 - protein, 404 aa, unidentified
MIFVGVDWAEAHHDVCVLDEGGAVLGSRRVLDTLEGVRQLHELVADHAEEPGQVAVGIEKDRGLLVVSLVAAGYAVYAVNPLASSRFRDRHQVSGAKSDRGDARVLADMVRTDRHQLREVAGDSDLAEATKVLARAHQSAIWSRQRHLNQLRNALKDYYPGALEAFGTDLASNDAVAVLTAAPTPAAGRALGTGELEALLRKGGRQRNVAARARQLRDALCRGQLEQPGIVADAYGAVTASELRLIAAATAEVATLEEALSAAFEQHPDAKVVLSLPGLGTVLGARVLGEFGDDPNRYASAKSRRNYAGTSPVTRASGLSRVVLARVSRNRRLVATCDQWAFCALTSSPGARRYYDELRQRGKTHRVAARALGNRLVGILHGCLEDHVPYDEATAWRHREQLAA

SEQ ID NO: 66803 - protein, 415 aa, unidentified
MTQCIMIGCDLHEDSMLLKIAQDCQTPETRTWKNTVRERARMTADLKRRSKAAGGARVIFAYEASGAGFGLYDQLTAAGIECCVLAPTKIPKSSRQKREKTDEKDALQLLELVRAHVLAGNPLPKVWIPDPQTRDDREVVRMRLDVAVKITAVKTQVKSLLKRNCVTRPGGLGKGWTRAFRAWLKVLSSDWADQAETALKYGSRSALTSLLRQLDFLEQEQEHLDKAVAALVYEPRYLAAVQELHKLLGVGALTAMVFLSEIGDLTRFNNRRQIAAYLGLCPTSFESGRTNDRKGHITRQGSARVRRVLCQAAWSHVRHDPREKAAYERIKAKNPKKAKIAVVASMRRLAIRMWHRGRQARELPCVNWQPSSLCKEATVGFSKASSRCPKGVQRKTKSPGETERLGKRMAASRGR

SEQ ID NO: 66804 - protein, 403 aa, unidentified
MNSVGIDISKGRSTVAVMRPFGEVVISPFEVRHTDSELSELARQLKSLNGETRVVMEATGNYHAPVAKLLHDAGLYVSVVNAKLVHVYGNNDLRRVKTDRKDAVKLANYGLDRWLTLPRYVPEEDTRLLLKNCYRQYRQYSKVQTVLKNNLISLLDTVFPNVNRLFSSPIRGDGSEKWVDFVAEFWHCRCVSEKSEKVFTNKYQRWCRKHGYNFSEEKAHTIHAEASGYIGVMPKSETTKLLVEQAVAQLRATSAALTALKHEMLALAAQLPEYPVVMGMFGVGPTLGPQLIAEIGDVRRFYSKKALVAYAGLDAPPNDSGDVTGKHKSMSKIGASSLRRTLFLVMSVYLQNAPLDEPVYQFMDKKRAEGKPYRVYMMASANKFLRIYYATVKAYLESLEHTA

SEQ ID NO: 66805 - protein, 387 aa, unidentified
MMTMTRTEESTAVATPVAPTTLLLAFELGERSWKLGFTTGLGQQPRIRQISARATDRVEEEIARAKARFRLPADAPVLSCYEAGREGFWLHRWLGAHGVSNHVIESSSIEVNRRARRAKTDRLDLGGLLNLLARHHQGDGRVWRIVRVPSVAEEDARQLHRTRETVQQDRNRLINRLKGLLTTQGLKLPVDATFPTQLETAQLWDGTPIPAGLKARLQRGWAQLEFLTRALTELDAERDALTADPQTAMGRYVEALPTLRGIGPIGTWTLATEIFGWRDIKNRRELAGLVGLVPAPYQSGESHHDQGITRAGNTHVRRLMVQLAWSWVRYQPESALTKWYEGKFGHGSRRLRRIGIVALARKLLIALWHYVEHGEVPEGAIVKGQAA

SEQ ID NO: 66806 - protein, 338 aa, unidentified
MGKITTIGVDLAKNVFHVVGCDARGKRVCRKQLRRGQLLRYFANLPPSLVGMESCASASYWARELQALAHVVKLIPPQYVKPYVRGNKNDYNDAQAIAEAVVQPQMRFATVKTVAQQDVQALHRLRERRVAERTALCNQVRGLLGEYGMVLPRGVASLRRRIPELLEDADNGLSTLFRRLLGQAYRQLQELDAHIADYTGELKRQSEQQVACQRLQTIPGYGPILASVFYSVVGDGAAYRRGREVSASVGLVPRQHSSGGREQLLGISKRGDRYLRSLLVHGARAVVRQAAGREDRLSRWINRIRAARGYNKAVVALANKLARIGWAVLAHNTTYQAA

SEQ ID NO: 66807 - protein, 336 aa, unidentified
MATSTTSCIEQNTLPQPTLYLAFELGQNTWKLGFTIGVAQQPRERTIPAGALETLQQEIARAKQRFGLPEEARVVSCYEAGRDGFWLHRYLVAHGVQNHVIDSASIEVNRRQRRAKTDRLDVRKLLTMLLRHSAGEKKVWSVVRVPSVAEEDRRQLHRELTTAKQDRTRVINRIKGLLAGQGVQLALQGEVDAQLDQVQQWDGSPLPSALRTRLKRAWQQVGFLTAHVQTLEAERRALLRRRADPVIAQVRQLFTLRGIGVNSAWLYVMEFFAWRDFQTPKQVGALAGLTPTPYQSGQSRRDLGIAKAGNRHIRAMAIEIAWAWRRFQPASALSQW

SEQ ID NO: 66808 - protein, 354 aa, unidentified
MADTSRHSIPAFSSIGVDIGKDVFHLVGFDQEGRIILRRKIKRLGLVNAFSKLPRCVVGMEACLSAHFVSRTLRRLGFEPRIIPAIYVKPFVKGQKNDFNDAEAIAEAALRPNLRFVKEKTQDQLDLQAMHRVRSRLVSRRTSTINQIRAFLIEQGIAVRAGAHNLRKSLFAILKNREDEISPRMHDLIVGLYEDWLWLDERIETITGEIEAISRREVNCQRLVSVPGIGPIISTAVVAAIGTGEAFERGRDFGAWLGLIPRQYSTGGKAILGRISKRGSKYLRTLFIQAAHVILMRPHNWEKFSFGPWLTEAAKRLHRNKLATALANKLARIAWSVLRNGRRFDAHLPQIAAI

SEQ ID NO: 66809 - protein, 347 aa, unidentified
MRFYTKQHKFYCGIDLHARKMYLCILDNTGEVRLHRNINTDREGFLKAIRPFREDIVVAVECMFTWYWIADLCVQEKIPFVLGHALYMKAIHGGKAKNDKIDSRKIAVLLKGGMMPQAYAYPARMRATRDLLRRRNHLMRKRAELYAHIQNTRSQYNLSDPLGRIAKPENREGVAERFEDPSVRNMIAADFAVIAAYDPILAKMERDIIQSAKHHDPVSHALLHTIPGVGRILSLVILYEIENIKRFPSVQDFASYCRLVKCAKESNGKKYGSGGKKIGNAHLKWAFSEAAALFLKGNEQGKRYLDRLTAKHGKGKSLSILAHKMGRAVYFMLKNKKPFDQKRFLGL

SEQ ID NO: 66810 - protein, 413 aa, unidentified
MSIDSNSTAPRVTAGVDWAKDDHAVCVVGDQGQALDRFTVPHDAAGLKRMAARLLRAGVEEVGIERGDGPVVQTLIRAGLTVFVIPPGQVKNLRSRYGSAGNKDDRFDAYVLADVVRTDVRRLRPMVFDSAQTTALRSAVRARRDLVTHRVAAANQLRAHLQIVFPAAVTIFADIDSTITLTFLARFTTQDQADWLSPKRLAAWLNSVSYSGGGDPAVLHARLLAAPRGATGEYASVHAGTTTALVAVLRALNTQIHILATSIGEQLDAHPDAAIFTSLPRSGSVRAARLLAEIGDARGRFPTRDSLTCLAGVAPSTRQSGKVKAVTFRWGADKQLRDALCDFAGDSRRANPWAANLYTKAIARGCDHPHAVRILARAWAHIIWRCWQDNVPYNPAVHGALQAILKQDQPTAA

SEQ ID NO: 66811 - protein, 309 aa, unidentified
MLSSVGIDTAKATLEICIKPQKIRFEVANNSAGFEALLERLKDFNISRVLIEATGGYEKDVLIALASAGLETICINPARARKFADAMGKKAKTDKIDAEVLADFAAHLSAPQGQPVSPEREELRELVKQRAQFVQSRDDYKRRRQQCRSATVMAHFDEHIEQLKVLIKRLDEEIDQAMVQLDDTRARQLLAVTGIGRVTAANLLASLPELGQLDRRQIATLVGVAPYNNDSGSHRGHRQIWGGRAHVRRVLYMSSWIIIRHNTEFKARYEALRERGKCAKVALVACMRVLIVRLNAMLRDNTPWRVQTA

SEQ ID NO: 66812 - protein, 347 aa, unidentified
MVTDQVDFVVGVDTHADQHALAVVDAVTLQTCRQLTILASRQGYRQALRLAKRHAPGRRAWALEGSGCYGSGLARFLNTRGERVLEVERPSREGAKGRLKTDALDAERAARQVLAGSAGARPRLGPDTQALRALLTTREGAVSACTAAINELRALIVVSPPELRERLQGRSEAALLDACVRLRPGRSDTEQAAVALALRSLALRIRQLRNEARTLEKELGRRTQALAPELLARPGVSPISAAAILIAWSAPGRLRSEAAFARLAGTAPIPASSGKTVRHRLDRGGDRQLNRALHTIILTRQRIDPDTQAYIARRLSEGKTKREAVRCLKRYLARSLYRLLETTPTPT

SEQ ID NO: 66813 - protein, 355 aa, unidentified
MSSVLAERLADRVDAIIGVDTHTDTHTAAVVSPVGSVLAELTVTATTDGVASLLAWAGEHTNGLGSGRRAWALDSARSHGVGLLHALRTANETVFEAPKPTATARRRGGKSDSLDAVHSARAVLAADHTTTPRADGDREALRILHACRRHYTDTRTATVNLFKSLILTADDELRDQFRGRNTDQQVRLAADLTAGEDADTLARLRRDQMTALANHIRDLDRLLATNLRHIRDLVTAMCPPLLKQPGIGPVTAAVALISWSHHGRVRSEAAFAALAGVSPVPASSGRTVRHRLNRGGDRTLNSAIHTIAKSRQRYHQPTKDYITRRTTEGRTPREITRVLKRYIARQIWWIIQAAP

SEQ ID NO: 66814 - protein, 376 aa, unidentified
MNSVAVVPLDIHKRFSKAVEMGEGGEVLGEARVSHAGRDEMKKYFSRFPAGTDVVMEATFNWPWIADAAEEAGLRPHLAHPMRAREMAKGMAKSDRKDAIFLGKLWLAGDIFPESYLAPPEVRRMRGLFRLRLTLVSMRTALKNAIHGQLHRQGILISECSDLFGKSGLAILEKLPMKEHERWQLDTKLSVLGDIGLYVKEMEQKIRRELKTDPRAQLLMSLPGVGEITAYSMLAEIGEIERFHNSRALASYAGLLPLDNESAEKDFGKRTGAHCNRFLRWAMIEAVTGAVTASGRMKSLYMRVKNRNKDKPQKARIAVARELIELSHLLLTRKVKYEEKRPPRPGSKEAGDETRPNRASQSALCARSPQASQAAL

SEQ ID NO: 66815 - protein, 411 aa, unidentified
MEAAVITAVGIDVSKSKSTVAVRRPGGEIVLRPFDVRHTNSDLKKLTSTLKKLGGDIRIVMEHTSTYWRPIALTLKEAGFFVSVVNAMLIHDFSDNTIRKLKTDRADALKIANYALTFWDILPPFNNEEETRLLLKMQSRANERITATATALRNGLIALADQTFPGVNIAFDPNTKNANGHEKWVDFFLRYWHKDCVCQYSMEAFTESYRGWCKRKNYKFRTDTAHKIYLLAQESVATLPKCESTKMLITQACKSLNAVCEAKQSTQLEMQRLAAMLPEYEVVMQMEGAGPITGPALMAEIGDVRRFKNKKALVAFAGIDAPPFQSGAFESKSRHVSKRGSPHLRRTIFIVSNIILTRSNPENAVYCFMDKKRSEGKHYYVYTVAGSAKFLRVYYARVTEFLRSLPSSDAC

SEQ ID NO: 66816 - protein, 471 aa, unidentified
MSTTPPRAQRRRQGGTALKRKVPLPPQLKQINLNAVGIDIGSEEHWAAVPPGRDREGQDVRRFEAFSGSLCALADWLKQCEIETVAMESTGVYWIALYELLVERGFEVLLVDARRVKNVPGRKTDVLDCQWLQELHTYGLLRGAFRPADQVCILRSYLRQRAMLVAYASHHIQHMQKALEQMNLKLTHVVSDITGLTGMGIIKAILKGERDPVELAKLRDPRCKNSEATVARALEGHYRQEHLFSLQQAVELVEFYQKQIAACDCQIEACLQQFEDKNPETPLTARSRKRRRSGVGFDARSYLYRMTGVDLTQIDSIEANTALTVIGEIGLDMSRWPTEKHFGSWLGLAPGSKVSGGKRLSGRTKPSANRAAAALRMAAQSLNQSQSALGAYFRRLKARLGAPKALTAAAYKLARILYRMLKHGAGYVDQGEAIYEERYRDRLLRNLKRRAAELGFQLTVTSSSTGRQALT

SEQ ID NO: 66817 - protein, 374 aa, unidentified
MRKMSLGVDLHKKQFTVYFLSEDHMVRELGVYETGQSGYERFLGVCADLEQRGFELHAAVETTGNARYFCSRLVGSGIEVTVVNTLKFKVIIQSVKKTDRHDARILAEFLEKNMLPESHLCSRESEEIRRLLKVRRSLVQTMVSVKNQIHGMLTSYGIESRGGQLQSKKDRQRILCGLADHEFGGNAAAAIASLFETIDQLDALVKRQTQLLQTLVAEDEDVALLMSIPGVGIITASTIRAYVDDIRRFGDAKQFASYMGLAPWVQNSAESVRHGHITRRGPMDMRTAMVQCVLGMVRMKAKTGSYRLMRQYQELKRRKGSGQAIIAIARKLSTIMYTMLKTREPFDPIRMAQKKKYLEMQAAALDAANSRQAI

SEQ ID NO: 66818 - protein, 327 aa, unidentified
MARKSVSHWDTIEEESKRGSEIWVGVDVHKSSYAVTILSSNGVRHSYTTPADNQNLIKQFTDRGVRITQLAYEAGPTGFGLYRACTASGIKAMVVAASQVPRAPGKTVKADKADSAKLAEYLAKGLLKPIEVPSESQEAIRSKSRRRSQISHEIGKCKERIKSFLLVNSLPEPSGLKHWSQRSREELKGLEMNPDLRFTLDSYLRELKFLEEEKALIEKDIKEKALPEKDVLQTVPGVGLVTSCIFRTELFDPKRFETGEQVSSYVGLAPIINQSGAKAGYGRIIPRGQGKLRSVLIEAAWRLLGTESWASEFYRRVLGNCGKTQKR

SEQ ID NO: 66819 - protein, 396 aa, unidentified
MISVGIDVSKGKSTVCILKPYGEIVSKPFNITHTHKDLSELSSMLFRLNDEVKIVMEATGIYHLPILTYLQEKGFFVSVINPYLMKSYRNESLRKAKTDKIDSRIIANYGIDHWFKMKEFQISGVIYEELKLLGQQYRHYMKLHLLSLAELTHLLDLTMPGIKNLLASWNETNRKDKRSDFVERFWHYDIITSMSEQEFTEKYILWAKEKKYVPSQEKAKVIYTLAQESIPTLPSETSSVKMLVTEAVRVLKEVDATLGLILSRMQEIAKTLPEYSVVREMGGVGNTLAPKLIAEIGDVRRFRNGKALVAFAGIDPPPYESGQFVGCNRKISKRGSASLRKVGYETMRSLKMRSRPEDPVYRYVVKKESEGKSKKNIEISRKIYRACLKNHFCNTF

SEQ ID NO: 66820 - protein, 315 aa, unidentified
MRDMPCFVGIDVATAQLDIALRPSGERWAVPNEASGVMTLVDRVQARHPTLMVLEATGGLERAVTSALATAGLPVVVVNPRQVRDFARATGQLAKTDALDARALAHFADVIRPTPRPLPDAQTQELRALLGRRQPLIGMRTAAQNRLAGTNARLTKDIAAHMTWLNAAIATLDDDLETILRASPLWRENDDLLQRAKGIGPVCARTLLLELPALGTLTRQQSAALVGVAPLHCDRGTRRGRRMIWGGRAHVRTVLYMGTLVATRFNPQIKVFYERLLAAGKVKKVALTACMHKLLTILNAMLKHRTPWQPQEVQS

SEQ ID NO: 66821 - protein, 342 aa, unidentified
MTEKRSIGIDLHRRNFACCVRLENGRNYLSQWSLKQLSQFIRKLRSTDEIAVEVTGNTRLFYQAVAPYVARVVVVDPNQFRVISHSVKKTDPHDARNLALYLAKGLLPEVRVKEKEQAEVASLTQTRDRLVKLRTALKNKVNNLLSARGIELDKESLSSDKGLISVLEQKVEELAHLELDVIVEQIRSLNRSIARLEHAIEEASQKLPGYRNLTSIKGIGSLGAGILLSVIGDVKDFDHEGKLAAYFGIVPRVQDSNETEHRGRITKRGSKLGRTALVQCALIAKRYSPYLHRYYERLRARRGTGKAIIALARKFLTIIYYTLKNNWIFEDFPNFVLAEAKT

SEQ ID NO: 66822 - protein, 418 aa, unidentified
MLVAGIDIGAESHHVAVVDRAEAVVVKATAFAENAAGYQELFALLARAGARGGADLPLAAASAEQERTLVVMEATGHYWQNLFAALVAQGYAVALVNPLRTHRFAGEELARTKTDSIDCLQLARFGAQKRPAVTCLPEAAVGELRELVRLRARLMQDVVDRVNQLHRLVDLGFPEFTRYLKNLNTQLATAILRQYPTAAAFRGLSYKRLARLSYDGRHRVGEELARQLIAAAAVSVGSQHTTAHQTGVRYACEDLETLRQRLKRLDGDITAGLQQHQVGKLLTTIAGIGDNTAAMLIAELGDPARFHSAASLAAYVGLCPGHRHSGKHQPKSSSLTPIGNRRIRQALWMPTLSAATCSNPWLMAFYRRLIERGKPHKLALIAAMRKLLAAIYSVAKHRRPFVPFLHSQPLDNEVPAPL

SEQ ID NO: 66823 - protein, 482 aa, unidentified
MANQKKSTFQRLINGRLNRKQRRELGRKLSAEDPGREIVNRNVAGIDVGNESHFVAVAPGRDPQPVQEFGSWTADLERMADGLKACGIRTVVMQSTGVYWIALYDVLEARGFKSCLANARHTKNLPGRKSDVQESQWLLKLPTCGLLRDSFRPPDEIRALRSLWRLRDRHVKEAARAVQHMQKSMITMNIQLSNAISDITGVTGQAIIRAVLAGERNPGELAKLRDRRVKATEQEVARSLEGNWRADMLFELQQAVDAYDFIQKQVAECDQRLQTLLAVLPTREVEADVVTTQAAGKPARKKRSRGKHKNVPRFDLHAELKRVCGVDLTSIDGVDIMTAQTVVAELGTDFSRWKDEFHFSSWLGLPPSRDISGGKVLRQGTLKVKNRVATALRTAANTLLHSDSYLGARFRSLPTRRGAPKAIKAMARYLACLIYRMFTHGQAWVDRGAQEFENKRAQRELSALKRKAAAHGFKLVNLEVCA

SEQ ID NO: 66824 - protein, 373 aa, unidentified
MNGISYVGLDVHKESITVALLKAGERGVIEWKVGNTAAEVRKLGRRLLRESGRQVKACYEAGPCGYGVQRQLQALGVDCVVVAPSLIPVKPGERVKTDRRDARKLATYLRDGLLTEVRPPTPAEEAVRDLCRARGDAREDLMRSRHRLSKMLLRRGLRYPGKNTWGAAHRRWLATICWEHEAERVVFADYRFAVEQLEERLKGLDAALAAQAEQEPYRERVGWLLCFRGIQIVTAMTILAELHGFERFTTARELMAYLGLVPSEHSSGERTQRGAITKTGNQHARRILVECAWHYRGEPAARRTLARRRAGQPAWVISIADRAQQRLHRRFWHLVLAGKKVPQKAVVAVARELVGWIWAVLQGPGAAEGQRAA

SEQ ID NO: 66825 - protein, 421 aa, unidentified
MLRYIGLDVHKHFIEVCITDRKGKILERGKVNCQREVLLEFATKKLRKYDRVALEATTNTWAVVDLIRPHVKQVVVGNPMKTRAIAEAKIKTDKVDAEVLAHLLRCDYLPSVWQPDEPTQTRRALLTHRNGLMSRRGRHMNRVQSMLARLMIKPPCKYLWSKTGVAWLETLELSPVDRLMLDSQLRQITQVNQELEIVDQRLVEIARNDSRVRLLMTLPGVSHVVAVGLLAAIGDIERFCDGNHAASYLGLVPSIRQSGNKCYHGRITKMGNPHCRWLLTQACQHVSRHPGPLGAFYRRLVKRKPRQVAIMALARKLVTIAWQMLKQNEPYRYAKPMLMAKKFTDLDRKYRQEQRRTPSAARAKAGDGLTAVYDEIGFTDSLSLDQVSDGERRMLIEKDVMMFVEELYRPVKKNRSTQTDK

SEQ ID NO: 66826 - protein, 334 aa, unidentified
MKYQFVIGIDISKPSFDVAILSVSNPENIVHNAFSNDANGFDEMMRFVNETMPGFDLSQALFCMEATGLYCNALLNFFQNHQANAWVENAVQIKRSLGVKRSKTDKVDSISIAKYALKNAELVRLWKPSGVVLEKIKHLATLRERMVVTQKRLLTPIGELRDAGQGKMADLLYKSIKKSITAIDADLKSIEAKIMECLREDASLHHLFSLITSVVGIGFVTAVNLLIYTQGFNIMCDSRKLACYCGVAPFPYQSGISVKGKTKVSHMANKKLKTNLQMAALSAVKYDPELKAYYERKVLEGKAKMSVLNAVRFKLLTRVVAVVNNDREYVKKAA

SEQ ID NO: 66827 - protein, 342 aa, unidentified
MHIASIGIDLGKTTFHLVALDEHSKVVIKKKFSRKQLVAYTVNLCHSLIGMEACSGAHFFGATLRAQGHDVRLIPGQFVKPFVKSNKNDFIDAEAIAEAVTRHNMRFVPIKTDDQLDLQALHRVRDRLVQRRTAVINQIRGFLLERGITFAKGPAKLRNQMPVILEDADQNLTPRLRTLLDHLWQEWKQLQSDIEVVSGQIEGISAEDATCQRLRQIPGVGPLVATATVAAIGNGAAFHKGREFAAWLGLVPRQHSTGDKARLSGISKRGNLYLRRMFVHGARAVLLVKYDTGDLGRWVHQLEARMARNKVIIAIANKLARIAWAVLAKGEDYRSSAVCAHP

SEQ ID NO: 66828 - protein, 346 aa, unidentified
MKIIGCDFHPSFQQISMLDLETGGWVRKKLGHASGEAEQFYRSLQGEPVKVGIEASGNTRWFECLLEGLGHELVMGDATRIRKMAARKQKTDERDADHLLELLVQGRFPQIWVPSAAERDLRQLVLHRHKLVQMRTRVKNQLQHVALNEGLQKKRQLWSEQGRQWLEQLSLPQWTERRRDDLLKLLDELNATIAELSQAVEQQAQQDARVQLLRTHPGVGPITALAFVLVVGDVRRFRRSKKLASYLGLIPREDSSGSRRRLGAISKQGNTLLRTLLVEAGQSAARGDPELRRAYQRLCHKKQHTGIGKVMVARKLAVRLYWMLKTQQPYPPARMQSSPSHSVSAA

SEQ ID NO: 66829 - protein, 401 aa, unidentified
MNAVGIDVSKGKSMVAIMRPLGEVVAAPFEVGHTATELNELAKFILKISGETRVVMEYTGVYFEPIAMALYDAGLCVCVVHAQLIHNYGNNTIRKVKTDKADAIKIANYALDNWDKLKPYTPIDEIRRQLKAYSRQYRKFNKLKTMLKNNFIALTDSTFPGVNELFSSPPRKSDGHEKWLDFAIKFWHAECVCSLSQKAFTERYRKWCHKAGYYFLESKAEDIYAAACGHIGLLPKDENTKQLVQQTIIQLTSICSSLSVIEYKMTELAGLLPEYPVVMDFHGVGRILGPQIMAEVGDVLRFKKKESLVCFAGLEAPPYESGKFESHNRTISKKGSPHLRAALFQVMDCLLKTQPVNDPVFQFIDRKRSEGKHYYSYMCAGSAKFLRIYYARVKEYLTALE

SEQ ID NO: 66830 - protein, 355 aa, unidentified
MSMLAGQYEFVIGGDPDRDTVDLAVVDSATGALRAQLADRADGAGYARMLAWADSHAPGRRVWALEGTGSFAAGLAVFLAEAGEDVVEIGGVKRQRGAKNDQIDAARAARQALAREHQTKVRAHGLREALRMILTTRQAILVSRTKAINELKGLIVAAPEQLRSDLRGCSLARQLDRIQAMRTQPEGAVEHRMAVLTLQSIAARVRFLSAQVDELDPELMTLLKQHPAGPALLAEPGVGPVVAAQLLVSWSHRGRVRSEAAFAALSGTAPLEASSGQRIRHRLNRGGDRDLNRALHTVAITRMRCHPETRAYHAKRTAQGKTHRDIRRCIKRALARRLYRRIQAATHQQQIPAAA

SEQ ID NO: 66831 - protein, 331 aa, unidentified
MGDQKRFVGIDVAKAQLEVFIRPDGETFSVANDEVGIGELLRQLEPADFVILEATGGLEMPVASALAAAGIAVAIVNPRQVRDFARATGRLAKTDRLDAEVLARFGEAVRPEARPLANEQAQALEALVTRRRQLVEMLTAEKNRRARAPKILHRSIDEHIRWLEKRLSGLDDELAELIRDTPLWRERDELLRSVPGVGKVLSSTLLAHLPELGMLNRKQIAALAGLAPFNRDSGNLRGSRCIWGGRAQVRRVLYMATVSGVRSNPAIRTFYLRLRASGKHAKPALIACMRKFLVILNAMLHNKTPWHTPALTSSTATLSPLPGADIQHGCC

SEQ ID NO: 66832 - protein, 358 aa, unidentified
MSTLAELVDGVIGVDSHRDTLAAAALSPVGGLLGQTAARADTAGYRELLGFARSHVPGRRCWAIEGAGGYGAGLAAFLGANGERLVEAARPKRPPRRSRAKTDAIDAVRAARDALGQQPHQLATPRQRGDRQALRVLLTTRRTAMAARTAAVNQLKALLVGAPEELRAELRSLPTRRQIAVCAALRDRLTRSLEHQMTVRVLRSTARRIQALQAEAEELHAQLQRLTAAIAPWLLELFGVGPVSAAQLLVSWSHAGRFRSEAAFAALAGTNPIPASSGKVTRHRLNRGGDRQLNQALHTIALVRLRDDLETRAYATRRTTEGKSPRDVKRCLKRIIARQLFRLLERYDQPGVEVLRAA

SEQ ID NO: 66833 - protein, 334 aa, unidentified
MTFELLAIDLGKSSFHLHSIASDGAILSRKVSRSKLAETVKAIDPRTVAMEACASAHHWGRQLQHDGRKILLINPRFVKPFARGSKNDAVDAAAIYEAATRPTMRFVPVKSTAQQDLQSLHRIRERLIVQRTSLINHARGLLAEYGIVLPQGPWRFASQAPSAVENAALSDLGHELFLELLDQLTDVNDRVARLDRKISEICREREDCRRLSDLPGVGPIIATALVASIEDGRHFKSGRELAAWIGLVPRQYTTGGKPRLGGIGRRANHYLRRQMIHGARAVISRLASHNDHRSKWLKELVARRGFNKAIVALANKTARVAWALLTRQERYAAQ

SEQ ID NO: 66834 - protein, 423 aa, unidentified
MSHDAKDVPFQQQFKLFAGFDWASDHHDVVAVDHDGQIVLELTIEDTAEGWAALRDKLAKRVGQDLSVVAVSVETCNGPAVERLLEMGCGVYPLNPKAAQRYRERKSPMGAKCDRLDAWSFGDALRTDGHGWRRLQPEDPLTQELRILCRDEVQLIQQRTALVCQLKQALHEYYPAALEAFDNWTVPSSWAFVEKFPTPQVLVKAGKRRWEKFLHTHRLARPERYAQRLEVFARADQFCGKQAVTNAKSRLAVALVAQLRVLEKQLQNYRKAIESLFGRHPDNDIFGSLPGAASKLAPRLLSEFGRNRDRFPKAESIQCYAGTAPVTKQSGKSRVVRLRRGCNKFLRAAVHLWADQSRHQCAWAQAYYQTKRGQGQSHACALRCLGQRWLNILWKMWQTGTRYDEAKHMRNQVQHGSWVIQLG

SEQ ID NO: 66835 - protein, 401 aa, unidentified
MEAIVKRSAGLDVHKKIIVVTILLEQPDGSLREETREYGTHYKACEELADWLSTQNIQLSVMESTGIYWKNIYAALEKKGLRVSVVNARHVKQVPGRKTDVKDSQWLARLARYGLVRGSFIPPKDLRELRLIARQRTKINRMLASEKNRLHKALDDAGIRLGNVVSDIGGVSATEIIDGLIEGEPIEKLLEYTRGQLKNKKDALRAELEGELSQRHVFLLQKLQAHITFLKKQLQEVDDYIFEAMSPYQEQWDILQTIPGIDAISAALIIIEIGVDMQQFGNREQFCSWAGMCPGNNESAGKRKNGKTPKGSKQLRYLLCESANAASKSDCQFKHKYKSLMIRRGHKKAIVAVGHKLLRVIYSRLKEKEIYHDPKVSYEELLVKKNAPRWIKMIRKYQDVI

SEQ ID NO: 66836 - protein, 460 aa, unidentified
MNRKKWKSKIDRTMPVVHPNAAAIDIGATMHMAAVRADRAPEPVRSFGTFTADLHRLVDWFAECGVETVVMESTSVYWIPIFELLDARGFTVFLVNARDAKHVPGRKTDVSDAQWLQRLHSFGLLRASFRPKGQIAELRAYVRQRERLLEYAASHIQHMQKALTEMNLQLHHVVADITGATGLRIIRAILAGERDPEVLACLRHYSCHSSAETIAKALTGSYRPEHLFALDQALALYDAYHEKASACDVRIEAVLKELRIHRGRDHGSAPPVSRRRNRTDQANALAFDVRAALFGLLGKDVTTIDGLGPYLSLKLIAECGDDLTSWPSAKHFTSWLGLAPSNKVSGGKMLSSRTRRSGGRAAALLRLAAVTVGRTDTALGAFYRRLSSRIGKAKAVTATARKIAVLFYNAVRHGMDYVDPGASSYETRYRTRVINNLHRRAKAFGFVLQPLEPKAGAAVS

SEQ ID NO: 66837 - protein, 435 aa, unidentified
MTNRLQVGIDFSQKKADFCLLFPDGRPLEPHASFSNSCSGYSSAKHLLLDALDTYAFDGVDISGEATGFLWLPFFLQLAADPDLSLRDMDLFLLNPRWVKWFKKCFAEDHKCDEKDAFYIAERTRSHRPNVAWSPPDCLPLRFYTRLRFHIVQNLAREKCYFSAFLFLKASSYRCLKPFSDIFGVTSRLVLTQQPTLDELAELPVEDLAAHLHELSGHHLPNPLHNARKLRRVAQESFPLQESLVLPVQRILALSLDHIRFLEAQVKQVDRWIAAELEAYPVISQLATIPGVGPVFSSGIGAEIGGVQRFLQGQKWDKKRKRYRRRNLRDAEDAVAKIAGLWWPRADSGDFAAQDRHLAKSGNHYLRYYLIQAADKMRKHCTEYAEFYARKYKESSKHHHKRALVMTARKSVGLVVGLLHRDEPYRSREERANQT

SEQ ID NO: 66838 - protein, 404 aa, unidentified
MTLNAVGIDVSKGKSMVTIMRPFGEVVASPFEITHTSLDFEELTELIKSLKGETKVVMECTGWYHYPVANALHKAGLFVSTVHAKLIHDYSNNTIRKVKTDKADSIKIANYGLSNWLELKQYLPEEDIRIMLKTFSRQYSKYQDLKTMLKNNFIALTDRTFPGVNELLTSTPRKKDGHEKWLDFALSFWHCECVCTLTPKTFANRYQKWCKKEGYRFSQDKSDEIYASACGHFSVMPKNEKSKLLVTQAIGQINAVSENIAIIAREMKLLAETLPEYPLVSQLYGVGEILGPQLIAEIGDVFRFRNKGSLVAFAGIDAPPYESGKFVASSRSISKKGSAHLRKTLFQVAQIYLQHSPVNEPVYQFIDRKRSEGKHFYNYMTAASAKFLRIYYARTKEYLINLSA

SEQ ID NO: 66839 - protein, 356 aa, unidentified
MNEITTVGVDLAKEVIVVCAGDAQGRTQYFKQLSFEGFARWAATLPACTFGMEACSTAHHWARFLASHGHSPRLMAPEFVVPFRKSQGAKNDRNDAQAILTAVRQPDMRFVSVKSIEQQAMLAWHRSRSGFIVDRTALLNRVRGLLAEFGVWVGRSSSVLLRQLPQLSEDPRLPELFRPMLSSTLEHLRRLEQCIADCDTRIHAHVRHSESAKRLRDVTGVGELTASALLATISDARDFKNGRQLAAWAGLVPRQNSSGGKQRLGQITKRGDSYLRGLLTQGARSTLQVALKREPLRRSRLEQWIVSLHGRVGYHKSLVAIANKHLRILWAILAHGESYDPNAWRRHTPQRSTVAA

SEQ ID NO: 66840 - protein, 376 aa, unidentified
MDSNTIFVGLDVHKATIAVAVAPSGRSSEVRFQGSFAHRPGGMTEFARHLLAKHPGSHLSFCYEAGACGYGLARELTEAGHECLVIAPSLIPTRPGDRIKTDKRDATTLAKMHRAGELVSVWMPDARHEAVRDLVRARETAMYWRNKARQALSSFLLRQGYRYGGRSAWTASYWRWLATIELEHPAQQVTMQEYILAIREGDERHDRLVRQIEAAVPDWSLAPLVRALQAMRGIALITAATIIAEIGDIGRFDTPRRLMAYLGLVPAEHSSGPKIRRRGITKAGNTRAHRLLVESAWTYCRAPRVSQEMQRRQEGLNLTILKIAWKAQLRLHDRYRRLSATGKPKNVVITAIARELVGFIWAIAQEVGPAKPAIAA

SEQ ID NO: 66841 - protein, 370 aa, unidentified
MGEITTFVGLDVHKATIAVAVARGGLRDAADFLGTIENTPAALGKLLVKLGRKHDQLSFCYEAGPCGYGVHRQLIQAGHTCSVVAPSLIPRRAGDRVKTDRRDAVSLAQLHRAGELSAIWVPDAAHEAMRDLVRARLVAVHTVRRGRQQLSGFLLRHGRAYDGKKAWTRSYRIWLAGLRFEHAAQQIVLQDYIAVVADSERRRDALGEQIRVLLPEWSMAPVVTALQALRGVALVVAATLVAEIGDLTRFDNPRQLMAHLGLAPSEHSSGATTRRGGITKTGNAAARRAMTEAAWTYRLPARIGRALLDRNDAVDKTVREIAWKAQVRLCARYRRLSAAGKPPQAVVTAIARELLGFAWAIARHVQTVHA

SEQ ID NO: 66842 - protein, 329 aa, unidentified
MPLLNAKTTKDMEPQVSFNQVVSRGCGIDVHQKVVVATISGDGLKKETREFGTFTRSLTELKDWLLEKGVTHVAMESTGIYWKPVYQVLEPTSLKVWVVNARHIKYVPGHKTDKQDSAWICKLLLAGLLKPSYIPAREQRELRDLTRFRTKMIQNVASQKNRIIRILEDCNIKLSSVVSNTHGVVATKLIHKLCEGHSITMVDIDEVYHKRLEVSKSDLYEACQGLMDEHHIYLLKLIRQDIASTEAVIENLNVWIKEMLSGYDNVLENLRAIPGLGHKTVEDLVAEIGLDMSVFPTEKHLSSWAGMCPGNNESAGKKKADAPTTATNR

SEQ ID NO: 66843 - protein, 309 aa, unidentified
MKEEKVYVGVDVAKATLEVAWAHGRWPGANSVAGRKALGKRLAQIPGSVQVICEASGGYERALIQALHGAGIKVSLVQASRVRQYARASGVWAKTDSIDAQLLARFGAVIQPEATIPPEPEQDQLRELESQRRHLSRLLVAEQNRSAQLTQSALVRLSKSLRHQIQKQIQQIDRLIEELIAQSPKLSTKAHKLTAVAGVGPRTAALLLAQMPELGELNRREAAALAGLAPFNRDSGLTKGKRAIFGGRRAVRTGLYMAALVASRHNPILAAFYRRLRQAGKPPKLALTATMRKLLIALNASLKPQPICA

SEQ ID NO: 66844 - protein, 426 aa, unidentified
MKYRIAGIDVHKRMLAVVIADIAVDGEFQFERRKVGTSPSELCQLADWLAAEQVEEVVMESTAQYWRPVWAALEQWWRPKRLQEGAGARSGQLHLAQAQSNRGAAGRKKDFPDAERLVKRLAAQELRLSFVPDVEQRLWRTIMRRKHQLTRNRVQFQNRLECLLEEAHIKLSSLVSDLLGKSARRMLQAVAEGAASPEAIAALADRRLQATAQQLSDALGACRDIHPVYRQLLKMALEELQLIEEQIDKLDQEMAQLLSAQQDVVQRLAEVPGLGADSAQQIIAEVGPAAAAFPSAKHLASWVGVCPGAEESAGVNYSHRSPKGNRQMKGLLNQAANAAVRTKGSIFEFVYRRLVPRLGHAQAIGAIAHRLCRLIWMILHQAIRYEERGPAVSRSKTERRAKLMIRELRRLGYRVEPMGAQPGVSA

SEQ ID NO: 66845 - protein, 369 aa, unidentified
MNRLFVGMDVHKEKIVAVGLPEEGNHPVMREEFGGNDLSRLVKRLRQIAKSHRVLACYEAGPCGYGLARVLLGAGMECRVAAPSLIPRRPGDRIKTDGRDARELALAFRANTLSFVRIPSREEEEVRGLIRCREDIAKEVRRIKHVIAHWLLIHEHRPPKGVKGWSQAHWRWMRGLELSSLDRTVLDHYLDVLHLLVERLNQIEQQVVALAETATYRERVTRLRAFKGFSPLAAMRVIAEVMEFGRFPRAAAFMKFTGLVPSEYSSSDRVRRGRITKAGNSHLRCVLVEAVQRGTRNAHLGRDMLKRLACVSGPLREVALRCLTRLQHKFWKLTRRGVAGGKVKVALARELAGFVWAMMTLPETAEAAA

SEQ ID NO: 66846 - protein, 343 aa, unidentified
MQIRSVGIDLGKTTFHLVALGDDGKVLLKKKFTQKQLIAFTVNLQTSLIGMEACSGAHFLGRALRAQGHDVKLIPAQFVKPFVKSNKNDFLDAEAIAEAVDRKNMRFVPIKTDDQLDLQALHRVRDRLIARRTSVINQLRAFLLERGMTFAKTPTKLKVAMPEILENADANLTPRMRNLISLLWSEWKDLEQQIVTVNAEVELIASSDAACLRLRQIPGIGPLIATAIVAAIGNGAAFHKGREFSSWLGLVPRQHSTGGKARLFGISKRGNSYLRKILIHGARSAVVRMKRDRAPFGAWLDALQTRAPLNGVVTATANKLARIAWAVLSTGKEYRALPSPPPA

SEQ ID NO: 66847 - protein, 349 aa, unidentified
MRYIGVDLHKTNFVVCFLSDDETSRTQTYPLTNAGLNRFIRQLEAEDEVAVEVTANIYYFYDQVKPHVRRVVLVDTYRFAVIAKSKKKTDKADAAALARFLKLDYLPSVPVPSERVRQLRHLLQARETLVGMRTKLKNMGHAALTRNGIALSRAAFASRLSRARLLKRDDLAPADALIMQTALRQLEELDREVEALGDEIVRVGKTLAGVRRLLQVHGMNLLSAISLLAEIGDINLFETSKQLTAYAGLATSTRQSNETTRHGRITKRGRKRLRTVAINAVLSMVSRTRTPLMEFYQKKKREKGSGKAICATARKLLTIIFVMLKKELDYWYLEDRLYNRKLRLLDAAA

SEQ ID NO: 66848 - protein, 430 aa, unidentified
MKSNTQNAKIEAITEKTLVLGIDVGSEMHYARAFDYRGIEYSKKPFKFSNTEAGFVTFKEWILDLKERHEKDKVIPGMEPTGHYWFNLGKFLQDNEMKPVLVNPHHVKKSKELDDNNPTKNDRKDPKVIAGLVREGRYMIPYLPDGVYADLRTASNIRFQLQAELTRIQNRISRWFNIYFPEYKTVYGKPDAKSGMLILKAAPLPEDILTLGIDGVNQIWRDAKLRAVGKARAKTLIEAAKHSVGSKEGAVSARMEIRMLLEDYESRNTRLQEVMVLIEELVKQIPMAEKLLEIKGVGIRTVSGFLAEVGDISRFNNPKELQKLAGLALVENSSGKHKGETTISRRGRKRLRYLLFEVAMSLVSKNQEFRELHNYYITRRLNPLKKMQSLMAIAAKLIRVFYAMLTKGVDYDPKKMVSDIKRPAVYLQAA

SEQ ID NO: 66849 - protein, 341 aa, unidentified
MMIIGCDFHPRFQQIAFVDQETGEYGERRLSHPGEAEQFYRSLAGRQVRLGMEATGNFRWFRRLLDELGQEFLLGDATEIHASSPRNQKTDKRDARHILRLLVEARFPAVWQPSEENEELRQLLLHRCRLVRMRTRIQNQLDSMAKNEGMLSSRVWSPKRRQEIEGLVLPGWYGERRKDLLSLLEELNKRIDPLDKAVRAAAEENAEARLLMTHPGVGPIVSLAYVLAMGNWQRFPRSRELASYLGLIPVEESSGQSRRLGHISKQGNSMVRWLLVEAAVHAQRKDPSWHRQYLRLSLTKHHGVAKVAIARKLAVRLYWMLRSGNDYQQVMERGSHAGQSV

SEQ ID NO: 66850 - protein, 385 aa, unidentified
MTTTTCPPESTAPSATPIALLLAFELGERSWKLGFTTGLGQRPRVRQVPAGAVERVAEEIARATQRFKLPVDAPVVSCYEAGRDGFWLHRYLVAHGISNHVVDSSSIEVNRRARHAKTDTLDLAGLLNLLARYQLGDRRVWRVVRVPSVGEEDARQLNRTWESVQQDRTRLICRLQGLLVTHGLRLAIDEDFLQRLEGATLWDGTPVPAGLKRRLERAWEQLELANRQREALEAERDALVADAATTTGQYAAQLPTLRGIGPIGAWVLATEIFGWREIHNRRQLGALVGLVPAPYQSGETHHDQGITRAGNKHVRRVMVQLAWSWVHYQPESALSRWYQRRFGGGSKRLRRIGIVALARKLLIALWRYVAHGAIPEGAILKAQAA

SEQ ID NO: 66851 - protein, 315 aa, unidentified
MTNTKTRKTVVNVGVDVGKISLDIVIHEKALHWQAPNSPEGIRAVLKRLSYYQVERLVMEATGRYEFELAHAAYGKGLPVVIAKPLSVRRYAGAVEQLAKTDRIDAAIIAEYAAVVKPRATPKKSKNLIAIKNLLARRRQLVNLRTQEMNRRQIMGKAFEVSCRRMIRVFDQEIVRMEKQLAKRVASQAAWSEKQALLNSVPGVGNTLVYTLLADLPELGTVTNREISALVGVAPINRDSGKQRGKRRVQGGRASVRTVLYMATLSAIQCNAVIKAFYRKLVAQGKHKKVALTACMRKFITILNTMVKNETAWAF

SEQ ID NO: 66852 - protein, 309 aa, unidentified
MKEELVYLGVDIAKSHLDAAIGAQKHRFCNDTIGHRQLVRWIEQTEAAVQVICESSGGYERRLVQALARARIKVSLVQANRVRQFARAAGILAKTDRIDAEVLCEFGKVMQPQTVTAATLEQEHLRELESQRRHLTHLLVMEQNRGARVSDASVVRLNRSLINQIKKQIEKLDLLIKEHIEQSPRLSAKAEKLTSIKGVGERTAALLLAQMPELGQLNRREVAALVGVAPFNRDSGKMRGKRAIYGGRRSVRHGLYMAALVAARHNPILRGFYLRLRAAGKPAKVALTATMRKLLIVLNSALKRDLRYA

SEQ ID NO: 66853 - protein, 412 aa, unidentified
MEVVYPCCCGLDVHKKSITACVLWAEAKGKSRKEKKRFGTFTHDLLQLADWLEQCGVTHAAMESTGVYWKPVWNILAEQFEVLLVNAQHIKAVPGRKTDQKDSEWIADLLQHGLLRGSFVPPQPTRELRDLTRYRVSLVQEINRIANRIQKVLEDANIKLASVATDALGASGRAILEAMLAGEQDAVRLAEMSKGLLRNKIPELKLALEGRMTEHHRFLLRQLFEHLRFTESKLREIEQEIDKRMRPFEDKVTRLCTIPGVDRVTAWGLLAEMGMNMNQFPSSGHLASWACLCPGSFESAGKRLSGKMRKGNVSLRRCLSQAAWAISMMKNNYLSALYRRIAARRGAKRAIMAVAHALLVIAYHMLKRKEDYRELGADHFDRIDVNRIRRSLVRRLERLGHKVTLEPLAQTA

SEQ ID NO: 66854 - protein, 311 aa, unidentified
MEQSLFVGIDVAKDRLDVHLRPTGETFSIGHDEAGLVALTERLVPCAPAIVVLEATGGYEVTVAAALASARLPIAVVNPRQIRDFARATGQLAKTDALDARVIALFAEAVRPVARPLPDAQAQVLGEFVARRRQLVEMLGAETNRRRLVRDPQLQRRIAAHLRWLERALRELETDLHDTIRSSPVWREAEDLLRSVPGIGPVTAFTLIADLPELGRLTRRKIAALVGVAPFNRDSGTLRGRRMVTGGRAPVRRVLYMATITAIRRNPPIAAFYQRLRAAGRPAKVALTAAMRKLLTILNAILRDHRSWQRA

SEQ ID NO: 66855 - protein, 482 aa, unidentified
MAKRKVSTFERLRSGKMNRKERKEWQQRLYAEDAGWEVIHPDAAGIDVGNASHFVAVPPDRDEQPVREFGSWTADLRRMAEWLKRCGIRTVAMQSTSVYWVAVQEILEREGFEVYLVNARGTKNLPGRKSDVQECQWLMKLHTYGLLRNSFHPPEQIRAVRTIWRQRDRLVKEAGREVQQMQKALTTMNVQLANAISDVSGVTGQAIIRAILQGERDPQQLAKLRDWRVAATEEEIAHSLEGNWREDVLFELQQVVDAYDFHQKQIAACDVQLQKYLSALPMRNGPGAGERNTADAPSERPKKQRRHKLQKNQPVFDLAAELQRTMGVDLTAIDGVDVMTTQVILSELGPDLSASFPSEGHFTSWLELAPRRDVSGGKVIRQKSRKSNNRVATALRMAAQSLWRSDSYLGARYRHLKARLGGQKAVKAMARYLACLIYRLLTKGQAYVDRGVAHFESKRTERELLALRRKAAELGMQLVAVS

SEQ ID NO: 66856 - protein, 393 aa, unidentified
MNEPTHHKHTMKKELLFLGLDVHAQNITLALAGSGAGEARHYGTIPNDLHALEKVFAKLRKAHPGVELRVCYEAGPTGFVLARRLGQLKIDCTVVAPSLIPVRAGERIKTDRRDALKLARLHRAGELTAVHVPEASDEAMRDLCRARTDAVQDLRRSRAQLKAFLLRNGYRYTGKSAWTEAHLRYLRELVLPHPAQRVVLEDAISASASAGERIARLEEQMSALLESWPMKPVVQALMGMRGFALVGAMVLASELGGAWRFAHPRQLMAYLGLVPSENTSSEKRRQGGITKTGNGHARWLLIEAAQHYRLSPKVSRELSLRQQGLSDDLKACAWKAQTRLHKRMMQLLARGKQRNKVTVAIARELTGFVWQIFRLMEPRMTPSAVAAAATAKP

SEQ ID NO: 66857 - protein, 354 aa, unidentified
MSGEKYIGLDVHQATISVAVMDSQGKLIMESILETKASTILEFLAGLRGTLSLTFEEGTWAGWLYDLLKPHVAKLVVCNPRKNALLKQGNKSDKIDARQLADRLRLNDLKSVYHGETGVRMLRELARSYLTVVKDLSRVMNRLKALYRSWAIPCAGRDVYYTRHRSQWLEKIPEAGTRRRAEQLYQQLDMLQHLRQQARRELLAESRKHTITTKLKQIPSLGPIRSALAVALIQTPHRFRSKRQLWTYSGLGLETRDSGEYHFVKGQVQRKKPVWIRGLNKDYNHDLKGLFKAAAMRASIQPGPFQEFYQRSLAKGIKPTMVRLTLARKIAAITLTVWKKGENFDVEKLKSQAA

SEQ ID NO: 66858 - protein, 384 aa, unidentified
MQTVTDRSEAPTAIRTDLGAIFVSLELSRSTWLITSLSPAGGEKMSKHVVRGGDVAGLLERFAQLREKTRARTGKVFPFVVIQEAGLDGFWIDRVLQNEAIESHVVDPASIATSRRRRRAKTDRIDGEALVRALLAYKRGEPRVCAMVKAPTPKEEDRLCRERKVLIAERVRHVNRVKGLLFSQGISGYEPLRRDRRERLDTLQTGDGRLLPDHLKAQVRRELDRLELLLDQIKAVEAERDVLLAAQQAPAPAAMLLDIKGIGPEFAAILWSEGLFRHFDNRRQVASYAGLAPTPWQSGSVDREQGVSKAGNPRLRTTLIQLAWLWLRHQPQSALALWFEERVRRNGGRLKKKTIVALARKLLIALWKYVTAGVLIEGAVMKAA

SEQ ID NO: 66859 - protein, 348 aa, unidentified
MVLLGIDPHKDTHTVVAVDPTGRQLDQTTVAARSHGHAELLGWARQRWPEARLWAVEDCRHVTGRLEGDLLAAGERVVRVPPRLMAGARQAVRTQGKSDPIDALAVARAALREPDLPAAGHDQASWEVKLLVDHREHLIAERTRTINRLRWHLHQLDPDLEHAARRLPGSDLDRIVAWLDGAPASVQVGICTELAATIQTLTTRIDQLTGDLRTRVDRLAPNLLDLPGCGVLTAAKLIAETAGVARFRSEACFAMHAGVAPVPVSSGRTDRHRLCRGGNRQLNSAVHRIAITQLRIAGPGQTYYRRRRAQGDGTGEAVRALKRRITRAVYQQLKLAEQRQRSPSPVAA

SEQ ID NO: 66860 - protein, 338 aa, unidentified
MTNDITTIGVDIAKHTFHLVFANQQGKPIQRKQLNRSKFKELIQTLEITTFALEACGTSHYWARTIQQAGHKVKLINPAFVKPFVMSNKNDFNDATAIVVAATQPTMRYVSPKSTEQQDVLMLHRIRERLVHQKTALINQIRGLLAEFGIVIKGGAKNLINELPFTLEDAENGLSPLGREQFYLLYQDLKQMDQRLNEQSLKIETLAKQNPVASKLQKLPGVGFLTASAITASVGDPLEFKNGRQFSAWLGLVPRQNSTGGKNILLGISKRGDSYLRRLLVQGALTAIARTKGNDSQVTWAKKLRQAKCTQVAAVALANKTARIMWSLMAHDKEYQVM

SEQ ID NO: 66861 - protein, 429 aa, unidentified
MVAPRPAELNRKQRKALARQLRVDDPGLDVMHPHAAGIDIGNSAHYVAVRPDRDPDSVRRFECFTADLHRLADWLQQCGVTTVAMQSTGVYWIPLYEILDARGLEVYLVNARHTKNLPGRKSDVQESQWLLKLHTYGLLRNSFHPSAEIRIVRTYWRQRGDHVHAVSTCIQRMQKALTQMNIQLANVISDLSGWTGQRIVRAMLAGERDPDTLAELSHPGIHATRDTIAKSLEGTWQPDLLFVLQQEVAMYDAYQQRIVECDQALEQHLKSVADKVADAAPDGQHSPTTPGEPRRAGPKRRRKAGSHTPQFDLGGELSRISGVDLTRIDGIDVGVAQTVISEVGVDMTRWKTEAHFASWLGLCPDNRITGGKVIRKGTRHVVNRAATALRLAATTLLRSQSYLGAQYRRLRGRLGTPKRSPPWPTSWPV

SEQ ID NO: 66862 - protein, 429 aa, unidentified
MAYKIAGIDVHKRLLTVVVSDVEVAGEGGYQFERRQCGSTPAHLRQLAVWLVEQQVEEVVMESTAQYWKPVWATLEQEWKPICQKRDGARPLSGTLHLAQAQSNRGPRGRKNDFADPERLVKRLVAGELILSFVPDAEQRLWRTVMRTKYQLRCNQVQLQNRLEALLEEAHLKLSSLVSDLLGLSGRRMLTAIAEGETDPAVVAARADCRLRATPTELRDALGACRDLHPVYRRLLKATLEEWQRTEARITELGQEMATLLAEHQEQVQRLAEVPGLGVDSGQQILAEVGASAAPFPSAKALSSWVGVCPGEEKSAGVNHNRRSPKGNRHLRRILNQAANAAVKLKGSIFAVLYRRYVVRFGHNLSIAVIAHRLCRLIWKILHQGVRYEERGPAVRQKSMQRRTARIIRQLRDLGYRVELTKPPAFIPA

SEQ ID NO: 66863 - protein, 423 aa, unidentified
MENTAARKRKQVPEGYLIIGIDPHKKRHAAVAITQDFTIRDKFKFDNTREGLETMLRRTRTEIVKADCRGVMFAIETGGHYWRNIAYFLDEQGTPFRFINQYTLKRRREGKDLNHKKNDYRDSEVAAQLLCTGEFTESTIPQGVYAELRTAHNAYRRLVKERTRITNLVKGLLDGLFPEFTRVFKDPCGLTALSVLSACAIPGVIAGMMEDEFVAAIEAKHQGRLMRKKLRELHYKAKASIGITAGARSVSSEISFLVEKHELIRRHIRIIEGTLVNLVDETEEGKYLLSIRGLNYIAVAGLLAELGCFKSYRSAKQMIKMAGSNPTESESAGKRGAHTPMSKQGRPVLRYCAWTSVIPMLRFNSDFRAWAKQRRERPAHANPLNGREVVGAALNRLLRLSFAMVKNRTYYQVSKPELTLIAV

SEQ ID NO: 66864 - protein, 338 aa, unidentified
MALYCGIDLHSRDCWLAILDKDLKVIREAKVGNDLNALLEVLEPYRDEMEGVAVESTYNWYWLVDGLADAGYRMHLTNTWAVKQWEGLKYSDDRHDARWLAHLLALKILPEGYIYPKHERPVRDLLRRRSFLVKKRTSFLLAMRGAFECRTGLPTTSSEVKQWTAEEVESYLDDPAEALGITCLLEPMNALNDQIRIIEKEVIGRARLRDEFAPLLSVWGIGKVLSLTVMYEVGEIARFKKVGNFASYCRLVNSARLSAGKKKGSGNVRNGNPYLSWAFSEAAHFAVRYHPEAKKYFQRKRAKTNGIIAIRALAHKLARASYYVMKDQVGFDPVKVFG

SEQ ID NO: 66865 - protein, 391 aa, unidentified
MDEAWAGVDAGKEFHWAHVLDVSGRQLLSRKVENDEADILRLIVEALSLAEEVHWAVDQPGGGAALLLALLWERGQKVLYVPGLSVDRARDTYRGESKTDARDARVIADQARMRPDLGELRPGKQELSELQLLLARRRDLITDRSRTITRLREALLSLFPALERALDLNSKGPLILLTHYRSPAQLRRAGHKRVAAYLRNRGVKGSSSVAHRALSAAGSQSVTLPAQEVASHIVAELAGEILALKERIESIDEELQKRFFARPEARILTSLPGMGAILGAEFLVCVGDISAFESADRLAAYAGLVPAARDSGKRVGNHRRMRGGNKTLKRVFYQSAFASLRGSAQSRAFYDRKRAEGKRHTQALIALGRRRVNVLWAMLRDGTTFEARSAA

SEQ ID NO: 66866 - protein, 356 aa, unidentified
MSHDVKYIGMDVHKEAVVIAVLNSSGQQVMESIVETKASSILQFIHGLRGELHVTWEEGTWAAWLYDLLQPQVKRVLICDPRRNALLKEGNKSDKIDARKLADLLRTGMVRPVYHGEHGLRTLRELGRSYQTISQDLNRVMNRIKALYRGWSIPCAGTQVYAPRYREEWLQKIEHVGVRRRAELLYQQLDGLQALRRTLRPELLAESRKHKASKLLRQIPCIGPIRAARLIALMQTPHRFRSKRQLWTYSGLGIETRDSAQYCYVHGQLQRTKKPQQIRGLNRNHNHEMKEIFKGAATRASCGVGPLRDFYVALVAKGMKPEMARLTLARKIAAIALTLWKKEERFDTEQLKPQAA

SEQ ID NO: 66867 - protein, 316 aa, unidentified
MSQFSVFVGIDVSKDHLDVHVLPEGGSWRIANDEAGCAELSKRLKGLPGSVLVVMEATNVFWRLAATELASVGLSAAVVNPRQVRDFAKATGQLAKTDAIDAHVLALFAQRIEPPVRVLPSAQCQVAAELLARRAQLMGMRVAEKNRLTSARAAKVRKDITATIAFLEKRIGALDEEIDQWLKSTPIDQSRANLLKSFTGIGEHTARSLLITLPELGSLTAKQIGALAGLAPFARDSGNKRGQRQIRGGRSTVRAALYMPALTAIRCNAVIRALYQRLIDAGKHHYVAITACMRKMLVILNAMLKSNQPWKNPQEV

SEQ ID NO: 66868 - protein, 482 aa, unidentified
MKAKPQEKNKRATNHPTQHHWHEMNRKQRRETMRKIQSEDLSLEVIHPDAAGIDIGNESHYAAVPPSRDSQPVRCFGCTTAELKAMAAWLQQCRIRTVAMQSTGVYWVGVYDILEQAGLEVYLVNARDTKNLPGHKSDVQESQWLMKLHTYGLLRNSFRPSQKIRTMRTYWRQRNDLVQSASRHILRVQKALTQMNVQLANVLSDISGVTGQAIIKAILAGERNPHKLAEFRDPRVQASEEEIAHYLEGNWQPDLLFVLKQEQDGYEFCQQQMAECDRQLEQYLQSTEDRSHGAPLPEEKRKGRLKKKKGNKPQFDLREGLFRMSGTDLTRIDGIDVMTATTVISEAGYDMSKWQTENHFVSWLRLCPDNRISGNKVIGKGRLPTHNPISIALKIAATTLRQSQTYLGAQFRRLRTKLGAPVAIKAMAAKLARLVYRMLRYGMKYVDQGAAVYELKHRELQVQQLKSKAAKLGYKVTLLPAA

SEQ ID NO: 66869 - protein, 358 aa, unidentified
MESQDSKYVGIDCGKKSLEVVRIHSENSLKERRQFSTTEIGINNLLKWLTQNDIVGLEAGTQSFRIAKSILNKGIQVIVLNPGDLATIYQSLKKTDKEDSLKIARLIQRYPIEELPTVPVPTDEEEDNRRLCTEQENWTRQLTQGKNRLHSLFTQAGLTEITKKHLRTKSSRETSVTLLPSRYQKEAERILQVLDLVEQNLKLIEEETKDALKKNPAYVQTIMSMPGIGMVTSLAIMSYMGDCKRFSSGKQAAYYAGLVPRVDISGDTVRYGKIVSRGCHSIRRVIVQAAWSLVRCQHGGKLKEFYERLYSKKGAKKSIIAVSRKMIEVLYSMIRTGALFDSMPEEVLHRKLAQHGLM

SEQ ID NO: 66870 - protein, 409 aa, unidentified
MDVIYPRCCGLDVHKREVVACVVITDPEGRPRKAIQAFGTMTPDILALADWLAAQEVTHVAMESTGVYWKPIWNLLEEQFVLLLVNARHVKAVPGRKTDVRDCEWLADLLRHGLLTGSFVPHRPQRELRELTRYRTSLVRERTAAANRLQKTLEGANIKLASVASDILGKSGREILAALVAGETDGVELAQLAQGRLREKLPQLGRALVGRVGAHQRFLVAEQLAHIDFLEAAIARVSAEIGERLQPDEDAIVRLDTIPGIGRAVAEALVAEIGTDLTRFPSPKHLASWAGLCPGNHESAGKRRGGATRKGSPWLRACLVQAAHAAARTKGTYLAAQYRRLAARRGRAKAAVAVAHSILIIAYHVLTEGTVYGDLGGNSFDERDRQAVEHRLVHRLQGLGYTVSLTPAA

SEQ ID NO: 66871 - protein, 431 aa, unidentified
MKNKTDLRLEDITAGTLIVGIDIAKHEQWARFVDYRGVEIGRAFKFKNNLEGFESIIAKICEICKLKTLKYAIEEVIIGMEPTGHYWKPLANYLIGAGYRVVGVNPYHTKKAKELDDNSPTKSDKKDAITIARLVKEGRFFDPYLPEGIYSELRVLANARTNALKRLSALKNTIKAILDEYFPEIYEVFKKTLTGKTSRQVLKSCPFPTSILELGEDAILAEIRKSVKKTVGMKKVRQLINAAGESIGVRYGLEAARMRLTMLLEELELIERHLCEIEQAMETALYKTGYAELLLGIKGVGVVTAASFLGEVGDPLRFQNARQIANYAGYNLTEDSSGQSKSGTCISKRGRKQLRSILYLMAFTLIGNNAEMKELYQYLTKRKNNPLKRKQALVVISKKIITVIYTLLKKQEPYKPELVFGAVRKELMKAA

SEQ ID NO: 66872 - protein, 439 aa, unidentified
MSRRAYRATGVNEVNWEQIAHGKDGLDVTLGVDVGKFDMLVVCRWADERFERPWRVKNPQEIPTLAALAKQVQADRNLVVAMESSGTYGDTLRQALTDNGIEIQRVGGKAAHDYAEVFDGVPSQHDGKDAAVVAELAALGKGRPWPYEAADSWEEELTYWVEDMVIQRQLVTFWQGRLEGLVARHWPEAFQVLKLSSGTLLRMLKRYGSPQALAADPQAPRQLARWGGALLSAKKIDQLLAGARSSVGVRLGPWQQRQIQECAEKALAARRQSNQAQRRLRQLAVGHQVLQAQGKVVGIPTACVLWVCTGDPRKFDSAAAYRKAMGLNLVERSSGTYQGQLRISKRGHARTRQWLYFAAMRLVQKRGVRPWYEAKKARDAGDARRLLVAVMRKLAVALYHVGVRNEEFQPRRLFGRIGKHRGRGAQRAIAVAEPSKIQG

SEQ ID NO: 66873 - protein, 410 aa, unidentified
MELKPMYQRVVGLDVHQAKISACALAQQPDGTVTVEQREFGAFKRDRKALAQWAREFGPEVVVMESTGIYWKSPYAALEAVGIAAWVVNARHVKNVPGRKTDVADAQWLATLARAGLLRGSFIPEAHVRHLRLIARQRQKLGGMLASEKNRLHKVLSDSGIRLGVLVSDMHGQAARDMTKALIAGKPLPDVLDLAGRLRASRADLFEALQPEELSQAHLFVLGETMAHIEELEARMGRFEQELLKGLSAWQTELVLLQTIPGIDIMGAAMLLVEISAEMQNFGSAERLASWVGICPGNNESAGKRKTGKTRKGNAWVRRLLCEFAQAASRSRCALKDKFAALSIRKGHKKSIVALAHKMLRIVFAVLKNKTPYLDKAVDYEALSVQRNAPRWMKMLIKHGYMPTAAPAAA

SEQ ID NO: 66874 - protein, 324 aa, unidentified
MRKHNTVCAGIDTSKHKLDVALNERPPELQVDNISDGHGALSAWLRRHGVKRVGIEASGGYEKAVVARLRRDGFVVVVFQPAQVRAYAQFVLQRAKNDKIDARLIAACTAAIKKIHAPPDPRLAPWAEHLTLIEQIEDDLARLKTRLESCREPRCAAFWRAEIARLNKLLKSELKTLVSAIRQHQDLAVRLDLIESVDGIGLRTAVAVLVRMPEIGRVTRQEAAALAGFAPYDDDSGDYIGARHIAGGRKRLRRGLYAAALPAAHRWNPQLIALYRRLRRKGKAHKVALVACARKLLIYVNTVVERGTPWIDKPPAPTSLLNAA

SEQ ID NO: 66875 - protein, 425 aa, unidentified
MLGIGIDWSEEFHLVALGRPGEGVIEVSRVEHSPTAVDALVAKIAGLEPDPAEVRVVIETRHGLLVERLVDAGYVVVPVNPDLVARRRGPAKKKDDAEDARIACLIALDRHERLRPLIPHGEIAGELRAIARDDERAARDERRLLNRLRQDLISTFPAALAIGGEDLGAPTFLRMLERWPTADTLAAAPRTELVAFARSCRHGWPERLADRVQASLAAEHFRPKDYLVRAKADTIRLAATQLLAIGAQRRTWERRMGELLLGAPRQGRDKRPRGDGLGKGFPGGEIYLSFPGLGDRLAARIAGEIGDHPEQFDTPNSLQCYAGKAPVTRRSGKSELVVACRLAHNRYLGGAVQQWAFCSLRRSGWAREFYDSQRARGKGHQAALRALGNRWLEILWHCLHRGVPYDEAVHVANRNRALGRTTQAA

SEQ ID NO: 66876 - protein, 386 aa, unidentified
MHDSTDLPVPERTGIRGDSATLFVSLELSRSTWVATSLAPGSKKMSKHTLVGGDGRKLLDLLARLKTRAEQRIAAPVKVVAIHEVGLDGFWIHRLLEANGVESHVVDPASIAVPRRHRRAKTDAIDGETLLRTLMAWQRGEPRVCAMTVPPSPSEEDCRRVSRERATLLRERIQHTNRIRGLLFGQGITNYNPLHKNRRECLEELRTGDGRSLPTHVKAEILREIDRLELVLRQISEVEAERDEMLRPAEASSPAALLMRLKGIGAEFATVLYLEGLFRHFENRRQLAAYAGLAPSPWKSGSIDHEQGISKAGNPRLRTTMVELAWMWVRYQPDSALSCWFRQRVGSERGRIRRISIVALARKLLIALSRYINHGEIPAGAVVKPD

SEQ ID NO: 66877 - protein, 353 aa, unidentified
MMVFVAVDVGKRRCVTCVMDQDGSILDTGSYPNTAFDASHYARQTVEKYGECKAVVESTGNMCMKTYEAFESNGVEVKLANPVKTRAIAEARVKTDKLDSKILAHLLRADLIAECYVPSKDVRLARALLSHRVNITREQTRIKNRIHSLLDKYDLECEYDDIFGAHGMRWLHTLQLNGHDHEILQSLLRQLEFLQDEEEKANSTIAKDALHSQYVPIIMSMTGFDYYGASVLAAYIADVSRFPSPSHMVSWVGLCPSVYQTGESLYMGRMKGGSRKVKWIMIQAANTAIRSDHRLKAYYERKLRRHHHNVAVTHVANKMLRIIWHMLRENRLYNERKERLYESKLKRMTHTAQ

SEQ ID NO: 66878 - protein, 351 aa, unidentified
MIIIGVDYHPSFQTIAFLMEETGEYGEQELNHSDGEAERFYRELKGRGVSVRVGMEATGHARWFERLLAELGFELWIGDPAEIKTKRVRKQKTDREDARLMLKLLRENRFPKIWVPSPENRDLRQLLWHRHRLVQMRTRIMNQLQAVAMNEGYRWKKKLFSEKGRALLEKLSLAPWASRRRKELLELLDQLDPKIAELTAAVEQEAKKRPEVLLLRSHPGVGPITGLAYVLIIGTPDRFPCGKKVGSYTGLIPCEDSSAGRQRLGHISKQGNTLLRFLLVEAAQAAARCNPDWRRRYAHLMMRREKRIAKVAMARKLAVRLYWMWRNNWQYSQLVEFGSNAGKLGTVHGVK

SEQ ID NO: 66879 - protein, 331 aa, unidentified
MEIKEIIGIDVSKLTLDCCHHSSGSHKEFDNNLDTIASMVKWSLQVSGVSKKKLLFVFEHTGLYSDQLVQFLGGGDYLFNVVPGLEIKRSLGIARGKDDKADAKRIALYGYRVKDELKPFQIPSKTLEVLKRLMSVRKKLVTQRAGYIATLKEQARILNKQHNKVLFKVQGKMILTLDKQITIVEQEMNQLIEEDPELLDLYWLITSVKGIGGVTARFLIVYTNGFKSFESWRKFASYCGIAPFPFRSGTSIRGRTKVSHLANKEGKSLLSMCAVSAIQSNPEMKAYYNRRIDQGKNKMSTINIIRNKLLARAFAVVQRRTPYVNTMKFAC

SEQ ID NO: 66880 - protein, 457 aa, unidentified
MKERLYARKVLSLDCIERNAAGIDVGSTEVYVAVPADRDPQPVRCFATFTADLRAMVAWLVHCGITTVAMESTGVYWVGPYELLEEAGIRVCLVNSRHVKHVPGRKSDVQDCQWLQYLHSVGLLNASFRPKSEICALRALSRHRSGLIESAAVHVQHMHKALTQMNLQIHHVLSDITGQSGMAIMEAIVSGQRSAVQLAALCHQRVRSAPETIIQSLVGNYRSEHLFTLKQSLTVYKQYQQLMTECDLEIKRMTELLNGKIDPPPQTLLPPPGSSKAKRSKAKRSKNQFHFNMESELNRIFGVDLTAIPGISTLTAHTLLAEIGPDLSRFPNVGAFASWLALCPANNKSGGKVLSSKTRQTNSRASTALRIAAQTLARSKSHLGNYYRRMRARLGGPQAVTAAAHKLARIIYHLLTTGQAYDETVFLKEDKKQAQRHEKRLRKQANALGFQLVPVAA

SEQ ID NO: 66881 - protein, 392 aa, unidentified
MVYVGIDVASEKHDCCILCADGSVLNEFTFSNDRNGFNQFIATVSGHCNKLGFENVKVGLESTGHFSTNITNFLLAKHLSVKIFNPLQVNMLHKAQSLRKTKTDKSDARFLAQLLFSDDSKPYSQPLYYISELKTLTRNRHRLVEMRSKLKISIHRLVTVLFPELPGAVWSVNQKSTYALLSEFPTAAGIAEAHLRRLTNILYESSKGKYGRDKALEIKELAKQSIGFDSRAMGFELKQAIRLVQNLQDEIKELEAEIKSVMLGIDSPILTIPGVGFILGAIILAEIGNIENFDNPSKLLKFAGLEPSVYESGKYKATNTPMVKRGSKYLRWALLQAARLVAYRDATFGAYMAKKRSEGKHFFVAKSHVAKKLVRVIFHLLHSGEPFALQMT

SEQ ID NO: 66882 - protein, 326 aa, unidentified
MLQIVGIDVSKSKLDCVWLKDPSTLKGKSKVVENSKPGIEGLANWLTSTIGLTSDGILVIMEATGIYHESLAYTLFNQGFKVAVINPAQIKAYSKSLGNTHKTDRQDSWVIARYGATQSPGLWTPEPPEIRELKALVARLEALDKDCQREHNRLEKAQTSGTTPIVLQSIRTMIEQLSQEKKRLERQIDDHIDRHPHLKKDRQLLTSIPGIGPTLSRLMLSVIHSRPFKNAEQLAAFLGVIPKLVESGVFKGRSALSKKGPPSVRAKLYMAAIVASRHNPDVIKQKSRLLAKGKTKMQALGAAMRKLVHICFGVIKNQTEYSPQAS

SEQ ID NO: 66883 - protein, 407 aa, unidentified
MRPIYGRCCGLDVHKKTVVACRLTPEGSQTRAFGTMTTDLIQLREWLLAGGVTQVAMESTGVYWKPVFNLLENHGMELLVVNARHVKAVPGRKTDVKDAEWLAELLQHGLLKASFIPDRESRERRELVRYRRSLVEQRAHLVQRIQKLLEGANIKLGDVASDVMGVSGRAMLQALAQGVDDPAAVAGMAKTALRNKIPELERALTGSVGHHQRFLLRSQFRLLESIEAEIASLDEEVAERMRPFQVALERLDEIPGIGRRAAEQILVETGTDMSRFPTSAHFASWARVCPGNNESAGKRQYASIGAGNRWLRNALLEAAWTVSHSRKQTFFTARYRRIASRRGNKSAAIATAHSLLIAVYHVLRDGVVFQDLGPAHFERRKVDAIVRRSLHRLEVLGYKVTLEAMPA

SEQ ID NO: 66884 - protein, 482 aa, unidentified
MAKHPSQPVEENQQRRFRRRRARAKGRLEDRQAAEVRRVEGLGVVNAHAAGIDIGSFSHWVCVGAGAAQEFPAHTDGLHAIVVHLREQQVTTVAMESTGIYWIPLYELLEAEGFEVLLVDPGYTRQVKGRPKTDRLDCQWIYRLHSVGLLAAAFRPDEKTCQLRSYLRQRANLIRYGGQHIQHMQKALEQMNLKLTEIISDITGLTGENIIRAILHGVRDPRQLAKFRNCHCKASEAEIAQALTGTYRDEHLYALKQAYDAWRFYAKQRDDIDEQIRQQLARMKQDRDLPPLKPRKLVHGRKPNQPRFDVRTALYYVVGIDLTEIEGIEETTALTIISEIGVTMSKFPTVKHFCSWLGLCPQIKKTGGVIKSSRTRPGANRAAAAFRLAAFGLHASKGALGAFLRRKKAHLGAPKALVAAAHKLARLVYYALKNGLTYVRQTQEAYEAKMRARQFQALQKKARQLGFALVDAASGERAEFAT

SEQ ID NO: 66885 - protein, 438 aa, unidentified
MKVMYERVAGIDVHKDMIKVAVRSPGDKPWTRKTEILTFRTFYGVLRAMARELRRRGVTHVVMEASGVYTEPVYYALCEEDFTEVAVVNPAHAKALKGHKTDAKDCARLAELFECGLLQGSYIPAAGLKEMRDLSRYRMKTVQARTSEIQRLGKALESAGIKLGSVASEITGKSATAMIEALISGERRGAVMADLAKGHMRTAGKLADLSMALEGRFTDHHALMCRLHLDRITALDAAVADLEARIAATAADWQREIDLLKTIPGFGDIVAWAWIAEIGPAPHQWFASHRKLASWVSLAPGNNVSAGKRKYGRTGDAGTYIKPMLIQAAWTAIRTKGRLQARYNRLVRRMGGPKNPAAKKKAIVAIAHTLLKIACTVLKTGTGYQEPGADFYTRRESPGHRQAWLERQIQKLHPGRTVTITISPPPDPAPEAALPPGT

SEQ ID NO: 66886 - protein, 341 aa, unidentified
MDKITTIAIDLAKHVFQVAAENARGAEVWQKRLRSRAALHAFIEGLSPPLKVGLEAGLGAQAWARVLAARGLEVHVLPAQRVAEHRSGAKNDCNDARAILRALHDRSIHPVPVKSTVQLTMQALLRVRAGWQRRHTAVANQMRGLLLEHGVAIAQGDAALTRALERVLPDAQVPIPDRLRALLAELAGEWEGLSQRVQAMDPELAELARADPVARRLCTIPGIGPVTATALVCKGLDPVRFRNARQFAAYLGLIPDQHSSGTKLRLGRMSRRGDRYLRGLLVSGAHAVLRHTRRDALDAGHRRILHWQQRHGSKAIAVRLANHNLRVVYALLRDHADYHAA

SEQ ID NO: 66887 - protein, 330 aa, unidentified
MHATTVAVDLAKSVFQIAVADEQWRIIETQHLTRSQFERWFVNRSIGLVVMEACGSAHHWARWLNSLGIEVRLLPAQYVRAYVRRNKTDATDAAALLEAARACDIRPVRVKSVEQQALQGLHRIRSLWMGTRTSRINALRGFCREFGIVIPVGARTGIEAIGRVLADPQSAVPELIRHTASQLLEEIRLLEARIAQVERQLSQAAQQSPACTLLLSVPGIGLLTATAMVAATSGDVTHFQDARHFSSWFGLTPREYSSGSSRYLGRISKKGDRYLRMLLTHGARSVLRAAKVAQGAGKEIQGVRQWALEVQGRNNHNKATCALANKLARI

SEQ ID NO: 66888 - protein, 371 aa, unidentified
MTDGSKGTLKMTAGLDLGDRYSYLCLLDNESGEVIEEGRLRTTPEAFKRRFDSERPLRIAIEVGTHSPWVSRVLKECGHEVLVANPRRLPLVYGERRKTDKLDAEKLARLARVDPKLLAPLQYRGEASQAHLALIRSRQALVNTRTQLVNHVRGSVKSFGGRLSRCSTASFHKKVAEQIPQELRPALEPLLETIASLSACIQHYDRELETLAQEHYPETKLLRQVQGVGTLTALTFVLTLEDPERFEESRQVGAYLGLAPSKDQSGERDPQKRISREGDEMLRRLLVGSAHYIVGPFGEDCDLRRHGLKVVGGAAGKNARKRAVVAVARKLSVVLHRLWISGEVYEPLYNAQRSKDRAASEKLLHPLGRGV

SEQ ID NO: 66889 - protein, 315 aa, unidentified
MDNTIITFVGIDVAKASLDVHIRPEGRTLSTSNDTQGHRKIVKFLPAAKTCLIVMEATGSYQKPVAAALLDAGHYVAVINPRQVRDFARGLGILAKTDKIDAAILARYAEQVRPRVLTKIPEKQAQIAELVTRRRQLIDQRTAEKNRLESIRQKLVRESIEQMLDVLKEQIKAIEKQIASMIKNDDDWNALADLLLSVPGVGVTTVAELLADLPEIGQISNKQITALVGAAPYNRDSGKSRGKRSIWGGRPQVRRALYMATLTAIRCNPVIQAFAHRLKKQGKPFKVVIIACMHKLLIILNTMVKNNTYWNVENA

SEQ ID NO: 66890 - protein, 448 aa, unidentified
MAAHSVSQIPAMVVPSQLERHWQQAFRQRWQAVAPAQWRCIGIDVGKYEHVAVAYDGLGQLLAPPLRFGIRAGDYQTLFAWVATVAPAPAVAPLFGLEPTGHYYEQLVYELAQQYGPKQVYIVQTTDVARRRADWNQGTFKTDEVDAAIISELLRQGHGRPYHPDEGAYLSLYQLERYRWAREQASTRLKNQIIGHVDRLYPGLVISDKPLAERYQPLWRSLWADETPRRLLTLYADPRDLRCADVATLCQRFRTAGYWMTRPYAAKILAAVQALPLPDAELGARRSTFLERDLAGLAYVEQQLAEVAAEMVDLLDLTWGHWLRPSGVDPLRLACLVATVGDMRQYHAARQLFGRSGLHSGCRDAGTRQQHGQGQHMVKPGDRHLRRQLLRFTLSMLAHYPALQTYRNRLLQRGKGKITANIAVARKLCGMLYALASQERPFDPTRLA

SEQ ID NO: 66891 - protein, 343 aa, unidentified
MESIGLDVHRHYTVYARVDETGRVLARDRVANEELPRIIDQAHAPCRVTLEATGNWGYIADLLQPIVDELVLAHPLQLRAIAAAKVKTDKIDATILAQLLRSDLIPRAYLAPPEVRDLRDLLRLRASLVRLRTAVKNKVHAILAKRGLRVPVTDLFGRAGRRWLAEQVLSSVHQYAVQAYLAVINAMDAEIARVSREIDQQAEQRQQTRWLTSIPGVGHYTALFLLSEIGDIHRFPDGDHLAAYAGLVPIVRASGGRARLGPITKQGSPWLRWLLVETVHRAVRRPGCLKERYERLRRRKGTAVATVAVARFLATCVYTLLSEGRPFAERPSGSRRDMVERGR

SEQ ID NO: 66892 - protein, 340 aa, unidentified
MTIVMGLDQHRAQITAEWVDTVTGEVCRSRVAPAHRESVRRFLARFEDHELEVALEATTGWRFVVEELQRVGASVHLAEPAETAARRGRKKRAKTDRADARLLRELVMVGRLPESWIAPEHILDLRARVRLRHTLIDERGEWQQRIHAVLYHHGCPHHHGIGLLTGTGREWLGSLELPATAREQVTVALQMIGAVDAQLAPMDKELRAYARRQPGCKALMGLYGIGHLTAVTILAELGDARRFSSSREAVRYSGLDITVYQSDQRRAPGHLSRQGPPALRWALYEAAQSVHRTSSPDRDYYLQAAERLGGNRACLAVARKLLKRSYHTLRELGDGALQPA

SEQ ID NO: 66893 - protein, 320 aa, unidentified
MSDRLAVGIDADSKSLVVARHGTKGSTRIPNSASAIGKWLSGLPTRSRIGVEATNRYHERVVQAAQMAGHVVFVLNPRDIKHYAKGVACRGKTDSGDAQVIARYIAKEADNLHEHVARSPAQERLHVLLQQRDSLVRSKTKLNLSLGSGASESALFGGIFSSLKEAIALLDQEIQRLCRTGEQHDLYRRIMTIPGIGPTVAAFVTHHITRWPLASLDAWIACTGLDPRPNESGARIGRRRLSKRGSAGLRQILYMAAMGLTRSKGGKPLYNAIRERGHSSTASFNILARKLAKIAWGVFKSGRDFDPAMLKVGQACFQQA

SEQ ID NO: 66894 - protein, 438 aa, unidentified
MANNIIFNLDELFISVGIDVGADFSWMSIALPNQQFVGKPYKILHNSMNSLTTAVSKIKEAEELYSLESRIFLESTGIYHYPLFCYLRDKGFNCSVINPIITKNSTNINIRKVHNDRFDSKKAALVGLKPDLKVSLMPSDLALNCRNLCREYYDLMDNRSSYVNKLQGELRMAFPQYLGIFSKITIRTSLTLLEKYTSPNAFLEADKQEIIDVIRSTSRFGLTYAEKKYNAIIQAANDANEFGYIIDSNIKRIRLYISFIRKYDDEISNIIDALHELVDSNEGTDFVKHIHLIETFKGAGFLSAVSLMGEIGDFSAFLKPKQLFAYFGLDPAVKQSGKFEGTKVQMSKRGSVIARRVIHVLTLQSISISRNGEAKNPVLRDYYLKKCESKPKLVAMGAVSHKVCNMLFAILRDNKPFEIITPQEHIKQYHAAKCDIAA

SEQ ID NO: 66895 - protein, 418 aa, unidentified
MRVDTDEPEIIERVAALDVAKAEGVCCVRVPGRGRQRMQEVRTVSTMTAALLGLGDWLAELGVTRVVMEATSDYWRAPFYLLEDRFETWLVNAHDVKHLPSRPKTDRLDAVWLCKVAERQMLRPSFVPPPAIRNLRDLTRYRVDLLAARTAEKQRVEKLLEDALIKLSVVVSDPFGVSGRAIMAALIAGERDPSTLAELARGRLRSKTDRLTEALTGRFTDHHAFLLSQMLHRVDAVSADIATVQARIDKQMGELAPAVAKLDAIPGVGPVAAQMILAEIGTDMSRFPTPAHLTSWARFAPGVNESAGRPTGKAASGKGNRYLARVLGEAAVSAARTDTFLGERYRRIARRRGKKRAIVAIGRSILVIIWALLSDEQAQFIDLGPDYYASRNNPERKARHHIRELQALGYSVTLNPAA

SEQ ID NO: 66896 - protein, 362 aa, unidentified
MISERTSVGLDVHARSVTATGLDAMTGEVFKQKLVPASEVVVDWLQGLPGPVAVTYEAGPTGFGLYRAITAAGIRCQVAAPSKLNRPPGDRVKTDAKDALLLAQLLQVGQIVPVRVPTITEEAARDLVRAREDVRGDLMRARHRVSKLLLRHGHVYYGGNAWTGKHQAWLHGIRFDQPGTRAAYEADLEAVEFTLARRNRLDAAITAMAADSEFTDLTRRLCCLRGISTLTGFALAVELGDWTRFTGSSIGAYLGLVPCEHSSGESRRQGGITKTGNTHARRLLIEAAWHHQPRYTVGPTMQARWEQASPAARVRGHAGNQRLHHQWAKYTARKKKHTVANTAIARELAGWCWSLATLDESE

SEQ ID NO: 66897 - protein, 335 aa, unidentified
MKYDHYISLDWAKSNMAIAKMTKQSNKIEVKDVPSDIEELKFYLSKQRGKKILTFEETSTSHWLYVELKEYVDEILVCDPWRNKLLCDGAKTDKNDASKLVSLLKSNMLKPVFHSGDYFFDLRKLNSGYNDLIQAGVRFKNQKKSLLRAIGVDTKTGELTKPFEVFVLTGLDRNINLYEEEKKLYEQEFKKICSNNKLIRNLKSIPGIGDIGAVKLAGIVVNAERFPDKGGWLSYCGLVDLEKMSGGRSYGKRKPRYCRGIKQIFKTAAMTSILEGRDNPFRRYYEYLIKEKNYTDYNARHAVARRIAIVALGVFKSNKKFENKWEDQNKITANK

SEQ ID NO: 66898 - protein, 412 aa, unidentified
MNVIYERCCGMDIHKNTIAACLITGRKKEVRSFSTMTSSLLGLIDWLKSVDCQCVAMEATGSYWKPIYNLLEMEGIPTLVVNAQHIKAVPGRKTDVKDSEWIGDLLRHGLLNGSFIPKREQRELKELVRYRRSMVQERARELNRIQKVLEGANIKLASVVSDIDGKSSRRMLDMLIAGCTDVQAMADTALMRMRKKIPQIEEALHGFMGDHQRTMLRMMLMHIDILEEQVLSLDQEIRARMKPVNEQVSLVDSIPGVGERSAQVIIAEIGINMNQFPSDSHIASWAGVCPGNNESAGKRKNGKTRKGSDILRATLIECAKVAGHLKNTYFSAQYNRIAARRGHNRATVAVAHSILKAAYHMLKNNTPYKELGPDFFELRRKAEIVKKSVKRLETLGFTVTIEQSATLVQLST

SEQ ID NO: 66899 - protein, 346 aa, unidentified
MLERRLNGKLTLPEAATPTLFILHLHGGTMNSCLPSDCYIGVDVAKAELVAAVFGQAGVTTCANAPATVNAWLATLPEAVHLGLESTGDYHRLLAERAHARGITVYVLNPHDVHHYARALGRRAKTDRVDAALLARYLAQEHAGLHPWQPPTPAQDRLTQLLKRRAKVVVAKGLLRASLAGLDIAQAERDATLNQLDALLTALDRELPQAVRTLPQGTSRWAHLRTIPGIGPLSGAALTELFSRVPFSRSDAVIAYLGLDPRPCDSGQRHGRRRLSKRGPAELRRLLYNAAMSAAKTATWKPCYERQRAKGLSTTAALVVLARKLVRVAFALHKHDTCFDPVFIGA

SEQ ID NO: 66900 - protein, 374 aa, unidentified
MNSITFVGLDVHKDFISVAVAFPEGEPQDWGDIPNNPKAVERLTRKLGPGAIFCYEAGPCGYTIYRQLERLGFPCVVAAPSLIPEKPGERKKKTNRLDAKKLARLLRSGDLTPVWVPNEDQEALRDLIRAREEAVRDCTRKKQQLSKFLLRLGHYPPPGVKAWSARYFAWLKELPLAQEAHRVLLAEYLRALEEATARRKRLEEALKHYTEKGLDPDSQPLFLAWQALQGVGPITSLTFLAEIIDPLRFTRPAQLMSYTGAVPGERSSGHRRRQGGITHTGNAHLRAVAVEAAWHYRHRPKQGWRLKKRQKGLSPEVIAIAQKAQERLHNKYWRLIARGKPPQVAVVAVARELLGFVWAIARQIAKERAALKAA

SEQ ID NO: 66901 - protein, 358 aa, unidentified
MQIIGVDLHIRQQTIAMLDTETGELVEKTLEHDGDEVRKFYSARTGPVQVGLEASGSMHWFLELLEELGIDCRVGHPSEIGKAEARKQKHDRRDAALLLKLQVEKRLPSIWMPPSELRDLRTWLRHRHQWVRIRRRVQNTLQAMALRHGLRRGKKLWSQAGQHAIASLPLPPHTAYRRSELQDWYDLLQGQIDELDKRVSAQAWQRPGAKLLMTHPGVGPVTALATDVFLGDPARFADGKAVASYVGMIPREYSSGGRQRLGGLSKQGNPLLRFLWCEAAIHAVRRDPELQRFYRRKLAPKGLGKARVAAARKLAIRLWIMLRDQIDYPEFCRGGQVRQKSGATCAGMPEVGHSPAIS

SEQ ID NO: 66902 - protein, 320 aa, unidentified
MSESSVVIGIDVAKAQLDVAVVGTAAKPAQFTNEVDGHTALLAWIQPLAPQLVVMEATGGHESLIACALQAAGLAVAVVNPRQAHAFAKAIGHLAKTDRIDAAALAELGRTLLARDELARYLRPLASPEQQDLAALVTRRRQLVTMLHMERQRLALARPAVRSSVQTLIAAIERQLDEVDGDLTRHVSQHFAELDQLLRSMGGIGPVASATLIAELPELGRLGRRQIAALVDVAPMACDSGTMHRRRHIRGGRFELRRTLYMATLAATRHNPIIRDHYRRLVDAGKFKKVALIACMRKLVTILNAMARSHTEFNQNHARA

SEQ ID NO: 66903 - protein, 345 aa, unidentified
MEIRTIGIDLGKTVFHLVGLNARGEVVVRKKCSRTQLLGFTSKLRECLIGMEACGGSHFLGRALREQGHDVRLMPAQYVKPYVKTNKNDYIDAEAIAEAVTRPTMRFVPIKTDDQLDLQSLHRIRERWVKGRTAVVNQIRGLLLERGITMRKGRKHLEASLPQILEDAENKLSGALRVLLHELRREMQYLDQQVEECDKLIERIAGELEQCRRLMAIPGIGPVIATATIAAIGNGAAFKKGRGFAAWLGVVPGEHSSGGKQQLTGTSRRGNKYLRKLFVLGAHTVLLQRRKQSWGLSTWLASLVSRKRKQVAIVALANKMARMVWAVLCKGEAYRPPLVPQIDAA

SEQ ID NO: 66904 - protein, 409 aa, unidentified
MDVVHARCAGLDVHKKSVYACVICSEANGEKRQEKRSFGTVTAALLSLADWLREHAVTHVVMEATGVYWRPVWAVLEGQFELTLVNPHHVKAIPGRKTDAKDCEWIAELLQHGLVRGSFVPPTEIQDLRDLTRYRVELTQAQNRVANRIQKLLEQANIKLSSVASNALGVSGQHMIEAIIAGVEDPERLADLAQRRLRGKIPELQLALEGRVREHHRFLLREFLDEWTALGTRIRRIEEEIDRRMVPFEEAVTLWQSIPGMDRVTAYNLVAELGVNMAQFPSPQHLASWAGLCPGNNESAGKRMSGTTRNGNKWLRRTLCQAAWAVTRKKDCYLSAQFRRLAARRGIKRAVMAVAHTMLIIAYTMLKTGRTYHELGGGYLERVNADQLQRYYVKRLQKLGLTVTVAPAA

SEQ ID NO: 66905 - protein, 410 aa, unidentified
MIEAILERCAGIDVGKKFVVVCVMTGGAKDEPHTQIKKFGTIVSELQRLAGWLVAEECTHAVMESTGSYWKPVFNLLEAHVQVILANAADVQNRRGHKTDPNDSRWLAHLLRHGMIRPSFIPPLAIRELRDLTRRRRQLIGENSRERNRVQKVLEDANVKLGDVLSDVFCVSGRLMLAALLDGQMTAEQIADLAKKKAREKIPQITAAVADHRLSDHQRFLIRHALRHLEFLDQEVEALNQEIRRRMEDPALAEAFHLLQSIPGIKEESAASILAEIGADMDQFPTAAQLSSWAGLCPANHESAGVKKSVRTNRGNVWLKTTLTQSAWAATNRKGSRLQSRYHALKARCGNKRAIVALGHTLLKTVHAVLSEKMPYREEPPITRDDRNVERAQHHIRSLKKLGYTTFAVE

SEQ ID NO: 66906 - protein, 341 aa, unidentified
METTRHIGIDLHRNKFTCCMRVENGRSYLSEWKLEDLPRFVKKLRPTDEVAVEVTGNTRLFYDAVAPHVARVVAVDPNQFRVISHSVKKTDPNDARSLALYLSKGLLPEVRMKEKTQAQIASLTQTRDTLVKLRTALKNKVNNILSAHGINLEREALSSEKKLNEVLALRFDPMIRIELKVIVEQIRSLNQSIAELEKTITEEGQKLQGHKNLTSIKGIGPLTGSILLSVIGDIHDFADEGKLAAYFGIVPRVSNSNETERSGRITKRGSKLGRTALVQCALIAQRYSPYLKRFYEKTKARRGTGKAIIALARKLLGIVYRTLKNNWVFEDFPNFVLAEES

SEQ ID NO: 66907 - protein, 411 aa, unidentified
MYYVGIDIAKSFHVISIIDETETMVLKKPFRVENSLDGYFKFIDKLISVSSNVKDFTIGLEATGIYGENLWEFLNSKGYNVKLLNPFQTSRYREQITMKKVKNDNIDSKIIALLLKDGKFSSGYVTDDEYQSLRTLYRNRASIQGDMKEVKKRILTQVTVTFPELENFMDIFTISGLALLDKYPTAKHYERSSVDRILKIFRHIQGNNFNQTKALEVLNLSQVSVYSGKAKDARAIAIRSTIRLLKMYQSELSILENEITSLLDKKSIHSSNDDISEPNSLIENLKTIPGVADKTIAAILSECGDITRFNNVTKFIGYLGLFPTENSSGNSTKTGRLSKRGSSLVKHALYMSSVSCLIHNSQLKQLYDTKRSQGKSKKEAIVTVSRKLATVIYAIFRYNTPYNPARVFAKS

SEQ ID NO: 66908 - protein, 510 aa, unidentified
MVKPNFLGEIIRVMPNYTKSKQTSIYQNQSVRIRAIFDEAKSAKKILCVAMDFAKAKHVALICDGEGSILKKSFPVDNNVEGVELLCDQIQSTARRRKIPRKHIFIGGEDEASYVENFTSALLKKKYLVVRVNARKAKENRENDLASTDDLDLLGIAKTMLSRRAIVARDPNEKEPKIYREIRDLCRTRRKLVREKTASSNRIHAHVDRLFPGFLTDSKSGITAFGPASLELMSRNFSCIQIAKRKQSALSNTLRRLRVHYPEETAGKLITLARESLAPDPVRIHSQQRTLSATVDLHRCIQRNADELKIEFAELLASTPYAFLTTLPGIRFVLAGGIAGELGDPEKLRRLDSLCAYAGIVPATWQSGGPDSPPTTTYTSVRCNHTLKDWVAQSAQKLRQYGPLEWRERHARWEANGQHALFAGGRRYLRLMRTLVRNQIPYMSPEARMRDTSKEIRALDAEQTWKLLVKKWRTIPNWQKVAFAEDKPLGFWRRVSIEMHGANLPFPKER

SEQ ID NO: 66909 - protein, 423 aa, unidentified
MSEPLTTIYVGIDVSKNSNQVCALTFESKKLINSPFKNNQEGALELESKLIKLCIKNDLKDIIIVLESTGVYSYHIANYLSTSHGLLKFNTTVYVVNAKMVKNYAKSYIDTSKTDPKDAFILADFARVGRCKELTPYRGGQRVALQRLTRHRKHIVDMCNKEKQYVISNIFIKFSEFNNKDHDYDTFLNSFTNTAVEVLLKYKTVEQIIKTPIDKLTDFIVKASKNRFGDPKEVATTLKAAARASYRLDKVTYKPINIAIASSLRLIDAFEKEIEEIDEQIQYLVLGLDNSNEYKSIISIPGIGPTLAAGIIAEIGSFKDFDDDSSLAKYIGLSWKKEQSGKYDSENTPMQKAGNTYLRYYIVEAANMVKLYVPEYKEYYQKKYAEVKIHQHPRALVLTARKLVRLLFTLASKEQLFNSNKSN

SEQ ID NO: 66910 - protein, 474 aa, unidentified
MARTRNKPASPPVPGDAGTEVTDEPVQVISRAAAIDVAKGSGMVCLRLPHESRAGRRTQKVWEVTATFAAVVALMDHLVCQGVERLVLESTSDYWRIWYYLAEAAGLEVWLVNARDVKHLPGRSKSDRLDCVWLCKLNEWGMLRRSFVPPEPVRDLRALTRLRANLTHDRVRHQNRIEKILEDALLKVSSLISDLMGGSGRRFLQALVDGERSPAALAALGDYRLHASKAELQEALTGRFRDIHGFEIGMLLKLIDDLSAKITELDERIEAQLENVPGLGGVCTSCGQPGPDGPCTGCGEPVLGVIARLEEITGIGRGAAQVIVAELGTDMTQFPTPGHAASWAKLTPRAIQSGATSKAGRTGKGNPYLRGATGVAVMTAARTETFLGARYRRHARRRGKQKAIVAGCRTIIEIAWRVIAGPGFRYTELGPDYHDQPGPGRKTRDKIRQPGKLNPGMTVTLTPRPEPGGQAPAA

SEQ ID NO: 66911 - protein, 352 aa, unidentified
MSNEEIFPNVTIGLDLGDKVSRVCEIDARGRIVKTAAVSTTPGAMERYFGGRPRCRVVLEASTHSPWLSRQLKDLGHEVVVANASEVYAKRPRKRRNDRTDAEFLARQGRADVTLLHPIEHRSAEAQQDLALLRARDQLVGARTKLINHVRGAVKSLGARINKCSSEAFAKQAAAQVPEALRPTLTPLLEVIADLTRRVREMDKQVEQMIDARPAVAQLQQPNGVGPLTALAYVLAVEDPARFKHSRQVGAYFGLVPKLDDSSDSSPQLHITKAGDPLVRKYLVSAARYILGPFGKDCDLRRYGEAIAARGGKNASKRAAIAVARKLAVMMHRLWVTGATYDADWLQRSRAA

SEQ ID NO: 66912 - protein, 370 aa, unidentified
MLDTTTFVGLDVHARSIKAVSLDVITGEVRCATFGYDAGAVAEWVRSVDPKARCVYESGVTGFDLQKRLSGLGVDCAVGAVSKMIKPSADRRRKNDRNDAEFLARMLSVGNVVEVWVPDDECEAARDLTRALEDARDDLSRAKQRLSKFLLRHGLAFDERTPTGRRKGNWTRAHWSWIESIRFAEGADNDVLAYYVDAVRRAAEEKARLEGLVEAEARKPRWRKGVDSLRCLKGVDTATAADLVFEAGEFSRFGNARSFAAWVGLTPSEHSSGESDRRGAITKAGNKHLRKALVEAAWHYLTCSGRPKDLAKGQAPDRVARRHAAKGVRRPVERREALLARGVHGNKANVATARELACWVWAVGLMAEEA

SEQ ID NO: 66913 - protein, 355 aa, unidentified
MKTRIPLITIGLDLGDKKHAICVLNQDGEIIDERTITNHRESLRRLSQKYPAARIAHEVGSHSPWTSRFLRELGHEVFVANPRKLRAIYTSDRKSDKNDARMLAKIARMDPQLLHPIEHGTEEAQRDLLQVKLRDNLVRQRVDIISSVRFTLKSLGVALPSPNSACFAKRCRSLLAKRDEALLGMVEPSLQVIDLMTQKIRELDRAVEALCETKYPATMRLRQIVGIGPVTALSFVLTIEDPELFENPRDVGAYLGLVPKRDQSGGLDKQLRISKAGDAYLRRLLVGCAQYILGPFGPDTDLKRHGLMLAERGGGRGKRKAVVAIARKLAVLMLTLWKHERDYEPLRGMEPAQAA

SEQ ID NO: 66914 - protein, 357 aa, unidentified
MTETPKPKPIKYTYFIGIDISKNELDFAVMKNKTLLFHREIVNGTDAIRALLKEISALPQFKFKQAIFCMEQTGLYGNYLLKALCTKRTNVVVENALAIKKTLGLTRGKNDKADAIRIAGYAQKNSHELKFWSQKRDAVVTLMHLYSLRIRLVATDVALKTPLTDQLGFEKKGLQTQMAKACKGSLEAIRADLAGVDSAISATLNADPGLKILNEIITSVPGIGPVTATQIILSTNEFKDIRNPKKFACYAGIAPFKNESGMSIGPARVSHIANKRMKSLLHVCAVRAIRCNEELRIYYERKTKTEGKHKMLVLNAVRYKLVLRIFACINQNRLYRKDYVRSQTNVNQGNGIEKPQN

SEQ ID NO: 66915 - protein, 410 aa, unidentified
MSVTLKNQDDYGFLNDMEPLCSLPDIGQNQRKKVFKKGEIMSIKRILVNQIDTNLEYEVIGIDLAKNCVSAILLTTDGEIFGIDRLDYQELEKSAQELSPTIFAMEPCTEMNYMVQKLEDWGHQCIVISGKNVKDYVESHFSNQKTDLNDAQALAFLTKDTQLRTVKAKDPEQLKYASLTTLREQYVKQYRQTMVSLKGICQVWGLNISKGISGKARLKDMIENHADFPAELRTALVGMVAHAQAVQKDLKSVTKILEELAKKDKACQLIQTVPGLGTICSCRLRATVGDIKRFKHPKDFPAYYGLVPRSMATGHNEKKGKITHRGDKTMRSLMVQGAGIVINQATKGNLNSKQLTKWILKKQKEKMPWGKLVCAVAAKLLRIVRAILISGKPYNPKIAGVAKCSLPKAS

SEQ ID NO: 66916 - protein, 356 aa, unidentified
MNQLTTVGLDLAKDVIAACVLDLHGAVVERRVLKREAFQRWAEQLPVCTVAMEACGSAHHWGRWFAARGHTVRLIAPQFVAAFRKGGKNDAADAEAVAIAARQPTMRFVPIKTIDQQTILAWHCAREGWKEERTALMNRVRGLLTEFGIVIARSSDRLLAELPRLTEDPRLPDAMQGLLLEAREQLASLHARLARCEAQITNHARSNTAAQRVSALLGIGPITSSALAATVPDTTTFKSGRQFGAWLGLTPKQHSSGGKTRLGRISLRGNVYLRTLLIQGARSTLQSALRADLSRASRLQRWIIELYGRRGYHKTLVAIANKHARIVWAILAKDERYDASAWQRHPMAQALPAASS

SEQ ID NO: 66917 - protein, 366 aa, unidentified
MGDVLTYVGIDAHKRELHVAMLIGTATTPVTWTVENEPKAIDRLHRKLERDAPGPVRVCYEAGPCGYALQRQLTKGRVSGVVIAPALMPRKPGDRVKTDKRDARKLAELFRAGLLTEVRPPTLAEEAVRDLCRARDDGRDDLQRARHRLGKLLLRRGLHFAGKNWTRAHRQWVASIAWDHAAERAVVEDYLLAIDQVESRLAELDARLAETAQTEPYREPVARLRCFRGIDTLTAMLILAELHDFRRFPSPRALMAYLGLVPSEDSSGDRHRRGRITKTGNGLVRRVLIETSWHYQHRAGVGPALAARRTGQPPHVIAIADKAQQRLCRRFRRMTAEHKPSPKIVVAVARELAGFVWAALQPVAAA

SEQ ID NO: 66918 - protein, 324 aa, unidentified
MVTVIDEEDRVLAEKRLPNDLTKMVEFLKPWQAGLAGVVVESTFNWYWLVDGLKEAGFTVHLANTTAIKKYDGLKHSGDEADARYLAHLLRLGILPTGAILGSEHRAVRDLARKRMQLVRSRTSHILAVENITARQNGARITSSQVKRLTTELVDEMPLPQDVALAVKTNVAVITTLSAQIDLLENRLFSDMKERPDYALLTSVPGIGKVLATTILLETGPIERFAAAGDVASYARCVDSVHTSNGKKKGKGNTKNGNKYLAWAFVEAAVCAMRFNAEAKRFYERKKAKTNNVVAIKALAHKLARACFHMLKEDKPFDAARCFA

SEQ ID NO: 66919 - protein, 365 aa, unidentified
MKKVSTMRVGGKDIFKGQLTIGLDLGDRSTAYCVLNEAGEIVLEHKLATTPEAMKQVFASMPRCRIAMETGTHSPWVSRVLFALGHEVIVGHAQKIRLITKSRRKDDRLDARTLARLARIDPALLSPVQHRSAEAQLHLAEIRARAVLVSARTALINAARGLAKSYGERLQKCHTQQVRRETANGLSAGLREALQPLLQEVESLNERIQEYDRRIAKMTNERYPETALLKQVKGVGDLIAATYVLTIEDPRRFRKSRDAGCFVGLQPGRRNSGESEPQLHISKEGDEYLRTLLVQGAHYILGPFGEDSDLRRWGMKLAMRGGKTGKKRAVVAVARKLAVLLHRLWVSGEVYEPLRNTQKALGTAA

SEQ ID NO: 66920 - protein, 344 aa, unidentified
MIFVGCDLHTRMQQVAVLDTETGERGEHQLRHDGMAVEEFYAALRRPVTIGIESTGYAVWFHSLMQRLGHTVLVGDAAKIRAMVVRKTKTDRRDARHLLELVSQDRLPTIWVPDPATRDLRALLTHRMRLVRIRTMVKNGLHAIALNCRLVRGARLLRQAGLAQLRALALPPHTARRRDQSLALLTELNAQIRELDDAITTAAHAHPDAPRLITHPGVGALTALATVVVLGPIERFHDSKHVVSYVGLAPAVHASADKYHLGHITKQGNPLLRFALGQAAAHAARMDSDLKRTYFTLMHRRGRPQAKVAVARKLLVRLFIMLRDHIDYDEFRRRGRQTLTLAPT

SEQ ID NO: 66921 - protein, 455 aa, unidentified
MSRPRVIDDQEHERVHERAAAIDVAEDTGMVCTRTPHPARPGARRATVQSVRARVNAIRALGRQLHRDGIEIVTLESASGYWRIWFFVLGACGLAVQLVHAAQAKNLPGRPGTGKLDAMWLARLTELGLLRASFVPPKAIRDLRDCTRARTRLVQERTRCWQRLEKLLEAALVKVSSAAGKLTTVSAQDMIKAMIAGQRDPEVLSALARGRMKAKRDDLVRALDGMFDDHHGELAGLLPDQIVFPDARIAQLTARAAELTAAMPAAWGVDGDGTGGPGAGTAPDAPVLPAVARLAEIPGVSENLARSIIAERGLDMTRFPTATHLVSWAGLCPPARQSGPRVPAWQEGPGRHLAARQPGPSRRWRFPHRYLPRRALPPDRPPPRQGQGPGRRGPLHPDHHLAPAEEPRGPVHRPRPRLLPGPHRHRPQDPQPHPPDPGARLRRHHHPGRVTPYRR

SEQ ID NO: 66922 - protein, 336 aa, unidentified
MSCYAGIDLHSNNNVICVIDDKDKRLLEKKLDNEAALVIQALKPYKRRLKAVAIESTFNWYWLADALMEAGFEVMLVNTAKVVQYEGLKRTDDRYDAYHLSHLMRLRILPTGYIYPLQNRGLRDLLRKRMRLVQDRSKYILSLKTQYQRQTGHTLPCNTIKAKHFSLPVVGDDNVQLAMTCNINMSKALTQQIKVVEKTIMRQVLPNKSFELLKTTQGIGDILAETILLETGDINRFNSPGNYASYCRCVDSRRESNGKKKGVGNRKNGNKYLAWAFIEAANFSIRHSARAKRYYERKKAKTNNVIALKALAHKLARACYYIMKRGVAFDEDKLFT

SEQ ID NO: 66923 - protein, 448 aa, unidentified
MKQSAKKVTRNTTAKKTTRHIPARSQASSGTNGDHSAPVILVGIDWADGEHAFRMLAPDGSTHEGSFEQQPAAIAELLTAWLQKYPQARIDICLETPRGALINALLEYPQVNIFPVNPNALANYRKAFAHGGGKNDPVDAKLILQYLQHYRDQLRPLQQNGPHTRELAALSEDRRRLVNQRVALANELKSLLKTYFPAILQLAPAKLYADFIVRLLLKYPTLQQAQAAGRTRLRKFFFGVGTKDKVEQRLDTLIDAMPLSRDEVLLRTSARRAQAICGQLDALNRSIAAYNVELSTLVKAHADYAIVSSLPGAAAKTQARLIAALGDDRARYQDAQSLQAAAGIAPLTTQSGKQRYVSCRWACSKFIKQTFHEYAGLSIGKCAWAKAYYEQQVSKGNSKQMARRALAYKWMRIIYRCWQTGEAYDDARYLTRLKATGSPLVERINAAA

SEQ ID NO: 66924 - protein, 360 aa, unidentified
MEGNQERSAGRIVGGVDTHKDLHVAAVVDELDRVLASQCFATTRHGYKQMLAWMRGFGSLQRVGIEATGTYGAGLLRYMQKAGIEVLEVTTPDKHDRRKRGKNDDLDAQNAAHAAFAGKRTVTPKSRNGMIESLRVLKACRKTAVAARRVALQMIQNTIVCAPDELRELLRTMTRMQLIRTLAAWRPDLTDYRNVTSAYRITLKSLGRRYLELHDEIADLDTMIIAIVDELAPNLVARNSIGHESAAQLLLTAGGNVQRLRSEASFAALCGVSPVPASSGKTTRHRLSRGGDRAANSALHIIAIGRLRTDPRTQAYVARRITEGHSKLEAIRCVKRYIAREVFSLIKQRPKESHPASSLV

SEQ ID NO: 66925 - protein, 345 aa, unidentified
MSLMFFLGVDVSKKTLAVVLSDHKDKILWSNKSIPNDEVGFKKLVETVIKNTSKKAGKEEYSIAAGMESTGVYGERLAYYLNGNSHNGRIVTYVLNPAAVRAFGTSVMAPNKNDSADAQLIASYLSMAVTKEQISPWKAPSPEGRALRELSRRREELTELHASECNRLEKLECMQEPPEAIVRNVRELISYLEDSIHNLEKEIEEHIDDDPGMREDIELLRSIPGIGDVTSVTLQGESDGLNNFQSVKGLVSFVGIAPSEHTSGTSVFKKPKISRQGNARIRHHLYMATLVAARVNPVIKDFYERLLNRGKCKKLALVACMRKMLHIIWGVMKNRKRFDPCYSLK

SEQ ID NO: 66926 - protein, 352 aa, unidentified
MYYVGLDLHTKYITGCALDSQGAVVATERRLPPVLETVLGWLAPVGQPAAVALEATLYWAWLHDRLTAAGYQVAVAHPQQVKLICHARCKTDPVDARKLADLLRTDLLPAIWIPDAATRARRTLLRGRAWVVRTRTRVKARIQAYLAAENERVPVSDLFSRGGRAWLATVALPPEVRQQVDRLVALVAHLDAQIAEQDRGVRELAQATPEAALLQTIPGIGPFGALLLLAEIGTIARFGSSHELAAYAGLVPSTRSSGGKTAHGSVGPAGSAWLKWLFVEAVQTLKRQPGPVRSQYERLLRAKGKPKATVAAARKLCCYVYWMMQEGRSYDDWLRQRHQREVRPIQAVAAVA

SEQ ID NO: 66927 - protein, 256 aa, unidentified
MTTSSGKFVGIDVAKEKLDMAVLGETKASQVGNDEKGIASLIKKMKALKAELIVVEATGGYQRAVVVGLYEAGQPVAVVNPQRVRQYARACGLLAKTDKLDAFNLAEFGKQVQPRRFEAKSEAGRYLSALLVRRKQVEEMLKAEKSRMRTVHEAMRGSLERMMDELKREKKRVEGEIGKFMQEHESWKEQEQILCSAKGVGRVTAATLLAELPELGKLDRKKIAALVGVAPMNSDSGKKRGYRKTKGGRIEVRSAL

SEQ ID NO: 66928 - protein, 457 aa, unidentified
MSDSKRSRSQRNLSPVHPAAAAIDIGATIHVAAVGPDRDKEPVRTFQTFTDDLHRLADWFTACGIKTIVMESTGVYWIPVYEILEQRGFEVLVVNARDAKHVPGRKTDVSDAQWLQRLHEYGLLRASFRPQAEMAGLRAYLRQRERLLDYAAAHIQHMQKALTQMNLQLHHVISDITGVTGMQIIRAIVAGERDPDVLASYRDRRCHASAETVRQALVGNDREEHIFALTQALELYEVYQTKVLACDEKIEAILKRLKQSAAPPINELPVARHRTRQPNAPAFEVRDALHAILGVDLTQIHGLGPYLALKLVGECGTNLAAWPSAKHFTSWLALAPHNKISGGKVLSSRTRRTSNRAASLLRLAAIAVGRTDTALGAFYRRLSARVGKAKAITATARKIAVLFYNSLRHGMAYADPGAGYYEDRYRQRVLSNLQRRAKSLGFVLQQAESGGAQAVVS

SEQ ID NO: 66929 - protein, 355 aa, unidentified
MSQEKYIGMDVHQATVSAAVRDRNGNLLMECILETKADTLVEFVQGLHGTLSLAFEEGTLAAWLHDLLKPHVNRVVVCDSRKAALLRDGNKNDRIDARHLSELLRTNQLKPVYHGEHGLRTLKELGRSYLTVSKEMTRTMNRIKSLYRSWAIPCAGTTVYAPRHRREWLAKIAEPGARVRAEHLYEQLDHLQPIRVRARRELLQESNKHDAVKRLRQIPSIGQIRAALLVALLQTPHRFRSKRQIWAYSGFAIETHDSGEYRYVRGKLQRNRERITVRGLNRNHNPDLKNIFKGAAISASSRPGPLQDFYETRVAMGMRPTMARLTLARKIAAITLTLWKKGANFDPQQLSRQAA

SEQ ID NO: 66930 - protein, 344 aa, unidentified
MQIRSIGIDLGKTTFHLIALGDRSQIVVRKKFSRSQLLIYTANLPPALIGMEAGVGSHFLGRALRGQGHQVRLIPAQFVRPFVKSNKNDYRDAEAIAEAVERENMRFVPIKTEDQLDLQALHRVRDRVVARRTSVINQIRAFLLERGISFRKGPASLRRQMPEILENADEQLSPRMRCLLDFLWQEWKGLESQIEGLNEDLEQIASSDPACVRLQKIPGVGPLIATAVVSAIGNGAAFRKGREFAAWLGLVPRQWSTGGKAKLLGISKRGNPYLRKMFIHGARAAVLRVKREGSSLGKWMGQLETRTARNVVIVATANKLARIAWAVLASGNNYHPLYREAFSN

SEQ ID NO: 66931 - protein, 340 aa, unidentified
MGDITTIGLDLAKNVFQVHAVDAAGNVVVRKRLRRGQVLVFFARIPSCLVGLEACATAHHWARELIALGHEARLMPPNYVKAYVKRNKHDVADAEAICEAVRRPSMRFVPLKTVEQQSALMMHRARDLLIRQRTMLVNALRGHLAEFGLIEAQGLHKVVRLITIVMDEMDRRVPDTARQVLKVIVHQIEDIQTGITELETQLLAWHKNSPVSQRLVTIPGIGPIIATAIAATVADPSTFRSGREFAAWLGLVPRQNSTGGKARLGGISKRGDSYLRRLLVNSAHTVLLCSKAAKTDPWLTSLLGRKPRLVAAVALANKTARIAWAIMSRQDTYRHVAAAA

SEQ ID NO: 66932 - protein, 396 aa, unidentified
MNGPIISFDVSKGSSHMQGFLDHGKPAGKATVIRHDLKDFAKIDALRGKIREETGSNPVAVYEYTGVYSHTLERYLDSIGMRRYAISPLESAKVRKAMIRPTKNDSLDCRTIAEVYYLRTLREVRNDDEIHDSLRDMGRFYHYLLEVKIVEKGRYYRCLDDVWPCFDKVIEPNSPKSLAIISHYGHPSKIRSKEQVKNFLMKLPRHGRVSTDELAEKIAAYAKTHVSGASPDSYKVKEVKMMSARVKGIINESERVMDSMISKAENLPEFALLKTIPGIADVTATRLIAEIGDINAYPKADSLIAYAGLDPAVMQSGQMTGEHMHITKKGNPHLRATLYVAVINMIMSKAENMITRYVLKKKNSGPSYKAAVIAGCSKLLRLIHAMLRNGTCYSDK

SEQ ID NO: 66933 - protein, 354 aa, unidentified
MPHNTSRLEAVATIGIDIGKNTFHLVGLDRNGAIVLRQKLSRRQIEARLANTPPCLIGMEACVGAHHLSRQLKAYGHDARLMPARYVRPYSKGQKNDFRDAEAIAEAVLRPTMKFVAIKTVEQLDLQALHRVRERLVCQRTSVINQIRAFLLERGIAVRQGPPALRSEIPIVLSMTDKLSPRMIQMIEDLCADWRYLDERVETVSDEIKTLSEQDDGAKRLMTVPGIGPIISTATVAAIGNGDAFSKGRDFGAWLGLVPRQMSTGGRTVLGPISKRGNRYLRMLFVQAAHAVLLHPKCWERHGLKSWIAAAARRLNRFKLAIALANKLARIAWGVLHGGRSFEVRSMKPAAQCL

SEQ ID NO: 66934 - protein, 341 aa, unidentified
MQLSIIGIDLGKTSCSLVGLDTAGKVLVRRRMRRDTVVTFCSKYPGSVVAMEACCGAHHIGRALAGQGHEVRLMSPEYVRPYVKAQKNDDRDAEAIAEAASRPTMRFVTLKSEEQLDMQTLHRVRDRLVGDRTSLMNQIRSLLLERGHVVAQGRARLAVALAELLDGEERVLAARIHELIVDMRCQWVALDERIKAFDAEFAAAAKAQDGAKRLLSIPGIGALNATALVAAVGDAGTFARGRDLAAWLGLVPRQVTTGGRPKLLGITKRGSKYLRKMLIQGARAALPTLKAGDTPVGAWLRGLLARAHLNTAVVALAAKMARTVWALLRHGDTYKAAALAA

SEQ ID NO: 66935 - protein, 422 aa, unidentified
MKNKPSAAPALVIGIDWADQKHDVCAIDASGKEVSQQIDHTPEAIDAWVSQQLEQADGHPIAIILEQSRGALIHALMFRENVMLYPINPKQLANYRESYSNAGSKNDARDAWLLARMLWERIRILKPWVPDDEQTRLLARFCQQRRQLVNERTRLLQQLTDQLKAYFPLALQLNPRGVQSSVVLELLRRWPDPRQLRNADRRWLVKVFKQYSIRNSDQQQALIDRIRSAKLLSSDNALIESAAIVVEVLAKQIPVLQKAIDKLDQKIEHGMATHTDAMLFQSLPGAGKALAPRLLTAFGSQRDRYASADEMSTYSGIAPVTKKSGKTRIVHRRFACPKYLRQTFHEFAAHAKRWCPWSRAYYELQRSRGMKHHAALRKLALRWIRILYVVWKNRVPYDANRYLATIQRKNPALVPFLQIQPK

SEQ ID NO: 66936 - protein, 332 aa, unidentified
MISYIGIDIAYKTFDVVVRQDNKNSKVETYNQHKDDHKKLINKLKKLKPESVVMEATGIYYLDLAKALFKADLPVSVINPKSFKSFAETLLKRSKTDSIDASLLAEYGQRMTPVLWTAPDDTMMELRDISRQINRLVYINTQAKNILHAMTATQNTNKYVIEDEKEGICFNEKRIKRMRDLALELISNHDALKRQLSNITSATGIGENSAICMMGELNILPKTLKAPQVCHYAGLSVRLKQSGTSVNGPGRLSKAGNTYLRSAFFMPAMSASIHDSNAAAFKEVLLSRGKKKIQAICAIMRKYLMGVWACIKTDTPFDSSKLFSEEHKITCA

SEQ ID NO: 66937 - protein, 367 aa, unidentified
MKNHSSIDQSLSSSDLSACTTLAVDLAKQVFQVAGEDVLGQVRYEQRIKSREAFYEFLQKMPPHVVVLMETGPGAQAWARQLQDQGNLARILPAGLVATHRSGPKNDRNDALAILRAGRDEKICAVPIKSVAALAMQALHRARQGYVRRRTAVSNQMRGLLLEHGVVLAQGDVAISQKIPRVLEDATQPVPGLLRELIDELLAEWRHLGERIRVLTGRLEVAANADMTAKRLMTVRGIGPVTATALVAKETKPERFPNARKFAAYFGMVPDQHSSGETVRLGDMTKRGDVYLRSLMIQGAHAVLQQLRPDSQQPDDRRLLRWMSRLGRKEAAIRLANRNLRIVWVLLQNDQTYRRHAGDGQQATMSH

SEQ ID NO: 66938 - protein, 481 aa, unidentified
MKNKKQSKKVSGNPTPGKWDQMNRKQRREMMRKMQNEDLSLDVVHPDAAGIDIGNESHYVAVPPSRDPHAVRCFGCTTAELKAMADWLKQCGMRTVAMQSTGVYWIAVFDILEAAGLEVYLVNARETKNLPGRKTDVQESQWLMKLHTYGLLRNSFRPSREIRMLRTYWRQRHDLVRSAARHIQRMQKALTQMNIQLANVISDISGATGQTIIKAILQGERDSRELAAYRDVRVKASEEEIAQALEGNWQDDQLFVLEQELAGYEFCQKQMAECDRQLAQYLGQMEDRSQGDTLPTETRKGRRKKKKGNAPQFDLRQDLFRITGTDLTQIDGIDVMTAMTILSEVGGNMSKWKTENHFVSWLKLSPDNKISGGKVIGKGRMPTNNRATSALKMAASTLRASDTYLGAQFRRFRSRLGPPVATKAMAAKLARLIYRMLRYGMKYVDQGAEFYEAQYRKQQVSYLKRRAAQLGLQIIEPAVAA

SEQ ID NO: 66939 - protein, 353 aa, unidentified
MPVYVAVDFHAREQTISWCDTADGEVHRTKLRHQHDDVRQFYEQFSGEVIVAFEASGYSAWFEQMLAELGHTVWLGNAAEIRRKAPRKQKNDRRDADLMLDLMLKSDFPRVHTFSTASRTVLRQLRYRHKLVKVRTIAKNSVHAIGINAGLPLRGRLLTQTGLEQLQALPLSPVLSQQRDEWLALIRLMNKQIGAVEESLAQYAKDDEAVELLRTHPGIGLLTALALRYTLEPIARFTSTRSVVGYAGLDCVEEQSSERRRMGSISKQGSRLLRFLLNEAGQTAARKDPQLKQFYRRLLRRRNKPKAKVAVARKLLVRSFIMLRDQIDYAEFVRRGVAARVARETHSPKVTDL

SEQ ID NO: 66940 - protein, 345 aa, unidentified
MFNCNILAIDLAKNLFQVCKTDKHGNVIYNKAVTRKKLKELLILEKQSLVAMESCGGTHYWARYAKQAGHHVKAINARQVKAFRQGQKTDVNDALAISVAARQPHIKASRLLSVEEQCLQSVECIRDLLVKQKVSLSNQLRALLLELGHSIAQTDAQLMKKFPEILEDGDNDFTSSFRISLNIIWKRLLDTIEEIKQVEQEQKAMVKQDRTCKRLQALEGVGPVCAILIKIALGNVNHFKNGREASACFGLTPVQHSSGGKENIGSISKITGNKKLRSALYKGALAVVSQLEKRESRTQKDIWLKSLIVRRGKKVAAIALANKTIRTAFALLKNNQDYKPQLLVV

SEQ ID NO: 66941 - protein, 387 aa, unidentified
MIYAGIDIAKNRHVACVADQRLEILVEPFAFENNIEGFRKLDSVLDSFDNETLVIGLESTAHYGETLIEHLLSKGHHLAVINPIQTATLRKTNIRNTKTDSIDSLLVVKSLVVNGWVPFTAHDADILKLRHLCRFRDKKRKSIATAKIRLTSFVDKVFPELQYFFKSGIHTNACHELLSRHPDADDIAALHLTNLYNLLRKASHGHYGKETARQLKSLANSSVGIRDAHMSIQITQTIENLRLLEKQLSQLDDSIKAIVVQLDPIILTIPGVGLINAGMILGEIGNIHRFSNPSKLLAFAGLDPTVRQSGNFTARSTRMSKKGSKLLRYALINASWNVVRNNSTFREYYNLKVSQGKGHYAALGSFAFKLVRIIYKMMKDNVTFNLD

SEQ ID NO: 66942 - protein, 340 aa, unidentified
MHITTIGLDLAKSVFQVHGVDAVGQVTIRKKLRRAEMLPFFEALPPCLIGMEACATAHHWARQLSALGHQVRLMPPSYVKAYVRRQKNDAADAEAICEAVTRPTMRFVPIKSAERQGVLVLHRTRELLVRQRTMLVNAIRGHCAEFGMIAPQGARRAPELIEDVRQADASLLPDLARSALLRLADQLDSLAAEIHALDRRLLAWHRQDQASQRLATIPGVGIITATALSATVVDPSAFRSGREFAAFLGLVPRQNSSGGKDRLGRISKKGDGYLRKLLVIGATSVIRRSRTGTLAAAPWIRSLLERRPARVVTVAMANKTARIAWAVLTRGEVYRPPVMA

SEQ ID NO: 66943 - protein, 337 aa, unidentified
MLHIGLDVHWKTTTVCILNANGKKVKTKKINGHWDKVMAFLKAEVAEPCQVVFEASCGYGVLYDQLMALRQVQRVYMAHPGQLRLIFRSKRKNDRVDAEKLAKLLYLDEVPTAYVPTLKMRQWRELIEARQHVVAKVVRTKNELRALLRMQGLVAPKGLWSRQGLAWLAAVEMPELRDLRRQILVAELAVQRDHLKKLTEVLDRIAGRSPGVALLRTIPGIGPRTAEAMAAYVGDPRRFGRVRAIGAYLGLIPSQDASAATNRLGRITREGPSTVRKLLVEASWQVIRWDPEIRKRFERLCHDRKDRRKKALVAVARHLACCMLSMLQTGEVWRGAA

SEQ ID NO: 66944 - protein, 357 aa, unidentified
MTSMTSIDDPVTGGVDTHGQTHHAAVIDSVGRHVGDREFPTTPGGYRQLAAWLRGQGELTRVGVEGTGAYGAALARHLRAEAITVVEVDRPDRKARRARGKSDPLDAYAAARAALSGTASGTPKHRDGQVEAIRALRVARRSAVKARTQAMNQLRALLLTGPAQLREQLRHLSSTMLVATCAGLRPSADLADPEQAVKTALRRLARRHRQLSEEIADADADLRVLVTTAAPELLALQGVGIDVAGQLLATAGDNPDRLASEASFAHLCGVAPIPASSGRTHRHRLNRGGDRAANNALHTVVLCRLRYDERTRTYAERRTRQGMSKTEIIRCLKRYIAREIYTALQATSTANDLAQAA

SEQ ID NO: 66945 - protein, 350 aa, unidentified
MIIGVDYHPSFQTIASLIEETGECDEQELNHSDGQAEKFYRDLKQRGICVRVGMEATGYSRWFERLLAELGFELWIGDPAEIKAKRVKKQKNDRNDARLLRRLMLENNFPQIWVPSPENRDLRQLLWHRHRLVQMRTRIMNQLQALAMNEGYRWKKKLFSEQGRAQLERLSLALWASRRRQELLELLDRMNPTIEELTAAVEQESRKRPDVIRLMTHPGVGPLTALAYVLIIGTPERFHCGKQIGTYVGMIPSEDSSAGKQRLGHISKQGNSLLRFLLVEAAQAAARSNPEWRRRYMHLAMRRNKSIAKVAMGRKLGVRLYWMWRNGCAYSPSLEFGSYVGQLGTGHGVK

SEQ ID NO: 66946 - protein, 331 aa, unidentified
MKNVTQTIGIDVSKLTLDVCIRTTAVHKQFSNDTKGFKQLISWVIKQKIDLEESLFCFEHTGWYCLMLSYFLYDNKYDYCCINPIEIKRSMGLRRGKSDKADAWEIANYAWLRRDELIPSIPPAKNLLELQRMMALRDQLVKQLTACKNLNSGMQEITVNRSKDISLGILSKSMRHLEKQIKAVEKAMDGLISQDESMVANYKLSKTVKGVGRVLAVQMLLHTHNYTRFASPRQFSAYCGLVPYPYQSGTSIHGRNKIHPISDRKMKSLLSMSAISAIQHDNELKLYYRKRVEEGKPKMVVLNIIRNKIVSRVFATVNRGTPYVEINKFLA

SEQ ID NO: 66947 - protein, 345 aa, unidentified
MKHYAGLDVSVKETAVCIVDEAGKILRELKVPSHPEDLVDVLKDPAWRLDRIGLEAGPLSQWLFSGLVEAGLPAVCIETRHTKAFLKAQVNKSDRNDARGIAQMMRVNLFRLVHVKTLTSQKRRALLTARKILQDKAVAIENDIRGLLRNFGLKVGVVGVGKFDERIRELVEGMPELVEIMEPLLTARQKLREMFTTLHRKLLSIVRDDGVCRRLMTIPSVGPVVSLAFRATIDVPARFKNSKAVGPSLGLTPVLNQSGESLRVGRVSLSGDEMMRALLYEAAQVMITRVQKWSWLKAWAVNVAKRRGLKKAIVALARRLAVIMHRIWVDGTVFRWTKEAAPATA

SEQ ID NO: 66948 - protein, 405 aa, unidentified
MVRYIGMDVHREFAQLAVVEDGLVRDEGRIGVTPEALRQWAAGLQPDDQVALEATGNSDAIACLLTPLVGKVVVSNPSKTRAIAEAKVKTDKVDARILAQLLAADFLPPVWLPDDRTRALRRQVIRRDHIVRARTRIKNQVHAILARNLAPTPPVSDLFGLAGRHWLSRRDLPADEQAAVDALLRQLDFHSAELAAVTRELAAEALQDRIVARLMTIPGVDALTAISVVAAVGDFTRFDSPGKLVSYLGLNPKVRQSGNSAAIHGHISKAGRSQVRGVLVEAAWSACRTPGPLRAFYQRIYARRGYHTAVVATARKLTVLAWHLATRDEDYAFTRPGLVARKRRKLELTAGAPRRRGTRSLPAAAYSSKQVRDQEWQASLQAERAYQVLVAHWQQKKPANIRGSA

SEQ ID NO: 66949 - protein, 438 aa, unidentified
MVNPDAAGIDISPKELQVCVPVGRDAENNRTFGVYTRDLHEISAWLKRCRISTVVMESTGVYWLPIFEVLKEDGFDVLLVNAKDAKNYSGKKTDEADAEWLMLLHSYGLLRPCYQPENLTRKIRNLVRHRDAMIKSSSREVLHIQKAMEQMNLKLDNVFSDILGKSGQAIINAILAGERDPEVLASNADLRCKKSREEIKLSLQATWDEDQLFIMKQSQELYLYYQEKIASCEREIEKYVKECTSAIKRKEGIAKEMERSGKRQSDRNKIAMDIEGYAFDLWGVNIMNIPGMSAPSTLRLVAELGENFIDKFEDARHFVSWANLVPNNKISGGKLLSSRVQKKKNPVGLIFRQCANSLYKSKEPMGDYFRHIKSRSGHMQAMVATGKKLATIFFTIISTKTEYNPDVYSNHRKAQLDRKIANLRNRLNRLENEKAACN

SEQ ID NO: 66950 - protein, 376 aa, unidentified
MSFGRILMGWTPPRRHRCAKVEVLKHRLKEASVSKVITIGLDIAKNVFHAHGADAGGAMVFSRKLTRGKLLDFFAGQPRCTVALEACGGAHHWARELQAMGHAVRLIPPAYVKPFVKRHKNDAIDAEAICEAAQRPGMRFVAVKSEEQQAAGLVFRTRDLVVRQRTQLINAIRGHLAEYGWVAPRGTAHMNLLADLLDDDEMTSTLPEAARPMFRLMVDLLAELDKRVATLDREIARRAKEGEAARRLMTIPGIGPIAATAIIALAPPIEIFRKGRDFAAWLGLAPRQHSTGGKQRLGSISKMGERTIRRLLIIGGSSMVRQACRHGAPAGSWLERMLARKPRMLISVALANKMACMVWALLTKNEDYRAPAAVAA

SEQ ID NO: 66951 - protein, 342 aa, unidentified
MTFVGCDLHTRMQQVAVLDTGTGEVSEHRLPHEGTAVEEFYAALPRPVTVGIESTGYAVWFHTLMQRLGHPLLVGDAAKIRAMVVRKTKTDRRDALHILDLLHHDRLPAIWVPDPATRDMRALLTHRMRLVRIRTMVKNGLQAIALNSRLACGSKLLRQAGVAQRQALALPPHTARRRDQSLELLAGLTTQIRELDDAITTAALGHPDAPRLITHPGVGALTALTTIVVLGPVSRFHDSKHVVSYVGLAPALHASADKYHLGRITKQGSPLLRFVLGQAAAHAARMDPDLKRTYGALVHRRGRPKAKVAVARKLLVRLFIMLRDRIDYDEFRRRGRTALAAA

SEQ ID NO: 66952 - protein, 352 aa, unidentified
MEIATVGIDLGKTVFHLVCLNAAGETVVRKKFSRAQLLRFTANLKVGLIGMEACGGSHFLGRALREQGHEVRLMPAQYVKPYVKTNKNDYIDAEAIAEAVGRPRMRFVPIKSDEQLDMQSMHRARERWVRNRTALLNQIRGLLLERGITIRKGRRHAEEALPTILEDAEANLTGMMRQLLGRLISELKQLRVQIAEIDAILAGKADDQEACQRLMAIPGIGPITATAIVSAVGNGTEFRKGRGFSAWLGLTPAEYSTGGKQKLLGISKRGNGYLRKLLVHGARAVLQFRDKQSPGLRAWLGQLVSRAHRNVVTIALANKMARMAWALLAKGETYRPPSMASNMEAAAPQLIA

SEQ ID NO: 66953 - protein, 342 aa, unidentified
MYYIGLDVHKKTISYCVKDASGRVHREGKLGATRCELDGWMRTLPQPWTVAMEATIFTGWIYDHLYPHAAQVKVAHPLMLRAIAAAKKKNDRVDASKIADCLRCDFLPECHMASTEIRDRRRTLRYRCLLVRQMVQTKNRISGLLMETGVTYNKQRLHKVGYFRELLASNEEVNESIRPLLRLSRDTIARLQKTERALVSSLQRDPLLSERIKRLRTVPGVGPITALTWALEMGEISRFRSIRQAISYCGLCGDERSSAEKSIRTPISKQRNKNIQFVLIEAAKLAPRQDHDLALLYEREKQKGNANRATLAVARKMVAYLLAVDRGQRDFVPAEDGRCDAA

SEQ ID NO: 66954 - protein, 343 aa, unidentified
MTVTMLGLDTAKSIFQVHAIDGLGKAVIRRKLRRDELPSFFERQVACTVVMEACGAAHHWARLLTGLGHDVKLIAPEAVKPFVKRGRKNDAADAAAICAAASQPDARFVPIKTLEQQGTLALHSVRTLLVKQHTMLANAIRGLAAEFGLTAPRGVAKLGELEALVDVDGALPETAQEAARELFAGCAALADSIDRFEKAIVAHARSDEMARRLATIPGVGPITASLIAATVADITAFADARRFGAWLGLVPRQYSTGGKTRLGRITKTGNSEIRRLLVLGATSMVYRAPHWNSALGAWTRAALQRRPVRLVTVALANKMARIAWALMTRKEVYRPKGYVTATA

SEQ ID NO: 66955 - protein, 392 aa, unidentified
MLYIGIDVASRKHDCCIMDGDGTILRENIIIKNNIEGFDLLLSQIRSFSCKSNLSDAKIGLEATGHYNKNITEFLRKHNLNVTVLNPLQVNLAQQADTLRKTRTDKAVAIFIAKMLFGIPLSSKKPMQNEIEELRELVRHRSRLVEMNAKFKVSVSRIISIVFPELPEAVWSIHQKSCYAMLLEYPNAQAVAESHLTKLSNILKDNSKGKYGKSKAEKIRNLARNSIGSLNLSYAFELQQTIRLIQNLQHEISLLDLRVRVIMDTLNSPIMTIPGISYRLGSVILAEIGNIHNFQNPNKLLKYAGLEPSVHESGTYKSTNEKMVKRGSKYLRWALLTATRLVSMRDHTFRVYSDKKKSEGKSFWVYSSHVARKLVRVIFHLLKNNTSFVSQS

SEQ ID NO: 66956 - protein, 332 aa, unidentified
MMAQNDCVVVGIDVAKDKVDACIRSLSQRQTFPSSAEGRRALIRWLRKHKVGKAAMEASGGYERDWAKVLREAGIEVRIVDPKRVRSFARSAGRLAKNDAIDAAMIAWFAETFTDAPGQTCDAARDKLVQIVRARQSLLDLQTSLQNRGEHAAPEVVEKMQARLLKTIAREVAELEAAIAALVKATPHLAELAEIIESVPGLGKITSAGLVAAMPELGQVSNNVAAALLGVAPYDDDSGQRRGDRHIKGGRRKVRNLFYMACLGAATRHNPVLKTFYDRLIAKGKEPKVALTACMRKLICILNTMIARRQKWDADRYKMSDPARLPPSACTA

SEQ ID NO: 66957 - protein, 348 aa, unidentified
MEFYAGLDVSLEATSVCVVNGEGKVVREGKLPSDPDAIELFLAEWGIHLKRVGLEAFSFSAWLYAALDEKGLPIVCIETRHTKAALNAMLNKTDRNDARGIAQLMRTGWFRPVHVKSREAQALRMLLAGRKALLGKVLDMENMIRGLIRPFGLKVGQVSTGKFDGRVRDLVAGLAELEQIVEPLLAARAAMRLQFARMHRLALAAARNDKAVRRMMTVPGVGAIVALTFRATVDDPGRFRKSTTVGAHFGLTPRRYQSGETDWSGRISKCGDDMTRAMLYEAAIAILTRIPKNFKLRLWGLKLLKKKGLKKAATAVARALAVLLHKIWVDGSTFRYGVGLKGGRIARA

SEQ ID NO: 66958 - protein, 450 aa, unidentified
MKSASAGAHSDVSDPKGLFVVGVDLASRSIRLCSEDPGTGEILNREVSREEFEGLIRKRGGPSMRLVMEACGSSNYWGSIAEMNGHAPVIVPARFVHGCSSGSKDDARDAECIWQMGYVPKIKSVRLRGAESRMALALLRFRESVLKGMGGLANRIRALSYELGSVSGKGAPAAVGALDKLCEETEREAPGSVMSENLAAVSSAACGLMKAITKAEQAIDERVMSLAESDGRCRLLMTIPCVGPVAAVAISAFMEDPASYRNGRQFAARCCAVPLHTGSGGKITILGIPPRGGMFIRRILFEAAMGMYNRVMRQQKDGREGKGEVPKALSEWIVSLAGRMPVKKAVSAIVNKLCRISWAVLRSGRPYDQEKSSLVPPSAMGPDGKVRNARAMRKSAARKLLQAVGKLESFLERRKGQIPAGDDTARGRGSEADDKGSEGRHGNAGKDGLK

SEQ ID NO: 66959 - protein, 422 aa, unidentified
MITNCPVIGIDVAKDFCFYAAASPNGTPFLKPFKTLNTKQGLLCALEQIKKVEETFRSKPVISLESTGHYSARIVHFFLKQGFEVFLINPLISHSIKNSLVRKVKTDSVDAFELAKLLFLQDFHPTYIPSDTFANLKILTRTRYHLASQRTTLLNQLVAAIEQIAPLFPKVLNPASLTALTLLTTFTSPAEWLKEANQQAILLLLETLPRQGKIYGKKKYEALLECARDAQVTGIDLTAHVTTVLFYANGMLFIDKQLKTLDDQIDEVAKQIPEFTLLKSIPGIGFTLASMILGEIGDINRFTNAKQLVAYCGMDPSVRQSGNYVGTKNRVTKRGSPFLRRSLYMAATTAIRKNGKGSLVNEVIYDYYQKKVQSKTRKQALGAVMNKLLRIIFSVLKSKQAFRVITPDEQVQLYQKSQTKAA

SEQ ID NO: 66960 - protein, 393 aa, unidentified
MRKPKQQMKPLNDLSRSLTPFDPNQTLIAVIELSKQSWLVAGIIPGVERQPLKKLPADENQLLQLLERWRAEAEKAGRKIDRIAVAFEAGRDGFWLARWLRTRGMETHVIHAASVAVSREHRRAKTDRLDTQQLKRAFLGWMRGERDHCKMCAIPTFAEEDTRRPHRERETLVGEHTTIINRIKASLARLGIRNFNPKLKKAPERLEQLRTPEGEPIPPNTLAELKRDIERKQLVAEQIRHIEKVRLEQLKRAPKTGPNLMVLLLVRVIGIGIETADMLVKEILSRNLRDRRAVARYAGLTGSPDESGSSCREKGLARSGNARVRRGMIQLAWRFLKFQNESALAKWFEARTKNAHTSRKKMIVALARKLLIALWHLVRNGVAPEGVVLRPTH

SEQ ID NO: 66961 - protein, 341 aa, unidentified
MEYCGIDLHAEYSQICTLDEDGEVMETSRVRTSRKALGRFFRRDRMRVVMEAGGSSPWVSRLLDSLGHEVVVCSPRRVRLIAESKLKNDRVDAEVLARLVRLDPEFLRPIQHRSEEAQLLRANLKVRSAMVEARTKWINTIRGLFRSFGYNVSGKAPHTFVERVDKMDLPDELRMVVEPLLEQLDLLTGEIDRRNQHLEEMVKDLPEVQHLREIPGVGPVVATYFVLTIDNPHRFNTSRDVASFFGLRPSMRESASMSRFGRITKEGDPEMRRLLVQAAHACLLTKADSELKGWALSLAERKGKGKAVVALARKLAVLMHHLWVTGEVYKAFPNGETTKAA

SEQ ID NO: 66962 - protein, 422 aa, unidentified
MKYALIRVLPDVPPGGVSAGIDWASADHAVCVVDMAGRVKDRFAAAHDRAGIAALITRLRGSGAAEVAIERGDGVLVDALLAAGLTVVVISPRQGKNLRSRYTSSGAKDDRFDSFVLADTLRTDRPRLRPLVPDTPATVSLRAAVRARKDLIAHRVGACNQLRAHLAMAFPGAIGLFHELDSPLSLAFLASFPGQEAAARLDEETLATWLKTIPSRGNTAPAGVLAARLAAAPLGTGDDAAQAAVTAELAAAVAGLAARIKALGAQAAARLDAHPDAHVFTSLPRAGTLRAARLLAEIGDCRARYPDPWSLASAAGVAPVTRRSGTFISHDFRWNVSRQLRDALCDFADGSRHASPWAAGICTAARDRGKDHPHAIRITARAWVLVIWRCWQDGTGYDPAKHNALQETLARQATADIPQEEQ

SEQ ID NO: 66963 - protein, 343 aa, unidentified
MSNVPVFVGLDYHQDSIQVCVLDPQGKVLLNRSAGNDCHALAQLIGPLGVVQRVGIEACCGAADLGQELVEQLGWNVSLGHPAYIAKIKSSPDKSDYSDGRLLADLTRVGYLPRVWLAPANIRELRQLVNHRQRLVDHGRALKLQVGGVLREQRVKIDKDRGSRWSKTWIASVRDNPRLSKHACWIVNDLLDDLKYTDGKILKAEQRLREASEGDAVIEKLVQQQGIGEVTAWVLRAYVGDFGRFKTAKQLSRYCGLSPCNASSGKKTADAGLIDGCNKLLRLTVVQAAHRLVRTTGRWSELADSMKARGKPACVIVGAVGNRWLRTLHHAMKPEAQTTNPRA

SEQ ID NO: 66964 - protein, 356 aa, unidentified
MNNLSKLDFTGQHIYIGMDVHKKSWSISILTDHFEHKTFSQPPDPHVLANYLKRNFPGATYHAVYEAGYCGFWIHDRLQELGIECIIVNPADVPTKDKERAGKTDRVDCRKLARSLRNGELEGIYVPSRIKVEDRHLIRTRRAMVKKQTQCKNQIKSMLTFYGIHVPDDINDRNWSKRFIDWIDHIRMERASGNFALKAHLDELLHVRRIVTDLNRNIRALSRTDEYRENVRLLKTAPGISTLSAMTLLTELYYINRFRSLDKLASYVGLIPNTESSGEKAKRKGITDRRNPALRVMLIECSWIAVRKDPALMMAFDRLSKSMASSKAIVHIARKLLNRVRYILKNQMEYVPAVVQ

SEQ ID NO: 66965 - protein, 420 aa, unidentified
MGRLKIVYPVCCGMDVHRDFLIACIAATNAQGVTEYQSRRFSTYTGSLRELRDWLLANDCKDVCMESTGKYWFPVHNILEESCHVVVSHPKFVKAIKGKKTDKKDAQWIADLFKHDLVRGSFIPPKDIRQLRDLCRYWVKLSSYMTGEKNRAQNCLTVSNFKLDDVFSNVFGKSASAITTQLLEHPGEQFDVAPFVDGRCKTPIEQIQEAVDGIFTYEQAEKLKIIRGHMDSLERHKAELESLILEIAQNYLPQIELLLTVPGIHDAFTAIRILAEIGADMTVFDTSKHLCSWAGLTPQNAESAGKKKTTRIGKSGAYLKPLLIQVALAASRGEKHPEIYGKKQALQKRRGKKKAIVAIARRLLTAIYHILSKNEPYNPAAYIQEDKNPMARQISQEKAFEMLARMGFIVSNPSPLSSSG

SEQ ID NO: 66966 - protein, 312 aa, unidentified
MQTETFVGIDVSKARLDGCVWPAQEYVTMPNDTDGIEKLVSMLREKHPTRVVLEATGGLETAFATAACAAGLPVSVVNPRQVRDFAKAVGALAKTDALDARVIARFAATIKPVPRPLRDAETAALASLVTRRRQLVLMRTQEKNRLGAATGRQRDGIKEHIRWLEAHIDKLDIDLTATLRQSEAWRVKENLLTSVPGIGPVACVTLLSLMPELGKLNRAEIAALGGVAPFNRDSGKYRGQRRIFGGRAEVRAVLYMATLAAIRFNETIRVFHAQLIARGKPTKVAIVACMRKLLTILNVMLKTNQPWNPNIA

SEQ ID NO: 66967 - protein, 346 aa, unidentified
MMVIGIDAHKRSHTAVTVDEMGRQGFVKTVGTTTQDQLRLLKWAVGLAEERLWAIEDCRHLTRRLERDLIAAGESVVRVSPKLMAHVRDSARSYGKSDPIDALAVARAALREPNLPTARLDGIERELRLLVDHREDLVAERTRIISRLRWHLHELDPRWTPPTKLQRGSAFDRVQAYLSGHNDGSTMVRRLALRLVEHLRLLTDEIDELTAEITVRVTRIAPSLLAIVGCGALSAAKIIGETAHAGRFRSKDAFARHNGTAPLPVWSSNKQRHRLSRTGNRQLNAALHRIALTQARCYPPARELLERRTNSGDGGMEALRILKRRLSDVVYRAMLADQTDPAPVAA

SEQ ID NO: 66968 - protein, 325 aa, unidentified
MEQRKTTTPGMTGTVAGVDVCKAHLDVALHAAPDEARFANNEDGRNELIAWLKAREVGRVGLEATGGYEKALFALLELSGFEAIRHQPLEVRLFARLKRKRAKTDRLDARIIAAATAQADSLKAAGDARLADLSERLTAYEQAADILAQMRTYREHTRLADLRAGLEETIRLLAARKKALLADLLARIRAEGDLLRRFNLLVSMPGVGKTIAAVLLIRMPELGAMEHGQPASLLGVAPFNRDSGKTVGAAFIQGGRERPRRFLYLAAVTAWRCNRDLKAFGDGLMKRGKPFKVAIVAIMRKLVEAANLVLKRGSPWLPQKPNPAS

SEQ ID NO: 66969 - protein, 341 aa, unidentified
MQTVTTIGLDIAKSVFQVHGVDADGQVVIRRQLKRRYVLAFFEKLAPCLIGIEACASSHHWSRQLRALGHTVRLMPPAYVKPYVKRQKNDATDAEAICEAVGRANMRFVPTKTPEQQSGLVLHRTRHLFIRQQTSVINAIRAHCAEFGIVAPVGRRGVEELLNAIANEKRVPEIARACLLALGAQLRTIKEKIVEFDRMIRAWHRSCETSRRLDEIPGVGPALATALVASVADPRTFRSGRDFSAWIGLVPKQNSSGGKLKLGSISKQGDRYLRGLFTAGALAVIRYAKIHGTGHRPWLTALLARRPTKVAAIALANKIARMAWAMMARGECYREPVALAA

SEQ ID NO: 66970 - protein, 318 aa, unidentified
MSTDIVIGIDISGKFLDIHILPEGIAKRFANDVLGIGEVVELAKEAEASLVVMESTGGLEVALAAECALELPTVVMNPRQIRDFARSMGKLAKTDTIDAEVIARFGAAVRPEPRALADEQASRLKALVARRRQVVEMIVSERNRLMRARRLVRERIVRHIEFLKQELSDIDGDIETAIKESPLWREKVERLRGVPGIGTVSCVTLVSELPELGKLNARQISALVGVAPMNRDSGAYRGRRSIWGGRAGVRRTLYMAAPSARRHNPVIREFYERLAAAGKPGKVALVACMRKLLTILNAMLRDAAFWDPQRGLALHSQV

SEQ ID NO: 66971 - protein, 487 aa, unidentified
MSRRKLSTFERLSQGKMSRKQRKELVRRLYAEDPGLEVVHRNVAGIDVGNESHFVAVAPGCDPQPVREFGSWTADLHRMGEWLKACGVKMVVMQSTGVYWIAVYEVLEKAGFEVWLVNARDTKNLPGRKSDVQESQWLLKLQTYGLLRNSFRPREEIRRVRTVWRLRERHVREAGRAIQHMQKALTTMNIQLANTLSDISGASGQAIIRAILKGERDPYQLALLRDYRVRASEEEIARSLEGNWQEEVLFELQQAVDAYDFCQQQMGACDLRLQKYLSALHSRPQAQQPATMVVSSATVQTAAKAAKKNRAKKKPRKNQPHFDFEAELNRICGVDLRTIDGIDVMTILTWVSELGTDMAPWPSEDHLVSWMKLCPRRQVSGGKLIKHERNPVKNRVAEALRMAASTLAHSDSYLGARFRSLRSRLGPGKAIKAMAAYLARLIYRMLTRGQAWVDRGAQQYETKRQTRETHSLQRRAAAMGFRLVPVA

SEQ ID NO: 66972 - protein, 295 aa, unidentified
MIIGCDYHPGFQQIAWLDTETGELRERRLAHREEAERFYRDLGAHRVSVRVGMEASGQARWFERLISELRFELWIGDAAEIRTKRVRKQKTDRQDAQLILRLLLEDRFPRIWVPSGENRDLRQLLWHRHRMVQARTRIMNQLQAVALNEGLRCKKRLWREAGREQLESFRLAPWASRRRRDLLELLDRLTPTIAELTQAVEREAENCPEAQRLRTHPGVGALTALAFVLIIGRAERFQCGKQIASYLGLVPLEDSSGQRRRLGHITKQGNSLLRFLLVEAAQVTVRSDPESSIEQ

SEQ ID NO: 66973 - protein, 409 aa, unidentified
MDVVSMRCAGLDVHQATVVATVRIPDGQGGRRSVTETFGTMTPDLLALRDWLQAYGVTKVAIESTGVYWKPVYYVLEEAFSLLLVDMHALKRVPGRKTDVIDSEWLAQLLECGLLKASFVPPPAIRELRDLTRYRVQQVRDRSQEVNRLCKVLEDAGLKLSTVASDIMGASGRAMLTALVHGTTDPTVLAELARGRLRKKLPELRRALQGRFRPHHAFLIEQIFAKIDFLDETLDRLTAEIDRRLVPFEPMLAALDTIPGVNRIGAISIVAETGGDMSRFPTAGHLCSWAAMCPGNNESAGKRRSGKTRKGNRYLRETLIQAALGASHKNGSALQARYHRVKRHRGHKKAVVAVGHQILEISFFLMRDGVTYNELGADYFDRRHAERAVRRHIKQLEALGFRVTIEKAA

SEQ ID NO: 66974 - protein, 390 aa, unidentified
MRKPKQRKPNDLSRSLAALDVDHTLIAVVEMSLSSWLVAGIVPGVERQPLKKLKTDACALLELLHRWRAEALRVGHKITRVAVAFEAGRDGFWLARWLKAHGIEAHVIHASSIAVSREHRRAKTDRLDTDLLKRSFLGWLRGERDHCKTVAIPTLEEEDAKRPNRERESLVGEQSRLVNRMKATLVRLGIRGFNPKLKRAAADLEALRTPEGSPIPPNTLAELKRDMERRRFICDQIRKIEQARIERLEQAPNTGPTAMVRLLARVIGIGVETADLLVHEVLLRNMRDRRAVARYAGLTGSPDKSGTLSREKGIARSGNARVRRGMVQLAWRFLLFQKQSALAQWYRQRTENAPKARKTMIVALARKLLIALWRLVREGVVPEGVAMRSA

SEQ ID NO: 66975 - protein, 408 aa, unidentified
MNPLFVGIDVSSKNNVAYLMKPDGSKHSSFSVQNNLGGAKLLSEKIVSALHSMQLNDVVIGLEATSIYGDSLVYALREDGGLGRFQRKIHVLNPKQVRKFKEAYPDLPKNDWVDAFVIADHLRFGRIAKEVYMDDYRYQALRTLTRARFDIIQNLTREKQRFANYLFLKCSGIAQDKDIQNTSATTIALMEHFETVDDLANADLDELTAFISEAGRGRFVDPDATAKAVQAAARGAYRLPKTVNDTVNQAMSVSIASMRALKEQVKVLDKAIEQQFEIIPNTLTSIPGIGKVYSAGIIAEIGDIHRFNAQASVAKFAGLVWHRNQSGNFEAEHSQMIKSGNRYLRYYLLEAANSVRRCDSEFRRYYDLKLKEVNKYQHKRALALTARKLVRLVFRLLKDNRLYIPPEG

SEQ ID NO: 66976 - protein, 374 aa, unidentified
MYEFSKYVGLDTHKDTIAVAVSDACGGKARYFGEIANTPEAITKLAKKLSPDGEVISFCYEAGPCGYGIYRQISKMGHDCSVVAPSLIPSKPGDRVKTDRRDSESLSRFHRAGELTAVWVPDQEQEAIRDLTRAREDMKAMERQARQRLNAFLLRHGKVYESGKSKWTQAHFRWLERVKFEVPVQQIVFEEYIGAIKQSQQRVSGMEDEMLKAMEGWSLAPVVEALMALRGIKLITAMTVMAELGDITRFDSPPQLMAYLGLVPSEYSSGKSKRRGGITKTGNGHVRRVLTESAWCYRFQARRTAHLQRRAEKTSDEVQAIAWKAQKRLCGRYQHLLDRGKLKVQVCTAIARELVGFIWAIACEVMGRQGVIAR

SEQ ID NO: 66977 - protein, 316 aa, unidentified
MDHKHAVYGVDVSKATLAIAHYEVETVVEIANAPEPVAAWLAHVPAGAAVAMEATGSYHRMFAQLAHAAGLQVYVLNPHVLKHYAQAIGQRGKTDGCDARMIARYAVHEGAKLRAWRPPAAAADTLSRLLVRRRVLVGARQTLAQSLASMPALKAARQTLLASFKRMIASLDLLINRELVRVPEMAALHRRLMSIVGIGEVVAAQLVAALHSLCFTRAAAFIAYTGLDPRPDDSGQHRGRRHLSKRGPALLRCMLYNAGMSAANSKLFKPIYLALRARGLQSTEAIVILARKLARIAFAIYKSGETFDPQKHFKTS

SEQ ID NO: 66978 - protein, 328 aa, unidentified
MFYLGIDISKAKLDCCLLLTPERKRSKTVFNSTAGFAQLVAWLKHHLPDAAPCDIHAVMEGTGVYHQGAATALHDAGLLVSVANPAQARDFAKAMGLRTKTDAVDSFALAQYGLRVQPSAWRPPAPHARVLQALLARHTAVQEDVQRERNRLEKTLVAGGVDAVRASLEKSLVFLQQQLADIEREINSHIDKHPDLKESSALLQSIPAVGPAVSRQMLECLHSKAFRSAEQLAAYLGLVPVERQSGTSLLGRARLSKAGPAKVRSVLYMAAIVATRHNPHVKAQYEALLKRGKCKMAALGAAMRKLVHLCFGVWKSRQPYNPKFAQNT

SEQ ID NO: 66979 - protein, 454 aa, unidentified
MAKKATTEKTTAGKKLKVVNPNAAGIDIAASEMQVCVPEDRDGECNRTFGCFTRDLIQIADWLKACRIDTVAMESTGVYWLPLYFILKEREFDVVLVNARDVKNYSGRKTDEADAEWLMMLHSYGLLKCSFQPENEARAIRNLTRHRTNLLRSSSREALHMQKAMEQMNLKLGNVISDLLGKSGMAIIGAIIGGNHNPAELAVLAEDNCKASKEEIAKSLEGSWSEDHLFELGQAYDLYNFIQKQIRACDRQIEIHLTRYRAQLDPPADDDLPRSKKKIGKKNAVDFDVEKYAFDIWKVNAMAIPGMSAISLLQLIGELGHNFVEKFETSHSFCSWLNLVPNNKVSGGKLLSSKVPKRTNTCGQVFRLCANTLKRNKTTLGYYFRRIQSRCGYSQAIVATAHKIAKIFYTMIKNHTEYDESKTGINERELLERKITMTQRRLDKLNRQLEVALA

SEQ ID NO: 66980 - protein, 466 aa, unidentified
MENNYILYVVMDASKGKADAAILKVSDRRSVKPKFLRKKLSFKFVKSEVSSFLETVRSYSDDNCTSICFALEVTGIYSTNVYNFIKANLNDNESIRFLNTDFVNQWRKAHNIAKSDPLDAQTISTIIGTDSDVQYVNDNVFENKNGYQDLKALVHRHYQIKKIYSQEINRLIAQCDCLFPELQYVFEPKSAAFIAVLSSYPTTHDIINASKFEVFSVVYEATKHRCSMDKIDKLFDLCWDTLVPDDISSYGRNIILDLVENIKNIKGQLKTIQRYIEDVVSLNPAYKLLLTMTGCGPITAATVIAETGDISRFKNADCFVSYSGASPRNKRSGTSVETMGKISKKGSRYLRHAIYMIAEFARRHNPVLKHQFERIKNGNKKRHKLANIAIANKIARYIYSIMKNKSSFVILHEHIMRLPEETRDTFFNSISLDFPKNTRKQIYQYSDINGEVHKFVYIKSEDTMIV

SEQ ID NO: 66981 - protein, 368 aa, unidentified
MLFNAFTIPNNADGFHDLFQKISSLTNDFSNVKVGLEATGHYNYNLLGFLIDKGLPTFVINPLHTNLFRKSLSLRQTKTDKVDAHTIALMMMSGVNLQSYSNTSYHNEELKSLTRYRFDKVQERAKLKTSISRLVNILFPELEKLVPSLHMVSIYALLAEFPSSAQIASCHLTRLTNLLANASKGHYNKEKAIEIRNAAKHSIGSNMPAKSLELKHTIRLIQELTSEIDEIECSIKSIMDEIRSPILSIPGINYRMGAMIIAEIGDFNRFSSPDKILAYAGLSPSTYQSGQLDGCYSHMEKRGSRYLRYALFNATKFVCIWDNQFSAYLAKKRSEGKHYNVAISHAAKKLVRVIYQLEKSGQLYHRAA

SEQ ID NO: 66982 - protein, 350 aa, unidentified
MLIIGCDYHPSCQQTAFVDTESGEFGERRLVHPEEAQQFYGELQQRNIAVRVGMESSGHSRWFERLLHQLGFELWIGDPAAIRTKRVRKQKTDRQDAQLLLRLLMEDRFPRIWVADAENRDLRQLLWHRHRLVQMRTRVMNQLHVVALNEGLQRKKALWRPAGRKELESLVLAPWASRRRQDLLELLDHLTPQIQKLTQALENEVENRAVARRLMTHAGVGPLTALAFELVIGTPNRFHCGKQIASYVGLVPTEASSGDRRRLGHISKQGNALLRFLLVEAAQVTVRSLPEWRSRFFHLAMRRGRKIAKVAMARKLAVHLYWMWRQGCDYGQMQKLGSHAGVPGNRDGAQ

SEQ ID NO: 66983 - protein, 367 aa, unidentified
MDGKRVIGVDIGKRWLDVAREDAAKVERHVNEAAAIAALMGTLDPTCDIVVFERCGGYERELEAALAAANVPWAVVHSARVKAFRQVQGIKAKTDAIDARLLRAFGRDHLNGGKLRLGRSEDVVLDALMARHRQLKAALHAEHCRREIAAIAPVRASIERVIARLEAELVAIAAELSAHEANDPQLAFKEAVMCERMGVAQATARALLAELPELGRLDRREIATLGGLAPRVHRSGRRQLRRGLVPGRTCVKVILFNPARTAMRWDPEIKAFCDRLRGRGKPGKVILVVVMRKLLVRLNAAVRDAQARRCADMGRSCGSLIHQSRWPIAASGAGGHGRHSRRAAVPLTAEHDAAQSRPDRWIDKATR

SEQ ID NO: 66984 - protein, 366 aa, unidentified
MKKVRLIEVAKQEASGRAERPAPGSVVSMAIDVSRSKMVYCVRWNGAEQRRLSTPAELCHLQGVVRQYQDCQLQVAYEACGFGYEAAWWLQEQQVAVTVIAPSRVERVPGLGVKTDRVDAGKLARKLEKGELKGIYIPPRTVHADRQLGRTYTQCVRERQRAQIRIRSLLQEHGRIGPEPTVGWRAYQTWLAAQDLPAPLRACVHTHEQLRTLADQQARYLRHELMQVAGRAQYRAVVDALCAQAGVGTFSAIRLVLELGTVERFSTGPALAHYLGLTPSQYSSGELDHRGRILKCGPAALRALLLQCAWAAVRPGRDSALRAKFERLAPRRGRKRAIVAIARQLAVQLHRRWAAVSHPSHCAPAS

SEQ ID NO: 66985 - protein, 342 aa, unidentified
MAIAVVGLDLAKHVFQVHAVDETGRAVLRRQLRRAGVEAFFKILPPCIVGIEACASAHYWARRITALGHEVRLIAPAKVKPYVQRGKKNDANDAAAIVEAVMRPHMVFVPIKNEEQQAVLMLHRTRDLLVRQRTMLVNAIRAHLAEFGIVAAQGRRKVKELIAGLDNTEMPELARIALWQIADQIDECDKRIDALERRILAWHKSDESSCNLATIPGIGPITASAMAATVPSPSAFRNGRQLAAWLGLVPRQNSSGGKDRLSGITKTGNTYIRRLLVIGATSVIRFARSKAPGTAEWLKKLLQRKSARLASVALANKMARIAWSVLTRGEVYRDIHPVPKPT

SEQ ID NO: 66986 - protein, 355 aa, unidentified
MTALAEKVDGVIGVDTHRDTLSAAAVTAVGGLLGQLAVGADAVGYQRLVDFARVHVPGRRCFAVEGAGSYGAGLARLLAERGEWVVEIDRPRRPARRGGKTDALDAIRAAREALSQERPAVPRRRGDREALRVLLATRQGAVTARTCAINQLKALIVGAPEELWAELRGRSTSGQVAYCAALRDRPARSLEHRMTAKALRSTARRIRILAAEAAELQGEIGRLVQAVAPWLLELPGMGPISGGQVLVSWSHVGRLRSEGAFAAVAGASPIPASSGQVIRHRLNRGGDRQLNRALHTVALVRLRDDPETRVYAARRRAEGKSPREIRRCVKRAVARQLFKLLQRLDHAGVEVVQVA

SEQ ID NO: 66987 - protein, 340 aa, unidentified
MKLYGAIDLHSSNNVTVVIDQQDRVVYQKRLPNDLVLILKELSVYQSEIEGIVVESTYNWYWLVDGLMEQNYRVHLANTAAIQQYEGLKYTDDHSDARWLAHLLRLEVLPEGHIYPRAERPVRDLLRKRGQMVRQRTTNLLSIQNLLTRNTGSSISANRVKALDGQQVDELLADGDLALAVKANLSVMSSAGEQVELIEKTVSQRVKLRSQFSFLKTVPGIGEILALTIMLETGDIKRFASVGNFASYCRCVGSQKVSNGKKKGQGNTKNGNKYLAWAFIEAAHFAVRYNSKIKSFYERKKAKTKIVVALKAVAHKLCWACYYIMRDRVAFDLSKAFGPK

SEQ ID NO: 66988 - protein, 337 aa, unidentified
MIVIGVDVHKQSLTAIAVDEAGRALAESTAPTACELLAWASSLPGERSWAVEDCRQLTRALERALLEAGESLVRVPPKLMAPQRRAGRARGKSDPIDALAVARAALREPRLDHPRPGEQRLRELKLLVDHRDDLIDERRRAQQRLRWHLHELELEPAVPLGALDRGVWLDRLGRRLAGLEQSAQVRIARELVGRCRGLTRTILALERELRTAAAQTAPALLALPGCGAVSAAKLLGEIGPIERFETDAQLARHAGVAPLEASSGKHRRHRLDRGGNRQLNCALHRIAITQARVHAPARAYLERKQGEGKSRREALRCLKRQLARTVYTTLKSEALLT

SEQ ID NO: 66989 - protein, 433 aa, unidentified
MKKIRKHVAGIDIGAKKLFAGVENEPVKNFDTFTEDMEALGDYLLSHNIETVAMEATGVYWVILYDILIAKGLDVWLVDGRSTKQVPGRKTDVKDCQWIQQLHSYGLLNRCFIPDSLVQELRTYQRLREDHIRSSAMHINHMQKALVLMNIRLKEVISQIQGASGMRIIRAILSGERDAEKLALLCDSRILKTKKELVVKSLNGHYSAPSLFSLEQAVKCYDFYREQIANCDIRLEQVLKNMHKDKPEQSKPNKARKPIRHHKPNIEDMGLYLINIFDGKDATVLPGITDYSWVQLLSEVGTDLTKWESEKHFTSWLGLAPKQHNSGKRNRNYKAKGTPKAGLIFKQAAVSLLNSKHIALGAFGRKIRARKGALVAIKAVARKLAELYWKLFVKGLDYVENGIKKYQEKMLLDKQRSVKRMARELGLELILTE

SEQ ID NO: 66990 - protein, 350 aa, unidentified
MTSTKYIGMDVHKESISIAVMNVSGKIGMECVIETKASMILQFFDGLRGDLQVTFEEGTSAAWLYDLLKPHVTKLVVCDPRKNASMREGHQSDKIDARRLAELLRLNHLSPVYHGEHGLRSLKELVRSYLTITKDLVRVMTRVKAIYRSWAIPCTGKQVYAPRHRAEWLGKITEPGVRRRAEFYYQQLDALRTVRQQVRRDLFAESQKHQAWKRLCQIPSIGPIRAAVLLGILQTPHRFRTKRQLWTYSGFGIETQSSADHRNVDGQLERAKKQSSIRGLNRNCNHDLKNLFKGAAIVASSKPGPFQEFYTALLTKGIRPEMARLTLARKIATIVLIVWKSMPTPRLCRL

SEQ ID NO: 66991 - protein, 424 aa, unidentified
MKNSAARKLKQVPEGYLVIGVDPHKKRHAAVAITQDFTTQAKFKFDNSREGFKMALERTRLEMTKSGSRGVIFAIETGGHYWRNLAYCLDERGIPFRFINQFTLKRRREGKDLNRRKNDYRDSEVAAQLLCTGEFTETQLQHGVYAELRAAYNAYRRLVKERTRITNLIKGLLDGLFPEFTHVFKDPCGLTALSVLSICPIPGVIAGMTEEEFTNTIRANHQGRLMRKKLCALRYAAATSVGMKAGAQSVSTELSFLVEKLQLIGRHIRSIDGTLMRLVDETEEGKYLLSIIGLNYIAVAGLLAELGSFRSYRNAKQLIKMAGSNPTESESGGKRGGHTPMSKQGRPVLRYCAWTAVIPMLRFNPDFRAWAKEKRERPVHNNPLSGREVVGAALNRLLRLAFTLVKKQTFYQSPRWVQVTSYRR

SEQ ID NO: 66992 - protein, 341 aa, unidentified
MKTFIRIGVDLAKNFFQVHGIEHEGGLALTRKLTRAKFREFCSRLAPCSIGMEACGSSHYWVRELRAMGHDVVLIAPAYTKPYVKRGKNDAADVAAICEAMSRPEMRFVPIKSADQQAVLMLHKTRDLLVKQRTMSVNALRGHLQEFGLIAAKGIHRVKELVALALADESLPEEAKQAAILLAAHGDELDEKIDALERKIARASAKNPTSRLLDEVPAIGPLIASAMTASFPDPSAFKSGSDFSASLGLTPSQHSSGGKEKLGGITKKGNRYLRKMLVVGCTSVLRVAHKYKGALADWIAAMKAKKSERVVAVALANKLARICWAIMSTGESFRTELYTRA

SEQ ID NO: 66993 - protein, 408 aa, unidentified
MRIIGLDVHRTFAEVAIREHGRVRPAGRISTTTAGLQLFARSLTHRDEVVLEATCNTHAIARLLRAHAGRVVVSNPLRTRAIAEAKIKTDKIDAAVLTQLHASGFLPEVWMPDATTEALRRQVSRRAQIVRHRTRLKNQIHAILHRNLLPRCPASDLFGRKGRAWLTTQSLPADERAAVTSLLRALDHADEDLTELDRDLASSILEDAGVRRLMTIPGVDFAVAVGLVAAIGDVTRFRSPQKLVSYFGLNPRVRQSGLQPAHHGRITKQGRAHARGMLVEAAWVAAKTPGPLRAFFVRVRGRRGHQIAAVATARKLAVLTWHLLTKQQDYAWARPSLTEQKRRALELRAGQPAERGRRGRAHAYNLTTLRTRERAIGEQAERAYQTLVTHWRPQRSKRGTGATKAARR

SEQ ID NO: 66994 - protein, 350 aa, unidentified
MLIIGCDYHPSFQQIAFVDTDTGELEERRLEHREEADKFYRELAVQAKKVRVGMEASGQARWFERLLAELNIELWVGDATEIARKRERKQKTDRQDAQHILRLMLKDDFPQIWVPSWENRDLRQLLWHRHRMVQARTRIMNQLQAVALNEGVRCNKRLWREQGREQLESFRLAPWASRRGHDLLELLDRLNPTIGALSQAIEQEVEKCPEAQRLRTHPGVGPLTALAFVLIIGKPDRFQCGKQIASYLGLVPLEDSSGNRRRLGHITKQGNSLLRFLLVEAAQVTVRSLPEWRSKYVHLTMRRGRKIAKVAMARKLAVRLYWMMRKEWGYEQLKKFGSHAGQPGNRDGVK

SEQ ID NO: 66995 - protein, 328 aa, unidentified
MNNEKLCCGIDVSQNTLDVAYQNNLGEIFHIKVGNNNKGFETILEHTGTFYHFVMEATGVYYVRLAFFLHGKNCTISVVNALKIKRYIQMQLEKNKTDKKDAQWICRYAIDQRPVLWEMPDSTYFESKQMYNTIRQYSEEIKRFNNQLHSLRILPVQNKETIKSLEKMKLQFEKEIKILEVKLEVLLMKWKPEQVKNISSIKAIGRRATAMLIIYTQGFRYTENHRQLISFAGLSPKEYGSGTSIKGRPKISRKGGKPIRDVLYMCAMNAIKTNTACKALYRRLRENGKSGKLALIAVCNKLLKQVFAVVKNNTLYQPNYCSARPISN

SEQ ID NO: 66996 - protein, 385 aa, unidentified
MMKLDRTDAPATDEYATVYVAFELSKAKWKLGVLLPGRGKLSRYTIDGGDLAALSSRLADARAKAGRCGKPVRILSCYEAGFDGHWLHRWLSQQGVINHEIDPSSIEVSRRARRAKTDRIDLEKMMRALLAHLRGEPRALSVVHVPTEEEEDRKRRTRERERLLKERTAHTNRIKGLLHAQGVRDAMPMKRGFIAGLATLRTGDGRALAPRLKEEIVREHERLCLVNKQLRELEAKSVAEVRRAAPGSAEAKIVQLIDLRGIGLASSQQLVNEVFYRSFANRRQVGSCFGLTGTPYDSGESQRDQGISKAGNRRARALAIELAWLWVRHQPNSDLTRWFCARVGELKGRIRRINIVALARKLMVALWRYLTTGVVPAGAVLRPGV

SEQ ID NO: 66997 - protein, 344 aa, unidentified
MKISTLSIDLAKNVFQVAGFNSNHKRECNKRLNRAKLNAFLANTPPCRVVMEACYSSHYWGRVFSSYGHTVDLIPAQHVTPFVRGNKNDSNDALAIYEASLRPHIKFVPIKTEAQQEILMFHKIRERLLQNRIAATNQLRGLLVDFGYVFPVGIKAFEQGIIALESDSELRPQLRIMVSDIYTEYKTLVKRIKAIEAMLTAHVERDTNAKILHSIPGVGVLNASAYAASIGNGQAFKSAKELGVWLGLTPKQYASGDKSKMSGITKRGNSYLRKQLIHGARALIARSHHKTDALSQWINQLREKKHFNCLVVATAHRLARLMWVLLTKQALYSPQYVQNTRKDA

SEQ ID NO: 66998 - protein, 355 aa, unidentified
MHEITRVGVDLAKHVIQVHGVDRAGQRVVGRALARDKFMAWCAQLPAGCMVVMEASSSAHHWARKLVALGLDARIIAAHLVAPYRMQGKHGKNDANDAAAICEAASRPQMHFVPIKSLEQQSMLCIHRLREGFKKERIACTNRIRGLLGEFGIVLAQKPEILQHALPDVIEDASNELPTLARLALQRAWEQWQELEAHLAWCDARIAAHLKTNAQVRQAEQLIGVGPIGASALIATVGDFKQFKNGAQFGAWMGLTPRQNSSGGQNKLGGITKHGDTYLRTLLIQGAKAAVFTAHRRDDPISQWVCRLREKTGWQKTTVALANKNARILWAVFVHGKPFDAHHVSVRPEMAGANA

SEQ ID NO: 66999 - protein, 348 aa, unidentified
MQIAVLGIDLGKNSCSAVGLDKAGRVVLLRRLSRHSLIKLATQMPSCVMAMEACCGAHHLGRVLRAHGHHVRLMPPEYVQPYVKAQKNDERDAEAIAEAATRPTMRFVDLKSEDQFDMQTLHRARSRLVSERTALVNQLRAVLLERGITVAQGRRRLARYLTQALDADDTEGTQLSSRIRVLIEDMRAQWHDLDQRIAAFDIEFAAAARSEESARRLSTIPGIGAINATALVAAVGDARRFARARDLSAWLGLVPRQATTGGRPRLLGITKRGNKYLRTLLIHGARAALPLLLTVESPLGNWLRGLSARAHRNTVIVALASKLARIAWAVLRSSTTYNAATGSRLVGA

SEQ ID NO: 67000 - protein, 387 aa, unidentified
MRTVYETCIGIDAGKTAHRACAVDSSGEVLFNAPVANAERDIDAMLARAPGRTLVVVDQRRNIGMLAIRRARAAGLDVAYLPGIAMSRAASLFPGDAKTDERDAMVIAMTAMGVPGSLRPVPEEDPRAEKLRRLAAQRSDLLACRTHQKNRMRALLLESNPAFEAAVDLGCPWMLALLSEFGGPWNLADAGRRRFLSWCRRTLRVDMARAEAVWSSTKEATRVTEGQVEAEGYLVRSIAARIAADGAEIERASAMIEAGLKGDAVYDALLTIPGVGPKTAAQLVLTVDISDFRGHDELASYAGLAPRNRQSGTSLSSVAASREGNKALKNLLVYSCMSLIGSDGYYGRYYDACRSRGMRHKQALKAVARKRLKVIYAVMRDSRPYTA

SEQ ID NO: 67001 - protein, 318 aa, unidentified
MSKIAEHSHFVGVDVSKDWLDACLLPGRCTFRVPNTTRGVWSLVGRLAECEDALVVMEATGGFEARALELIAAAGLDVAMVNPRQVRAFARALGILAKTDRIDALAIARYAEAVEPTPRAVAHKDLSEIRALMTRRQQLSDMLTQERGRRCRVTSPLVRRRILVSLRGLKKEIEFIDGAIDKLVAETAKWREKEEQLRSVPGVGKIVSRTLIAFVPELGALTRRQIASLIGVAPFSRDSGTLRGRRRIWGGRANVRAVLYMAALVASKRNRVIAAFYGQLLARGKQRKLALVAAMRKLLTILNAMSRAQTTWEEPNRA

SEQ ID NO: 67002 - protein, 334 aa, unidentified
MNYSHFIGFDISKLTLDVSVLDQKGTQVFYAQIKNTRSDLAKLDKELTKKSIRIQTSLLCGEHTGVYGNHLRNWSEQRGFTLWLEQPLQIKRSQGIQRGKNDKIDAYRIAMYGFKNKTSYKPTIKQRDNVLLLKELLSHRRRLMKAKMQISQLLTERSFYEKEVLKAVKANMTHSLKGINLDLKETEKAIRKLLQEDAEFKRLYTIMNSVDGIGLISAAIILVASNEFKSIKDGKQFSCYAGFVPFEYNSGTSVRSKPRVSQMANKKVKTVLHMAAMSVIKIPGDLREYYLRKVGEGKNKMSVINAVRNKLILRVFACVKENRLFEKKFEYSLV

SEQ ID NO: 67003 - protein, 400 aa, unidentified
MNEHDEIGVFLGLDVGKSAHHGHGLTPAGKKVFDKQLPNAEPKLRQVFNKLREKFGTVLVVVDQPASIGALPLTVARDTGCQIAYLPGLSMRRIADLYPGEAKTDAKDAAVIADAARTMPHTLRSLELTDEITAELTVLVGFDQDLAAEATRTSNRIRGLLTQFHPSLERVLGPRLDHQAVTWLLERYGSPASLRKAGRRRLVEVIRPKAPRMAKRLIDDVFDALDEQTVVVPGTGTLDVVIPSLARSLGAVHEQRRAAEAQITALLEDHPLSKVLTSLPGVGVRTAAALLVTVGDGTSFPTAAHLASYAGLAPTTKSSGTSIHGEHAPRGGNRQLKRAMFLSAFAALHDPASRTYYDKCRARGKTHTQALLRLARQRINVLFAMLRDGTFYEPRTPRLA

SEQ ID NO: 67004 - protein, 346 aa, unidentified
MDHVGIDLHKRDSQICWLTEAGEIREARIRTTRARFEAVFESQAPVQILVEASTESEWVAQCLEGLGHRVIVADPGYAPMYPRRGRRQKNDRRDALALARANRAGTYRAIHRVSAAQRGIRELLTVRDQLVGARTGLIAVVRSLVRGHGQRVASSSAGKVVGHVEALALPEPLATTVAPLLRVLTTLTTEIEASEDRLVTLTAADARVARLRSVPVVGPITAAAFVATVDEASRFADAGQVTAYLGLVPRDRSSGEGRRSGRITKAGPSRMRWLLVQAAWRLLRTTAPAAQPLRRWGEAVRARRGAGIAVVALARRLARILFALLRDGTTFAADHEARRRQARVAA

SEQ ID NO: 67005 - protein, 466 aa, unidentified
MFPLERFVYLSDSWPGTAKRTNTNTTMTTPTLPVLDPTAAAIDIGSEELHVSIAGGPPKVFGTTTGQLHACRDWLKENGVRSVAMEATGIYWLCPYAVLEEAGLEVVVVNGKYVKNLPGRKTDMKDCQWQSTLQAHGLLQPGFVPPEHIRRLQDYLRLRADHVVLAGSHEQHMQKALERMNLKIHDVISDLTGMSGLNMVAAILKGERRAGELVALCDAQIQKKKGVALRAALEGNWRKEHLFALRQAYEGWQFYQKQIAECDQQIGEILKEIAGPEDPQAPPPPAAPKRGGVNTPQIAQLHSLLYRLCGSKDPTGLPGVADHVLLQLIGELGTDLQKPWKTEKQFTAYLGLAPGSRQSGKRRGSQKRSRNRAGRLFCVIARSVGRSVDKALGGFYRRLKGRRGGLVANIALARKLAEMYWRLMVHGRAYVEEGLKKYEAKVAKTEQWLLQKLARKYNLQLHPMPT

SEQ ID NO: 67006 - protein, 405 aa, unidentified
MQNVYRRCCGIDVHKKLIVACFRNGNKAELRKFDTLTSSIKELGNWLLDNKCQMVAMESTGAYWKPIYNILELLNIDVMVVNAHHMKNVPGRKTDVKDAEWIADLLQHGLLKASYIPDREQRELREIVRYRKNLVEERSREINRLEKTLEGANIKLSSFVSNLTGVSSRNILQLALTGEVNEENIESLMHPSMKATKEQLLKAMDGVLSPVQKKLVRAILDHIDDMTRRIQDLDEIIDDQIRDNENLIKNIDALPGIGKRSAEVILAEIGTDMNRFPSAAHLASWSGLCPGNNESAGKRKSGKTTKGNKYLKSTLIQCAKSAIKNKDSFFHAQYQRLVVRRGANRATVAVAHSMLIAIYHILKDGVPFKDLSSDYYTKFNTEAKARYYMKRLRELGVSVPVSLTA

SEQ ID NO: 67007 - protein, 430 aa, unidentified
MKSNTQNAKIEAITEKTLVLGIDVGSEMHYARAFDYRGIEYSKKPFKFSNTEAGFVTFKEWILDLKERHEKDKVVPGMEPTGHYWFNLGKFLQDNEMKPVLVNPHHVKKSKELDDNNPTKNDRKDPKVIAGLVREGRYMIPYLPDGVYADLRTASNIRFQLQAELTRIQNRISRWFNIYFPEYKTVYGKSDAKSGMLILKTAPLPEDILTLGIDGVNQIWRDAKLRAVGKARAKTLIEAAEHSVGSKEGAVSGKMEIRMLLEDYESRNTRLQEVMVLIEELVRKIPMAEKLLEIKGVGIRTVSGFLAEVGDISRFNNPKELQKLAGLALVENSLGKHKGETTISRRGRKRLIYLLFEVAMSLVSKNQKFRELHNYYTTRRLNPLKKMQSLMAIAAKLIRVFYAILTKGVDYDPKKMVSDIKRPAVYLQAA

SEQ ID NO: 67008 - protein, 355 aa, unidentified
MNEIKYIGMDVHQTSTSIVVLNAAGRVLTSAVVQTQGQALVAFIQGQSGTLHLTFEEGTYSAWLYDLLWRHVSRLVVCDPRRNALLKSGSKNDPIDAHKLADLLRLNALRPVYHGQNSLGTLKELSRSYLTLVQDSTRVMNRLKALYRSRAIACAGTKVYSPSHRASWVDQLKEAGVHQRAELLYQHLDLLSLLRREARRALLAESRKHTVSRILRAVPGLGPVRVAVLLAMVQTPFRFRSKRLFWAYVGLGLVTRISAQFALVNGQLQRSAKAPALRGLNPNHQRELKEIFKSAATAAVQRPGPWQQFYRQRVDAGRKPELVRLTVARKLAAITLHLWKKGEPYDVHSLRSTTV

SEQ ID NO: 67009 - protein, 347 aa, unidentified
MIIIGCDLHTRTQQIAMLDTETGEVAERRLEHESGEAKRFYKGLKERALVGMESTGYTRWFAEMLSELGHELVVGDAAKIRAMEPRKQKHDRRDAQHLLNLLVRGDFPRLWLPSVEERDVRVLVEHRHQLVELRTRAKNGLQAMALSYGIRRRGRLWSQAGQEELKKIPLREGMARRREDLLRLLAQLNEWVKELDQRLQQEAEGREAARLLMTHPGVGPLTALATVLVLGPVERFPDAKHVTSYVGLIPQEESSGGRQRFGHLTKQGNRLLRFLLVEAAQTASRFDPGLRRAYRRLAFRKGAASAKVAVARKLVIRLYIMLRDGIDYAEFVRRGSHAGMLGDVALV

SEQ ID NO: 67010 - protein, 315 aa, unidentified
MSQTNEVIIGVDVAKDKLDIYVHPVANHFVISNDEKAIKTFFSKLNQEYKIKMVVLESTGGYEKRCVKVVSNMNVAIHIAHPNQVYHFAKSHKLFAKTDKIDAKTLALFGEEDHVLPSTVKSISEQENQELMRRKHQLTDSLTVEKVRLAHDLSKSVKDSIKRFIKQIEREIELINTKIQEKVVQNEELVEKIKLLESFKGVGNATATMLTLCLPELGELNRAEIARLLGVAPINHDSGNKKGYRAIQGGRFHVRKMLYMVVLSALKYNHMIKPFYDRLIASGKKSKVAIVACMRKIIIILNAMLRDKKEFSILS

SEQ ID NO: 67011 - protein, 335 aa, unidentified
MQIYGIDLAKEKFDVSFFDLTSKKVSNKPSHKVVKNNFKSIGRFLETLPSDAVLVAEHTGVYGDTLLKCCMDSNVKIAFVGGYVIHRYRATPDRAKTDVLDCALLREFGERYPDKLKYRKFPEEALYELRQLARHREMLVEQRKQLMTADKSEDCRPIRSLAVKRSMDRIKEMLDTEIAETEKEMLKVINGHDSIHHNYEIVKSVNGVGLVTAVELLVKTDNFTKITTARQYSAYAGTAPYEKSSGKMDKGAHISKIGNRRSKTLLYICAESARLHNKEIKLYYERRTLIDKKPRHYVLNAIANKLLRIIFTLVEKGEFYDVNYIRQDPRLVKHN

SEQ ID NO: 67012 - protein, 340 aa, unidentified
MVHVGVDLHKRVSQIAVLSANGEVTQHRLENDRLGVQRFFEQVPAPARVAIEASGTWWWLVDVLEQLGHQPVLSHPKQTRAIAAARLKNDRVDAERLVQLLRGDLLPTVWIPSTAVREARELIRHRVSLVWERTGVKNRLLALLARRNLQPTSGQSWLTVRGQRELHALPLTPTPTAIVEDCLALRRLLDEQIQRLDHALVARWGDDGRVRRLATIPGIGPFLAILVVLELGDIHRFPSAKHVASYIGLTPRVRASADRVRVGHISKEGNRLLRWALVVAATQAARRPGPLRTWYRLVQRRKGAKVARVALARRLAEIIYQVWKEETDFFAVLRRGGVRG

SEQ ID NO: 67013 - protein, 341 aa, unidentified
MEQYVGLDVSLEETSVCVIDQSGSIVFEGDVASRPAAIEKLLRRHAPHAVRIAFETGSLSNWLWHELRTLGFPVCCLDARHAKAALSMRMNKSDRNDARGLAEIVRMGWYREAKVKSMESRQVHAILTARAKLVELRRDIENQIRGLLKSLGIVIGKAGTKAFPARVAAILHEAAHLRPLIEPLLQAHSALISQVLKYDGQLNDVAKSDQTIRRLMTVPGVGPITALAFASTVDDPSRFKRATDVGAYLGLTPRRYQSGELDRTGRISKRGDRLTRYYLFEAANVLLKVVRRSSPLKAWGLKLAKRIGPKKAKVAVARKLAIILHCIWTDGTQFDWGKVST

SEQ ID NO: 67014 - protein, 361 aa, unidentified
MAGVYYPAMVSKLRTLKRRRHMQLYAGIDLHASNNFVAVIDASGKRVFNKKIPNEAEIILSILGSFQEEMTGVVVESTFNWYWLVDLLGEAGYRVHLANPSAIQKYSGLKHSDDKHDAFWLAEMLRLAILPEGYIYPKEERPIRDLLRKRGHLVRLRTSLILSLQNIVARNCGVRLSVNDAKRLKENVVLPLLQSNDDLAMAGLVSKETIDFFTRKIRAVESMVEERVQLKDQYRYLLTIPGIGKILALTIMLETGPISRFAKVGNYVSYCRKVSSKWTSNDKAKGKGNKKNGNKYLAWAFSEAAEFARRYNTQCRGYYNRKMQKTNFMVAHQALAHKLARAAYCIIKEEVPFMPEKVFAY

SEQ ID NO: 67015 - protein, 360 aa, unidentified
MAKARSLVGLDVHATKIVAAVLDAETGELQFFSVGGEVSEAAGLCAGLPGPVRAAYEAGPTGYGLARELERRGVACVVAAPSKIPRASGDRVKTDRRDAELLVRLLLAGKLHPVRVPGPEEEALRDLVRAREAVRLDLMRCRHRLSKLLLRHGFRFDDGRAWTDRHRAWLAGVALGWPAAQATLTDCCGAVDALVHRRDQLEREIIALLPASPWATQVARLRCLRGIDTLTAAGLCAEIGDFERFARAEQIMSYVGLVPSESTTGQQRRLGAITKTGSGHARRLLVEAAWHYRKRPTTGKTLTARQDGQPAQAVAIAWSAQQRLHRTWNRLEARAKRRTIIAVAAARELAGFCWAITRIE

SEQ ID NO: 67016 - protein, 315 aa, unidentified
MRSTVAQSVGVDISKDALDVAIHPGGESFRITNNPEGHRALIKRLKRFDIARVVFEATGAYHRLFQQTMVEAGLPWVKVNPCQARRFAQATGKLAKTDRCDALMLARMGAVLDLEPRAHASKTVEALRELVNARDALIKDRVAALNRQAIAVSPLIKRQLAQRLRQIDGQIEAIDRRLKTLRNADSDLCQRFDILTSIPGVGEVTANVLVVETPELGRLEHAQAASLVGLAPVPRDSGQTHGKRSIRGGRPRARQALYMPALNAIRLNPEFKAKYEAMVKAGKPAKVAIVAIMRKLLILANALIRDRRKWAPANP

SEQ ID NO: 67017 - protein, 389 aa, unidentified
MTVRTVTNLPAVTHGETVRCLFAIELSTMSWVVAFNTPLSEKISRHALTGCKWKRLLELIEEVRARVSRETGRAVEVVSCYEAGYDGFWLHRKLEAHGIRNYVIDPASLQVDRRARRIKTDRSDTDRLLRSLMAYLRGEPKVWSVVRVPSVAEEDARRLHRERDRLVSERVQHVNRIKGLCALQGIYDYNPLRPQAMARLEQLRTAQGGAFPPRLKSEIMRGLQRLEMVVEMIATLEAERNAIVENEASTHLNAKKIQTLHKLKAIGPEFAAVLVGEIFHRDFNNRRQVASYVGLAPSPFQSGNVAHDQGISKAGNRKGRTTGIELAWMWLRYQPESDLSVWYRARVGATKGRIRRIAIVALARKLLVALWRYLETGLVPRGAVLKGDQ

SEQ ID NO: 67018 - protein, 341 aa, unidentified
MEHTTIAVDLAKSVFQVAVSHRPGHLDEERRLPRDRFLAFFAQRPPATVVLEACGSAHYWARQLQPLGHAVRLLPAHDVRPYVRRNKTDRTDAKGLLEANRNEEIHPVPVKTIEHQAIASLHRLRSTWLATRTARLNTLRGLLREFGIFIPVGSQRVVPRVRALLDEPAVPVLLHTTLAAACDEIAGLEANMRAVERQLAALADDMPDVQLLQTVPGVGLITATALVALVTDIRRFPSGRHFASFLGLTPREDSSALRRRLGAISKQGDVYVRMLLTHGARSLVWHAKAAGRPTSLQQWAMQTELRRGRNVAAVATANKLARIVWAVWVQQRPFAADHRLG

SEQ ID NO: 67019 - protein, 316 aa, unidentified
MTEAGGFVGIDVAKAELEVVVRPSGARWTVTNNPAGLAQLQERLQASAPSLIVLEATGGYEVAVVAALATAALPVVVLNARQVRDFARATGRLAKTDAIDAGVLAHFAEVVRPPVRPLPDAMTQSLQAWLMRRRQLVEMLLAEEQRRSRAPRPIQRQIDQHVRWLRAQLGAVEKDLAQTLRESPVWREKDNLLRSVPGVGPVLTTTLLGDVPELGQLNRKQIAALIGVAPLNRDSGTYRGRRAVWGGRAHVRATLYMATLTAARYNPVIRAFYERLVAAGKPKKVALTACMRKLLTILNAMIARRTAWKPPAAVSA

SEQ ID NO: 67020 - protein, 359 aa, unidentified
MQTQSNKIDFNGQNIYVGFDVHLKSWMVTILTEKLTHKTFSQPPKPEALHHYLVKTFPGGTYYSAYEAGFCGYWIHNRLVELGINSIVVNPADIPTTGKEKVMKTDPRDSVKIARSLRNGDLKPIFVPSSSILEDRGLVRMRATLVKDLARYKNRIKSFLYFHGIEYPDVFNKSQGHWSNRFVKWMEDLELKDLTAKATLSTLLEQISSLRGAVLKITKQLRELAKTDRYKEQEMLLRSIPGVGLITALTILTEIETIDRFANIDQLCGFIGLIPSTNSSGEKVVDGDITPRGHSTLRTVIIESAWTAARHDPALNKSYHDYCRRMEPNKAIVRIARKVCSRIRFVLKNNQPYVCSAVK

SEQ ID NO: 67021 - protein, 370 aa, unidentified
MEIIIYVGMDVHKETYSVCCYDPRTNTYMFEQKIKASTASVLKYLKHVKEQFGEEIVFICGYEAGPTGFGLCRDLLRADISCIVMAPTSLKRNSGKKRKNDKVDAKQLAKALYTKDYSQVHLSTKKEEAIKEYCRMRQSLVTELKKAKQVLQAFLLRQGKVFEKDAWTKEHREWLRKLTFDQPYMQDALNEYLTSVNTLEARLKEVEKRLNEIAKDDEVKEKVEKLMCFSGIDIVTAVSIVSEVGDFTRFGRAWDFSNFVGLTVGEDSSGQREKKLGITKSGNRYLRRLFTESAKSIKKTNPRGEKSKRLIKRQEGQNPKVIAYADKCRMRLRNKMFRLEMRGKLPNVASTAAARELACFVWGMMTDNIA

SEQ ID NO: 67022 - protein, 361 aa, unidentified
MNATTVAVDLAKSVFQLAVADEHWRVVETQRLSRTQFERWFSNRDVSLVIMEACGSAHHWARWLGSLGIEVRLLPAQYIRAYVKRNKTDAADAAALLEAARASDIRPVRVKSVEQQALQGMHRIRSLWMGTRTSRINALRGFCREFGIAIPVGARTGIEAISRVLADPSTAVPDLIRGTAKLLVEEIRLLEARIAQLERELTAIAKLSPACTTLLSIPGIGLLTATALVAATSGDVSHFKDARHFSSWFGLTPKEYSSGSTRYLGRISKRGDRYLRMLLTHGARSVLRAAKVADAAGREVCGVRRWALQVQSRTNHNKAACALANKLARICYATLRDKEPFGEQTVRLGKKISRESFAMPA

SEQ ID NO: 67023 - protein, 386 aa, unidentified
MDKIGMDLGKKKSDVAVMATVDCVSERFKLATTRESLQRHFGNRPAALIAIESCRDSGWVRQELVALGHEVVVVDTTRARAIGIGQGRRKTDRRDAEALARALWTGTIPEAHVLSERAAAIREALHARQTLVRERTKLVTQLRGLWQAQGWPVRSCAAEDFLERLRETQQPLLETVHVQCLLRVLAQLQQEIGTLDQHLAALAAQEEAYPRLSSVCGVKVIVALSFIAAVDTPQRFARSKQVAAYLGLVPSEWSTGGRQRLGRLTRAGNSMARWALVQAAQTLLRSRKHAQDPLVLWAQQVAQRRSKRVAVAGLARRLAQLLYRLWRDGTYYDPVGLGRASAAGLAQQARTTQQHAARLERAAVTAEVQQNTAAARSQAAAPFGPG

SEQ ID NO: 67024 - protein, 356 aa, unidentified
MSRDTKYIGMDVHKEAVVIAVRNSTGQLVMESIVETKASSLLQFIHGVQGELHVTWEEGTWAAWLYDLLKPHVHEVLVCNPRRNALLKEGSKNDKVDARKLSDWLRTGMLRPVYHGEHGLRTLRELARSYQTISQDLNRVMNRVKALYRGWGIACSGTQVYAPRYRQEWFDKIEHAGVRRRAELLYQQLDGGWRDRIFLRPELLAESRKHKASKLLRQIPCIGPIRAARLLALMQTPHRFRSKRQLWTYNGLGIETRDSAQYRFVRGQLQRAKKPQQIRGLNRNHNHEMKEIFKGAATRASCGVGPLRDFYEALLAKGMKPEMARLTLARKIAAIALTLWKKEERFDAQQLKTQAA

SEQ ID NO: 67025 - protein, 324 aa, unidentified
MSNATSSQTVFAGVDVGKATLDLALSFHQDQFLQKQFPNTPEGRGELIALCAKHHVQLVVLEATGGLELDAAAELAQAQIPVSVITPAQSEAFRRALNLQAKTDRIDGRMLALFARKMTPPASEIPSETQRNLRELAARRRQLTQQLVQEKNRLQQARDRRVKANIQKVIAFLEEQLADIDGHLGQLIAADPQLQLTVERLDSVPGIGKETARQLVVCCPELGSLNRQQIASLAGLAPFNHDSGSSTGQRAIRGGRSSVRTSLYMATLTAIRSNPKIKDFYLRLVQAGKKKMVALVAAMRKLLIMLNSLIRQQKTWPQFVSQSV

SEQ ID NO: 67026 - protein, 354 aa, unidentified
MSKILAIDLGKFKSVTCLLETDTNATEFWTMATERHYLETVLKRYAPDLVVIEACAIAGWIHDVCTSLGYRVLVCNPAQEPWKWKHLKRKTDRDDALKIAKLAALDQLVPVYVPGREQREFRSLVKYRKAVLGRRTRVQNRIRAIFAQRGMAMTGGLKAWTLGRREELTCHGKPLADCTTDELWRGELDLELAELARLSEQLAQIDKKLDALGTDDQRVRLLRTIPGVGRRTAEVVVAYLDDPRRFKNARQVSSYAGLVPGRYQSGQMDRQGRIHKRGPRLLRSALVEASWVMLRLNPWARALYDRLCGGQKTRKKKAIVAVARKLLVRCWVMLLRKEPWRAVTPLAEPAGACV

SEQ ID NO: 67027 - protein, 334 aa, unidentified
MWHVGIDLHRETVVAAAVNDAGEVIDPVRVGCEDTAAILRMVKALGSFRAVIEASGTYRWLYDLLRPYGTILLAHPLRLRAMIQRRTKTDKLDAQLLANLLRINQIPLAYIPPEPYQQLRELTRGRARLGRQQAEVKIGLRALLARRNLSAPYRVPFGVRGLAWFRKQNFGPIDNMVRDELLERFRHYARQIAIFDRHLEGMRSSFAQVESLLEIHGIGLYSALLIVAEIGEVERFHTAKQVGAYSGLTSRIHQSGGHCYQGSITRQGSPWLRWVLVQAAMKAVHKDIALKNFYTRVRKRSSAKIARVAVARKLAEICWKRLRRWQREHAGQAA

SEQ ID NO: 67028 - protein, 380 aa, unidentified
MITSNPCLESTGIMFQSHVGTDLHKASLTFTVIDSSGKLTNAADIDCKCVNKIKDFITSLPKPIHCAIESVGMYEWLWELLEPLVDKLTLADAVELNYRAGRRQAKTDRIDSKFISLLTYKGELPVSFVPDKTTRQFRRVCRHWHATSEMLSGIKVRMRWILLQHNLKGPAHLTGDSTRRWLKAHGHLLDSIAFFSFSQFLETVEHIELQQLTIRRQMRQFSQLPQFKDDIELCCTVPGIAEILAAIIVAEVAGFHRFDSAQAIACYTGLTERTHESGGKRSQGHVSCAGPASLRWALCEAATTLVRSDPSYRGIYNHLVKNTGNKSKAKVAMARKLITWLWKMAQTRQPFIRGGSTNHNRNANIARQKAKSIKNLASAC

SEQ ID NO: 67029 - protein, 450 aa, unidentified
MSAEKQKKSTTVKLPKHLQHINIHAAGIDVGSRSHFVAVPEGTSEPPVREFESFTDDLQRMADWLSACEVTTVVMESTGIYWIPIFEILESKGFEVKLVNARHVKNVPGRKSDVLDCQWLQRLHTYGLLEGAFRPPEQICTLRGYVRQRMNLVRYAASHIQHMQKALAQMNLQLTNVVSDITGKTGMLIIKAILGGERNPLVLAALRDQRCKNSVETIARSLHGNFRPEHLFSLKQAVDLYGFYQGQIAECDQVILAQLATFDVASDSDKDNKPPTTIEEALQRMSGVDLTKIDGIDSNSALKIIAEIGIDMNRWKSPKHFASWLGLCPGTKVSGGKILSGKSKQVANRAAATLRMAAFTLFNSKSALGAYLRRQRSRLGAPKAITATAHKLARLVYAMLKHGSAYVDAGQDYYEERYRSRVVQNLKRKAQELGYQLIEISGIQQKTTAT

SEQ ID NO: 67030 - protein, 347 aa, unidentified
MQYYAGLDISQEKTSICIVDAEGSIIAERKVATCPDAIAAVLTTSPLTRAGLETGPLSVWLWNELKVAGVPIICMDARHANAALSMMPAKTDRNDAVGLAQIVRTRWCKSVHVKSVPSHEARALLAARSQLVQIRCDLENEIRGVLRTFGVVFGKRVGGFARRAEEIVAGELDTSPTIRAVVDALMKARADIAAQVTSLDARVRSMARATPAVRHLMMVPGVGAVTALGYVATIDNPSRFRRSASTGAYLGLTPKVYASGETMRVGRISRRGDDFLRRSLYEAANALLTRVARPSSLKAWGLRIAKRSGFKRAKVAVARKLAVVLHAMWRSGEAFRWTSGVTEPAAA

SEQ ID NO: 67031 - protein, 323 aa, unidentified
MITDQEDQQLFQRRLPNQLPVVLESLEPYRPRRKVVVVESTYNWYWLVDGLLDRKYPVVLANPGAIDQYDGIKEADDLTDAAFLARLARLGILPTGYLYPKEDRPVRDLRRRRSLVVRQRTSMILSLQNMALRQTGQNFGWRALRRLSDQERAEVLGDHDCLAFVTTEQLDLIELLSEKIKRFEAKVLEHAQLRPAYECLLTLPGVGVILALTILLETGDIGRFATVGDYTSYRRCVRATHTSNGKSKGKNNGKNGNASLAWAFVEAVHPALRTCPPARSFYDTKVAKRNGALATKALAAKWSKAAYYMIKRQEPFDLARVFG

SEQ ID NO: 67032 - protein, 428 aa, unidentified
MNIEDTIRRDQFCQIKSEIRGCADYLVIGIDVAKDKHHAFMGTATGKSLLRKLVFENNLQGFCELLERSEAVRAQNALSKVVFGLEPTGNYHKPLGAHLIGCGCHVVLVTGKAVVNNRELLDGRWDKNDTKDAANIADLVCRGKCFYYDYPSSRINELRQSLSLRRRLKKEEHSLRMRIRNNLLAQYFPELDVFYSACESETLAIVRWCLDPARIAGMEFDAFFSMVTGSRRGIAQQLRLQKIHRLAHESVGCTMGAAAAFEAVLLVDKLQAVREQLKQVANQMEDICQQFAEYSYLLSIPGFGPYVAARVLASIANPWRFDSSSQVIKMAGYDLGANRSGQGSDKAVPVISKRGNAELRYALYQSAHVASTRNGDFIGYFTRMLDGRQRERGIKTKMKVKLAAKMLKIAWTLMKKREAFDPEYLNLE

SEQ ID NO: 67033 - protein, 400 aa, unidentified
MDDIDDVGVFLGLDVGKSAHHGHGLTPAGRKVFDKQLPNSEPKLRAVFDKLAAKFGTVLVIVDQPASIGALPLTVARDTGCKVAYLPGLSMRRIADLYPGEAKTDAKDAAVIADAARTMPHTLRSLQLTDEITAELTALVGFDQDTAAEATRTSNRIRGLLTQFHPSLERVLGPRLDHPAVTWLLERYGSPASLRKAGRRGLVEAIRPKAPRMAARLIDEIFDALDEQTVVVPGTGTLDVVIPSLARSLAAVHEQRRALETQIGQLLEAHPLSTVLTSIPGVAVRTAATLLVTVGDGTSFPTAAHLASYAGLAPTTKSSGTSIHGEHAPRGGNRQLKRAMFLSAFAALHDPASRTYYDKCRARGKTHTQALLHLARHRISVLFAMLRDGTFYEPRTPRLA

SEQ ID NO: 67034 - protein, 463 aa, unidentified
MKRKEITKTPHSGMAMVHPNAAAIDIGATMHMAAVGADRTSDPVQSFGTFTGDLHRLADWFAECGVKTVVMESTGVYWIPIFELLDERGFEVFLVNARDAKHVPGRKTDVSDAQWLQRLHSYGLLRASFRPKGEIAELRAYLRQRERLLDTAASQIQHMQKAMTEMNLQLHHVVADITGATGMRIIRAIIAGERNPSVLASMRDKRCHSSVETIEKALTGHYRAEHLFVLEQAVALYDVYQQKVAACDIRIESVVNALSSVRGRQEGATADGSVSPKPHRHRTANEPAFDVGGSLHTLLGKDLTRIDGVGPYLALKLVSECSDDLSAWPSAKHFTSWLSLAPNNKISGGKVLSSRTKRSGSRVASLLRLAAVSVGRTETALGAFYRRLSSRVGKAKAITATARKIAVLFYNAMRHGMDYVDPGASYYETRYRERVVKNLHRRAKALGYVMLAADAPTAVAAVS

SEQ ID NO: 67035 - protein, 454 aa, unidentified
MGNARARKIPARLVEDEDYQLRHERVAGIDIAKAKADVCTRLPPARDGGRRASRVEEVPATAADVLALAGRLKAGRVELVVMEATGEYWRIWYYLLEAEGLNVQLVNPSHARQLAGRPKTDQLDAQWIARLAEMGLLRPSFVPPPEIRALRDLTRARLQVVRDRTREWQRLEKLLEGALIKLSSAVHSLARTKTARIILEAIAGGERDPEALAALAMGPADRSAIEKSLDGMQVGDHHPALIRGFLDHAAFLDQRVAAIEDMIQDRLDRIEASWGIAADGTRTPAPGPDAAVLPAADRLAEVPGVSPDLARAIIAEVGLDMTRFPTAARLASWAGLAPVARQSGPRTRKAAKGQGDHWLKGYCTQAALGASRTDTFLGERYRRLARRTGAVRAQCAVARSILTIIWHLLNNPDARFTDLGADWHARKNDRDRKTRRHLKELQALGYQVTITEAA

SEQ ID NO: 67036 - protein, 404 aa, unidentified
MNNVAGIDVSKGKSMVSVLRPFGEVVAKPFSIGHTGSELKELADYLKSLDGETRVVMEHTGRYYEPVARFLHDEGVFVSAVNPKLIKDYGNNTLRKVKTDKADSRKIARYGIDNWAELRQHTPMDTIRMQLKTLNRQQSLYSKTKTMMKNNLIALLDQTYPGVNDLFDSPVREDGSQKWVDFATAFWHVDCVRNMSLVAFTERYQKWCKRHGYNFSQSRVVEIHARAQDLIAMLPKDALTKTVVRQAIDALNAVSASLERLKAEMRTLAAQLPEYPVVMAMRGVGDSLGPQLMAEIGDVTRFTHRNSITAFAGVDPGADQSGIHEAKSTRASKSGPPELRKALFLVMDCLLKTMPQDDPVYCFMDKKRAEGKPYLVYMTAGANKFLRIYYGRVKEYLASLEDTD

SEQ ID NO: 67037 - protein, 363 aa, unidentified
MWRPAVSIGRMIAALSSSSTGRGVVMAIVGGFDLHRRQITFEYVDTASGEVSRGRVAPADREHLRAWLRRLEGQEAAFAVEACTGWRFVVEELERAGAQAHLAEPADTAALRGPKRRAKTDRADARHLRELLMAARLPESWIPPAHVSDARTQIRLYKTLVDERTAWLQRVHAILFQLGAPAVPGLARASGRGRLDLAALPPAARSAAEVALRSVDRVNEELDTLRPELARLARAQSGCRALQAHYGIGPLTSVAIWAELGDCGRFSSSSDAVRHSGLDVTVHSSDSRRARGHLARQGPGVLRWALFEAAVCAARPASPDHAYYLQVKARLGRQWAVLSVARKLTRWCHHTLRALGDQALAPA

SEQ ID NO: 67038 - protein, 411 aa, unidentified
MSSNEYEWFLGIDWGSEKHRFCLMDGSGKVLEEKWIEHSGKALAEMVDWLGRHTGDVPGDLAVGIETPRGALVETLIERGFAVFSINPKQMDRFRDRCSSAGAKDDRRDALVLADSLRTDRHCFHAVRIAPAEIIRLRELSRLEDTLVGEHNRLTNQLWEQLHRYFPGLLQLCGGADEPWLWELLEKATLPAQAAKLSAGQIGEILSRHRIRRLDGAAVKEVLGRQPLRLAAGAAEAASEHVLLLLPRLRLVHRQRDEIVQRIQRLLEELAAPEAEEGRKHRDAAIILSLPGVGRKTGATMLSEASQALAERDYHALRCLGGAAPVTRRSGKKKVVMMRYGCNERLREAFYHWSLNSIRCEERARQQYAEKKARGKTHGCALRGVVDRQLAVLVSMLRYNTLYDAQRRAPA

SEQ ID NO: 67039 - protein, 326 aa, unidentified
MMILGNDIAKAKFDIALYAGKELIATGQFDNAPAGYKKLSKWLKNKGVEQVWACMESTGRYGDSLALYLYQAGHQVSMVNPARIKKYAESKLQRNKTDKLDAKTIADFCRTQEPSLWTPPAPEKRELQEMVRRLSALIKEQTRERNRLQAGLESTVVKASIQASLAFLATQIAQLEQLIQSHIAHYPDLKRDHNLLTSIKGIGDKTAAIILGELPQVDNFDNSGQAVAYASLNPQQHVSGSSVNKPTKLSKTGNQNIKTALYFPALSAMQHNPIVKALVLRLRLQNKDNMVIVGAAMRKLLQLAYGVLKSGQPFDPNFATKMQAAI

SEQ ID NO: 67040 - protein, 362 aa, unidentified
MLYVGVDLHRKRSHVTALNEQGGIVLNRRIENSPERFVRIFGELAPEPLAVAFEATYGWSWFADLLSDAGIEAHMAHPLATKAIAAGRVKNDAVDARTLAHLLRTHLLPEGWIAPPAIRERRRLVRTRASFQRIGSRLRCQIHALLADHGAHPPMQRLFGPAGRQYLASLELPAVARGRIDAALRLIDAAAAEVTSLDRELRAVFAADARIAQLLPIPGIGFITAATVLAEVGEVSRFRSADQLCSWAGLTPSERSSDEHTRRGHISKQGSRWLRWIMVEAAASAVRNPELRRLFERVAHRRGSKIARVAVARRLLTLCFYALRESDGCRAFPVRARSSRPIRPSALAQSHGLPDGTAAVTD

SEQ ID NO: 67041 - protein, 341 aa, unidentified
MEQITTIGLDLAKNVFQVHGVDDHGRTVLRRKVSRGQLLKLFAGLEPCLVGMEACATAHHWARELGTLGHEVRLMPPAYVKAYVKRNKNDAADAEAICEAVTRPTMRFVPIKSAEAQSLLMLHRARHLLVRQRTAQASAIRAHLAEYGIVAARGISRLRDLLPALDADAGIVPELARKTLLLIAQLIEALTLQIRKIDTELLRWHRNSPESQRLETIPGVGFITATAMAATVRDARAFRSGRQFAAWLGLVPRQNSSGGKDRLGGISKMGDRYLRHLLVVGATAVVRYARRKTTAISLWANQLLERKPARLVTVAVANKMARIAWAVMARQEDYRAVPATA

SEQ ID NO: 67042 - protein, 401 aa, unidentified
MTTLRDNGERVKRFRELKGTLRSNRQRLLVGLDIAEGEHVAHLRHAHTRVVVPSLTIPNTTRGFTQLWAQIQQAQRATGCREVVVALEPTGTYHEAVAAFLDAQGADVVLVASSVAYWNRRTQDGTYDKNDPKDAANCADLLEQGKVLFYSQPDGPLAALRRLVRVLRRARGELAACKARWRTTLRPTLGPMGEPLPQRLWAELPAVLQAWTPAAPGRPAVAKGRLPLGLATACTDLAAQVAAVHARITAIEAALTPLAERLPAYGLLRTIPGVGPTVAAILLAEIGDVAWFTQFSQLRKLAGLDIIRVQSGKRTGQWRISKCGRSLLRWALYHAAVGLARTTAGRARLAACKAKRRGDRYAGFKAITELAAKQLRVVWGVWRSGTPYDPRRAGGLQRQPR

SEQ ID NO: 67043 - protein, 345 aa, unidentified
MPIVGGLDIHRKQITFDYLDTATGQVRRGQIAPADRVHLRAWLARFAGRDDVAFALEGCAGWRYVAEELAAAGITAHLAEPADTAFARGRKRHAKTDKTDSRHLRQLLAEGRLPECWIPPARILECRALLELYNDLRRERTAWAQRIHAVLFHQGAPALGEGALRTEKGAAGLRAAAAAHLSPAGQLQVATALEVIDALEARLHVVRHQLLDAARHLAGAKALAARLYGVGPVTALAITCWLGGAGRFSSSRQAFRFAGLDITVSSSDRKGPPGKLSRQGPPVLRWAVYEAGKAHARTSAPDHRYYAAVKDRKNSKRACLSEARKILRQAHHILAELGDDALAAA

SEQ ID NO: 67044 - protein, 402 aa, unidentified
MSDVIALDVSKNHSYAVWYRNNKCLSEFNFQHNKVGFQRLKRIVDEAKSPTVYFEATGIYSRPVARFCQDNQFKYAQLNPLELHLHSENLRRIKTDKVDAHKMAHAVVEKKYRCTNTWSKNYRKLHELSRFYDQISDEIKLKRLRLYTALDQTFPEEEQLFTNQVSKLALNVILLFPHPDLVRSFSRTRLKNKLMSQIDKRLSQAKGLKYAEKLLKFAKISYPAADVDSIQVQEVKYYCRQLIELTKEKDALVKQTEKLAQSLQVYKIYTSIPGIGPLTASRLLGELGDITRFDNANQLNDYIGIDLNRYQSGKYQRQDHINKRGNPHGRALVYIIVRNMIRQKAVANNHIVDYYYRLKKRPIPKRDKVAVVACMNRTLKCLYAMVTAGTEYVYAYADSRSL

SEQ ID NO: 67045 - protein, 390 aa, unidentified
MDVLYQSCAGIDVHQANIVVCILHGPLTSTRPKREMATFDTTTKGLRACHDFLSQFHVEAVGMESTGVYWRPVWHALCDDFELILAQPAHMKAIPGQKTDKKDAHWIAKLTRIGLLPRSFVPDETIQELRELTRQRKHYVESRNRETNRIHKILQSGGIKLTTYIEDIMGLSGRNLLQLLVDGTPITPRIVHQSVYTSLKKKVPQLLEALDGYFSDHHRFMLKQSLEIYDFYQKQIELLEERITVYLSQYENHVEILDSIPGIDVITASVIISEVGVDMSQFPTSGHLASWAGLCPGNNESAGKKRSTKIRHGNSYLKKCLCQAAFAIKKQKGSPLADRFYQIQSRRGSQKATIALAHQLLKIAYILLKEQITYPEFLAQKKTTRDELVA

SEQ ID NO: 67046 - protein, 320 aa, unidentified
MNATEKVHVGIDVSKARLDVAMLPSGETFAVTNDEDGIQTLLEKLLQEAAGPTLVVLEATGGLQRPLVAALFASRIASAVVNPRQSRDFAKAIGRLAKTDRIDALVLARFAEAVRPEPKAPPKTEALEFQAIVARRRQLIQMMTAEKNRLGAATSRKVRSRLEAHIRWLEKELARIDQDLDEAIADSPTFKESETLLRSVPGVGPVLCRTLLAELPELGSLSPRELSALLGVAPINRDSGTLRGRRSVWGGRARVREALYMAALVATRYNPAIKEFYGRLVASGKPKKVALVACMRKLLTILNAMIRERTPWRFPHALNS

SEQ ID NO: 67047 - protein, 429 aa, unidentified
MRTESTPGARGPVFCGVDTHADSHWLCVLDWRGRKVLSRQFPADAAGYEALAGAIAAAGEPACVAMEGTSSYGAGLTRHLASLGMPVREALSPARMQRRRPGQGKCDEADAERAARAAMSGSKLGTPKSQDGWVDGVRCMLAARSGAVKARTSAINTARSLLTTAPEGLRSRFRGMGGPRLMEELPSVRAEGALGAALGALADLWEAARDAALDMERAIEASLEENCPALLAMYGCGPVSATKLAVAAGDNPGRLRSEASFAAICGACPIPASSGKTVRHRLNRGGDRQANSALHEIARQRVMRDPETAEYAERARGRGKSDREVMRCLKRYVAREAYRALMHPHEIRRPEDASELVAARRAAKVSQVRAASILGTSEKYISMLERGQRELKPIRRAYEAWVEAGLPLDWDRRAFEAERKMDSKKHLAK

SEQ ID NO: 67048 - protein, 350 aa, unidentified
MLMIDCDYHPWFQQIAFLDNETGECGERRLEHTEGAEQFYRDLQAGGIEARIGMEASGHSRWFERLISELGFELWIGDAAAISTKRVRKQKSDRQDAELLLTLLVENRFPRIWVASRENRDLRQLLWHRHRLVQMQTRIRNQLHAVALNEGVRRKKALWRPKGRAQLESLVLAPWASRRRQDLLQLLDQVDSSVAELTAAIEKEAEKRPEVLRLMSHPGVGALTALAFVLIIGTPERFARGKELSSYLGLVPAEESSGERRRLGHISKQGNTLLRFLLVAAAQAAVRSDPNWRRRFLHLAMRRERPIAKIAMARILAVRLYWMWRNGWDYAQLPKLGSHAGQPGNRLGLQ

SEQ ID NO: 67049 - protein, 449 aa, unidentified
MSNGSGITRGDRRRNARKARLRALVPYENAVAGLDLGERKQALAVTGADGQVLARRSPRVSVHDLGPYLDRALEQALAAGYTGLSVACEPTGSRWMVVQDLCEERGLPFVCVQPLVSHVAREQEDLTGDKTDEGDSALIARLARELHCYEPERLEGAWAELRDEGRRRAQLITSATAAKQLIRDKLGLAAPALLESACEPFDSPTWLASLEVMLERCGGGTAAVAAMGYEAFAAAVGAALPGWGGQQVGGTCRQLFSALGDGRGVARMRRAALRRARGALADLKYARARRAQAEADMIALAGELGVDADRICEIPGLSPATLAAILAETGDLHNYESSSSVVKHAGMSPARNESGSFRGQAKISRRGRPVLRLAVWRATWPVLRHCAVLAAKHAALTGRDDDSKLTPEQARVACAASLLRWIWSLTVHGTRWDARIAAGDLGHHHAMAA

SEQ ID NO: 67050 - protein, 387 aa, unidentified
MIKYSLGIDISMKSFHACLSIIDDQQQVKVKASRKFTNNAAGFKELHDWIDKHYKQNDIPLHIVMEATGVYYEQCAMYLFKKEFTVAVVLPNKAKKYLQATGLKSKNDKIDAKGLAQMGAEQKLQPWQPMNDFFYTLRALTRHHESLQNLKTNINNQLHADNAGMYANQQVGKQLNKLVETMDKQIEVMEQSIKDHVASDAAVHQKVKGIIKMKGVGIMTVATLLAETNGFLLFKNSPQLVSYCGYDVIENQSGKYKGKTRISKKGNRHIRRILHLPAFNVIRYKVAPFTQLFERTLSKHNIKMKSYVAVQKKLLVIIYSLWKNEEAFNKDYFKSTTRKEEPVLPSRLSFAEADQAEQKNSPDINQGYTRCTTVKVSSFAPSRLLQK

SEQ ID NO: 67051 - protein, 391 aa, unidentified
MAGVRNQTGEPDTMPSENTVHIAIELSFSSWLVAARLTGAKKSRLHRIEGGDTGALLALIAELRSRALTQLGGAAEVACCFEAGRDGFWLHRLLTAHGILVYVLEPTSILVNRRSRRAKTDRLDAEGMLRVLAAWLGGDRQVCSMVRVPTPEEEDGKRPHRERERLVQEKLRIENRIEALLFTQGIRARPSLRSWERELTELRTGDGRTLPPLLRAELDRLRRRLVLILEMIRELEAERAAALAAAPDEAMAQKITSLQRVRGIGANFSAVLVREVLYRSFANRRQLASYVGVAPMPFQSGGMDRDRSISRAGNPRARTTLIQLAWLWLRYQPGSALATWFRERVGTLQGRTRRIAIVALARKLLIALWRYVEAGVLPAGVEIRTGTVPAA

SEQ ID NO: 67052 - protein, 346 aa, unidentified
MEHFAGLDVSVKETSVCIVDETGKIVREVRVASEPDALLEVLKSHAYRFNRIGLEAGPLSQWLFSALAEVGVPVVCVETRHMRAVLKAQINKTDRNDARGIAQMMRAGLYRPVHVKTLRSQKLRMLLTHRKLLQSKAIAIENDLRGTLRNFGLKVGMVGTVKFEARIGELVESVPDLAALVEPLLVVRRAIREQIAILHRRLLAIVRDDEVCRRLMTIPGVGPVVALTYRSTVDVPARFRNSKAVGAVFGLTPAQYQSGEIDRTGAISRCGDEMMRVMLYEAAHIMLVRSTKWSWLKAWAMQIARRRGMKKAIVALARRLAVIMHRIWVDGTEFRWTREQPAAAGA

SEQ ID NO: 67053 - protein, 410 aa, unidentified
MLYFGIDWSQDHHNLAIVNESGAQVSRLQFEHSLVGFTRLDDERRKLGVPAHDCLVAIETAHNLVVDFLLERGYPVYIIAPQATDGYRNRQRRSGAHDDDSDAALLAGILRTDRDSHRCWRPNSPLTQQLLAQIRLIETLRRSIHRQASQLRTVLLRAYPTAVDLFSDLTSQISLRFLSAYPTAEAAQALSREAFDAFCRAEGYTRTDMLSKRYAHLVEPAPLSSPAVTQAYQSHVRVLAELLLPQIHERQKALTQLGRLFQMHPDAFIFASLPGAGELLAPSLLAKFGDDRARFPAPGDVQALAGTCPVTERSGKRMVIRFRHGCDKEFRRISQQFAKSSLGQSGWADAYWHDIRPGCNSDSHALRIVANRWLAIIWKMWQDRKPYDETYHLQQRALRRRPRSEPTGKH

SEQ ID NO: 67054 - protein, 335 aa, unidentified
MKDIMYDHYIAIDWSMINMAIARMTKKSNKITVIDVPSDIGELKVYLKNVSGTKIVTIEETTTTQWLYVELVEYVDKIVICDPLRNRLLSEGPKTDKIDASKLVQLLKANLVKEVYHSTDTFLYLRRVISGYEDLVKAGVRLKNQRHALLRACGKKGDKDKKLESHGDQFVLECLDRQIEAYSNEKKGYEEEFKRLVKKYPEIKQQKSLPGIGDINAVKIVSRIVTPYRFIDNGHYLSYAGLIKLDRISGGRSYGKKTPRFCRQLKSVYKSGVLAAIGGNNPINDYYQYLMKEKGYPEFNARHKACRRLAILSLGVFKSGKKYQPYRRDHVEAVN

SEQ ID NO: 67055 - protein, 392 aa, unidentified
MYIVGIDIGKNHHEASIVSPEGKQIGRSLRFATTHKGADSLMSFIFKNIGNSPCVFGMEATGHYWYPIYSFLKAKGYTIYVINPIPSDSLRKMYIRQTKNDSIDSFLIAEVIRFGQFGTTSMADENILAMRQLCRYRDSVISSRTEIKLRIGTIMEQIFPEYEKQFSSLWVSTSMGILEKYLTPENIENAPIDELFEIIKDKSHNRLTRAKAISIKEAAADTFGIKIAQDAFSFQLKQLIDRMNFLDKQIEALDCQILEYYEKFDCYLHTIPGIGIIGAATILAEIGDISRFKNSSSLIAFAGIDPTVRQSGEFNSTHNHMSKRGSPYLRHAIFLAATTCSFHNSPLNAYYKKKRDQGKHHLTATGAVARKLTTVIYAVLRDSKPYEPKKFC

SEQ ID NO: 67056 - protein, 372 aa, unidentified
MNYNTVYVGMDVHKESFTLCSCKYEDEKASHYQRTPASYKNVLRYLAFLRTIYGEYTRFVCGYEAGCLGYSLYHQLENFNVECVILAPTTMLEQRSKRRIKTDKRDAEIIAKSLAQHNYSPVHIPTKMDNQTKEFIRMRDDHKAELKKIKQQILAFCLRQGYQYDGSGNWTAKHVKWLRSLKTEGLYKEILDEYLLTYTILTDKLNRLDQRIEELASKEEYKESVSKLTCFLGIKIHTALSVIVEVGDFQRFVSARKFAGYLGLVPGQHSSGDDRNGLGITKAGNTHVRRLLVESAQSYTRGKIGYKSRVLRSRQAGNSPQIINYADRANERLRRRYYQMVLKDGKKYNIAKIAVARELACFIWGMMTDNIY

SEQ ID NO: 67057 - protein, 449 aa, unidentified
MSRPQVIDDQEHERVHDRVAAIDVAKDTGMVCTRTPHPARPGTQRATVWTVKARMGAVRALGRQLKNDGIEIVTLESTSDYWRIWFFVLEACGLAVQLVHAAQAKNLPGRPKTDKLDAMWLARLTELGLLRASFVPPKAIRDLRDYTRARTRLVQERTRCWQRLEKLLEGALVKVSSVASKLTTLSAQDMITAMIAGQRDPDQLAALARGSMKAKHDDLVQALDGMFDDHHGELAALLLDQIAFLDARIAQLGARAAELAAAMPAAWGVDGDGTTGPHAGATADAPVLNAVARLAEIPGVSEMLARSIIAETGLDMTRFPDAAHLVSWAGLCPSARQSGPRTRSGRKGRGDTWLRGALGQAAVNASRTATFLGERYGRIARRRGKAKAQVAIARSILVIIWHLLANPEARFTDLGPGYYQTRLDTDRKLRNHLRQIQALGFTVTLTKAG

SEQ ID NO: 67058 - protein, 352 aa, unidentified
MSKVKALDFSGETIYCGIDSHKTNWKLSTRTDDFELSNFSQNPDPELLSRYFKKNYPGAKVKAVYEAGFCGFGIQRSLSALGIECMVVNAADVPSSDKERRRKDDRIDARKLSRQLAEGNLKGIYVPGIEMEHARVLVRQRWRLVQDQTRCKNRIKHMLMCHSIKVDGKENWSGQYVKALEGISCSVALRAALDLAIGEYKQIRRLLREATVAIRQMAMQPPFVPVQKYLQSIDGIALINAMVIQTEIQDIKRFKVLDSLCDYAGLVPDIRSSNDRMVVKGVTKRCNQFLRDAIIESSWVLIRKDPAMLMKYRIYCSRMNKNKAIIRIGKHLLSRIRYVWENQKEYERGIVG

SEQ ID NO: 67059 - protein, 342 aa, unidentified
MSSSPHKLFVGIDVAARTFSAAWGSNGNMVGSAYEFEQKQDDYKKLVGRLQATGHALHSVLVVIEATGTYWMRLATYCHQAGLQVSVINPRQAYHFAQATLQQAKTDALDAQLLAQLGAKLPLKAWHPPSQAWEALYQRLVERDSLVEIRQMLRNQLHALQRRTLIDPAVQTRKQQLIATFNDQIKAIDQELEQWISESEWSKQATYLRSIKGIGLISAAWLLVVTNGYSTCEDAEQLASYLGLVPHPNQSGSSRRGHKPTGLHGHARARRVLYQASVSAACFNPIIKSFYARLIANGKHVKVARVAAARKLVHIAFAVVMKEQMFSPHYHLAKCQPVALLA

SEQ ID NO: 67060 - protein, 355 aa, unidentified
MQSNKISFKGQNIYVGIDVHLKTWHVTMLTESGYKYSFAQHSDAKELFDRLNKKFPEAHYKSAYEAGFCGFSVHYALTELGFENIVVHAADIPTTGKEKAMKTDAVDSEKIAWSLKRDELRGIYIKDKCFMDDTNLMRLRQRFIMDLSRQKNRIKHLLYTQGVTYPERFHNSKTHWSRNFMKWLREEVELLSEEKMALTLLCDQVENTRMAILTVTREIRRLSTTDKYRENFSLLTSVPGFGLITSMSMLTEFDNNPTRFPNERKFVAMLGLIPTCHNSGEKKVSGEKTNRGNKQLGPLIVEASWVAIYRDYQLGAYYSSCCQSMKPHKAIIKVARKLACRAYAVLKTKTSYVLS

SEQ ID NO: 67061 - protein, 341 aa, unidentified
MAESVGLDVSMKETAVSIRRDGKRIWRGKCGSDPKLVAEVIRRRAPDAARVVFETGPLSVWFFHALTAEGLPAICIDARHAKAALDMAPNKTDANDADGLAQLAEVGFFREVRVKGFDSMLGRTLVAARNRLVQITTELSNQIRGLMKTFGLVVPAGKGSRFEAHVRALLADQEELAPIMLPLLDAWQAVRVRAAELGRQLVASARQSAACQILMSVPGVGAVTATSFATAVEDPENFRRSRSVGAWLGLTTRRYQSGEVDYDGHISRRGDTHLRGLLYEAATVLLTRTSAESSLRTWGLKLQERIGFKRAAVAVARKLAVVMHAMLRSGQLFDRTAGVAA

SEQ ID NO: 67062 - protein, 316 aa, unidentified
MSKRSTDYAGIDTGKHQLDAALHKRGEELQVKNSPEGHRTLSAWLRQHGIKRVGIEASGGYEMDVVAHLRREGFTVIVFQPAQVRAYAKFHLQLAKNDKIDARLIAACTAAKANIHAPPDPRLAPLAAHLTWIDQIGEDIACNKTRLETCRDPRAQAYWKQEIVRLEKLQKAEMALLEKAIRLHRDLAERLDLIASVDGIGLKTAVVILVRMPEIGRLSREQVAALVGLAPYDDDSGSRHGHRHIRGGRKRVRWGVFAAALPASLLHNQQLMAMYQRLRAAGKEHKVALVACARKLVIFANTVVARGTPWQPQGAL

SEQ ID NO: 67063 - protein, 339 aa, unidentified
MQLYSGIDLHSNKLVLGISDETGKRIMKKNLPNDSETVLATLEPFRAELVGVVVESTYNWCWLVDALMEDGYRVHLSNPCANQQYSGLKYRDDNHDAFWLSDLLRLRTLKEGFIYPKQERPLRDLSRKRLHLVRLRTSLILSLKGFIVRTCGIGIKTDSIKEDDINTLLRHMPTEENIRLLVKSNKDSIDFLGTQIHQLETSLLAQLKAKPLFKNLLTLPGIGKVLAWTIQLETGPISRFGKVGQYSSYCRKVQSRWTSNDKTKGKGNAKNGNKYLAWAYAEAAEQARRFYPACRKFYNRKLSQTNAAVAHHALAHKLTRAAYYVLRDNVPYDEAKLFG

SEQ ID NO: 67064 - protein, 407 aa, unidentified
MVDTVDIDLFLGLDLGKEFHHAHGLTGQGKTVHDRRLPNTEPRLRELFEKLVAKFGAVLVVVDQVANIGALPIAAARASGCRVAYLPGLSMRRAADLYPGEAKTDARDAFVIADTARTMPHTLRAVDRDDETLAELTMLTGYDNDLAGEVNRTTNRLRGLLSQIHPSLERVVGPRLAYPYVQALLQRHGSPARLKKLGRARCEALLKAHGSRKAHHLTTEIFDALAEQSLVVPGTEASALIVPGLAAQLAAAHAQRRQAEQEIAALLEALPLFHLLTSLPGLGVRTTAAVIVAIGDGATFPTAGHLASYAGLAPATKSSGTSIRGEHAPHRGNRLLKRALFQAAFAAIGCKSDPSSRIYYDRQRARGKTHTQAILRLARQRVNVIHAMIRTGALYEARTPGDVGLAA

SEQ ID NO: 67065 - protein, 354 aa, unidentified
MSNKSIATIATMGIDIGKNSFHVVGLDQRGAIVLRQKWSRGQIEARLANMPPCLIGMEACVGAHHLSRKLQAHGHDARLMPAKYVRAYSKGQKNDFRDAEAIAEAVQRPTMKFVATKTADQLDLQALHRVRERLVRQRTGIINQIRAFLLERGIAVRQGLRCLRTELPGILAKRTDVLSPRMMRIIEDLAGDWRRLDERIEGLSAKITSLVEKDPACERLMTVPGIGPIISSAMVAAIGTGDVFSKGRDFAAWLGLVPRQISTGDRTILGKISKRGNRYLRVLFVQAAWVVLIWPQSWERHGLKSWIEAAKKRLHHNVLAIALANKLARIAWAVLNKGRNFECARTNAMAPQPA

SEQ ID NO: 67066 - protein, 314 aa, unidentified
MNTLVFVGIDVSQAQLDVAVRPGTCFSVSNDEPGWTTVVAQMRRLAPVLIVLEATGGLEVPLAGALAAAGLPVVVVNPRQVRDFARATGQLAKTDALDAQILAHFAEVIRPQIRPLPDAQTQALAALSARRRQLIEMLTAEKNRLRTASPSIRKSLRAHMAWLHREQTRIDTELAQAIQDSPVWRDKDNLLRSVPGVGPVLTTTLLANLPELGTLTNKQIAALAGVAPLNRDSGTLHGKRMVWGGRAQVRATLYMAAIVATRYNPTIKTFYQRLCGLGKAKKVALVACMRKLLTTLNAMLKHRTHWRTEQPQHA

SEQ ID NO: 67067 - protein, 423 aa, unidentified
MMRIVYPICCGLDVHKNIIVATIVTTGKDGISEYQQKSFSTINSDLQKFHDWLIDNNCKHVCMESTGKYWIPVFNYLENDIDVSLTHPKYVKAIKGKKTDKKDSKWIADLYKFDLVRCSFIPPKDFRQLRELARYRFKLVCMKSSEKNRIQNCMTVSNIAIASILSDPFGKTATELMSYLLQNTADTIDDKAVRKLIKKGARAKSDEIFEAIKGYHIGSDQHKKLDLARAHLNYLDDMIRQTEIELYVRIKPYYEFVEHIATLPGITQLSATIILAEIGVDMNVFDDAKQLCSWSGLAPSNNESAGKKKSVRIAKAGAYLKPLMVQCALAAIRSKKQPYFAIKYGRIKKRRGHKKAIIAIARMMLICIYHMVIKKESFNPTDYSELMDPHFNQHKVILNDKNVFAYLESQGYDTSSLVKCNDN

SEQ ID NO: 67068 - protein, 313 aa, unidentified
MSNSPVYVGIDVAKATLDVAVHPTADRWTAAHTEREVAGLVTRLTALHPALVVLEATGGLEGPLAGALATAGLPVVVVNPRHVRDFAKATGTLAKTDALDAAVLAHFAAAVRPTPRPLPDAATQTLAALVTRRRQLVEMLTAERNRLGSAPRTLRAEIQAHITWLQRRLGRLDDDLNQAIRTSPVWRVQDDLLQSVPGVGPVLSATLLASLPELGRLDRKAIAALVGVAPLNRDSGTLRGRRMVWGGRAAVRAVLYMGTLVAVRHNPILRAFYQRLRAAGKLPKVALTACMRKLLTILNAMLKHQRPWNPNYA

SEQ ID NO: 67069 - protein, 314 aa, unidentified
MKMIERCYGGIDVSKDRLDVEILPDQQRFSVDNNAVGWSELVERLHRLSATAIGIEPSGGYERGVIRSLLIAGLSVRRINPNKLRQFARARGVLAKNDRLDARLIAEYVTIMPTRAVQRDPVTERLAEIVTTRRQLCDEHVAVENQTAHIEDALLRRLNKRRLARLKTDILLLDRRMAEIVATNADLTRRYELLTSMRGVGPTLAFTLIALLQELGQMGRKQIAALVGLAPYDFDSGKLKGRRCIYGGLLPVRNVLYMAAMSACRYNPALKVFHDRLAAANKKPKVVIVAVMRKMITTLNAMLRDNAVWHPKSA

SEQ ID NO: 67070 - protein, 408 aa, unidentified
MKTLLRRCAGLDVHKVEIVACLRLVEKGKVARRVRRFPTTTQGLLELVEWLEGAGCSHVAMEATGVYWKPVWHILDGHFALILANAMHVKAVPGRKSDVNDATWLADLLAHGLIRASFVPSTPIQELRDLTRTRKQLTREIVQHVQRIQAVLEEANVKLSSVISDIMGPSGRRILTAIIAGETDAEKLAALGSERLGCGRAALSEALKGRIREHHRFLFAQHLRTIEQLEESVAAFDARIAGALAPFRDVVERLNEVPGLGRIAIETIIAEIGTDMSRFPTAGHLVSWAGLAPRLDESAGKRRSTRIRNGAPWLKPALVQAGWAATRKKNTYLQAQFLRLKSRRGPKKALIAVAASILTIVYHMLRDGTFYRDLGPEYFARRSPAKLAANLANRIRNLGYHVEISAAT

SEQ ID NO: 67071 - protein, 346 aa, unidentified
MDVEHTPPPPAAPVATPAATPVVVFGIDVAKDKLDLARSDAAAAAAAAAAAVRTVANDDAGIASIVKDAAAARPAVIVVEATGGLERPLMDALLDAGLPVALVHPGRVRYFAKGLGLLAKTDRIDAAVLVRFGQLAAPRLAERRTANEAELQALVVCRRQLTVTRTQQANRLGATTASKPARKAIEAVIKTLDKQLDKLDAQIRALIDADDDFRHLDGLLQSVPGVGPTLSATLAAEFRELGDLDRRQAGALAGVAPFNHDSGAMAGKRSIRGGRAAVRCVLYMATIAAIKFNPVIRAFSDRLRAAGKVGKVRVVACMRKLLTLLNAMVREGLKWEQLDVVKKLAA

SEQ ID NO: 67072 - protein, 340 aa, unidentified
MDTHKDIHVAALITSTGIPLGHEVFPADSVGYRRLTAWVRSHGPVNHAGVECTGSYGAGLTRHLRDEGITVTEVNQPDKAARRRHGKSDPVDAEAAARAVLSGRATAIPKSADGPAEDLRAYKIAKDSAVKARTQTINQLKAVLVTAPSELRERLSPLSNPRLIAACADLKDSPSSGAIVYTLRLLARRIQNLTAEVRDLTGRMTATLRSHTPKLLEIQGVGPDSAAALLVAAGDNPERFSSEASFAALCGVSPVERSSGKTHRRRLNRGGDRQANAALYRITQSRLRWDPRTQAYLERRTRDGRSRRETIRCLKRYIAREIYRHLQSTVALNTAGLAAI

SEQ ID NO: 67073 - protein, 339 aa, unidentified
MAWTVAIGVDTHKEAHVAVACDRLGRQLDACELPAGAGGYARLLEWAEGLGSPAFAIEGCGSYGAGLARFLQASGAAVFECERPRRRERRRGKSDLIDAALAARRLVAGEGLARPRGGGRREELRLLLLERRGLVQARTAALNQLQAVLVSAPERLRVRLGSLRGTRLARAAQALRAGSDEERVLVGVLRRLARRVQQLEAELAELEAELEAIVSELVPELLAECGVGPVCAAQLVASSGDPARMRSEAAFAALAGTSPVDASSGRQRRHRLNRGGDRQLNRTLHVIALARVRHDRETAAYHQRLLGSGKTDREARRCIKRALARHFYHRLSANSALTT

SEQ ID NO: 67074 - protein, 349 aa, unidentified
MVLTVGVDVHKDTHTAVLVDELGREHTSRTVRATDAGHRALVAWARGQGDELRWAVEDCRHVSTRLERALLGAGQQVVRVPPKLMAGARHSARTRGKSDPIDALAIARAALREPDLPVAEHDQASRELKLLVDHREDLVAERTRMQNRLRWHLHELDPEIDPPARRLGEVGLLDALTARLAEHRGMVARLAGELIADIRERTLRIRALEREITTLTRQAAPQLLELPGCGALTAAKIVGETARPGRFRSEACFAMHAGAAPIPASSGRTDRHRLARGGNRQLNAALHRIAVTQTRLPNSLGQAYYQRRRAGGDTTMEALRALKRRLARVVFNLLQPPTTTAAAPQPAAA

SEQ ID NO: 67075 - protein, 434 aa, unidentified
MKLKETEQEKPIRAWIGIDWADEKHDVSLYDVATGKQEALIIRQSPEALQEWLGQVRSRYECGYVAVVLEQGRGGLLNALMGCEFLVLYIINPKSLSSFREAFYGSGATSDPVDAKLMRDMVRQNPSRFRAWRPDDVMTRSLRLLTEGRRNLVNQSTALTNQLTAFLKGYYPQALVWIGSLDTAWACNFLEQWPTLQSLQASSRRQILRFCEKHPRASLDLNEQLKQIQDALALTQDEAVLESSALMVRALVSQLRSLLASIAEFDRKIAMIFHKHPDRPIFESFPGAGAALAPRLTAAFGTDRDRFQAAKEMQELAGIAPVTEKSGKKSFVHWRYACPKFMRQTFQEFADHSRRWCKWAKAHYELLRRRGKSHNAAVRALAYKWIRILFRCWKDRQPYQDEVYTKALLKHGSPLSSLLAESVGNPSVGCEIRC

SEQ ID NO: 67076 - protein, 550 aa, unidentified
MPSISTKDHPLLGERFPQKSSRIEPLNLIEQEGVSRRAQHGRITLWRVFVTARGRDWFRSSACVLFGDPGSSGFPLGRLVLQETTGRTPAGTDNQPPTTMKALPVLDPKAAAIDVGSERLHVSIAGDAPKVFGTFTGDVEALRDWFHQQAVRTVAMEATGVYWLYLYEVLEGVGLEVVVVNGRHVQNVPGRKTDMADCQWLATLHAHGLLRGGFVPPADIRQLQDYQRLRSDHIIGAAAQVQKMQQALERMNIKFHDVISDLAGVSGLKVVRAILKGERRPGELLKLCDEQIQKKKSDRVKESLRGCWKKEQLFALRQALEVWEFYQKQIAECDREMEGLLQQLAGALPTGAAGQPPAASGGGIGPVKLAPAKAPGKNAPVIERFQEMLARICGGRDATQIPGLSTYLVLQLISEVGTDMARWKSEKHFVSWLGLAGGRKQSGKRKGSIKAHRNRAGRMFCAAARALAQSVDKALGGFYRRLRGRVGGLAANVALARKLALLFYRLLRYGMDYVEKGLKTYEAKVFETEARLLRKLASKQGFTLIPSTTN

SEQ ID NO: 67077 - protein, 370 aa, unidentified
MRHDSTVYVGLDIHKDSIIAAYAVGLGEIEDLGEVGVWQRDLDRLCTRMQSKASNVHFVYEAGPCGYSVYRYLTSKGHRCTVCAPSKLARKPGDRVKTDRRDAQKLVRGLRMNDLSAVHVPDIADEAFRDLVRAWCGARSDLRQAKQRLKSFLLVHDVRYTGKANWGEAHRRWLSKFVFAHSNSHIAFQEHLRTIEERLAQCERLEQNLREAAKEWRFYPVIQALQTLRGVQFTVAVGLVAEIGELARFDTPPQLMAWLGLVPSEYSSGPRKRQGAITKCGNSYARRLLIEAAWAYRYTPKVSPTIQKRHEGMPKPIVDRAWDAQVRLCKRFKKLTARGKPHNIIVVAIARELTGFIWDIARLATPRSTR

SEQ ID NO: 67078 - protein, 388 aa, unidentified
MTQTPVSQPHPVAPDHNNTLVLAIELSNKSWVLAAQVPGLARVKAKQTIEPTFEALLAALQGYRERANSAGRHVERVIATYEAGWSGFWLARLLATHGVEVQVVQPSSVLVDRRARRAKSDGIDAELLLRTLLAWLRGEPRVCSMVPIPDEGDEDARRSVRERAELLTERVALVNRIGAVLATMGCADYNPLLRNRRRRLNELRTAFGTSLPPHARAKISRMLDRLELICAQIAELERDRDAVLQEAEPNKAVEMIQQLVKLRGIGVQSATVLVREAFVREFANGKALGSYAGLCATPYSSGGTDREQGISKAGNRRLRTVMIELAWLWQRYQTGSAEVDWFRARVSGTGARMRKVMVVALARKLLIALWRFATQGVIPGGAVMKPAS

SEQ ID NO: 67079 - protein, 410 aa, unidentified
MDSNYAVYCGIDVGKGEHHAVGLTAAGKKIYDKALPNDEAKLRAVFDRLASHGSVLVVVDQPNTIGALPVTVARVGGHEVGYLPGLAMRRIADLYPGQAKTDARDAFIIADTARTMPHTLRRVDTGDEALAELEVLVGFDDDLAGEATRVSNRIRGLLTSIHPALERVLGPRITHPAVLEILSRCGGPAGIRQAGKRKLTAIAVKHAPRMGARLATDILAALDEQAVVVPGTAAAETGLPKLADSLKETLSQRKAVAADVERALDDHPLTRVLTSMPGIGVRTAARILIEVGDGSAFPSAAHLAAYAGIAPVTRKSGSSIRGEHPARSGNKKLGTRPVPVRLRRPPRPHQSRLLRQETGREEETQRGPDLPRPTPLRRPLRHAQEQGTLPESNPLSGLTKTIGTPPRFCS

SEQ ID NO: 67080 - protein, 358 aa, unidentified
MLGVDVGKAELHGTWRDPETRRIRWQGAVPNTSAGIETLLRRAPQTPIVVEPTGRYGEPLIRAAQAAGREVLLAAPRKARAFLWSEQPRAKTDRVDSAGLALYGLTGRLRPYLLPSPAVDQVKQLLAARRGLSQSLTSLRQQRATLPLAADVLTPAITALERQIAELDRQMKRALGAATEPPAQRALPAAAAAAPTVTDPDTTVAAAAPRGHSLTTAAAALMAIPGIGEVTAPALAACLVDKQFTHPDQFVAYVGLDLRVSQSGQRRGQVTLSKHGDAELRRLLYLAALSAGHATHDTTFATRYQREQAKGLAKTAALNAVARKLAKVTWSIVTHGTTYDPKRVDSQPVDDKPLDNQP

SEQ ID NO: 67081 - protein, 400 aa, unidentified
MAVAVGVDVAKEFHWAALVHAETGKVLASRKVGNDPAAIQALIDEIRAAELEHGGATVAIDVLGGIAGLLQAMLAESGLRLVHVSGLAVNRARRATRGGEHKSDPRDAKVIADQIRLRGEELRVVTPAGEADAELRLLVGRRRELVVDQTRRIGRLRDLLASIHPGLERVIDPTHKADAALLARYVTPIEIRRAGRRRLTEYLRTTGRHNTSVLDALVGKALTAAAAQHIAVPGEAVAANIVRDLAREVLTCRDKLAELDKRILEALDRHPDAALIQSLPGMGATLTAEFLAVAGGITRFPTGNQLASAAGLAPVLQQSGKMHYLRRATSGDKTLKRIFYQSAFCALQRDPTSRAFYDRKRAEGKRHHQALIALARRRINVLHAVLRTRQPYQTNFALAT

SEQ ID NO: 67082 - protein, 385 aa, unidentified
MQVKIEGQSHFRPFGLPYWGFADLNKGVGSMTASYDYHIGVDYHKSYSHLVVQDSSGKTLRSGRVKNDRQSLGGFLERYRKNSHAVVEATRNWMVMYDWLDDICDDVVLAHPWKVKAIADAKIKTDKIDATVLAHLLRDDLVPEAWAPSERSRELRVALRERMFYVRLRTMVKNRIVTVFDRYPEQTAQLKKLGDLFGKAGRIQLAQVKVSEIDRIQIDRGLEFIGDIDVRIKQSEATIRAMTKANANVKLLKTIPGIGEFFARLIDAEIDDISRFRNPKKLAGYAGLVPSTHSSGGKTFHGKIIKQGNKWLRWAFVEAVAPAIASDAQLQAQYEHLKFRGVNKARVAIARKLLTIAFQILRDQRAYEQRDTSTTEGASTISRLS

SEQ ID NO: 67083 - protein, 405 aa, unidentified
MATNMQYERAFGLDLSKKTFHGCILDGPDLAKRHFFTGEMGPKGKAQLAGRLCSGDVVLMEAGTSSFSLARFLLENTEAEVVVLNPAKLYNIFNSTMKTDKVDSEKISRIARNMPRDEWPTVSIPTKSEQAERSAVSMEVFLAQEITRLVNRVYALFNSMGHPFISKKELKDEETRLVLANRLLCEEPVAFYQLLMLSEQIKMVTGHLEECKQTLREICLAHPMQALSLLSLPGVGLMTAASQIAFLGDASRFNSPDSYVNYVGLSERRFDSGNRVSKGHISHMGNRCIRRNIVQAAWVASTRLQRNPLSNRYEEFLWRGKPKPVAVVAVAKKMIQLSYILVKNGDLYEFTKQQGFATFRRKLQYHGLAALLDYLPERTREQMEEIDRREKEEAAATTSIHKKLA

SEQ ID NO: 67084 - protein, 419 aa, unidentified
MTSDFEWYAGIDWASEQHRVCLLDGGGGPAGEREFAHSGDGLAELCAWLIAMSGCEPHKIAVAIETPHGPVVEMLIDQGFAVHSINPKQLDRFRDRFTVAGAKDDSRDAQVLGHSLKTDAHAFRRLVVDDPMIIELREWSRLGDDLKQERNRLANRLRQQLWRYYPQMLELGGDDIAADWLLALWDEAPTPAKAAEISTQVIAPLLKAHRIRRFEAADVLRILRQKPLTVAPGTIAAASAHIRILAERLRLVNRQVKEANRKLDRLCRKLGQAPESEAGNRPEQRDVAILRSLPGVGRINLAALLTEASEPLKRRDYHALRLMSGVAPVTRRSGKACLVIRRLACNARLARAVYHWTRVASQCDPISQKRYAALRQRGHSHGRALRTLGDRLLGLACTLLRRQVLFDPDYHCKEVAAAA

SEQ ID NO: 67085 - protein, 362 aa, unidentified
MSLDPSRPWESRSAAPFTTDKPGQLMGLRARMLQGRVPFDNPTHTMNTQQSFVGIDIAKDRLDLDTCPRADPWNTTNDAQGINQVIKHLRERQPALIVLEATGGYERVLAAALASDGLPVAVVNPRQVRDFARATGQLAKTDAIDAQVLALFAERIRPEVRPLPDAQQQALAALVARRRQLLEMLQAEKNRLHLAHKAVAAEVRSHIRFLEKRLDKADRALQTAIEASPVWRAKENLLRSTPGVGPVVSATLLAELPELGRLSGREISALVGLAPFNRDSGKFRGQRCIWGGRVSVRCALYMATLVAVRHNPVLRRHYGQLLGRGKAKKVALVACMRKLLVMLNAMMKTQTHWNADFGCESP

SEQ ID NO: 67086 - protein, 345 aa, unidentified
MKIVGCDLHTRYQQIAMLDKETGELVERRLEHESGEARAFYAGLRAPVRVGIEATGHTRWFERMLGELGHELWIGDAAQIRAAMVRKQKTDARDAAHLLELLASERFPRIWRPTLAERDLRQLVWHRQKLVWMRNAIGNQLHSLAMGEGVCRKKKLFTQKGRTELEGLKLDPWASRRRQELLRWLDQLDASLEEFDQAVGEQAEQNAAAVLLMTHPGVGPVTSLAFVLTLGPVGRFGRSKQVASYLGLNPREHSSGGRQKLGAISKQGNPIMRSLLVEAGHSAARLDVELRQDYQRLKLRRGSGVAKVAIARKLAVRMYWMLRRQVNYAQLVRMQGSPWGTLVPK

SEQ ID NO: 67087 - protein, 394 aa, unidentified
MILVGIDIGKNKHTFSIIDKNSGEILLSPSDFSNNLKGFLFLIPKLSSYTKSKLLIGMEDTGHYHFALLKYLLDRRYTVALINPTTTDLTRKLQGGITKNDPLDSLTICDVISSNHRNKPYRVTTLNRFDLYEQKQLTRHHHNLKEELNTYKNRLQKCIDIVFPEFNSLFHSKYGIVYMNILKTFSSAKAIANADIRSIRKCFEFKGQGKRISLSAEQLKLTAKSSIGIPSVAEEIQIRHLVSQIELLEKQLSEIDKRIEEFSLKNNSPILTIPGISHFSGTSIISELGDICNYTKASQIIKFAGVAPYHYESSQFTAHHTAITKKGSKYLRKTLYQIILPVISNNEVFYAYYTKKLNEGKGHRCAQGHCIRKLLRVIYHLLSTRQPFNPKLLV

SEQ ID NO: 67088 - protein, 424 aa, unidentified
MRFIALDVHRDFCEVAIAEGGEVRLAGRVKTSPDELGLFAGSLAADDQVVLEATGNALVIARILEPNVARVVLANSKAVKGATQTAKTDKLDARALAKLLAAGFLPAVWTPDEQTRVLRRRISRRAQLVRQRTREKNQVHAILIRNLKQRAPAADLFGAAGRRWLATQQLPADEREMVEACLRGIDFLNGEITAIERALAELVLASAELRRLMTLPGVNSVTACALMAAIGDVTRFPTARHLVSYLGLDPRVRQSGSEPARHGRISKQGPGETRHVLVEAAWHAARTTGPLRAFHERIRARRGGNVATVAVARKLAVIAWHMLTRGQDYAFARPSLVREKLRRLELMVGAERRQGKRNPVRVFATREQHQLDKELAAQAELAYRRLVQDWHPANKGAGAAPGRASCGPSSGQAARQETAPPPAL

SEQ ID NO: 67089 - protein, 464 aa, unidentified
MHLGGFSPRLFNVDELPKRTAVCCITQVKSTSSKVRIPTRAIPSLHISGRDLMQDILTCAMGLDVHRDVIVACLARGELGTEPEIEIRSFSTLIPEMRKLRDWVLEVECRHVAMESTGIYWQPIYEMLEPCFDGQINILVVNARHMKNVPGRKTDMRDAQWIATLLRAGLLNGSFIPDKTFRELRHLTRYRKSIVHDITAQKNRIDKFLQSSGFRFTAFLSDAFGASGRNIIRHLMEYGDISREALDKCLKTQTRKRIDEILVALNGSLSEHQRSFLRMIFEHLESLERHRHTVEDAISEEIVKHEAALSLLCSIPGIDVTAAASIIAEIGTDMSAFPDSQHICSWAGLSPGNNESAGKRKSAHINKGNPYLKSMLCEVGWVISGKRTLYLSGWYWRVKQRKGAKRATIALARKLLVLIYTMLKTGTPYNEECFEIRRKQSERKRASRMVNELQKLGYFVVAPD

SEQ ID NO: 67090 - protein, 472 aa, unidentified
MARAAGLQGESQHHKRRSGRGRSAPLAQMHLNAAGIDVGATEHWVAVPADRDEEPVRRFGAFTADLYALAAWLQQCQIETVVLESTGVYWITLFEVLEERGFEVKLVDAHYARQVPGRKTDVKDCQWLQELHTYGLLHGAFRPEDQVCVLRSYLRQRSMLVAMASRAVQHMQKALEQMNLKLTEVVSDINGKTGMEILHAILAGERDPQRLASHRDRRCKHDQATIAKALEGHWRAEHLFALQQALEQYEFLQQQLQACETQIEACLQTFVTHVDVDTPPPAPARKRRARQRHAPDFDVHGYLAAMTGVDLTQIDGIDALTALKVISEIGLDMTRWPTGKHFASWLGLCPGNKVSGGKRSRMRSKPTANRAASALRLAAQGLVNSHSALGAYYRRMRARLGAPKAITATAHKLARLVYSMLRYGTAYVDAGQQAYEQQYRDRVLTNLQRKARVFGYQLVQEGTGSAQAAATL

SEQ ID NO: 67091 - protein, 318 aa, unidentified
MSSAAPAFVGIDVAKAELVIAIRPSGEHWTIANDVAGIHTLVQRVRSHAPTLIVLEATGGYERAAVAALAAAQLPVVVTNPRQVRDFARATGQLAKTDRIDADILALFAERVRPAPRALPDDAAQALDALLTRRRQVLEMLIAERNRLEHAVPTVRRGLTQHIRWLERQLDDVDRDLDDAIQASPVWRAKENLLRSTPGVGPILSRTLIGELPELGTLPRKQIAALVGVAPLARDSGTLKHKRLVWGGRAPVRAALFMAALVGTRCNPVLRAFYRRLLAAGKPKKVALTACMRKLLIILNAMMRTNTAWHHIDLSPTT

SEQ ID NO: 67092 - protein, 356 aa, unidentified
MAIVADTYTYVVGVDTHAATHHYAIVETRSGGQIAHGKFPTHPAGLLRAVDWISRRTSVDGSPAVDQVLISMEGTGSYGAQAAELLAARGYRVVDAPSPKRDRGSGKNDHIDALVAARGALPRNSERLADRRAGHTRAALQILLTARDSMRRDRTRSKNALTALLRRHNLDIDARKGITRAQISTIAGWRRRPTDTTITGVARAEAHRLATRIHALTVDLASNEKAVHALVRELEPTLLDLPGLGPINAAVVLTVWSHPGRIHDEAGFAKIGGVCPLEVSSGNSKDHRLNRTGDRQLNAALESIANTRMRHDETTRDYVKRRKEQGQTKPRIRRCLKRYIARQIFRHLTATSLDKT

SEQ ID NO: 67093 - protein, 385 aa, unidentified
MKQAAGIDISKDSFHVCLKEQSDDGRVKIKRSHSFPNDYEDFKDFPEWSRKGLPKGMSLKFVMEATGCYQEDLAYFLHDNGQEVCVVLANRIRHHAGSLNVKTRTDKADAALIADFGLERSMPAWQPTSLNYRELRDLCRELSSIKKDLTRAGCQLHAMEHSHHKNARVTALKTGQIEFYTQATEEIEAEIRKLAEEDRELKERVDRITKVKGLGLITVVTVLCETNGFRLFSNIRQAVSYAGPDVVLKESGNFKGRTRISKKGNAAIRQCLFMPALSAANHNKNMKTFYARIVEKNPQAKRKAIVACMRKLLTLIFVLWKKGEEYDENYLWGKDAGKARTEADQREEAPSADKEKRDTTCPALDRPCRTAHELRSSLNGSKSMD

SEQ ID NO: 67094 - protein, 409 aa, unidentified
MLKIVYPNCCGIDVHKTFVVAVIAITNNQGITEYHRKRFSTFTNGLTQLRDWLEYYSCFDVCMESTGKYWIPVFNILEEQTNVCLAHPKYVKAIRGKKTDKKDAQWIADLFKHDLVASSFIPPLKIRQLRDLFRYRMKLTQLQVGEKNRYQNCLTWSNLQIASVVSDVFGKSAQAIIKSILDNPQDKPNIEQLVHKRMKNKVQDLEIAMEGALTPEQAEKIRVIKAHYDALAICKEDLEQMIRELGQDYQHQVKLIQTVPGFKEDLSALRIISEIGCDMTVFDSAAKLCSWAGLVPANNESAGKKFSTRISKGGKYLRPFLVQVANAVVKSDKHPDLRNKYLKLKKRRGHRKAISAICRRLLVSVYQVLRKQEDYNPVLQGLTEIRNPDKTMSVQDAVRFAQQHGFNVA

SEQ ID NO: 67095 - protein, 307 aa, unidentified
MPKFTVGLDIAKSVFQVHVIDQSGQAVIQRKLRRNSVLKFFADLEPSVVGIEACHSSHYWGRELIKLGHTVRLLPTQYVKPFVVGGKNDANDAAAICMAVSRRDIHTVPVKSAEQQSLQSLHRMREKAIQERTAKSNQIRSMFSEEGHIFPAGLPSLRKGILTLMDDGEAGLTPILKRLGQMYLEQMAVLKAWLDELDAMIDDNFKNNETCQRLATIPGIGPVIATAMVGLVGDPAQFKNGRRFAAWLGLTPRQHSSGGKTRLSGITKRGDGYMRKLLVQGARAVIYNVQKNLYQQPVKACCREKFV

SEQ ID NO: 67096 - protein, 430 aa, unidentified
MNFLPNYISVGIDVAADFSWFCILTPDGKEFKKPFKVEHDNADSLKNAVLTIKKAEEQFSMKSKIFLESTGIYHFPLFCHLKELGFEVFVINPLITNSNKNIGIRKVKNDRFDAKRIAAIGYSPDTKLSVMPTELILNLRCLCREYYSLADNRTSYVNKLKAQLHIVFPGFCKVFSDITGITAISVLKRFPTPEDVINAQPDEIIELISLLSRKGLNYAKAKYDKLFKSAKNALNFRYNLSSVYDVLKMYIYFIEEFDKKINLILSAIKAFVDKNKSEKFVQQIYYLDSIPGVGFLSAVTLMCEIGDFSAFSKPKQLFAYFGVDPSVNESGHFKGTDNKMSKRGSKIARRVLYAIALASVRVKRNDIAINPVLYDYYQKKKESKPKKVALGAIMHKISDIVFAVLRDNKPFVLKTPDEHKLQYQNIHKAA

SEQ ID NO: 67097 - protein, 322 aa, unidentified
MAMLSFGGIDVSKDRLDVVVLPEEECSSVPNDAAGWAELVERLRGFSITAIGIEPSGGYERGAMRALLAAGMPVRQVNPFKLRQFARASGVLAKNDPLDARMIASFVTIMPTRPAQRQTPAAERLAEMLAIRRQLSTEKVAAENASRLLEDAMLQRLSRRRIVRLAADIDLLDKRMVEIVATDDALVHRYRLLTSMPGVGAVLACTLIALLPELGRMSRKQVAALVGVAPYAFESGTLKGRRCIWGGRAHVRQVLYMAAMSASNWNPVLKAFHDRLTAAGKLPKVVIVAVMRKMITMLNAMVRDDVVWADRLSGRHVLPTAR

SEQ ID NO: 67098 - protein, 313 aa, unidentified
MSNSLPQTIGIDISKKHLDAHAHPCGDARQFANTAPGFAALLKWTGQWQVERIAYEATGTYHRAFEQALASLPLVQINPLRARRFAQATGTLAKTDRIDAGVLARMAATLQPDVRPVKSPELAGLAELMNARDGLVRDRTALKNREKNLLLPLLKRQAKARLEQIARHIEAIDKQAQALITADLALARKREIIASIKGLGPITAAQLIATMPELGSLENKQAAALAGLAPITRQSGQWAGKAHIHAGRANVRRSLYMPALVAARFNPDIKAKYTHRISSGKPAKVAITAVMRKLIVMANALLKADRLWKESIA

SEQ ID NO: 67099 - protein, 320 aa, unidentified
MTYIGIDVSKDSFVAAYPAKSGYSTKSFFNTTSGVRRFISSLPPNCHCVMEATGNYSMLLLYLLQQANITVSMENPQKIKHFARAMLSTTKTDEIDAKLIAMYGEKMEPAPYKIPSESIILLKQKRTVLKQLKKQLLMMTNLQESMAVLPKQDPTSKVSIEQTIKFLRKQISKMEEEITNLSNKEYKRQMDLLTSIKGISNTIASALIIATGGFTYFSSAKQISRFLGLCPTYQQSGTSVNVKGHINRNGDTYLRSQLYVAAVSSIACNSACREAFLKMKERGKSGKVAIIAVANKLIRQAYAVVTNNQSYIDGYVSSFH

SEQ ID NO: 67100 - protein, 426 aa, unidentified
MKSTQNEKISQIKFSTLVVGIDVAKETHYARAFDFRGIELSKLLRFSNTAEGFQRLEEWMQNICRQHSKTDIIVGFEPTGHYWFPLGDYLKNQGHKLAMVNPFHVKRTKELDDNSPSKNDRKDPKTIAMLVKDGRYREVYIPEDVYQELREAVSERDRLVQRIISISNQVTRWLDIHFPEFNTIFKDWRRKAALQILRDFPTPEKIVAAGAERIEEAWKSAMKRTAGLKRAQELVKVAEKSIGRKTGLVAAEASLQNLLKEYDLYSQQYQQLEQLMLELLQQVPNAEKLLDIKGVGLITAATFVGEVGDIRRFQDPRQIQKLAGFNLVENSSGKHKGKSKISRRGRRRLRHGLFMAMITILATNPEFRQLHKKNISRENNPLNKMQSIIALCGKLIRVFYALLRTGTEYSADKMMGDIELGMKAAA

SEQ ID NO: 67101 - protein, 340 aa, unidentified
MKKEKQCYLGIDVSKSWFDLSMISVIDNEKQAMISVRFNNDEQGIKQLNKWLKENEVPFNGNSLLVVENTGVYHRLLWAYCSNKNLPIHIGNAAQIKWSQGITRGKNDLVDSQRLCIYCLRHADDLKATPALDPVLLKLKDLFTARSRLISQCNSINVYLHGLKRANTPDVQQLMESAHKPATEGLKKSLEEVEAQILRIITASEAIKRSYDLLLSVPGIGHVTTIYLICCTNNFAGNVSGKQLASYAGVVPFGHSSGSSIRGRNKVHKMANKELKKLLHMGARSVATHNSEFRNYYERKKAEGKHDLAIINAIRNKMVLRVVAVIKNQRKYVDNYQKAA

SEQ ID NO: 67102 - protein, 397 aa, unidentified
MYIVGIDIAKRKHEAAVIDGEGTVIIKPFSFTNNCSGYNRLLAMLAKAKLPLDEVSFAMEATGHYWLALFTRLQKEGFRVQVINPVQTNSIRSFYIRQAKTDPRDALLIAEVIRFGHFSESTLHPENIYELRELCRGRHAIVSMQADVKRKVVALLDQVFPEYETAFTNMFSDTSMAILQNCPTPKELSEMPLEELCHLIEVSSHKRFRMAKARELQELARNSFGFAMAGDVFSTMIRLYAKHLDFLKQQVREMDRKIAEIMDTLDTPITTITGIGPTLGAYILSEIGDINRFSSSAKLAAYAGIDPTMRQSGEYNGVRNRMSKRGSPYLRHAIWLATSSAVLHDPALKLYFQKKRDEGKPYMASVGHACRKMVSIIYAVMRDNKAYTPCIPNEISA

SEQ ID NO: 67103 - protein, 404 aa, unidentified
MPEQSDFQRWIGLDIHKAYFVAVGVNAEKRTIFGPQKIPNDQLETWISKHLQPTDAVVMEMTTNAYLFYDTLVPHVGSVIAVHPPNVRLVTGVRVKTDKKAAETLAQLHAAGMLTGVWIPPVEVRELRAVIAQRAKMVRLATQAKNRLNSLLHRTHRERPAQPFSPEQRFWWESLPLTTFEKYIMQSDLETLAFAEKQVEAIEEILRQEAAKDERVPLLTQLPGVALLTALTILAAIGPIERFEDAKHLVGYSGLGASVHDSGQTHATGHITKAGRRDLRGAMVDAANAAVRHHPYWKKEFERLEFRLGRSKAIVAIARRLLVAVWHILRNEAADRHADVTSVAASMFKLAYEIKVRNLPDGLSARAFTRKQLDRLGIGQDLDILPWGGTKIKLPPSTLPLEKK

SEQ ID NO: 67104 - protein, 358 aa, unidentified
MDGSKEHPLMTAGLDLGDKYSYLCLIDQHSGEVIEEGRLRTTPEAFRRRFASEQPMRIAIEAGTHSPWASRVLEECGHEVLVANARKLRLIYANKRKTDEIDAENLARLARLDPKLLYPLKHRGEESQAHMAIIRSREALVSCRTQLVNHVRGAVKSFGARLPKCPAVSFHNKAAEHIPEALMPALGPILEQIGALTQRIRDYDRQLETISKERYPETELLRQVEGVGPLTALTLVLTLEDPYRFEKSRSVGAYLGLVPARDQSGDRDPQRRISKEGDELLRRLLVSGAHYILGPFGSDSDLRRHGQKIATRGAKNSKKRAVVAVARKLAVLLHSLWISAEVYEPLRNTQRSSGGQAA

SEQ ID NO: 67105 - protein, 399 aa, unidentified
MRPVIGIDVAKGKSVIQAFIKRNAPYGRDQVIWHTLNGLEHLLRVLREMEIKTKMKPAVILEPTGHYHRVLVQRLQSEGYDPILINPLQAQRARRTSLRKVKTDASDAWHLGDLYYQREDWITQPQREEHLVDLQFLTRHHEFITSLYVQAKLNLRTLLDQVFPGYEGVFKDLFSKTSLNLLEMLLTHEKVQSGEEEEWKEAVRQATRTSRSEAWMNRKIDHLRTAMLQNPVTYVPFGLETALRSMLATVREFQVQLTELEKTILELSELIEEVKLLETIPGVGAKIAASIVAEIGDATQFQNAKQLVAYAGLDPSVFSSGKFTATQNRITKRGSKRLRRAVYLAVTCGLRVGLNLHLREYYDKKKSEGKPHKVAVIACANKLLHHIYAMLKRRQPYTY

SEQ ID NO: 67106 - protein, 346 aa, unidentified
MAYYVGLDVSVKETSICIMDDKGVVAARTDISTDPDLIAGFIFRHAPKLERVVHESGILAIWLTRELEKRGVPIICIDARLAHKALSGRINKSDQGDAEGLAQLARTGWFSQVHIRSEASERVRVLIGARERLIRMRKDLEGHVRGVLKVFGICMTSVATGKLRKGFRDQLTAVADTDPAIKMMSETFAPLHKTLCIARDALDDEVRAIARESDLARRLMTVPGVGPIVALAYIATLDDEKRFRKSIDVGAFLGLTPKRHQSGEVDWSGKISKCGDCDMRRLLYSAASTLISCTRKPSRLKEWATKLAERKGHKKAAVAASRKIAVILHCLWRNETVFEPGMEGTS

SEQ ID NO: 67107 - protein, 385 aa, unidentified
MKGQTFKPTDYEVFAGLDVDKRSISVTFTNHQGFIRSLRMPYSVEHLVTHVRKHFGDQKVAFAYEAGPTGYGLYDGLVAQSYPCLIASPSMIPKAPGQRVKTNRLDSRGLSENLRGGQLKSIHVPSALYRELRHLTQLRDTFVSEMVGMKQRIKSLLLFEGIEFPPAPAGRQWSFMVKDKLRKLECSKTVRFKLDQLLDSLEFSEKQVLKATREIRRFCHNDAELSQCIEYLMTIPGIGWIVASQLVARIGDWRELKNIRQLGGFLGLVPTENSTGERTDRGSITHTGDGRLRSKLIQASWLAIRQDGELRQFFRSVCQTHARHLASRVAIVAVARKLSVRISVVLMKQRPYEVRQKVQSAPLTQEETSPQGTTRREPEPGEKNS

SEQ ID NO: 67108 - protein, 532 aa, unidentified
MGWFACNTHGTAQQADISVAVIHERAKQPATARRSEVVNNCAADDNCGGGRPALVRSRSQQAHPQRVRRRLPGEPVAHAQTSNRKRPREGHYISSMGGMAKRRKQHQPPQQTMNDSPQWQQYQAFGALDWGSQTHSVIVIDAAGKVMEDFAIEHSALGWKQFRQKLQVYGSIPFAIETSQGAAVEQLLEAGMIVYPLNPNRAQAYRQRKAPSGVKDDRLDAWSFADALRVDGHGWKALQPEQPLTKELRLLCRDEVSLIEQRTALIQQLRQALAEYYPAALEAFEDWTSVSAWMFLQRFPTADSLAQAGRRQWQKFLHSRRLWGSDQGPRRMEIFAHATELAGSEPTVKAKSLLALSLVQMLFAVQKQLELYRQRIEELFARHPDHDLFGSLPGAGSKLAPRLLSEIGDDRQRFEADAQALQCFGGTAPVTIRSGKDRKYWPVHQRQACNKHLRHALHLFAEQSLSRCVWAHIYYQHHRQKNQSHANALRRLAHRWLKIIHKMWLDRSPYNAELHHRNQLQHGSWIFQFQKS

SEQ ID NO: 67109 - protein, 347 aa, unidentified
MSKETAFWFVGIDLHKDTMTVCLYCPTSGEVRYRKLACKCREQVAEFFRGLPRPHVVAIEAVGMYRWLWELLEPIVQGLLLADATAARALAGRRLKTDREDAFNIADLLAHGRLPVAYAPPGEVQELRDWTRRRNRLSRDHARTLHWIKSLMNLNNRPGPARLDGEGLVRYLKGQGDKLPTRHRTVLWDCVDQLTLIERQIQAAERELIELLKRPRFQATAEILTTFPGVGLVTLATVLAEVGDFHRFTHRKAIARYAGLNPTVHASGGKNCTGHIAKAGPPDLRWILQQAAWTAIRVEPHLKRMWLKISRSAGKKAAAVAVARKMLTWMWYAVREGKPYRSHVQAA

SEQ ID NO: 67110 - protein, 411 aa, unidentified
MQVVYNRCAGLDVHKKTVVACVITPKSPSGWHKQIRAFTTMTQDLLKLSDWLTSHDCTHVAMESTGEYWRPVFNILEGNFEVMLVNARHIKAVPGRKTDIKDSQWIAELLQHGLLRASFIPPVEQRDLRDLTRHRSNFIRERVNLVNRVQKVLEAANIKLASVASDVMGVSGRAMLVAIVEGSASPELMADLAKGTMRKKHDLLIQALEGRVRPHQRFILAQLLCQIDSIDETIKCFDQQIEEYCRPFEQAVDLIDTIPGIARRTAEIIVSEIGMDMSRFPSAEHLAAWAGVAPGNHESAGKTLSTSTRKGNRSLRTILVQAAHALARTKTYLAAQFRRISGRRGKKRAAVAVAHSILTIAYHLISRQEPYKDLGADYFDKQRPESVKKRLVKRLEKLGYQVNLEPVPVAN

SEQ ID NO: 67111 - protein, 379 aa, unidentified
MDTLYKRCAGLDVHSETIVACALVGESEADMETETETFPTLTKDLFRLLKWLEEKGVTHIAMESTGVYWKPVYNILEDFFDITLANAQRIKNVPGRKTDVSDAEWIAKLLRHGLIEKSFVPQEDFRNLRDLTRLRKKWIGHMTSEKNRIQKVLETSNIKLGTVISDVFGVSGRKLLEQLMADGYINPEEVEQKIHGKMAHKKQLITDSLFGTLNDHQLFLIKQSWMHIVYLEELISEIEMRIDHILLGYQEELQLLITMPGIKKDTAAIIIAEIGVDMGQFPTSKHLASWAGLSPGNHESAGKKKSTRTVKGNPHIKSALCEAAWAVSRSRNKRLSNMYWSLAARRGKKKALVAVGHRMLTIVYHMLQNREPYHELAVN

SEQ ID NO: 67112 - protein, 318 aa, unidentified
MNVIGLDISKDTMDVTLITAKGEIDYIKIGNSHEGFEKLIAWIKTKRVRKIVISMEATGVYYEQAAEYLSAVYTVYVINPLKIKDYAKSQFSHTKTDKADSKLIADYAKRHLDKLTPFRPSENPTLYKLINLLQQLKQQKHESQNRLHTAKDPFIRSTHETIILLLSNKIDETSKRIDSTIKQQKSLNAEYKNLQTIPAIGKDTAAILLRHLTDKTFRTANQFVSFAGLSPKIEQSGSSVNKKGRLSRYGHRQLKRALFMPALVAYRINAFPQLVKNLEAAKKPKMVVIVAIMRKLAKIAYYIHKTQKPFDKARHQTV

SEQ ID NO: 67113 - protein, 419 aa, unidentified
MAFKIFRFNCCGLDVHKTWIFACIGITDSNGLTEYKQKRFSSFSRGLRELAAWLASFNCADVCMESTGKYWIPVFNILEKTCNVILAHPKYTKPQKGNKTDRKDAKWICDLFMCEMIKPSFIPPARIRHLRDLVRYRLKLVNMLTGEKNRAQNCLTVSNLKLDDVFSDAFGKSSRSITEYILAHPGETFDVSPFVDSRCKSPIEEIQAAVDGAISSEQAVKLRQCLNHIDELENHKEKMEREILRFSDPYLDTLNLIRTVPGLGKNPFTAIQILSEIGDNMSVFPTDQHLVSWAGCCPRNDQSSFKIKSTRISRSGSYLKPVLVQVANALIKSKKHPEITERYRRIKSRRGHKKAIIAICRMLLTAIWHILTDSKPYTAEGYLSPRPVKIEKILTASQALNLLKLRGYVIKDDLPVTAS

SEQ ID NO: 67114 - protein, 404 aa, unidentified
MVFLGVDWAEEHHDAWLENEQGEMLGQARIANDVGGVRQLHELVAEHADDPSQVVVGIETDRGLLVAALVGAGYQIYAVNPLPVSRYRDRHKTSGAKSDRADAKLLADLVRTDRHNHRPLAGDSDLSEAIKVLARAHQDLVWTRKRFINRLRSALREFYPAALEAFETDLGGLDAIAVLERAPTPWQGRQLSQAKIVSALRKAGRQRYLEHKAAEIQRSLRSEQLQAPSQLQAAMATVVSSCVAMIKSLNLQLEQVGAEMSASFKAHPDAEIYLSLPGLGVVLSARVLGEFGDDRARFADAKARKAYAGTAPVTQSSGTKKIVLARFARNRRLGDACYWWAFSSLTCSPGANHYYRALRTRGKTHHQALRGLANRLVGILHACLAASQTYSESVAWPQPQKIAA

SEQ ID NO: 67115 - protein, 312 aa, unidentified
MEKLSYGGIDVSKDRLDVVVLPEGWFFSVSNDTAGWAELVARLRPLAVCAIGLEPSGGYERGIIRALLAAGLSVRRINPNKLRQFARARGVLAKNDRLDARLIAEYVAIMPTRVVQRDGAVERLAEVVTMRRQLCDEHVAVENQAAHLQDAMLRRLSKRRLVRLEADIRLLDKRLAEMVATNAAFAQLYELLTSMPGVGPVLAFTLIALLPELGKMSRKQIAALVGLAPYDFDSGKLRGHRSIYGGRMPIRNVLYMAALSASRYNPALKTFSNRLVHANKKSKVIIVAVMRKMITTLNAMLRDNAAWQPRSA

SEQ ID NO: 67116 - protein, 356 aa, unidentified
MKNDNTRLPGSGLTVGIDVGDKYSQICVLDVAAEVIDEGRVRTTWSAMGGRLGAMARCRVVIEVGGHSPWLSRLLEELGHECIVANPRRVRLIADSAKKNDRIDAETLARLGRADPALLSPVFHRSEQAQADLAVIHSRRALVETRTGLVNRVRSLAKAYGARLPPCDARYFPERVAARAPPQLGEAIRPLLEVVATVSAQIKTLDGRLESMIAERYQQARLLEQVTGVGPVISIGYILTIGDPHRFKSSRQVGAYLGLVPRQHSSGEKTPELGISKTGNVYLRQLLVNGAHYILGSRGPDCDLRRWGLRKAEGGKNAKKRAVIAVARKLAVLLHRLWITGEVYTPLLHEEEVKAA

SEQ ID NO: 67117 - protein, 418 aa, unidentified
MNEDGNTRGIRRYVALDIHKHYCVVAGVDREGRVLLQPVRVEHSDLEGWLKKNLSSTDHVVIESTTNAWHVYDLLAPLAERVLVANPIQVKQIARARVKTDIRDTLILARLLAANLVPVVWVPPVHVRQLRQLLSQRRQFVETHTQIVNRMHSVAHRHHLSHPAGKRFNEKNTAWQKDKRLSQIEQFQLGLEMENRVYIEKQIGRIGKEVAKMSHQKPWAESMTYLMQLPGFGVITGMTVLAAIGEIQRFDSARHLASYSGLTPGLEQSGTKYHEKGITKEGRKELRWAMVEVAQRAVKSDPLWKHRFQELQKRMHRNQAIVAIARRLLELVWYVLTRRQPYRHFSQERIAYKYLTWAWQMDDEARDGLTRQQFTRYYLMRLGVGHDLSRIALDPKHPRKIASEAELLALRPELQHIE

SEQ ID NO: 67118 - protein, 346 aa, unidentified
MKILSLDLGKYKTVGCDYEGESGRHSFRGSLTTPAALQQLVRDVKPDRVVIEVCSIAGWVCDLLRELGVEVQVANTNEDAWRWRKVKRKNDRSDALKVAQLSAVNQLREVHIPQIEVRQWRALIGYRQQLVWRRVKVKNHIRDLIMREGQLLPRGRSCWTQVGMAALEAMARPMSEVGLSELWRGELGLELEQLRALQQEIAVVEEKLDIIAAADPRVRLLRTIPGVGPRLSEAIVALLDRPERFRNASQVSAYIGMVPKEFDSGETERRGRITRHGSRLVRSLLVEVAWAGLRYNPWVRETYRRISGGKKSRRKIAIVAVGRKLLVRCWAMLRHGTAWQWSPEVT

SEQ ID NO: 67119 - protein, 357 aa, unidentified
MDYRIGCDAHKHYSQFAVMDEEGNLLAQHRVDHQPGAIQAFLEDMPEGTPVALETVGNWYWIADEIEAAGCLPLLTHAAKAKVMMGNVNKTDKLDAKGLAKLLHLDSLPTVWLPSGEIRDERELHRTRMALSKLRTALKNRVHATLAKYGITSTEYSDIFVGSGRAWLATTLPQLPPETERCVAQELEALDGLQNQIALLEQRIRERIALTPSIQLLKSLPGVGNILAIVVEREIGSIDRFDTSGQLTSYAGLVPTVHASGGKTHFGHMRKPSNQYLKWAFIEAANVVVRHRHHPAWKVTYVCQIYDQVSQRKGHAVAVGAVARHLAEGAFWILKRQQPYRPPAVRQASPKQVRGRA

SEQ ID NO: 67120 - protein, 351 aa, unidentified
MPRTSTVHAVTAIGIDMGKNTLHMIGLDARGAIVLREKVSRGRIALRFANMPPCLIGIEAGLATHYVARELAALGHDVKQVPPAYAKPFRQVHKNDFRDAHAVAEAVQRPTTRFVPAKTDEQLDLQALHRVRSRLVSGRTAVINQIRGFLLERGIIVRQGLRFLRQALPDILAKRTDVLSPRTVRIVADLASDWRQHDERIEAVTDEIDTLAKSDDSCRRVMTVPGIGPIISSAMVAAIGSGGAFARGRDYSAWLGLVPKQMSTGDRTILGRISKRGNGYLRMLFMQAARVILMRPASWPKHGFGTWLARAAQRLHPNVLAAALANKLARIAWTVLTQERSYEARVTMTAA

SEQ ID NO: 67121 - protein, 371 aa, unidentified
MDPPLCRTALMSQNGCHEFRHIIHPQEASPVNQHIRVLGIDIAKQVFHLVGMDGRGTVVLRKRLYRSQLMAFITTLPPAVIGMEACGGAHDWARRFREHGHEVHLMPPQFVKPYVKANKNDMRDAEAMAEAVTRPTMRFVPIKSVAQQDIQAWHRVRTRLLKARTALIHEARGLLLEYGIVVPPGALTFRKHLLATLAANDAKLTPMSRVLFQQLAEELAALEDRLTRSDTQLTQLARHHPVCQRLMTIPGLGELTATALVAAVSDAAQFKNGRQFAAWLGLVPRQHRSGGKARLLGISKRGDRYLRTLLVHGARSCLRWVDRQRDRRSQWARSLLERRGWNRAAVALANKNARVAWVLLRTDQVYCAVEA

SEQ ID NO: 67122 - protein, 360 aa, unidentified
MLYLAIDQHRRQLTVNLRNEQGDVLVKRQVSTEWPRVRSFLDEVREMSVSEGGFIAILEVCGFNDWLLKLLAEYGCRETILIQPEKRSKKKTDRRDAYALGELLWVNRQRLLAGKKVQGIRRIQLPTDREAEDRQLTAVRQRMGRQRTRTINKIKHLLRKHNLEQQQPAKGLDTQRTRKWLATLPLEPIDRLEKDLLLAQWKLWDDQLARLELEIEKRQAKNAMAAVLATIPGCAAYGSLALASRIGSIERFPRPASLANYWGLTPGCRNSGEATDRLGSITKQGSAMARFVLGHMVLHVLRRDARMKAWHGRIKRRRGSKIARVAVMRRLATIIWHMVKHHEPYAVGGPPQRKPSAQAA

SEQ ID NO: 67123 - protein, 410 aa, unidentified
MSYTVAAIDVHKKLLVVVVADAAQPDVTLQARRFGTGAAELHHLAGWLEDLGVAEAVMESTAPYWKPVWMEREPHMRLHLAQAQSNRAPKGRKTDFGDAQRLWKRFVAGELMLSFVPGTEQRAWRMVTRGRLPLVRERVHLQNQIESLLEEGRIKLSAVISDLLGASGRRILRAMAKGETNAETLAELGDQHLRCGHEVLVDALTGSMGGIHRQLLKQHLDRIELGDRQIEEWNKLAAAQMQEQQAAVVRLIEVPGIGAEAAQEILAEIGPTAAAFPSAAQLASWIGVCPGSSQSADHNHSGRSAKGNRFLRRLLCQAAQAAARTKGSRLESLFKRLIVRLGYVKAIWAIAHRLCRIVWNILHQGARFIELGEAINPKAVQRCINHHLKALRRLGYQIPAAVAPAGIPSR

SEQ ID NO: 67124 - protein, 438 aa, unidentified
MSNKVIFNLDELFISVGIDVGADFSWMSIALPNQQFVGKPYKILHNSIDSLTTAVSKIKEAEELYSLESRIFLESTGIYHYPLFCYLRDKGFNCSVINPIITKNSTNINIRKVHNDRFDSKKAALVGLKPDLKVSLMPSDLALNCRNLCREYYDLMDNRSAYVNKLQGELRMAFPQYLGIFSKVTINTSLTLLETYTSPSAFLKADKQEIIDIIKSTARFGLTYAQNKYNAIIQAATDANQFGYIIDSNIKRIRLYISFIRKYDEEINSILESLHELVDANEDSDFVKQIHLIETFKGAGFLSAVSIMGEIGDFSAFSKPKQLFAYFGLDPSVKQSGKFEGTKVQMSKRGSAIARRVIHTLTLQSISISRNREAKNPVLREYYLKKCDSKPKLVAMGAVSHKVCNMIFAILRDNKPFKIIAPQEHIKQYNSAKCDIAA

SEQ ID NO: 67125 - protein, 387 aa, unidentified
MILVGIDVAKDKHDCYIMTSEREVLFKSFTITNNMEGFNQLYEKILSVTDNLDKVKIGLEATGHYSYNILGYLLDKGLTPFVINPLHTNLYRESLSLRKTKTDKVDSRTIASMLMSDVSLKPYSDTLYHNEELKSLTRYRFDKVQQRARLKTSISRLVTILFPELKKLVPTLHMKSVYSLLYEFPNAKAIAKAHLTRLINLLYASSKGHYGKEKATSIREAAINSIGSYMSAKSLELKHTIKLIEELTSEINEIEQEIKSIIDKLNSPILTIPGIGYSMGAQIIAEIGDFKSFDSPDKILAFAGLSPSTYQSGKLYSSNAKMEKRGSRYLRSALFNAAVCVCRLEPTFALYLAKGKHYYVALSHAIKKLVRLIFHLEKTGEHYVALT

SEQ ID NO: 67126 - protein, 288 aa, unidentified
MEERSKFYVGLDVHKDSISVAAAEPGRGGARLMGKVTHDVNKLLKVLAKIGTAEQLHIVYEAGPTGFGLQRALSERGYLCEIIAPSQIPRRPGDRVKTDGRDCIQLAECSRAGQLSAVWIPDPSDEAIRDLSRAREDAVNSRVQARHQLKGFLLRHDIRYTGRTSWSIALYRWLATLNFGAGATQTAFTEYWQAVESADERVERLTKALQSSITGWRFEPVVGALQALRGVAAITAIGLVAEIGDLARFSHPRKLMGYLGLVPSERSSGERISRGSITKTGNAHTAGS

SEQ ID NO: 67127 - protein, 459 aa, unidentified
MTNYFFGGDVSKGYSDFTVLDHNKVIVEPNFRLDDTYTGHENLKAFIERFHSSHPDSFLNVGLESTGGYENNWYNTFLNLSERFNLKVARLNPYGVKHYKEAGLKRNKTDKICAQNIAEYLISYDEKIRYNEMKNDVGLKKQWKLIRLLTKQQTQLLNQFESLLYNTHPQLVSYCKDSTPNWVLEVVQRYPTARRLSRVNAKTLAKINYVTLERAKELISDARKCIGAAQDELTQLCMKSLAGQIIHLQRSIKDQIKEMIKACHFTEKIELLKSFKGIGEFSAVGIMLVIENIERFPTSKKLVSFCGVHPILDDSGDKNGGYRMSKQGNKEMRFILFNVAMSAINCNTMIKELYESYQEKGKTKMCAIGIMMNKILRIVYGMLKNNKKFDPSIDNANRSKKVERNEIGIINRDRRYQEPDEKAPISRRQTKKRKQNKKIDNMVVMVEREEEKSQNEERK

SEQ ID NO: 67128 - protein, 342 aa, unidentified
MSIVYVGLDLGSSNFQQVALNHDGVSRVNRDFITSEANLVKAFSDLKGEIQVHLEAGELAPWAASIIAPLVTRVVCSHPQSNAWIAKDADKCDRVDAYKLAELLRLNRFKEVHYAPDQPRRNFKQLVQHYDELTAQQARLKTKLKARLRMQGVMVTGERLFSATGRKEVLARVESRDLRTAITQLYSVLDQSVEAQTKARWLMLRAAQAFPEIKLFRTAPGVGPIGACRFSAYVHTPSRFSTTRKLWKYCRLSVSHRSSNGKPLRRPRLDRSGCGRLKDVSRKAFEVAIRSQKDNGFKRTYQRALETTHDATHARLTVQRKIVSTLRAMWLNQTPYCDELMR

SEQ ID NO: 67129 - protein, 343 aa, unidentified
MVVIGVDAHKRTHTMVAVDELGRTLGERTVAATSDGHLQAVQWAARWPGARFALEDCRHLTRRLEGDLLRAGFAVVRVHTRLMAAARRGGRQRGKSDPIDALAVAHAALREPDLPVACLDGPARTVKLLSDHRQDLVAERTRLCNRLRWHLHELDPGLDVPSRGLRRYHVLDGLAARLAVMDGVVARIAAGLVARCRELTGQVNALERELGTLVRQLAPALLAIPGCGVLSAAVIIGETATASRFRSRDAYARFTGTAPIPVWSGNTVRVRLNRGGNRAVNCALHMIAVTQARGIGPGKDYIAKQLAAGKTTTEALRLLRRQLSDTVFRALLADEHRQAHRTA

SEQ ID NO: 67130 - protein, 373 aa, unidentified
MGKATESLAGVTRIGLDLAKTVFQVHGVDAKGEVVIARKLRRGTILEFFGRLVPCMVAMEACGSAHHWGRQLVALGHEVKLIPPAHVKPYVRRTKTDAADAAAICEAALRPGQRFVALRSIDNQAAVMRHRVREQLVGQRTALLNALRGHLSEIGVVTAQGAQHAYRLKRMLTDGADENGEIVIPERVCVALAPLAAQIDALDQAIAAIDDKLIETVKGDEKARRLMTIPGVGPVIATAVVATVGEVASFASAREFAAFLGLTPCQHSSGGKERLGRITKMGDRYLRKLLVVAATTVLHHARGHNDSLRRWARQMLERKGGRAGFKLVAVALANKLARISLRRPPGRGLNEKVSAKRGFTARLKGVEGDQRVM

SEQ ID NO: 67131 - protein, 351 aa, unidentified
MPKVRSWVGLDVHAARVVACVVDAESGEMTVHRLAGVTIGVVGFCAGLPGPVRVAYEAGPTGFGLARALAAAGIECVIAAPGKIERPSRDRVKTDVRDAERLVRLLMIDALHPVRVPSEQEEALRDLVRAREDLREDLMRARHRLSKLLLRHDVRYEDTTSRWGERHRRWLARVELPEPGAQLTFSDYLGAIEQLTIRRDTIEQAIEGLIPSSSWALTIARLRCLRGIDTLTAVGLCAEIGDFRRFQRPGQLMSYLGLVPSEHSTGETRRQGQLTRTGSRHARRLLVEASWHYRRPPRLGTVLERRQQDQEPAVIAIAWKAQQRLHRVWRRLEQKRGMSLTEFHGEWICRF

SEQ ID NO: 67132 - protein, 407 aa, unidentified
MDWAGEHHDVFVTNERSEKLGAFRIAHSIEGIDLLTKRLRDLGGAPAAVQIAIERPDGLLVAALVEHGYAVYPINPKAVDRYRDRHHTSGAKDDARDAQALAHILRTDGEHFRPLAPESELAAELRLTIRAYRDLVVEGVRFTNQLHSCLGDYYPAALGLFSELDAAISLAFLLAFPTPDAARAAGRDRIIAWLKQQGYAHPKRAEQVVERATAKALAAGAGVVRARSRQMVGVVAALQAVIAAKQAHVKALEELLGQHPDGGVFLGLPGAGVVTAAALLGELGEDRDALPNAQALQSVGGTAPVTIQSGKSRRVVRRHACNRQLNEALLQFARCSLMRAGCGDEGVAWVKEAYLARRQAGDTAQQAYRVLANRWATILWAMWTRHEAYDHERYAKARAARALPKAG

SEQ ID NO: 67133 - protein, 313 aa, unidentified
MSPSLVYVGMDVAKASLDLHAPSAPSAQSRQFANNSVGHRRLVRWLHAVGLAHVVCEASGGYERTAVTALQQAGLAVSVVNPRQVRDFARAQGRLAKTDRLDAQVLAQFGECLQPTATPVPSLVQRQLAELVARRQQVQQLRIAEHNRLEHITHPAVRGQLQHHLLALDRQLQHLQAWITELIQTEPALAHKVARLCAVVGVGQITAAVLLATMPELGTLNRRQAAALAGVAPFNRDSGPRRGHRLIGGGRAVARRALYMAALVAAFNNPRLQVFYQRLITAGKAPKVALVAVMRKLIILLNQLLKNPELQPT

SEQ ID NO: 67134 - protein, 407 aa, unidentified
MQYKDRPVLARGRAVVGIDIGKRKHSAVAIGPQGEKLASLASFDNDRAGVDRLEDVVLRVPGPPKKTLFAMEATGHYWMPLYHELVRRGYEGVVLNPIQTHGESRTRIRKTKTDHKDAEGIARFILTGKAHATRIPDEATEELRIMTRRLHQLTQMKGDVERAAHSLVDRAFPEYSGCFSRPFLQSARKLICEVGLTPDRIAREPDGVRVLLRRAGRGQLSDTTINNLITRAQTSIGIGRASMVINEELATTVEIIEELEMQIVLLDARLTSIMEERESPLMSLGIGTSLAATIHAESDPASDFPSARQYAAYAGLEPDTFQSGAMTGTKAHISKRGSPLLRHALFQTAFAVYQRHSCFQRIYTRFRKKGHKHTAALVIVARHVAMVIWRMLVDNRPFSKRPPQRAK

SEQ ID NO: 67135 - protein, 375 aa, unidentified
MNMNAVGIDVSKRKSTVAILRPGGKIVVKPFDVPHLSTDFQSLKELIRKLDGETRIVMECTGRYYEPVARELSQDGFFVSAVNPQIIRNFQGQGNPLRKVKTDKADSVKIARYTLDSWANLKQYSLMDELRSQLKTMNRQFDFYMKHKTAMKNNLIGLIDQTYPGANTYFDSPAREDGSQKWVDFIDTYWHVDCVRKMSLSAFTDHYQKWCSRRKYNFSKSKAEEIYGKAKELIPILPKDNFTKRIIKQAIDQLNAASQTVEQLRALMNETASRLPEYPVVMAMKGVGPSLGPQLMAEIGDVTRFTHKGAITAFAGVDPGVNDSGDYSQKSVHASKHGSPVLRKTLFQIMDILIKTKPDDAVYRFPAFLKMHHSK

SEQ ID NO: 67136 - protein, 332 aa, unidentified
MFQLGVDVSKNTLDLCLLRDGVKGRVKTRKLKNDLSATSAVINWLHKQHCEPVEVHIIMEATGVYHESLAYGLHKAGARVSLANPHRSREFARGMGMLTKNDQVDAYMLACYGALREPIPWTPPPENVRYLSSLLRRRDALVADSTREKNRLEKCRATDCPPVISESIESMLQRLSSELEHLDKLIREHLEQHPELKKDFDLLTSIKSVGFQLGLNMLVILRSHHFDTAEQAAAFLGVVPVEKTSGTSVSGKSRLSKIGPPEIRAKLYLASLCGLRFNPVMKAMYERLCQCGKPKMCAIGALMRKLVHWCYGVLHTQRPFSAEYLRSACKGA

SEQ ID NO: 67137 - protein, 417 aa, unidentified
MNSLPETIPIKRYIGIDSHKHYVMVGGMNAQREWTLRPRKVQMPRFRAWAAQNLKAGDAVVLETTANVWDIYDIVSPMVTKTVVANAYKVRQIAEARVKTDKEDVKRLITLLIADIVPEVWVPPMHVRELRSLISFRWRIGKQLTMSKNRLHSVVQRFNLRPPEGQLLADKNQTWWNEQEFSALTGFQVQLDLEIITHLEAQKAKIDQKLAELSNTAPWSDEMVYLMQIPGFGLLTSMILLAAVGDISRFSHSKKLVGYAGLGAGVHSSGQKHQEKSITKQGRKELRWILVQAAWAAVRSDPYWMAQYKRLTKIKHPNKAIVAIARRLLVSAWHILTKHEPYRRADDETIAYKMMIWSQRMDEKALRGLSRQQFIKYGLLRLGVGQDLTRIERKGIPRRIAPTDEVLKLLPDLKPPG

SEQ ID NO: 67138 - protein, 407 aa, unidentified
MVDTTAIDLFLGLDLGKEFHHAHGRTQDGRTVHDKRLPNTEPKLLELFTRLVAKFGTVLVIVDQVANIGALPLTVARAAGCRVAYLPGLSMRRAADLHPGEAKTDARDAFVIAETARTMPHTLRAVDRDDEVLAELTMLTGYDNDLAGEVNRTTNRLRGLLSQIHPSLERVLGPRLAYPYIQALLQRHGSPARLKKLGQARCEALLKVHGSRKARHLTAEIFDALAEQTLVVPGTEASALIVPGLAAQLAAAHTQRRQAEQEIAALLEALPLFHLLTSLPGLGIRTTAAVIVAIGDGTSFPTAGHLASYAGLAPATKSSGTSIRGEHAPHRGNRLLKRALFQAAFAAVGCKTDPSSRIYYDRQRARGKTHTQAILRLARQRVNVIHAMIRTGALYEARTPGDVDLAA

SEQ ID NO: 67139 - protein, 344 aa, unidentified
MIYIGVDLHLRFCYMTALDASGTLLQHGRVGNDPDSLRGYFGRWQRSSKEEEQAVWVAVEACGFWAAFVERVEPLVERIVLVHPAKVKAIASAKLKNDRVDSATLAQLLRAHLLPEAWPADQATRDLRELLRLRVALGRQRTRWKNQIHATLHRHGLRAPVSDLFGLEGRAWLQSVALRATARQLCDTYLRLLDQIDQEIYPLDRQLRLRAQADPDARHLLSIPGIGAFSALVLKAEIGDIGRFRSKRSLYNYAGLVPVLRQSAEHTRRGGITHAGSGTLRWVMSEAAMSAARYSSGARAYFERLCQRKHRHVARTALARKLLGAVYALWKHGVCFDEQVFAAM

SEQ ID NO: 67140 - protein, 350 aa, unidentified
MRTVAEEYARVVGVDTHAATHTMTLLIGATGAVVEHRTFPTSAAGLRRALTWIRNRTQDQACLVVVEGTGSYGAGLAEHFTQGGIVVAEAPTIPAARPRGKDDAMDSARIARAVLGLRLDQLCWPRAGGTRTAIRVLVSARDQMSTERTKIINALTALVRSVDLGVDARKALTSAQITTIAGWRARDEDPAVAACRREAIRLASRIHALGRDLAANMAELRQFTAAQVPELLDLPGVGPVVAGTILLAWSHPGRVRSEAAFAALAGTSPIPASSGNTIRYRLNRGGDRQLNRVLTTIVLVRMRHDQTTRNYLARRRAEGRTTKEIMRILKRYIARQVFRLLAAAHPTPTA

SEQ ID NO: 67141 - protein, 369 aa, unidentified
MQEGTTYVGLDAHQESTNGAIILTSGEVVEDRFATTPEGIRRWARRLKRRCKGRILCCYEAGPLGYALQRTLVSLGMECIVIAPSLIPSKPGDRIKTDRRDALKLAELLAAGLLTEVHVPTPEQEAIRDLCRARESVKGDQKRIQHRLSKFLLRRAIRWTHGRKMWTGAHRQWLRGLRLGHVADQDILDDHLLALEQNAGRLAALDEKLAHWATQEPYAEPVAWLRCFRGIDTLTALSVAAEIHDWRRFPSPRALMAYLGMVPSESSSGGKIQRGRLTKAGNRRVRRLLIEAAWHYRHRPSVGYRLAKRRVGQPAEIIAIADRAQQRLHSRYARMSARGKRHNLVIAAVGRELVGFLWAAMQRTEIPSA

SEQ ID NO: 67142 - protein, 349 aa, unidentified
MSQTSNTAIAVIGIDIGKNSFHVVGHDARGAIVLRQKWSRGQVEARLANVPPCLIGMEACVGAHHLSRNLASLGHDARLMPAKYVRPYSKGQKNDFNDAEAIAEAVQRPTMKFVATKTAEQLDLQALHRVRERLVSQRTGVTNQIRAFMLERGIAVRQGIGFLRMELPTILATRTDALSPRMLRVIEELAGDWRWLDQRIDGLSGEIEALARLDQACLRLMTVPGIGPIISSAMVAAIGTGDVFSKGRDFGAWLGLVPKQISTGDRTILGKISRRGNRYLRVLFVQAARVVLARIKHLERYGLKSWIEAAKRRLHPNVLAIALANKLARIAWAVLHKGRAFECVKTNEA

SEQ ID NO: 67143 - protein, 334 aa, unidentified
MQNITLIGIVLGKHSFHIHCQDKSGKALLRKKFTRTKLMQFLATCPPSVVVMEACAGAHFMARRISDFGHETKLISPQFVRPFVKSNKNDFVDAEAICEAASRPSMRFVQPRTEPLQAMRALHRVRESLIRDKVKTTNQIHGFLLEFGISLPTGDAVIKRLSLVLAEHEIPEYLSRLLVRLHTHYLYLVEQIAELESELSQSINADDTAQRIMTIPGVGPITASLLSSQPGDGKQFSCSRDFAASTGLVPRQYSTGGKLTLLGISKRGDKNLRRLLVQCARSFMMRLERQHGKLAEWVREQLNKKHSNVVACALANKLARIAWVITTQQKEYQA

SEQ ID NO: 67144 - protein, 366 aa, unidentified
MAKNGTLAKIEELQPSFQTTTEQITIGIDLGDRFSHCCVLGPDGKILTEGRLRSTPETMARHFQDLPPSRIAIEVGTHSRWVSQLLGQWGHEVIVANPRNLRMIADSIRKSDQVDAHMLARLARVDPKLLSPIAHRKQELYPDIIQLKARDLLVKNRTRLMNAVRGVLKSAGLRVPNSGTSCFPSKAAACIPDELKLSLTPLLETISHLNKQIYSLDKAIESTAQNRYPETNRLRQISGVGSITALQYVLTIGDPGRFAHSRDVPAYLGLTPRRHQSGSVEQQLRISKAGNKQLRCLLVQCAQYLLGRFGPDSDLKRWGTRMFERGGKNSKKRAIVALARKLAVLLWVTGDTYHPLYNVANSSVTP

SEQ ID NO: 67145 - protein, 370 aa, unidentified
MSQSSTLFIGMDVHKDSIAVAYVAQDHGAEVTYLGASGTRQCDIDQLVRKMQSKAKHLIFVYEAGPCGYWLYRSLTRKGYDCWVVAPSLIPHKPGDRVKTDRRDAMQLARLARSGDLTVVYVPKVEDEAIRDLSRAREDAISDLKDAKFRLKAFLLRQDIRYVGRAHWGPAHLRWLSEVVCPTPAQQIVFQEYVRAVQEHTERLQRLEQELQEQVNAWRLNPVVEALQALRGVQFTVAVTMVAEIGDLTRFDTPRELMKFLGLIPSEYSSGEQRRQGSITKAGNTHARKAVVEGAWAYRYPAKVSRHLQLRLEKPPKMIQDLSWKAQVRLCTRYRRLVSRGKHANVVTVAIARELVGFMWAIATQVPLTA

SEQ ID NO: 67146 - protein, 348 aa, unidentified
MRFYTTTHQYYCGIDLHARVMYLCIINSDGEIVLHRNMKADPESLLKAIEPYRPDIVVGVECIFTWYWVADLCAEEEIPFTLGHALYMKAIHGGKAKNDRIDSGKIAAMLKGGMFPMAYVYPAKMRATRDLLRRRNYLVRKRADLIGHVQNTNSQYNQPPFGACNIAHKCRREEVLSHFIDPDVYMSMKTNMDMIAQFAIQIRAIEKHVLDNAKNHDPQSLHLLRTIYGIGKVLSLTILYEIGDIDRFPRVQNFASYSRLVKCARESAGKRYGTSGSKIGNVHLKWAFSEAAVLFLRGNPEGMKYKKRLEMKHGKAKSLSILAHKLGRTTYYMLKRKNAFDMKKLLRA

SEQ ID NO: 67147 - protein, 378 aa, unidentified
MQIIGIDPHKGSHTAVAVNADGTVSRSVRVASSRRQVDRLLAFAVGWPDRVWAVEGAAGVGRLLAQQLVARGEHVVDVPSSLSTRVRVLSGRSGRKTDAHDASAVALAALHNPALTRVLTEDASRGMRLLSDRRLQLTAARTQAVTRLHGLLAELIEGGAGQQLSATTAAVLLRRIHPSTDVDIIRKDLARDLLDDIRRLDAKLAANHRRIAEAVATSGTTLMTIQGIGVITAARILGHTGPVARFADRAHYASYAGVAPIEASSGQVQRHRLSRRGNRQLNSALHGVAITQQRHPGPGRDYHAKKITQGKTTGEARRALKRHLADLVYATLVADAQRSPGGQVGASTRSSAADLIPMANTSDKSLPGLHPQATTDVA

SEQ ID NO: 67148 - protein, 414 aa, unidentified
MKLFVGIDVSSQELEACLMNPDGEKLDTLKVNNDLQGASHLRDRIVAAADKLSASEIHIGLESTSVYSWHPAMYLHQDPALKARNAKVFTINPKLISKFKEAYPDLDKTDRLDAWIIADRLPFGRLTMTVVMQEQYIALQRLSRMRYHLIHSLTREKQYFLQNLFYKCNAFTSEVESSVFGHAILEMLSEKYSLDDIATMDVADLADYLKEKGKNRFPDPEHVARCIQKAARDSYRLSKVVEDSIDLVLGVSIQTIRSIQAQLKELDKAIERILDGMTGAKRLRSIPGIGNVYAAGILAEIGDIERFDNQAAVAKYAGLTWRRHQSGSFEAEDTKRIRSGNRFLRYYLVEAANSVKNREPEFGEYYRKKYQEVPKHQHKRALVLTARKLVRLVDALLRNDQLYTPRRKVNSAKG

SEQ ID NO: 67149 - protein, 373 aa, unidentified
MPRYSTAFGMDVHLRSTTVCALDAETGEAVARRFRGNPWGEVAEWMSGFPGPSLAAYESGYLGFAPQRELSALGVDCVVAAVSKVPRSAADLSSKNDRNDAARMAKAILSHDVTPVWVPSPEIEGLRDLAAAHDAATARLAAAKQRLLAFLARRGYVYGGTTPAGNPRKYWTYGFLRWLDKVRPADDGGIRALAALRNEVEAADEAREALLAEYRAAVAAGPLSAEVEALQSIKGCGFVLAAAFASEVGDFSRFRSGRQVTAYFGLAPKQRSSADSVRLGGISGAGNALVRRLAVEGSWRYAQAGHQPKLMPKGSGVPLEIRMHGRKGSERLLRRREEMLERGMPQAKANAATAAELVRWLWALGMMCREAGE

SEQ ID NO: 67150 - protein, 354 aa, unidentified
MKRTTKHVALDVHQATTIASVREDSGRVIARTILPTEDGPIVEFFRGMRGAIHVAFEEGTQAQWLHELLDPLVQEVVVCDRRGEARRGNKGDQVDADALSELLRRGSLRAVYHGSADRATLKELTRAYQNLVEDATRVMLRLKALYRARGIPAPGKRVYHPAERAAWLARLTNPGARCRAEALYAQLDPLRALHPQVKAAMVAEARRDPAWALLQTIPFYGPVRVALLLATMQTPWRFRTKRNLWAYAGLAVVTHTSAEYLLVAGRPVRRRRAPLTRGLNRNYNRVLKNVFKGAATAATTQPGPFQEFYQGLLARGMREELARVTLTRKLAAVTLRLWKKGERFDPTKLTVQAR

SEQ ID NO: 67151 - protein, 400 aa, unidentified
MRSIGMDVHRSFAQVAIYDDGQITESFRVDMEHDAVVAFGRSLRSEDEVILEATGNTSAIVRLLAPFVNRVVIANPLQVKAIAHARVKTDKVDAKILAQLHAAGFLPEVWAADDETLHLRRLVSERDATVRSIRRVKSRVQAILHANLVPKYAGHLFGKGGRKWLGKVPLPKSERDLLGRHLDELDWLSRKLEELEKDLIGISLDDTRARKLMTIAGISSVIATAVIASIGDISRFQTPEKLASYFGLTPRVRQSGDRGAIHGRISKQGNATARTMLIEAAWGASSVPGPLRAFFLRIKDRKGANVAAVATARKIANLIWHLLTKDAPYQWARPAFVAMKMRRLELRAGAPKAHGKAGPGRDYWIKELRHREMELVANAEASYAKMVEAWREKPPKPQEN

SEQ ID NO: 67152 - protein, 350 aa, unidentified
MIIIGADYHPAFQQIAWVDSESGELNELRLEHREGAEKFYRDLGAQGMKVRVGMEASGHARWFERLLAELHFELWIGDAAEIRTKRVRKQKTDRQDAHLLLRLLLEDRFPRIWVASGENRDLRQLLWHRHRMVQTRTRLMNQLQAVALNEGLRCKKRLWREAGREQLEGFRLAPWASRRRRDLLELLDRLNPTIAELTEAIEQEVEKCPEAQRLRTHPGVGSLTALAFVLIIGKAERFQCGKQIASYLGLVPSEESSGDRRRLGHITKQGNSLLRFLLVEAAQVTVRSDQEWRSKFFHLALRRGRKIAKVAMARRLAVRLYWMWRKGWDYEQLKKFGSHAGQPGHRHGVH

SEQ ID NO: 67153 - protein, 336 aa, unidentified
MMPHTVTPIRSASNPSLPGHVVAFEVSKQQLVVQALPADGQHAIANVPSSVRRLLKAEIRRNSRLGLGRMLVVCEATGGYERHVLDAAIGLGIEVHLAHGSKVRHFARYKGRNAKSDAIDACMLALYGAETADLRRYQPPSQANRDLRALDARRQELKAALQAESNRLEHASHPVVLASLQASLQSLSRMLKAIETEIERLVARKADLARKVALARTVPGVGPVVATTLLAHMPQLGSLTRGEAPALAGLAPYDNDSGKMRGRRHIQGGRSAVRRCLYMAALVAMRVCPHLRAFAGRIRARGKPFKVAATAVMRKLIVIINAVLAAGQPCNYAKPA

SEQ ID NO: 67154 - protein, 344 aa, unidentified
MKKIVKQVCGIDVAQNELVVCFATLNEDYSLNLTASKTFVNKKSSFSQLLSWAQKLADRNVSLLFAMEATGVYHEQLAYFLDDRRQKVSIILPNKISNFMRTLEIKTVTDSTAAQAIARFALERSGLELWKRPKAIYRQMRNLTRERDQIIHERTMVKSQLHAERAQAFAESGTVKRLEARITLLDKQVNQILAELKALVKSDPEIESAVELLTSIDGIGELTAFIILAETDGFALIKNRRQLASYAGFDVKEKLSGTSVKGKPRISKRGNKYLRKAMYFPAMRSAKAEGSHKAAYAQIVARTGVRKKAGVAVQRKLLELTYTIFKTQKPYDPEYYKRQEVQLV

SEQ ID NO: 67155 - protein, 414 aa, unidentified
MLKIVYRVCCGMDVHKSFVVACIASTNEQGVTTYKSKRFSTFTGDLRRCAAWLSENNCKDVCMESTGKYWIPIYNILERTCNIVLAHPKYVKAIRGKKTDKRDAKWIADIFKHDLVAGSFIPPADIRQLRDLFRYRWKLTNFATGEKNRAQNCLTVSNFKLDDVFSDVFGKAASAITARILKNPSEKITDVSGFRTKRMKATDEEILAAVDGEMCAEQAEKLSIIRSHMDSLELCKLNLESLILSTAEKYLPQLELVMTAPGIQSFAAIGIISEIGVDMSVFPTSKHLCSWAGLTPQNNESAGKKKTTRISRAGAYIKPLLVQCALCAVRAKQFPEVRNRYLALKKRRGHKKAIIAVARMLLTAIYNMLKKNEPYNSELYRKGDRPPAHREVSVEEAVFILQRQGYLVSAPPTP

SEQ ID NO: 67156 - protein, 466 aa, unidentified
MKRKASTKSRKSRRNISLLQRINPDVAGIDCGASEHYVAVPTDRDEESVRSFPTFTRDLHRLADWLQKCGVRSVAMEATGVYWIPLYELLEKRGFEVLLVNARHVKNVAGRKSDVLDCEWLRELHSVGLLRGSFRPADAIVVLRGYLRHRDTLVAAMSGITQRMQKALVQMNVRLGEVLTDITGKTGMAIMQDIVEGRVNPKQLARRRDGRCKATEEEFVAALTGNYRPEHVFALKQNLDLYAYYASQLAECDEAIEGYLNTLAAQNPEQKEPLQPLRKKKSRPRPQEPSFDMREYLYQIHGVDLSQIDGIGPYQALRLTSEIGTDMSRWPTAHHFTAWLTLAPQNKVSGGRLLSSTTRSSANRAKGMFRMIAMSVVRTDTALGAFYRRLSSRIGKAKAITATARKIAILVYRMLKGEITYQDPGPDAYAQRQRTKALRNLKKRAKSLGFELVQVDSGELLVEGVS

SEQ ID NO: 67157 - protein, 354 aa, unidentified
MPQSNTLYVGMDGHKESIAVAYGGQDHGAEVISLGTVGTRQCDIDKLIRHLQSQSTQLVFVDEAGPCGSWLSRSLTKKGYVCWVVAPSLMPKKAGDRVKTDRRDAMQLARLMRSGDLTPVYVPAVDDEAIRDLSRAREDTLRDLKAAKLRLKAFLLRHDIRYTGRANWSPAHLRWLSEVVCPTPVQHMVFQEYVQTVTEQTERLQRLEQALHEQVQTWRFAPVVEAFQALRGVQFTVAVTTVAALGDLTRCDNPRQLMHYLGLTPSEYSSGARRQQGSMTKTGNTHARRALVEGAWAYRYPAKVSRHLQLRLAKLPTALQAISWKAHVRLCTRYRQLMATGKHAQQVVVAIARE

SEQ ID NO: 67158 - protein, 333 aa, unidentified
MSRFWVGIDVAKRKLDVALLDEAGKVKSKSLPNDPAGFATLMTWLKERGADVASSHLCLESTGVYSDGCATAFADAGWKVSVVNPSLPKDFGRSELKRNKTDAMDAGLLARYCSKMEPPAWQPPPLEYRKLRSLVERLQALKDMYQQEANRLEASLEAAAQTSIAQHLSWLEARIAELEKDIDEHIDGNKETLGKDAQLLASIPGIGRTTAAKVLGLLGDLRRFDSGKALAAFIGVTPKRHESGDSVRGRSVISRAGHASVRHALFMPTLVATRHNPKLKAFRDRLVAAGKPKKSAVLASMHKLVHIMHAVVRKGLSFDPQFGAPALDVQDGI

SEQ ID NO: 67159 - protein, 458 aa, unidentified
MKIRLGIDVACRAAHQASCADDTGRFLWSGHRFRTDPDDLDALWAKLPVGEVEVTVIMEPTRNAWVPLAAWFRRHGAVVVMVPPEQSADLRDYYNKHAKSDRLDSKVLARLPLLHPEGVTVEAGIGPGDALKRAVKIRSGLVHRRTTSMQRLDCLLELMSPAWVAALGSDMCKTSFRFLARYANPHTVRHLGQRRLSEFLRRSSRGAWADERATEILAAAKTTIALWGDEFDFDELAADIAAEARLALGVCDEIAAMDKRIAALYTTADPAGIVRSAPGVGVIGAPQILGRLGDAHRFRNLAGVRSFSGLVPRRDDSGHTAIAGGPTKAGDACLREALFISADHARKIDPTLAQRYHRLMTVEGKHHNSALCHIATVLLTRIAACLRANQTYQLVDIDGTAITEGEGRAIVAERYTIPPATRAARRAATTTSRQPRRNERATKGVDKRSETPLVPTPA

SEQ ID NO: 67160 - protein, 320 aa, unidentified
MTRKKSKAFVGIDVAKQRLEVAVYESDYQFRCANKASAFGELLAELINLRPALIVLEATGGLEIAVSSALHAAGLPVVVVNPRQVRDFAKALGQLAKTDRLDARVLAHFAAAIKPPLRPIKSKEELELDALTRRRGQLIEMLTDEKNRRGSAASDSVRDKIKEHIDWLEECIAELDEQLKALLQTSAPWQAKDEILQSVPGIGPVTAFSMIADLPELGTLNRQQICKLVGVAPLNRDSGQQRGSRHIYGGRAHLRSVLYMAALTAVRHNEVIKEFYERLRTNQKPFKVAITACMRKLLSITNVMVRDSTCWKIKEASVLA

SEQ ID NO: 67161 - protein, 342 aa, unidentified
MDKMAACGMEVSAQELVIALLGKKGEAVLLRFANTAAGHGQLLRTLTRGGKRVRVCMEATGMYGLDVALLLSAQEGVELMVANPRAVRSFARAMMQRSKNDQLDAVVLREFAGRMPFQRWTRPTENALALWGMARRLEALTKERTAEKNRQHAAGVSQATPECVRRSIARTLRFHRREIAQLRGEALRCIAAEARLRRCYQLLRSVKGIGETSAIQILAELALLPEDRDVRQWVAFAGLEPREYSSGTSVRKYTRISKVGNQHLRQALFMPALVASRREPHLRAFYEHLLASGKKKRQALVAVARKLLHAIYGMFHNDQPYDGARVYTLPASLATSPAAHAT

SEQ ID NO: 67162 - protein, 403 aa, unidentified
MVVVATAADEVVDAAGEALEFECRRFGAGAGERKRVRSWLRERNVREVVMESTAQYWKPVWLDLEPHFGKLHLAQAHSNRAPKGRKNDFGDAKRLARRLLAGELVLSFVPAAEQRTWRTITRGKQQLVRERVRLQSQLEALLEEARIKLSSVISDLLGVSGRRILRAMADGETDADRLAGLGDDRLRCSKQELMDALNGSLEPIHRELLKLYLQRPELLDEQIGKLDQMIATALQRHQDAVVRLAEVPGFGVDSAQQLIAEMGVDAEAFASPGQFVSWAGLCPGTEESAEHNHSSRSAKGNRFVRRLLTQAAQAAVKKKGSHFQSLFRRFLPRLHYSGAIRAIAHRPGRLVWKILHDGVRYVEQGQETTPQAKKRRAQRLVQALRKLGYSVALTPTAPALAPG

SEQ ID NO: 67163 - protein, 325 aa, unidentified
MKSENLVCGIDVSKDTLDIYYNDHLGKECYLRVSNDHEGHLRLINALGVERTFVMESSGPYYLRLAFALKKKGGDVRVENPIVIKRFIQMQLERNKSDRKDAKWIYRFGRQCEAAEWKMPSKQQLQCSEILSAIDLYNRQVTMIANQLESLEQIPWCERTVMSSLVQVKSKLENEVKKLERRVNEILKQWQEQQLKNLSTVPGLGKRAVALLIVYTDGFRKIQNHRQLSALCGLAPREFSSGTSVRRRKGICKMGNGHLRNVLYMCSLSAIKHNRACKDLYERLRGKGKRGKVALIAVCNKLLKQAFAIATRGTQYQADYKSSLC

SEQ ID NO: 67164 - protein, 346 aa, unidentified
MNQIIRIGMDTSKYIFQLHGVDASEQVVLRKRLGRSGMLSFFTKLAPTVIVIEACGAAHCLARELGKLGHTVKLIAPQLVKPYVERNKNDGRDAEGLCEASSRPRMRYVPVKTAEQQAALMLLGVRDQLVMRRTQLSNTIRGHAAEFGLIEAKGLDKLASLLAAIEQGDSVPVLARDLFAMLARQYAQVQVELKAIEARLLAWHRGNALSRRLAEIPGVGPVTAAALVMKAPDPHAFRSGRLFAAWLGLTPKDHSTAGKTRLGKITRAGDERLRQFLVVGATSVVKQATGKHHRGPRWLLELVKRKTPKLAAVALANKTARIAWKLMTTGESYDGARMPKASAAAA

SEQ ID NO: 67165 - protein, 417 aa, unidentified
MDTLFPKVAGLDVHLKTVQCAVRCQQASGKLLKEVRCFGTMTRDLRALADYLTALGVTHVALEATGVLWKPVWNLLEGRFTLLLINPRHLKKVPGRKTDVSDAEWIAQLLQHGLLRGSFVPPRAVRNLRDLTRHRAQLAAEHTRVANRIHKLLEDANVKLGSVASDVLGKSGRAMLREMLKGEQDTEKLANLACGVLRKKIPQLKLALEGHCTEHHRYLLGRLLSHVSYLESQIEDLSEHIVARLNELLPAADQQRLDHIPGVNRRTIENVLAEIGVDMGVFPDEHHLASWSGICPGNEESAGHRLRSRIRKGNCWLRRALAEAAWAASHAKDSYFSAQYRRLAPRRGKKRALVALGHSLLVIIYHVLKNQVEYVDLGPDYFDRLEPQRLRRYLVRRLQRLGYNVVLSPAKPDNRAA

SEQ ID NO: 67166 - protein, 429 aa, unidentified
MNYNTQNAKIASITEKTLIVGIDVGSETHYARAFDWRNYEYSKKPFTFNNDEAGFAAFKAWMEDIAEKHGKEVVIPGMEPTGHYWLNLGAYLQEQGMKPVHVNPHHVKKSKELDDNNPNKNDRKDPKTIAGLVNEGRFSYPYIPTGIYAEIRNLSNLRIQTQEELTRIKNRIARWFSIYFPEIKDVYKNPDAVSGMMVIKKAPLPCDIKELGVDGVNQVWRDAKLKGAGLKRARTLVSAAEHSIGSTEAPESARIEIRNLLNDYEVYKNRMDDLMREIEAKLSEIPYIDKLMEINGIGLKTVSCFIAEVGDIRRFDNPKQLQKLAGYAIVADSSGKHNGESRISHRGRKRLRYALYEAAISVIGKNKEFREIHDYYRTRKQNPLKKMQSVIAIACKLIRIFYTILTKGVDYDGQKMLSDIVRPETVMAA

SEQ ID NO: 67167 - protein, 350 aa, unidentified
MDQQQHYVGLDVSLQTTSICVIDDKGTAVWRGKCASTPESITEAVHTYAPAAVRIGLETGQLSNWLTLNLRRRGLPVVCLDARHAKAALSLQINKTDANDAFGLAQIVRTGWYREVAVKSMDAHTLRMLMVARAQLVSQRQTIANTIRGLLKTFGLVIVRGSGGLFAVRVREQIAGNDVLVAIVEPLLVVWHAIREQIEMLDRQILGRARADAAARRLMTIPGVGVVVALAYTAVIDDPARFRRSASVGAYLGLTPRRYQSGEADTSGHISKCGDGLLRAYLFEAATVLLQRHSRASTLKTWGLALAKRIGMRRAKVAVARKLAVIMHRVWSDRSEYRWGDVPVAANHRR

SEQ ID NO: 67168 - protein, 320 aa, unidentified
MMAQNDLVVAGIDVAKDKMDACIRAFALRQTCPNTAQGHRKLVAWLRKHKVNKAVMEASGGYERDWARVLRQAGIEVRIVDPKRVRSFALSAGRLAKNDVIDAEMIAWFAETFSEAPSQTHDAAHEELLALVKARKGLLDLKTRLQSQNEHAAPGPVQKAHARVLKSLAAEIAKLEAAISAKIKATPDFAERAEIIESVPGFAETTAANLIAGMPELGQVSNKIAPALLGAAPYDDDSGHRRGERHIKGGRRWVRNAIYMPCLGAATQNNPVLKAFYQRLIAKGKEPKVALVACMRKLIVILNTLIARRQKWDPSRYALS

SEQ ID NO: 67169 - protein, 491 aa, unidentified
MSRTAKQSGKKKDPTLNARASKRQASTSHCQQGIGGQRRSKLTMANPNAAAVDVGSQVHYAAVPEGRAEQSVRSFGAYTAQLAELVHWFKDCEIKTVAMESTGVYWIALYQKLEEAGFEVLLVDARAVKHVPGRKSDVQDCQWLQQLHSYGLLRAAFRPEDSICRLRTLQRHRKNLVECGAMWIQHIQKALNEMNLHLHHVLTDISGQSGLAILDAILAGERDPKKLASLVDRRVKKSQAQIEAALTGDYRPELLFVVSQTLHDYRQMQQQIAQCDLKMDQQLATMAACREPKHRPQQTPAPQQGAAIKARTSKRKPKDALEVSLAGHLKHILGVDLTTIPGLNVLAVLSLISEIGTDMTKWRNEKAFVSWMGLSPNNKVSGERVLSSRTRKVNNRAATTLRLAAMLLGRTDTPLGSFYRRKRGHLGAPKAITATARKLGCLIYRLIKDGQAYQQPDLHTYELKYRNQILRSLRRRANGFGFDLVELPKAA

SEQ ID NO: 67170 - protein, 418 aa, unidentified
MIRGDDSKIIEVVHSVCCGLDVHKDSISACLIFFDDHGRERIEVQAFGTLTGDIMRLRDWLLDHECPVAAMESTGIYWRPVHNILEGFVQVILVNARDVKNVPGRKTDIGDSKWLAGLLKHGLLKGSFIPPKEVRQWRDLTRLRRRYVQTAADYRRRTQKLFESANIKIDSVISDLFGVSGRNLMNLLVSGKEITLSDVRGCMKGKLKASEAEIYRSIQGFFNDHHRFQLSLLLGTIQHLSEEIGIIDSRIRDLMMPQQDILERMKKVPGISEIASRDILAEVGPTLEAFATDAALSSWSGLCPGNNESAGKRRSGRSPVFKHHLKTIMIEVAWAAVRTKGSYYKDKYHRLKSRIGAKKAIVAIAHRIMKAIYRIIKDGAVFKDLGEEYLMLRNKSKKINHLKKQAQLLGFTLVPQTT

SEQ ID NO: 67171 - protein, 389 aa, unidentified
MITIGIDVGKFNHCACVFDNQSGELLVEPFFFKNNLDGFNELFGSIKPYKSSLVGLEDTGHYGDNLILHLLENKYNVGLINPLTTEHKRKSKLKSAKNDKKDSILIAQTLLYKDEYRLVTLKHYKLRELKKLTRHHHDLKEEINAAKNRLQKSIDLVFPEYNKLFNSKYGKVYNALLKQFPSAKVIANTDIRTLRKVFNYKGKGNRIKLTPEHLKLVAKNSVGEESYASIIQIKHTIAIIEMLEDQVIEVDKKIEELSSQLNSPITSIPGIATFSGMSILSEYGDISRFDSPAKLISYAGVDPYVVESGTYKAPVTAITKKGSPYLRKTLYQIALPVINNNPVFHKYYTLKIKQGKSYRCALGHVVRKLLRIIHHLVTNDLQFDVNHLR

SEQ ID NO: 67172 - protein, 393 aa, unidentified
MFRLAGLRTSNRDLSPCPPRMSSTSPSNSVSHPGSSQRACPAPKKHGCTASPGDTTALLVLIAELRARASARLGQAVEVACCFEAGRDGVWLHRLLTAHGITAYVLEPTSILVNRRARRAKTDRLDAEGMLRVLAAWLAGDEQVCSMVRVPTPEEEDAKRPHREREHLVQTKLRLENRIEALLFTQGIRGRPSLRSWERDMVKLCTGDGRALPFLLRAELDRLRRQLVLVLELIRELEAERAAATEAAADDATIQKIVNLQRIRGIGPNVAAVLVREVLYRSFANRRQLASYVGITPIPHQSGGMDRDRNISRAGNPRARTTLIQLAWLWLRYQPGSTLALWFRERVGTLQGRTRRIAIVGMARKLLIALWRYVETGIIPDGVEIRMPAVTAA

SEQ ID NO: 67173 - protein, 452 aa, unidentified
MKKEKLALDVVNPQAAGIDVGSRSHYVAIGQGDEDVKEFGVYNEDLIALSQWLLANEVKTVAMESTGTYWQSLFTTLQSAGLEVILCNGKFTKNIKGKKTDVKDCQWIQKLHTLGLLSGSFLPDEATEQLRTYCRHRANLLEQAADTSRKMQKYLRLLNLRLDVVVKDVTGLTGLSIIDAICKGEMNPEKLASLRHGNCKKSEKEIAKALQSNGRTDLLFSLTHEYELYQVFQGKIGECDKQIQKLLNEQINQDDNKRQHHIEGKVHKRINKNNPDININLLSYQYFEGVDLLAIEGVSHSTVLTLMSEVGHGIHKFESAKQFASWLRLAPNNKISGGKILSNKIPKGSNRLKIALRQAANAVGNLKDTALSNFFKRIAFRKGRTSAISATARKLAVIIWNMVTKKVPYKTDSQYEFLDQKRKRKVMEMKKLIHKFDITPDDLGLQLNINNL

SEQ ID NO: 67174 - protein, 317 aa, unidentified
MQVMHEVCCGLDVHKKSVTACVVWAAGRRRQTREFGTFTKELLELSDWLRSCGVTHVAMESTGVYWKPVWNLLEGQFEVLLVNAQHIKAVPGRKTDQKDSEWIADLLQHGLLRASFVPPTPIRELRDLTRYRASLAQEINRISNRIQKVLEDANIKLASVATNALGASGRSMLEAIVHGEQESQKLAEMSRGLLRNKIPELQQAMQGRVTAHHRFLLRELLDHLYFVESKMRRIEQEVEEQLRPFQSEVARLCTIPGVDRVTAWSLLAEIGLDMKQFPDAQHLASWAGLCPGSHESAGKRKSGKIRKGSLWLRRCLC

SEQ ID NO: 67175 - protein, 401 aa, unidentified
MSFNGASVVAATVVAVDVGKNKAALSVTSADRHRLFGPAEFAMTAPALAAVLQRMCAVLPAAPVKVGVEAAGHYHRPLLGVWPAGWEVLELSPARVAEQRRVQGRRRVKTDAIDLEAITELVLAGHGVLVTARSAAVTELTGWVMHRGRRVQTRTATKNQLLAQLDRCFPGLTMVLPDVLGTKVGSLVAAEFADPHRLAALGVARFIRFAANRGLRVRRSTAERLVAAARAALPCLGAQLARRVLADDLVLLGCLDAQIAAAEAKLAQLLPDTRFAPLTTVPGWGTVRAANYGAAVGDLDRWPGARQLYRASGLSPAQYESAGKRRDGHISREGSVALRRALIDLGIGLWHADPAARRYGQRLRARGKKGGVIGCAMAHRANKIAYAMVRDQTGYDPDRWV

SEQ ID NO: 67176 - protein, 320 aa, unidentified
MSVSSVTVGIDVAKAHVDVCVLGAKSDAQRLNNDADGHSALAAMLQPLGVGLVVLEATGGYEAALACALQAAGLPVAVVNPRQARDFARSMGRLAKTDAVDARMLAELAAVLVRREDLARFVRPLADERQQWLAALVTRRRQLLTMLHSERQRLQITPKKLHASIDAIVAAIKAQLDEIEAQMVTHVREHFGELDKLLQSAAGIGPVASATMIAELPELGRLNRREIAALVGVAPMANDSGSSKGRRRVQGGRFEIRRVLYMATLTATRYNPAIKAFYERLKAAGKLPKVALVACMRKLLTTLNAMVRTGKPWDKSLHGA

SEQ ID NO: 67177 - protein, 326 aa, unidentified
MEHELHYIGIDTAKEKLDVDVLRPDGRHRTKKFANTTKGHDELVSWLKGHKIDHAHICIEATGTYMEPVAECLYDAGYIVSVINPALGKAFAQSEGLRNKTDTVDARMLAEFCRQKRPAAWEAPHPLERALRASVVRHQALTDMHTQELNRTETAREVQRPSIDAHLLWLEAELKRLEKQIKDLTDDDPDMKHRRKLLESIPGIGEKTSAVLLAYIGLKDRFAHARQFAAFAGLTPRRYESGSSVRGASRMSKAGHVSLRRALYMPAMVATSKTEWGRAFRDRLAANGKKGKVILGAMMRKLAQVAYGVLKSGVPFDASRHNPVAA

SEQ ID NO: 67178 - protein, 376 aa, unidentified
MSNVRFVGLDVHAETIAVAVADPDGDVRSLGVIPNGSEAIRKLVKKLGPAKELRVCYEAGPTGYAVYWQLTALGVPCEVVVPTLVPVKAGDRVKTDRRDALKLARSYRAGDLTAVWVPDAAHEALRDLVRAREAAKKDQLRARHRLGKLLLRHGRRPPTVMTPWTDKYLMWVKTVRFAHAAQEATLLDYVQEVEHMRERLVRLEHAIDEAVETAPARMRAVIESLQALRGIARVSAATIVSEVGELSRFQQARQLMGYSGVVAREDSTGERIRRGGITKTGNAHLRRIVIEAAWAYRHRPMLGPTLRKRQAPASADVQAIAWKAQHRLHARYRALTARGKCKQQVVTAVGRELLGFIWAIGVRVEAANHRAASLPA

SEQ ID NO: 67179 - protein, 353 aa, unidentified
MGHKYVGLDVHQSSTVAAVHDEQGKSMMESILATEAEAIRDFLKGLRGTIHVTFEEGTQAAWLYEIVRPVVAEVIVCNPRRNKLLAVGNKGDRVDAEKLAELLRCGQLKPVYHGTPAVRLLKELVHSYDSLVGDTTRVMNRVKAIYRGRAIGCAGRDVYYQRNREQWLEKLTEPGMRQRAVFLYQQLDTVRGLRREANKAMLKESRRHPAYATLKQIPVLGPIRIAQILAKVASPHRFRTKRQFWAYCGLAVVTRSSADYQFREGKVEKRKRAPMTRGLNPNFNHRLKYVFKSAAVDGMHQAPFEGYYARLLIKGIRPELARLTLARKIAAVTLTLWKRGERFDELKVSEPAA

SEQ ID NO: 67180 - protein, 363 aa, unidentified
MKIMVGIDLHSNNVLCGLMEATGRRLVHKQLPCNLTAILQLLEPYQARIATIAVESTFNWYWLVDGLQDHGYQVVLANPARMQPYSGKKHTDDISDAYFLAELLRLDLLPTGYLYDRRTRPVRDLLRRRRLLVHQRTTLILSFKSLHERTLGQRLSLARVKTMEAEEAQARFLEPADQLLAGEQITLMAHHTEAIRKLEQHILGVAGNWPAYQRLQALPGIGKILGLTIALETGDASRFADAGNFASYCRCVNSLRQSNGKKKGENNRKCGNRYLAWAFVEAAHFACRYDDQCRRFYDRKKQQTNPVIATKALACKLAKAAWHVMKEDVPYDAVRVFGPGKKGPFGEIGREPAKGSGLPSQQN

SEQ ID NO: 67181 - protein, 415 aa, unidentified
MEITAVGIDVSKSKSTVAIRRPGGVIVARPFDISHSNHDLEKLVSILKTTGGDIRVVMEHTSNYWKPIALTLKEAGFYVSVVNAMLIHDFSDNSIRKLKTDRADSLKIANYALTFWNELPPFNDEDETRLVLREQSRMYERLASTATSLRNGLIALADQTFPSIDQAFGHAIKNADGHEKWVDFFSIYWHRDCVLRLSIEKFTESYRKWCLRRNYKFRTNTAHKLYALAQDAVPTLPKNNGTKALVLQACKSLNAVCEAKQSTQEEMNRLASLLPEYEVVMQMEGTGPITGPALMAEIGDVRRFKNKKALVAFAGIDAPPFQSGNFESKSRHVSKRGSPHLRRAVFLVANIILTLSHKDNSVFCFMDKKRAEGKHYYVYTIAGSAKFLRIYYARVTEYLRTQEIPVAASCLNGNS

SEQ ID NO: 67182 - protein, 351 aa, unidentified
MLVGIDVHKDTHTAVGVSPFGEKLFELTVGNYQKDFVDLTAKVEAAARDAKLSPYFGLEDCHGYGERLATYLDAVGYSVVQVASTLVDRQRHTNTHPEKSDSLDAQGVAEVMLRKSDKLPRYTVTEASTIAKDIKDVAKDRENLVLERTRLKNQLHDLLHRIWNTAYREKFIDPFSQKAMRYWSRAQCKDASLFLMRTMKRKVRRLQALHIEIKELDHELVRLVKESGNTIATASGCGVVVASTIIAEIGDINRFRSPGALAKYAGCAPREYGSGKKQRYRKSRSGNRRLNSAFHLMALTQISPTGNDKARAYFRKKISEGKTKSQALVYLRRQLVNVIWCMLKYKTVYRS

SEQ ID NO: 67183 - protein, 401 aa, unidentified
MASDFWKWRYNLMKIYLGIDIAKLNHFAAALSSDGEIILELFKFTNDADGFQLLVSKLESFDKNSIIIGLESTAHYGDNLVRYLVAEFYQVCVLNPIKTCQMRKNNIRKTKTDKVDTYVIAKTLMMQDDLRFVSFYDLDMMDLKALGRFRQKTIKQRTRLKIQLTTYVDQVFPEIQYFFKSGLHQNAVYALLKEAPSPKEIASMHMTHLANLLKVNSHGHFTKEQAKELRVLAQKSVVANDSAISIQITQTIQQIELLDSQLEKIEAEMTDIMKFNDSVIMTIPGIGYINGGMILGEIGDIHRFSNPNKLLAFEGLDPSVYQSGNFQAKTTRMSKRGSRVLRYALVNAAWNVVRNNATFKAYYDAKRAEGRSHYNALGHCAGKLVRVIWKMLTDKVEFNLE

SEQ ID NO: 67184 - protein, 363 aa, unidentified
MTSMQDAPRRRRVVVGVDTHKHIHVAVALDELGGRIEARSFAADRSGYEQLIDWASSLGREVMFGVEGTGSYGAGLASAIRRRSIGVLEVLRTDRRDRRLRGKSDTIDAENAARAVLNGQASAVPKSADGTVEMIRLVKVAKDVAVKARTSAMISLKAVLVNAPAELREQLQPLTKMALIRRCAALRPGPVTDPMTAAKHTLRAIARRWLALDAEIKAHEQVLNRLTTELVPDLVAAFGIGADIAAEMLIVAGDNPERVHSEPAFARLCGVAPIPASSGMTTRHRLNRGGHRQANAALYRAVIVRLQYHQPTQAYYQRRTAEGRTKAEIIRCLIGEVSVMRPGIGLDRGFSVVSGDGLVAEPL

SEQ ID NO: 67185 - protein, 378 aa, unidentified
MNSIVYVGMDVHKNSYSLCCYDPSKQVFFSEVTTKADYKMIVRYLKKVKERHPEIQAFQCGYEAGGLGFSLYKNLTAVQISCVIMAPSTIYRNGSRVKTDRLDARRLAQALAFGGYHAVHIPDDEDEQTREFLRMRDFYKRERKKVKQAIIAFCQRQGFVYSTTKHYWTIAHLKWLKNLTCSAALYQEILDEYLHSYDELTNKLERLDQRVEELAFQDRYQEGTAHLCCFRGISVVSALAIQAEIGDFSRFATAKQLSAYLGLVPGEASSGEHQCYTSLTKAGNKFIRTLLIEASQSYGRGSASFKSKAVKARQKGQPAAIIHYADKATHRLMTRFRRMQLRGLSHNVIKAATARELACFIWGMMTGHIEDRPAYAAH

SEQ ID NO: 67186 - protein, 320 aa, unidentified
MQIPTNVLNVGGDVAKDEIVVACSEGSFPTRPLANQRAALLAFLKTLPAGSRIGMESTGIYHELFANIAHKLGFIVFVLNPKDARNYAKGVGMRGKTDRVDAELLARMVAHEHAKLHAWIPPTPEQYEIAQLIKRRAKLSSLRAALGMSLKGVDGFGTDLKALKKRFNQLIARIDQRVQILVDTNPDRKQHDTNLRTIYGVGPVVSAALINTLERVPLKNADAFVAFTGLDPRPDDSGHHRGKRRISKRGPSELRRLLFLAALSAAKTKAWHPLYEHYREKGLSSTAVLVILARRIARTAWSIYSHKTEFDPKRLISALT

SEQ ID NO: 67187 - protein, 356 aa, unidentified
MNYTGIDYHKRYSVVCIIDEAGNILHEERIEHGFPERFAALLGTYAPLEVAFEATMNWSWLYELLEVTAGIKRIVMANPLHVRLISAAQVKTDKVDSRKLAQLLRTGLLPASHIPDRATRLRKEVLRQRTFWVRTRTKVRNRVHRLLGRQHDLAMPQVTDLFGRKGRAALDKVALTSPDDMLLRQQLSVLDVLGTQIKELEARIAADGASDETVKLLSTVPGLGPILGNVIATEIDGIERFGDSASLCAYAGLIPSTSSSGDKTYHGRLVPSCNKWLRWALVEAAWVAVGCSAYFGGFYRHHRARGKKANTVIMIVARRMCQVIFRILKERRAYEARPCSKDVPGRSQQGRTTQAA

SEQ ID NO: 67188 - protein, 453 aa, unidentified
MGRRTGKVGCLSLERIEANAAGIDVGATEIYVAVPPDRDTDPVRCFQTFTGDLREMAAWLVRCGIATVAMESTGVYWIPPYEILEEAGLRVCLVNSQYVRHVPGRKSDVSDCQWLQYLHSVGLLKPSFRPDAAICALRAVSRHRAGLVESAAVHIQHMQKALTQMNLQIHHVLSDITGLSGMAIVEALVAGQRDPGQLASLCHAQVHADRPTVIKSLTGNYRPEHLFTLKQSLAAYRSYQHLLAECDQEIQRLTASMSGKIDPPAPAPHPSRQKRRKNQFHFDMGSELHRLFGVDLTAVPGISTLTAHALLSEVGPDLSRFPSAGAFANWLALCPNNKKSGGKILSSKTRPTNSRLSRALRVAAQTLARSQSHLGNFYRSMRARLGAPQAITATAHKLARILYHLLTTGSAYDETVFAQEQQKQKIRLHKRLSKQAKLLGLQLVPITIGESCS

SEQ ID NO: 67189 - protein, 337 aa, unidentified
MKYCGIDLHWNNSVVLVSDEKDRIVLQKRLPNELGQIQAALEPHRDELVGVVVESTFNWYWLVDGLMDAGYRVHLAHPSAIKKYEGLKYSGDFADAGYLAQLLRLGLLAEGYIYPREERAVRDLSRKRLQLVRYRTAQVLSIENILARQTGARLSGEAVKRLTAAQVEELGFAPDVALAVEANRAVSQALAQQIAALEQRLKERVRLRGEFKLLKTTPGIGDTLATTIMLEMGTPTRFAKVGNFSSYCRCVDSLRESNEKKKGEGNAKNGNKYLAWAFVEAANFARRYCPQAKSFYERKKRKTNGILATKALAHKLARACYHMMRHQVPFDAAKAFG

SEQ ID NO: 67190 - protein, 799 aa, unidentified
MSLVILGVDPHKQSHTATALVVGSHQQLASLQVPASQSGYRQLLAWARQFPQRRWAIENARGLGCHLTQWLLAGGETVQDVRTTATARVRELSRGRGRKTDALDAAAAAGIAALQGDAEQLQPEDATVVLAVLEERRSNLVGQRTRSVNQLHALLRKLIPGGAPRKLSADKAAALLRAVHPLTAADRARKQVAWDLVAEVRGLNRRLAMIGKQIQDTVTALGSRLPETVGVGPIIAGRLLGRTGRASRFPTAAHFASYTGAAPVEVASGERARHRLSRAGDRQLNHTLHIIALVQVRSQAAPATTTSGANWPRARRPEKLCVASSAGSPITSGESCSATNRPATSANSRRLDTQRRPRPVAVKRPGDLWRRHAARPVSLKGHAGRVRASNTPSVLRPLRTGSWARNDHPGGIPQTRPPTIPCGCRVPARPPPRTMPRSRVCGGVRGPPWDEMCGDRLLAAPARWPGRRSRGMTIDRQVVAERVRALRATLPGPGDLLTGLQRVTEATRAVVGVDGAGMTLAHEHGPPRWVAVSDAAMELLEQAQHDFGEGPCLLAYAEDRVVAVEDLRSERVWDRLAAVVAQLRVRGVLSVPVRLASQPVGTLDVYATQSRAWTPTEVEALGAFAVVTAELVSTGVELAVRDVEVAQLRRALTSRVWIEQAKGVLVATQGVTPDEAFQQLRAWARSSRRRVAALAQEVVQEAQRERIAGLAIEDARVRAAEARAQQAEQALLAAQTGLARRTAALDRAQDNLDERARAADERNHLADERQRAADDRNRIADERDRLADERDRTARDGDG

SEQ ID NO: 67191 - protein, 388 aa, unidentified
MQSIAERHEEPTAIRTDLGAIFVSLELSRSLWLVTSISPGGGEKMSKHDVRAGDIGALLARFAELKKRALARTGKMAPILVVQEAGLDGFWIHRVLQSEGIESHVVDPASIATSRRRRRAKTDKIDGEALVRTLLAYKRGEPRVCAMVRAPTPEEEDRRRLCRERKVLTNERVLHVNRIKGLLFAQGVSGYEPLRRDRRQRLDELSTGDGRPLPEHLKRQIGRELDRLELLLEQVKTVEGERDALLAEQDAATPAPAAMLLGIKGIGPEFAAILWSEGLFRRFDNRRQIASYAGLAPTPWQSGSVDREQGVSKAGNSRLRTTLVQLAWLWLRHHPQSVLALWFKERVMRNGGRLKKSTIVALARKLLIALWKYVTFGVVIEGAVMKPA

SEQ ID NO: 67192 - protein, 395 aa, unidentified
MYSLWVGVDVSKDFFSTAGLDGEGKELFSATYEMNSNGFKEFLKVLSSHSERLDQAMVAMESTGCYHINLFSFLTSQAIRAVVVNPLLIANYAKRSLRKTKTDKKDALTIAKFVLDHHEEISQLSLSQDHQDLRDLARERESLCHLIAATKVEIKRVLRTTFPELESIGNLYTGVMLRFLQQYPSARLVRGAKPKVIAKALKGPYVGDKLTFSAEDILRAAQSSVAVVSPAKEIILRGKIATFFHLQERLDEVTKLLTDLCKNTRVEDLMILESIKGVGPKTAVPFLAEMGEVKNFASYKKLIAFAGLDPSVHQSGKFMGASKISKRGNRHLRRAIYLMTASVVSQNAFFKAYFLRRKREGLPPQKALFTVAHKLIRVIFAMLSQRTYFKVKEAI

SEQ ID NO: 67193 - protein, 335 aa, unidentified
MKHDMHVLGIDIAKRVFHAVGMDDRGNIVYRKRLSRHDLIPYIAQLPPVRIGIEACGGAHYWARRFRAHGHEVKLMAPQFVKPYVKSNKNDSRDAEAIAEAVTRPTMRFVPIKDVDQQDLQALHRVRERLMGARTALVNEVHGLLHEYGIIISKGVAKFRQAVVGKLESEKDKLTSLSREMFWKLVDEFALLEKQLAYDQEKRDTVATTHPECQRLMTIPGIGPFTATALVAAISDASAFKNGRQCAACLGLVPRQHTTDGKERLLGISKRGDTSLRKLLGHGARTTLRWVGRKTDRRSQWMRQLLERRGKNRTAVAVANKNARMVWALLTSHQD

SEQ ID NO: 67194 - protein, 403 aa, unidentified
MNNVAGIDVSKGKSMVSVLRPFGEVVAKPFSVGHTGSELKELVDYLKSLDGETRVVMEHTGRYYEPVARFLHDEGVFVSAVNPKLIKDYGNNTLRKVKTDKADSRKIARYGIDNWAELRQHTPMDTIRMQLKTLNRQQSLYTKTKTMMKNNLIALLDQTYPDVNALFDSPVREDGSQKWVDFATTFWHVDCVRSMSLTAFAERYRKWCKRHGYNFSQSKAVEVHAGAQDLIAMLPRDALTKTMVRQAIDALNAVSASLERLKAEMQALAAQLPEYPVVMAMHGVGDSLGPQLMAELGDVTRFTHRNAITAFAGVDPGADQSGTHEAKSTRVSKSGPPELRRALFLVMDCLLKTQPQDDPVYRFMDKKRAEGKPYLVYMTAGANKFLRIYYGRVKEYLAQLENS

SEQ ID NO: 67195 - protein, 364 aa, unidentified
MKIIGCDFHPSFQQIAMVDTESGETTERRLLHADGEAQQFYESLSGPVLVGIETSGNTLWFERLLEKLGHQLRIGDATAIRAAAPRHQRCDPRDARNVLQLLLEKRFPTIWVPTLAERDLRQLLKHRHTLVQMRTRAKNQLQHIAMNQGLQKKRQLWSKAGLEQLKSLALEPWTKRRRDDLLKILEQMDRHIAELSKAVQAEAQHWPQAVLLMSHPGVGPIVALATVLTLGDVSRFARGKHVASYLGLIPREDSSGEHRRLGSITKQGNSFMRFLLVQAGMSAARGDAELGRVYKRLAQRKHHGVAKVAVARRLVLRLYWMLRTNRRYPEVVRMQGSSSHPVAEVKADRLSEHPASRCCTHPGL

SEQ ID NO: 67196 - protein, 342 aa, unidentified
MQQYVGLDVSQKETAVCVIDDAGRIVFEGKARSEPGALAKVIRKRAPHALRIGFETGAMASWLWHELKRIDLPVVCIDARHAHAALSVRINKSDPNDARGLAELMRMGWYREVRVKSAESQVVRSLMVARARLVSIRRDLENQVRSLLKENGQLFPRAIGRQFRDYVRELLSDSHPLRAIIESLLVVHERASQEQATLDARVRTLAKSDQTTRRLMTVPGIGVVTALTFRHTIDDPSRFRSATSVGAYLGLTPRRKQSGELDLTGRISRWGDRLLRTYLFEAASVLIHRTKRWSPLQAWGLRLVKRIGLKKAKVAIARKMAIILHCIWSDGTEFDWGVPKAA

SEQ ID NO: 67197 - protein, 343 aa, unidentified
MDHFAGLDVSVRETSVCIVDETGKIVREVKLASEPDALVEVLTSPSYHFKRIGIEAGPLSQWLYNALAEAGLPAICVETRHMRAVLKAQINKTDRNDARGMAQMMRVGLYRPVHVKTLRSQKLRMLLTHRKLLQSKAIAVDNDLRGTLRNFGLKVGMVGTAKFEARIKELVENLPDLAVLVEPLLIVRRVLREQIGVLHRRLLAIVRDDDVCRRLMTVPGVGPVVALTYRATVDVPARFKNSKAVGAVFGLTPSRHQSGESDRPGSVSRCGDEMMRMMLYEAAQTMLVVSTKWSWLKAWAMKIARHRGMKKAIVALARRLAVIMHRIWVDGTEFQWTREVTAA

SEQ ID NO: 67198 - protein, 341 aa, unidentified
MQDVTLIGIDLGKHTFHLHAQDRAGHAVWRKKCNRSQLMALLANTPACTVVMEACAGAHQMARDLGRLGHTIKLISPQFVRPFVKTNKNDFIDAEAICEAASRPSMRFVTPKTEAQQCLGAWHRVRESLVRDRVQVTNQIHAFLLEFGISLPKGPAVIKRLPSVLAEQRLPARLIVLLERLRDQYRALDAQIAEIEQDLAAQLQEDESGRRLLSVPGIGPITASLLASELGDGKQYGGARDFAASLGLVPRQHSTGGRAQLMGISKRGDKNLRRLLVQCARVYMQHVDRQTGRLADWVRDLLQRRHSNVVACALANKFARIVWAMTAKRVDFERLGEALPA

SEQ ID NO: 67199 - protein, 355 aa, unidentified
MQKYKVSFKGQNIFVGIDVHLKTWHVVSITESGYKISFSQRSDAKVLFDTLNSKFPDAHFKSAYEAGFCGFSVHYKLTELGFENIVINPADVPTSNKEKVTKTDAVDAEKIARALKQGQLTPIHIKSKEYMDDTNLIRLRSRFVKDLGRMKSRTKHLLYNQGVEYPERFQKNGTHWSRNFIAWLRNEVEFLSEEKRTLMLLVDEVENLRKAVLRITKEIRRLAVSPKYKENFELLTSVPGIGKITGMSLLTEIDNDLGRFSNERQFASFLGLIPTCHNSGEKTSSGMKTFRGNHQIGPLIVEASWVAIRNDRELSNCYINYCQRMKPQTAIIKIARKLACKLFAVLKTKKKYVHQ

SEQ ID NO: 67200 - protein, 356 aa, unidentified
MKYFKDTEEFIKNKKVFCGIDVHKSKWNLCFFSDGEMIERMQINSDYHRLLTHLHTFYHSASSVKLVYEAGFTGFWLCRKLRKAGYHCIVTPPNRVPKTEGKVKTDKRDAAKLTRYLCSGILKEVYLPPESIEADRRVERHRLSFVKKKTRIQNQIKSFLYLHDVQRPDFIKRRWSKAYMQWLEALKFDHTADRFVLERMFSNYHHIRDELAAITRQLRRLSRTEPYYKNFKRLTACKGVGLVTAMTYLLELHDLTRFPSADKLSSYLGMTSSQHSSGEKVRLGHITREGNVYARRCLVESAWTVIRFDPHLREKYNRIRAKGTNGKKAIVAVARSLALRLRRCLLDEVPYEVGIC

SEQ ID NO: 67201 - protein, 423 aa, unidentified
MLKIVYPICCGIDVHKKFVVATVTSTNENNITTYATKQFSTYSKNLFHLKEWLSEHNCKEVCMESTGKYWIPIYNILEDSCNITLANPKYVKNIPGKKTDKKDSLWLADLHKHGLVKGSFIPPKAIRELRDLMRYRFKLTNFRSSEKNRFQNSLTVSNIMISSVVSDTFGKSSSAIIKYAMEHPDKLDIDYTQFLHKSMLSKADEIKIAMQGSISKNQTAKMSVCLNHYDYINNCISQLDTAISLISSEFKSQIELIASAPGITTQSATTIISEIGVDMSVFPDAKHLCSWAGLTPQNNESAGKKKSVRISRAGAYLKPILIQCANAAIKNKSCPYFKYRYESIKKRRGHKRAIIAIARMLLTCIYNMLLKNEAFDNSIHEKYLKRENTSRHFQPDIDRIILFLQAQGFEVTKVSQEISPKIS

SEQ ID NO: 67202 - protein, 404 aa, unidentified
MRVFVGHDWAEAHHDVFIEDEAGARLAAARVPEGIEGVARFHALIADHIDDPSEVMVATETDRGLFVGALVAAGYRVLAINPMSVARYRERHATSGAKSDAGDAWVLAELARVDGQHHRPISGDTDLADAVKALARAHQSLIWARKRHTNQLRSALREFYPAALDAFDDLASGDALAVLAIAPTPTAGRHLASPRIVSALRRGGRQRLVDQRAGEIRQALRAEHLRAPDVVADAMGATVVALVGVISELRIQIRRLEGELADRFEQHPDAKIIRSLPGLGTILGARVLAEFGDDPNRFDSAKSRKNYAATSPITRASGKHRVVLARYARNHRLADTCHLWAFAAITASPGARAFYDHRRQSGDTHNRALRALANRLVGILHGCLRHGVPYDEHTAWAHRNDLAA

SEQ ID NO: 67203 - protein, 345 aa, unidentified
MEHHAGIDVSLEWSSVCVVDASGKIVREIKVASEPEVLVEFFKGLSFPVTRIGLEAGPLSQWLHAGLTRAGFETVLLETRHVKAALSAMSIKTDRNDARGIAQLMRMGWFRPVHAKSVGSREVRALLVARKQLLSKLMDLEASMRGILRGFGLKMGVVTRKGFEARVRELSAGQAMLERVTSAMLEARAALWREFEQLHREMLRIVRDDEICRRLMSTPGVGPLVAITFKSAIDDPGRIAKSKTIGALFGLVPKKYQSGERDVSGGITRTGDESVRTALYEAANVMLTRTTRFSSLKRWALEVAKRRGLKRARVALARKLGVVLHRIWIDGTTFRWTKHNPAIAG

SEQ ID NO: 67204 - protein, 417 aa, unidentified
MKTSSNAIPIERYVALDIHKEYVMAGGMNREQEWVLQPRRVEMERFRAWAVTNLRMGDEVVIEATTNVWDIYDIVAGLVSRVVVAHPAAVRQIAEARVKTDKQDVERLLRLLIADIVPEVWVPPVHVRELRALISYRWRLVKMSTMIQNRLHSLLHRHNIHPPEGGLDTEKNRSWWEQQEFSSLETLQVKQELATLYQVERHKGEVEQELGRMSNSEPWASQAAYLMQLPGVGIVITMTALAAIGDISRFESPKKLVGYAGLGAGVHDSGKEHRDKKITKCGRKELRWAMVEAAWRAVWHNPYWKKQFEALKRRKHPNQAIVVIARKMLVTIWYVLSKQEAYRYASEEDLAYKMLIWSWSIGKEAHQGMTRQQFAKYGLLRLGVGEHLTRIVRDGLPRRIAPTEEVLAIRPELRPPE

SEQ ID NO: 67205 - protein, 412 aa, unidentified
MQVVYARCAGLDVHKKTVSVCISVCEAEGAKQQQMRVFGTFTKDLLALADWLKEAGVTHVAMEATGVYWRPVWAVLEGQFQQMLVNPQHIKAVPGRKTDAKDGEWIADLLQHGLLQGSFVPPVRIQDLRDLTRYRAELRQSQNRVANRIQKFLEQANLKLSSVASNALGVSGRRMLEAIIAGQEDVEQLAKLARGKLKSKIPQLEQALEGRVRDHHRFLLAEFLDEWGALGERIARLEAEIDRQIRPFEPAVALWQTIPGVDRVTACNMVAEVGVDMNQFPTAQHLASWAALCPGNHESAGKRKSGRTRDGNKWLRRSLCQAAWAVTRKKDCYLSAQFKRLAVRRGAKRAVMAVAHTMLIIGYHILKTGRGYYELGGNYLEQINKGQLQRYYTKRLQRLGLRVTVEPVPEAA

SEQ ID NO: 67206 - protein, 366 aa, unidentified
MLRKAELSREADSENDLGGSSETMYYIGLDVHKKAISFCVKDAAGRVHQEGKIGASRRELDSWIRTLPQPRTIAMEATIFTGWIYDHLLPHAEKVKVAHPLMLRATAAAKKKNDGIDAGKIADCLRCDFLPECHMASTEIRDRRRTLRYRNLVMRQMVQMKNRVSGLLMESGVSYNKQRLHKLGYFTDLLSTNEEISQSILPLLKLGREHIVRAQRLDSALIGSLEKDPLLSERLRRLRTIPGVGPITALTWALEIGDYTRFRSVKEAISYCGLCSAEKSSADKVMRMPISKQRNKHIQHVLVEAAKMAPRYSPELALVREREIQRGNKNRATFAVARKMVAYMLAVERRKQDFVPAEEMAGRAVA

SEQ ID NO: 67207 - protein, 361 aa, unidentified
MDAHKRECQATWIDREGKVQREERFPTTPSRLRAFAASMGPEDRIVVEASSTGRLVYKLMRDGGVDVRLANPAGIALIARSKVKTDARDAEVLAQLLRTGYLPEAYVPPDDVQEIRDVVRFRVGLTWKLVAAKNQVQALLMWNGVEKREADIFGKAGLEALAGVELPPHHRALMDLRLQEVLLLAGQIERMEETMAGLGEARGDIRRLMTLPGVSFYAALAVVGEVGDFRRFPTAKHLASWAGLAPSVRQSGDRARTGHITKKGSPLLRWILGVCATAAVKMPTPFRRFYLHLKGKGHGVAVTAVARKMLCTMWSMIVHGRDYDHAIEGNVRRKATEMRRKARKGPASDIAATRPASPTPS

SEQ ID NO: 67208 - protein, 324 aa, unidentified
MDSQGRTVLRKTLKRAQVADFFSNLPHCLVGMEACASSTYWARVIESCGHTAKRIHPKFVKPYLMAEKNDPNDAEAICEAVQRPRMRFVPNKTQEQADIQAIHRVRRSFVQARTAAINQVRGLLAENGIILKQGACHVRFHLPSIIDDHENGLSGTMRQLLRSQYENITFLDARIAEQNKVLKDIVKEHEACRRLMQIPGVGVLTASILLTVAGTVQDFKNGREFAAYLGLVPRQHSTGGKRRLLGISKRGDSYVRTLLIHGGRAVLRAMKMDREPLGDGARNAWLVSLIDRRGHNRASVALANRTARIAWSMLAHGTEYAKAA

SEQ ID NO: 67209 - protein, 343 aa, unidentified
MKHYAGLDVSLEETAICVIDESGRVVKETRAASEPEALVATLREIDLALERIGLEACSLTAWLHDELRSAGLPAICIETRQANAAMKTMPNKTDRNDARALAQIMRTGWYRQVHVKSRPCRLWRSLLVARRTVLNEMRSIENVVRAVLREGGLKLGTPSRAAFTRRARELIAEDASVKPLVEPLLAILATMLDQFARLTKQVLDIVRREKVCRRLMSVPGVGPITALAFRATIDRPDRFRRSRDVGAHLGLTPARYQSGETDIQGKISRCGDELARTALYEAAHTLLVRSRKWSSLRAWGMKIAKHRGMARARVAVARKLAVILHRMWRDETEFRFGKEPATA

SEQ ID NO: 67210 - protein, 391 aa, unidentified
MVCVGIDVAKDKHDCCILDSDGTVRADCFTIPNNMDGFKQLLQTIRDCTKKSDKIKVGLEATGHYSYNILGFLLDNGLPTYVINPLHTNLYRKSLSLRKTKTDRVDARTIATMLLSDVDLKSYTDIAYHNEDLKSLTRYRFDKVQERAKLKQSVSRLATILFPELEQLVSSIHGTSIYALLSEYPGAKQISEVHLTKLTNLLTTASKGRYGKEKAIQIREAARTSIGSVMPAKSLELKHTIKLIQELASEINEIEDSIQKIIDELNPPILSIPGMGVNSAAVILAEIGDFSNFSSPDKILAYAGCSPSTYQSGKLTNCYAHMEKRGSRYLRHALYNATKYVCYWNPVFAEYLAKKRAEGKHYNVALSHAMKKLVRLIYALQKSGKTYLTAA

SEQ ID NO: 67211 - protein, 441 aa, unidentified
MAMRKRELTVMHPNAAGIDIGSASHYVAVAPDQSEEPVKEFGCFTEDIEAMADWLIECGVDIVAMESTGVYWIAPYEILESRGLTVYLVNARHVRHVSGRKSDVLDCQWLQQLMSFGLLSGAFRPAGEICALRAISRQRDTLLNEQARQVQRMQKALTQMNVQLTNVIADIVGKTGQDIIRAIVAGERDPHKLAKLRNYRVHASEETIAKSLEGNWREEHVFCLSQALSLFDAYQALIVAVDAKLEEMIKPMRQHQEALAANKNKGRGKNAPAFDARNALYQWAGVDLTRIGGIDVSTALKVLVEIGTDLSKFENAKRFASWLGLCPGTKISGGKKLSSASKRIPNRVTQALKLAAQGLHRSHCALGAYYRRMAARMGVGKAITATAHKLARLIFAMLTKGGEYVERSQEQYEDQMRKRTVAYLKRKAAAMGFSMQPIEAV

SEQ ID NO: 67212 - protein, 375 aa, unidentified
MIVIGADTHKVTHTVGAVNEATGRVVADLTVRAKRRSFDDLLMWGRGLGCGRVWAIEDCRHVSGALERFLLARGERVVRVPPRLMAGARKSGRERGKSDAIDAVAIARAAIREGLETLPVAQLAGPELDVRLLVDHRERLVAQRTALINDLRWGLHDLWPEYEIPLRALIHRGWQDRVDGRLKRAEQCTRVRIARDELRRIRELTRAIGTIETELAPLVGELAPSLLAERGCGVLTAAKLIGEIAGVSRFATDAKLARTAGSAPIPASSGNTKRHRLDHGGNRQLNCALHRLAVSKGRLDPETAAYLARKQAEGKTRREALRCLKRHLARRVFKLLQPSASMPQAAPAIGERPPVIAKPGQMIHCNLPAGTPALT

SEQ ID NO: 67213 - protein, 346 aa, unidentified
MSSFTIGVDIAKRVFQVHVVDSNGEVQAARKLRRSEFLDFLSKLPPSLIGMESCSSAHHWARELSAMGHEVKLMNPMYVKPYIKRGKNDAVDAEAICESVTRPTMRFVPIKSVDQQSVLMVHRTRSLLIKQRTMLVNALRGHLAELGIVAPVGIERIAELVDRVTGREGDEIGIPPLVRSLVEVFSQQITVITEEVKALEKSLRSWHRTSEASQRLATIPGVGEITATALAATVPDPSFFQSGRAFAAWLGLTPRSNSSGGKERNGRITKAGDRHLRTLLVLGATSVIRRVRAGQPTPIYGWVNRLLGKKPARLASVALANKLARIAWAVMARSTDYQPQRAALAL

SEQ ID NO: 67214 - protein, 372 aa, unidentified
MGHHSEAFIGIDTSKSGNAVAIAEGGRGGEVRYLGEFPATEAGTHKLVGKFAAKYNKLTFCYEAGPTGYGLYRVIKSLGHECIVVAPSLTPRKPGERVKTNRRDAVSLARLSRAGELTAVWVPDERHEAMRDLSRARQAAKKDLQGKRQQISSLMLGLGRCYPGKKTWGPAHMTWLRSQKLKQREQRTALEELLEGVRQEGERVERLEQAIREAVPEWSLAELVTAVQAMRGFDLIAATGVVAETGDLSRFQKPREFMGYLGLVPSESSTGDRVNRGGITKAGNGRARRLLVEAAWAYRHPARVGRVKQAKVAAAPRRVREIAWKAQTRLCRRFRLLERKGKRRPVVATAIARELAAFIWAINREVMQGRQA

SEQ ID NO: 67215 - protein, 402 aa, unidentified
MNAVGIDVSKSKSVVAIMRPFGEIVSTPFEIKHTASDIHSLIELINSVEGESRIVMEHTGRYYEVLAHQLLEANLFVSAINPKLIKDFDNDSLRKVKSDKADAVKIARYALDKWQNLKQYNVMNELRNQLKTMNRQFGFYMKHKTAMKNNLIGILDQTYPGVNTYFDSPARSDGSQKWVDFASTYWHVDCVRKMSLNSFIDHYQNWCKRKKYNFSQSKAEEIYGKAKELVPVLSKDAITKLIIKQAVDQLNSASTTVESLRTLMNETASKLPEYPVVMAMKGVGTSLGPQLMAEIGNVSRFTHKSAITAFAGVDPGVNESGTYEQKSVPTSKRGSADLRKTLFQVMDVLIKTHPQDDPVYQFLDKKRAQGKPYYVYMTAGANKFLRIYYGRVKEYLSSLPES

SEQ ID NO: 67216 - protein, 389 aa, unidentified
MPQIPLNLDDMSRQQTALAVKLSALMNKTITGHSISQASLVNDVNRVLNLGLDVHYRQVTVAMQEDGGRIKAAGKMGYVDFLNWVGKKLAEGWEIHSCYEAGASGYWLHRELVKLGVKNLVVVPKAMGQGGKKQKTDKRDAGELCDCLDRYLRGQDKALSVVRVPTEDQEQKRALIRFHRQIMADRGRCEARGKGLLCAQGIQVHGRWWQVKAWLEVQSDPRLKDWMKEQLSGWRNKILSTDEEQDGLRERIAALAPAILPKGVGAYSAAVLHYEMRGFERFSNRRQVGSMTGLCPGIHQSDGRGKEGSINRCGIGIVRWTLVEMVWRLRIWQPQYPPVRRLASGLVKGKRARKRLVVQAARRLAIDLWRLSTGQTTPEKLGLIMHRAK

SEQ ID NO: 67217 - protein, 464 aa, unidentified
MKNDGKSGKTRSAVSNGLKAVRPMVAGIDIGSREHWVCGPAHESGAANVRVFGTTTVQLKELVDWLVLQGVKSAAMESTSVYWIALYELLESRGIEAVLVNARQLHNVPGRKTDFHDCQWIQLLHSCGLLRGSFRPKDEIAAMRAVHRQLFNFVEERTRCVQWMQKALTQMNVQVHHAVSDISGTTGMAIIRAIVAGERDPGRLSALRHPRCRKSVEEIARHLTGTWREEHLFNLGAALALYDAVEAQIASYEARLAAAISALQPQERKDAPVPVHPNPRKEKDIQGRGDQAARTALWRFSGVDLSRIDGVGTAVAQTVLTEVGPDLSAFPTEHHFVSWLRLCPRRPISGGKPLNKSRNALGANRIAAALRMAATSLQRGKTALGATYRRIARHKGASVAVFATARKLAQLVYRMLRYGQDYVDIGEQAYEQKFKARRIASLKEAARSLGYSLTEAPASQGSPV

SEQ ID NO: 67218 - protein, 403 aa, unidentified
MRVPAAADKAWAGIDVGKRHHWVCVVDRDGRQLLSARVANDEAGIAAVIGSVTGLAAEITWAVDIIGAPSALLLAVLSQSGQHVRYASGRLVAAMSGAYTGEGKTDPKDAFVIAETARIRRNLPVTGHKGELVCNLSLLTAHRADLIADRVRMINRLRDVLTSVFPALEREFDYSSCKGALVLLTGYACPARIRRIGQARLASWLRQRRVRGYASVAARAITAAQAQRITLPGQDIAADIIAELARNLLALDERVTELDTQIAALFAEHPQAEIIQSMPGFGPVLGATLLVTAGDLAAFPSPGHLAAAAGLVPVPNDSGRRSGNLHKPRRYSRPLRRVFYLSAQTSMMRDGPSRDYYLKKRQHARTHNQAVIALARRRVDVLWALLRDNRTYAAIPPALARAA

SEQ ID NO: 67219 - protein, 371 aa, unidentified
MKSIIYIGMDVHKKTYSLCALLKETGEIIGETKIPADVSLIIKFIENAKKSVDSDDVQIKTGYEAGCLGYSLYWQLAEKGIECDILAPSTMHRSAKNKVVKNDRRDAKNIAANLANGTYKSVHVPTDEDVEIKEYIRMMHDFKIELKKVKQHINAFLLRFGHQYPDKSKWVPAHIKWLKELELSDMHREILDEYLSQLEILSEKIERFKHRLEELSQKETYNEKIGQLRCIKGIDTTAAMTMHAETSDFDRFPTANAFASYCGLTPGEDSSGESYHRLSITKQGNSMIRTTLIEAAQVLVRGAIGKKGKKVKSKQKDQDVKVIDYADKAVIRLQKKYHRMIFRGVKRNIAITAVARELACFVWGIETGHIS

SEQ ID NO: 67220 - protein, 344 aa, unidentified
MNPMTKVTLLGIDIAKDIFQLHGVDASGKAVLKKKLKRAKLLEFIAQLELCVIVMEACGGSHYWAREFKKLGHEAKLISPQFVKPFVKTNKNDMNDAEAIAEAASRPNMRFVPVKTQEQQDVQCIHRVRERLVKNRTALVNEIRGLLTEYGVVAPKGIAKLRALLSEIIGDDDNKFNLTSMLKELCVDIYEELKELDEQIEQCNRKLEAIANTNPICQRLMTAPGVGVLTATILFTVLSDPSLFKNGRHFAAFLGLVPRQYSSGGKQKLYGISKRGDKYIRKLLILGAKSVLIKSPKKSDKRSLWINKLNERRGANRTCVAIANKNARVVWALAKNATEYKMAV

SEQ ID NO: 67221 - protein, 332 aa, unidentified
MKKMMLGVDVSKEQLEAALWVGGPRKGYASKAGNDPAGARKLLGWAGAKSGLTAVDCRVVLEATGVYHEVVAQVFHDAGCEVVIANPKRVRDYAKGQGLLTKTDAVDARMLARYGAQGEELLAWVPPAAEVRILRALMARLDAIEQDLQREENRLEKAQATHTPPVVIDSLQRSLTALRAERERLRREINDHYDQHPGLKQERDRLKTIPGIGNVSANRMLCLLKRHTFSSARQAAACAGLIPIEYESGTSVHKRPRLSKQGDPKLRATLYMAAIVASRHNPQLHKVYESLIARGKSKMSALGALMRRLVHIAFGMLKHQTDYNPALVTKMT

SEQ ID NO: 67222 - protein, 370 aa, unidentified
MLDTTTFIGLDVHARSIKAVSLDVMTGEVRCATFGYDAGAVAEWVRSVDPEARCVYESGVTGFDLQKRLSGLGVDCVVGAVSKMIKPSADRRRKNDRNDAEFLARMLSVGNVVEVWVPDDECEAARDLTRALEDARDDLSRSKQRLSKFLLRHGLVFDERTPTGRRKGNWTRAHWSWIESIRFAEGADNDVLAYYVDAVRRAAEEKARLEGLVEAEARKPRWRKRVDSLRCLKGVDTASAADLVFEAGEFSRFRNARSFAAWVGLTPSEHSSGESDRRGAITKAGNKHLRKTLVEAAWHYLTCSGRPKDLAKGQAPDRGARRHAAKGVRRLVERREALLARGVHGNKANVATARELACWVWAVGLMAEEA

SEQ ID NO: 67223 - protein, 342 aa, unidentified
MGSVLRKRRSRHVMSAFVCGLDVHKDSTYATILNHEGKIVNQTRMNNERVLSYLSHFRVSKVGMESSNQIAPLFRQLTSKGYDVVISHPKKTRYIAEAKIKSDRVDSKAIAELVRLDALPLAYFPTGEIAKLREKVRRRAFLVRERVKLRVKIKSVLTYEGLKWPSDHGLFTKKGLEWLHGLNNESVECYLRILKPLDLEIKLLSKELLGIAENDEDVKLLMTIPGIGYYSAVLMKSEIGDINRFPFAERLCSYAGLVPSTHASGKTVRHGGITKEGSRWLRWVMVEAAQTHVHKYDTSITRAYNRIAEKRGKKIAVTAAARRLLMCSFSVLKNKRPYYDQA

SEQ ID NO: 67224 - protein, 355 aa, unidentified
MTSTKYIGLDVHKESISIAVLNSAGKVVMECVIETKASTILQFIHGLRGDLQVTFEEGTWAGWLYDLLKPRVTELVVCNPRKNALLKEGSKSDRIDAHKLAELLYMSKLSSVYHGEHGLRMLKELSRSYLTISKDLGRVMNRLKALYRGWAIPCAGTQVYAPHYRSEWLAKIHEAGVRRRAELYYQQLDALRLVRQQARKELLVEAKKHRATKLLRQIPGIGPLRAAHLVAVMQTPHRFRTKRQLWNYSGLGLETHDSAQYRVVEGQLQRSKKPVTLRGLNDNHNHDLKDIFKGAAMRASTAAGPLRDFYEALLAKGRKPTMARLTLARKIAAITLIVWKKEVRFDANYLKQQAA

SEQ ID NO: 67225 - protein, 344 aa, unidentified
MWIIGCDFHSGFQQVAIFDKQSGAIEEKKLCHPAPATEFYRQLQGEVLVGMESGCGCQWFRRLLQECGHQLWMGDAARIRASETRQQKTDRRDAELILKLLLEGRFPRIWVPTEAERDVRQQLLDRHHRMRMRTRVKNQLQGLALNQGVQKGRRLWSEEGLRQLRELPLLEHAGRRRDQLLKLLTELNGQIAVLDGVVRREAEGREEVRRLMTHPGVGPQTALGMVLTVGQVSRFASSKQLASYLGLTPREHSSGGKQRLGHISKQGSSFMRFLLVEAGQTAVRGDEELKRAYRRLAAKKSRAVAKVMVARRLAIRLYWMLRNRWTYAELARHAGKPGSFRGEQ

SEQ ID NO: 67226 - protein, 437 aa, unidentified
MKSTHDDKTMKKTEAEGDFAALIGLDWGSQEHALCLHDCTTGRCETSILEHTPEAIAQWAAALQTRFPDGKIALCLEQARGPLISALMAYPFLVLYPVNPATTARYRQAFKTSRAKSDPSDAQVCLELLLHHRDKLMQWQPDEPQTRELARLLEHRRGAVDLRTLLTNMLRDALKSYYPQALALAGQDLFAPLACQFLLKWPSLQELQKARKETVRKFYYVHNCRRQDVINKRLEGIAQMTPLFHDAALLEPAKVHVTMLARQLLQLSTALKDYDSRIERLFARHADAFIWKSFPGAGPTLAPRLCCAFGSERSRYQSAAAIQQYSGIAPVTERSGKNQHWVHRRWGRPHFVHQSFFEYANQSALQCAWAKLFLQEQMAKGKTHPSAVRALAFKWQRIMFVCWRDRVAYDETTYLNSLKRRGSPLAHKLELILAKAA

SEQ ID NO: 67227 - protein, 317 aa, unidentified
MERILGVDVSKDYLDTDTLPPTQQRRFTNDPAGTAELVEWARGFRPDRIVFESTGPYQKAAVGALLAAALPAVVVNARQVRDFAKALGILAKTDTIDAAVLARFGQVVPTIVRPLPTPEIQAFQELYDRRGQLVRMLAAEKNHRYAATSAKVIKHIDAHIRYLENQIETLEDRMDQFVQNSEAFKARDEILQSIPGVGPQVSRTLLAYLPELGQGTRQQLSALVGLAPFNDDSGTQSHTRHIRGGRAKVRLGLYQAAVVAIRHCPPMKDFYIRLKARGKASKVALIAVARKLLVLANALVRSMKPYDPANSVCLQSA

SEQ ID NO: 67228 - protein, 327 aa, unidentified
MMFIGIDISKEKIDLSWLRDQLTNKIKTKVFKNNRQDFTRIEKWLLNTTKSAANELVITLEPTGVYHEALMYFLHEQGFNIILANPGKAKKYADALNIIHKTDKSDATMLAHYGCAKHAVVNYWQPEALEIRELKALIRRLDALESNRQREANRLEASEFSNVSARVCQSIKVTIAFLDDEIKQLKSDIDNHIDNEPDLKRNRKLLESIPGIGPVLSRELTYLFAAKKFNKAKEAAAYCGLIPRHNESGKLKGRTSISKLGPARIRCKLYMAAIVAGQWNKTIKRHKLTLINNGKTPMQAVCANMRKLIHICFGVIKNQEAFKLQES

SEQ ID NO: 67229 - protein, 410 aa, unidentified
MEVLHAHCAGLDVHKESVVACVRHMADSKVTTVVKTFKTTTQELMALSEWLSSEGVTHIGMEATGVYWKPVWHILSDGEFELILANAAHVKNVPGRKTDVNDATWLADLMAHGLIRASFVPDEPTQQMRDLLRTRKQMVRERSSHVQRIQKTLEDANIKLDSVVTDILGLSGRRIIEALIAGQTMPQALASLAHRRIHASADELEAALRGRVTKHHRFLLKLHLDQIDAFDAAIARIDEEVSANVEPFRTAIEMLSTIPGISTLSAEVIVAEIGIDMSRFQTAGHLISWAGLCPRNDESAGKRRSNRMKKGAPWLKTTLIQCAWAASRKNNSYLQAQYLRIRSRRGVKKAIGAVAASILTAAYHMLKDGTLYQDLGADHFDNRAKGKHVLRLVNRLQNLGFDVQITPLAA

SEQ ID NO: 67230 - protein, 388 aa, unidentified
MPAAETPVAYLGIDVGKSSHSACALDAGGGVAFRAELANRPDDIDRLLERAGSGALVVVDQKRNIGALVLARAHAHGNPCAYLPGYAEKQARGMFPGIAKTDAIDAEVIARTALGVPGALRPAPEEPEGAASLRVLSSQREFASSARTRAKNRLRATLLEADPALEGAVDPSSRWQVSMLAEFGGAAGCSAAGWRRFSNAARRAGAPAAGARRLWEALLASSRSGRRLPAGEDVAVRILAREIASLDADIEELDSLVADSLAGDEVYECLLTVPGIGPKTAAALVTSIDISAFRGHDELASYCGVAPSDRRSGSSIRSTSPQHGGNRQLKNLLIFSCNSLIGTDNRFGRYYGECRARGMRHGKALKAVARKRLKVIYAIMRDAVPYAA

SEQ ID NO: 67231 - protein, 347 aa, unidentified
MRLVYPVCCGVDVHKTFLVATIITTTNNIFPRYRQKRFSTYYSGLLDFKQWLLDNNCNDVCMESTGKYWVPVWNVLETVSINVVIANPKWVSAVKGNKDDKKDSKWIGDLFRMGLVPGSYIPIKDIRILREFTRYRSKLVSMRSSEKNRFQNAFTVCNLTLDAVVSDMFGVSATAIENYLLDTDTVDPNYCVYLLRGSLKKKASDVVEAVKGFNMTAEQKERVRIVQGHFDDIDKRIAQIDNVIAGLVADYEGQIALLCTIPGIDRRLAITIISEIGTDMSEFGSSRRLCRWAGLTPGNNESAGKKKSVRICRAGVYLKPALVEAAHAAVKATLLWRFTQDLGWSHT

SEQ ID NO: 67232 - protein, 342 aa, unidentified
MEKVSIIGLDLAKRSFQTHGALADGGVGFRKKLSREKVLGFFAEQPRCIVAMEACGSAHHWGRAIRDLGHEVRLIPPTYVKPFVKRQKNDATDAEAIAEAASRPTMRFVAVKTEGEQARAMLFRTRDLLVRQRTQLINALRGHLSEHGVVAAQGPANVKVLEEAIEDQTTSLPLLVVELARVFLDQIQGLSKTISKLEKVTAHEATCGKTTRRLQTMPGVGPITALAIETFAPPMDVFKQGRDFAAWLGLVPRQHSTGGKQVLGKISKMGQRDIRRLLIIGAMTVVRSALRKGAPEGSWLQRMLARKPKMLVAIALANKMARSVWAMLAKGEDFRVPAVAAV

SEQ ID NO: 67233 - protein, 359 aa, unidentified
MSKCSTKNQKVYVGFDVSEKKIEIFSVCGTKTSNGRVQISNEPDAIREFLSIFEKPKNVCVVMETGTHSLWMSELIKELGFEVIVAHARDLALIYHSDKKNDRLDAEKLARLAQADKKLLHPVEHMTMERQDDLMVIKARDLVVKQKSQIICTIRGLLRSHGCKMIEAQYTAAGLKKCYSDLPAEVGSVLAPLLQQICYLDLAIKEYDRQVKKLCKKYPETDILRQIPGVGELTALAIVLIVGNPRRFKTSARLCAYLGLVPKQDQSGNTDKQLGITKKGNKLGRRLLIQAAHYIMGPFGTESRLRSFGLRIQSRGGNSAKMKSFVAVARKLVTVMFALWMHPEIPYRPNFKKGNKAAA

SEQ ID NO: 67234 - protein, 415 aa, unidentified
MVAVEVLVERCAGLDVGKADLKACVRVPGPRGGRRQQIKTFATTTSALLELREWLIAQGVTVVGMEATGDYWKPVYYLLEDAVGVQLLNAAHMRNVPGRKTDVSDAAWIARLVEHGLVRASFVPPPPIRRLRDLTRYRAALVVERSREKQRIEKLLEDAGIKLSAFVSDMFGVSGRAMLTALVDGERDPQVLAGFAQGRMRPKIPVLVEALTGRFGEHHAFLCRIMLRHIDDLDTAMAQVTAQIEAEIAPFQDIVDRLDTVPGINQRAAQVIVAEIGVDMTRFPTPAHLASWAGMCPGNNESAGKHFSGRTRKGDRWLRAALGEAAAAGAGAKNTYCQAQYHRLAARRGKKRALVAVGHSILIAAWYIINDGVVYQDLGPLHFLTRVNPARQSWRLVTQLQQLGYRVELNPVRAG

SEQ ID NO: 67235 - protein, 407 aa, unidentified
MPDYDWYVGVDWGGERHQVAILDATGARVAEHQVAHSGAGRESLVEHLARLGADPGRVAVAIEVPRGPVVDTLLMRGYHVFALNPKQLDRFRDRYSVAGAKDDRRDALVAASALRTDQLAFRQLQPDDPQVIRLRELSRTYDELLGEERRLANQLREQLWRYYPQALTHCPGADESWLWELLHEAPTPAHAQRFTRPALRALLARYRLRRITGDMLYETLQARSVTLTPGAAEAAAEHVELLLPRLRLVHEQRQQWERRMDALLDALGPPVEGRQEHRDVTILRSLPGVGRVVAATMLAEAWGLLAARDYQSLRAQSGVAPSTQQSGKQRLVLMRRSCNHRLRTAVFHWARNSVRLDPRCRAQYQRLRQRHSQARALRSVADRLLSVLVAMLCSGTTYDITRCPNAA

SEQ ID NO: 67236 - protein, 338 aa, unidentified
MTYIGLDVHKRVCYGTVMDEKGQIVKRGKFSNDPQGLEEFMEGVDEALVAMEAGYCWQPLYDRLEETGHDVRLAHPLKVKAIAEAKVKTDKIDSETLAHLLRADLLPESYVPPRDIRELRDRVRRRAFLVGMRTMLKNRVHSELAKRGIRLGVPLFTRKGRELLRGLGLEAVDQILPVMDALDRQTALISGGLKRMCGEDHRASLLTTIPGVGYYIALPIVSEIGDVRRFPDSEKLCSYAGLVPIVRRSGGSTRHGGITKEGSKWLRWALIQAVHVHIRCETNLTRFYRRLVETKPVQVAVMATARKMLKVVYWMLRNDEPFHPGPGVVDPVAGRREI

SEQ ID NO: 67237 - protein, 433 aa, unidentified
MPTTHPYDLVIGLDRSDRKADLHLIDTRTGQTQKQTVATSPEALHDWLARLHQDRPQDRVGLCLEQPAANLIVFLEPYSWIRLYPINPISLQKFRETFVTSRAKDDGKDAQYLAQLLLSHPDKLKPWQPDDSQTRQLQQLVFHRRAVVDQRTGLTNRLKALLKHYFPQALDLCGEDLWRPLATAFLLKWPTLQSLKKARKESLKQFYYLQGSRSQTLIEQRLERIDKAVPLTDELALLQSYTLRVQLICKELQLLQKTLEQFDQQIAKVFEQHPDREIFAALPGAGPVLAPRLLASLGSERERFARPENLQSFSGVAPVTKQSGGKRHVHRRYLCPKFLRQSFHEYAKESILHSRWAAAYYFQQRTKGSQHHTAVRALAYKWQRILWRCWQSRTVYKEALYEAALKKNKSPLVGLLDQIELGKSPVKTRAKKS

SEQ ID NO: 67238 - protein, 351 aa, unidentified
MDHIGIDVHKRDSQIYILAEGGEIVEQRIRTEPERFAAGLGTRPRARIVIEASTDSEWVARCLEAFGHEVIVADPNFAPMYATRTRKVKTDRRDARALAEACLLGAYRPAHRLSDPQRHVRGRLLVRDAVVRTRTRYISLIRALLRQHGYRVPSGSAESFIPRVRGLPLPGRLLSVVAPLLALMRPLNRQLSYSDATIEHLAVQDPRVPRLHSVPSVGPVTAAAFLAAIDDAQRFRHAHQLEAYLGLVPREYSSGETQRRGAITKAGHSRTRWLLIQVAVSILRRRPPQAEELRTWALRIAARRGKQVAVVALARRLAGILYALLRDGSVFEPQRVRHPRPPAAATALVGL

SEQ ID NO: 67239 - protein, 321 aa, unidentified
MKVVGIDVGKRKFDVALWVQGKVRSKVFENTGQGYQGLLGWLSSRGCEPGQTHLCMEATSQYYEGLALALHEAGYRVSVVNPLQIKAFGEAQLRRQKTDRADARLIAQFCEQSPPPAWQPPAPQIRELQRLVARIEAVQQMRVQELNRRHEAAGAALASVERMLKVLDEELAGLERQVQDHIDRHPPLRQQRDLLTSIPGIGQRVSTYYQAWLQGERFDEARQAVAFVGLSPSHRESGDSVRAKARVSKLGHARLRKVLYMPAMSAMRCNGAAKALYERLRAAGKPGKVALCAVMRKLVHWMFGVLKSGRPFDVTLALAKD

SEQ ID NO: 67240 - protein, 412 aa, unidentified
MSKNNIEFEQVIERGCGLDVHRDTVVATVMGKGIKTETRTFGTTTSSLKELGAWLESLQVTDGAMESTGIYWKPVLHVLREYPINLIVANARHIKNVPGRKTDKADSQWICKLLLSGLLKGSFIPPENIQELRDLHRYKKKLIGTVAAEKNRIIKTLEDANVKLSSVVSDTSGVTATYLINGLIEGRKDLSNLVSECYHKRLQASPKEIEEAINGRLTDHHAFILKSMQKHIASVEMQIAEIDVEIEKHIKDFEKEIELLQTIPGVGKNGAIGIVAEIGVDMDVFPSEHHLASHSGMCPGNNESAGKKKSSRTRQGNKHLKSTLTELAWGATRTKKSYYKAKYESMVVRRGKKRALIAIGHKILCAAYHIIKNKEPFKELGYEYLAERKKKNRLEYLKRELKEHGYKVEKAA

SEQ ID NO: 67241 - protein, 458 aa, unidentified
MNRKRSKPKIDRRMPMVHPNAAAIDVGATMHMAAVSAERTPEPVRSFGTFTTDLHRLVNWFKECGVETVVMESTSVYWIPIFELLDARGFTVFLVNARDAKHVPGRKTDVSDAQWLQRLHSFGLLRASFRPKGQIAELRAYVRQRERLLEYAASHIQHMQKALTEMNLQLHHVVADITGATGLRIIRAILAGERDPKVLTRLRDYRCHSSAETIEKALTGSYRAEHLFALEQALALYNVYHEKASACDTRIEAVLKELSIDRGRRSDSLPSSGRPRSDQANALAFDVRAALFALLGKDITQIDGLGPYLSLKLIAECGDDLSAWPSAKHFTSWLGLAPSNKISGGKILSSRTRRCGSRASALLRLAAVTIGRTDTALGAFYRRLSARIGKAKAVTATARKIAVLFYNAVRHGMEYVDPGASYYETRYRTRVVNNLHRRAKAFGFVLQPMEPAPGVVVS

SEQ ID NO: 67242 - protein, 365 aa, unidentified
MQKAELSCEADSENNLGGSSETMYYIGLDVHKRTISYCVKDAAGRVHMEGKIGSTRRELDSWIKTLPQPRTIAMEATIFTGWIYDHLLPHAEKVKVAHPLMLRAIAAAKRKNDKIDASKIADCLRCDFLPECHMASTEIRDRRRTLRYRGLLVKQMVQMKNRISGLLLEKGVTHTKRRLHKVGYFAELMAGNEEIDQSIRPLLKLSREHIVRAQKLDYALVSSLERDPLLVERLNRLRTVPGVGPITALTWALEIGDVSRFRSIKQAISYCGLCGEEKSSADKMLRTPISKQRNKHIQHVLVEAAKLAPRQCHELALIYEKEMQRGNRNRATLAVARKIVAYLLAVERRQQDFVPTEEFGGTAAA

SEQ ID NO: 67243 - protein, 408 aa, unidentified
MQRREKLLYVGIELHKETHTAVMVNCWNEKLEVVVIENKPSEFKKLAEKVNRKSDHLGLEPIYGLENAYGYGRSLAVWLIENGYIVKDINPALAYDQRKSAPMYRKNDEHDAYCVATVLINQLHTLPDAKPKDNEWTLAQLVNRRDLLVKDGIRFKNGLHEQISMAYPSYSKFFSEIDGKCAMYFWKTYPSPVHLQEKTAEDLTIEFKEISPIIRGDKAELILDCVKNDGNTYREYQESRDFITTSLVRDLEHQREELAGLDKEIEKILLSFDYKLTSMPGIGTSIASKLIAEIGDIRRFSNADKLARFAGVAPVKFSSAGKGKEQSSRQGNRQLHGLFYFLAVTMVSKPKNGAPNHPVFYDYYMRKIGEGKTKSQALVCIMRRLVNIVYGMMKNKTEYREPILKEEQ

SEQ ID NO: 67244 - protein, 348 aa, unidentified
MILVGCDLHSRTQQVAVLDTRTGELVEQELAHDGDAVERFYRALPPPVTIGIETTGYTQWFHALMHQLGHTVVVGEAAKIRAMVVRKTKTDRRDARHLLDLLQHDRFPAVWIPDPDTRDRRALIAHRVRLVRMRTVVKNGLQAIALNQRLALHSALWTQRGLTQLKALALPPHTTRRRDDSLALLAWLTTRIDQLDEHIAAVASADPRVQLLLTHPGVGPLTALTTVLVLGPLPRFPDSKHVVSYVGLAPAVHASADKQRLGKITKQGNALLRWVLGQAAPLAARQDDDLRRRYFSVMHRRGRPKAKVALARKLLVRLYIMLRDQIDYEEFRRRGRVPRPQQLPVAVM

SEQ ID NO: 67245 - protein, 418 aa, unidentified
MKSATSRNTLPEEPPNGVTGGLDWARDDHAVSVVDARGREIVRHTVEHSAAGLRELIEVLAGAGACEVAIERPDGPVIDALLGADLTVVVISPNQVKNLRGRYGSAGNKDDRFDAFVLADTLRTDRARLAALIPDSPETVTLRRACRARKDLVAHRVALANQLRAHLRNVFPGAVGLFAEIDSPISLAFLTRFDTQERADWLSPKRLGAWLGSVGYSGKVDPAVLHARLTGAPRGLAGADAAANAHLTHALVAVLTSLLEQIKSLTVQIEQQLAAHTDQQIFTSLPRSGRVRAARLLAEIGDCRSRFPTPEALACLAGVAPSTRQSGKIRTVGFRWACDKQLRDAVTDFAGDSRRANPWAADLYQRARARGHDHPHAVRILARAWLNVIWHCWQNSLAYDPAKHRALQRLIQDQQMAD

SEQ ID NO: 67246 - protein, 382 aa, unidentified
MQTIDTVNPSILLAIELSASTWLVAARVPGLEKPHLHRIDGGDTAALLALISSLQARAARGLDATIGVVCCFEAGRDGFWLHRLLTAHGVVCHVLEPTSILVNRRARRAKTDRLDAEGMLRVLAAYLRGDHQACSMVRVPTPEEEDAKRTHREREKLVQERLRIENRIEALLFTQGIRKRPSLRSWERDLAVLRTGDGREIPRHLRAELDRLRRRLVMTLELIREVEAERDQAAKTKPQDQTCHKIAALCRIRGIGENFAAVLTREVFYRSFDNRRQIASYVGITPMPYQSGGMDRDRRISRAGNPRARTTMIQLAWLWLRYQPVTELAEWFRERVGTLAGRTRRIAIVAMARKLLIALWRYAETGVIPAGAEIRAETTVAT

SEQ ID NO: 67247 - protein, 394 aa, unidentified
MFYLGIDVGKFSHSLCLLAEAGQESKIWQATNDRIGFEKLQERLLKEEIPWSDLTIGMEATGHYFLNLYGFLLELGIKAEQIALLNPLQVKSFRNTNLRGAKSDNVDAERIAVLLRFGGYKRCNVSVNEMMNLRELSRLRADLTASGGNLKRKLIAVLDRIFPEFAKIFKNQFGVTALTLLQDYSTPEELARLSLKELRLAIKKLSKRGLSPAKIKRLHEASKNSIGISFGQEAFKIELQIILQQLAHLEEQIDFLKDQIEMIVKKLHSPIFTIPGIGPTTGATILSEIGDINNFPSAEKLVAFAGLDPKLKESGTYQGRTPISKRGSKYLRAALWYAAMVACRVEPTFKKQYQARREKGKSHRYAVTSAANKLTKVVYHILKYDCIFDSKQLT

SEQ ID NO: 67248 - protein, 355 aa, unidentified
MSSEKYIGLDVHQATISAAVVDSQGKVVMESILETKASTLLEFFRGLRGSLFVTFEEGTWAAWLYDLLTPHVSEVLVCNPRKIPLLKQGNKSDKIDARKLAERLRLHDLKPVYHGETGVRMLRELARSYLTVVKDLSRVMNRLKALYRSWAIPCAGRDVYYTHHRNQWLEKIPEAGTRRRAEQLYQQLDMLQHLRQQARRELLAESRKHAITAKLRQIPSLGPIRSALAVALIQTPHRFRSKRQLWTYSGLGLETRDSGEYYYVRGQVRRRKKQATIRGLNKDYNHDLKGLFKGAATRASVQPGPFQEFYQRSLAKGIKPTMVRLTLARKIAAITLTLWKKGEDFDINKLNTQAA

SEQ ID NO: 67249 - protein, 355 aa, unidentified
MTSKIREDSVAASVIGIDIGKEVFHLVGFSADGRLVLRQKIKRLALEATFKKLPPCIIGMEACLSAHFVSRTLRSMGFEPRIIPAIYVKPFNKGQKNDYNDAEAIAEAALRPNLRTVSEKSQDQLDLQALHRVRSRLVSRRTATINQIRAFLIEQGITIRKGLRAVQNSLLTLLDERRDEISPRMRHIILDLHDDWMRLDARIEAISGEIAEIGQSEAHCRALRTIPGVGPVISTALVAAVGQGEAFDHGRDMAAWVGLVPRQYSTGGRTTLGRISKRGSRYLRTLLIQAAKIILMRPKKWPELSFGAWLAEADQRMHRNKLAVALANKLVRIAWAVLRYGRGFDAPRDTVAEAI

SEQ ID NO: 67250 - protein, 350 aa, unidentified
MAIIGCDLHSRYQQVAMLEFSEGEIVTRRLEHENGEAREFYASLPKPSLVGIEATGFTQWFERMVGELGHELWVGHPAEIRARAVRRQKTDTRDAEHLLDLLISHRFPRVWVPTPEERDLRQLLKHRDKLVGMQTSVKNQLHFLAMSQGICRKQKLWSARGRVELEGLILGPWATRRRQELLEMLDRLQPEISELDEAVKVEAERRPEVILLRKHKGVGPLTALAFVLTVGPVERFPNSRKLVSYLGLNPGEHSSGGHQRLGHISKQGNEMMRWLLVEAGHVASQFDPELRRKYQRLKFRRGAKIAKVALARLLAVRMYWTLRLAQPVVPPVHMPSSPGWRKVDTSPSHV

SEQ ID NO: 67251 - protein, 458 aa, unidentified
MSQAKRPRGRQELSPVHPNAAAIDIGATMHVAAVGPDCDEQPVRTFQTFTADLHRLADWFAQCGVKTVVMESTGVYWIPIYEILEPRGFKVMLVNARDAKHVPGRKTDVSDAQWLQRLHEYGLLRPSFRPQAEMAGLRAYLRQRERLLDYAAAHIQHMQKALTQMNLQLHHVVSDITGVTGMRIIRAIVAGERDPAILASYRDVRCHASVETVRQALVGNDREEHIFALTQALELYDVYQAKVAACDGQIEAVLARLKQSAVPPTEKLPAARHKTRQPNGPAFEVRGALHAILGVDLTQIHGLGPYLALKLVGECGTNLSAWPTAKHFTSWLGLAPHNKISGGKVLSSKTRRTSNRAATLLRLAAITVGRTDTALGAFYRRLSGRVGKAKAVTATARKIAVLFYNTLRHGMSYADPGASYYEDRYRQRVLGNLQRRAKSMGFVLQQQAEPAGAQAGVS

SEQ ID NO: 67252 - protein, 394 aa, unidentified
MSFSFFVGVDISKDSFSVCIRNAQGEVISQKSFPQSSQGFSSLFETLSSLSNNLSSFLVGMESTSIYHINLFSFLSEKGIPSVIINPSIIDRFSKVNLRPSKSDKKDAKTISEFLFIYKPSPSSSNKISELKIITRERENISKEISHLKDDIKRCLSVLFPELEYHVNPFTSGMLNFLLHFPSAKSIASSERKIVDFVFSESFKGRGKKPSFSSDMIFDLASKSIGINSKAFENILRSKIEILLLLLEELDKFDKLLSESIKDIEINDINIITSIPGIGKTSAISFLCEVQDIRRFRRAKSLIAYAGIEPVIKESGRRDVRLGISKKGNRHLRRILFLMAMNVIKYEGKFKEFFLKLRARGKSFKSALIAVANKLLRTIYSMLIHGTFYSPNYS

SEQ ID NO: 67253 - protein, 338 aa, unidentified
MGQVVTIGLDLAKSVFQVHGVDAAGEVIVRRQIRRGQLLQFFAKQPQCLVGMEACASSHHWARQLLALGHEVKLMPAQYVKPYVKRGKNDAADAEAICEAVARPTMRFVAIKTPAQQSAMMLHRVRLVLNRQRTQLSNAIRAHLGEFGIVAPAGRLGLQHLLDVLADEAEERLPSEARTCLQMLASQLEVVKAQILDNDRRILADARSTELGRRLMTIPGVGPLLASALVATVADPSIFRCGRDLAAWIGLVPRQNSSGGKERLGSICKAGHRYLRQMLVVGAMAVIRYADPKRRPWLAQLLARRKAKVAAVALANKIARTAWAMMMTGERYREPLAA

SEQ ID NO: 67254 - protein, 426 aa, unidentified
MLKSQVERLKFIRNIDIIVGIDIAKETHWDRIISPCGLEFCKPFPINNNIIDFKLLEDKIKNIMSKNNLKNVIIGMEPTGSYGSALIKFLVNTGFYVVNVMSNHVKKAKELDDNTPTKNDRKDALTIANLIKEGRYHDIYIPKGTYADLRILTTNRQEWIRNKVHCNNKIICILDQYFPEFQSVFKDISGKSSMQILSKYPLPEDILSVDIETLRNNTKIANGKRRISKTKIVALYTFAQNTIGITNDVSYIKTNINFLINEYKHILNNLEYIETQMSQVLSKLEEAQYITSVKGISDIFASDLIGELGDITRFQNWKQIRKYAGYNFKEESSGKKKGQTVISKRGRPFLRYTLYQVALSLVSNNNEFKKLFEYFKTRKKNPLKGSQALVAVAMKFLRVMFYLVTNKRKYDSSRVLGEYREQQIAA

SEQ ID NO: 67255 - protein, 319 aa, unidentified
MMNYIGVDVSKESFDAYNFELGGRQFSNDDAGFKLFKKWTGSPVHVVMEASGPYYLKLAHQLFEWNIAVSVINPLVIRRFCQMNLQRAKTDSKDAVSISQFAQLTNPAQWTPAPEHLQQMLQMQSVMEQLSKQQTSTMNALEALRQHPRINKKASRSLDQVARIQKEQIAQLEKEIMELTKQHYSAEFNSLISIPGIGKKTAMLLILSTSGFSRFENVKQLVAFTGIAPRIFQSGKTVNKKPRISKLGMSDLRRSLFMCALQAIKCNEACKTLYQRFRQNGKAAKVALMAVSHKLLRQAFALVKSGMTFDTKLSFQMIQ

SEQ ID NO: 67256 - protein, 322 aa, unidentified
MRYIGIDVSKATFVVAYSSDKGGEIRTFNNTTTGIRQFIGTLPKDGSIHGVMEATGNYSALLLYMLNVAGITVSMENPLKVKNFAKAMLSTIKTDKSDARLITLYGEKMNPRPFKVQGEAILRLRQKRTVIRQLTKQITAMSNLRGSLACLPVPDKGATHTVDETIKFLEKKRDRLQSELTDLVEVEFSRQLALLTTIKGIGITLATALIITTGGFTYFQNAKQVSRYLGICPTYEQSGTSVNIKGHINRNGDAYTRGLLYVAAWTASRFNAQCKETYTRLRQNGKSGKLAMIAVANKLVRQAFAVVAHDKEYVDGFVSNRP

SEQ ID NO: 67257 - protein, 369 aa, unidentified
MQKRTNVATLSDLGKQKVAGRMTIGIDLGDRRSHFCALNDQAQVIARGSLPTTATAFRREFAALPPSLIAVEAGAHSLWVNQVLKVCGHEVLVGNPRKIRLITESDRKSDRADAQSLARLARADRLLLSPIQHRTQEKQVELSVIRARDALVRSRTALINCARGLVKPMGLRLPACSTEAFAKRAASTDLPEILRVALAPLLKQIEAVNQAIREYDRQIEHIAATQYPETCLLKQIKGVGTLIALTYVLTLEDPHRFSKSRDVGAFLGFLPREKQSGERSPKLGINRAGNEYLRRLLVQGAHYILGPLGPDTDLRRWGLQLAARGGSHSKKRALIAVARKLSVLLHHFWKTGEVYEPLRKEQITKGAAA

SEQ ID NO: 67258 - protein, 323 aa, unidentified
MFYLGVDVSKKKLDCMLLNSANGKLKSKSLSNTKAGFEELIGWLAENKAPEAHVVMEPTGVYHEPAALALTDAGLTLSLVNPAQLRQFAQGLGVKNKTDKADSTVLARYGEAVKPEAWQPPSKSARHLKALLARRDAVADDLQREQNRQEAVEFAVSPEEVRQSINQSISFLKAELKRLEETIEEHIDSDPGLRDKKDLLETIPGVGERVSTNLTALFAAKTFDSAEQLAGYLGLVPVHGESGTSVHKRPRMSKAGPAHLRKLLYMPALVARQWNPHIKAFSERLLAKGKTKMAVIGACMRKLAHLCFGVVHTGRPYDPNYAM

SEQ ID NO: 67259 - protein, 348 aa, unidentified
MNYAGIDHHRQYSHITLLDERGEVVRSGRVANLRRELEGFFQGARDIKAVIEAGRSSYTMVDVLDDLGIETTVAHPKEVRGIARAKMKTDERDSWKLAHLLRAGYIPEVHKRSRENRSSQRVLRQRAFYGGKQTSVKNRLRALLAQQGEEIRQEVERVEDLFTEKGLKVLAGLTLPEREAKLVGALLKTYHHLQKCIDETNALVKELYEKMPTARLIQTVPGFGIFLAVLVAVEIEDIKRFEDVGKFHAYAGVIPSTHSSGERSWHGKIIKEGDRWLRWAAVEAVWPALRADFDIRCFYDRLKRRKGANSGKVATARRLLTIIYRMLKENRRYIPHKRVDDRPPSANS

SEQ ID NO: 67260 - protein, 435 aa, unidentified
MSYPHREERQMQPHYQCVCGVDIHKEFLQVCILRRDEDPDIFRVFNNFSGVQNLKQRVEEEGCECIACESTGVYWYRLYLSFEGQTRVIVGNAYQIKSIPGRKTDVRDAQWIAELAMSGLINPSRVFPKKDRELRELTRTRESTVHSRTQIKNRIHRTLDSAGIALGKGVNDIFGKSGTHLLWGLLNRESVENIITTIPSARVKKKVDTLREILSGSLSDLQIMLIKNNLDLMAHINEHIRALDEQIIARIGEQERIRDVDIACSIPGVSVTAAVTALAEIGDYHDFVNPEKLASWAGLVPSVYQSAGKNCSGKITKHGSEHLRWILVQAAKSAGRTVNTTFRKFFNRITYRKGANTATVALARKILCILWHLLMKNELYVDPLKSAKLKPRAVQKFSKNSPSDIQKAIDFILDSGFKVIYPDATLDQNFRGVSR

SEQ ID NO: 67261 - protein, 426 aa, unidentified
MEVLFSRCCGLDVHQAEVVACALFDDGKRRPKKVVRSFPTMRHGLEQLRDWLASLAITHVTMEGTGVYWRPVYAALEGRVDITLVNARHVKAVPGRKTDVKDAEWLATLLRHGLLRKSFVPEKEIRAIRDLCRYRRMLVQSQTTEKNRILKLLEIIGIKLASVASDVFGVSGMLMLRAIAANSCTKEQIASLARSRLRSKVPELRLALDVLVEEHHRVMLSDQLARLDRTAEEVARYDELLDKQVAPYEESLALLSTIDGIRRIAAIEIFAEVGPDVASFPSAAHFASWAGTCPGQRQSGGKSFSARRRKGNPYLQSILVEAALAATRKKATYLTDKYRRLKSRRGSMRALFAIAHKLACAVHRVLQTHEPYRDLGAGYLDLRNKRSTAKALAKRLKSLGYDQHNVATLFAPLAPTLGLRPEISAG

SEQ ID NO: 67262 - protein, 448 aa, unidentified
MSNGSGVSRGDRNRNARLARLREAVPVMNAIVGIDLADAKQMVVVTDHESRVLARRTFRRRAWELGAALDWAAARAAAAGFTGVSVAVEPTGHRWRVAGQLAAERGMAFVCVQPLMSAWARRAEDLTFDKTDDKDAVLIARLAAQLRCYLPEPADETWGRLRHLGIRRARLVAGSVSQVQQMRDLLECVWPAVLDAARQPFKSTTWRAALTVALERAEGDLGRVTLLGRRRFGAAVRRQVARWDAVHPWQKIIDAVFGACADPAGVPALRRGALERVALLLAGWRDTQARLAGTGTRMIAVLAELGLTGLVTSVTGLSTAGAASILAETGGPSRFTTGRALVKHAGLAPGEKNSGTCTGRSRTTGHGRPALRLAAWRAVWGALKSNPVYAARFTHLTSRKHNQLSTGQAHAALAAALLRHLHAVITTGQRWDPAIAAGGRPGPALIAA

SEQ ID NO: 67263 - protein, 427 aa, unidentified
MPYRIAGIDVHKKMLAVVVADVEIDGDFHFDRQKVGTTPGDLRGLADWLVEQDVEEVVMESTAQYWRPVWEALEQHWRPRRRARAGAPRLAGTLHLAQAQSNRGPGGRKRDFPDAERLVKRLVAQELTLSFVPDTEQRLWRTVMRRKYQITRNRVQLHNRLEALLEEAHIKVSSIVSDLLGISARRMLQALAEGETDPAALTKLAAPRLRATPEQLCDAFQACPTLHPVYRRLLKLTLEELRVIEDHLGQLDQQMADLLAVHHDAVQRLAEVPGLGVDSAQQIIAEVGATAATFPSPKHLASWMGACPGNEESAGVNYSHRCPKGNRQMRRVLNQAANAAVKAKGTIFAIVYRRIVPRLGHAQAIGAITHRLCRLIWKILHERVRYEERGPAVSAEAKKVRARKMIRELRSLGYRVELLPAPSSSPA

SEQ ID NO: 67264 - protein, 369 aa, unidentified
MNDITYVGLDVHKATVCVAIAESGRGGEVREVGIFENRPDVLRKMVARLGKQRHRLNFCYEAGPCGYRLHRLLTGLGHDCVVVAPSLIPMKAGDRVKTDRRDALMLARLHRAGELTPIWIPDAAHEAMRDLVRARATAVRALSKARQHLQGFLLRHDRICHGARAWTLAYRRWLTTVRFDHPAQQIVLQDYIHTVEDAECRRDQLTRQIEELMPTWSMAPVAAALQAMRGVALVVAVTVVAEVGDFRRFTNARQLMAYLGLVPSEHSSGSTVRRAGITKAGNALARRVLIEGAWTYRMSARVSRKLHDRLEPLSAAIRDIAWKAQVRLCARYRRLAATGKPKVVVTTAIAREMVGFIWAIACVAQPELT

SEQ ID NO: 67265 - protein, 340 aa, unidentified
MRKYIRIGVDIAKNCFQVHALESEDCSATKRRLSRSGIVKFLAEVEPCAIGMEACGSAHYWARRFRAMGHEVKLTPPIYVKPYVKRGKNDAADAAAICEAMSRPNMRFVAVKSEDQQATLMAHKTRELLIKQRTMSVNALRGHLAEFGVIAAKGIGHVEELVERAATADLPAMVQATLGVLLAQLRSLDAAIDELERAIVADHRRDPVSRLAASVPGVGALAASAILASAPDPQAFKSGRDFAAWLGATPKQNSTGGKEKLGSITKQGNRYIRRLLVLGAISVLRAAPKRKGALCDWLAALRARKPAKVVAVALANKLARIVWAIITTGEAFRTSIYAKA

SEQ ID NO: 67266 - protein, 405 aa, unidentified
MFFAGIDWSDTHHDALVVDDAGRQVHSPIRVDHTAQGLEKLHAFLEAITGPDGKENMACIVETSYGLLITFLLERGWPVYPVHPTTVDRRRAASGAKTDAIDAYLLAKTGRADFVELRRLTPDSDQIAELKALTRDQDTLIQMQTRLVNQLTACLKAYYPVAMTLFAKLQQRSTLLFLQAYPTPEIAMGASREQIAETLRQAGHRSAEKAATKIFEALHQPHLKASDITTRTKSRLMLALVAQLLPLVEQIALYDEEIGQLFLSHADSEIFSSLPRAGKRLAPRLLAEIGDDRKRYANATRLQALAGTSPVIFQSGTYTRIHRRHACIKPLRNALHQFAWQSTLSEPWALEYYQRKRKEGKSHSVAVRALSNVWVRLIHAMWFKQECYQAATFETARLEHARRAA

SEQ ID NO: 67267 - protein, 360 aa, unidentified
MHATTVAVDLAKSVFQIAVADDQWRIVETQRLTRTQFERWFANRSVDLVIMEACGSAHHWARWLNGLGITVRLLPAQYVRAYVRRNKTDATDAAALLEAARASAIRPVRVKSVEQQALQGLHRIRSLWMSTRTSRINALRGFCREFGITIPQGARTGVETIGRVLADPRSAVPDLIRHTAGMLLEEIRLLEARIAQVERELASVARHSTACTLLLSVPGIGLLTATALVAATSGDVTHFHDARHFSSWFGLTPREYSSGSSRYLGRISKKGDRYLRMLLTHGARSVLRAAKVAEGAGKDVCGIRRWALDVQGRSNHNKATCALANKLARICYATLRDHAPFDEAARLTKKQSRQSFALPA

SEQ ID NO: 67268 - protein, 346 aa, unidentified
MMIIGCDYHPSWQQICWVDTVTGETGEKKLEHALGEAEKFYRGLSGAALIGMESTGNCQWFVEMAAATGHDLWIGDAAKIRACDVRAQKHDRRDAALILKLLLEGRFPRIWVPSSQEKDLRQLLIHRYKLVRIRAQVKNELQHLAMNQGITKKRRLWSKAGEKVLRELPLGPWTSRRREDLFKVREMLSAQIDLLDQAVVEVAEKNEKAKLLMTQPGVGPITSMAFVLTMGDVSRFQRGKQVASYLGLIPREYSSGGHQRFGSISKQGNWFMRMLLVEAAQNAVRYDPGFRNEYLHRCHNKAKGVAKVAAARKLAIRLYWMLRTNSGYPGVVRVESSSRVPLVSAS

SEQ ID NO: 67269 - protein, 371 aa, unidentified
MTNVIHIGIDVHKDSYSLCSYSFATKQSFGQTKIASKDSLVIKYVQRLQKEQPNSEVLCGYEAGPTGFGLYRELEKTGIACVLMAPTSLPKAPGNRVKNDRLDAQELAQHLAWGTYSAVHIPTSEDEAVKDYTRMRNARVLALKKAKQNLLSFLLRTGRTFTEGKSYWTLMHFSWLRKQEFVDPLAQETFNEYLQEVLDQQDKVDRYESQIEEIANREEYREKVSKLRCFRGIETHTALSLVAEIGDFSRFVTPEQFSSFLRLVPSEESSGQREKRGGITKAGNTRLRLLLIEGAKSTLRSDVYGKKSKRLQARQKGNDQAIIAYADRANRRLHRVYSRLTSRGVNTNKATVAVARELSCFVWGMMNDRIQ

SEQ ID NO: 67270 - protein, 437 aa, unidentified
MTSHCRSCNHKISGGVLLAFKIFRFNCCGLDVHKTWIFACIGLTDANGRTEYKEKRFSSFSRGLRELAAWLASYKCTDVCMESTGKYWIPVFNVLEKTCNVILAHPKYTKPQKGNKTDRKDAKWICDLFMCEMIKPSFIPPAEIRHLRDLVRYRSKLTNMLTGEKNRAQNCLTVSNLKLDDVFSDVFGKSSRSITEYILAHPGEAFDVTPFVDKRCKTPIEEIQAAVDGAVSPEQAIKLRQCLDHIDELEKHKAEMEREILRVSNSYLDALELIRTVPGLDKNPFTAIQILSEIGGDMSVFPTDKHLVSWAGCCPRNDQSNFKIKSTRISRAGSYLKPVLVQVANALIKSKKHPEITERYRRIKSHRGHKKAIISICRLLLTAIWHILTDLKPYSAEGYLAPRPVKEDKVLTTSQALSLLKLRGYIIKDDDSPATAF

SEQ ID NO: 67271 - protein, 498 aa, unidentified
MNYTQNQKIEQVTESTLVLGVDIGSSEHYVRAFDYRGRELTRKVFRFSTDINGFNSFYDWVTQICIKHGKNEAMIGCEPTGHYWYTFYQFVKDYGMKLAFVNPASVKKAKELDDNSPKKTDLKDPKTIAKLVIDGRYSFPYVSEGIYAEIREVTSSRDRIMKELNAASNRIQRWLKIYFPEYLTVYKKFDTTTGMMILEEVPLPTMVTALGVDNIIKIWREHKVRGKGASFNRAKTLVDAAHDSVGKSGGQGAVMEIQMLLEDYKVKKQQLEMVTSVMEELIMQIPNAEKMLSVDGVGLVTVAGFISEVGDISRFKNPKQIQKYAGFELVENRSGKHKGRTTISKRGRKKLRKIIYQVVLPLIQSNKEFRSIYDYYRKRIKNPLKPKQIQKYAGFELVENSSGKHKGRTTISKRDRKKLRKIIYQVVLPLIQSNKEFRSIYDYYRKRIKNPLKGRQAMIAVGCKLIRVFFAIMTKGVVYNGSKMIEDIHRPTQLPQAA

SEQ ID NO: 67272 - protein, 303 aa, unidentified
MLPNAERFTVANDERGVRTLVERLRSIGAQLIVLEATGGYELLAVAALVAAALPAIVVNPRQVRDFAKATGQLAKTDRIDAVLARFADVVRPALRPMPDEPAPELKALLKRRRQLLDMLQAEKNRTGQVFGKGKRLAKKSLKAPIAFLERELRMTDTDLGDMVTASPAWRERDDLQQSVPGVGPVMSRTLLAALPELGRLSRREIAKLVGVAPLSRDSGTMRGRRFIQGGRSSVRAVLYMAALVATKRNAAIRVFYLRLVTAGKPKKLALVACMRKLLTTLNTIVRTKTPWRDDVAAGVLTGA

SEQ ID NO: 67273 - protein, 349 aa, unidentified
MTTQRLSYVGQSVYVGVDVHKDTYAVTCVCNKQIVKTATVKADPAGLTASLSQWFPGARLYTAYEAGFSAFVLHRALTKAGIMNIVVNPASIAVAANDKVKTDRRDSKKLALDLSDGRLQGIYVPTEDEELARLLPRTRAQMVEHRATIARQIKAKLHQFGLIAPASRRLISNRYVREIDAWPLPPDLRVSLTFLAEQWRFATRQLIEMRRLLREQAKAHPAIEQVYRSVPGIGEVVARTLATELGDMTRFANERALCSYTGLTPSAYASGPSVRRGHISRQGSSRVRHLLIETAWRALPRDAVLKEIFDRIAATRGKKRAIVAIARRLTGRIRACFRQGTTYAVGTYA

SEQ ID NO: 67274 - protein, 372 aa, unidentified
MGHHTEAFVGIDTSKSRNAVAIADSGRGGEVRYLGEFPATEAAIRKLVAKLAAKCCHLTFCYEAGPTGYGLYRLLKSLGHDCLVVAPSLVPKKAGDRVKTNRRDALSLAKLLRAGELTAVWVPDERHEAMRDLSRARLAVKKDLQGKRQQISSLMLRLGRIYPGKTTWGRAHMRWLMEQKFEHREQRIAFEELLEGIRQESERMERLEDAIREVVPEWSLAEVVAALQAMRGIDLIAAVGVLAEIGDLSRFQNPRELMGYLGLVPTEDSTGDKVKRGGITKAGNGRARRILVEAAWSYRYPPRVSRDKQPKVEAAPRRAREIAWKAQTRLCGRFRSLERKGKRRTVIVTAIARELSAFIWAINRELLPPRQA

SEQ ID NO: 67275 - protein, 496 aa, unidentified
MSAFLRRSGQNPHRWATKGMKSKKELLAKKKHIKRKSAKAKHNRVLGIHNPHAAGADIGATEIYIAVPPDRLEMNVRCFGTFTQDLRAIVQWLREYKVTSVAMESTGVYWIPLYELLEQEGFEIYLVNARHVKNVPGRKSDVQDCQWLQYLHSVGLLRGSYRPAQDICAMRAISRYRDNLLHFGAQHLQHMQAALDQMNLRLHHVIADLSGLTGMAIIEAILAGERDPRQLAKLRDPRIKASQETIAKALEGNWRVEHLFVLGQALQSWKQVQQQLGQCDQKLGELSSQLEGKIDLANSPLPPSAKYCGREPRSKNQPNGPWREELYRHFGVDLTEVPGLSLGVVLTLFVELGADLSAFPTPRHFAAWMGLCPDNAITGGKVIRRGTRRNRQRIRLALRLAATRLHHNKTQLGECFRRLRARLGAPKAITAMAHKLARIIWHLVTHRVGYDESIFAEREEQLLRRKQRQLRNLAHSLGFTLVPNPRPAATSNAEVS

SEQ ID NO: 67276 - protein, 458 aa, unidentified
MSGGTLFSRLPTRLRVWLSSGLRTVGHRDEAWLQRGLPLLVVAMPTSPSYWVEEERENAMAKVIIGVDPHKLSATIEVVDRRERLLGSGRFSTDQAGYTAMRTFAKAWPERVWAVEGSNGAGRPLAQRLLEAGEHVVDVPAKLAARVRLFDTGHNRKTDARDAHSIAVVAVRTRTLRVLAADGELEGLRMLCDRREELTRLRVQTVNRLQRLLAELIPGQGQKDLTALQAKAILATVRPRDIAGKTRRRIAVEELADLVAVEAKMKKATAELKTIVLARGSRLMDIHGVGPVVAARILADVGDITRFADRNRFASWTGTAPLDASSGEQNRHRLSRAGNRRMNHMIHIAAATQIRLDTPGRAYYLRKIAAGKSRREAMRCLKRRISDALYRQLRNDATSGVNAGPGGHSGAALQSSAAGLHPHTGTSDQPLPGPAATTLPAPARTRKTVGSGQLQLAP

SEQ ID NO: 67277 - protein, 349 aa, unidentified
MNFYTNTHPYYCGIDLHTRLLYVCIIDNENNILVHEKIDDSPDKLLALLKPYLGNIVVGVECMHCWYWVSDFCEEHNIDFILGHALYMKAIHAGKTKNDKIDALKIAKLMRGGNFPLAHAYSKEHRSIRDALRRRTHIMRMSAQLKAHVASTVSQYNLPVLETRLDLRNSPDREKMRHFFPDEAVQKSMDLNLNIIETMVSELYKIEHYVKTQAQTHCATDLHILKSFPGIGKILALTILYEVGDIKRFPSVQKFASYSRLVKCKAESAGKTHGTQGNKIGNAHLKWAFSEAAVLYLKGNDNAKRYLAKLQKRMSKAKALSALAHKIGRCTYFMLKNRQVFDEERFLNG

SEQ ID NO: 67278 - protein, 366 aa, unidentified
MIIIGADYHPGFQQIAFVDTDTGEFQERPLQHREEAEKFYRELAAQGMKVRVGMEASGHARWFERLLAELNFELWIGDAAEIQTKRVRKAKTDREDARLLLRLLLEDRFPRIWVPSWENRDLRQLLWHRHRMVQARTRIMNQLQAVALNEGWRAKKKLWRESGRQQLESFRLAPWASRRRQDLLALLDGLNPMIAELNQAVDQEVERCPAAQRLMTHPGVGPLTALAFVLIIGEAERFGCGKQIASYVGLVPLEKSSGNRRRLGHITKQGNSLLRFLLVEAAQVTARSIPEWRSKYFHLVMRRGRKIAKVAMARRLAVRLYWMMRKQWDYELLKKFGSQVENSPLMLWRPRVRSGSRGYGVRGSFY

SEQ ID NO: 67279 - protein, 317 aa, unidentified
MQQLNNIVVGIDVAKRKLDLCLSSSVKVQTFSYDKPGLRQLMTLLGKHDVQLVCLEATGSYERRLLDELFKKDLPVAVVNPRLIRDFARAMNQLAKTDAIDARVIVQFAQKMEPRRTPKPSKLSLKLQALSTRRRQVNGMRVQEKNSLDTTNDRFTQRMIRQSIRLFEKQLETINRTIEQLIAQDKTLQAKADILLSTPAVGPATAGMLLADLPELGELNKREIARLVGLAPTNRDSGTMRGYRTTGGGRSHVRTGLFMATLVATRHNPVIKAFYQRLLKEGKKKMVALVACMRKLLVILNTMIKNNETWKVQPITT

SEQ ID NO: 67280 - protein, 344 aa, unidentified
MGEVSTIGLDIAKSVFQVHGVDADGAVVIRKRISRAKVLEFFAAVSPCLVGIEACPSAHHWSRKLQALGHTVRLMPPSYVKAYLKRSKNDANDAAAICEAVTRPSMRFVPTKSEQQQSGLMLHRGRQLLVRQRTMLSNAIRGHMAELGIISAKGRNGTVELLEIITNADDDRVPTVARLSLDALARQYANTTAEIRAFEKHIHAWHRSCEESRRLEGIPGVGPIVATALVAEVGDWKAFSSGRNLAAWIGLVPKQHSTGGKERLGGISKQGNRYLRWLLIAGAMAVIRYARQHGTKRLWLARIMERRPIKVAAVALANKIARMAWAMMVRGERFKEPRSLSEAA

SEQ ID NO: 67281 - protein, 485 aa, unidentified
MAKVKLSAFDRLRLGARLNRKERRDVEQRLSATDPGLEIVNRDAAGIDVGNESHYVAVPRGRDAQPVREFGSWTAALVEMAQWLMGCGIRTVVMQSTGVYWIAVHDVLQKHGLEVNLVDARGTKNVPGRKSDVQECQWLMRLHTYGLLRSCFLPAPEIHGIRTMWRLRDQHVKDAARCIQHMQKSLIAMNVQLHNALSDISGRSGQAIIRALLAGQRDAKTLAALRDPRCMASEEEIVHSLQGDWKPDVLFELQQAVDAYDFYRQQLAKCDEQLKQYMALLPARKVETVVSSAEPAATTDRSKTSRSRKPRKPKGNQPAFDLEAELERILGVNATTIDGINVITVQTVLAEVGPDLSAWKTEAHWSSWLNLAPKRDVSGGRVIRHIREHRTNRAGNAFRMAAQTLLHSHSYLGARCRYLRAKLGGLKAVKAMARVLACLYYRLVTKGQRWVDQGIEEFNRRSEQRELAVLQRKAHKHGMHLVPTS

SEQ ID NO: 67282 - protein, 348 aa, unidentified
MSEAYDGLQVVGMDLHRRRSVLVRMTADGRKLETAHITNSPAALRRVIARAGKHPRVVLEATYGWYWAADTLAAAGAEVHLAHPLGVKGFAYRRVKNDEKDAADLADLLRMGRLPEAWIAPDEIRELREITRYRIKLVRLRTSCKDQVHAVLAKLGIPVTCTDIFGVWGNTWLDGLELGQPYAGKVASLRTLASELTAEITVLEAAIAGLLEHHDGYHAIRALPGIGPVLAAVLVAEIGDITRFPHPARLCSWAGLTPRHRESDVKVSRGHITKQGSPLVRWALMEAIQHVPAGHPLRQRKDDILARRGKEAKNIAKVAAARQLLTWVFYAMRDGQVRALASTARKAA

SEQ ID NO: 67283 - protein, 347 aa, unidentified
MNFYLSTHRHYCGIDLHARSLYVCIIDQQGEVLLHKEIKAQPELLLALLEPFRDDLVVGVECMHCWYWISDLCEEHGINFILGHALYMKAIHGGKTKNDRIDSFKIAMLMRGGNFPLTYVYPREMRASRDLLRRRTRIVRHGAMLKAHAVNTLGQYNLPPSKANLNNPGGRSQLTAAFSDPDVQRNIDLDLAIVDCYQHELKKLEWHLEQQAKQHDPASLNVLKTIPGVGRILALTILYEVGDIQRFESVQKFASYARLVKCKAESAGKIYGTQGNKIGNAHLKWAFSEAAVLFIRNNDKAKRYVEKLQKRMNKPKALSALAHKLGRAVYFMLKDKRVFDEQRFLRG

SEQ ID NO: 67284 - protein, 386 aa, unidentified
MKDETFVPREYDVFAGLDVDKKSIAATFSSPQGFIRSLHMPYSVDYLLNHVRKHFGDQKVAFVYEAGPTGYGLYDGLVAQGYRCLVAAPSMIPRVPGQRVKTNRLDSRGLSESLRGGQLKSIHVPSPIYRELRHLTQLRDTVVREAAANKQRIKALLLLEGIGFPPATAGRQWTLRVKAQLRKLRCSRTVRFKLDQLLDSLEFCEKQVVSSTKEIRRFCKEDVELFQSIEYLMSIPGIGWIVASQLLARMGDWREIDNVRQLGSFLGLVPTENSTGDSVDRGSITRAGDGRLRSKMIQAAWSAIRQDGELREFYRSVCQRNPRGKGARIAIVAVARKLSTRIYAVLKKQRPYIVRKQVHSAPLTQEETSPQGTTRRCAEPGETDNS

SEQ ID NO: 67285 - protein, 359 aa, unidentified
MSAEEAHERRVIGGVDTHKDLHVAAVVDGRDRVLATASFAATRQGYRQMLIWMRSFGSLRRVGVESTGSYGAGLLRFLQRAGIEVLEVTAPDTQDRRRRGKNDDFDAQSAAHAAFAGTRTVTPRTRDGMVESLRVLSACRKTAVAARRIALQMIHNTIVCAPDALRETLRRMTRMQLVRTLAAWRPDLSAYRDVEAAYRIGLKSLARRYLELHDEIADLDAMIGAIVDELAPDLVARNSIGSNGAAQLLLTAGDNPERLRSEAGFAALCGVSPVPASSGKTVRYRLNRGGDRAANSALHIIAIGRLRTDGRTKAYVARRIAEGHSKLEAIRCLKRYIAREVFTLITRRRQAINQPRIAA

SEQ ID NO: 67286 - protein, 370 aa, unidentified
MKDYSEVFVAFDVAKLKNAVAIAQDGRDGEVRYLGEIKSTQAATRKLVEKLSVRHAKLTFCYEAGPTGYGLYRLIKSLGHDCIVVAPSLTPKKPGDRVKTNRRDAVDMARLLRAGELTAVWVPDERHEAMRELSRARQVAQKDLRSKRQQISGLLLRMGHHYPGKKTWGPAHLNWLTSFKLDHLEQRIAFEELMGAMRQAKERSERLEQAIREVIPDWSLAQQVVALQAMRGIDLITAVGVLAEIGDLSRFASPRQLMGYLGLIVSERSTGDRVRRGSITKAGNTRARRLLVESAWSYRYPARVSKDKQAKVEAAPRAVREIAWKAQTRLCGRFRSLTRNGKKSTIVATAIARELSAFIWAINREVAATR

SEQ ID NO: 67287 - protein, 389 aa, unidentified
MLLDHPSDGLTAIRTHIGAIFASLELSRSNWLVTSLSPGKGEKMSRHIIAAGNVAGLLTLFAELRRKTEVRTGQSYPIITIQEAGLDGFWLHRVLQQEGIESHVVDPASIATPRRRRRAKTDRLDGETLLRALLAYKRGEPRVCAMVVAPSPEEEDRRRLCRERRTLIAERITHVNRIKGLLFAQGISDYAPLRRDRRARLEALRTGDGRELPLHLKAQIDREFDRIELLLGQIKAVEAAQDALLAAASKPASEEAAPDPVTMLLALKGMGANFAAVLWSEAFYRQFANRRQVAAYAGLAATPWQSGGIRHEQGVSNAGNPRLRTTMIQLAWLWIRHQPQSALTRWFKERSQQGRKRAIVALARKLLVALWKYVTQGVVIEGAVMKPAA

SEQ ID NO: 67288 - protein, 519 aa, unidentified
MTTTRVRRPSRRRTPTAVGKPRGVLHPRVQQVGPEHFGSVCFDCHKVSSKFLLADFYGRHLIPPTVVQHNRPDLDSAIAQIRLAFEQHQIRDGVVAIERTGRYHRVVQRAFAAAGFETRILHPFVTKQYRQPVDPGNKTDDADLAAIHRATVTGCALLEATRDEAWTTLQLVIRHRRDLVCKGAALNCQIRDHLEAAVPGYAACFDKLWESPIPWHLLRHYPTAGQLHEAGVTTLGQSLRQAGIRFQQRTVQTVFDWAFQAAAGDVAASQHLRIALALYDDRQRKTRDIQALEREIAGRLVQTPYVLLLSFPGINVVSAADFAGEMGPIEHYANAKSITGRAGLRPSRYQSGQVDKASGPLVRNCNRSLRAAILGIADNLSVCNHHFQALATGWAAQGKDPRHSRVKIGLRFSRIAFLMVAGRQVFRHPSIQGRHYILDKLSAFHREHDTGMVEVLRDLQAALGQLPSREYAAEAKPLGEELKRIQDGHRRGPQVLGDILPIVLARLGVGVIQSAESGE

SEQ ID NO: 67289 - protein, 316 aa, unidentified
MIGIDVGKAHVDVAAIGGELPAALSHVGNDADGHSTLADGLARLKPELVLMEATGGYEAALACVLQAAGLRVAVVNPRMARDFARAMQRLAKTDRIDAATLAEFAGALAQRPDSERFIRPLSEPEQQDLAALVTRRRQLVSMQVAERQRLQLARPVARASIEALLEAIARQLDDVEVEMTRHVEQHHAQMAKLLQSVTGIGKVVAATLIAELPELGRLNRRQICALVGVAPYAKDSGASRGRRRIVGGRFEVRRTLYMATLTATRYNVAIRVFYERLVAAGKLKKVALIACMRKLLTHLNAITRDHLNVQGHAPIA

SEQ ID NO: 67290 - protein, 374 aa, unidentified
MKQFTKYVGLDVHKSTIAVAIAQAGSSEVRYFGEIPNTPEDINKVMRKLSSSEATLSVCYEAGPCGYEVYRHLSGRGIDCMVVAPSMIPRKPGDRVKTDRRDSQMLARLHRAGELTSVWVPSAEQEALRDLVRARADFVLLQTQSRQRLNAFLLRHGQRFGGKSKWTQAYFRWLETIKYDFPSQQIVLQEYIDTVLHMQKRIKALDTQIELAGNESALWPLIQNYMALRGISRLIATALAAELGDVTRFTTAPQLMAYLGLVPSEYSSGPSKVRGGITKTGNGYIRRLLTEAAWTYRHMARKSACVQRRAEQTPEPIQEIAWKAQQRLCARYRGYIQRGKVSVQACTAVARELVGFIWAIGQATGPLHEMSANA

SEQ ID NO: 67291 - protein, 363 aa, unidentified
MMTENSPVLEVFGGVDTHSLTHHAAVVDTLGRELDDQEFPATPAGYEALQAWLVGFGQLVRVGVEGTGSYGAGLMRVLTGTGIVVVEVDRPDRTARRSLGKSDPLDAYAAARAAASGRATGTPKSRDGIVESIRCLRLAQRSAIKARTQCINQIRALLVNGPADLREHLAQLPTAKMIKSLTRLRPTTDLTDPHVACKLALRSLARRYASLDEEIKQLHRGLCDLTRQVAPQLLERPGIGVQVTAQLLITAGDNPGRLGSEASFAHLAGVAPVPASSGKRQHRHRLNRGGDRSANNALYTVALVRMRYHEPTRAYVERRTAEGLSKKDIIRCLKRAIAREVYRLLTRPTVPLVRTVTAPPAAA

SEQ ID NO: 67292 - protein, 414 aa, unidentified
MDVVHPRCAGLDVSKRDAKVCVRIQAEGRTRATSKVTTWGAVTSQILALRDHLIAEGVTLVVMEATSDYWKAFYYVLDDGPFEVMLVNARHVKNLPGRKSDVSDAAWLAQLGAHGLVRGSFVPPEPIRQLRDLTRTRTTITRERSREIQRLEKLLEDTGIKLAAVASDLVGVSGRAMLEALVAGERDPAVLAEMAKRRMRSKIPELTEALTGRFGDHHAFLVQLHLDLIDQHTRAIDELTTRIEVVLTPFRGARDLMVTIPGISTAVADVIIAETGADMSQFPTAGHLASWAGTCPGSNESAGRVKSTRTRPGNPYLKGALGVAALSASRSKDTYFSAKYRRIASRRGPMKAIVALEHAMLIAIWNMLQTGALYTDPGDDFYARRNPDQAKHRAVDQLRRMGYAVTLEPMAEAG

SEQ ID NO: 67293 - protein, 400 aa, unidentified
MNPVIGLDVSKGESHAQAFADRGTPYGKIFRFKHDLEGLASFLRFAQDLESFTGKRATVVLEATGHYHSSVVQFLEEHQYLHIVINPLLSHQAKKSNLRKVKTDAADAYQLGEMYYKEELEPYKKRGQYLMNLRYLTRQHESLTDMYVQAKLQFQAVLDQVFPEYHGVFGDLYSKVSLRFLVLYPTSQTVLAMSEKDVMANIQRLAGHVNPSCWSLKSAQKLMAAAERNPFKETAFPSQLISLELLINLLLQYQDHLAKLDKSIEALAEELMEFDLIQSIPGIGTKIAATILAEIGEIDRFDHAKKLIAFAGIDPSVFSSGKFTASRNSITKRGSRRLRTALYQAVRCGLRSSRNKKLRAFYDKKRAEGKLFKVAVIACANKLIHWIYAILTKKEPFRLD

SEQ ID NO: 67294 - protein, 400 aa, unidentified
MNAVGIDVSKGKSTVAVLRPFGEVAASPFDVIHNDSDLKQLAELIKALPGESKVVMEYTGTYFEPIAQFLHNNGIFVSVVNALLVHDYGGNSLRKVKTDKKDALKLASYALDRWTELDEYIPADEQHKTLKLLNRQYNQSIKIQTMMKNNLISLTDSVFPGINKLFTSPERQSDGHEKWVDFLKAFPHKDCVAKLYLSVFKTKYKSWCSKNKYKYSESKAEEIHAYAKSVIAALPMNDSIKLLVTQAVSQLNTILETLSSIRNEMNRIASSLPEYDTVMSMFGVGKVYGPQLIAEVGDTHRFRNRRAITAFAGLDAPPYQSGQLDVSSRHISKRGSAALRKVLFQITEVYILNKPEDEPVYQFIDKKRSEGKHYYSYRIAAANKFLRIYFAKVNQVLISQ

SEQ ID NO: 67295 - protein, 335 aa, unidentified
MKHDMHVLGIDIAKRVFHAVGMDDRGNIVYRKRLSRHDLIPYIAQLPPVRIGIEACGGAHYWARRFRAHGHEVKLMAPQFVKPYVKSNKNDSRDAEAIAEAVTRPTMRFVPIKDVDQQDLQALHRVRERLMGARTALVNEVHGLLHEYGIIISKGVAKFRQAVVGKLESEKDKLTSLSREMFWKLVDEFALLEKQLAYDQEKRDTVATTHPECQRLMTIPGIGPFTATALVAAISDASAFKNGRQCAAWLGLVPRQHTTGGKERLLGISKRGDTSLRKLLGHGAQTTLRWVGRKTDRRSQWMRQLLERRGKNRTAVAVANKNARMVWALLTSHQD

SEQ ID NO: 67296 - protein, 344 aa, unidentified
MTENTTVAVDLAKSVFEVAVSPRAGRVSERRRLNRAELLRWFARRRPCRVLLEACGSAHFWARELERLGHRPVLLPAQHVRRYRSRNKTDRADTKALLEAYRNEEIHPVPIKSPAQQELAALHRLRASWLASRTARINTLRGLLREQGILISTGARFVVPRALELAGDVDSQLSETLRFALFELAREIRDHERRIGEIEQRLAALAEQNALALRLRTVPGIGLISATALAGFVGDLRRFSSARKFASYLGLTPREHSSGSTRRLGAISKRGDVYLRMLLIHGARAVLAAAPKVKNPDRVRTWALELSRRIGHNKAAVALANKLARYAWAVAAHEENFADQRPAA

SEQ ID NO: 67297 - protein, 373 aa, unidentified
MPKYSTAFGMDVHLRSTTVCALDADTGEAVTRRFPGNPWGEIAGWMDGFPGPSLAAYESGYLGFAPQRELAGLGVECVVAAVSKIPRSAADSASKNDRNDAARMAKAILAHDISPVWVPSPEVEGIRDLAGAYDGATARLATAKQRLLAFLARRGFVYGGTTPAGNPRKYWTYDFLRWLDKVRPEDDGGVRTLAALRNEVEAAAEARADLLSEYGAAVDASPIAAEVAALQSIKGCAFALAAAFSAEVGDFTRFRSGRQVTAYFGLAPSQRSSGDSVRLGGISGAGNALVRKLAVEGSWCYAAARHQPKLMPRDTGVPLEIRMHGRKGSERLLRRREEMLARGVPAAKANAATAAELVRWLWALGMMCREGAE

SEQ ID NO: 67298 - protein, 347 aa, unidentified
MTIVEDRPVITGGVDTHADMHVAAALDSIGGLLGVREFPATAAGYAGLPGWLRSLGNLALAGVEGTGSYGAGLARYLAAAGVRVVEVDRPDRQDRHRQGKSDPLDAVSAARAAQSGRASAAPRGRDGAVEAIRALMVAKRSARQERTQAVNQARALIVTGPEELRARFAQRSPAQLIDAIAALRPRPGDVPGYATRVALRELGRRARFLDGQLDRLDELIGPLVTERAPGLLALHGVGPDTAALLLVAAGDHPERLRSESSWAHLCGVAPIPASSGKTAGRYRLNRGGDRQANSALWRVVMVRLRSHEATRAYADRRGKEGLSKKEIIRCLKRYVAREVYRQLRAGS

SEQ ID NO: 67299 - protein, 390 aa, unidentified
MIYTGIDVSKDEHDCFIADSDGVIPTELFTIQNNRTGFNELFQRLTDCSSDLSAIKVGLESTGHFSDNLVEFLTTKGLHTTVINPLHTSLYRKSQSLRKTKTDRVDARSIVKMLRTEDLKPHFPTSYHVRELKSLTRYRFSLVQRRAKLKTSYARLCVILFPELEKLVPNLHLTSIYALLFELPTARAIADCHLTRLTNLLSSASKGRYGKDKAIEIRDAAKASIGTYSDVKALELQQTIQLIRMMDTQIEQVEAKINPIVDALESPIMTIPGISYRMAAIIIAETENLTHFGSAEQMLAFAGLEPSVYQSGQLTSTHAKMVKRGSKYLRYALFNAAKYVCHWDTTFRAYLAKKRSEGKAYNVAVSHAAKKLTRVIFHLVKTNQPFVSQA

SEQ ID NO: 67300 - protein, 377 aa, unidentified
MGDYSEAFVGFDTSKLRNAVAIADASRGGEVRFLGEIENTPAATAKLVRKLAAKYERLTFCYEAGPTGYGLHRQIKDLGFECVVVAPSLIPKRPGDKVKTNRRDALSLAKLLRADELTPVWVPDGPHEAMRDLTRARETAMLDLRTKRQHVSAFLLRLGRPYPESRKTWTKAHASWIASQKLEHPQQRLVLEEMMLAIRQAQERLARLEQAVAAAVPEWSLAPVVTALMAMRGMDLVSATTLLAEIGDLSRFQTPTELMAYLGLVPSENSTGDTVKRGPITKAGNRRARRMLVECSWSYQHPPRVGQAKQPKVDAAPPAVREIAWKAQCRLYRRYRALIRKGKRKTVAIVAIARELAGFIWAVARAVTTGRVAAATA

SEQ ID NO: 67301 - protein, 421 aa, unidentified
MRKADTRKVKAVGDDTLIVAVDIGMEMNRGYCTTPDGRSSKTFKFDNTRVGMDTLWDMIMISKNRFKCNEVIVGYESTGPYGEPMLHYLMKKPVRIVQVNPMHTKKVKEINDNSPLKTDDKDPRVIADIIKLGRALSIVIPEGDAAYLRRLNNSRERHVRERTALYSQLQQSVFLLFPEFRTVIKNIKCRTPLYLLKKYPTPEIISALGKHVLGEEMRKKSRGKFREHHADMLINLAKNTVGIREGASGLSMDIRHILVQLEMLKNLIAEIEGEMEIALGRIPYSSKLLSIKGLGVVSVAGIIGEIGDFKKFNTRSEIMKLAGLDLYEISSGKMKGQRRISKRGRSLLRKILYYVAIQTIRKNGILHDYYTRLTDRGMKRMMALVAVSRKLLGIIYAMVRDDSEYSVNFESMKRQVIKKAA

SEQ ID NO: 67302 - protein, 482 aa, unidentified
MKPKPQEKTKKAADHPTERHWREMNRKQRRETMRKIQSEDLRLEVVHPDAGGIDIGNESHYVAVPPSRDSQPVRRFGCTTAELKAMADWLKQCGIRTVAMQSTGVYWIAVYDILEQAGLEVYLVNARETKNLPGRKSDVQESQWLMKLHTYGLLRNSFRPSQEIRRMRTYWRQRNDLVRAAGRHIQRMQKALTQMNIQLANVLSDVSGVTGQAIIKAILTGERHPHKLAAFRDCRVKASEEEIARSLEGNWQEDLLFVLKQEQAGYEFCQKQMTECDRQIEQYLQQREDRSRGASLPEEKRKERLKKKKGNKPQFDLRAELFRISGTDLTRIDGIDVMTAMTILSEAGWDMSKWKTEHHFVSWLRLCPDNKVSGDKVIGKGRLPTNNRVTIALKMAASTLWASNTYLGAQFRRLKTKLGAAVATKAMAAKLARLVYRMLRYGMPYVDRGAEFYQAQHRQLQIKYLKWKATSLGFQIIQVPAA

SEQ ID NO: 67303 - protein, 323 aa, unidentified
MTVYIGIDIASKKFDAAELRDGAYRCKTFENTPTGFTALYNWLKTDSIPDIHVCLDATGSYGTALATFLYEKNLKVSVVNPARIKGFAASELTRTKTDKADSRLIARFCKAAQPAPWRPVPAPVRKLQVLVRRIGALNGMLRMECNRRENADIDAQESVERMITHLKMELKSVRQAIKEHISNVPELKKQNDLLLSIPGIGAVSASLILSFMASKDFTKAKEVTAFLGLNPRHHQSGTSVRGKTRMSKMGDAKLLCALYMPALVALKHNPDIRAFGLRLLAAGKPRMLVVGAIIRKLIHIIFGVLKSGTGFSSRVTVNAGFNQ

SEQ ID NO: 67304 - protein, 349 aa, unidentified
MAMTIVEAPVGITGGVDTHLDTHVAAALDPLGRLISTESFDADAAGYKALLAWLETFGQVDKIGVEGTGSYGVGLARFLRRRGVEVIEVNRPNRQARRNHGKSDPLDAVEAARAVISGRALGTGKTKDGPVEAVRVLVVAKRSARQARVKAIVQMRHLVITAPDQLHSRLKGLTVTALVAESAKLRATRAADPVTAATKASLCSLAHRVRALEAELDELNEQIEALLLATAPELMARFGVGPDTAASLLVAAGDNPERLHSEAAWAHLCGVSPVPADSGKNAGHLRRHSGGDRQANSALWRIAMVRIAHDPETRMYFDRRVKEGRTKRDIIRILQRYIAREVYRYLPRG

SEQ ID NO: 67305 - protein, 407 aa, unidentified
MLFVGDDWAEDHHDVEIVDDAGRRLAARRFPEGLFGLTGLHALIGEHLPEPGPDSEAQVKVAIETDRGPWVAALVAAGYEVFAINPMQVARYRQRHSTSGAKSDAADAHLLAEIVRLDREHHRPIAGDTPQAEAIKLVARAHQTMIWDRSRAVLRLRAALRDFFPAALEVFDDLDAPDVLELLARAPDPDRAARLSKAKITAALTRARRKNVEARARHTQQIFRAPQLRQPPAVQAAYAVIIANTVRLISQLNRQISELGEVVGEHFGRHRDAEVYLSQPGLGSILAARVLAEFGDDPHRFADSKARKNYAGTSPITRASGTRRIVLARYARNRRLGDAVHQWAFCAMRGSPGAKAYYKTMRARGIGHQAAIRQLANRLVGILHGCLKTGTLYDENTAWAHHITAAA

SEQ ID NO: 67306 - protein, 319 aa, unidentified
MAQNNLVVVGIDVAKDKVDACIRSLPSGRTFPNSSAGRRQLTSWLCKHQVTKAVMEASGGYERNWAKALRQAGIEVRIVDPKRVRSFARSAGRLAKNDTIDAAMIAWFAETFGEVSGQAYDVVREQLSQLVNARQGLLDLQTNLQNRDEHAEVDAVQKMHGRLLKRIALEVASLEAVIAALIKATPHFAELAEIIESVPGLGRTTSAGLIAAMPELGQVSNKVAPALLGVAPYDDDSGRRRGERHIKGGRRRVRNLFYMACLGASTRHNPVLKTFYRRLIAKGKKPKVALVACMRKLIVILNTMIARRQKWDASLCVSG

SEQ ID NO: 67307 - protein, 352 aa, unidentified
MDATTVAVDLAKDVFEVALANRAHRIIDRKRLTRRQFESFIDGLSAGTTVVMEACGTAHYWGRRCQARGLAVRLLPVQYVRPYVRRNKTDRTDTEAMLEANRCAGVAPVPVKTVDQQALQALHRVRTQWQATRTGRINVIRGLLREHGCPVPAGARTVLARVTAILDDPARALPTVLRQTVAHLVEEVRSLEARVAAVDRELARVAREHPVATRLQQVPGVGIVTATAMIGAVGHIHAFRRGRDFASWLGLTPRESTTGTRRYLGRISKRGDGYLRCLLTHGARAVLLAAQRTARTSPHRLTRLQQWAVTVAARRGHNKAAIALANKLARIIWALWCHEADFHSPTVQPTAA

SEQ ID NO: 67308 - protein, 324 aa, unidentified
MGIDVSKSTLDCHLYLQREELSPVANSVQGFKQIGKWLKKQCKGDTNGVLVVMEHTGIYTYGLEQYLYKQGIAYVKRPALDIKRSLGMVRGKTDKADARFISKYGWMRKEELRPMKPVSDRLVELQQLMSYRDKLVADRASYLTRIKELEGQLGKKLNAKISDSSAYIMDVLNREIKELEQAIKELLKEEQALQTNYELATSVVGIGFATAVHFIIATENFTRFPDARKLICYCGVAPFKHESGSSIRGRTRVSPLANKKLKSLLTMAAICAVRFDKDLKEKYEQKVAEGKPKMSVINIIRAKLIERVFAVVKRQAKYEIRAAA

SEQ ID NO: 67309 - protein, 376 aa, unidentified
MSKDTLYVGLDTDKKSIEVALAEGLPGGEVRAWGKLANDARSVLRLVKRLQAGGRQLEMCYEAGPCGYGLDRLLNGQPGVRCTVVAPSLTPRRPGDRVKTNRRDALMLARLLRAGELTAVWVPDPAHEAMRDLVRARGAATGDLVRCRQRIGGFLLRQGIGYVGKPWTRKHRAWLGQLVATLPLAAHRLMLGEALQALDEATARRDRLTDHIAELVPGWSLAWLVDALQALRGFALINAATLAVEIGDPRRFATPRQLMAYLGLVPSESSTGDKVRRGGLTKAGNGRTRKALIEAAWTYSRPARAPSDNQRHAPAVVAIATKARHRLSQRYRRLTARGKRPVIAVAAIARELSGFAWAIAQVAGPTATAPQPPAKR

SEQ ID NO: 67310 - protein, 323 aa, unidentified
MHHIDEETGEIVNKPIKRAKFLEYFVNRAPCLIGMEACGGAHHWARQLTRMGHQVKLMPGEYVKAFNIRNKKDPADARAIWLAVQQPSKPVAIKTEMQQAMLALHRTREQLVKFRTMQINALRGLLTEYGEVMAKGRAPLDRAMPDVLARVADRLPAALIDTLREQWNGLTGLDEQIATIERRMREWKKEDQEVKAISEIPGVGLLTATAAVATIGDAKAFRSGREFAACIGLVPKQTGSGGKVKLHGISKRGDTYLRTLLIHGARSVITNAKQPDPWIEQMKKRRPPNVVVVALANKMARTIWAVLAHDRPYQRGYVSTKPA

SEQ ID NO: 67311 - protein, 344 aa, unidentified
MSKLSADLSSVTTVAVDLAKHVFQVHATDAGGKIVVAKALRRRDMLPFFAALPPCFVGMEACGSAHHWGRELIALGHEVKLIPPAYVKPFVKRQKNDRNDAAAIHETLSRPALRFVAVRSIANQAVLMQHKVREMLVGQRTQLLNGLRGHLSEVGVIAAQGTCHMRGLGALIHEGHADIPEAVHASLLPLVEQIAHLDEAIKAIDGEIAAQAKADPVSSRLMTIPGIGPVTASALVATVGDPAGFSGPREFAAFLGLVPRQHSSGGKPRLGRITKMGNAYLRKLLVVGAHAVLHHQARHDDPLRQWARRLLATKPFKLVAVATANKLARMAFALMRQGTRYAAA

SEQ ID NO: 67312 - protein, 355 aa, unidentified
MERYIGMDVHAASCTLAVISEKGRKLRDFPVETNGQSLVEAIRMIPGHKHLVFEEGLQSAWLYETLSPHVDDIVVAGITVSRGPKSDKRDAYGLAEQLRVGSFDKTVFKAPRQFTRLRELSRIHTTLVSDTVRVQARIKSLYRSRGILVAGVNVYGVRHREEWQKQLSSSLQTRATRLYDHFDFLLEQKKQAEADLLREAKKHTIARVLQTAPGFGPIRTAQLIPIVVTPYRFRTRRQFWSYCGLGIVTRSSSDWVQTADGKWIRGQVPQTRGLSRQYNHVLKYIFKGAATSVITQRNKDPIYGRYERLLDGGTKPTLAKLSLARMIAATVLRMWKDEKEYDPGRASPPGRTRES

SEQ ID NO: 67313 - protein, 344 aa, unidentified
MTTEAVPTLFAGLDLHKSNVFCAITDAGGKPIYRQRLPAELPTILQALDPYRPHLKAVAVESTFNWYWLVDGLQAAGYPVRLANPAGMEAYSGLKQTNDQTDALWIAEMLRLGILPEGYIYPKAERPVRDMLRRRMLIVHQATQTVLSLQSMVTRQTGQSVAAATLSKWTRAEVDESFLDSYSQETAVALLELLCEQRRIQHSLEKKVLAVVKLHGAFQRLLTLPGVGRILGITITLETGPIARFGSAGQYASYCRTVNSRCESDGKKKGENNRKNGNKYLAWAFVEAANFAQRYSPRAQAWFASKTARAGRVVAVKALACKLAKAAYYVLRDDVEFNEAKMFG

SEQ ID NO: 67314 - protein, 446 aa, unidentified
MSRKKHTHLRGERGQAFADKMRGIPVEQILCVSLDIHKYFHVVMMHNALGEIVTVPFEIDIFQAGFDRLCQAIDAAVTRTNAQVVLVGMEPTGHYFENLARHLHHDHRSPRPVTLINSFAVSRNRDQQMMHREKDDEIDVAAIGDLLRRGEGTPFRPIDGLYLEMQHLARVRLSKVKMQTALKNQILGHLDRIFPGLVIQGKVARERYEPLFVADFWSCQTLQHLIRVCPDPRQLATLTPHELRNAFHEQAFALGVKTAAEIITYAQKVLLPNPEVIAIRRELLARDLAFLEEVERLIAELEDRLHALLRQTPYWVWTKVRGLSETQVASLAAAVGDPAHYTYAAQVFRRSGLVSGRNDSGTRRHKGKGKRVVKTGDVYLRRALMNAIMSLIRHQPALQDYFNELHRSKHAGVARVATARRAVGILWAMQRDQQSRTLVLKRGAEM

SEQ ID NO: 67315 - protein, 322 aa, unidentified
MIVGIDTSKDFFDATAIEGGRVIFQKQFDNNLKGFNLFLKAIKNNPIELVCIEATGPYHLRFALFLNENNFNISVVNPLVIKRYAQMKMSRAKTDKKDSYLIAFYAKEQKPELWKAPSEASLEIRQLDTHLELLMKHKRALANQLHAFKSRGAVVRGLEKQMEEQINQLNENIKKIERKIEVLVQSSYKEIAGQLKSIPGIGKKSAYMMIVSTNGFSTFDNYKQVISYFGLAPRHYQSGTSVKGKTRICKMGMSRVRKTLYMAAVTAIKYNKTCKDLYERLRTKGKSHDLAIIAVVNKLIKQSFAIAKNNTYYQADHILQSA

SEQ ID NO: 67316 - protein, 407 aa, unidentified
MDLLKTVFGIDVSSRKSNVCIMVNGQKVNDYAISNDMVGFNQLLDDLKQVTNPQIIFEATGVYSRRLQAFLNMHELRYVMMNPLEAKRKTKDDLHQNKTDKLDAMYLAKLQSEHPQRLAYVQSEEYQELMANNRIYEQASHDLITNKNRLHKAIQLTFPEIEHLMANPRGKNYWSTVLRFPHPDIVLETKEADIIDFLKSLSGIGEKRTNDLAQRLIRLAKLACPAVKKDSAYVHGLKIAINNILSAEEECQTALQEMAKLAPKRDLEILTSIPGIGENTALRIISELGDIRRFKNPNQLNAFVGVDPQVYESGNLTAHLSISKRGTAIGRKVLYLAINQIQSAKKAGNPCHIADYYEKRKRSSETASHKKAAIASIHKLLRTIFALIKNDQLYSYDVAKHNQRLLS

SEQ ID NO: 67317 - protein, 423 aa, unidentified
MAYRIAGIDVHKKKLAVVVADVEVEEEYHFERRWYGSNPEHLQLLSQWLVEQKVEEVVMESTAQYWKPPWSALERYWKPSSQNREGAGKMSGTLHLAQALSNRGRRGRKKDFRDAERLVKRLVSQELTLSFVPDGEQRLWRTLMRTRYQRTRDKVRLQNQLEALLEEAHIKLSSLVSDLLGASARRLLKALADGETDPAALATLGDKRLRATPAELQDALGACTELNPVYRRLVGLALDDLQLIEQQIGQLDQEMASLLREHQDAVQRLAEVPGLGVDSAQQIIAEVGAKAATFPSAKNLVSWVGACPGEDESAGVNRSKRSPKGNRQMRRILNQAANAAVKHKGSIFEIVYRRFVPRLGHNKTIGVIAHRLCQLIWIILHKGVRYEERGPAVSEKSQRLRTTRMIRTLRNLGYRVEPPVIPA

SEQ ID NO: 67318 - protein, 338 aa, unidentified
MKLYGAIDLHSNNNVTVLIDEQDQVVYQKRLPNDLPLIARQLSGYRDRLQGIVVESTFNWYWLVDGLMDQGHKVHLANTAAIQQYEGLKYTDDHSDARWLAHILRLGVLPQGYIYPKEERAVRDLLRKRGQMVRQRTTNLLSLQNLGTRNTGSSISSNRIKTLDAEQIDQLLPNPDLALAVKANLAMINCANGQIDILERTVIDRIKLRAGFSFLKTVPGIGQILALTIMLETGEIRRFSTVGDYASYCRCVGSQKLSNGKKKGSGNTKNGNKYLAWAFVEAANLAIRYNARIKSFYQRKKAKSHGVLAIKAVAHKLCRACYYIMKDQVPFDITKAFA

SEQ ID NO: 67319 - protein, 345 aa, unidentified
MHNIITGVDLAKEEIQVCVCKRNKVQSNQAMTPIEFGSWLASSKPMTIVFEACSTSNYWKQKALEYGHDARLISAKLVASVRQNQKTDKNDALAVAQAAQLTDVSFINGKSKEQQELQTLVRLRELAVKHKVAVQQQIKSLLLEFNIRVSPSQGGLSGVVEAVLEDAENGFSVVFRQALNTSWQHLQQGIESIKQYDLYLEKAANEHETCKSLQALEGVGPLNAVNLYMALGCGEMGQFETGRDASACIGLTPIQHSSGGKVKLGSVGKYVKNNMLRSCLVSGAMSAVNQAMRRPAKTKKEMWIQQMVERRGKRCTAVALANKTVRTAFAMLANGTEYKAELLAA

SEQ ID NO: 67320 - protein, 366 aa, unidentified
MTDGSKGTLKMTAGLDLGDRYSYLCLLDTESGEVIEEGRLRTTPKAFKRRFDSERPLRIAIEVGTHSPWVSRVLKECGHEVLVANPRRLRLIYGERRKTDRLDAEKLARLARVDPKLLAPLQHRGEASQAHLALIRSRQALVNTRTQLVNHVRGSVKSFGGRLSRCSTASFHKKVAEQIPQELRPALEPLLETIASLSACIQHYDRELETLAQEHYPETKLLRQVQGVGTLTALTFVLTLEDPERFEESRQVGAYLGLAPSKDQSGERDPQKRISREGDEMLRRLLVGSAHYILGPFGEDCDLRRHGLKIVEGAAGKNARKRAVVAVARKLSVVLHRLWISGEVYEPLYNTQRSKDRAASEELCIF

SEQ ID NO: 67321 - protein, 355 aa, unidentified
MERYIGMDVHAASCTLAVISEKGRRLKDFPVETNGQALVEAIRMIPGHKHLVMEEGLQSAWLYETLSPHVDELVVAGITTSRGPKSDKRDAYGLAEKLRVGNLDKHVFKAPRQFTRLREFSRTHMTLVGDVVRTQARIKSAYRSRGVLVTGIDVYSSRRREEWLKQLPSGTKIRATRLYAHLDFLLEQKKQAESDLLREAKKHPIVKILETAPGFGPIRAARLVPIVITPHRFRTKRQFWSYCGLGIVTRSSSDWVQTADGAWIKSRVPQTRGLSRQHNHFLKSIFKGAATTVVTQRNKDPIHARYERLLDGGTKPTLAKLSLARMIAATVLRMWKNEEEYDPGRAGLPTQTRKG

SEQ ID NO: 67322 - protein, 386 aa, unidentified
MQKLNDLSRSLTPLKPDGTLIAVIEMSLSSWLVAGIVPGVERQPSKKLEVDENALLKLLNRWREEARKAGHGIERIAVAFEAGRDGFWLARWLRARDIEAHVIHASSIAVSREHRRAKTDRLDTELLKRSFLGWLRGERDHCKMVAIPTIKDEDAKRPTRERESLVGEQSRIVNRMKAALIRLGIRGFNPKLKKAAERLDGLRTPEGEPIPPNTLAELRRDMARRRLVSDQIRQIEEARLERLKQTPSDGPHAMERLLARVIGVGVETGDMLVQEVLSRSMRDRRAIARYAGLTGSPDESGRKRRERGLTRSGNARVRRGMIELAWRFLRFQKDSVLAQWFRTRTENARGTRKTMIVALARKLLIDLWRLVREGVVPDGVVLRPAS

SEQ ID NO: 67323 - protein, 399 aa, unidentified
MLEQAWAGVDVGKEHHHCVVIDAEGRRLLSRRVANDEAVLLALISDVTGLAGQVRWAVDISTGEAALLLALLAAHDQQVCYLSGHQVNRAAGGYRGSGKTDAKDAAIIADQARMRRDLAPIRVPDEVIVELRMLVARRRDLQSDRVRAVNRLHETLLTISPALEKALDLTNQGPLILLTGYQTPAAIGQLGVTELTAWLRARKVRRAGELATRAVAAANAQQIALPGEALAAHLAGQLAEGVIALDEQIKHTDKLIEGRFHRHHAAPVILSMPGIGTLLGAEFLAATGGDTAAFATPDRLAGYAGLAPAPRDSGRISGNLYRPKRYNRQLQRVFYTSALISIRCCPESRTFYDRKRAEGKRHNQAVLALARRRVNVLWALLRDHRPYQASPPVSTAAAA

SEQ ID NO: 67324 - protein, 346 aa, unidentified
MGKSIINLSSVTTVGLDLAKHVFQVHCVDASGCVVVAKAIRRNKLLEFFALLPPCLVGLEASGSAHHWARELIKLGHDARMMPPAYVKPYIRRQKNDAADAAAICEAATPPSMRFVGVRSLENQAALMRHKAREMLVSQRTQLLNGLRGHLTEIGVITAQGPRHARELAELIEACDETIPFEVCEALAPLVVQLRNLDEAIARLDRIIAKLAQKDETARRLMSIPGFGPITASAMAATIQDASSFAGPREFAAFLGLTPKQSSSGGKQRLGRISKMGNRNLRKLLVVGAHAVLFHRKPHTDPLRMWAKKLIDKKPFKLVAVALANKMARIAFAILRGKTVYREIPA

SEQ ID NO: 67325 - protein, 338 aa, unidentified
MTIVMGLDQHRAQITAEWLDTVTGEISRTRIAPADRAGVQRFAGRFRGQPLEVALEATTGWRFVVEELQTVGAQVHLAEPAETAARRGTKKRAKSDRADARHLRELLMVGRLPESWIPPAHLLDLRARVRLRHTLVDARREWQQRMQAVLYHHGVPSRSWLMTAASRAWLAELELPTTARKQITIALAMIDAHDTQLEPLDQELRDYARRQTGCRALMRHYGIGPLTSITILAELGDPRRFSSSREAVRYAGLDITVHQSDSRRAPGHLSRQGPPALRWALFEAAQCARRPGSPDHDYYQQAAERLGGNRACLAVARKLLKRSYHTLRELGEEALQPA

SEQ ID NO: 67326 - protein, 354 aa, unidentified
MNKDKYVAMDVHKASVVVGMRDAAGKYITEAIVETKASTLLDFIRGMSGKIHLTFEEGTQSAWLYDLFKPHVAELIVCDPRRNKLLEEGSKGDRIDVQKLSELFCKGMLKPVYHGDHGTRALKELGHNYESLVSDRTRVKNRLKAIYRGRGISYRGTEIYQTKQQQEWLAKLNERGVKRRAELLYQQLESLDALVKEARRELLAESRKQKVSRCLRRISTLGSISVALLIATVDTPHRFRTKRQFWTYCGLAVVTRTSADYYFDQGQLRRSRRPVVTRGLNQNYNRRLKRIFKQAALTASRQGPFKPYYERLLGRGLSEELVRVTVARKIAAVTLAVWKKGARFDPEKILKPTT

SEQ ID NO: 67327 - protein, 428 aa, unidentified
MNQTDRIRLEEFRQLKKEIRGSTEYLIVGIDVAKDKHHAFLGTAAGKTLLKRLVFDNNLEGFEKLLEQVEALKVQHVLGKVVFALEPTGNYHKPLGEHLIRCGHRVVLVSGAAAYENRKTLDGRWDTNDTRDAANVADLVSQGKCLFYEFPIGALQDLRNLLSLKRRLKKQEQGMRVRIRNHLLAKYFPELDRYYERSESGSLAIVRWCLDPSVIAGLEYEAFAQRVAPGKRRGPQENRLQAIWKVAVDSIGCEAGPTVEFEAQMMVEGLQQTRDALRRIEEKIQESCSQFPEYEYLLSIPGFGPDVSSKVLGAVGDPFRFQNGKQVLKLAGWDLNAERSGKSSDLVRPVISKKGKADLRYALYQAALIASIRDRHFIVYFTNQLRGREKEPGIKTKMRVKLAAKLLNIAWALMKKKEPFNPDYLRLE

SEQ ID NO: 67328 - protein, 419 aa, unidentified
MTKSNISKQLRQVPPGALHVGVDLALEKNVAVVINEKAERLDQFSFTQDRGGYDYFLRRLEGVRQKHHAPSTVVAMEPSNYFWKLLAKELEEQKIAYHLVNAYTVKKHREGNQLDRSKDDQRDAGQIAELSRNGHYTQTRLQKGAYEELRQYAALYHRLVQGIRCERQVLWGLVGQVFPEYFQVFKDLGGETSRACLESCACAAAMRRITEEELIAEVRAVYTGKKLSVSKIRQAYRWAATSIGVAEGLQAIQLTVRLHLAQLQSLQTQLEQVTHAMLACLVSLPETPYLLSVKSLGAVSVALFLAEVGDPSRYQTAAQWVKLAGIQPAANTSGKKQRSQTPMSHQGRSQLRTLLYFTCLRMVRFDPHFAQLYAALQRRPKNPLTKMQALGVLMNKLLHILWALIHNQTFYDPSFASSI

SEQ ID NO: 67329 - protein, 362 aa, unidentified
MTKSTIIIAFDQHAATTVAAVLLPADRTPALHELTSDIPTILRFLERLRRGHPVQCCYEAGPCGFELQRALSGRGIRCDLIAPALIPRRSGDRIKTDRRDAAQLAVLYRAGALTAIHIPTEQEEAARDLLRCREDIRADLLRARHRLSKFLLRHGRRFTGTKKAWSKRHDVWLRAQAWPIPALDQTHRAYLRAVDEALARLRSAEEDLRALVTLAPLQARVQRLRCVRGMDDLTALTIAAELGDPRRFASAPRTMAFVGLVPSEHSSGTRHARGAITKTGNAHLRRVLVEAAWHYRHRPFVGAALRRRQRGAPDAIVAQAWTAQDRLYRRYHRLAGRGKPHQQVITAVARELTGFVWAALVQ

SEQ ID NO: 67330 - protein, 366 aa, unidentified
MKKVSTVAAKQSRNNSQQKLTIGLDLGDRNSWYCVVDEAGQIQLEQRVRTTAKALQEVFGAMPRSRIALEIGTHSPWISRLLSELEHEVIVANARKVRLIGESRKKDDRLDAQTLARLARIDPELLYPVKHRSAQAQADLMMIRARAGLVRARTGLVNTARGLAKSYGERLRSCNVRNMNAEKAEGLSPELQRALEPLLAAIEEVSTRICEYNERIETLAQASYPQVALLKQIKGVGTLIALTFLLTLEDPHRFPKSRDVGCYLGLQPGRRNSGQSEPQMHISKEGDPYLRTLLVQGAQHILGPFGIDCDLRRWGLKLAERGGRNGKKRAIVATARKLAVLLHHLWVSGEVYEPLRNRNCMTVAAA

SEQ ID NO: 67331 - protein, 346 aa, unidentified
MEQYVGLDVSLKMTAICIVDRAGKIEREGMVASDPAAITAFVRLHAPHVARIGLETGATSTWLWTELNKMGLPVICIDARHAKAALKMQINKSDRNDALGIARIMQCGWYKEVRVKGLDSHAIKALLVSRSLLVKIKRDLENQVRGLLKNLGLVIGRAKMNVFVVRAAELIGDRPELAAAVEPLLKAREAVEKQIADLDRKVMRLARNDVQVRRFMTAPGIGPITALCYLATIDDPTRFKRSRSVGAYVGLTSRRYASGEVDWTGRISKCGDAMLRCYLYEAAGVLLTRVAKWSVLKAWGMRVAKRSGLRKAKVAVARKLAVILHRMWVEGTEFKWSSKEDVTQPA

SEQ ID NO: 67332 - protein, 293 aa, unidentified
MHSASFSNDAGGIARFIAFLAQLDGIERLVVEPTGGYERSVVHTLLAARLPVAKVNARQIRQFARACGQLSKTDRIDAFVLADYARRMETKDLAPSSPAQVVLIDLVSRYRQLSHMIVQEKNRLEKLGARADATARAWIEETLSFLLQQRQSVVDAMEACLQSDEDLAVKAKVLMSLKGIGLRTACLLIAGLPELGLLNKGQIAKLVGVAPINRDSGLMRGKRMIAGGRKPVRDALYIAALPAIRFDPAMKAVFERLKAKGKPGKVALVAVMRRMIIILNAKMRDYRATVIDA

SEQ ID NO: 67333 - protein, 336 aa, unidentified
MNEATHVVGIDVAKRKLDVALLVNGKLKAKVVDNTPAGHALLQHWLIERGAQLIDTHICLEATGPYSETVATTLVEAGWPVSVVNPARIKGFAQGELARNKTDRADAALLARFCAAMHPSIWTPPPPAWRELRAWVDRLQALKDMHQQESNRREAHQAAGQAALVQAVQTHLDWLAQQIADLERTITDHIDRHPDLKGDAELLHSIPGLGKTTVAKVLAYAGDVRRFANAKALAAFIGVTPRQRVSGSSIKGRTMMSRTGHAALRRALYMPGLVARRHNPVLRVFGDRLRATGLAPKAVVGAVMRKLAHLIYGVIKSGQVFDARLATPHLDFQDGI

SEQ ID NO: 67334 - protein, 404 aa, unidentified
MEFVVALDVSMGKSYSVIYQDQRCLYEEQIAHNQLGFQQLFDHIQTLPGSVTVVFEATGIYSKPVETFCQRNALRYCLLNPLEAKKQLELGTLRSWKTDKHDAHLLAQSHSLHRREENQTHIHHLSTSALSRFYQEIEEEIKRMRMYLHNALQLSFPELEQFFSSRITPYALSLIALFPHPDLVLRSSITKIKNQLINHTLKNISQNRAKQKAVEIMSYAHSSYPAVSIESVQTQKVRYYARQLLHLLEEKERVSKELIEEAKSLPEFDLFLSVPGIGEISAALVMGELGDLSRFSNHKKVNAFVGIDIRRYQSGKYHGQDHINKRGNPKGRKILYLIIRNMIRQQKAAPNHIVEYYYKLKKQPTPKKDKVAVVACMNKLIKCMYSMARNHTEYDYSHAVSMDQ

SEQ ID NO: 67335 - protein, 354 aa, unidentified
MSETLKTSVAVIGIDIGKNSFHVVGQDRRGAIVLRQKWSRSQVETRLANLPPCLIGMEACVGAHHLSRKLQMLGHDARLMPAKYVRPYSKGQKNDFRDAEAIAEAVQRPTMKFVATKTADQLDLQALHRVRERLVSQRTGIINQIRAFLLERGVAVRQGLRFLRAELPGILATRSDVLSPRMLRIIEDLAGDWRRLDERIEGLSNEIETLARHDQACARLMTVPGIGPIISSAMVAAIGTGDVFSKGRDFGAWLGLVPKQISTGDRTILGSISRRGNRYLRVLFVQAAWVVLVRLKQWERYGLKSWIEAAKKRLHHNVLAVALANKLARIAWAVLNKGRAFECVKTDAMASRPA

SEQ ID NO: 67336 - protein, 415 aa, unidentified
MALKIVYPICCGIDVHKTFVVACIASTNSKGLTTYKSHRFSTFTQGLNELSQWLCEHDCKDVCMESTGKYWIPVFNLLEHSCNITLAHPKYVKAIRGKKTDKKDAKWIADLFKHDLVAGSFMPPLPIRQLRDLMRYRFKLTNFTSSEKNRLQNSLTVSNIQLGSVISDTFGKSAMNIIDKLLNDPRDTSFDLEPLIHGSLKGKLAELALAVDGFITPEQAGKIKVIKQHYEDLESRKAELESIILSLADAYTEELNLILTVPSFKNIFSAIAVVSEIGVHMDVFLTAKHLCSWAGLTPSNDQSAGKRKSVRISRAGVYIKPLLVQCATAVVKSEKHPEIRNRYLQLKRRRGHKRAIIAIARMLLTAIYHILKNKQPYNPDLYKKADVHPADREITVEQAIKLAQSQGYRIMAAAT

SEQ ID NO: 67337 - protein, 341 aa, unidentified
MKYRFYIGVDVSKSTLDFALIDDRNKQDIGHKRVDNSDEGIINVFAWIAERHCDFELSNTIICMEATGLYCYPLLQYLYQHKANIWVENAVQIKRSSGLLRGKNDKIDAIRICQYAYKNDDNIRLWEPTRQTVDKLKHLATLRERLVETKKRLVTPVEEFRQMGNEMMAKMLEKSMRKSIKAIDSDLKGIEGQMKKIIDNDDELKKLYALVNSVVGIGFVTAVNLIVHTNEFKRLKDTRKLACYCGIAPFEYLSGSSIKGKTKVSHMANKKLKTNLHMASLSGIRNDEDLKTYYERKVAEGKSKLSVLNAVKNKLVARVIAVVKRGTPYEENYFKNASVLS

SEQ ID NO: 67338 - protein, 418 aa, unidentified
MRISKTQIGRGVNKEELIVGIDVAKMKHFARVLFPDGSESAAFGFLNVREGFEAFLSWLIAFRKKLNNPQVIVGMESTGHYWEALAFFLDGIADILLVQVNPSHVKRAKDLYDNSPGKTDSKDAGVIAMLIGMGRYQPMVLPRGPFANLRGFAKLREQKVVELGIQRNILHSIVDVIFPEYGRVFKKLEGKTSLHILKTFTTPQEIIQAGIQRIEAELHKTSRGKLSEAAAQELVKTAAHTVGITEGIEANVFAIKRAIESIERIQGDIVAIEEKQREILERVSYAPYLLSIPGIGRISLAVILGETGDMLRYRRAEEVIKLAGLNLFEISSGKHKGQKHITKRGRALLRKCLFFAALRMVKEGGAFREDYCRLTQVNGMQKIKAFVALSRKLLRVIFALARDGVMYQQRGLALALAA

SEQ ID NO: 67339 - protein, 394 aa, unidentified
MKLVGIDVGKNSHHFCVMDKETGEFNVTPSSFSNNKEGFDFLINSLKPYSKKSILLGMEDTGHYHVALLKFLLSNGYTVALINPKTTDLTRKMEGGITKNDKLDTITICDVLDTPERKKQYRITKVDRFDLYEQRQLTRHHHNLKEELNVYCNRLQKSIDLVFPEFNTLFSSKYSIVYMNLLKTFGSAEAIASTDIRTIRKCFEIKGRGNRISLTPEKLKECAKNSIGISSEVETIQIKHLVSQISLIKEQIAEIDKKIEEFSITNNSPILSIPGISHFSGTSILAELGDIGNYSKPSQIIKFAGVAPYHYESSQYNAQHTGITKKGSKYLRKTLYQIILTVINNNPVFKKYYLLKISQGKGHRCAQGHCIRKLLRIIYHLLETGQSFDPALLR

SEQ ID NO: 67340 - protein, 344 aa, unidentified
MQAVFKTIGLDIAKSVFQVHGVDGDGQVVIRRKLKRRYVLAFFAKVPPCLVGMEACATSHHWSRELQALGHRVRLMPPAYVKPYVKRQKNDATDAEAICEAVSRANMRFVETKTVEQQSCLVLHRTRHLFIRQQTSVINAIRAHLAEFGIVAPVGRKGVEQLLDVVANTEDQRIPDVARACVAALGAQLRALKAQILEFDRQIMIWHRSHETSKRLDEVPGVGPALATALVASVADPKAFRSGRDFSAWIGLVPKQHSSGGKDKLGSISKQGDRYLRSLFVAGALAVIRYAKIYGTKHRPWLTALLARRPTKVAAIALANKLARMAWAMMATGARYNYPASLRV

SEQ ID NO: 67341 - protein, 397 aa, unidentified
MPTDEAKTTTPLPYAAGLDVHQKTISVAVLDPGGQLVHRRTIRTCPKMLDELDRDLRKLASTTPVILGLEASTAGKAVFQHLRGRGCDVRMAHPKKLKALLGDTKTDENDALMLATVLRLGTFPEAYVPPPEIESLRTLVRLRGEVVEKLRRAKIQVRSLLVKHHLQHEGAKYNDIFGVQALRWLRDEVKLSDPWDQRQLVFLLEEGALLARQQYELTTELARVATTRNEVRILQSVPGIDYTLALTIVAEVGEIQRFPNRKKFAAYCGLVPKNRASGEKDPQHTKRRHGNSQLTYAFEMAVSAIRQMGRGRFFVQLKALEKRLGVPKAITAVAHRLAFTVYGLWKKGALYEETAVRLYSSKRRRMATRAAESVTTPSLADHVETLIGLQGYAGVAR

SEQ ID NO: 67342 - protein, 328 aa, unidentified
MKHTTIGLDIAKRVFQVHSVNQQTGEVVRRQLKRAEMLEYFTQLPAALVVMESCGTAQWWARELKKLGHEVKLIAPQFVRPFVKTNKNDAADAQAIWTAAQQPEMRFVAVKTPEQQAVLALHSIRQRLMKNRTAYVNQLHGLMAEFGVCLPRGWRGMLPKAVAALAEGSSPIPGVLRAELQRQIASWKRQEVECERIAAIPGVGLLTATAAVATIGDARTFKSGRQFAAYLGLVPRQSGTGGRVQLLGISKRGDVYLRTLLIHGARGVLSRMRPEAKDTWLGKLARRRPNNVAIVALANKMARQIWALMAHQRIYQPNYAVAATATVA

SEQ ID NO: 67343 - protein, 344 aa, unidentified
MEISTIGLDLAKNVFQVHGVDPGGKVVVRRTLRRAQVLPFFTKLPPCLVGMEACGTAHYWARELINLGHDVRQMPAAYVKPYVKRGKTDAADAEAICEAVTRPTMRFVPVKSPEQQAALSMHRARDLLVKQRTQLVNMMRAMLAEFGINIPQGVRLALEMARKIVDGEAPAVPREAAKIAGRLSQQALDTHAQLREIDLDLLAWQRANDTARRLMSIPGIGPIGATALAASVTDANQFRSGREFAAWLGLTPRQHSSGGKERLGRITKMGDKYLRTLLVVGMTSLIKRVKRKPETADPRLVALLARKPVRVATVAMANHTARVVWAIMVRGETYQAGHQPRLTA

SEQ ID NO: 67344 - protein, 356 aa, unidentified
MSRDLKYIGMDVHKEAVVIAVLNSSGKLVMESIVETKASSILQFIHGLRGELHVTWEEGTWAAWLYDLLQPQVAQVLVCDPRRNALLKEGNKSDKIDARKLADLLRTGMLRPVYHGEHGLRTLRELGRSYQTLSQDLNRVMNRIKALYRGWSIPCAGTQVYAPRYREEWLQKIEHAGVRRRAELLYQQLDGLQGLRRTLRSELLAESRKHKAAKLLRQIPCIGPIRAARLIALMQTPHRFRSKRQLWTYSGLGIETRDSAQYRYVQGQLQRKKKPQQIRGLNRNHNHEMKEIFKGAATRASCGVGPLRDFYAALLAKGMKPEMARLTLARKIAAIALTLWKKEERFDAEQLKPQAA

SEQ ID NO: 67345 - protein, 315 aa, unidentified
MSEMAVEKFVGIDVSKGALDLCTAPAGEALHVDYDDKGIGHVVNYLAALTPTLIVMEATGGLEMRLAGELVAHRFPVAIINPRQARDFAKATGQLAKTDVVDAAILAAFARAIRPVVRPIKDTDTRDLDDLVTRRRQLMDMRVQEMLRLGTASKVQKKSLTAHITWLEKRITELDDELTKRLRASDVWRAKDDLLRGIPGVGPITSLTMLAKCPELGQLNRRQIAALTGVAPLAKDSGKHRGKRFVWGGRADVRAVLYMATVSAVRFNSCIKAFAERLRRAGKPGKVVIVACMRKLITIMNVIIKNNMPWHPKNA

SEQ ID NO: 67346 - protein, 430 aa, unidentified
MEEVTDEPLYRDRVCGIDIGKAEMYATIRVPSEKDPARRASETRCFATTRRGVLELADWMRSWQVPALVMEATGDYWKGPFYRLEAEGFECVLADARKVKNLPGRPKRDPSDSAWLATCFERGAVTSCFVPTPEFRLIRLHTRYRRDLIDERTREKNRTEKLLESAAVKLSSVVTDLHGVTGRDIMDHLIAGERDPKTLAQLARARARRKITELEQALEGAEFFTAAHAALLKAMLDRIDVINAEISRLSRVIEELLAPWEEQLQQAESMPGWGRRSAEDALAETGADMTRFPTPAHLASWAGRTPLDKQSGKRAGQARHKRGNRYLGAITGETAVSAGKTDTREGARYRKLARGRGKAKACVAVGNTQMRVYHKLLSTPGARYEDLGTDYYDKQRNRARQASHHVGKLGDLGYKVTIEPLDTQTGELIS

SEQ ID NO: 67347 - protein, 408 aa, unidentified
MQVTFGIDVSKSNSTVCELIGESKNELTITNDRPGFIQLLHELAAFSKHPQIIFEATGVYSRRLQAFLEDYGYEYVILNPLKAKKEMNMGLRYNKTDKTDAYHLALIQRLYRHPVNQSESQTYKQLNALSRFYDQLTSDLVIAKNRLHQALQSTFPEIENLFSIARGKNYWHIVARYPHCDLVRKDDKKQIINWLMKLKGIAFNHAQRTTDKLIELAHLAYPVVSCSDIEVQQAQYYARRMLNLSNQRQRIITKMVKLAKTLPNHDLENLESIPGFAQTTAVRVLAELGDLRRFSNPNQINAFIGIDPGRYQSGEMDSNLSITKHGNAVARKLLYRAIGQIDNAAKTNPCHIADYYESKKLSSQTKGFKKIAIASIHKLIRTIYALIINDQPYDYNVATHNPKDFSRN

SEQ ID NO: 67348 - protein, 438 aa, unidentified
MRKKKNKANKRIHLQSLPLINPNAAGIDVGAKQHLVAVPPDRDPQPVRTFQAFTPDLHELARWLKRCGIETVALESTGIYWISLYEVLEQYGFEVRVVNARHVKNVPGRTKTDVLDCQWIQKLHSFGLLNGSFRPDHQIRKLRTYMRLRDNLVVERTQAIHHMQKALFEMNVQLSNVISDIVGETGLRIIEAILAGERDPEQLAALCSTRIKSSRQTVAKSLHGNWDEALLFCLKTALETYRFNENKIQECDHCIERQLATFDSRAQLSQQGESLRSQLHRVCGVDLTKIPGIKEQAAQIIISEVGLDMEPWKTEKQFSSFLGLCPNNLITGGKVLRRATRKVYNRAADTLRLCAQSLTHSKSALGTKYRRLRARLGAPKAIVAMAHHLARLVYRMLRYGQNYVEKGIEHYEEKFRLQRIKWLKKEAQSLNLQLVATQ

SEQ ID NO: 67349 - protein, 316 aa, unidentified
MSHALYVGIDVAKDSFDVASDPAGLVLSLPNDPPGRQRLLDALQDRPVALIVLEATGGYERALAADLIGAGHKVVVANPRQVRDFARGIGQLAKTDRIDARVLAQFASMVKPQPRQKASEEAVNLAELVTRRRQLSDLMTQESNRLPHARHPEVRRSLKKSLRALEKQIDDLDKLIRRNIDSDDGLRRMDEIVQSFKGVGPGTSAMLLSHLPELGRINRQQIAALAGLAPWDFQSGQWAGQSRIWGGRMPVRNMLYMAALSAIRSNPIIRKFYQRLESQGKKFKVAITACMRKILVILNTLVRNDCLWSPPLPKNA

SEQ ID NO: 67350 - protein, 440 aa, unidentified
MNDLRVLDAHAAFVDVGSEQMFVSIAGGSPEVFGTVTSQLHALRDWLLTHEVRSVAMEATGVYWLPLYAVLEAAGLEVLMVNGRQMRNLPGRKTDMQDCQWGATLHAHGLLHAGFVPPAHIRRLQDYLRLRADHITSAAAHVQHMQKALERMNVKLHHVISSLTGTSGLAVVRAILRGERNPEQLLALCDTQIQRAKAQRVKESLRGTWAEEHLFALRQALASWEHYQNQIAECDRQIEALLPASADDHTPPNTAVHTRPRKRAGPNAPEIPQLREILTQMCGGQDLTRLPAHTEYSVLQIVSEVGTDLTKWATEKHFTAWTGLAPGSHQSGKRKGSVKRQRNRAGRIFCVMARALARSKDIALGGFYRRMAARRGGLIANIALARKLAVLFWRVMVKGTDYVEHGLAQYEAKVLQTKQRALRRLARQLGQQLVPSPVPT

SEQ ID NO: 67351 - protein, 319 aa, unidentified
MAMKIQPIHIGIDVSKSTLVIADEDDSISEIPNESRSIRGWLKTLPGPARIGVEATGIFHVELIERAHQAGHAVYVIDGYKLNRYRESVGGRAKTDASDARLLRRYLAKELDQLRPWSPPPKGYRALQNLLLRRAKLVQCRTRIDQSLRGLTELGPSRRALLRQIDHLDRMIQRRILKVLRSQNWFVEARTVQDIEGIGVMTTAALVMVFRRGRFRTSDAFIAFLGLDVRVRDSGTMKGRRKLTKKGPPELRRLLYMAAMTASLSATWAPIYQRYLDRGLATTEALIILARKLARVAFALLKNGTQYQPKSVQGACMGT

SEQ ID NO: 67352 - protein, 408 aa, unidentified
MICVGIDWADDKHDVCIRDIRDRRILAEFAITHDAEGVEQLDQTVAALGFQPADCLVAVETPHGLLVGYLLQAGYLVYAIPPRAVDRYRDRHRGSGAKSDQIDARVLSDILCVDREYHHPIPEDSPLAQEIKLVSRQRQKLVQQQTRIKNQLTACLKAYYPASLGLFSGLDCAIAWAFVRAYPNAKTAAQASLAELEVFFDQHGYTCKRKIPEIYAQLQAPAIPVAEWEVRALQRHMLLLVDLMATLTPQIKAYERELTRLLDQHADAFIFRSLPNAGDVTAAWLLGEMGDCRDKFENASSAQALAGTCPVTIQSNKRRYVKFRVGCCKSFRNAVQQFARLSARGKKGSSWAKGYLTDQLARGHSVSRATRALGNRWVAIIFRLWQDRVAYHEDTHLRNRTLRGRRLT

SEQ ID NO: 67353 - protein, 352 aa, unidentified
MQTPQLFIGIDVHKKSWSVSIRTDLFEHKTFNMPSEPDKLISYVNQHFKDYPVECCYEASCCGFIPYRQLAQAGWKVKVLNPSDIPQSAKNKDQKNDKMDCRNLAKQLQSGHLTGIHVPDEQREQLRSLFRQKNNLTKVMRKLKSQIKAELLYYGIKFPSQFEKANWTKEMTTWIQDLEWKYVTGYTSLQSKLRHLAFVRQEWLTINKDLRQYVTACFNDDYQLLMTIPGVGPVIAIGILSELGDIRRFRKFDHLSSYVGLIPSVYSTGETVQIRGLTYRTKSLVRSYLIESAWVSVRRDPTMQAYYRTHTGKQPNKIIIKVAHKLLRRMWHVIKTGDGYKTCLNDSTAEPG

SEQ ID NO: 67354 - protein, 368 aa, unidentified
MSEIATFVGLDVHKETVSIAIAEAERNGEVRHLGNITNNPDAIAKMARRLGRKHGAIEFVYEAGCCGYNIQRQLTELGFACKICAPSMIPRKPGERIKNDTRDAVNLARLLRAGELTYVWVPDIVHEALRDLVRARHAACADVRRARIRIQAFLLRNDLRYEGKAWSHRHRMWLCNRQFAHPVQQIAFQTYLNALEHEEQRKAQLDEQIKELISQSSWVRLAVALQALKGVGAIVAATIIAEVGDFTRFRHPRQLVAYFGLAPGEHSSGGSVRPRGITKAGNSAARSILCEAAWNYRTTPKVGQWMKQHRPPVPQEIIDLAWKAQLRLHKTYARLVARGKRSVVATAAVARELLCFMWSIAQKVPRAA

SEQ ID NO: 67355 - protein, 339 aa, unidentified
MKVLYVGADLSKNSFPCSIWVDGELIELGQFENNQSGFKELAIAVTSNQEKYGYDSVQIILESTGGYELHLLSFIHSQGWAFTLPNPKAVRDWAKGVGYRAKTDKVDGRILAHYGGERRPKAQQPVPEIIEQLDSLLQRQEDTQKTLRQELNRQHALSYHPNASACAFKSLERTIAFLESELQQLKDDIALLLKNNPELRTQSKQLLTVAGVGEKTVLPLLVMLHRFDARTNGDGTGKQVTAYMGLDPKPFESGDTVWKRPSISKMGNSVMRSRLYLAALGGVRGKKSPLRHFYLRLVERGKSKKLSLVASARKILVWAWAIFKQGIEFDASRLATSSN

SEQ ID NO: 67356 - protein, 312 aa, unidentified
MAQSEVFVGVDVSKAWLDVAVWPGGQAWRLANDRAGRGDLVRRLKRLTGLQAVGFEASGGYEQSLLKALLDGDLPARRINPTRIRKFAQACGVLAKTDAIDALMIARFAATLPGRLAEQNKAAEALAELVTARRQLCEEMTRAGNQAEHADQPLLKRLARRRAQRLSDDIAALDAAIAKAVAKDPDLARKDALIRSVPCVGPVLSHTLLALMPELGKLSNRAAASLLGVAPFDRDSGLMRGQKHISGGRRPVRDVAYMAALVGARCNPVLAAFKQRLQAAGKRPKVIIVALMRKLITILNAMLRDQTAWANP

SEQ ID NO: 67357 - protein, 354 aa, unidentified
MSETLKTAIAVVGIDIGKNSFHVVGLDQRGAIALRQKWSRGQVEARLANMPPCLIGMEACVGAHHLSRKLKELGHDARLMPARYVRPYSKGQKNDFRDAEAIAEAVQRPTMKFVATKTADQLDLQALHRVRERLVSQRTGIINQIRAFLLERGVAVRQGLRFLRAELPRILATPPDVLSPRMVRVIEGLAGDWRRLDERIEGLSSEIEAVARQDTACERLMSVPGIGPIISSAMVAAIGTGDVFSKGRDFAAWLGLVPRQISTGDRTILGKISKRGNRYLRVLFVQAAWVVLIKPKSWERHGLKPWIEAAKKRLHRNVLAIALANKLARIAWSVLARGRAFEVRKVDEAAAQPA

SEQ ID NO: 67358 - protein, 422 aa, unidentified
MLIESHDEEQIISRVAALDIGKAEVVCCVRIPAMGNRRKRMQEVSTHTTMTRALTELANHLVESGVERVVMEATSDYWKPVFYLLEAHGLDPWLVNARDVKHLPGRPKTDVLDAVWLCKVAERQMLRPSFVPPRPIRQLRDLTRYRVDLVGARGAEKNRVEKLLEDACIKLSVVASDIFGVSGREMMAALIAGERDPKVLAQLARSRMRAKIGLLEEALSGHFDDHHAFLLTRMLGRIDAIDADIAAVDEQIEAQLVPFAQAAAQLDEIPGIGPVAAAIILAEIGVDMSRFPTAGHLCSWAKFSPGVHSSAGKSKGNGSTGHGNRYLARVLGEAAVIAGRTDTFLGARYRRIARRRGKKRAIVAVGRSILIIVWHLLSDENAAFADLGADHFTRHLDPDRRKHSHIRQLEALGYSVTLTPAA

SEQ ID NO: 67359 - protein, 358 aa, unidentified
MKKIVIGIDISKEKIDATAIDVRDSQLGVVKLDYQVYENRPMGYRRMLVWARHLIKGIGLEDVLFCCETTGGYDRCLCDYVYAKGLDIWREGALQIKRSMGVRKGKDDKADSLMIAEYAMRHIDKAVIYETPDENVRELKALFLYRHKLVQERTEKKVRAAELKATAAKSDAMRFIMRDAMKSIRAIDKSIRDCEKQILAIIDGDKDLKRNYGHIDSIPGVSIVNATAFIAYSNNFRSITTANKIASYWGCASFRERSGTSVDKKAYVKCYSSSLLKATLTQAAECTIKDHGIYRDYYLRLKAEGKPYGVIVNNVRNKLIHLVFSLVTNDTDYEKNHELLRKKRKSEQGMSAQLEIIN

SEQ ID NO: 67360 - protein, 456 aa, unidentified
MGNARARKVPAQLVEDEDYHLRHERVAGIDIAKAKADVCTRLPPARDGGRRASRVEEVPARAADVTALAGRLLADGVELVIMESTSDYWRMWYYLLEAAGLAVQLVNSRHARQLAGRPKTDRLDAQWLARLAEMGLLRPSFVPPPEVRALRDLTRTRLQLVRDRTREWQRLEKLLEGALVKLSSAVWSLAQSVTARAVLEALADGERDPKALAALAAPQVRGGRAAIEQALEGMQLSSHHPMLVRGHLDRITLLDRQAAAVEDEIEAGLAAIPASWGITAGGVPDPAPGPDAAVLDAASRLAEVPGISPSLARAIIAETGLDMTRFPTAGHLASRAGLAPVTRQSGPRTRQPGRGHGDAYLKGYCTQAALGAARTETFLGERSRRLARRIGGIRAQCATARSILVIIWHLLASPEARYTDLGADWHARKTDRDRKIHAHLRQLQALGLDVTITPAA

SEQ ID NO: 67361 - protein, 340 aa, unidentified
MRQLYAGCDLHGNSNFIGVVDAEGKRVFKRKLSNDLGLVRETLKPFEQELVGVVVESTYNWYWLVDGLMETGYRVHLANPSAIEQYAGLKHSDDQHDAFWLAEMLRLGILPEGYIYPKEERPIRDLLRKRGHLVRLRTSLIISLQNILSRNLGRRMNVNDMKAIKEDRVTLLLGMNEDLALAGRVSKEVIDHLTRQIHKIEWVVQKRLVLKEAYRYLLTLPGVGKILSLTIMLETGPISRFETVGDYVSYCRKVPSQWMSNGKWKGTGNRKNGNKYLAWAYSEASEFARQRYPEPRAYYNRKMQKTNAAVAHSALANKLSRAGYYVMRDQVPFQPEKLFG

SEQ ID NO: 67362 - protein, 454 aa, unidentified
MKPAEEFVLSRHRHLGQLSFLNTSGKNEPTPGLTASQPFPEEKEAVMEVVHLVCCGIDVHRQSLTACLRRVDATGTVAKEVATFGTMYRELLRLSDWLVEGHCPIVVMESTGVYWRPVYHVLTGNVEVLLANPHEVRQRRGKKTDKADAEWLAELLAHGLVTPSFIPTPEISTLRDLTRMRTGLVQTRTQAKNRVLKVLEDTNLKVGDVVSDVFGVSGRRMLDALVAGERDPVVLAEMALRKLRSKIPALQLALEGSFTEHHGWLIQMSLDMVDMANRQIHEMDERIGKLLEPLSSQAAQLATIPGVSEQAARVILSEIGADMSRFGSPQRLASWAGMCPGNNESAGKRRSGRTRKGNKHLRRVLVECAWATVRTDSFLGRTFRRHRARIGGKTAAVAVGHKILVIVYHLLAEGSVYDGERYDRPDPKEEARRISRAVQALARLGYEVELKKAV

SEQ ID NO: 67363 - protein, 417 aa, unidentified
MDVLYERCCGLDVHKKTVVACVIVPGPKGQPRKEVRTFSTMTADLLALGDWLTAEQVTQVAMESTASYWKPIYNLLEDRFTLLLANAQHVKAVPGRKTDVRDAEWLADLLRHGLLRNSFVPDRPQREVRELTRYRTSLVQERSAEVNRLQKVLEGANIKLAAVASNVLGVSGRAMLEALVAGIEDATVLADLARGRLRDKAPALAQALRGRMGAHQRFLLARQLAHIDFLDEQIAQVTAELAERLQPEEDDLDRLAGIPGVSRRIAEILVAEIGTDMSRFSTAGHLASWAGMCPGNNESAGKRLSGRTRKGSPALRTALVEAAHAAAHTKGTYLAAQFHRLAGRRGVKKAAMAVGHSILVLVYHLLQRGTIYADLGGSYFDERERDTLQQRLVRRLGRLGYRVSLDPLGPALPAPAA

SEQ ID NO: 67364 - protein, 481 aa, unidentified
MKKNPGRQHGKNIRQPQKKIVEQIAGPSCQAADNEDNEGLPVIRPLVAGIDLGSEQHWVCAPRLDGAGREVAVFGATTPELERMALWLKERKVESVAMEGTGVYWIAPHEVLERHGFQVALVNTRELARVPGRKKTDRVDARWIQRLHSCGLLRGSFRPVEQVCILRTYVRGRSILVAETADWMRRMQKSLDQMNVRVHRAVSDLDGMTGMAILRAIVSGERDAAKLAKLRDRRCRKSEAEIAEELTGHWREDHLFSLEQALKVYDGLQERIADYDRKILEKVAEMTEEERRGQQAPELKNKEKARGIKRRGEEPLRQALYRMSGVDLTAIDAIGVGAVAVVLSEYGPDLSRFSTEDEFVSHVNLAPRKPVTGGKPMKKKKRGSASTRVAGALRMAAVSMRNSKTALGAYYRRVARRISGDVAVFATARKLAQLIYRLLRWGQAYVDEGAEAYEKRYAEQRVQRLKASANDLGYELTPKVA

SEQ ID NO: 67365 - protein, 453 aa, unidentified
MAQGSGLTRGDRNRNRRIGLLREVVRRDRAVLAVDLGEDKQAAVLVDHEGRVLARKTVRAKAHQLGGLLGWAAGQAARAGFAGLTVACEPTGHRWKALMGLADAAGHGFCCVQPLAVARAREGDDYTRDKTDHRDARLIGKLAVRLECYLPERADETWARLRHLGARRAALAADAVACRQQIGDLLACAWPAALGVAARPLRSVTWLAAMGVITDRCCGDPARLRKMGYARFLAAVRRELPRWGGKYVRHSIVTGLWAALADPGGVRAQRRGALERVHLLMADWRSLRTRLADTEARMCAVLDELGLTGLVTSIDGLSAVGAAVILAETGELSRFASARSVVKHAGLNPAENTSATLTGRTRISRRGRPGLRTAAWRAAWAALRRNRVLAAKYAHLTGRDGRRLAGGQARAACAAALLRWLYAVITRRQPWDPRIAAGTIGARAGAVTAPAAA

SEQ ID NO: 67366 - protein, 350 aa, unidentified
MIIIGCDYHPGFQQIAWLDTDSGELQERRLGHREEAEQFYHELKSRGMKVRVGMEASGHARWFERLLNELQFELWIGDAAAVRTKRVRKQKTDRQDAQLLLRLLLEDRFPRIWVPDPENRDLRQLLWHRHRLVQMRTRVMNQLHVVALNEGLRRKKALWRPVGRAELQALSLAPWANRRRQDLLDLLDRLTPKIHELTGKLEQIVERRPVTRQLSTHPGVGPLTALAFELVIGTPERFACAKQIASYVGLVPSEESSGDRRRLGHISKQGNVLLRFLLVEAAQVTVRSDPQWRSQFFHLAMRRGRKIAKVAMARKLAVELYWMWRRGWDYEQMQQLGSHAGEPGNRHGVQ

SEQ ID NO: 67367 - protein, 328 aa, unidentified
MMNDVAVGIDVSKKKLDVCIAREGKYKSKVLSNTPNGHKELIRWLEAQGISQEAPVALEATGPYREAIAIHLSENDWRVSVVNPARISGFAKSELSRNKTDSADAKLIARFALHAELEIWQPPTPAIRELRALVDRLQALSDMKQQELNRIEGLSETCEVAVKDMIIDHVHWLEKQILSIQSKIDDHIDGNPELKRDADLIESIPGMGRRATSQFLAYIGDVRRFKSAKALAAFIGVTPKQKQSGTSINGRSSLSRTGHNAARKALFMPGMVAKRFNPVIIAASIRLEARGLTPKAIIGVSMRKLVHMIYGVMKWCSPQKIDTVPMQR

SEQ ID NO: 67368 - protein, 333 aa, unidentified
MKNYLFHAGIDISKDKLDINILDSLTLQSQHLIIKNDIKSISDLIKILQKKIDLNRTLFCCENTGVYTNHLSFVLLNKELDLWVVPAIEIKKSKGISRGKNDKTDSKDISYYSYRHLDKLALFTLADVDVQKLKILFTERAKMIKALLILQTSRENKEFTQKEIYKEISGVNGALLKQIKNSIKKIEIRIKEVIKSNDQLNKQDQLARSIPGIGAQTSAYLIIATKGFSSFDNWRKFACYSGVAPFEFSSGTSVRGKTKVNHMADKKMKSLLQMCVLTAIKYDPQLKEYYNIKKAEGKNSMLVMNNIRCKLISRVFAVISRGTPYINTYKFAS

SEQ ID NO: 67369 - protein, 417 aa, unidentified
MEVVYPRCCGLDVHKKSISACVVIREQGKIKKLEQRFGTYTGQLEELAEWLEQQQVTNVVMEATGVYWKPVWNVLEGRFDLMLVNPRHVKALSGNKHDRGDAAHLADLLQHGLLHGSYVPPVAIRELRDLTRNRVRTTQETVRINNRIQKILEEANIKLGSVASEVLGVSGRRMVKALIEGEQDSAKLADLALGQLKKKRAQLIPALAGKVSAHHRLMLDKLMRALEAREGEIAEDERDIRKAIEPFQKAVQAWMQEPGVDEVTAWSLVAEMGPDLAPFATAEELASWTCLCPGNHESAGKQLDGRTRKGNPWLRSAMCEAAWGASRTKNSYFHAQFSRISARRGPQRALLAVAHSMVVIGFYLIKYDKQYKELGANFFDERHREHTKCRAVKRLNALGFKVTLEQMPAEAAPSTPA

SEQ ID NO: 67370 - protein, 337 aa, unidentified
MIVVGVDVHKQSLTAVAVDEVGRCVAELAVASAGELVVWSASLAADRLWAVEDCRQLTGSLERDLIAAGERLVRVPPKLMAPQRRAGRTRGKSDPIDALAVARAALREPRLDHPRPGERAMRELKLLVDHRDDLVDERRRAQQRLRWHLHDFDPELAVPPGALDRPLWLDRVARRLGRAEQTVQVRIGRELVGRCRNLTRTIQELDRELQQRSSETAPALLALPGCGALSAAKLLGEIGPIERFQSDAQLARHAGVAPLEASSGKHRRHRLDRGGNRQLNCALHRIAVTQARVHPPARAYLERKQADGKSRREALRCLKRQLARTVYTTLKNEPALT

SEQ ID NO: 67371 - protein, 453 aa, unidentified
MEREEKRLEQFRRLHQEIRGSQQYLVVGIDISKDTHNAFMRTPTGKTLYRRLIFNNTREGFETLLLQVEAVRVQHSLNQVVFGMEPTANYHKPLGEFLINQDQQVVLVSPEAVKHNRPLLDGRWNKHDGKDCANIADLMCQGKCLFYEYPSSELRDLRNLLSLNRKIKKLEQGLRLRIRNHLVAQFFPEMDQYCHWGANEGLALVRWCLDPALMGTLSDEELGKRLHTQGRTLAQRKRLSALKDKAPSSIGCQFGDSVEFEGQSVVKLLKEVRQTLADTQEKIEQVCLKFQEYPCLLSIPGFGPTLSAMVLGAIGNPWRFQNGAQVIKMVGLDLSASQSGKSQGPASVSKKGKAEIRYAVYQAAMVASNRDKHFVAYFTDQLRGREKEKGIKTKKRVKLAAKMLMIAWTLMKKQEIFDPKYLSTTAQPIIGQKTRQTDPGGIPEVQPGAARRL

SEQ ID NO: 67372 - protein, 463 aa, unidentified
MARKNHSRPRPAKSLDLSIKNPDAAGIDVGSTFHCVAVPPDRDAESVRTFKVYTPDLHEMAAWLKACRITTAALEATGVYWVPIYEILQAHNIKVILVNPDFVRRMRDPKTDVADSQLMLQLHTYGQLPASFRPTLDISILQTYWRQRDRLVYEAADAIRLMQKALDLMNLHLHKAISDLSGVTGLRIVRAILSGIYDPEALAMMREPGIKCSREELVHALTGNYRTEHLFSLRLALAHYDFAQRQIEQCDSAICGYTTTLPDGTAGPTSDGSDPKDQPPAKKRRSRRGNAPKIFDLAEEVNRLTGRDWNVIPALGPMTIMTGISEVGLDLTKWDTERHFSSWLSLCPNPRITGGRVKSSRTRKNKNRFAKALRTAATSLSRSKSALGAEFRRLRARLGAPKAITAMAHKLGILFYRIMRYGSAYVDMGQEAYEAKYRERTIKYLEKRALELGLELHSPVQCT

SEQ ID NO: 67373 - protein, 335 aa, unidentified
MEFDFFIGIDVSKNELDFALQQGGKLLFHRETANRPEAIKAFLKELGRQPGFELRKAVFCMEHTGIYNNHALSVLHQKKANICLGPAVQIINPSGNIRGKSDKVDAIRIAGYAYTQREKLRLWQPKREVVQQLACLAATRSRLIEAGKALRIPLKEKDAFNTKKVAGESAKLCAQTLKAIDAGLKKADKAIQKVIDEDPELKRLFGLITSVNGIGKVTAVQLMITTNEFKDITEAKKFACYSGVVPFTRESGIFKGKARVSPMANKKVKTLLHLSAIVAIQHNADLKLYYQRMVNQEKKNKMSVINVGRNKLILRIFACVNQNRMYENNYTKAVA

SEQ ID NO: 67374 - protein, 397 aa, unidentified
MYIVGIDIAKRKHEAAVIDGEGTVIIKPFSFTNNCSGYNRLLAMLAKAKLPLDEVSFAMEATGHYWLALFTRLQKEGFRVQVINPVQTNSIRSFYIRQAKTDPRDALLIAEVIRFGHFSESTLHPENIYELRELCRGRHAIVSMQADVKRKVVALLDQVFPEYETAFTNMFSDTSMTILQTCPTPKELSEMPLEELCHLIEVSSHKRFRMAKARELQELARNSFGFAMAGDVFSTMIRLYAKHLDFLKQQVREMDRKIAEIMETLDTPITTITGIGPTLGAYILSEIGDISRFSSAAKLAAYAGIDPTMRQSGEYNGVRNRMSKRGSPYLRHAIWLATSSAVLHDPALKLYFQKKRDEGKPYMASVGHACRKMVSIIYAVMRDNKAYTPYIPNEISA

SEQ ID NO: 67375 - protein, 460 aa, unidentified
MACCAAYKIAQQAAITGSRVDMVALLTTPQRRPATAKVEHTSDALVLVGIDISKHRHEVLIAVPGKTRRRRLTITNSTDDFMRLIAILREYGLPVRIGFEATGNYHRVLMYHLGVAGFDLKLVSSVALARTREALHNSWDKNDPKDAQVILHMLQIGAVQIFQDPMVAGTNDIQELSKTHDAVSRSKTELWHRILTHYLPLYFPEADRFHRSSRTDWFLAFLEMFPSPHMISAMTKEEFIQTAWEVVGRKVEKSLLLSDIYETAKVSAGLPVAPDSDALRMFRMMLAEGRSLIRQRNAIEDRAVELLGDRPDYQLLRTIPGIGPINALTILAETGDLRRFHHHRQFLKFCGMDLATVQSGMFRGRSKISKYGNARLRRTLWLARQAAVLKKANSFRDKFERYIAQDRHNPDLRRKAYTAIAAKMARTIHAVIKSGEPYRPFFEGTSPSGRTSLSKGRGGA

SEQ ID NO: 67376 - protein, 343 aa, unidentified
MDVRTRYYVGLDIHNKTIAYCFRRSNGKIAREGSCKATGEDLLALFDRQKRSCVVGMEATMFTGWVYDTLLGHGIDAHVGHPAMLKAIYAGKKKCDKIDARKLSNLLRCDLFPECYMAPENLRQLRRVLRYRNTLVRTATRMKNQGATMLMELGISYNKKKLHGNKYFKDLVDTLTEIPDTVRHLLFLNHENLQVFEQQQKWLLKQLQSHPDIMERVERLMTIRGVGPVTALTWVLEIGEPERFSSVKAAVSYCGLCSAQIESAGVTKRAPLSKQRNKHLQSVLIEAAKLAPRWNPQLAAVYKRELDRGRNKNQATIAVARKLVAYLLCVDKSGKDFELREAA

SEQ ID NO: 67377 - protein, 337 aa, unidentified
MKYSGIDLHSNNSVVTVTDDEDRVVAQKRLPNDLAKIVAFLHPWREELAGVVVESTYNWYWLVDGLQAAGFVVKLAHTGAMKTYAGLKYSGDEADARHLAHLLRLGILPTGTILPPEHRATRDLARKRMQLVRTRTSHIVAIENILARQKGATINSNAIKRLTPSDVAKMGLPADVELAVESNLAVVSTLSVQIERLENRLQEKLGDRSDYTLLTSVPGIGRILASIILLETGPIERFPAVGNYASYARCVDSKRLSNGKKKGEGNTKNGNKYLVWAFIEAANFALRFNAQAKRFYERKKAKTNGVVATKALAHKLARACFHILKERQPFDVTRCFA

SEQ ID NO: 67378 - protein, 394 aa, unidentified
MKLVGIDVGKNSHHFCVMDKETGELNVTPSSFSNNKEGFEFLINSLKPYSKKSILLGMEDTGHYHVALLKFLLSNGYTVALINPKTTDLTRKMKGGITKNDKLDTITICDVLDTPERKKQYRITKVDRFDLYEQRQLTRHHHNLKEELNIYCNRLQKSIDLVFPEFNTLFSSKYGIVYMNLLKTFGSAEAIASTDIRTIRKCFEIKGRGGRISLTPEKLKECAKNSIGISSEVEIIQIKHLVSQITLIKEQIAEIDKKIEEFSITNNSPILSIPGISHFSGTSILAELGDIGNYSKPSQIIKFAGVAPYHYESSQYNAQHTGITKKGSKYLRKTLYQIILTVINNNPVFKKYYLLKISQGKGHRCAQGHCIRKLLRVIYHLLETGQSFDPALLR

SEQ ID NO: 67379 - protein, 264 aa, unidentified
MTYTHFTNNIGIDISKKKLDISFNANETVSYTNDLEGFKQLLKRISNKKVTRVVMEATGGYERPLVSFLHEKGVAVSIVNAKRVRDYAKALGMLAKTDKIDSHVIRLFAEAINPNITGKLSDSHKSLNALKLRRNQLVKQRTMEKQHLETVANEETKRSINRSIKFLNKEVEKIEEKINEIIDLDDSFKDKVDRLTSIKGVGLVVAVAFVSDIPELGTLSNKEISALVGVAPLCRDSGAMRGKEPFGVGDLKYALSFIWLLSAQ

SEQ ID NO: 67380 - protein, 394 aa, unidentified
MKLVGIDVGKNSHHFCVMDKETGEFNVAPSSFSNNKEGFDFLINSLKPYSKKSILIGMEDTGHYHVALLKFLLSNGYTVALINPKTTDLTRKMEGGITKNDKLDTITICDVLDTPERKKQYRITKVDRFDLYEQRQLTRHHHNLKEELNVYCNRLQKSIDLVFPEFNTLFGSKYGIVYMNLLKTFGSAEAIASTDICTIRKCFEIKGRGGRISLTPEKLKECAKNSIGISSEVETIQIKHLVRQITLIKEQIAEIDKKIEEFSITNNSPILSIPGISHFSGTSILAELGDIGNYSKPSQIIKFAGVAPYHYESSQYNAQHTGITKKGSKYLRKTLYQIILTVINNNPVFKKYYLLKISQGKGHRCAQGHCIRKLLRIIYHLLETGQSFDPALLR

SEQ ID NO: 67381 - protein, 329 aa, unidentified
MYYTGIDLHKFTSYLTTVDSSGVIVKQSNLKNNDFEFVQYFADLKENHKATVESTMTWYWLNDLLVTLKIPLVLAHAKFVKAIAYAKVKTDKVDSQTLAQLLRMDYIPEAHKISNDLRTLRDALRARRKIVQRHTSVTNSMHLLLAKYNFSSPDQLSGISKYQYDQLVDLEEILNEQILDLEKHLYPGLIPNEDIQRLLWIPGIGKMNAFSILLEVDDINRFADVKNFFSYCRLVPSTRNSAGKSKQRSSKDGNKYLKGVFTDAAIHAIQYYPVIKKHHNALLRKKNKFVARTIIAKEIARVVFYTLKYKTDFNNKFKGKDLIHTKSLQ

SEQ ID NO: 67382 - protein, 378 aa, unidentified
MNLKYSVGLDVSSKKIDACISVIDQRQRVIVKSSKKILNTKTGFEDLVVWILKHQKDSIPVVICMEATGIYHENCAYFLYEKGFTVSIILPNKAKKYLDCLGLKSKNDSIDAKGLSQMGAEQCLEAWEPIGVFFYELRLLTRQRQNLTELKTIIRNQLDALSHAMHQLASVTAQLKENISLFESQIKELDKAILEHIASDKEVLEKVKNICTIKGLGILTTAVILAETNGFTLFNNYKQVVSYAGFDVVEAQSGTRVGKTKISKRGNSRIRRALYMPSLVVIQCEVQQFKDLYDRTYKKHGIKMKSYVAVQKKLLTMIYYLWNKNEAYDPNYKVKFQEEEQELYSLFAFEKGIKSSPNKIEATQGKLPVNDHSVFPLC

SEQ ID NO: 67383 - protein, 321 aa, unidentified
MKTVLGIDQAKKKFDVALLLNGKYKSKVFENNPAGFSALLAWLAKNDVATVHACMEATGSYGEALARFLHEAGHSVSVTNPARIKAFGQSELLRTKNDKTDAKLIARFCEKMEPTLWQPPPVEVEYLRGLGRRRDALICMRTQELNRQETSNETVNSSVQTVLECLDKEIEQISKLIKEHISKHPGLKHKHDLLNSIPGVGPATIEAVLSEINAFEGFETIEQVVAYMGLSPKEHTSGTSVKGKSVVCKIGNARLRKALYMPALSAIIYNPIVRALYIRMKAKSKNGMVIACACMKKLVHLIYGVIKTNKPFDPAYMLKTA

SEQ ID NO: 67384 - protein, 300 aa, unidentified
MLIIGVDYHPSFQEIAFLDQDTGECGERRLNHGDGEAEKFYRDLQQKGVRVRVGMEATGYSRWFERLLSELSVEVWIGDAAKIKTKRVRKQKTDRQDAQLLLKLLLENNFPRVWAPSPENRDLRQLLWHRHRLVQMRTRIMNQLQALAMNEGTRWKKRLWSEQGRSQLEKIRLAPWASRRRQDLLGLLDRMNPTIAELTAAVEQEAKKRPDVLRLMTHPGVGPLTALAFVIIIMTPERFPCGKQIGSYVGLIPCEDSSAGRQRLGHISKQGNALLRFLLVEAGGKQRCVVMRTGGVGTYT

SEQ ID NO: 67385 - protein, 412 aa, unidentified
MKDFLEISCGLDVHKEKIVACILTGPLGKATRSESREFTTLIPDMIALRDWIVSQNCHHVAMESTGIYWMPIYEILEDAFSGDITLLVVNARHMKNVPGKKTDMRDSEWISTLLRAGLLNGSFIPEKRIREFRDLNRYRKSVIRDITSQKNRIEKFLQSSGFRLSSFISDIFGASGRNIILHLIEHGQIDKTALDSCLKTKTRNRIDEILMSVNGTLSEHQKAFLRILMTHYDSLKKHLAEIETSLEEDMAPFALQVEQLNSIYGISTTASCAIIAEIGIDMKPFKTAEHICSWAGLCPGNNESAGKRKSTSVTKGNPYIKSMLCEIAWVIAGKRNTYLSAWYWRIKQKKGAKKAIVALARKLLVIIYTMLKQGTLFDESCFETRRKHCEQKQLSRYIRELEKHGYHVEAQS

SEQ ID NO: 67386 - protein, 358 aa, unidentified
MADKVTEAAVVGGVDTHKDLHVAAVVDQNNKVLGTQYFATTRQGYRQMLAWMTSFGALKRIGVECTGTYGAGLLRYLQNAGLEVLEVTAPDRMERRKRGKSDTIDAECAAHAAFSGIRTVTPKTRNGMIESLRVLKTCRKTAISARRVALQIIHSNIISAPDELREQLRNMTRMQLIRTLGSWRPDASEYRNVTNVYRISLKSLARRYLELHDEIADLDVMIAAIVDELAPELIKRNAIGYESAAQLLITAGDNPQRLRSESGFAALCGVSPVPVSSGKMNRYRLNRGGDRAANSALHIIAIGRLRTDDKTKEYVARRVAEGHTKMEAIRCLKRYISREVYTLLRNQNRRVKSIPIMA

SEQ ID NO: 67387 - protein, 368 aa, unidentified
MIEYKLKAAPTALSKGQNSQKESKANRIDIGVDAHLKSYQAARKIDNGAVGVAQTFGSKEALLLYVQKQREQAKQVTVVYESGPLGLTLYRELKALDIQCLVCAPRSAEQKRKRRKNNSIDARTLTSDLSNYLNGNEQALQLVRVPTEAQEQARVQSRQHDALVQERKRLGAIGNALLLSQGYGSWSNWWRPKAFERLSQAVAAWIVKHLGRWVGILRELDQQIFQAKAELTQQYQGPRPKGMGAPSLAQLNAEVLDWNLYSRGRKISCLAGMVPSEWSTGNSQRLGAITKVGVPAIRRIITEMVWRMILFQPQYKAVQKWREVLEGSNRGLKKKAVVAIGRRLIVDIWRLQTGRITAQELGLIMIEA

SEQ ID NO: 67388 - protein, 387 aa, unidentified
MPQVDDLSRSLVAFDQDASLIVVVEMSEASWLVAGMAPGLDRQPLKKLGPDPDALLRLVERWRDEAVKAGKMIKRIALAFEAGRDGFWLARWLQARGIEVHVIHSTSVAVSREHRRAKTDRLDTAMLRRVFLGWLRSERGHCGMVAIPTLEDEDARRPSRERESLVGERTRIINRMKAILAWLGVRGFNPKLRKAPQRLDDLRTPEDLPLPPNTVDELRRDMARLAMVCEQIKALEQARLANLEQAPGTGPHAMVRLIANVIGVGIETADMLVQEVLSRNLRDRRAVARFAGLTGAPNESGSRRRERGLAKSGNARVRRGLIQLAWRFLRFQKDSALAQWYRVRTDGPAGARRTKMIVALARKLLIAFWRMVTVGEIPAGFALRQPA

SEQ ID NO: 67389 - protein, 339 aa, unidentified
MNEITTIGLDLAKKVFQVHGIDAAGEVVMRRSLRRAQVLAWFAALPPCLIGLEACATSHYWARELRKLGHTVRLIPPAYAKAYVRRNKNDPADAAAICEAVSRPSMRFVAVKSEAQQAAAGLHKVREMLMKQRTMLMNQLRSLMAEFGIVVGTGPQHVAKLVAILDDPADERVPAPLHEALVGLAQGLRGLALRMTTLDRQILAWGGDNASYRHLLTVPGYGPILASAMAAMAVEPAAFHSGRGFAASLGLVPRQDGTGGKVKLGPISKRGNGYLRRLLVNGAMSVLNAKRARQNPWLIKMLASKPRKLVAVALANKMARIGWAIMMRQEDFRTRPAAA

SEQ ID NO: 67390 - protein, 339 aa, unidentified
MSIIGCDLHSRYQVIALVETETGEMVTRRLEHENGEARAFYTTLPKPSLIGMEATGYTQWFERLVAELGHELWVGDPAAIRARAVRRQKTDTRDAEHLLDLLLTKRFPRVWVPTPEERDARQLLKHRNKLVRMQTSVRNQLHFLAMSQGVCRKQKLWSARGRAELEGLSLGPWASRRRKELLETLDELGPRIAELDQAVKAEAERRPEAVELMKHKGVGPVTALAFVLTIGPVERFAHSRALVSYLGLNPSEDSSGGHQRLGHISKQGNQMLRWLLVEAGHSAAQFDPQLRRKYQRLVFRRGRNVAKVALARHLAVRLYWTLRQASSATPPVHTPGSPR

SEQ ID NO: 67391 - protein, 343 aa, unidentified
MEIRTVGLDLAKNVFQVHAIGDTGEVIVRRSLRRAQVIPFFSKLPPCLIGIEACATSHHWARELVGLGHEVRLMPPAYVKPYVKRGKTDAGDAEAICEAVTRPTMRFVPIKSVEQQAALALHRTRDLLVRQRTQLINMIRGLMAEFGIHIPKGITNALAFVRRAVAGEANEVPDLATKVIAALAEQAIDVQCRIRQLERDLLALFRSNDLARRIATVPGVGLLGATAIAATVTDPTQFRSGRQFAAWLGLTPLNNSSGGKERLGHISKMGDQYLRRLLVTGMTSLVRRNKHHLNAADPRINALLARKPVRLVTVAMANRAARVIWAIMLRGEAYRRPVASMAA

SEQ ID NO: 67392 - protein, 340 aa, unidentified
MVHVGIDLDKRSSQIAILTEDGDIVQQRLANEVEGLEKFFGQLPPQSPIAIEASGTWWWLVDLLEQLGHRPVLSNPKQTKAIAAARLKNDRVDAERLALLLRGDLLPTVWIPPAPLREARELVRHRIQLVWLRSVVRNRLQAMLARRNLQPMSGKSWLTQRGQRELQQLPLTEAPSRIREDCATLLPILDAQIRRLDADLVTRWGRDPRVERLTTIPGIGPFIAIVLVLELGDIQRFASAKRVASYVGLTPRVRGSAGRVRAGHITKEGNRLLRWVLVLAATQAVRKPGPLRTWFHAVKKRRGKKVARVALARRLAEIVFHVWQQECDYFTVVRHGVVRG

SEQ ID NO: 67393 - protein, 325 aa, unidentified
MRQPQSQVKPQTQVGLDVSSQTLDAHIRVDGKAFSVPNTDAGFDQLCEILSTYSVSMILMEATGGYEDNVACYLQLQGFDVVVINPRFARRFAQSMGRLAKTDRIDAAILSQMAFMIDSGPDRDRYIKPVTDEQRKQLSRLSSRRRQVVDLITIEKQRLTHADDYARESINSIISLLNVELKRIESDILRYVKKNFSELANRLLSIPGVGEQAMIVLIADLAELGHVNRRRISALLGVAPFNHDSGKFKGQRRIRDGRQTVRNVLYMGVISATRFNPVIKAFYDSLLLRGKPRKVAIIACMHKLIRIINAMMRTGKSFDMSLHGV

SEQ ID NO: 67394 - protein, 349 aa, unidentified
MRFYTTQHQYYCGIDLHARSMYVCIQDQSGKILLHRNYRAGPDALLGAIDQYREDLVVAVECVFTWYWIADLCSRKGIAFVLGHALYMKAIHGGKTKNDKIDSNKIAALLRSGMLPMAYVYPQGMRSPRDLLRRRLYLARQHAELQAHIQNTNTQYNLPYFEKRIDRNSNRAGIAMRFTDPAVRTSVEVDGALMDALHQQILAIERQINAQVPEHDPVALHLLRSIPGVGKTLALVILYEIHDISRFPAVGNFISYARLVKCTHESGGKRKTGPNNKIGNVHLKWAFSEAACLFLRKNERGKLYHQRLVSRYGKAKALSILAQKLGRTVYTMLKRRTPFDAKRFFETVG

SEQ ID NO: 67395 - protein, 347 aa, unidentified
MNYIGVDCHISSLDFAVVNEKGTTTKRAKVNTGVKEFMEFVKSIPKPRKIFIEEGELANWLLETSLKFGENLVITDPKINKWIGKAGKKDDAIDAEKLAQLARGKYIKEIYHSINNRRRFKELVFAYHDTVKSQTRIKNKIKASFRREGIRCGGATVYSEKYRKEWRKKLPGNKVVHLIVNELWAQLDQIQNAKEGLKRNIRIHGKQYPEIKRFRNVPGIGLIHASTISAIIETPHRFANKKKLWMYAGIGLAERRSGEKVYSRRLTWEYNRQLKNTVKQASEAAIYAKDNQFRRQYLRLTIEKGIPSYKAKLTVARSLLAALYGMWKKGEAYDPEIDIKRSNGNKK

SEQ ID NO: 67396 - protein, 392 aa, unidentified
MRERITEMQMMIEGQSHFQPFGLSYWGFEDLNKGVGSMTASYEYHIGVDYHKSYSHLVVQDSSGKTLRSGRVKNDRQSLGGFLERYRENSHAVVEATRNWMVMYDWLDDICDDVVLAHPLKVKAIADAKIKTDKIDATVLAHLLRADLVPEAWAPSERSRDLRVALRERMFYVRLRTMTKNRIVTVFDRYPEETAQLKKLGDLFGKAGRVQLAQVNVSEIDRIQIDRGLAFIGDIDMRIKQSEATIRAMTKANANVKLLKTIPGIGEFFARLIDAEIDDISRFRQPKKLAAYAGLVPSTYSSGGKTFHGKIIKQGNKWLRWAFVEAVTPAIASDPQLRAQYEHLKIKGVNKARVAIARKLLTIAFQILRDQRAYEPRGTATMEGASTISRLS

SEQ ID NO: 67397 - protein, 380 aa, unidentified
MSAKTTRREEYSEAKGTLYMGLELGSGQWRLGFTTGLGQKARERSIGARDVTALKREIGRAKERFHLASSARVVSCYEAGRDGFWLHRLLVEAGIDNVIVDSASIEVNRRAKRVKTDALDVRKLSAMLVRYDEGERKVWSVVRVPTADEEDNRHLHRELETLKAERTRLTNRIHGLLAGQGVRVEVKKDLLEQLKAVRLYNGRPLPPALHCRLVREWARIELIDAQIRELEADRAELVKEWEGPEAEKIRQLLQLRAIGINSAWLFVLEFFAWRRFSNRRQVGSLAGLTPTPYQSGQMRRDQGISKAGQKLVRHLAIEIAWGWLRFQPQSRLTLWYQERFGGGGSRLRRIGIVALARKLLVALWRYLETGVVPEGARLKA

SEQ ID NO: 67398 - protein, 350 aa, unidentified
MDGSYDGRQIVGMDLHRRRSVLVRMTGDGRRLDTARIENSPAGLRAEIAKAGDCPKVVLEATYGWYWAADALAEAGAEVHLAHPLGVKAFSYRRVKNDEKDAGDLADLLRMGRLPEAWIAPAEIRELRELTRYRIKLVHLRTSCKDQVHAILAKLGVPVTCTDIFGAWGNAWLDDLRLPQPYAGKLASLRGLAAQLTNEITLLEKVIADLLEHHDAYHALQALPGIGKVLAAVIVAEIGDITRFRRPGQLCSWAGLTPRHRESDLKIARGHITKQGSKILRWAMVEAIQRQPAGNPVRQRKDAIIARRGKEARNIAKVAAARQLLTCVFYAMRDGQVRSLAARAAAQEAA

SEQ ID NO: 67399 - protein, 427 aa, unidentified
MPYKIAGIDVHKRMLHVVVSDVQVDGEYDFTRRVFGSLPEALRSLAAWLVEQQVEEVVMESTAQYWKPVWGTLERYWKRICQTREGTLATSGTLHLALALSNRGRRGRKKDFRDAERLVKRLVAHELTLSFVPDVEQRLWRTVVRTKYQLTRNRVQLQNRLEALLEEAHIKLSSLVSDLLGASARRMLEAIAGGETNRETLAALADRGLRATQEQLQDALGVCQELNPVYRRLIKMVLDEVASIDKRIDQLNQEMASLLRPHEDQVKRLAEVPGLGVDSAQQIVAEVGATAATFPSEKHLSSWVGACPGDEESAEVNHSRRSPQGNRHMRRILNQAANAAAKHKGSIFQMLYGRYVPRLGHNQTIGIIAHKLCRLVWKILHRGIRYEERGPEVSKASKQKRTRKMIRQLRRLGYRIEPSPSQSAITA

SEQ ID NO: 67400 - protein, 353 aa, unidentified
MKTYYVGMDVHRASIVIVVMNGAGKIVMQSVIETGAERVRGYLKQLRGKVYVTFEEGTQANWLHEVVRPLVTEVVVCDPRHNKLMQSGNKSDRVDAQKLAEVLRLGSLKAVYHGDNGVRALKELVRSYDCLVSDTTRVMNRLKAIYRGRAIGCAGHEIYCQDRRQQWLEKLRERGAKQRASCLYQQLAALKPLRHEAKRLMVKEARRQLAYPWLLSVPQFGSVSVAQLLAIVGTPHRFRSKRQFWTYIGLAVVTRTTADHEVVNGVLRRSQRPVSTRGLNRNHNHLLKRVFKNAANGACHGGPFKAAYELRVTQGMVPSLARLTIARQLAAITLAVWKRGQQFNPERMKQQAA

SEQ ID NO: 67401 - protein, 411 aa, unidentified
MKVTYQTCCGVDVHKSFFVATIVKTTGGIEPSYQKKCFSTFNNSILEFKQWLLDNDCHDVCMESTGKYWVPVFNLLEDEINVVIANPKWVKAVKGNKDDTKDSKWIGDLFRLGLVKGSYIPCKIVRILREYTRYRYKLVSCRSSEKNRYQNALTVCNVALDSVVSDIFGKSSTSIIDCLLEQSGTSINHEEIASNLLRSLKSKEDAVIESIEGYQMTDAQKYRMRLVRAHMDYITAEINDVDKIIENMISSNPDFENAVQFLCTIPGVKRDSAITVISEIGTDMSQFSSSKHLCCWAGLTPGSNESAGKKNSVRITRAGVYLKPALVQCTHAAVKSDKSPYYKKKYESLVKRRGKKRAIIAIARMILTAIYQMLSTGEQWNPSDLYKIDMPEALVEKQKTKAIKQAKKLLQ

SEQ ID NO: 67402 - protein, 341 aa, unidentified
MEIDILGIDLAKRVFQLHGADRRGQAMHRSKVSRPALMETIRQLRPRTIAMEACSSAHHWARQFQALGIEVQLISPHYVKPFVKTNKNDRNDAEAIVEAACRPSMNFVHVKSVEQQDIQAVHRVRELLVHQRTALINQARGLLAERGIIIAKSPAAFKRSIPDILSEPDGELTTFCQSLLTMLLEQFRVIENQIGRAEDWITSFMKNSALCQRLATIPGVGAITATAIVAAVGDAKAFKNGRHLAAWIGLVPRQHSSGGKNRLLGISKRGDGYLRTLLIHGARSVLIRVACKSDARSRWLQELIARRGYNRATVALANKNARIIQAMLSHETNYCPAMVAA

SEQ ID NO: 67403 - protein, 342 aa, unidentified
MKIIGCDFHPSFQQIAMVDTETGEQTERRVTLVEAAEFYRELPGPVRVGMEACGNTLWFERLLAELGHELWLGDAGRIRATEVRKQKTDRRDAELLLRLMLENRFPRLWIPSLEQRDLRQLLIHRHKLVGMRRQVKNQLQHLALNQGVQQKRKLWTQAGRKLLEELPLTGWTARRREELLKLLDGLDCSIGELDDAVKEAAEKDPVAQLLDRHPGVGPITALAFAVTLGDIHRFAHSRQVVSYLGLNPSEHSSGGRQRMGKISKQGNAMVRSLLVEAGQSAARLVPELKRAYQRLKHRKHSSVAKVMVARKLAVRLYWMWKTQQPSTATRMQGSPSHPVAAV

SEQ ID NO: 67404 - protein, 355 aa, unidentified
MNDAKYIGMDVHQATISVAVRNSRGNLVMEAILETKAETILQFIRGLRGSLYVAFEEGTWAAWLHDLLQPHVARVLASDPRKNALLKAGNKSDRIDARKLSELLYLNKLSPVYHGEQGIRTLKELARSYITITRDLTRVMSRLKAIYRGWGIPCAGQQVYAPRYRAEWLSKISEAGVRRRAELYYQQFDVLAALRQGTRRELLAEARKHPAMRLLRQIPAIGPIRAALLIALIQTPNRFRTKRQLWAYSGLALRTYTSGEYRFVAGQLKRSKKVLAVRGLNINHNHDLKNIFKGAATRAAATAGPLQGFYQACVARGVKPHLARLTLARKIASITLLVWKKGARFDAEHLKQQAA

SEQ ID NO: 67405 - protein, 370 aa, unidentified
MLDTTTFVGLDVHARSIKAVSLDVMTGEVRCATFGYDAGAVAEWVRSVDPKARCVYESGVTGFDLQKRLSGLGVDCVVGAVSKMIKPSADRRRKNDRNDAEFLARMLSVGNVVEVWVPDDECEAARDLTRALEDARDDLSRAKQRLSKFLLRHGLAFDERTPTGRRKGNWTRAHWSWIESIRFAEGADNDVLAYYVDAVRRAAEEKARLEGLVEAEARKPRWRRRVDSLRCLKGVDTATAADLVFEAGEFSRFRNARSFAAWVGLTPSEHSSGESDRRGAITKAGNKHLRKALVEAAWHYLTCSGRPKDLAKGQAPDRGARRHAAKGVRRLVERREALLARGVHGNKANVATARELACWVWAVGLMAEEA

SEQ ID NO: 67406 - protein, 417 aa, unidentified
MEGLSPVHRRVAGIDVHRMVHAVTVLVEQPDGSISRSSREFGGFKRDCRALAAWLVELGVELVVMESTGIYWKSVHAHLERAGINAWVVNAHFIKHVPGRKTDMADSEWLAVLARFGLVRASFIPPQDLRELRLVSRYRRKLNAMRASELNRLHKFLDDAGIKLGAVVSDINGVSAREMVQGLIEGQAIDTLLGHARGVLKRKNEALAASLEGDLSARHLFVLKHIHAHLGALQRELAEIDEYLLQAMQPYAWAHALLQTIPGIDEIAAALILIEIGEDMARFGSPERLASWAALCPGNNESAGKRKSGRTRHGNNVIRYILCECANAARMTKSTLAAKYRSLMVRKSHKKAIVAIAHKMIRVIYLLLTRKQPYLDQHIDYAAMSAKKNAPRWIKQLKAIGKWPSKSSSSTPATAST

SEQ ID NO: 67407 - protein, 343 aa, unidentified
MYVGLDVHKKYCYYAMVDGRGTVVKKDRFRTTVEELEEFASALPQGDQVAIEASASGCFVYEQLDEQGIAVHLAHPTMVRPFAKKHVKTDKVDAIVLAQLLRMDYLPESYVPDEAMRDLRTVVRHRAGLVRIRTSLKNRVHALLTMEGVQPPAVSDLFGKKGREFLETVKIRESRRLVLDNYLKVLDELNERITGVEQFLEEKAESTEEVAWLRTIPGIGLHNAVLILSELGEVSRFSRPQGLVCYAGLAPKVAQSGDQVRYGHINRQSNGFLRWAFVQSAWSAVLSSTPNRFQLIYQKVKARRGAKIAIVATARHLAESVYWVLTKQEAYKETKARIASSSP

SEQ ID NO: 67408 - protein, 322 aa, unidentified
MQYIGIDVSKATFVVAYSSDKGGEIRTFNNTTTGIKQFIGALPKDSSIHCVMEATGNYSAMLLYLLNVAGIAVSMENPLKIKNFARAMLSTVKTDKIDARLIALYGEKMNPQPFKIQGEAILRLRQKRTVIRQLTKQITAMSNLRGSLACLPVPDKGATHTVDETIEFLEKRRDRLQSELTDLVEVEFSRQLALLTTIKGIGITLATALIITTGGFTYFQNAKQVSRYLGICPTYEQSGTSVNIRGHINRNGDAYTRGLLYVAAWTASRFNTKCGETYTRLRQNGKPGKLAMIAVANKLVRQAFAVVTHDKEYVDGFVSNRP

SEQ ID NO: 67409 - protein, 456 aa, unidentified
MLRIIGIDLAVTAVHKAVILDPVSNKFIGKQISFRAKPSELDRLLVRAKSGVKEPVEIVAMMEATGMAWYPVGVYLHQRGVKVYRVNGRQTKDLRQVYWKHAGSDRIDSRVLTHLYQVASDRLTRWLPPCGETLALQRACREFVRWREQDTAIQNRLKSYDHWAWGVLTKLIPAQAQAWMRRNWYNPWRVQQAGEKQLQEAWIAANPNKAVETNWIARWVARAEEMTQLFGSEKMVGYDALQETMERNLDLQAHGQTAQSRLSKEEIQPRYQSLFPERRLETVTGIGPDSAAIYMAFIQSIDRFPTIEQFRKWTGMVPGSHQSGQFESKGLSLTQAGPNIIKATLYLNAQVARQWDVQMAAIYYTQMVTYGKHHTQAVCACASHLASRIYAVLTQNRDYQLRDTDNNPITRQASRRLCLTRYHVPEEIRQRNTVRHRRQQAQTQVEQRYQRRQRKN

SEQ ID NO: 67410 - protein, 397 aa, unidentified
MYIVGIDIAKRKHEAAVIDGEGTVIIKPFSFTNNCSGYNRLLAMLAKAKLPLDEVSFAMEATGHYWLALFTRLQKEGFRVQVINPVQTNSIRSFYIRQAKTDPRDALLIAEVIRFGHFSESTLHPENIYELRELCRGRHAIVSMQADVKRKVVALLDQVFPEYETAFTNMFSDTSMAILQTCPTPKELSEIPLEELCHLIEVSSHKRFRMAKAQELQALARNSFGFAMAGDVFSTMIRLYAKHLDFLKQQVREMDRKIAEIMDTLDTPITTITGIGPTLGAYILSEIGDISRFSSAAKLAAYAGIDPTMRQSGEYNGVRNRMSKRGSPYLRHAIWLAASSAVLHDPALKLYFQKKRDEGKPYMASVGHACRKMVSIIYAVMRGNKAYTPCIPNEISA

SEQ ID NO: 67411 - protein, 337 aa, unidentified
MKYSGIDLHSNNSVVVVSDEADRVLVRRRLPNDAAAILAVLAAHREELVGVVVESTYNWYWLVDALQADGYRVHLANPAAIKRYEGLKHSGDEDDAAYLAQLLRLEILPRGYICPPAARAVRDLARKRVQLVRSRTAQVLSVENMLSRQTGAGMRSYAVQRLTAQAVASFGFHPDVERALCANVAVIQTLNREIDKLEQRLHQCVRWRPEFRLLTSVPGIGQTLATLIMLEVGTIERFAAVGNFASYARCVDSARMSNGKKKGQGNVKNGNAYLAWAFVEAANFARRYCVEAQHFYERKKARTNGVVATKALAHKLARACYHMLKENQPCDVKRCFA

SEQ ID NO: 67412 - protein, 408 aa, unidentified
MFKKTSPSSNSRRRVRGTGSVASRHADAATLPRPIAPGCANTVAKPGPAGSRVLQLEQPTETEPPDTTRPPISHWQERVTVTPATSTTVASQTPPVFVGIDLAKAKFDLGTNLDSRITTFAYTPAGVTHAVQLVASVKPTIVVLEATGGLERKLAAALLDAGLPVAVVNPRHVRHFAIGLRISAKTDPIDTRVLVRYAEQAHPRLLEKRSENHTELEALVARRRQLIDGRTQEICRLEQVESKFARQSIKTLLQAIDRQIERMDKQIDKLIKSDDDLSGKKQILQSVPGVGRVASSTLIALVPELGTIGHKQLSALIGVAPYNHDSGAFKGKRSFFGGRATVRSVLYMAALSARTNNPIIKAFADQLEERGKPFKVVIVACMRKLLTILNALVKRKQSWNPEKLNLAT

SEQ ID NO: 67413 - protein, 347 aa, unidentified
MRFYNRQHRHYCGIDLHVKTMYVCILDGTGQVLVHRNVPSTPEALLQVVAPYRDDLVVAAECMFTWYWLADVCAAERIAFVLGHALAMKAIHGGKAKNDKLDSFKIASLLRGGLLPQAYVYPAAMRATRDLIRRRLHLVRKRGQLLAHIQNTRAQYNLPAFGRRLAYPANREGVRERFADPSVRKSIDVDLTLVAQYDTLITDLELTIVREAKRHDADAFHRLRSVPGIGKVLALTILYEIHDITHFDRVQEFASYARLVKGQKQSGGKTLGTSGAKMGNVHLKWAFSEAAVLFLRHTKDGKKLLAAIEKKHGKGKALSILAHKIGRAVFYMLARGTVFSTDKFLAA

SEQ ID NO: 67414 - protein, 409 aa, unidentified
MMKQNIIFGIDVSSKSSTVCVVIDRIKQGETFKITNDSFGYQDLLDRLNQYLITPLVVFEATGVYSLSLQAFLEDYHIKYLKLNPLKAKKLMDNNLRHNKTDKVDAYRLALIQFNAPQKLRAPQPKEYHELQNASRYYEELTQALIINKNQLHRNLQSTFPQIESIFSTSSGRVYWTIVSLFPHAQYVLNHNENQVFQSLLAISGIGRQRAHYLTTRLYALARQAYPYDNESSITIRAIQRNIANLLSLSAERDNVINYMEKLAMQANARSLTIYESIPGIAKTTAVRLVAELGDLRRFDTSAQIDAFVGIDPGRYQSGEKDSHLGITKHGNHLARKILYRTITQMETVKATQPCHITDYYDKKKRSSNSRGYKKIAIASVHKLIRTMFALIKHDQLYDYNVATHNQRL

SEQ ID NO: 67415 - protein, 349 aa, unidentified
MMVVGVDPHKQTHTAVAADELGRKKAQRTVRARRDGHRELIAWARELAPGRLWAVEDVRHVAGGLIRELLAAGEQVVFVPPKLMAGERRGGRERGKSDPIDALAIARLALREGAGLPAARLDEQVLEVRRLTDYRDDLVAERTRVVNRLRWMVHDLAPELAPAPRSLGSDRARTRLEAGLRALPASAGQRVALSQLARITALSAEITQLEKDLAALVTVLAPELLATLGVAVITAAKILGETGDIRRFRSPAAFARHNGTAPVPASSGTAHDGPHRLNRGGNRQLNAALHRIAVVQARCHSGATALLERRGQDKHETRKASLRALKRHLSDVIYRALNADAWRLGQPAA

SEQ ID NO: 67416 - protein, 411 aa, unidentified
MDVFCGIDWAEDHHDVAVVDRDGRLLASQRISDDAAGLARLLELLAGHGDSPDDPVPVAIETPRGLLVACLRATGRTVYPVNPMAVARYRDRHSVAGRKSDKGDAAVLANVLRTDRHAHRPLPADSELAQAIAVLARAQQDAVWDRTAAHNKLRSHLREYFPGFLAAFAAARDGIMRPEARVILAAAPAPADAAKLTVAQLRALLRKAGRSRGIDAEAQRLHETLRKEQMRQLPLVEQAMGRQTLAPLRQLEAACASASDLEQAAAESFNQHPDAGIITSFPGIGTLTGARVLAETGDDRSRFQDARGLKAYAGSAPITRASGKTRSVTHRKVKNNRLAAAGYTWAFAALTASPGARAHYDRRRDAGDRHTAAQRNLFNRLLGCLHHCLATGQHYDETTAFPGQATAKTAA

SEQ ID NO: 67417 - protein, 459 aa, unidentified
MNKQESARDSFNTNLPLININAAGIDIGADRHWVSVPIGRDSENVRSFACFTADLYAMADWLHQCGVTTVAMESTGVYWLPVYEVLESRGLEVKLVNAHYVKTVPGRKTDVLDCQWLQQLHTYGLLAGSFRPEDQICVLRSYIRQRDNLIKSTCVHVQRMQKALTEMNVQLHRVISDITGTTGMAIIRAIVAGERDPKKLAAFKDGRIKASSLEIASALTGNYRPELVFILQQELQLYEFYQQQIATCDFQIEQCLISFADKVDVTKKTLPKPKRRGKKQPGNAPQFDLRTHLYRISGVDFTQINGFGALTVLILLSELGLDPTRFPTVKHFTSWLGLCPGSRITGGKVKSSKTRPVVNRAANAFRMAAQTLCRSHSALGAYYRRMQARLGAPKAITAAAHKLARLFYRLWTSGGAYTDPGIDAYEQQYRDRTVKYLQKKAHTLGFNLVAQSTATECVS

SEQ ID NO: 67418 - protein, 339 aa, unidentified
MQAIMIGLDIAKNVFQVHGVDARGQVVLRKRLRRGQVERFFAALPPAVVGLEACGGSHHWARVLQGLGHEVRLMPAAYVKPYVKRNKTDGRDAEAICEAMQRPTMRFVAVKSREQQAVLAVHRTRELLVRQRTMAANVLRAAFAEFGVVAPQGRKGLATLMAELPAPDAIPEPAHAALASLARHWHALDADIRDLERRIVQGVRENEAARRLMAIPGIGPIGASAIVATVPDARIFRSGRGFAAWLGLTPRQNNSGGKRRSGGISKQGQRSLRTLLILGASAHLRHERARGAKDPWLAGLLARRPVKVAVVARAAKTARIVWAMLTKGEEYRAAVAEAA

SEQ ID NO: 67419 - protein, 342 aa, unidentified
MDHFAGLDVSVKETSVCIVDDTGKIVREVKVASEPEALLAVLKNRAYHFKRIGLEAGPLSQWLFSALAEAELPVICVETRHMQAVLKAQINKTDRNDARGIAQMIRVGLYRPVHVKTLRSQKLRMLLTHRKLLQSKAIAIENDLRATLRNFGLKVGMVGTVKFEARIKELVENQPDLASLVEPLLIVRRALREQIVILHRRLLAIVRDDEVCRRLMTIPGVGPVVSLTYRATVDVPARFRKSKAVGAVFGLTCSKYQSGEVDRSGSISRCGDEMMRVMLYEAAQSMLRSKKWSWLKAWAMQIARRRGMKKAIVALARRLAVIMHRIWVDGTEFRWTREAATA

SEQ ID NO: 67420 - protein, 313 aa, unidentified
MPSGLCVGMDVGKRALDVNAYGSAEVRRFSNAVEGWGKLIAWLKELAPALVVMEASGGYERNAFKALAEAGLAVAVVNPQRVRKFAQAMGILAKTDTIDARVIAHFADVVRPTPQLPPTEDEERLAALVERRRQLVVNLTAKKNRLSTCLASLKDDIQEHIEYLEEHILKLEDEIQALIVLDPDRQARAERIDSVPGIGPVTASTMVAELPELGKLNRQQIAALVGVAPFNKDSGKKHGKRKTTGGRAGVRRTLYLATLSASIHNPVIRPHYQSLLKRGKEKKVALVACMRKMLTIVNAMVRKGEMWQYSQNP

SEQ ID NO: 67421 - protein, 404 aa, unidentified
MDVVFPYCCGLDVHKNSVVACVITPDEKEIRTFGTMTRDLLNLADWLTSKGCTHVAMESTGVYWKPIYNILEQYQLELLVVNAKHIKAVPGRKTDVKDAEWIADLLRHGLLKGSYIPDREQRELRELVGYRKSLVEERAREVNRIQKTLEGAGIKLSSVATDVVGVSGRAMIEGIISGIDDPAVLADFAQKKLKKKKEQLEQALFGLVGKHQRLLLAAQLRHIDYLDQEIARLDQEIEERMRPFEAELALLDTIPGVGRRTSQVILACIGADMSRFPSAAHLSSWAGVAPGNNESAGKRKSGKTTKGNTLLHTTLIQAARAASRTKNTYLSALYHRVAARRGANRAAVAVAHSILVSVYYMLIRRVPYHDLGGDYFEKRNSKAVVNRAVKQLEQLGYRVSIEVA

SEQ ID NO: 67422 - protein, 393 aa, unidentified
MICVGIDVAKDKHDCFILSSEGEALADVFTIQNNAEGFDRLLQTIRRCTRPEDKIKVGLEATGHYSYNILGFLLDKGLPTYVINPLHTNLYRKSLSLRKTKTDRVDARTIAAMLMSDVDLKSYTDTVYHNEELKSLTRYRFDKVRERAKLKQSVSRLVTILFPELEKLVSSLHSASVYALLSEFPGAKQISSTHMTHLKAVLKNASQGRYGQEMAETIRNAARSSVGSVMPAKSLELQHTIRLIRELDAEIEDIETAIQAIVDEMQSPITTIPGMGVRMGAVILAEIGDFSRFDSPDKILAYAGMSPSTYQSGQLSLSGAYSHMEKRGSRYLRYALYNATKHVCHWDPTFAAYLAKKRAEGKHYNVALSHAAKKLVRLIFAMEKSQRPYCAAA

SEQ ID NO: 67423 - protein, 378 aa, unidentified
MTNATVATTSVVSAKATLPTNAGAGTPRLTVGIDLGDRHSHLCVLDSDGAILEQSRLQTTPAAFRQRFAAMPPARIAIEAGTHSPWVNALLTELGHEVLVANPRKLRAIYDNDNKSDHVDAEQLARFARMDPKLLSPIAHRGMATRADLAILRSRSALVDSRTQLINHVRGSIKPFGVRLPASSTPTFARKAAWKIPRELRRALVPILRTIADLTTRIVEFERRIEQIATERYPETIKLRKVNGVGAITSLTFVLTLEDPKRFTKSRAVGAFLGLRPGRNQSGKRDPELHITKAGDRDLRRLLVQSAQYILGPFGSDCDLRRFGLALAARGNKSAKKRALIAVARKLAVLLHRLWLSPIDYDPLRQAEGRNLSRRRRA

SEQ ID NO: 67424 - protein, 345 aa, unidentified
MIIGCDFHPSWQQIAWLDSETGETGERKLVHASGDAKAFYEQLGAPAWIGMEATGNSQWFIELVQDLGHEIWIGDAAQIRASYVRKQKTDKRDAAHILKLVVEGRFPRLWTPDREQRDLRQLVLHRHKLVEIRSRVKNELQHLSLNKGMQRKAKLWSQAGQKLLRELPLKPWAACRREDLLGLLALLNQQIGTLDQAVQQAADQHPQAKLLMTQPGVGPNTALAFVLTIGDVSRFPRSQQVASYVGLIPREESSGGRQKLGAISKQGNRLLRSLLVEAAQIAVRYDPGLRKQYLHRCHQKPKGVAKVAAARKLAVRLYWMLRTEKPYPEIVRIESSPRVALVGAS

SEQ ID NO: 67425 - protein, 342 aa, unidentified
MAYFAGLDVSVKETRVCIVDDAGKIVREARVASEPDALLQMLTIYRFKRIGLEAGPLSQWLYSVLAEAGLPVICVETRHMRAMLKAQINKTDRNDARGIAQMMRAGLYRPVHVKTLRSQKLRMLLTHRKLLQSKAIAIENDLRATLRNFGLKVGMIGTVKFETRIRELVENLPDLAVLVEPLLIVRRVVREQLGILHRRLLAIVRDDEVCRRLMTTPGVGPVVALTYRATVDVPARFRKSKAVGAVFGLTCAKYQSGEVDRNGRISRCGDEMMRVMLYEAAQSMLRSKKWSWLKAWAMQIARRRGMKKAIVALARRLAVIMHRIWVDGTEFRWTREQATAAA

SEQ ID NO: 67426 - protein, 431 aa, unidentified
MHHEPAPGFALVIGLDRSDQKVDLCQLGGSQAATHCSTVSTSPEALLSWVVNLRKDHPVGRIALCLEAPAGNLLAFFATHAPWLELYPVNPLTLKRFRETFVLSRANDDGKDALYLARLLQSHSDQLRRWRTEDPATARLQQLVAHRRAVIDERTALTNRLKALLKGYFPQALGLCGEELWRPLALAFLRRWPSLQSLRKTRPETLRSFYYLHGSRSLKLIEHRLALIQNAVALSEEPAVVECFSLRVGLVVRQLAALLPVVARYDRQIAQNFMEHPDAPIFSSLPGAGQVLAPRLLAALGSQRERYPTAAALQSATAVAPVTRQSGGKRHVSRRRHGALFLRQSFHEWARESVRHSVWAKAYYEQQRAKGCPHHVAVRSLAFKWQRIIWRCWQNRTPYSEEVYLNALKRAASPLASKLTPPLPPKITNNN

SEQ ID NO: 67427 - protein, 341 aa, unidentified
MKKNLFFVGLDISAADFAASIYQTPGQVMKTKAAIPNNPKGFDMLLLWLKDHHIDKTNSRICMEATGVYSQAVAYYLFFLGFPVSVEPPLKVKRAFDPVGHKTDPVDSKQIAEYAYRYQDELTSWQPREEILEKIRQLLVVREQFTKQKVALKNAMHAYARQHVQVALIKKAHQETLAQIEKQIARIDQELGKLIKQDPSIFQKANNLHSIPGYGMLLTAQLLVITENFTKIQQHKRLAAFIGIVPYQHQSGTSVFRKPRIRHFGPGPIRKLLRLAAQSVATHDVTFRHYYLRKLAQGKEKGLVLNNIANKLLKVACAMIQNNTRYIKEHRSIHPMYLKSA

SEQ ID NO: 67428 - protein, 484 aa, unidentified
MELKMGKSAGLSLECIELNAAGIDVGATEIYVAVPPDRDPQPVRRFATFTADLRAMAAWLVQCRVTTVAMESTGVYWIPPYEILEQAGIRVCLVNSKHVKHVPGRKSDVQDCQWLQYLHAVGLLHASFRPDEKICAIRSLSRHRASLIENAAGHVQHMQKALTQMNLQIHHVLSDITGLSGMAILEAIVAGERDAAKLAALCHTRVRSDQQTVIKSLVGNYRSEHLFTLKQSLTAYKHYRELMAECDREIERLTRQLNSRIDPPQKEPMPPADLRFRKRSKNQFHCDMSSELTRVLGVDLTTIPGISALTAHTLLSEIGSDLSPFPNAAAFASWLALCPANKKSGGKVLSSRTRQTNSRASRALRLAAQTLARNRSHLGNFYRSMRARLGAPPAITATAHKLARIIYHLLTTGQPYDESVFLQEGKKQAQRNEKRLRKQAKALGFQLVPIADLPSKPHLPYSGMWPLRTPRKTPHPSPHFLPHP

SEQ ID NO: 67429 - protein, 412 aa, unidentified
MTATNQFAAHVGLDWADKKHDVCVQFKNGERTFYVIEHTPEALDVWLTELHQKVKGRIAIAVELKKGPVVYALQKYPFITVFPVHALSLARYRQAFSPSGAKDDQQDAELALELMLRYPQKIKAIEPDNADIRLLQQLVEQRRQLVEDKRRFVNRIINTLKQYYPQPLEWFSHRGSLLLCELIIRWPSLQQLKRARRDTIRNFLNAKGGRAMALTEQRVASIDNAIPLTTDPSVIEANALMATALATQIKVVSEIIKTYDERIEALFDTLPDAELFKSLPGMGPCMGPRMLAALGDNRDRFNSAEEIQNYAGIAPVTERSGQKSWVHWRWQCAKFVRQTFVEWAAKTVNSSYWARLYYQGLREKGKSHQSAIRALAFKWIRIIYRCWKARTQYDEAKYLLALEARHSPLLKP

SEQ ID NO: 67430 - protein, 425 aa, unidentified
MARNPSERSVPCMFSPVKAKEGRSAEGDLREWAIKLVGGGRLRREPGFVAEVEAGFTGKPTGPASPDGADGERPICALRLDLVEEQRVPPSVLVKLEPLTEPSSSHCKMETNQPEITNRTYVGLDVSKDRLDYAVDGHRCHHVPNNEIGLQKLTAELIRLDPPVRVVCEATGGYERAAVGALLMAGLEVCVVVPGRVRAFAQAEGLLAKTDKLDARLLKRFGEKVRPRLHVPMDEAAATLRELLDYRRQTSDQLVAVRNRMELAGTVLRPLLEAQARFLEGKLAEAERLIRNHIDRDDNLRGKTERLRQLKGVGPVLAATLLAYVPELGQIEDKSLSALVGVAPFARDSGNTSRKRHVRGGRAVVRHVLYMAAVAATRYNRLLGEFYQRLRAAGKPASVALVAVMRKMLGVLNRLIADPHFTLAR

SEQ ID NO: 67431 - protein, 320 aa, unidentified
MKTQETQVVEFEQIVERGCGMDVHKETVVATVSGTGIKQETRTFNTFTSSLIELSEWLKSLGVTHAAMESTGVYWKPVFNVLEEDFEIILVNARHIKNVPGHKTDKKDSKWIAKLLLSGLLKGSFIPPKEIRELRDLFRYKRKLTGHISSEKNRLQKILEDANIKLSSVVSDTFGVSSTKIIDALIEGKNDIDELVKLCHGRLNNKKDALKEALVGKLTEHHKFMLRTIKKSIVNIEEIVAEVEKQIDEQTKCYQIEMELLQTIPGVGKGTALGIIAEIGVDMNIFPNEQHLASWAGMSPGNNESAGKKKVQEQRTEINT

SEQ ID NO: 67432 - protein, 400 aa, unidentified
MMTPDDIDVWVGLDVGKSAHHAHALDHDGNTLYDKPLKQDEKAIRTMLGKLSKHGRVLLVVDQPNTIGSLPLTVARNMGIAVAYLPGTAMRRTAQLLPGDAKTDRRDAHVIAWAALKLPETLRDAGPDDETLAALKLLAGHDEDLAHESTRHVNRLRSLLLQTHPAFERALKGERITRDATLALLERYGGPMGVKRAGIEDVKDWAKSNGLRAGRIIDDMFKAIGEQTVTVPGTLMAETIIPSIAHDIKTIRDRRREVDRQVEKLLEDHPLLTVLTSMPGTGVRTASNILLGIGGDIANFKSSAHLAAYAGISPVTGQSGTSIKGERPSRRGNKRLKNALWQTAFVASTKHPPSVAYYKRKREQGKHHNAAIICLARRRCDVIYSMLKNGTLYQEPALVA

SEQ ID NO: 67433 - protein, 391 aa, unidentified
MIYVGIDVAKDKHDCFIVSSEGEVLADAFIIPNTMDGFHYLLQRIRHCTAPQDKIKVGLEATGHYSYNLLGFLLDNGLTTYVLNPLRTNLYRKSLSLRKTKTDRVDARTIASMLLSDAGLKPYTDTAYHNEELKSLTRYRFDKVKERAKLKSSIARLVCILFPELEKLVPSLHIASVYALLEEFPGAKQVANTHLTRLKALLETASNGHYKRDMALEIRNAAKNSIGSQMPAKSLELQHTIRLIRELDREIDEIEEQIQSIMDELHSPITTIPGLGFRMAAMILAEVGDFTRFDSPDKLLAYAGMSPSTYQSGQLKNCYPHMEKRGSRYLRYALYNATKYVCHWDPTFADYLAKKRAEGKHYNIAISHAAKKLVRLIFAMEKSRQPYCSAA

SEQ ID NO: 67434 - protein, 377 aa, unidentified
MKNVRFVGLDVHAETIAVAVAEVGGEVRSLGVIPNRAESVRRLMGKLGKPESLRVCYEAGPTGYVLYWQLSELGVHCEVVAPTLVPVKAGDRVKTDRRDAEKLARCYRAGDLTAVWVPDAAHEALRDLVRARLAAKRDQLRARHRLGKFLLRQGRRAPLGTKAWTGKYLSWVKQQHFEHAAQEATLLDYLHEVEHAAGRIVRLEHGIDTALESVPESLRTVIEGLQSLRGVAKISAVTLVAELGQLSRFEHPRQLMGYAGIVSREHSSGERVRRGSISKAGNAHLGRIVTEAAWAYRHRPAVGPGLAARQSGQSEAVKAIAWRAQHRLHGRYRALLARGKTKQKVITAVGRELLGFIWAIGVELERTHTTQQFKRAA

SEQ ID NO: 67435 - protein, 322 aa, unidentified
MEMLSFGGIDVSKDRLDITVLPDEQCSSVSNDAAGWAELIEQLRGSSITAIGVEASGGYERGVVRALLAAGMSVRQINPFKLRQFAKASGILAKNDRLDARMIASFVAIMPTRPAQRQTPMIEQLAAMLTVRRQLSDHKVATENASRLLEDAMLQRLSRRRVARLTADIDLLDQRLVEIVTADPALAHRFRLLTSMPGVGAVLACTLIALLPELGQMSRKQVAALVGLAPYDFDSGKLKGRRCIWGGRARVRHVLYMAALSASNWNPALKAFHDRLEATGKKPKVVIVAVMRKMITTLNAMLRDGTAWVDRYSGRRSASTAR

SEQ ID NO: 67436 - protein, 469 aa, unidentified
MGKRRRREPQEKAGLPPQFEQVNLNAAGIDIGSEEHWVAVPAGRDPDGQDVRCFGAFTADLQALADWLERCGIDTVAMESTGVYWIPLYELLESRGFEVCLVNPSHLKNVPGRKTDVVDCQWSQVLHTFGLLRASFRPEEEICVLRGYHRQRQMLVEYRSHHIQHMQKALDLMNVKLHKVVADITGTTGMAIIRAILVGERDSVALARLRDQRCKSPAEVIAKSLVGNWRAEHLFALEQAVTLYDTYTEQLAACDAQVEAHLKTLEDRSGGEQPPAPSRKPTTNRSLPAFDARSELYRMAGVDLTRIDGIAATTALGLVAEIGIDMSPWRTEKHFCSWLTLCPGNKTSGGKRLSGKTRRSSNRAKELFRLAARSLERSQSALGAFYRRMKARLGAPKAITATAHKLARIFYNMLKHGTEYVDVGQHYYETRYRERAVQGLTRRARALGYKLIEVAQPPASEAAQRVPEG

SEQ ID NO: 67437 - protein, 346 aa, unidentified
MKHSVGLDVSVKETAICIVDEAGKVVREGKVATEPQAIIAFLSSAGVEYARIGLEAGPLSQWLVNGLSEAGLPVICVETRHMKAVLKAQQVNKSDRNDARGIAQMMRVGLYKPVHVKTLASQQARMLLTSRQLLRDKLQDMENELRGTLRNFGLKVGVVSPGHFEARIKELVAGQPPLEMIVVPLLTVRRVVREQLAKLDKMVLDQVRDDKLCRRLMTVPGVGPIVALTFRATVDQAQRFARSKTVGAHFGLAPRRFQSGERDYDGRVSKCGDAMMRTALYEAAQVLLTRTQTWSWLKAWGMQVARRRGAKKAIVALARRLAVVMHRMWVDGTEFRWRKEADTAAT

SEQ ID NO: 67438 - protein, 330 aa, unidentified
MENCIGIDVSKASINIHISENGQDLQLENSIKGFKTLYSKLKKIYKKEIDNIVYIFEPTGSYSEALRKYCSHQQIKCFIINPKQFSNYAKALGVEVKNDVEDARVLSKALHIAKDGQVTVPTYDEDVERIKELMSYYKFTTKQTTQQKNHLESLKSKDGDAFAIRDLKKSIKSSKEKESRIIEQIQTIIDTNAQYKNNYENIISIIGIGQIGAIALLHLFLKYPEANQRQITSLTGLNPIYRQSGTSIQSGYRIAKTGAKVYRGSLFMAAMSAIRYDANFRAFYERLKANGKHTTQAQISVMRKLIITAHSLYKNNRKYDVDLNTKRLGL

SEQ ID NO: 67439 - protein, 337 aa, unidentified
MKYCGIDLHWNNSVVLVSDEKDRIVLQKRLPNELGQIQAALEPHRDELVGVVVESTFNWYWLVDGLMDAGYRVHLAHPSAIKKYEGLKYSGDFADAGYLAQLLRLGLLAEGYIYPREERAVRDLSRKRLQLVRYRTAQVLSIENILARQTGARLSSEAVKRLTAAQVEELGFAPDVALAVEANRAVSQALAQQIAALEQRLKERVRLRGEFKLLKTTPGVGDTLATTIMLEMGTPTRFAKVGNFSSYCRCVDSLRESNEKKKGEGNAKNGNKYLAWAFVEAANFERRYCPQAKSFYERKKRKTNGILATKALAHKLARACYHMLREQKPFDVSRCFG

SEQ ID NO: 67440 - protein, 428 aa, unidentified
MNIEDTIRRKQFCQIVSEIKGSHEYLIVGIDVAKDKHHAFMGTATGTSLLRRLVFENTIDGFSKLLSQVEAVKNRNGLEKIVFGLEPTGNYHKPLGRHLIRCGHNVVLVTGSAVKHNRQVLDGRWDKHDTKDAANVADLVSRGKCLYYDLPSSKIDELRDLLSLRRRLKKEEHSLRMRIRNSLLAKFFPELDRFYGACESESLSIVRWCLDPNKIAGMELDQFFRMVTRTTRGIAQRLRLQKIHRLAVESIGCPMGQAAEFEAGLLVEKLKQVRQQIQETQELIEDVSIEFAEYTWLLTIPGFGPYISARVLASIASPWRFDNCKQVLRLGGYDLCASRSGKQSDKAVPVISKNGNGELRYALYQAAHVASTRNRHFIKYFNKLLRGRERERGIKINMRVKLAAKMLVIAWTLMKKQEPFDPHHLNIE

SEQ ID NO: 67441 - protein, 378 aa, unidentified
MSDVISIAPADVRLWVSLDVHKFSIVAATLPPAGGKPEVCRIETTEKAIRRFIDRLGGPEGLAVCYEAGPGGFALWRLLTRLGVSCDVVAPSLVPVRAGDRVKTDRRDAKKLVSLHRAGLLRFVHPPTEELEGLRDLLRCRDDIRCARTAARHRVLKQLLRHGRIFRDGKTAWTKLHRAWLARQRLDDPLAQRALEQLLIHLDGIERQLDLLDAELAQIAASERWAGQVAILTRFRGISTLSALGLIAEIGDFARFGHPRELASWLGITPSEYSSGDQQHRGHITKAGNHHARRLLVEAAWHYRHPPRRPTSGPEPDERAWQAQIRLHHRYRHLTEHGKRTTVTNIAIARELVGFLWAAMTDQPLRDTHDPHHKEVAA

SEQ ID NO: 67442 - protein, 372 aa, unidentified
MTSIIYVGMDVHTTNYTLCYYSMEDDRFFAEVQVEPDAKNILKNLARIEKQQSRDCRIVCGYEAGCLGYSLYHQLHAHGIDCVILAPTTMMTKPGKRIKTDRRDARLISKCLAFHTYSPVYIPTEVDDAVKEYIHMRDDANSALTRVKQQIIAFCIRHGKIHDGKSYWTNKHLEWLSSLDLGNKILSEVLQEYLIRYYQLREQVDVYDMRINELAQAEPYRQKVEKLGCFRGIAAYTALSFCVEVGDFRRFATAQQFASYLGLVPGECSSGDKQQYTGITKAGNSHLRKLLVETAQVFGRSATKSGKSVALKERQAKCDSLTVAYADKANARLKKKYFKIAMRSKVNIAKTAVAREMACFIWGMMTDNISCA

SEQ ID NO: 67443 - protein, 352 aa, unidentified
MRIIGCDYHPSWQQISWMETNTGETGEMQLQHASGEAERFYRQLPGPVLIGMESTGNCQWFVELLERLGHELWVGDAAKIRASDPRQQKHDRRDAKLILRLLLEGRFPRIWIPSGEEKDLRQLLIHRYKLVCIRAQVKNELQHLAMNQGVTKKRKLWSKAGEKVLRELPLRPWSSRRREDLFRIREMLNGQLDLLDGAVGEAAQKNEKAKLLMTQPGVGPITSMAFVLTMGDVSRFQRGKQVASYLGLIPREYSSGGKQRLGSISKQGNRFMRMLLVEAAQNAVRRDPQMRNEYLHRCHRKAKGVAKVAAARKLAIRLYWMLRTNQGYPEVVRVESSPWVPLVSASLPGQAS

SEQ ID NO: 67444 - protein, 422 aa, unidentified
MSDQEAVAYSVYVGIDWADTKHDVCIQPATSDKRVFDVIRHCPEAIDTWVKDLHQQYGGHIAVAVELSKGPIVSALQQYDFIDIFPVNPSSLAKYREAFQPSRAKDDPTDAELAVDMLLRHPEHFKTLKPQSVEMRTLTTMVEQRRCLVNDQIRITNRLRCALKQYYPQVLEWFEHIDTPLFCAFVKRWPTLIQAKRARANTLRRFFHEHHMYREGVLDHRRQAINSARPLTLDDAVIVPYRLQTLVLVEQLELIFRAINQFDDEIEKLATEHPDYDLFQSLPGAGPALAPRLLVAFGEQRERYKSAADIQKYSGIAPVTERSGQKHWVHWRLQCPRFMRQTFVEWAGQTINKSYWAGAYYRQQRDKGSTYQAAVRSLAFKWIRILYRCWQTGVAYDESRYLKALERRGSPLLKRNNILKTT

SEQ ID NO: 67445 - protein, 341 aa, unidentified
MKVSTLGIDLAKNVFQLHGVDHEGHTILRKKLTRAKFVQFVIQLEPCLIGMEACSSSHYFARLFTRYGHEVKLIPPQYVKPYVKTNKTDAADAEAICEAVTRPNMRFVQIKTEEQQAVLALHTERGILIRERIACANSLRATLAEFGITIAAGQSHLTRELPAILEDGENGLSPFVRTSIYRQSKHIRELEEQVKQVEEALASWYRTQEACQRMAKIPGVGMLTATYVVAAVGNARQFSTAKQFALWLGLTPKEHSSGGKQQLGGISKRGDGYFRYLLVHGARALTAWVNRNGAVEENSWLQGLLERKHYNVAVVAMAAKTARIMWSMLSHNTEYQPRQLA

SEQ ID NO: 67446 - protein, 337 aa, unidentified
MDYFAGLDISMDETHVCVVDRDGEVVFENKTASTAQAIAVELAKAPSCRRIVFETGRMAPILFHGLSRLGLPVVCIESRQAYQALKSLATHKTDRNDARGLAHLARTGFFKPVHVKSLPAHALRSLITARKKLVGQRVTLENQIRGLAVVFGIRLPRALTAAFVNQALKASEGITGLSAAMRGLIAARAAVMTAVAAIDADMRRMTRASAACRRLMTIPGVGQLTALAFVAAIDDPSRIRRSRDVGAYLGLVPRRYQSGEVDYVGGISKCGDRRVRTLLYEAANVMLTRYKGQLKLKDWAFAIARRSSMRKARIALARRLAIIMHAMLRNETEFAPA

SEQ ID NO: 67447 - protein, 308 aa, unidentified
MVCVGIDVCKERLDVHVLPQGQAFAVARDGRGLSDLVARLQAVSPDLVAIEATGGFESVAAAALAGAGLPLVVVNPAQVRHFAKALGQRAKTDPIDAAVIARFAAATQPDVRPLPDAATQMLADLVARRRQIVEMIAAEKNRAHRTQVPRIAKSIARLIKALEKELASVDGEIDDGIRGSPAWQAAEDLLASVPGVGPVTARTLLAELPELGRLDAKQIAALAGLAPFVRQSGKWKGRAMVAGGRKTVRTALFLAALTATRHNPVLKAFRDRLVALGKPKLVAVVAVARKLLTILNAMIRDQKPWQTA

SEQ ID NO: 67448 - protein, 354 aa, unidentified
MKRTTKYVGLDVHQAMTVATVRSEGGRVIARSVVETSDESIREFFNAMAGSVHVVFEEGTQAQWLYDLLSPRVDRVIVCDRRGEKRSGNKGDQVDADELSEQLRCGGLRAVYHGAGGRADLKELTRAYRNLVEDSTRVMLRLKALFRARAIRTTGGGVYQPKGRAAWIAQLPEHGARLRAETLYAQLDVLRTQRKKTKAAMVAEAKRDPAFGVLETIPYFGPVRIALLLATIGTPWRFRTKRNLWAYAGLAVVTRSSADYELFDGRPRRRRRPPLTRGLNRNHNRVLKNVFKGAANVAIARPGPFQDFYHGMLERGMREELARVTLARKLAALTLRLLKTGEIFDPTQLSRPQI

SEQ ID NO: 67449 - protein, 347 aa, unidentified
MQVTTVGIDLAKNVFRLHGCDAQGRPVLRKQLGRRQLLSFVANLPRCLVAMEACASAHYWAREIEKLGHQVRLISPRFVKPYVKANKNDASDAEAICEAASRPSMRFVAVKSTAQQEVQAVHRVRQQLMKTRTALVNQARGLLAEFGIVVAQGVGRLRRALPTILEDRENGLSGVMRELLGEIGERLRFIDERLHKYDLTIQRLFRQDERCQRVAAVEGVGPLVATALVAAVGNATDFRSGRELAAYLGLVPRHRASGGRTVLLGISKRGDRYLRTLLIHGARSALLRIERQRSARASWAARLKLRRGSNVAAVALANKNARVLWALLNRHQSYQPAPFPARVPQSG

SEQ ID NO: 67450 - protein, 418 aa, unidentified
MTATDTTASTLLVAIDISKHRHEVLIGVPGKKRRRRLTITNTLDDFQRLASILTDYGLSVRIGFEATGNYHRPLAHHLGQAGFDLKLVSSVGLARTREALHNSWDKNDPKDAQVILHMLEIGAVQFFHDPLATGIADIQELSKTHEIVSRSKTELWHRILTHYLPLYFPEAERFHRSSRTDWFLAFLEKYPTPHMITSMSREAFVVDAWQVVGRKVSKERLLSDIYATAVGSVGLPVHPDSDAVRMFRLVLAEGRSLVRQRDEIEVRAVKLLSDHPDYQLLTTIPGIGPINALTILAEAGDLRRFRHHRQFLKFCGMDLATVQSGMFRGQSRISKYGNARLRRTLWMAGQVAVLKRTNSFHDKFERYIARDRHNAHLRRKAYTAIAAKMARTVHAVVKHGEPYRPFFEGVSPGGRTLV

SEQ ID NO: 67451 - protein, 341 aa, unidentified
MDQYVGLDVSLKQTWISVRQNRKRIWRGKCLSHPRVVAEAIRQHAPNAVLVVFETGSLSTWFHHELTAAGLPAVCIDARHAKAALDTAPNKTDATDADGLSLLAEAGFFREVRVKSWAAMQVRTLVGGRAQLIGISSDLSNQIRGLMRTFGLVVPAGGGRIFEANVRALLEGQAALAGSILPLLEAWRAVRAQATALDRQLVAVARQSPACRLLMTVPGIGAVTALSYTTMIENPANFGNSRAVGAFVGLTTRGYQSGEVDYDGHISRRGDKHVRALLYEAATVMLSRVRSDSALRSWGLKLKEKVGFKRAAVALARKLAVVMHAMWRDGRVFNPATGAPA

SEQ ID NO: 67452 - protein, 371 aa, unidentified
MKQQTKSSHITIGLDLGDRRHRFCALDERGEVVEQDSICNDRVSLRKLAGRYHGALGVMEAGAHSPWISRFLEALGWRVVVSNPRKVRAIYQHERKSDQRDALMLARIGRMDLALLYPVRHGTAEAQQDLLRIKLRDSLVRARVAVINSVRFTLKSLGYTVRNPSSARFHKVVMEEVPESVCEMITPSVQALAELTARIKMLELEINTLAQMKYPQSAQLQQIPGVGPITALYFVLKIEDPNRFAHVRDVGAYAGLCPRRDQSGESDPQLRISKRGDAYLRRLLVSAAHYILGPFGPQSALRAYGLMLAADGTARAKKRATVAVARKLAVLLLSLWKSQQPYQPFPGACLNGEQEDRRSGTIALHRMEATD

SEQ ID NO: 67453 - protein, 405 aa, unidentified
MKVKYEDRQKQKVIAITTDTLVVGVDIAKNYQWARFVDFRGIEHDRALKFKNSKGGFETILARIREICKKENFAKAVVGMEPTGHYWKAFANWLEKQDGIKAVLVNPYATKQAKELDDNSQTKSDKKDALTIAKLVKDGRYFELYLPHDVYAELRGLSTTRTGLNKRKNALKNTITAVMDEYFPEYEEVFKCPLSGKASRHILKTCPFPKFILELGEDGVTDEIKKAVKKTVGRKKAAQLIETAKESIGVDYGEEAALQKTDYAGFLLSIKGIGVVTLAACLGELGNPARFENPRQMSRMAGYNLVEDSSGKNKSGTKISKRGRKNLRSVLYQMALIMVATNDEMKQLYHYLKTREEAPLRKMQALIVVSKKILALIHALAKKKENYDPGKVFGPVRREQLKAAA

SEQ ID NO: 67454 - protein, 344 aa, unidentified
MQRSLVMPCMCCSGPPVSSRTTPHDGTVVIRKRVSRAKVLEFFAAVPRCLVGIEACPSAHYWSRKLEVLGHTVKLMPPSYVKAYLKRGKNDANDAAAICEAVTRPSMRFVSTKSEQQQSGLMLHHSRRLLVRQRTMLSNAIRGHMAELGIISAKGRNGTAELLEIIANAKDNCIPAAARFSLEVLARQYIAIATEIGVLEKRIHAWHRSCEESRRLEEIPGVGPIVATALIAEVGDWKAFASARSLAAWIGLVPKQHSTGGKERLGGISKQGNRYLRWLLVAGAMAVIRYARRHGTKRLWLTRIMERRPIKVAAVALANKIARMAWAIIVRGERFREPRLLLAA

SEQ ID NO: 67455 - protein, 354 aa, unidentified
MKRTTKYVAFDVHQATTVASVREESGRVIARSVLPTDRGALTEFVRGMRGARHVTFEEGTQAQWLYELLAPLVDRVIVCDRRGAPRQGNKGDQVDADQLSELLRRGALRAVYHGSADRATLKELTRTYRNLVEDATRVMLRLKALFRARGIATAGTAVYHPRHRARWLAQLLEDGARFRAAALYAELDVLRTLRPKAKAVMVTEARRDPAWRVLRTIPFLGPVRVALLLATMQTPWRFRTKRHLWAYAGLAVVTRSSADYTLVAGAPMRRRRAPMTRGLNRNHNRVLKDVFKGAATAATARPGPLQDFYHGVLARGTREELARLTLTRKLAALTLRLWKKGERYDPTQLTTPAR

SEQ ID NO: 67456 - protein, 312 aa, unidentified
MNSIICGVDVSKAWLDVFIRPSGVSQRFGNDAAGISALAALCRAEGVELVAMEASGGYERAAFLLLWEMGIACALANARNVRRFAEAMGFLEKTDKIDAAVIAHYAEARPLRASPPPKPEQMRLQALVARLSQVTGDLIVQRQRKTATRDADTIESLNEVIALLVRQSRRLEGEIASMIDDDPLWASLDKAFRSIKGVASRTVARLMAELPEIGHISNKAIVKLSGLAPIANDSGKKSGPRPVRGGRKGPRGILFLIAAIAARYDPHLAAFQQRLQAAGKPKMVIRIALARKLLVILNAKARDARREFQYAT

SEQ ID NO: 67457 - protein, 342 aa, unidentified
MYYIGLDVHKKTISYCVKDVSGQIQRDGTIPASRTELDSWMKTLPQPWTVAMEASIFTGWVYDHLLPHAAQVKVAHPLMLRAIAAAKKKNDRIDASKIADCLRCDFLPECHMVSTEIRDRRRTLRYRHLLVRQMVQMKNRVSGLLLETGVSHNKQQLHKVKYFRELLATNKEIDESIRPLLKLSRESIERLQKTDYALVSSLERDPLLAERLKNLRTVPGVGPITALTWALEIGDVSRFPSVKQAISYCGLCGDEKSSAEKVLRTPLSKQRNKHIQRVLVEAAKLAPKQSHELALVYERAKQKGNTNRATIAVARKMVTYLLAVDRAQRSFVSLENFSTVVA

SEQ ID NO: 67458 - protein, 317 aa, unidentified
MKQVQCNTKVAGIDVGKRRLDVAIHGVEAATSVANDAAGVGALIAWLGARAVGRVGVEATAGYEQAVCAALRRAGFEVVIHQPLEVHLFARLKRLRAKNDRLDAVVIAAATAQVDTVKAAQDPRLAEVAERLTAYEQVTDQLAELKTFMEHVTLKDLIRTLKAQIRSLESLKARLARDVLQFIRTHADLAARLKLLMSLPGVGSIVAASLVVRMPELGAMSRGQAASLLGVAPFDRESGQYKGMRFIAGGRRRPRRMLYLAALSAKRCDKGFKAFAERLRDRGKPPKVIIVAIMRKLIEAANLILQRGHPWVKQAET

SEQ ID NO: 67459 - protein, 419 aa, unidentified
MSKIIERCAGIDVGKRFLLCSVLTGAAQEDPTSLTRRFDTDVPDLEEMCEWLKQEAVTHVVMESTGSYWIPVFNLLEGHFTIVLANPEEVKNRKGHKTDRKDAEHLADLLRHSHVRASYIPPEPVRQLRDLTRRRIQLTQDASRERNRVQKLLEQANVKIASVLSDVFGVSGQRMLLALLAGEATPEEIAQLARGTAKRKIPQLIHALDGHRMSDHLRFIIRSCLRHLACLEEEIEELDAEIIRRMKLPIFENAFTLLQTIPGIGQLSAATILAETGTDLAAFPTAEKMASWAGLCPGNKESAGVQKGRDTTHGNPYLRMTLVQCAWAAARKQESVFRARFLQLSPRRGQKRAIMAVAHSMLIVLYCMLSRSVPYNYAQEAPKQRRRKHRAHHHLRSLRRLGFTIQVTPSFDADTPVGG

SEQ ID NO: 67460 - protein, 411 aa, unidentified
MDTVIARCAGLDVHKDTVTACVRVPVPGGDRRQVVQSFGTTTTDLLALRDWLASHDVTVVGMESTGVYWKPVYYVLEDAFECWLLNARHLRNVPGRKTDVADAVWIGQLVEHGLVRPSFVPPKPIRDLRNLTRYRKAQIEERTREAQRLDKVLQDAGIKLSSVASDILGVSGRAMLHALVAGSQDPQTLAELARGALRKKLPALREALTGRFGAHHALLVGAMLAKLEFLEGVITELSAEIARVLAPFARAVELLRTIPGVDHRTAEALVAEIGVDMARFGAAPRLASWAGLCPGNNESAGKRRRGTTRNGSKWLRTSLTEAAKAAGRTKGTYLAAQYARLRGRRGSAKATIAVAHSILVAAYYILERDQPYRDLGPDYFRARHSRHHHLRRLVRQIEALGYKVSVEQEAA

SEQ ID NO: 67461 - protein, 349 aa, unidentified
MNATTVAVDLAKNVFELAVADAEWRIVERHRLNRARFARFFVHRPPCQVVMEACGSAHHWARRIRAEGHTVRLLPAHYVKPYVGRSKTDRADAAALIEAARSPRIRVVPIKTIEQQQLQSLHRLRSQWMSTRQRYLSTLRGILREFGIMIPLGPSVAKAQIGAALAAADSAIPDGLRPELAQMLQEIAPLEEKILSVERQLAALTRTDERVQQLREIPGVGLLTSTALLSTVGDIQRFPSGRHFACWLGLTPSERSSAERRRLGKISKQGDVYCRTLLVHGARSALLAARRAQRAGKPLDRLRRWALNCEQQRGHNKATVALANRLARIVWASWKYQRSFDGNWGNQAA

SEQ ID NO: 67462 - protein, 345 aa, unidentified
MDEGYDGRQVVGMDLHRRRSVLVRMTMDGRKLETARIENSPAALRAVIARAGKCPLVVVEATYGWYWAVDVLRAAGAEVHLAHPLGVKAFSYRRVKNDERDCADLADLLRLGRLPEAWIAPEPVRALREVTRFRHKLVQQRTSCKDQVHGVLAKSGIPVTCSDIFGRGGGLWLDGLPLPAPYAGKVASLRALIAVLDGQIALAGEQAAGMLAADRGYAAVRRLPGIGPVLGAVICAEIGDVTRFGRPGQLCSWAGLTPRHYESDTKVIRGHVSKQGSRALRWALCEAIQHQPPGTRPREVRDAIIARRGTDARSIAKTAAARILLTQVFYAMRDGHVRRATRQAA

SEQ ID NO: 67463 - protein, 447 aa, unidentified
MTLDVATKTGKTPVLERMLSKYVGRQTSSIENDITKTRNHSRQRGNIMRVVFGIDVSKVSSEVAILVNGEKVHNYTMSNDAIGFSRLLGDLKTVHKPEIIFEATGVYSRRLQSFLDEHGYAYTRLNPLEAKKQLDSLRVRKTDQIDAEKLAQSQFVLNRKTTYVQEEIYQNLRDLSRFYQNLTEDIVRAKNRLHKALQVTFPELENILSTPSGEQYWNLVIAFPCKDFVLDLSKDELSESIRQSTSKRISDKRVAYLAEKLIALANQSYCAVKKTSPMLEEVRYYAKELFRLSEQRQTILDEMVELAQPLPEYDILLSIPGIAETTATSIIGELGDIRRFQSANQINAFIGIDLRHYESGNFLAKEHITKRGNPYARKILFKCIHNIASASNTNPCHIADFYEKRKRQSQTTSTKPHTIASIHRLIRTMYYLIMHNKLYDYASTQNR

SEQ ID NO: 67464 - protein, 468 aa, unidentified
MARSPSHARSLAEGEIRSTEGLPVVNPHAAGADIGAEAIFVCLPGPDQTQIVRSFGTYTADLNAIADWLVEHGIQTIAMESTGVYWIPLFEVLEGRGIHCCLISGNLARRLPARHKTDVLDCQWIQTLHSLGLLTQSFRPDADLIALRTLLRHRGQLIEHRSPHILHMQKALIHMNIRLDQAVSDPTGDTGLRILRAIVAGERDPRKLAALRHPNCKKSEAEIARALTGTWREEHLFVLKQSLELYDFYTRQIEACDAEIERTYSAIRPTWPDPNPADQEPLPAHKRGSRSKNLPRDSAVHVRQHLRRLTGIDLTAVDGLSLDLAQKIVSEIGTDMSKFPTEKHFTSWLKLAPNNQVTGGKIIRSSTGKSHNRARQAFLQAAASVARSHCAFGAFYRRLKARVGPAQAQVATAHKIARVVYHLLKNKIEYQQMSAEEYAQQFRERELRHLQRKAARLGFTLTPAGAVS

SEQ ID NO: 67465 - protein, 405 aa, unidentified
METLYEICCGIDVHKDKLVVCLKKGKSKIIKEFGTKPRQLKELADWLLAEGCEMVAMESTASYWKPLYNVFEVKGVNVIVVNAKDMKNVPGKKTDVLDSEWIADLLKHGLLRPSYIPERDQRELRELTRYRKSLTEERARELNRLQKMLEGANIKIGSVLSDVNSKSSRNLIEYAIENDTDMDCGIVSELVNNVKASYEDIADAMGGTLTNLQKELIKEVLSHIDDMAVRINKVSKIIKDHMTQYKKNMDKLTEMDGIGQMSAEIILAEIGQDMSRFPTAACIASWAGVAPGNNESAGKRRSGKTLKGNKTLKSTLAQCAKSAVKKNGFYRAQYQRLVVRRGKNRATLAVAHSMLISIYHMLKDDVRYIDLGADYYNKFNTERKANSYLKKLQELGYDVEVKKSA

SEQ ID NO: 67466 - protein, 544 aa, unidentified
MARRKGSSRRQGRIHRQKVNSAFLERARAVGAERFGILTVDPAKQRSAVKLTNYYGQELMAPLVVEHTDRDLKALVETVKREQQEHGLGDLVVGVERTGRYHAPIRRALELHWTVQMLHPFATKQLRQPVDPGQKTDPNDLNAMTRGMIVGYGAEEPGLPERWLEWRLVSRERENFVRKTATLRNQMKERLEALLPGYAALFGAFWQAPVALAVAERYPSAAALLQAGPDTILEALRHDGQATRRDTVARLLEWARNAPTPDPCADLNHRLLRGEFGLLRHLESALRAFECDLVQYLVDTPFVLLISIPGIHVVSSASYAAELGPLEHYLTPKNISGRAGLYPSRYQSDETDRADGPLVSRRNARLRDAIMEIAHNLIRCNHYFEAWAEVRRRQHWPARKLDLAVATRFIRISFRMVSGRMVFRHPCAQGRDAILDKLLDFALRHQIPPRDIQDLLQRALRQIPQDAFEEEARALIGRLPRRDRRDDPRPDTSGREPVRLGDLLRQVIHHLAPHLSLELPRSTTEEPTHTGGLPNHRLSAAEGS

SEQ ID NO: 67467 - protein, 330 aa, unidentified
MKKWDYTIGVDVSKNTLDLHCAEINEHIQIINGADGFKQMLKWCKTHGIDLAKAMMVMEYTGGYEYKLIAFCEEKSLPYARISGLAIKRSMGITRGKSDQVDAARIAQYGDEKHKSIQPAKPLNKSIIELKELLGFRKRIVREMAGYKATLKERKHMYPDLKQDIICKSLESKIKENTKMIEKIDGELLNMVAKDQALKNNYDLLTSIKGIGMVNALMTIAYTENFVCFSNPRSYAVYVGVVPFEHSSGISLRGRKRVSPIANKELKQELTQAARSAIQWDKEMKEYAARKMPEKCYNIVLNNVKFKLILRMFAVVKRGEKYVDNYKKAA

SEQ ID NO: 67468 - protein, 479 aa, unidentified
MAERRIAGIDLGIASAHTVVVLTGDGAEVCRRRCVPTAESLGWIEQQALRGAAEGTVLEVVLEPTGPAWLAPTVFFGRRGHAVYRVSSQKASDLRKFLSRHAKSNSIDAVTLARLAIVDPESLHPVELPGADRASLDRRVRACDRLTREAAEHKIRIKDLVRQLLPMTPLTGDLGHADLAVLERWADPNALLRAGKARLTAVIAKASHHHLGADRAEEWLEAARSSVELYGGDSAVAFADLACEVATEVRLLRAIQRELETHAEVRESAYGRVDPEGLARSVPGVAEVGGPVMVSAMARPHRFARGEQFKSFTGLVPRASETGESDRKGQPMSKAGSSLLRSQLLRSADTARTMDPQLAAIYFTQMVERGAAHTKALCVVAAHLAERVWAVMARGTPYVVRDTDGRPVTKAQAKAIVLEQWTVPEEVRRRRRNKKGGKVPHQVLMGHVSRARGAVPRRPSPPASSALEATASTRQGGGA

SEQ ID NO: 67469 - protein, 402 aa, unidentified
MNSVGIDVSKGKSMIAVMRPFGEVVVSPFEVRHTANELNELAGLLKSLDGETRVVMESTGNYHAPVAWLLHDAGLYVSVVNAMLVHDYGNNSLRRGKTDKKDAVKLANYGLDHWLTLPKYVPEEDTRLMLKTCYRQYQQYSKVRTMLKNNLISLLDTAFPDANRLFTSPPRADGSEKWVDFVAAFWHCESVCGLSKKAFTTQYQKWCRKHGYNFSEDKALDIYASACGHFGVMPKTDTAKLLVEQAVSQLRATSAALAALKQEMQSLAVSLPEYPVVMEMFGVGPTLGPQLIAEIGDVRRFHSKKALVAFAGIDAPPYQSGQVDVRSRNISKRGSASLRRTLFLVMGVLLQCAPMDEPVYQFMNKKRSEGKPYRVYMMASANKFLRIYYASVKAYLDSLEHG

SEQ ID NO: 67470 - protein, 356 aa, unidentified
MGQKWLMHYSQFKTKIMKKQTGFFLGIDVSKLWFDISLMIVINFQKQPMITERFDNTIEGLALLKKWLKAQEVKFDNDTLLVIENTGIYHRLLWKFFSENNIPIHIGNAAHIKKSFGIARGKNDKIDSQRLCSYAYKNDDELKATSALNPVFLSLKDLITSRTRLKAQLGANRTYLKELKSINDKATQTMVEKVYKMAITGLQKSIDEIEKQITLTIKSDQSISDNYNLLLSVPGIGPVTATYILCCTNNFAGKVSGKQLACYAGVVPFSDRSGTSLKGRNKVHKMANKELKSLLHMCALSTIKCYQEFRDYYDRKVKEGKHPNSVLNAICNKLVLRVAAVVNNQKNYVENYEKAA

SEQ ID NO: 67471 - protein, 323 aa, unidentified
MRKSIGIDVSKTKLDVSIFDGDEHRQISGGNTESGLKELLGRMGRLQGKELVITMEATGTYHLRAAMGLHEAGYRVSVVNPLIIKRYSEMKMLRAKTDPVDARLIAEYGYYERPAEYRPNNKECQELVYLLKTIEGLYRVRGQNRNRIEAFTQSPVCVSVAIESIQRINTAIDDEIKLLERRIRQLIGETYQEEYRRLLGIPGIGKRLGAAIIGYFQEFEHFEKAKQVASYIGVNPAPRNSGSSVRGRGAISRKGNTYLRKLFYMASLAASRHNHECSKLYNRLLSEGKKKKVALIAVSNKLIRQVFAIVKNQREYSPLYQSV

SEQ ID NO: 67472 - protein, 457 aa, unidentified
MGRKGRRTKGIEEAHPFAGMSRINPNAAGVDIGAVEIVVCVSGEGDTQIVRAFGNYTVDLQAIGSWLKEHGVETVAMESTGVYWIPLFEELERQGFECLLISSRSMRRVAGKKSDIEDAQWIQTLHTYGLLEGSFRPQAELIALRTLLRHRSQLIEHRSPHIQHMQKALLQMNVQLSQAVTDITGVTGQTIIWAILAGERDPKKLAALREPGCKKSEEEIGKALTGTWREEHLFVLKQSMEMYDFYIQQIQACDQEIERVYSLTRPDWDAGELKPLSIRKRSSHSKNRPQNPESIRKHLKRISGVDLSAVAGFGVSLAQTVIMEVGTDMSKFPNEKHFCSWLGLAPKHEISGGKVLKNKTLKTKNRAGQAFRMAANSVKQADCVFGVMYRRLKARLGPAQATVATAHAIARAVYRMLKYKVEYETISVEEYEKKYRAQQLKYIKKKAAKLGYQLIPA

SEQ ID NO: 67473 - protein, 367 aa, unidentified
MSISKFVGLDVHKETIAVALADDGRTGEIRFYGTIPNTQDSIRRLVARLSSPDVALHFCYEAGGCGYGIHRQLVDLGADCSVIAPSVMPRKPADRIKTDRRDAMTLARLLRSGELTAIWVPDEAHEAIRDLIRGRRQAKHDLVAGRQMLLSFLLRHGRKFAGRSNWTKAHWRWLGEQAFDAPHQQFVFGESIRRIEEAQQRCDRLDAMLVEALPYWSLAPLVQALQALRGVGLIVAATLVAEIGDLGRFDTPKQLMGWLGLVPSEASSGARTRRGAITKTGNREARAMLVEAAWSYRLPAREERRYRARVEGLPDEVKAIAWKAQVRLCQRYRMLAASGKPLPKVITAIARELVGFVWDIGRRMQPA

SEQ ID NO: 67474 - protein, 317 aa, unidentified
MEQVQSNTKVAGVDVGKAWLDVAVHGLEDSGRWPNTTAGINALIGWLKAREVGRVGMEATAGYERVLRSALDAIGLEVVVHQPIEVKLFARLTRRRAKNDALDARLIAAATARIDTVRAASDPRLIDLAERLTAYEQITGQAAELKTFMEHVTLKDLDIDLRRQIAVLTQLKARLLAGILQQIKAHPDLLARYRLLLSLPGVGPVVAATLAVRMPELGSMKRGQAASLIGVAPFDRDSGQHRGQRFIAGGRSRPRRMLYLAALAAKRFDPSLKAFAQRLLDNGKPPKIAIVAVMRKLIEAANLVLQRRQPWTRQLPA

SEQ ID NO: 67475 - protein, 366 aa, unidentified
MKKLSKKQNKVALTEPQEGPFTIGIDIGDRISHFCVLAVSGDVIIEGRLQSTPTAFYNHFAAFPAATVAMEVGPHSRWISSLLADIGHKVIVANASQVHLIHKSLKKTDKADARTLAKLARLDPTLLSPIQHRSSEAQSHLCIIRARQVLVAARTQLINCVRGIVKSFGERLPRCSSDSFFERTAMLIPDILRPALDPLRKQIAILTAQIQAYERQIQQIADTQFPETRALQTVPGVGALTALSFVLTLEDPSRFRKSRDVGAYLGLVPKQSQSGDCSPQLGISKAGDSYLRKLLVGSAQYILGPFGPDTSLRRWGCELAKRGGPNAKKRAVVGVARKLSVLLHRLWVDQTQYQPFYARSIIPNAA

SEQ ID NO: 67476 - protein, 353 aa, unidentified
MTKGITAIVGLDLGDRFSQYSIADYASGGIVEEGKVMTRPESLRSRFADAPPMRIVIETGTHSAWIARLLRGLGHEVLVADARRLRFIYMSDRKDDEIDARMLAKVGRLDPSLLHPVRTHSPEADRGLAVVRSRDILVRARTKLVNSVRGQVKKMGYRLPGLSAEAFARKARLHLPDELRPVLEPILDVIAELTAKVREYDARIDALCSAHPETERLRQVAGVGPVTALVFALVIEDPHRFAKSREVGPFLGLTPRRDASGTIDRQLGITHAGDNHLRWLLVSSAHYVLGPFGPDTELRRWGLSLAARGGANGKKRAVVGVARRLAVLLHRLWVSGETYRPLRSAVPQEAVAV

SEQ ID NO: 67477 - protein, 437 aa, unidentified
MSKRLQVGLDIHQKHNHVCLMTQEGQIVNPHQRFDNNWPGFQEFIEMLVGVLEEGPFEGVDIAGEATGLLWFHPFYHLAQAKELAPFDSHLYLFNPRTIKHFKKALAERDKVDPKDAQAVVERLRFGGRMPHQLTFDERYLPLQRLTRYRYHLSHALAQEKVYARMVPIYLKASDYTRKPKPFSDVFGATSRHILSEYATIDELASLPLDDLAEELERVGRHRFTDATDNAHRLQRAAQHSYPLAPCLVEPVNVILDSLLAHIRFLEESLQNLDPLIEAILVDLPGASYLRSVNGLGLVYSAGLLAEIQDLSRFMQGLKRDKQGNLRPKTRHDGQAALARFTGLWWPRGDSGDFHAQDRRLPKTGNHYLRYYFIEGANSLRRHNAEYAAYYQRKHHESLKHKHWRATVLTARKLVRLVFALLHDEEMYQPPEVRYHS

SEQ ID NO: 67478 - protein, 320 aa, unidentified
MSVSSVIAGVDVAKAHVDVDVVGAEFAPQRFDNEADGHSAVASALKALDVGLVVMEATGGYETSLACALQGAGLAVAVVNPKQPRKFAEAMGYLAKTDRIDARVLAEFGQTLARRPDLSRFLRPMDDVDQQWLAALVTRRRQLVAMMTSERQRLQITPKKLHPSIEAIIKAIKAQLDDVEGQMVGHVKEHFSQLDAILQSVTGIGPVASATLIAELPELGKLNRRQIASLVGVAPFAKDSGTTKGRRRVQGGRFDIRRVLYMATLTAAFRNPVFKAYYQRLTAAGKLPKVALVACMRKLLTTLDAMVKAGSKWDPEHRVA

SEQ ID NO: 67479 - protein, 343 aa, unidentified
MDHFAGLDVSVKETSVCVVDDTGRIVREVKVASEPEALLAVLTNPACHFKRIGLEAGPLSQWLFNALAEAGLPVICVETRHMRAVLKAQINKTDRNDARGIAQMMRVGLYRPVHVKTLRSQKQQMLLTHRKLMQSKAIAIENDLRATLRNFGLKVGVVGTVKFEARIKELVENLPDLVVLVEPLLVVRRVLREQIGILHRRLLAIVRDDDVCRRLMTVPGVGPVVALTYRATVDMPSRFRNSKAVGAVFGLTPSKHQSGESNRTGGISRCGDEMMRMMLYEAAHIMLVRSAKWSWLKAWAMKIARHRGLKKAIVALARRLAVIMHRIWVDGTEFRWTREVAAA

SEQ ID NO: 67480 - protein, 345 aa, unidentified
MIQYKRIGIDTSKAVFTLHGIDQQDRPVLRINLRRAQMISFFRKLPPIEIAMEACGGAHHWARELIALGHEVRLIPPQYVKPYVKRGKNDRNDAEAICEAAGRPGMHFVPVKSVTQQAQGMVLKVRETLVGQRTLLANTLRGHAAEFGVIAAKGLRQVGPLLTAIEQETAIPPEAKDMAALLGRQIEELDTRIKEIDVKLTAAHKANEVSQRLATIPGVGPVTALTLAIEIDPAAFESSRHLAAWAGLTPKEYSTGGKQRMGGISRAGNERLRVLLVAGATSVINAAMRPGSQQMTDWLRALLARKPRKVVAVALANKMARVAWALMTRGEVYRRPAAVRGAAVA

SEQ ID NO: 67481 - protein, 347 aa, unidentified
MAMTIVETRAITGGVDTHAGTHVAAALDPIGGLLGVQEFPATAAGYASLLGWLGGFGTVALVGIEGTGSYGAGLARHVTAAGIRVVEVDRSDRQERRRQGKSDPLDAVSAARAAQSGRARGAPKGRDGAVEAIRALMVAKRSARAERVQTINQARALVLTGPDDLRARFARHAAAGLVSGLASLRPRPGDVVGYATRVALRELGRRAEFLDGQLARLDELIAPLVAARAPALLALHGVGPDTAALLLIAAGDHPERLRSEAAWAHLCAAAPIQASSGKVTRHRLNPGGDRQANHALWRIVLTRMSAHPPTLIYVERRTKEGLSKKEIIRCLKRYVAREVYHHLRAAG

SEQ ID NO: 67482 - protein, 352 aa, unidentified
MTVTIVETRAEIRAITGGVDTHADVHVAAALDPIGGLLGVKEFPATAAGYGRLLSWLGGFGTVCLVGIEGTGSYGAGLARHITTAGIRVVEVDRSDRQDRRRQGKSDPLDAVSAARAAQSGRARGASKGRDGAVEAIRALMVAKRSAAGERTRTINQARALILTGPDDLRARFTGHTTAALVAELASLRPRPGSTVGYATRIALRELGRRAEFLDGQLERLDELIGPLAAARAPGLLALYGIGPHTAALLLIAAGDHPGRLRSEAAWAHLCGAAPIPASSGKTVRRRLNPGGDRQANHALWRIVFTRLGSDPATRAYAERRTAEGKSKKEIIRCLKRYVAREVYPHLRTTAG

SEQ ID NO: 67483 - protein, 324 aa, unidentified
MSGFVAHRWVGIDVSKAQLDVAVLPDDTTFRVRNDTAGWQELLARLGAATSTGIVLEATGGYHVGVTLALAAVGLPPAVLNPEQTYAFIRSEGQRTKTDRTDARLLARFGQQKQPGPSPVVSDNARDLKELVACRDDFTKLLTMEKNRRQQATARTHAHHQAVIDHLVAERRAVEHEIAQLIAADPALATRTALLQSMPGIGPVLGAVLVAGLPELGQADAKGLAALAGVAPHTQQSGQRSPRAAIVGGRRTICKALYQMAQTAVLHNPVIRAHYQQLRQRLPHKPAVIACARRMLGILNAMVRDGLTWPETQVGQGHFLPPPT

SEQ ID NO: 67484 - protein, 356 aa, unidentified
MTISTKYIGLDVHKESISIAVRNSVGKVLMDCVIETKASTILQFIDGLRGDLHVTFEEGTSAAWLYDLLKPHVTKLVVCDPRKNKSMREGNQNDKIDARRLAELLRLNHLNPVYHGEHGLRTLKELVRSYLTVTKDLARVMTRVKAIYRSWAIPCSGKQVYARCHRAEWLGKITEPGVHRRAEFYYQQLDALRVLRQEARRDLLAENKKHKAWKRLCQIPAIGPIRAAVLLGILQTPHRFRTKRQLWNYGGLAIEMHSSADHRSVDGELQRSRKNVLVRGLNRNCNHDLKNLFKGAAAVASSKPGPFEKFYAALVAKGIRPEMARLTLARKIATIVLIVWKKGVSFDANHLKPQTV

SEQ ID NO: 67485 - protein, 349 aa, unidentified
MDYRVYCGVDFHARQQTICSLTTESGVMSTHELKHQNKAELKAFYAQFSGPVLVGLEASGYSPWFEQLLESLGHEVWLGDATEIRRRARRRQKNDRRDAELILDLLIHNEFPRIHRPPATSREILRMLRYRHKLIKIRTIIKNSLQSLSIQSGLSLRARLFTHAGLAQVRAAAMSPVMQYQRDQWLQSLEPLNQRILEAANWLQQQAAGDERIERLRTHPGIGLLTGLGLVHTLAPVGRFSNQRKVAAYVGFDPKERSSGEKKRYSGISKAGSRVLRFLLVEAAQTACKGDPELKRFYLRLLHRHGKPKAKVAVARKLLVRSYILLRDGIDYAEFNRRAVAARLAREAT

SEQ ID NO: 67486 - protein, 343 aa, unidentified
MQSVTTIGLDIAKSVFQVHGVDANGNVVIRRQLKRRYVLAFFQKLPPCLVGIEACASSHYWSRELQALGHTVRLMPPAYVKPYVKRQKNDAADAEAICEAVTRPNMRFVATKTPEQQSCLTLHRTRHLFIRQQTAVINSIRAYLAEFGIIAPVGRRGVEALLEVVADANDTRLPEIARACVAALGTQLLSLKAQILAFDRRSMAWHRSNETSMRLDAIPGVGPALATALVASVADPKAFRSGRDFSAWIGLVPKQNSSGGKDKLGSISKQGDRYLRSLFTAGALAVIRYAKIHGTKNRPWLTALLARRPTKVAAIALANKMARMAWAMMTRGERYKEPVALAA

SEQ ID NO: 67487 - protein, 368 aa, unidentified
MKNITTYVGVDAHKKDLFIAMLVGDHTTPVTWQLANEPNAVRRLVRKLEREAPGPVRMCYEAGPCGYALQRQVTTPRVSCQVIAPALIPRKPGERIKTNRRDARKLAELLRAGLLTEVRPPTPEEEAVRDLCRARDDAREDLQRCRHRLGKLLLRRGLHYSGRNWTRAHRQWIDSLDWTQPAERVVVDDYLLAVDQVEARLLELDARLAEIAETDPYRERVGWLRCFRGIDTLTAILILAELHDFRRFQSPRALMAYVGLVPGEDSSGEKHRRGRITRTGNALVRRLLVEMAWHYQHRPSIGVALTRRRKGQPGRVIAIADKAQQRLCRRFRRLAEQHKPAPKVAVAIARELAGFLWAALQPAPTPAG

SEQ ID NO: 67488 - protein, 480 aa, unidentified
MPQPSKKSTPKARRGGSRAIRSRRKTRRAKDPTQGLQVTHPHAAAIDIGCAEHWVAVPPGRAEKPVRPFGCCTAALEALADWLAQCGVDTVVMEATGNYWVVLYDLLEERQLRPVVVNPRYAKNMSGKKGDIPDCQWMQKLHSYGLFANSFRPSEPLRALRTYLRQRESLVTSVGQCIQHLQKALTEMNVQLANVISDVSGETGLRIIDAILAGERDPQRLASLKDWRIRATTSQLAQALTGHWKDEQLFALEQARLSYAHYQEQILQCEERIQQQLRAVQSRLPAQPSLSDPAAQRVPGPTNRKTPPAPPAGQTFNLQAELRRIVGVDLTAIDGIGSLTAQVILSEVGTDMQPWPTEKHFASWLGLCPDHRISGGKVLARSTRPVVNRARNALRMSAYTLEHSQSALGAKYRRLKRRLGAPKAIVAMAHHLARLIYRMIKYGQDYIDKGLAAYEAKYREQRVQWLEKQAKELNLKVVAA

SEQ ID NO: 67489 - protein, 339 aa, unidentified
MKFCGIDLHSNNSVVVVTDEADHILVSRRCPNDLSKILRTLEPHRADLHAVVIESTYNWYWLVDGLQAAGYVVKLANTVAMKHYDGLKHSDDEDDAAHLAHLLRLGILPTGYIHPPEERALRDLARKRIQLVRSRTQHVLAIENILARQLGARLSSDAIKRMKSDDIDTLGLPPDVALAVKANRSVIAVLNQEIKGVEDRLLESVKLRPEFALLKSVPGIGDVLATVIMLETGDIERFPEVGNFASYARCVGSAHYSNGRKKGEGNTKNGNAYLVWSFVEAANFARRFSAEARRFFERKKAKTNNVVATKALAHKLARASYHILKEKQPFDVTRCFAGS

SEQ ID NO: 67490 - protein, 352 aa, unidentified
MTVLAELVDHVIGVDPDRDRITAAVVSVTTQGELASATFPATRRGYGQALRWAQTFTVDERRAWAIESTGSYGAGLAATLADRGEFVIEFDHPSTRASKDGAKSDSLDAVRAARETLGRKTWATPRSRGLREGLRTLIVARDSAKLARVAAINVLKALIVTAPVDLREDLRGHTLGQLVDRCVRLRPDTATDPEHAATKLSLRSTATRVRQLTDECRELEQAMLPIVRELCPALLDEPGIGTLVAAQVLVSWSHAGRCRDEAAFARLGGVAPLEATSGQNQTRHRLSRGGDRQLNRALHTVILARAKIHPETREYLARRIAEGKTKREAMRCLKRYYARHLFRLLETNPAPA

SEQ ID NO: 67491 - protein, 400 aa, unidentified
MISIGIDAAKGKSTICIMKSYGEVLVPPRDVAHTATELQSLIFLLKSFGEPVKAVMESTGTYHYPILNALLDADVFVTVENPLVIKKYTTASLRKGKTDKLDAIKLAQYGMEKWLILRPYEHREAVYEELKLLGRQYTNYIEMRVAALNRMLDLLDQTAPEIDRLLQSHCADKSKCKLCDFATTFWHFDIISKKSEKAFVVAYNTWAKKNGYRSSESKAKEIYALAKDGTPTLPSSMPSTKMLILEAARNLNTTNLTLATILSQMQLLANQLPEYSVVSAMKGVGERLSVLLIAEIGDVRRFHNGSALVAYAGLDAPPYQSGTFEGTKRHISKRGSPQLRKLCFEVMMALKLKPPKEDSAVYDFMLKKEAEGKAKMVAKVAAMNKFLRIYYARVLEVYSA

SEQ ID NO: 67492 - protein, 347 aa, unidentified
MDQISRIGMDTSKHIFQLHGVNAAEEPILRRKLRRKDMIAFFERLAPTRVAIEACGASHHWARLLCNLGHEVQLIAPQLVKPYVKRGKNDAADAEALCEAMSRPTMRFVPVKSAEQQAALMLIGLRDRLIRNRTQIVNAIRGYAAEFGITAAQGIAHVAALLARIQADEALPPLARELFTLQAVEYEQVQAKIAAIDAKLVAWHRADPCSRRLAQIPGIGPVGSAMLIMKTPSPEAFRSGRQFAAWIGLTPRDHSTAGKVRLGVITRAGDEALRRVLVVGATAIVRRVREGRCGWGLAAWVKQLLQRKAPKLVAVALANKLARIAWKMMMTGETYAGGRTPAAECAL

SEQ ID NO: 67493 - protein, 311 aa, unidentified
MTLPQTDIGVDVAKDWIDVFDLSTSRHERIPTDNRSLRRFAAVVGHSIVVLQASGGYERPIMEALSEAGRHATCVNPRHAREFARATGRLAKSDRVDATVLAKIGRALQLAPASPRSAGRQRLSDLTAHRNDITVMIVAEKNRLRTTTDQWIRRSILQHIRALQGSQVKVEAEMEAVLQEHDELREKSARLRCVKGIGPVVSATLLSQLPEFGQLDRRRLAALAGLAPHANESGHRRGKRSIWGGRGTLRRCLYLAALTASRFDPRFRAFKERLIATGKAKNLVIVACARKLLTVLNAMTRTGTAYRDAPT

SEQ ID NO: 67494 - protein, 343 aa, unidentified
MYFIGVDHHKQVSVMTVLDEDGQERKNGRVPNLRRYVERFLEDCRPFTAVLEAGRSSYVMADLLRELGGEVKIANALQVKAIAHARIKTDKRDSRTLAHLLRADLIPEIYQRGEWNRRAQRVMRMRAYWVRKQTEVKNKIRALLAQQREEVRLEVEKHERVLFSPKGLEFLAKLLLEAREKEVLDDLLQGYQEMQGHIKKSDGLVRALYGEIEEASRIDTVPGFAATLSVLVAVEIADVRRFSRAAELHSYAGVIPSTYSSGERSYHGHITKQGNVWLRWAALEAVYPAIKKDLGLRVLYSRLARRKGANVAKVAVARRLLTIIYRVLTEKRDYIPDMKQSAA

SEQ ID NO: 67495 - protein, 369 aa, unidentified
MAVAKRIKKERSSKTMAEGVAAVGLDLSDRRARFHAIDDEGETVETGTVAMEAPHLQRWASNIPPTVMAIEAGTHSPWVSRLLTACGHEVIVANPVKVALITRNIRKSDAVDAEYLARLARLDRKLLHPIQHRGEQAQLDLQVIRTREIMVQSRTKLIGHVRGAVKSFGARLPKCATEAFVNKTRKVIPEQLRTALDPVYVQIEHLSTTIAGYDRQIETTARERYPEVERVAQIKGVGTLTGLTFVLVLEDASRFRRSRSVGAFLGLTSKREQSGEEDPQRRITKAGDRLMRRLLLQSAHYILGAFGEECDLRRHGMRIAERGGKRAKKRAAVAVARKLSVLMHRLWISGETYDPLRNGGKLAELPSAA

SEQ ID NO: 67496 - protein, 386 aa, unidentified
MMTMTRTIESTATAPSCSTCLLLAFELGERVWKLGFTTGLGQRPRMRQVPAGATDRVLEEIVRAKRRLKRPADTPVISCYEAGREGWWLHRWLVAQGVTNHVVDSSSIEVNRRARRAKTDRLDLGGLLNLLARFVLGDARVWRVVREPSVAEEDARQLHRSWESVQQDRSRLINRLKGLLTTQGVRLRIDEEFPQRLAAARLWDGTPVPPELQQRARRVWAQLALLNQQRDELEGGRAALVPDANTPMDRYVRTLPTLRGIGPVGTWVLATEIFGWRAIRNRRELGALVGLVPAPYQSGDTNRDQGITRAGNRHVRRLMVQLAWSWVHYQPTSALTQWYRRRFGGGSKRLRRIGIVALARKLLIALWRYVEHGEIPEGAIVQGHAA

SEQ ID NO: 67497 - protein, 350 aa, unidentified
MNIIGCDLHTRYQVVAWIDEETGEIRTRRLAHDKEEPRAFYISLPRGARIGIEATLPALWFERLLAECGHELWVGDAARIRAMEVREQKTDGRDAKHILELLRTHRFPRIWVPSVAERDVRQLLVHRMKLVRVRTLVKNQLHALAMSQGVCRKRKLWSVKGRAELESLVLLPWANRRRKELLAWLDQLDAAIAPLDHAVAEEAEARAEARLLMTHPGVGPVVSLAFVLTVGRVERIAHSGQLVSYLGLNPREHSSGGRQRLGAISKQGNPMLRWLLVQAAQTAAWGDVELRRVYQRLKFRRVSGVAKVAIARRLAVRLYWMLRERKDYAQLVRMSGSPSSAVVPEKGSKV

SEQ ID NO: 67498 - protein, 311 aa, unidentified
MNDTIGIDVSKDWLDAYSMARAEHRQFANDGRGLRALHRWIEISSAGLVVFEASGVYHRRLENSLSEGAVPYSKVNPRQARRFAEATGTLAKTDQVDAAILAKMGTILQLEPQAPKAEYLNILREMMTARRGLIKDRVTVRTRMQTTTQKLLKRQLKERLTQVEKHLDQIDKAILELVAQDAQLMAQFDILTSIPGISTVTAFSMLIEMPELGTMSGKQAACLAGLAPISRQSGKWQGKERIQGGRAFFRRAMYMPALCVIRHDLSAKRKYDQLVKAGKPPKVALTAIMRKLVVVANALLRDGRKWSEDYA

SEQ ID NO: 67499 - protein, 421 aa, unidentified
MSYKIAAIDIHKKVLMVVICSVGEEVADETGAAVAFECRKFGAGAAERTHLVSWLQQHQVWEVVMESTAQYWKPVWLDLEVHFDKLHLAQAQSNRASKGRKDDFRDAKRLGRRLLAGELMLSFVPEPEQRAWRLMTRGRLQLVYERVRLQNQVEALLEEARIKLSSVIADLLGVSGRRILQALAGGLTDPVQLAKLGDDRLRCSKQQLADALTGAPQPEHLQLLKLHIGRLQLLDQQIETLSQMASAALKQHQDAVVRLSKVPGFGAESAQQLIAEVGVDAEAFPSAGQFASWIGVCPGSNVSAEQNASSRCPKGNRFVRRTFTEAAQAAVKKKGSYFQKLFRRFVSKLGYNGAIWLIAHRLARLVWKILHDGVSYIEQGQDTTPGARKRRAQRLVKALRGLGYSVALTDVLIETAPQIPE

SEQ ID NO: 67500 - protein, 346 aa, unidentified
MMIIGCDFHPSWQQISWLDTETGETGERKLVHVMGDAKQFYEQLSAPALIGMEATGNSQWFIELVEDLGHTIWIGDAAQIRASYVRKQKTDKRDAAHILKLVVEGRFPRLWTPDREQRDLRQLVLHRNKLVEIRSRVKNELQHLSLNKGMQKKCRLWSREGQQMLRELPLKPWASCRREDLLGLLGMLNQQIGALDVAVQKAAEENPQARLLMTQPGVGPNTALAFVLTIGDVGRFPRGKQIASYLGLIPREESSGGRQKLGAITKQGNRTLRSLLVEAAQIAVRYDPEFRKEYVHRCHQKPKGVAKVAAARKLAVRLYWMLRTQKPYPEVVRIESSPRLPLVGAS

SEQ ID NO: 67501 - protein, 415 aa, unidentified
MDLLHPRCAGVDVSKRDAKVCVRIARPGRAGADSKVTTWSSMTGQILALRDQLIEQQVTLVVMEATGDYWKPFYYLLEDAPFELVLVNARQVKNVPGRKTDVSDATWLAQLGAHGLVRGSFVPPQPVRELRDLTRTRTALTRERTREWQRLEKLLEDAGVKLTSVATDISGASGRAMLAALIDGVGDPAVLADLARARLRDKIPALTEALTGHFTAHHAFLAQLHLRLIDQHTQALDDLTERIEVVIEPFRRARELLVTVPGISTTLADIIIAETGADMTRFPTAAHLASWAGTAPGSHESAGRIKSTKTRPGNPYLKGALGIAALSIARSKQNTRLAARYRRIASRRGPMKALVAIEHTLLTAIWHMITTDVGYTDLGGDYYTHRNPDRTKQRALNQLRQLGYDVTLNPLPATG

SEQ ID NO: 67502 - protein, 415 aa, unidentified
MLKIVYPICCGIDVHKTFVIATIATTDRENITTYQTKRFSTFTRDLKALAAWLSEHQCVDVCMESTGKYWIPVRNILEPSCQITLAHPKYVRAIRGKKTDKKDSIWIADLFKHSLVPGSFIPPADIREIRELLRYRSKLVSFKSSEKNRVQNSLTVSNIMLSSVVSDTFGKSASAILEHLLKNPDDKDFDFRPLLHGSMLEKEADIALAIDGTITKVQADKITLCLRHMNSVKSYIADIESKTMLLAQPYSGALAIIQSVPGVSQLSALIILSEIGADMSTFHSAKHLCSWAGLTPSNDQSAGKKKSVRISRAGIYIKPVLVQCANAAIKDKSFTHYRTRYETIKRRRGHKRAIIAIARMILTAIYYMLSSGEFFNPGLYEKAQCKPGFVASSEAHAVKLLQRLGYVVVKEPESA

SEQ ID NO: 67503 - protein, 348 aa, unidentified
MKPEPTKLNRVGIDVSAKTLDVAIETDGKKIPLMCVNNDHTGHKKLLKKLTKRGYHARVVLEATGSYSFKLAMALEEHPRVEVMVGNPRALKRFAEACMQRGKSDPLDAGSILEFCKRMDFQKWVRPSDACLELRCITRRIRQLTDDVVADKNRLGAKHYEGPTAKMVINDIEVNIRHLEKRIDLLEKTALTLIKPHEDLQSKYDLLITVNGIGQTSALHLLGELMIISKDMTAPQWVALAGLDPRLCQSGTSLNKKKRISKAGNKYIRAALYMPAMTAARRDPHIRSFYLKLVDDRKKKEIVALVAVMRKLLHAIWGMFKYKQPFQGASFHPLRVEKEQACAVHIKQ

SEQ ID NO: 67504 - protein, 367 aa, unidentified
MRRKGSAEVMSIAESASPRRVAIGIDTHKYVHVAVALDELGAFLGDIAIPVDQGGYERLLQWATSKGRVTAFGIEGTGSYGAALTSFLRRHGHNIVEVARADRRDRRLRGKSDILDAENAARAVLAGRATAIPKSADGVVEMLRQIKVAKDTAVKARTSAIITLKALIVTAPPELGDELRELSKMALIERCLALRPGKIDTPLAAAKHVLRSLARRWRDLSAEIKEHELLLTQLTRSIAPQLVEAFGIGADTAAEVLIVAGDNPWRIRTEAAWARLCGVAPIPASSGIITRHRLNRGGHRQANAALYRTVIVRMRHHEPTRAYVARRTEEGRTKKEIIRCLKRFLAREIWALMRPLREGPGLSAQAT

SEQ ID NO: 67505 - protein, 335 aa, unidentified
MMKKRYFMGIDVAKISFDFSLLSKEGALLWRGHWDNEPQAIEGFLAQLRTRGWKFSQLHVGLESSGVYGNKLLAALHEAGLAVSVLNPAQVKFFAVSVLRRTKNDRVDAGIIARFCLERKPLSTRPLRRVEEQLKLLVHERESRVAEQTRERNRAKKDPFQIALPCLICRQRLHRLKQLQNEIRQLDCAINELIANDEYLKTQTRLLCSIPGVAQTTAAKLLSELAGKEFHSARQLAAYAGLTPSEFRSGTSAYGKTHLCKIGNAFLRKALYLPAAVAKKWCLPLKPWITLLEQRKLAKRAIRGAIMRKLLHIAFGVLKHQKPFDPCPVFLPKTI

SEQ ID NO: 67506 - protein, 389 aa, unidentified
MFYLGIDIGKNTHVASLMDDKAKIIFKAFCFSNTLDDAEMLLKKIKPYENNIEIAMEATGHYWLSLYSFLIQNNFVVHVVNPIQTDGWRKGVEIRKRKNDTIDSILIADMIRYGDFLETSLSDEDTLSLRNLSRFRSYLVSSISDLKRKSIAVLDQVFPEYASCFSDVFGQTSKELLKSLNLPSEYENLSADKLEKVLANIRLKDKAKSKINDISRKANRSFGISFCKESFSFQLKLLIEQICFIQQQVDSVEEEIALILDKMNTPIKTIPGIATVTAGTILGEIGDVNRFSNPSKLVAYAGLDASICQSGEYEASSGKMSKRGSPYLRKALFQAALIAEFHDPVFSAYYQKKRKEGKHHLVATNAVARKLTHTIYAILKTNEPYEIKL

SEQ ID NO: 67507 - protein, 409 aa, unidentified
MRLFVGLDVSSFDIKACILNGEGKKLDSFSVNNDLPGATAIKERVLQRIANQEIKTFKIGLESTSVYSFHPSMFLHYDEDLQRFGAKVFLMNPKQIANFKKSYSDMDKTDEIDAFVIADYLRFGRNQMSIVKESQYVALQQLTRSRYQLVRMLTKEKQHFLQHLSYKCNTFSQEVDSSIFGNAMMELFLEKFSLEELADMPLEELAEFLQKKGKNRFGDPKCIASTIQKAVRSSYRLDKVVEDSIDVLLGTSIAVIRTYQQQIKEIEKSIKRIMAGLTQTLESIPGIGPVFAAGIIAEIGQIERFDDETKIAKYAGLYWRTHQSGRFTAENTSLSRNGNHYLRYYLVEAANSVRKHVSDYQEYYVKKYNEVPKHQHKRALVLTARKLVRLVDALLRSHQLFTPERCVKV

SEQ ID NO: 67508 - protein, 409 aa, unidentified
MAAVMIGVDPHKGSHTAVVIDQAEMALDQVKVRACTAQAERLLAWAAAWPERTWAIEGAGGLGHLLARQLVAAGERVLDVQPKLAARVRLLAAGDVNKNDPNDARSVAVAALRSAACPQVRAEDHAAVLKVWAKRHRDLSRSRHQVTCRLHAVLCELVAGGVSKQIRAAAAARLLDQIQPCGAVQAARRDLAGQFLADLRRIDAQRRDTKKTLAAAVRTCGTTVTEVFGVGPAVAATVIGDVRDISRFPGPDCFAAYNGTAPAEVSSGNRKVYRLSLRGNRRLNHAIHMAAVTQIRYRHTKGRAYYDKKLAEGKTAKEALRALKRQVSDAIYQHLKADARRAAATAGPGGHPGNGSVASAAGSHPEHRLFGPATPGPESTLRPRPGPSKATRPGSSRRTRRSVPSHTSA

SEQ ID NO: 67509 - protein, 342 aa, unidentified
MEHYAGIDVSLEYSSVCVVDAKGKIVREAKVASEPQALVGWFDSLGFGLERIGLEAGPLSQWLFAGMKRAGLAVELLETRHVRKAFEAMPVKSDRNDARGIGQLMRLGWFRPVHCKSMSAQETRALLTARKLVQSKLHDVENSLRGILRGFGLKVGKTTGQKFAGRIEELVAGHPHLQTIAKALLAVRAVLRAEFAAFEKQTRRMVRSDMQARLLTSVPAVGPIVALTYASAIDDPARFKSSKQAGAHFGLTPKKHQSGETDYTGRISKIGDASVRTALYEAANVMLTKPVKGCSQLKSWAMRIKRRAGTNKAKVALARRLAVIMHRMLADGTPFNAAAAAA

SEQ ID NO: 67510 - protein, 361 aa, unidentified
MTGTMTWAGLDVHARSTHAAAINVMSGELVRAKFGAGLEEPLAWLAGLPGPVKACYEAGPTGYGLYRAARAAGVEMMVIAPGKTPRGPSDRVKTDRKDAELLARLLLAGSLTAVVVPPPEFEAARDLMRAHDACRRDLMDARHRVSKLLLRYGRVYPEKTTWTVRHRSWLGRQQFDQAATELAYLDALACVDAISARKTALAERLSQLALDEQWWPTVARLRCFHGIDTLTAFALHLELGGDWQRFQRAPQLAAWLGLTPTLSQSGESSRQGAITKTGSVLARRLLVEAAWHYAREPRLGVALAARQAGQGAHVLQISHRARLRLHRTHRKMRSRGKPGNVCVVACARELSCFLWAAATAD

SEQ ID NO: 67511 - protein, 411 aa, unidentified
MGAGGEGCGTIAGCDELQQMETAPMQRNDLNRSLVAFDQNSTLVAVVELSLQSWLVAGIVPGVKREPLKKLSADRERLLALLERWRNEAIKAGHAISRIAVAFEAGRDGFWLARWLRARGIEAYVIHASSIPMPREHRRAKTDRLDTASLKRAFLGWLRGEAHHCRMAQIPTLEAEDAKRPTREHESLVGERTRVVNRMKATLVRLGITGFNVKLRKAAEKLAALRTPEGAPIPPNTLAELCRGLERLAMINAQIAAIERARLLRLKAAPQHGTHPMILMLAKILGLGIETADMLVHEVLARGLRDHRAVGRYGGLTGSADESGSQRREQGLAKAGNGRVRRGMLQLAWRWLMHQKDSALTHWYRERSANGRGDTRKTMIVALARKLLIALWRYVTTGELPAGVVLKAKAI

SEQ ID NO: 67512 - protein, 354 aa, unidentified
MTAMLAGTVEFVIGVDTHRDSHTAAIVQAATGGVVDQLTVATDAFGYRKLQAFADQYAPGRRVWAIEGTGSYGAGLTTSLLEHGQWVVEIDRPARPARRDGAKSDDLDVVRAAREALARDYLAAPRARGDREALRVLTTARSGAIVARTKAIGQLKALIVNAPQSLRDQLRRGTTDPQLQRCARLRTLPGHTTEHRATIRAIRGTARRALALEAEASEYETELEQLVVAICPALLERPGIGTITAAQFLISWSHSGRIRNEAAFAALAGAAPIPASSGTISRHRLNRAGDRQLNRALHTVALSRLRIHEPTKAYADRRTAEGKSAREIMRCLKRAIAREVFRLMTHHAQGPMAA

SEQ ID NO: 67513 - protein, 426 aa, unidentified
MDDISRIEQFRQFKNQIRGSDRFLIVGLDIGKSIHYGFLGTANGKTVKRGLRVENSDSGFEHLLTMLQFYMDRDGFKDVVFGLEPTSVYHKPLAEFLITHHYLVVYVTNEAIKKNRALLDGRWDKNDTKDSANAADLVAQGKCQFYDLPDIQLRDLRALLALRQRLKKQLHSCRVRIRNNLVAQYFPELDKCWNQAQEENLAIVRWCLSPRVISEMSFEDFFQMVTTRNKGLRQYNRLIKIWEIAPYSIGCQPGIAMELEAQILVENFKTIEAHIASIDESIEDICVSFQEYKYLLSIPGFGPYVSAVVLAGIGTARRFENTRQVVKFAGYDLNANRSGQKSQSAVPVISKKGKASLRYALYQAALIASSSNAKFRGYFHHRLAGREREKGIRTKMRVKLAAKLLVIAWTLMKKKQAFDSSYLKVQ

SEQ ID NO: 67514 - protein, 341 aa, unidentified
MAIVAGLDVHRAQITFDALDTDSGEVMRGRIDATPSAVARWVERFEGEVDVAVEACTGWLFVCDALVAAGAVAHLAEPVETRALRGRKRRAKTDREDARWLRELLAEGRLPEAWIPPDHVRQWRSRARLRHTLIGERTKWMQRIQATLFHHGISGTPEKLRTRAGRAFLDSLEVPADARERIEIALAMVDAIDGQIAPLERELRQLARRQTGCRALMGLYGMGELTSLVTLCELGDVRRLSASRKAVRMAGIDIGVHRSDRRARAGKLTRQGSPQLRWALYEAALSACRPSSPDHADYLALKARGLSHTRASLTIARKLARRSFHVLRELGPAALEPVPTA

SEQ ID NO: 67515 - protein, 351 aa, unidentified
MMIIGVDYHPSFQTIAFLIEETGEYGEQELNHSDGEAEKFYRELKQRGTSVRVGLEATGYSRWFERLLAELGFEVWIGDAAEIKTKRVRKKKTDREDARLMLKLLLENRFPRIWVPSPENRDLRQLLWHRHRLVQMRTRIMNQLQAVAMNEGYRWKKKLFSAQGRALLEKLSLAPWASRRRKELLELLDQLDPKIVELTAAVEHEAKKRPEVVQLMTHPGVGPITGLAYVLVIGTPERFPSGKQIGSYVGLIPCENSSAGRQRLGHISKQGNTLLRFLLVEAAQAAARCNPDWRRRYLHLMMRREKRIAKVAMARKLAVRLYWMWRNGWDHSQLVEFGSNAGKLVISHGVK

SEQ ID NO: 67516 - protein, 354 aa, unidentified
MDSKKYIGMDVHQATISVAVMNEAGKVVMDSVIETKAGTILELIQGLHGTLWVSFEEGTSAAWLHDLLKPYVAKVVVCDPRKNALLKAGNKNDRIDARKLADLLRAGLLSPVYHGESGVRLLKELARSYLAITKDLTRVQNRIKGLYRSWAIPCAGQKVYSPRHRTAWLKQLPESVQRRAARLYQQLDDLRPLRREARQEWLLESRKHPASALLRQIPWLGPIRVAILIAFVQTPHRFRTKRQLWAYSGLALRTRVSGEYRSADGQLQRAKWQPAVRGLNENHNHELKALFKSTATRASTAAGPVGEFYTALLATGMRPTMARLTVARKIAAIVLSIWKKGERFDPEQLKRQAA

SEQ ID NO: 67517 - protein, 367 aa, unidentified
MFTERTSVGLDVHARSVAAAAIDGVTGELVQCKLTPSDEHIRSWIADLPDPVAVTYEAGPTGFGLQRVLMAAGIRCEVAAPSKLQKPSGDRVKTDAKDAVHLARLLRLDEITAVAIPSVDQEAARDLVRAREDCRGDLMRARHRLSKLLLRHGIVYYGGDAWTGKHDTWLRHDAAPQLVSRATRLAFDSDYETVIAVKARRDRLDLAIAEMASESEFTELVRRLGCLRGVSTLTGFALAVEIGDWHRFTGNTIGSFVGLVPSEYSSGNSRVQGSITKTGNTHVRRLLVEAAWHHRARYTVGKTMRDRWELAPSAARIRGDEGNRRLHQRWVKFIERRKRHTIANIAIARELAGWCWSLAVLEEHPQH

SEQ ID NO: 67518 - protein, 426 aa, unidentified
MESTEEPVELVERVAALDLGKAGLVACVRVPHEDKPGRRRQEIREYATLSRSLLELADWLRCERVELVAMEATSSYWKPVFYLLEAEGFTCWLLNARHVKNVPGRPKTDKLDAVWLAKVAERGMCSPSLVHPKPIRQLRDLTRYRRSLVRERTREKQRCEKLLEDAQIKLSSVISDIFGVSGRAMLEAMIAGQRDPATLARMARGSMRSKIAALQEALTGHFEDHHGFLAARMLQRVDALSADIEAVGARIEAVIAPFGRHVQRLDEITGVGVIAAEELIAEIGVDMTRFPTAAHLVSWAKFAPIDKNSAGKKHGGATGKGNPWLGATLGEIVVGVSRTDTFLGERYRRLARRRGKNRAIVAVGNSVLTIVWHLLANPDARYQDLGSDFHQSKINARRRERDLVRQLEHLTGKKVTLAPRPEQPAA

SEQ ID NO: 67519 - protein, 308 aa, unidentified
MSSHCIYLGLDFSKEKFDFHGADTRGTIVNTPAEHRRFLAKLTPGTHLVCESTGSCHRALVTAAHAAGVALSVANPRQVRDFANGLGRRAKTDPIDAQSLYDFGRLVQPKADLAPSPTQMALQELVVARQQAVLERSSLLVQAPSHSVALIVSLHRARIVLLTKHIAKLEAALTATLAQEESLAAQAARLAQVKGVGLLTATTALALCPELGTLNRGQAASLLGVAPFNHDSGQLQGQRHIAGGRYRLRCAIYMAALSAVRFNPILRAFYQKLRARGKAAKVALTAVMRKLFLLLNHLLKNPKFVLAS

SEQ ID NO: 67520 - protein, 408 aa, unidentified
MNTTLYVGIDVSSKSNVVYLMLPNGDKHSNFSVANSHDGSIQLVKRILSALTSHSLDTVLIGLEATSVYGDNLVYFLREDATLAPFNRKIHVLNPRQVKQFHDAYNDLPKNDYVDSFVIADCLRFGRINKEVYIGDYHYKALQNLTRARYFAVQNLTKEKQRFINVLFKKYSTMTQEKVFSNTFSTTALAVYDEFESAEALANMDLQELTDFIIEKGKNRFPDPDAVAKAIQKAARSSYRLPKTVNDSVNQVLSISITSMKALDAQIKEFDKAIKAQMELLPNVLISVPGIGPVYSAGIMAEIGDINRFENQAKLAKYAGLAWKQYQSGGFESETTRLIPSGNRFLKYYLCEAALSLVRCDKEYSDFYHLKYKEVNRYQHKRALALTARKLVRLVFRLLKDNRLYRPA

SEQ ID NO: 67521 - protein, 400 aa, unidentified
MSLDPHEERAAIQTHISAIFISLELSRSKWLITSLAPGGGQKMSKHSVEAGNFAGLLARFSAIREKASARTGISYPIIVIQEAGLDGFWIHRALEQEGIESHVVDAASIAVSRHRRRAKTDRIDGEGLLRALLAFKRGEPRVCSMVRVPTPEEEDRRRICRERKTLLVERIQHVNRIKGLLFSQGIGDYEPLRRDRREALEAVRTGDGRALDANMKAQIGRELDRLELLLGQIAAVEAERDAMLAREAEAKAKAARDAKRTPAAVEMLMDLRGLGAEIVAMLWTEAFYRSFDNRRQLGAFVGLAGTPWQSGSIDHEQGVSKSGNHRLRTAMIQLAWLWPRHQPGSALARWFHERTQGASKLQRKKMVVALARKLLVALWRYVDAGVVIEGAVLKSAAKAS

SEQ ID NO: 67522 - protein, 351 aa, unidentified
MPRPSTVQAVTTIGIDMGKNTLHMIGLDSRGAIVLREKVSRGRIILRLANLPPCLIGIEAGMATHYVARELAALGHDVKQVPPAYAKPFRQGHKNDFRDAHAVAEAVQRPTTRFVPAKTDEQLDLQALHRVRSRLVSERTAVINQIRGFLLERGIIVRQGLRFLRQALPDILAKRTDVLSPRMVRIVADLASDWRQLDERIEPVTDEIETLAKSDGSCRRVMTVPGIGPIISSAMVAAIGSGAAFARGRDFSAWIGLVPKQMSTGDRTILGRITKRGNGYLRTLFVQAARVILLRPASWPKHGFGVWLARAAQRLHRNVLAAALANKLARIAWTVLAQERNYEARIMKAAA

SEQ ID NO: 67523 - protein, 418 aa, unidentified
MNEDGNTRGTRRYVALDIHKYYCVIAGVDREGRVLLQAVRVEHADLEGWLKKNLCSTDHAVIESTTNAWHVYDLLAPLAERVVVANPIKVKQIAQARVKTDIRDTLILARLLAANLVPDVWVPPVHVRELRQLLSQRRQLVETHTQIVNRMHSVAHRHHLTHERGKRFNEKTTLWQKSKTLSSLEQFQLGLEMENLTYIEKQIERISKEVRKMCHQKPWAESMTYLMQLPGFGVITAMTILAAIGDIQRFETPKHLASYSGLTPGLEQSGTKHRGKGITKEGRRELRWALVEAAQMAVKSDPVWKTRFQEMLKRMHRNQAIAAVAHRLLELVWYVLTRRQPYRHFSHERIAYKYLTWAWQMNDEARDGLTRQQFARYYMMRLGIGHDLTRIALDPKHPRKIASEAELLALRPELKQTE

SEQ ID NO: 67524 - protein, 349 aa, unidentified
MRFYKKSHAFYCGVDLHARTMYLCILDSAGAVVLHQNLPSDPKRFLSAIAPFRSDLVVCCECLFAWYWLADLCAKEQIPFVLGHALYMKAIHGGKSKNDKIDSEKIASLLRGGNLPMAYPYPQGQRETRDLLRRRGYLVHKRAALVAHIQITNAQYNQPPFEKKLIYAKNREEMQVADRFQNPHVQKSIAADLAVVDCLDEVIGDLELYLEKAVKVEDSQTYHQLRSIPGVGKILALTLLYEIHDIKRFETVGDFISYARLVRPSHESAGKKTGNGPKKIGNAHLRWAFGEAVCLLLRESDVAKRFVARKEQKHGKAKALGLLAAKLGRAVYWMLRKGKAFDVVKFWNS

SEQ ID NO: 67525 - protein, 320 aa, unidentified
MGQEFKSFVGIDVSEGWLEVCVLPQAARRRFAQDAQGWQALGEVVAEQPAPLVVIEATGGLERPAARLLSAVGIAVAVVNPRHTRQFAKGLGWLAKTDRLDAALLARYGALAQPTAHPPLGVAQARLQALVLRRRQLAQQVNAEGNRLRRATEALIRCSLTAHLAWLKAELAALDEHIAAALAAQPEGSERATILASVPGVGPVATSTLLALLPELGRRDGKAIAALAGLAPIAQDSGQRRGQRCIDGGRAVVRCALYMATLVARRHNPVIRAFYQRLVAAGKARKLALTAAMRKLLVILNAMLRDGSTWNPDHAAATNP

SEQ ID NO: 67526 - protein, 347 aa, unidentified
MFQLAVADAQWRVVETQRLTRTHFERWFLNREVNLVIMEACGSAHHWGRWLNSLGIEVRLLPAQYVRAYVKRNKTDAADAAALLEAARASDMRPVRVKSVEQQALQGMHRIRSLWMGTRTSRINALRGFCREFGIAIPVGARTGIEAISRVLADPNTAVPELIRGTARLLVEEIRLLEARVAQLERELACLAKLSPACTTLLSIPGIGLLTATALVAATSGDVSHFKDARHFSSWFGLTPKEYSSGNSRYLGHISKRGDRYLRMLLTHGARSVLRAAKVAECAGKEVGGVRRWALDVQARGNHNKAACALANKLARICYATLRDKVPFGESSRLGKKVNRESFVMPA

SEQ ID NO: 67527 - protein, 419 aa, unidentified
MRNSNTKKLKRISEQTLLVTVDIGKVKHTGYCRFPNGTEGKPFEFFNSRNGFEELWWRVCQAKRSINLAEVVVGFESTGPYAEPLLHFLRKRDVRLVQVNPLHTKRLKELQGNSPNKTDQKDPKVIADIIELGHALTVIIPEGTVAELRRLTQARERSIQRMSMLMSQLQDLVFLIFPEFITVMKDITIKSTQYLLKNYPRPQDIVEQGIDGLAQILKKVSRGQLGKERAEALYQAAVESIGIGEGRESIVLEIREIVFSIESIEKFVKEIEKHMSKHLKDVPYSRCILSIKGIGEITAAGLIGEMGDFKNYRTISEVIKHAGLDLFEISSGKHRGTRRISKRGRPLLRKLLFFASINVVRKGGILHKQYQHHLEKGMPKMKALVAISRKLLSIIFALVRDHSVYIAEYSKTQQLKEAA

SEQ ID NO: 67528 - protein, 347 aa, unidentified
MYKANRRDGLCERSLTMFPVGIDVSKNTLDLCILYDGIKGRIKTRNIQNNRHSVENILRWLRLQHCGPEDVHVVMEATGVYHERLATELHDAGFRVSLANPHRSREFARGMGIMTKTDKVDAYMLACYAFLKKPHHWEPPSPEIRYLAALLRRRDVLLGDALREENRLEKYLSTDTPADIISSCRRMAQLLREEVSNIERQIKAHIKASPALRRDYTLLNSIKSVGPQLGMHMLVVLRSHNFASAEQAAAFLGVVPIEKRSGTSVRSRPRMSKIGPPQLRARLYMSALCGKIYNKRMRNIYDEMCLRGKPKMVAIGALMRKLVHWCYGVLKTGTVFNDEGLKQVLST

SEQ ID NO: 67529 - protein, 478 aa, unidentified
MAGKMNRKQRKELMRRLRSDDPGLEVVHPRAAGIDVGNSAHYVAVRPDQDPESVRRFECFTADLHRLADWLQSCGVDTVAMQSTGVYWIPVYEILEERGFEVYLVNARHTKNLPGRKSDVQESQWLLKLHTYGLLNNSFRPTAEIRVARTYWRQRGEHVRGASTCIQRMQKALTQMNVQLANVISDLSGLTGQAIVRAILCGERDPKKLAELSHAQIRASREEIAKSLEGNWRAELLFVLKQEVEMYDTYQRRIAECDRELEAHLKRLADNVHQKPAEGRPVSEEQKDKKAPTKLPRSAKRAQGNAPSFDLRSELYRISGVDLTRIDSISVMVAQTVISEVGLDMSRWKTEAHFASWLGLCPDNRISGDKVLSKGTRHVVNRAATALRVAATTLVRSHSYLGAQYRRLRTRLGAPKAITAMAHKLARLMYRMLKYGQEYVDKGMQYYEDRYRWQQVERLKKTAAKLGLQIVEIQAVGG

SEQ ID NO: 67530 - protein, 373 aa, unidentified
MKKNTAEFAGRTVGMDVGDEYCHLAALDCEGGLVEETRITTSRKSVDAYFARIPRSRVVVEAGTHSRWISRIIEKGGHEVIVANPRRLALIYGSDSKSDRNDAVSLARLGRIDVNLLSPIKHRDERAQADLVLIRSRDVLVKSRTQMVNHVRGITKSFGVRLRKCSTDCFHRRVKESMDSIPEVLQPAVVPMLDVIEDLSKMISRYDKAVEEIARKRYPETERLRQVAGVGPLTSLAYVLTIEDPHRFPTSRKVGSYLGLRPRRDASGSRDPALRITKAGNSTMRRLLVGSAQYILGPFGPDCDLRRWGMKLAERGGKNAKKRAVVAVARKLSVLLHRLWVRGADYDPLRNAKRLEHLKRELKGSYVIDGIEM

SEQ ID NO: 67531 - protein, 325 aa, unidentified
MEVKKLCCGIDVSHTKLDVCYQNNLGELFHLQVGNNNKGFEKILEHTGIAYHFVMEATGVYYIRLAFYLQQQQCKLSVVNALSIKRYIQMQLERNKSDKKDAGWICRYAIDQCPPYWEMPDSAYFECKQLYNTIREYTEQTKRFNNQLHSLRLLPVPSKDTIRSLEKVKHQLAKEIDNLEQKLEALLQQWQPVQLKSVGSIKGIGKRATAMLIVFTQGFKNTHSHRQLISFAGLSPTEYSSGSSIQGKPRIYKRGGKNLRDVLYMCSMNAIKTNTACKTLYERLRAKGKTGKQALIAVCNKLLKQVFAVVKNSTLYQPNYCSAKP

SEQ ID NO: 67532 - protein, 429 aa, unidentified
MNDREIIRLEQFRQLKKEIRGSEEHLIIGIDVAKQKHNAFVGTATGKTLLKRLVFENNKEGFEKLLMHVESISASNSHKRVTFGIEPTANYHKPLAEFLINKEHDLVLVSGVAVKRNRELLDGRWDKNDMKDSANVADLISQGKCLFYEYPTHVLRDLRSFLSLKKKFKKIEHGFRVRIRNHLLAQYFPELDRYYGHNEPENLAIVRWCLSPSKIAEMKYEDFFRLVTTRDRGLTQHRRLKAIWDSAHYSIGCSTGMAAEFEAEVLVEALKRIRETIGSINEKVIEICVLFPEYQYLLSIPGFGPVISAIVIAAIGDPFRFESGNQVLKTAGWDLNANRSGKRSDSVIPVISKRGKSDLRYALYQAALIASTRNKHVTSWFIEKLRGREKEQGIKTKMRVKLAAKLLIIAWTLMKKKESFNPELLKIKK

SEQ ID NO: 67533 - protein, 310 aa, unidentified
MIIAPGFVGIDVSKHHLDIFDAAVGIAAHLTNTAAAVAELAHDWARRDAFVLFEATGCYDLDLRHALTAAGVRFARVNPARARDFARAAGFLAKTDAVDAEMLAAMAQCLQLPPAKAGLAAREQLAALNRRRDQLVANRQQERTRQRECPDPFSRQSIAAHLAWLDAAIKAIQAQIAAAIAAEPELEHDRRLLSSAPGVGPVTAATLLALMPELGRRSPKQLAALAGLAPFNNDSGTRRGQRSIRGGRKRVRDALYVAAFIAARHAPRFKAFFKTLIDAGKPRKLALIAVARKLLTVLNAILRDRQPFHA

SEQ ID NO: 67534 - protein, 364 aa, unidentified
MKRKLYVGMDVHKETIRIAYLTSNSKEILKEQQIKHNEVQIKKFIKKLKTEWNEIHCCYEAGVTGYPLYRYLKSLGVNCILVAPGKIPRQSTDKIKTDKRDAIKLARLMRSGELESIHVPSEEDEAVRDYLRSRDSLRLDLGRNRQRLMKFLLRKDIKYSTTKYWTVSHYKWLNNLHFNNEILQETFNDYYSRVRVQEENLKAMDKKIQEIAESEPYREKVGILRCFRGVDYLTAMFLLSEVNDFKRFKTAGSFMSFLGLVPGEYSSGSKRKQTGITKTGSPRLRRILTEAAWQHRFPGTGSKIITARRSGQPALVVALAEKASLRLHKKFRNLQLRGKTPQVMITAVSRELSGFLWAAMNLVA

SEQ ID NO: 67535 - protein, 462 aa, unidentified
MNKNTRKLLSVSKGISQTAQSPKHLEHINRWAAGIDIGATSHFVAVPEGCSESTVREFKSFTPDLYALADWLKQCGVQTIAMESTGVYWIPVYEILEEKGFEVKLVDARQVKNVSGRKTDVLDCQWIQQLHTYGLLNGAFRPDDKVCELRSYVRQRSMLVKSASRYIQQMQKALTQMNLQLHHVITDITGDTGLKVIRAIIKGERNPAILAKNRDPRCKSSNDDIEAALTGNYRAEHLFALKQSLELYDYFQEQMKACDHEIEKNIAEFSTNILVANVPVEQLNPNKKRVSKNSPDFNLGKELHRLSGVDLLAVPGINNVSAMQLLGEIGFDMTRWKNPKQFASWLGLCPGNKVSGGKSISGKTKPSNNRAAATLRMAASTLYRSQTSLGAYLRRLKSRIGPMKAITATAHKLAIIIYNMLRHGVEYVESGQAYYEEKYRDRMIKNLKRKATEFGLTLIEAG

SEQ ID NO: 67536 - protein, 342 aa, unidentified
MQITTIGLDIAKNVFQVHGIDAAEKVVVRKQLRRGQMLAFFKALPPCLVGMEACATSHYWARELTKLGHQVRLMPAKDVKAYVKRNKNDAADAEAICEAVRRPTMRFVQIKSVEQQGQLMLHRARDLLMRQRTQLINALRAHMAELGIVAAQGREGVKELLKIIASEQDARLPVDAHASLVVLAAGLQALQTMIGSIERRIIAQHRSDEASKRLRSIPGIGIVGATAIAATVPDPKVFRSGRDFAAWIGIVPRQDSTGGKQKLGPISKRGDQYLRRILVVGAHAVLKRARHQPEKYPWVTRLLERKPFRVVAVAVANKMARVAWALLARGGSYRAPALAAAA

SEQ ID NO: 67537 - protein, 345 aa, unidentified
MSRNTTKSETQAMFAGIDYHKKFSVVTLGDKDGRPILQEKVPSDAESVTKFFAGRNGLVCAIENCRGNEWIVELLKSFGCEVRVANTYAVRLIADSRCKNDKIDSRILMELVSRNYLPVCYQPTEEERLLREQLRFKTKLMRSKTQYKNVAHALMDKENKGRGIGSTKKRKQAQEHAGLHPERQQRLSRALQVINFLEEQMSLEDKELVEWGRSNPDVRRLKTIPGVGDLSALMLVAELGDVSRFRKAKNVGSYLGLVPRMYASSDVCRMGRITKQGSGLVRRILVQDAWMAVKVSNVFRNRYNSILKRKGKRVAIVAIARMLAEVAFRILKDKTEFKEELLTLG

SEQ ID NO: 67538 - protein, 342 aa, unidentified
MEHTTIAVDLAKSVFQVAVSHRPGRVDEERRLSRDRFLEFFAQRAPATILLEACGSAHYWARQLQPFGHVVRLLPPHDVRPYVRRNKTDRTDAKGLLEANRNEDIHPVPVKTIEHQAIASLHRLRSTWLATRTARLNTIRGLLREFGIFIPVGAHHVVARVRTLLLESTTVPVLLHTTLAAACDEIDVLEADMRAVERQLGALAAEMADVTLLQTVPGVGLITATALIALVADIRRVPSGRHFASFLGLTPKEDSSALRRRLGAISKQGDVYLRMLLTHGARSFLWHAKAARQPTALQHWALSVEQRRGHNVATVAVANKLARIVWAVWTQQRPFVTDHRQP

SEQ ID NO: 67539 - protein, 338 aa, unidentified
MNKLNIIGIDLAKNVIQLHGNDHHGHTRFTRKLKRKEVLAFMVNQPQSLVAIEACGGAHYWARALQAQGHEVKMIHPQYVKPFVQVNKNDARDAQAIAEAAARPAMPTVAIKSIEQQDIQAIHRVRERLVKEKTAISNELRGLLGEYGIVMPQGHKSIRETVLSILENAENGMSMEGRSIINDLREQWLDREERISQYDNKLKIIAKENDVCVRLQTIPGIGPVNATLLYSHTGDHNHFASGRHLSASLGLVPRQHASGGKENLLGISKQGNKHVRKQLVHGARAAYKVLLKEDNTSRLGLWVKRMEGKHPNKIIVALANKMARIVWALMKNEAVYQA

SEQ ID NO: 67540 - protein, 413 aa, unidentified
MTESSDYESVQVFIGVDVGKDTHHAVAINRSGKRLFDKALPNDENKLRSLISDLKQHGQILLVVDQPATIGALPVAVARSEGVLVGYLPGLAMRRIADLHAGEAKTDARDAAIIAEAARTLPHALRTLKLADEQIAELSMLCGFDDDLAAQTTQASNRIRGLLTQIHPALERVLGPRLEHPAVLDLLQRYPSPEKLASLGEKKLAAQLCKLAPRLGKRLAADIAQALAEQTVVVPGTNAAAVVLPRLALQLITLRKQRDEVALEVELRVLAHPLYPVLTSMPGVGVRTAARLLTEVACRAFASAAHLAAYAGLAPVTRRSGSSIRGEHPSRRGNKALKRALFLSAFAALRDPLSRAYYTRKMSQGKRHNQALIALARRRCDVLFAMMRDGTFYTRRGHNMLDNLIGAPPEGQG

SEQ ID NO: 67541 - protein, 355 aa, unidentified
MNSEKYIGLDVHQATISVAVLDFTGKLVMESILETKAATILQFFAGLRGRLSVTFEEGTYAAWLYDLLKPHVAHLVVCNPRKNALLKEGNKSDRIDARKLAELLRGGYLKAVYHGETGMRTLRELARSYLTTVKDLTRVMNRLKAVYRGWAIPCAGRDVYYARHRTAWLGKIPHPGVRRRAEQLYQHLDLLQGLRQQARRELLAESRKYPATARLRQIPCLGPIRSALLVALIQTPHRFRTKRQLWAYGGLALETRISAEYRYVEGQLQRSKKLLSIRGLNQDHNHDLKALLKAASLAASVRPGPFRDFYQALLAKSMKPTMARLTLARKIAAIALTLWKKGEAFDPEKLKPQAA

SEQ ID NO: 67542 - protein, 320 aa, unidentified
MPQNGRIVGLDVAKSKADACIRSLQLRLSQPSTPEGRAAMLAWLRAHDVETAVMEASGGYERSWAEALRKAGITVRIVDPKRVRHFAKSAGCLAKNDALDAAMIAWFAETFPDLPALPHDPDREELDALVTARKALVNLVTQLGNPGEHRQPRAVRRAYAAILRNVAAQLARLEAAIAVKLAATPGFAARADIIQSIPGLAAQTVAGLIAWLPELGHIGNKEAAALLGAAPYDDDSGKHKGERHIKGGRQEIRNLLYMATLGAATRHNPILKAYYQRLRAKGKPAKVVLIACMRKLIVILNTMLARGEKWDPARCQASPA

SEQ ID NO: 67543 - protein, 431 aa, unidentified
MNRSVEFLSVGIDVGADFSLMAFALPSQEPLGKPYKIIHSSQRSLNGAVEKIKTLSQKYQLPARVFMESTGIYHYPLYHKMKDAGFDVFVLNPLVTHAGRDLNVRNIHNDKYDSQKIALLGLRPGLKTSLIPSDQVISMKVILREYYAVKKEISMYICRLKNQLRQAFPQFLPLFSKVNGVTAMAILCEYPNPESLLNAGEHAVADFMKSVSHNGPLKVQKKAAALIQAAQDARSFGHWNHGISILIRHYIEMIRLLDVRAKTLLAQAKTLLAEQDSKTLAHQTELLQTIPGIGFLSALTLICELGDFSAFKRPKQLFSYFGLDPIVRQSGNYNGANLKLSKRGSPFARRCIFVIALQSISLNIHKEPKNPVLRAFYEEKCMCKAKMTAIGAVMHKICNLIFAVLRNDAPFVLQTPEQHNAAYLSKTHSVA

SEQ ID NO: 67544 - protein, 408 aa, unidentified
MLFVGDDWAEDHHDVELVDEAGRRLAKARLGEGVQGITRLHELVAAHVPEDAEPGQVVVGIETDRGPWVQALLASGYQVYAINPMQAARYRERHSTSGAKSDAGDAHALAELVRLDRAAHRPIAGDSDLAEAIKLVARAHQTLIWDRHRHLLRLRGALREFFPAALDAFDDLTAPDALELLGAAPDPVTAASLSQARIRGALGRARRRHPAERAVQVQAALRAEQLGQPPVVTGAYAAIVRSLTAVITALNTQIKAMEVQVVTHFGRHPDAERYRSQPGLGDVLAARVLAEFGDDPTRYAGARSRKNYAGTSPITKASGKKKVVLARYARNDRLADALHQQAFCALTASPGARAYYDTLRARGIGHHAALRQLANRLVGILHGCLKTGTRYNEETAWGHNLDQQQAGA

SEQ ID NO: 67545 - protein, 343 aa, unidentified
MHVNTIGVDLAKNVFQVHGVDSAGKVVITRQLRRKQVLDIFSKLPACLVGMEACGTAHHWAREISKLGHTVRLMPPSYVKGYVKRSKSDAADAAAICEAVTRPSMRFVPIKSPDQQALLMLHRTRDLLIRQRTQLINALRAHLAEFGLVAETGREGLAQLGAIITDESNRESLPSAMKQALQAIVDQLAALELQVGTLDRAIHAHHRANDMSCRLETVPGIGVIGATAIASTVTDPSGFKSGRDFAAWIGLVPRQHSTGGKERLGRISKQGDRYLRRLLVIGATAVVRQARQHPQKHPWIMRLLAKKPAKLVAVAVANKMARIAWAIMAKGGYYRAPELAAAT

SEQ ID NO: 67546 - protein, 392 aa, unidentified
MSRVWVGVDAGKGFHWAVAIDEEGEVLISRKAHNDEADLSALVEEALSLGPDLVWATDQPGGSTALLLALLWEREQRVVYAPGVAVNRARDAHRGESKTDARDARLIAELAQMRRDLATLEPGAQLLAELRLLVAHRRDLVLDQSRSIVRLREALVALFPGLERTLDLRTRGPLVLLTRYQSPGALRRSGQKRVEAYLRSKGVRNAARLAENALRAAKAQRVVLPAEGIAAGIVRELTERALGLKERIAELDQELEDRFFAHPLSEVLESLPGMGPVLGTEFLVAVGDPTETFENADRLAAYAGLVPAAYDSGKRVGNRRRMRGGNKLLKSVFYRSAFSSLRHHQASRAFYERKRAEGKKHRQALIALARRRVNVLWAMMRDGERFDPVRAA

SEQ ID NO: 67547 - protein, 403 aa, unidentified
MNGPIVSVDVSKGKSDYQAFKDLNVKFTDVRSIKHTKEGFDEIVNLVKDMERKLETEVCVVYEATGVYHRVLKKVLEDNNIKQFIINPLLSAKTRKNDSLRSPKTDKLDPKSIAKTYYNQSLHSSYKPQTTYHELRELSRYYEDILVHIRKDKVAFRAQLDIVFPGYDTLFDDLYGAVSLTVIEKYPHPELLQKKSINTVSKIIQKKTRHRQAVSNKMAFKAIEYSKTIYSGCGKDDIDVLILERLIKKLNEDLNEAERTINEMIRLVQELPDFIIIKSIPGIGDNLAARLIAELGDMTRFKKKNELVAYAGLDPRIYESGQKDGAHMHITKKGNKRLRCLLYLAVTCSIRLKRDDNSIKDFYIKKMQQSNPMCSKAAKTACASKLVRIIYSMCKTGELYQYK

SEQ ID NO: 67548 - protein, 311 aa, unidentified
MTSQFAGIDVGKDSLTGNLYGQDVVKDYPNTSRGIQRLSTWLQKHEIDLVVMEATGGYEKMASRQLERAGLAVAVVNPTYVRRFAQGMGTLAKTDPIDARMIAWYASVKQPKPRPPRSEAAEALSACVDRRDQLVAMRTMEKNRLGSAAAYVQSSITAHIQSIDEQIKQMEVEIDHLIDQEEEWQSRIACMTSCKGVGKVTAVTLLAEMPELGHEKREQIAALAGVAPMNRDSGRKSGRRKTRGGRSKLRRVLFMAAMSAAKFNPVIHAFYQRLIEKGKPKSVVMVACMHKLLTILNAMLRKNEMWRPDFA

SEQ ID NO: 67549 - protein, 368 aa, unidentified
MQETTTAFVGLDAHAESTAIGVAEAGGAVPRFVGTVGPKFTELSKTLAKLGDPCKLLIVYEAGPCGYALARELKRTGYRCEVVAPSKVPRRPGDRVKTDRRDALTLAGLARAGELTFVVVPDERDEAIRDLSRARIDAVRARLKARQQLKALLLRHNRRYSGKTSWNAAHERYLAAVSFDHRAQNVAFVEYRQAVSEGQARVERVSEALAQELESWRMRPLVRALMTLRGVDQLVAMTLVAELGELKRFAHARELMGYLGLVPSEHTSGEKRRLGAITKTGNSHARRVLVEAAWNYRFPPRISVPLQKRQEQQPAEIRTIAWRAQLRLNHRYRQLTARHLQHNKICVAIARELAGFVWSIGQQLTIPT

SEQ ID NO: 67550 - protein, 322 aa, unidentified
MGTTKATKEGGDMDVIIEKGCGLDVHKETVVACVMGEGIKKEIRTFSTMTGDLFRLKGWLSEKGIKHVAMESTGPYWKPVFNVLEDSFEVILANARHIKNVPGRKTDVKDSEWICKLLRSGLLAASFVPPKAIRELRDLTRYRRKLTQAISSEKNRVQKVLEDANVKISSVVSDTFGVSASRMIEAIMAGGLDTEAISDLAVGKLKGKKEELKKALVGNFQAHHRFMIQASLNHIGFLEKIIAELDQEIDRKLEDYHQEYELLQTIPGVKEQGAASIIAEIGADMDRFPSEGHLSTWAGMSPGNNESAGKKKAERRPTAIRI

SEQ ID NO: 67551 - protein, 326 aa, unidentified
MQGKESSEQKAKVKSSAGIDVCKSWLDAHVLPEGCSLRVVNDARGHRRLIAWLSQYAVSLIAIEATGKWPRQVHRMLHARGFQVAVVNPRRARLFAEAIGLLAKTDRLDARMLALLAVDLSPPARAPAPEAIEALQELVAGRDSAVAEQTALENQLAAATTTFFTRQLKARIVRIAKDIASLQTEIERRIGCDEALARRYAILISIPGVGPVTAATLIANMAELGTCSTKQIAMLAGLAPVADQSGSREGRRAIRAGRAAVRRVLYLCALAAKRCNPAMTALYDRLMAAGRPHKVALVAVARKLIVLANTLIVQNRLWQSQPPIQA

SEQ ID NO: 67552 - protein, 343 aa, unidentified
MAIVCVGIDLAKNVFALHGVDEAGKPALVRPTVPRAKLVEAIAALPPCLVAMEACSGAHHWAREFQKLGHAVKLIAPKFVIPYRLSGKRGKNDAADAAAICEAAQRPSMRFVPIKNVEQQGQMCLHRVRQGFVEQRTALINRIRGLLSEFGIVLALKAATVRREALLHLEDLPGWANLAVGDCLSEVSRLDERIRDYDRHLAQLARQNESARRLMQLSGIGETTATALIAAIGNGHDFQCGRQFAAWLGLTPGQYSSGGKTRLGRITKAGDAYLRSLLVLGARAVLASAKNKADPISRWAMRLQERRGYWRAVVAMAAKNARLAWAVLRKGEGFTPPGAPSPA

SEQ ID NO: 67553 - protein, 343 aa, unidentified
MQAITTIGLDIAKSVFQVHGVDAEGNVVIRRQLKRRYVLAFFQKVPPCLVGIEACASSHHWSRELQALGHTVRLMPPAYVKPYVKRHKNDAIDAEAICEAVTRPNMRFVATKTREQQSCLTLHRTRHLCIRQQTSVINAIRAHMAEFGIVAPVGRNGVEELLTVAADASDKRLPDVARACIVALGAQLRTLKAQILQFDRLILAWHRSNQASRRLDDIPGVGPVLATALVATVADPIAFRSGRNFSAWIGIVPRQHSSGGKDRLGSISKRGDRYLRGLFVAGALAVIRYAKIHGTKHRPWLTALLARRPTKVAAIALANKIARMAWAMMAKGERYKEPVALAA

SEQ ID NO: 67554 - protein, 347 aa, unidentified
MKRTTIGLDIAKHVFQAHAVCSETGAVTRTKLRRAEVLMHFAQLLPSIIVIEACGSSQHWARELAKLGHEVKLVAAQFVRPFVKTNKSDAADAQAIWTAAQQPEMRVVAVKTEEQQAVLGLHAVRERLKKSRTAAVNQIHGLMGEFGVELPRGWRVMLPRAAAALDEATSRVPALLRGQLRRQLDEVRGLTAQIDDVEQQLASWRRRQEHCERIAAIPGVGLLTATAAVATIGDARAFRSGRHFAAFLGLVPRQRGTGGRVQLLGISKRGDGYLRSLLIHGARSVLVRSAARQDPNTWLGRLVQRRPHNVAAVALANKMARQIWALLAHGRIYEPARSLPPQTLMPA

SEQ ID NO: 67555 - protein, 335 aa, unidentified
MNHCSYLGIDVSKRKLDLALLNNINSRKRKTKVFDNNAKGFELLLDWLNKNVDKDLSELRIIIESTGVYHRSLAYFLADHGLFVSLINPADSHKFIASGNLHKTDQCDAIALAEFGVALNLRDKLVQWQPKPIEIRQLNALITRLDALKTDLQREQNRYEKAEVGDYPKDILQSIINTQTFLKQEIVRLEKKIDDHIDRHPKLKKDCELLKTIPGVGEAVSLRMMSLYHSHKFHCASQMAAFLGLVPRLKESGNYKGKAMLSKRGNSKIRALLYLPAVVAKAHNPDIKHCYERLLAKGKAKMQAIGAAMRRLVHICFGVLKHQSKYQARNAVICA

SEQ ID NO: 67556 - protein, 342 aa, unidentified
MSTIKTIGVDLAKNVFSIHGVDAYGKCVLRKTVKRNKLLDTFAKLPPCLIGMEACSGAHHWARELLKLGHNPKIMASKFVIPYRQNEKNDANDAEAICEAVSRPKTRFVSIKSEEQQAVLCLHRIRQGLIKTRTATINQLRGLLSEFGIVMPQGRYSAQNTIGSVLEDAENGLPILARELLQDLSNKIQNLNLEVLHYDRRVSALVHEMASAKALMDIPGIGEHSASAIIATVNDAKQFGSSRQFSAWIGLVPRQYSTGGHVHLGRISKRGEKHIRTLLIHGARAVIARCKEKTDRNSIWLNQLVERRGYKRATVALAAKNARIIWALLTTGKEYKINYVNG

SEQ ID NO: 67557 - protein, 360 aa, unidentified
MRKYIGLDVHSKKIVYVAMDEQGQVIGKGQIETSEAGLKKLLRQVRCRKGTQVGLESGQQAFLVARWLVGLGMEPKVIHAQEVRAKARRKRQKSDSRDAYEICDGLRRGIWEAFVYVPTQKVQRLRQLLSRRRHFVKVSTMQVNAAKFLLRSVGVKFAGQLASEQAWQKLLAQKELRPLREHLQMHAEMWRLARQHIDRLERQLEEATEDFKQQMEILTSMPGVGKITAAGFIAAVGDVRRFEHAGKLASYLGVVPSSYDSGERVRHGRITRSGPDWLRALLCEAAHHAGRLNHPLNPYWRRLMVRHGYRRAVIAIAHRMVRILYKMWLRGERFDVGKLNVVYEPGTLQRQYIYRLREAV

SEQ ID NO: 67558 - protein, 339 aa, unidentified
MKITTIGLDIAKKFFQLHWVDMTTGEVHRKQLKREQMAEFFATCEPSLVAMEACGSAHYWARKLQAFGHEVRLVAAQFVRPFVKTNKTDAADARAIWEAVQRPEMKFVAIKTEAQQGLLTLHRLREQMVKFRTMQSNQLRGLLYEFGVALPTGRAKGMPAALEALGALEEALPAMVIDALRQQITRIQKLDEDIADIEKKLTLWKKEERSAMNLMEIPGVGILSATAAVATIGDATTFKSGREFAAFLGLVPKQSGTGGRVRMLGISKRGNVYLRTLLIHGARARINFQKQRDPWIEQLLARRPFNTVVVALANKMARTIWAMMAHDRTYQKNYATSIA

SEQ ID NO: 67559 - protein, 341 aa, unidentified
MEITTLGIDLAKSVFQLHGVDADGAVVLQKKLRRGSVLEFLGKLEPCLIGMEACPSSHFWAREIAALGHEVRLIPPAYVKPYVKRQKNDVADAEAICEAVTRPSMRFVPVKTEDQQAVLVLHRSRDLLMRQRTMILNAIRAHLAEFGMITAQGPRKVVDLARRLSDPDDGLDLPVLAGSALLSLVAQLESLVEEIGKIERQLMAWHRQSAASQRLETIPGVGIITATALAASVPDPSVFKSGRQFAAWLGLVPRQNSSGGKERLGRVSKMGNGYLRRLLVVGATSVTRRAGTTDTWTGAWVRSLLERKPTRLVTVAIANKTARTAWALLAKGENYTAAPAT

SEQ ID NO: 67560 - protein, 388 aa, unidentified
MPAAETPVAYLGIDVGKSSHSACALDAGGGVAFRAELANRPDDIDRLLERAGSGALVVVDQKRNIGALVLARAHAHGNPCAYLPGYAEKQARGMFPGTAKTDAIDAEVIARTALGVPRALRPAPEEPEGSTSLRILSSQREFASSARTRAKNRLRATLLEADPALEGAVDPSSRWQVSMLAEFGGAAGCSAAGWRRFSNAARRAGAPAAGARRLWEALLASSRSGRRLPAGEDVAVRILAREIASLDADIEELDSLVADSLAGDEVYECLLTVPGIGPKTAAALVTSIDISAFRGHDELASYCGVAPSDRRSGSSIRSTSPQHGGNRQLKNLLIFSCNSLIGTDNRFGRYYGECRARGMRHSKALKAVARKRLKVIYAIMRDAVPYAA

SEQ ID NO: 67561 - protein, 394 aa, unidentified
MIYAGVDIAKTDHVIGAVDERGAEMCRPMPFKNTEAGLERAVAWLEGLAESPSDVVVGMEATGHYWMACYSFLVARGYSVAVTNPMQVKAVRKLKGLDKVKNDRIDAGLIAEALRIGQYDETRLATDEVASLRSLSRYLQSLRGMIAELKTQCVCLMDAHFPEYAGIFSDMFGAGSRAVLSKSPLPFELARRRADSLARDIAEASRRPGRSAGLAAEVKAAAKSSIGVRLGQEAASFQVKSLIRQIEFADSECAGVEARVRELLDEVEPLVLTIPGVSYVTGAQIVSEIGDVSRFRNAPALVSYAGLNSSVSQSGQFDSGGGPITKHGSPYLRRALWLAANRARQYDPGLRAFYDKKRAEGKPHRVAVTAVARKLCHIVFAVMRDQVPYDPDRE

SEQ ID NO: 67562 - protein, 315 aa, unidentified
MNDQVEHQCVENTVAALSSYLKAVKRRFKVKDASIYLGIENTGRYSWPALRAFSCGELKLHLLSPLHLSKSQGLVRGKSDLVDSQRIARFLKKNLDELSLYQKPREVIEELSLLLARRNKLQKLIKAESATIEEMGQVSKGRVRSFIIADSKKSVLALKKRLQMVELQIENLIAEDQDLKHKVKLLMSIPGVGKILSWYLLVKTNEFKNFDDPRKLACFAGVAPFQHTSGTSVRGRTRVSSFADKTLKRILHLAALRVTQMKGELGEYYRRKVEEGKNKMAVINALRNKIIHRIMAVIREDRPYQIREKNTLLVS

SEQ ID NO: 67563 - protein, 423 aa, unidentified
MDVMYERVAGLDVHKQTVVACVRLMVGRKVVRECRTFATTTDGLMGLLAWLRVSRCSHVAMEATGVYWTPVWKILSDGEFELLVANAAHIKNVPGRKTDLNDAMWIADLMACGLIKASFVPEEVLHELRSLMRTRKQLGREQTRHVQRIQKTLEEANIKLDSVISDILGASGRRMIEAMIQGVRNPQQLAALAHRGLKASPTQLHDALHGRLTDHHRFLLNLHLGQWDRLEAAIRDIDREVDGRIEGMDQTLKEGELPFRMLILRLSSIPGVGALSATTILSEIGRDMSRFPTAGHLVAWAGLCPGQNESAGKRKSSGLRKGAPWLKTMLVQCAWAAKRQKNSYYMAQFYRLQTRRGPQKAICAVAASLLTAIYHMLKNGAPHHDLGADYFDRRSPTAKAKRLVAQLSRLGFEVTLQPLTEAA

SEQ ID NO: 67564 - protein, 338 aa, unidentified
MKFKRIAIDTSKHVFTLHGVDDQERPVLRRELKRAQVESFFAKQQATEVVLEACGGSHHWGRLLSQLGHRIRLIPPQYVKPFVKRAKNDRNDAEAISEASSRPTMRSVVVKTVDQQADGIILKHREMLVGQRTQAINALRGHAAEFGVVAAKGLTKVAPLLAVLAADSAIPASARAMFARMGDHIAALDHQVAAVDDELAALHKANPVSQLLAAIPGVGPLGAITLALTVEPGNFASGRHFAAWLGLTPKEHSTGGKQRMGKISKAGNEKLRQLLFVGAMSVIRFAKPGSKSASAWLLQLLQRKPRKLAAIALANKMARIIWSMMSRGEAYRRQPIAA

SEQ ID NO: 67565 - protein, 430 aa, unidentified
MKSNTQNAKIEAITEKTLVLGIDVGSETHYARAFDYRGIEYSKKPFKFSNTEVGFATFKEWILDLKERHEKDKVIPGMEPTGHYWFNLGKFLQDNEMKPVLVNPHHVKKSKELDDNNPTKNDRKDPKVIAGLVREGRYMIPYLPDGVYADLRTASNIRFQLQAELTRIQNRISRWFNIYFPEYKTVYGKPDAKSGMLILKAAPLPEDILTLGIDGVNQIWRDAKLRAVGKARAKTLIEAAEHSIGSKEGTMSARMEIRMLLEDYESKNMRLQEVMVLIEELVKEIPMAEKLLEIKGVGIRTVSGFLAEVGDISRFNNPKELQKLAGLALVENSSGKHKGKTTISRRGRKRLRYLLFEVAMSLMAKNPEFRELHNYYTTRRLNPLKKMQSLMAIAAKLIRVFYAMLTKGVDYDPKKMISDIKRPTVYLQAA

SEQ ID NO: 67566 - protein, 384 aa, unidentified
MQKPNDLNQSRIVLKQDSTLIAVIEMSLSSWLVAGIVPGVERQPLKKLAVDESALLKLLNRWREEAEKAGRRIERIAVAFEAGRDGFWLARWLRARGIEAQVIHASSVAMSREHRRAKTDRLDTELLKRAFLGWLRGERDHCKMVAIPTTKDEDAKRPNRERQSLVGEQTRIVNRMKAALIRLGIRGFNPKLKKAAGRLENLRTPEGEPIPPNTLAELHRDMERRRLVSDQIRQIEEARLERMEQAPGDGPHAMVRLIARVIGVGIETADMLVHEVLSRKLRDRRAVARYAGLTGAPDESGSKRREKGLAKAGNARVRGGMIQLAWRFLLFQKDGTLAHWYRTRTEGGRNRKTMIVALARKLLIALWRLVTTGEVPAGVVLRAA

SEQ ID NO: 67567 - protein, 343 aa, unidentified
MDYFAGLDVSVKETSICIVDDAGKLVRELRVASEPDALLQVLTNNSYRFKRIGLEAGPLSQWLFSALAEAGLPVICVETRHMRAVLKAQINKTDRNDARGIAQMMRVGLYRPVHVKTLRSQKLRMLLTHRKLLQSKAIAIENDLRATLRNFGLKVGMVGTVKFEARIRELVANLPDLTVLVEPLLIVRRVLREQLGILHRRVLAVVRDDDVCRRLMTVPGVGPVVALTYRVTVDVPARFRNSKSVGAVFGLTPAKDQSGERDRSGAISRCGDEMMRMMLYEAAQSMLVRSAKWSWLKAWAMKIAKHRGMKKAIVALARRLAVIMHRMWVDGTEFRWTREVAVA

SEQ ID NO: 67568 - protein, 417 aa, unidentified
MFKIFRKNCCGLDVHKTWIYACIGITDPNGRTDYKQVRFSSFSKGLRELSDWLAKYNCHDICMESSGKYWIPVFNILEKTCFVTLAHPKYTKPQRGNKTDRKDAKWICDLYMCDMVKPSFIPPPDIRNLRDLLRYRTKLTNMLASEKNRALNCLTVSNLKLDDVFSDVFGKSARSITCYMLDHPGETFDVAPFIDGCCKTPIEEIQAAVDGAISYEQAVKLKQCLAHIDELEKHKRQIEQEIFHIAQPFSDVLALIRTVPGLNSNPLTAIAVLSEIGSDMSVFPTAKHLVSWAGCCPRNDRSAKSTKSTRISRAGCYLKPLLVQVANALLKSKHHSEIRERYNRIKSHRGHKKAIIAVCKMLLTAIWNILSKHEPYSPEGYRHDYPSHQQKVLTKSQALELLKLRGFIIQDDPLSSV

SEQ ID NO: 67569 - protein, 376 aa, unidentified
MKKDTRFVGLDVHKDTIAVAVAEAGRDGEVRSLGTIPNDADAVRRMVRKLEGPDGLHVCYEAGPCGYVLYWQLAKLGVRCEVVAPTLIPVKPGDRVKTDRRDAEKLARSLRAGDLTAVWVPDAEHEALRDLVRAREAAKTDQRRARQRLLKFLLRRGCTTPPGMRSWTDKHREWMMKLKFEQRALEETLTDYTAEADHQRARVERLERALDEAVERVPVAMRAVIDALQSLRGVSKLTATTIVAEVGELSRFDRAAQLMGYSGAVPSEHSSGGKTCRGGITKTGNSHLRRVLIEAAWTYRHRPRIYGALRARQEGVEQPVKEIAWKAQHRLHQRYRRLAERGMPHQKVVTAVGRELLGFIWAVGVYVERQHRAPVS

SEQ ID NO: 67570 - protein, 424 aa, unidentified
MKYSQNEKIAQVTEKTLIVGVDVASMTHFARAFDFRGIELGKIIRISNDVQGFRLFKLWVNELKGKYNRDTVMVGMEPTGHYWFNFAQFLKDSGIRIVLVNPFHVKRSKELDDNNPTKNDRKDPKTIAMLVKDGRYQVPYVPEGLYSELRTAMETRWHIVQGLNAIGNRVKRWLSIYFPEFSKVFSAWEGKGALIVLKEFPTPEKVLQKGVDGIAARWRKDKLRPLGLKRAMRLVEAAKNSVGVREGLRAAETSLRMLLAEYEMKKQQLEEIMVLVEELIYQIPGIKEVLKIKGIGLVTAAGFMAEVGDLSRFDHPKQIQKLAGLNIRENSSGKHKGKTTISKRGRRRLRALLFQGIMPVVAKNPEFRRLHQYYTTRAQNPLKKKQSLILLCCKLIRIIFALMKKQVAYDPQKMMNDIQRPVAA

SEQ ID NO: 67571 - protein, 410 aa, unidentified
MKVKRYYLGVDWSDEFHQVWVSDPEGKKVIEKKVLENVDGLSEFGRWLDESRAQGIELWAAIEKPAGRIVDFLLDHGVVVYPVNPKALDRVRDRFRMSQSKSDSFDAYVLAEYLRTDHAHLRALEPSSEQAQEFKMLTRDHHRLVRHKTRLINQIEVTLKEYYPRPLEVFSDLESKIALDFLTQYPTPRALSDLTRRKWNRFAKRDHHLGEAHCKELWEKLNQPQLGIPEHVVRAKAQLLLVLVAELKALAQAVQSYSEEVQRFFASMPAAKLAQTLPGGKSGTTVAMLWAELGDAKSRWESFRHLQAEAGGVPVTRSSGKSHAVVFRYACNKLMRYASYWLAFNSLNRCEWANKYYRDQRAKGHHHPQALRALAAKWLKIIFIMWRDGKPYDENYHLANIARQTIRQAA

SEQ ID NO: 67572 - protein, 312 aa, unidentified
MAHIICGVDIGAETLDARIGRDGAWQQFVRTNDSIDRLAAFCRTHQAGLVVMEATGGYERLPFHRLWSADIPVAIVNPRSVRQFAEAMGTLEKTDKIDAGMIAWYGETKRIVPTPPPSDDQRALTALVRRLRQLIGLRTAQNNQRRLVDQAVALDSFTTILAMINREIRSLQARIIALIDADPLWLALDRAFREVKGVADRTIACLMANLPEIGTLSGKAIAKLAGLAPIARDSGKKNGNRPVRGGREAVRSMLYLVAEIVRRHDPDFKAFHQTLRAAGKPTKVVRIALARKLLVRLNAKARDVRKELAQPA

SEQ ID NO: 67573 - protein, 425 aa, unidentified
MNYKQNEKINQVKESTLVVGIDIGSTTQYARAFDWRGIELGKVFPFSNSREGFESFKAWMQHLQDKYKKLDAIVGIEPTGHYWFDLGAYLEDEGILLVMVNPYAVKQTKELDDNSQSKNDRKDPKVIAKLVTEGRYSAPYTPDGVYADLRIMVANRKRLIREMTRSKTDLPDGSPYISPSTPDVFGDYEAQSSMLLLKKVCTPEAIVELGAGKINQIWRDAKLRAVGMKRATTLCETAKRSIGLKKGSSAARYEMKLLLEDYEYKKAQLDAVMEEIEKLCRKIPESEQMLAIKGIGVITVAGFLAEVGDVRRFESPRQIQKLAGLSLRENSSGKHKGQTTISKRGRSKLRAVLFNAAIPLIAKNPEFKSLHEYYTTRANNPLKKKQSVIAISCKLIRVFYAILAKGVTYDAQKLISDIHRQPQAA

SEQ ID NO: 67574 - protein, 392 aa, unidentified
MRISVGIDIAKEIHWVTAIDADGAVQIDRKLPNTPADIATLSDELTALRGTVRIGLDVIGGIAGLAQAMLAEAGFALVHVPGIAVNRARQGTVGGENKSDPRDARTIADQVRTRPDLRPIEPAAELDLEIRLLVSRRGDIVQAQTQRLSRMRDLLVGIFPGLEACLDLKAKGPLHLLTKFVTPAELRAAGKKRLVRHLQAAGGLPKVEDLADLVLIVAAEQTVAVPAEPMTARLIRELANEALASRTRLIELDRELETLLQRHPDAALIRSLPGMGAVLTAELIAEAGNLARFRSADALASAAGMAPVLRQSGRTRFLRRPSGGNKGLKRVFYQSAFCSLNHDDSRAFYERKRREGKRHHQAVIALARRRVNVLWAVLNSRTPFQTRFKAAP

SEQ ID NO: 67575 - protein, 428 aa, unidentified
MNSTQNERINQITSSTLIVGVDIAKFKHVARAQDYRGVELGRTITFENNREGFELFVCWFHKIATEQGFKDVVVGMEPTGHYWLNLAYFLREQQVLCVVVNPLHVKKSKELDDNSPTKNDIKDAKVIAQLVKDGRYAVPNLPQGIYAELREAMKIRDHLSTDLRVVQGRVHNWLDRYFPEFLTVFKDWECKSARQMLGLCLLPHELVTQSEESLLRHLREVAKRGLGIERMRCLKAAASRSVGIREGTELARIELKLLLTQYELLESKFEELEAKLDELLEQIPHVKKLMAIKGIGRDSIAGFLAEVGDIERYRHPKQIIRLAGLNLKENTSGKHKGQTKITKRGRKRLRALLFRVMMPLVAKNRAFKELHQYYTKRPTNPLKKMQSLIALCGKLIRILFCVLKKGRQFSEERMLQDIPRFKVVSLAA

SEQ ID NO: 67576 - protein, 319 aa, unidentified
MNQTLHFIGIDVAKARLDIAVRPTEQRWQVDYTEKGIQELVDQITKLHPTLVLLEASGGLEVPMVTALAVASLPVVVVNPRQVRDFARATGKLAKTDSLDAMVLAHFAEVIRPLRPLPDVETQALTILVTRRNQVMGMLVAEKNRLHTSRPPVRQRIQLHIDWLEKELYEIDQDLKETLGNSPVWREKENLLRTVPGVGPQLAVSILAYLPELGTLDRKRIAALVGVAPFNRDSGTLRGKRAVWGGRSHVRAALYMAALVASHHNPVISTFYQRLLAAGKAKKVALTACMRKLLVILNAMLKHHCSWQCLNPQIIGPCS

SEQ ID NO: 67577 - protein, 318 aa, unidentified
MNKINVGIDISKRKFDVCILLPSSKALTRIFDNDAKGFADLLEWFDQKKVSPCLIAMEATGWYGEDLARALYNRGIAVFVINPAQIKYFGKSKLSRAKTDKKDAHLIAEFASTHPELKPWIPLTDSQEKLKNLYRHLDRLKADHAQLLNRLESIRDEDVKKLSTAQLDFVNNQIQDLQKQIRLHIKSDPNLKEKEALLLTIPGVGEALCWAILTEVPDVKDFRDAKQLAAFAGLNPSICESGTSVRGRGGISKTGSSFLRKMLYLPSMNAMRFNPIIKLFADTLRARGKKGKVIVIACMRKLLHIIYGVLTKQQPFTG

SEQ ID NO: 67578 - protein, 315 aa, unidentified
MTQYTIGVDISKAHLDAHRLPDDVARQFSNDRRGFADLIKWIGTRSAERIVYEPTGAFHRDFEEAMTAADLPLAKVNPLQARRFAEARGTRAKTDKVDAAVLAHMGVALQPDICAAPSKIGRDLKELQIARQALIKDQTAAKNRSKSLRLAMLKKQNKLRLRQIAQNLKAIEDAMLVLIKADQKTARAFEILCSIPGISTLTAATLLTEMPELGSLEQKAVASLAGLAPFSRESGKWKGKRFIGGGRKFLRDALYMPALVACRFNADMKVVYQRLKEAGKPSKVAITAVMRKLIILANTLVKNNRTWSEIRTLTT

SEQ ID NO: 67579 - protein, 461 aa, unidentified
MPLSINVVNMMMKDNNNIKVCGIDPHKRKCQAMILSINQDHHTVAAKTELRFDNNLTGALELLKLLRDADCNRVVIENSNNFAYALYEFLREAKVHVELVGPSRVPAKHKKSDRVDAEWLALMYSRSMVSPDYVPTKEIRQLRDLLRLRSLLVRARTMLKNNVHANLTRGTFDISKIVSDAFGKRGFEILEMLSLASVGVHDYDDALLRLPKAVIEKYKDAVNNSFIAQINGVTLGVALGIIKALNEGIKELEDTIAQHILEHEELKRMVELIMTIPGIGLIVATTIVAEVGDFSRFGSKKELAAWAGMIPDTEESNGKQKSHGITKRGSPHIRRVLCEAANVIALHGKPVGLLRFYKRILHRKGRKVAIVALGHKLLRVIYALIVTGKRYEDEEVPKNDRRGRRTIPEVDKGELKRIHTKKMKMLQRRGATGKAVMKKYREIGALRAHISTGMSEEGEAT

SEQ ID NO: 67580 - protein, 336 aa, unidentified
MNIIGCDFHTRFQQIAMLDTETGEIVERRLEHENGEARNFYGGLSSPVRIGIEATGYARWFERMLLEQKHELWIGDSAQIRAAMVRKQKTDSRDALHILELLVGNRFPKIYVSKLEDRDVWQLLQHRCKLVRWQTSIRNQLHALAMGEGVCRKKKLWSQSGREELQKLQLDPWASRRRDELLAMLDRLAPSIRELDQAVEQTAKQCPNAVLLQRQAGVGPVTSLAFALLVGPVKRFCNSRQLVSYVGLNPSEHSTGGKQRLGSISKQGNAMVRWLLLQAAQTASQHDEGLRRDYRRLVSRRGRAVAKVAIARKLAVRLYWMLRQVSEANAANSHAG

SEQ ID NO: 67581 - protein, 350 aa, unidentified
MAIVGGFDIHRRQVTFDYLDTVTGQVRRGRIEPACRLVLREWLEERFAGRDDVTFAVEGCTGWQFVVEELQRAGIAALLAEPAQTADLRGSKKRAKTDKTDARHLRTLAADGRVPASWIPPAQVLELRALLQLYRDLREEHTAWTQRIHATLFHQGVPGLAGRLSDPRARARLAAAPAAMGLSAAGAQAVQVALRRMDDLEAELAPVRAQITAFARRQPGCRTLQHELFGVGPLVAAIVWAFLGDTRRFSSSAQAVRHTGLDVTVHSSDGKGPPGSLSHQGPPILRWALFEAGHQGSRASSPDHRYYADVAARIDANRAALSVARKLARRSHHILRRLGDQAYAPVPAGR

SEQ ID NO: 67582 - protein, 328 aa, unidentified
MDYHQSSVQVCVMDAGGETLMNRRCRNDWLAVVEAVAGYGQVAGAALESCCGAADLAEELIEHAGWSVDLAHPGFVSRMKQSPDKSDFSDVQLLADLERVGYLPKVWLAPQEVRELRRLVRYRQQLVADRRNTKLRVGALLRDQRVRNAPARPWTRVWTAWVIQTPQLSEQSRWLIGRHLHRLGLVVEQIDEVERRLEELTQDDSVVRTLRTHRGIGPVTAWTLRAEIGRFDRFRTGKQLARFCGLSPRNASSGMRQADAGLIKAGNRQLRATLMEAAHRLIEFDDYWKGFAMDLIKRGKPKCLAVAAVANRWVRWLFHQMQPERLAA

SEQ ID NO: 67583 - protein, 452 aa, unidentified
MPAGKDITMHYQKVLKMPESIPYLSVGFDVGADFTWMSIMLPNGILIGKPFKIIHSDPQSRELAISKIKEAQEMYSLESRCFLESTGIYHIPLLCFLRDKGFDCAVINPIITKNSTNINIRKLHNDKFDSKKAALVGLNASLKTSIIPDDAIIDLRNLVRDYYYFKDLQSAIVLKLHAELKVSFPAYLNVFSKVTTQTSLKLLEAYPLAADMLAAPKDELVETIRSTARFGETYALARYDAICTAAKDAAVFGRALPSNALRIRLYIKMYREYQAHLDSILEELHQAVGKLEGTPDYDRISFIQTLHGVGFLSAVVLIAEMGSFDLFSSPKKLYAYFGLDPGVNDSGKFHGDRVHMSKRGSSLARRILHMVAINNLKVDKATKTPVNPVIYDYYTRKCASKKKSVAVGAVMHKICNIIFAMLRDNKPFELITPEEHRERYAAEHPESVNTAA

SEQ ID NO: 67584 - protein, 320 aa, unidentified
MSASSVVVGIDVAKAHVDVAVLGAKLDAQRFDNQAEAHSALAAAFKPLDVALVVMEATGGYETELACALQAAGLAVAVVNPRQARDFAKSMGRLAKTDAVDARMLAEFAAVLLRRDDLARFLRPLADPQQQWLAALVTRRRQLLAMLLSERQRLQITPQGLHPSIEAIIAAIKAQLDEIEGQMIGHVREHFGELDQLLQSTSGIGPVASATLIAELPELGRLNRREIASLVGIAPMANDSGASKGRRRIQGGRFDVRRVLYMAALTASRRNPVVKAFYDRLIAAGKLPKVALVACMRKLLTTLNAMVRTNKHWDSSLHGA

SEQ ID NO: 67585 - protein, 354 aa, unidentified
MQIHTIGIDLGKTVFHLVGLNLRGEVVVRRKCSRTQLLQFTANTQADLIGMEACAGAHFLGRALREQGHEVRIIPAQYVKPYVKTNKSDFIDAEAIAEAVGRPTMRFVPIKTDDQLDMQSLHRVRERWVIRRTAVVNQIRGLLLERGITLRQGRRHLEAALPGILEDATARLSGALRMLISQLKHELEELANFIGEADGIMERTSRENESCRRLLAVPGIGPVTATALIAAVGNGAAFRKGREFSAWVGMVPRESSTGGKQKLLGISKRGNPYLRKLFIQGARAVMLRGTKQSPGLKTWIENIAMRKHHNVAAVALANKMARIAWVVLARGEAYRPSLLTESEPNLNGLQMMPA

SEQ ID NO: 67586 - protein, 421 aa, unidentified
MLGVGIDWAEEFHVVALGSPSEGVIDVVRIAHRPEAVSALVARIAGLEPDPAEVRVVLETRHGLLVEALVQAGYTVLPVNPELVSRRRGPARKKDDAEDARICCLLALDRHAGLKRLIPHGQIAGELRSIARDDERACRDERRLLNRLRADLIVTFPAALAIAGEDLGATRILRLLERWPTAQALAAATREEIIEFGRAQRTGYLQRFADRIQAALAEDQFTAPEHLVRAKVDTIRLLARQLLLIDAQRRVWEKRMGELLLGASGQPAEDQPGNAFPGGEIYLSFPGLGRRLAARIAGEIGEHIEQFTTPNSLQCYAGRAPVTRRSGKRDLVVAHRLACNRYLADAVHKWAFASLRRSAWARQFYDAQRSRGKNHHAALRALGNRWLEVLWHCLTNGVPYDEAVHVANRNQALAATTASAA

SEQ ID NO: 67587 - protein, 343 aa, unidentified
MKIIRVGVDLAKNVFHIHGVDRHGKAIFKRRLRRHNWLAVLLDNAAPGCEIGMEACTGAHHWGRLLQARGFTVKLIAPQFVKPYVKSNKNDAKDAEAICEAMSRPGMRYVGVKTVAQQDIQAMHRIRAELIGQRTAKANQIRGLVAEYGLVAPPQLRRLRAAIPGWLEDAENGLTMRFRELLQGLWNDLLTLDERVGELDREINRIAQSDPVAKRLQQLRGVGPMVATALVSAVGNAQQYGKGRQMAASLGLTPRQHSTGGKDRLFGISKRGDTYLRSLLIHGARAVVSQAKHKDDRLSRWVTAIAQRRHPNVAAVALANKTVRMAWAMIRKEKDYDLGFVVT

SEQ ID NO: 67588 - protein, 351 aa, unidentified
MTEHSREPIVTLGIDLAKRSFHLFGVDARGREVLSKKLSRARLSEFMANLPPCTVAMEACGSAHHWARLFRTFGHTVRLIAPQFVKPFVKSNKNDAADAEAICEAAQRPNMRFVSVKSVEQQDIQAMHRMRSLVVERRTAQVNQIRGLLLEYGMEIPKGRAAVSRRLPEILEDAENGLSARLRAELSELAEELRHLDERVRHYDAQLQAIAQSDPRARDLMTIPGLGAQGATALLAAVGEDAHVFSNGRGLAAWLGLVPRQHSTGGRPRLLGISKRGDVYLRNLLIHGARAVLRWVERKEDPLSRWATTLKGRRHTNIAIVAMANKIARIAYAVMTSGKPYDAAKGALANG

SEQ ID NO: 67589 - protein, 347 aa, unidentified
MKFYTKQHKFYCGIDLHAKSMYVCIMNQDGEIVIHRNIRTNPEVFLKTIAPYREDIVVAVECIFTWYWLADLCAQENIHFVLGHALYMKAIHGGKAKNDKIDAHKIAVLLRGGMMPMAYVYPQGMRSTRDLLRRRMHLTRKRAELLAHVQNTNYQYNLSDIGKKIAYKANREGVAERFPDASVQKSIELDLTLLNHYDQLLPRLEHEISLIAKTHDADSYFRIRSIPGIGRILGLVILYEIHDINRFPKVQDFVSYCRLVKSAKESAGKRIGTSGKKIGNVHLKWAFSEAAVLFLRRNLRARKYREKLQRKHGKAKSLTILAHKLARAIYYILKRKEVFHMETFFAT

SEQ ID NO: 67590 - protein, 355 aa, unidentified
MSGEKYIGLDVHQATICAAVMDPMGKVIIESILETKAATILEFFAGLRGTLSVTFEEGTWAAWLYDLLKPRVANLVVCNPRKIALLQHGNKSDKIDARKLADRLRLNDLESVYHGETGVRMLRELARSYLTIVKDLSRVMNRLKALYRSWAIPCAGRDVYYTRHRSEWLGKIPEAGTRRRAEQLYQQLDMLQHLRQQARRELLAESRKHTITAKLRQIPALGPIRSALAVALIQTPHRFRTKRQLWTYSGLGLETRDSGEYHYVQGQVRRRKKQVSVRGLNKDHNHDLKGLFKGAATMASVRPGPFQDFYQRSLAKGIKPTMARLTLARKIAAITLTLWKKGENFDAEKLKSQAA

SEQ ID NO: 67591 - protein, 344 aa, unidentified
MGEVITIGLDIAKSVFQVHGVDDAGTVVIRKRVSRSKMLEFFADLPPCLVGIEACPAAHHWGRELQALGHTVKLMPPSYVKAYLKRSKNDANDAAAICEAVSRPSMRFVAIKTREQQAALMLHRARQLLVRQRTMLSNAIRGHLAELGIVSAKGRNGTDELLEIIMNGADSRIPLVARNILKVLAAQYSTIGTEIASIGKSILAWHRSCEPSRRLEEIPGVGPIVATALVAEIGDWKAFRSGRGLAAWIGLVPKQHTTGGKDKLGSITKQGNRYLRWLLVAGAMAVIRYAQKHGTKKRPWLGRLMERRPTKVAAVALANKMARIAWAIMTRGERYKEPELLLAA

SEQ ID NO: 67592 - protein, 391 aa, unidentified
MKFIGIDVASLKHDIIIIDDYGEIIKDHFTISNDKVGFKKLHTEIKSCMKSVNDIHIGMEETGIYHENLRDFLISKGFTVYTINPLLTSYSRKSLSPRMTKTDKIDATAICRYIMNNIRALHSYTPSLYHLDELKQLSRNYHSKNKLLSKSKTELKRLLHISFPEFKIHFDPLSKWSLSVLHDYPLPTNYARLHTITLASRLRTKSDRYIQAILLKQIAKDSIGKSNDSQTFLIRSIISDINHYDKQIKVLKKTITTKLKLFPKITSVPGIGPINGATILGETGDINRFNNKHAYFAYYGLDPIIYESGKYKLKKSKISKRGSRFLRTAAFSVSRVACVGYSKQTNKFREKYNRMKKSGKHHNTIICAVSKNIIHSIYKILKDDIFYDDSK

SEQ ID NO: 67593 - protein, 338 aa, unidentified
MFEVGTIGVDLAKNVIQIHGADSDGKVVVRRQLRRSQFLAFEGRQGCLIGVEACSGAHHWGRQLQEMGHEVRLMPPSYVKPYVKRNKTDAADAEAICEAVSRPSMRFVPVKSEADSAALVLHRARGFLVGQVTQVGNAIRAHMAEFGIVTAKGSKRVASLAGELDRVPGTARLPLQALFDQLAETQARIDRLTDEVGEVRRQNEVSRRLASIPGVGVLTATAIAATTPDVNDFGSARDYAAWLGLTPKQHSTGGKQRSGGISKMGNRYIPRLLHLGAMAQIMVRRRRRHPGTDWVSQKLAAKETRVVAIALANRMARTIYALLRDGTSYRPRLGVVPG

SEQ ID NO: 67594 - protein, 453 aa, unidentified
MEMEIINPNAGGIDVGSKSHFVAVGQSLEDVKEFGVYAEDLTSICLHLQSYGITSVAMESTGDYWQNLYVALINYGIEVVLCNGKFTKHAKGKKTDVKDCRWIQKLHALGLLTSSFLPDETTEILRTYCRQRNNWIDLSSSASHKMQKYLKFLNFRLDVVVKDVCGLTGLKIIEDICNGNLDPESLAEHRHYNCRKSKEEIAKALHGNNRKDYLFGLKQEYESYNFFQKKIKDCDREIERLVKTELKKDPAKLKLTTTEKPYKRINKNAPEIKDFNQIAFRYFGGIDFMAIEGVSHATIMSVMSEIGVEGFKKFITSKAFCSWLRLAPNNKISGGKVLSNRIPKGSNRLKIALRQAANAIGNLKDTHLSDFFHRVAYRKGRQAAVSATARKLATIIWTMVTKKVPYKPPTEYLFLDQKRKQKVMQRIKKNIVKFDLKPEDVGFGNSLNISLSL

SEQ ID NO: 67595 - protein, 345 aa, unidentified
MKIVGCDLHTRYQQVAMLDDETGELVERRLEHESGEARAFYAELTGAVRVGIEATGHTRWFERMLRELGHELWIGDAAQIRAAMVRKQKTDARDAAHVLEMLLTERFPRIWRPTMAERDLRQLVWHRQKLVWMRVSVSNQLHALAMGEGVCRKKKLFTKKGRAELESLALDPWASHRRQELLKILDQFDASLNELDRAVAEQAEQNAAAVLLMTHPGVGPVTSLAFVLTIGPVERFQRSKQVVSYLGLNPREHSSGGKQRLGAISKQGNPMMRSLLVEAGHTAARLDGELKQDYQRLKLRRGGGMAKVAIARKLAVRMYWMLRSQASYTQLVRTQGSPWATLVEQ

SEQ ID NO: 67596 - protein, 359 aa, unidentified
MDKALNSNKPVGHGQPVYVGLDVHKKSWSVSVYSSQGEYKTFSQPPEADKLVNYLKRTFPDSQYYSVYEAGYCGFWIHDQLQQQGVVSMVVNPADVPTKQKEHQHKRDRIDCRKLARNLCHGEMEGIYIPSPAMREDRTLVRTRQAFVKKRTRCKNQIKGMLFFYGIHLTDEEAYAPWSADFIKWIESIRMQRDSGNAALKAYLEELASLRQLINQVNQEVLKLARSEEYAVPVKVLKSAPGISTLSAMILLTELCDMARFASLDTLCSYVGLIPSIKSSGETEYVRGITPRRNAYLRWILIEAAWVAVRKDPTMMMAFNEYCKRMRKNRAIVKIARKLLNRIRFILKHRTPYVPVRAK

SEQ ID NO: 67597 - protein, 339 aa, unidentified
MQLYAGLDLHSTNTYIGILDQEFNRIFKKRVANNLDLILQTLNPFGSQLKGLVVESTYNWYWLIDGLMDNGYQCLHLANPSAIKQYEGLKHADDQHDSFFLAHLLILGILPQGYIYPKKDRPVRDLARKRMFLVQHKTAHILSLQSLITRCCAKKISSNQMRHLTLDDLQHLLEEEHLVLSAQANLDNIRFLTQQIKQIEKTITKKIKLNKAFQNLLTVPGIGNILAMTIMLEVGDISRFAKVGNFASYCRCVPSQRLSAGKSKGHGNRKNGNRYLSWAFVEAAHLTRRHCQQFRRYYNRKVAQANTSLATKALSNKLARICYYIMRDNVPFREELSSQ

SEQ ID NO: 67598 - protein, 346 aa, unidentified
MMLIGCDFHPSWQQVSWLDTETGETGEQKLVHATGDAKQFYQQVAAPVLIGMEATGNSQWFIEMVEDLGHQIWIGDAAQIRASYVRKQKTDKRDAGHILKLVVEGRFPKLWAPDREQRDLRQLVLHRHKLVMIRSRVKNELQHLSLNKGMQRKRTLWSPAGQKLLRELPLKPWAACRREDLLGLLTMLDQQIRKLDRAVQHAAEENPQSKLLMTQPGVGPNTALAFVLTIGDVGRFPRGKQVASYLGLIPREESSGGRQKLGAITKQGNRMLRSLLVEAAQAAVQHDPGLRRQYRHRCHQKPKAVARAAVARKLAVRLYWMLRTQKPYPEIVRIESSSGVALVGAS

SEQ ID NO: 67599 - protein, 430 aa, unidentified
MKQYELLHSLFVGIDVSMKENVVHAMPFSPEDHPGNAHLRFSAPNTPAGSVGIVEKVSDFLKFYPDVIQVVIALEATSVYSFHLATFLSVAHFNGHIPAIVYSVNPKEIHAYKKTFTDVGKDDYVDAMVIADYARSNKIRSRPWKGPELLGLRVLTRLRFRIAKLMGIVKNSTGNSIYLECSGLMTGENPFCNVWTTTCQELLTTFQGPDEILSLSDEELLNFITEKGHGRFSHPLDVVEKVKKAARNSYRLDKRVYEPLTSGLSVSFFIIHSLEAAIKKLDKSIETMAKSFSSDSYHILLSIDGVGPVIAGGLLAEIGDIKRFKTDDALAKYIGLTWRGKQSGQSESPVKHLSKAGDVYLRYYVLLATGQIINYSAKYREAYERIRSRKTLFPYRAALNLVARKIVRLIFTLLDKHQLYSDNKVMVTLE

SEQ ID NO: 67600 - protein, 393 aa, unidentified
MCLKNALSPRGWLSSEAAARSDPVAVWLVRGSAFEPHIRSVHCGEAIHFDKEHIMFMIGIDPHKGSHTAAAVDRSEVVIAVVRVDADGHQRDRLLEWAVGFEPRVWAVEGATGMGAMLAQQLVAAGQHVVDVPPKLSARVRLLDNGRIDKTDPNDARSAAIVAWRNPALNVVAGLDEHRVMLRLLADRDHQITAQRTRTVCRLHAVLCLLIEGGAKRSLTVAQAENMLASVAADTAVTRARIAAASEFVNEIRALDTARKDARTRTAGAVKACATTVTDIYGIGPLMAAIIIGHSGDIRRFPTAGHFARHNGTAPIEASSGPKKRHRLNPRGDRQLNHAIHMAAVTQVRNETAGRIYYRRKQAEGKSRKEAMRSLKRCISDAVYRQLLADTRC

SEQ ID NO: 67601 - protein, 331 aa, unidentified
MTSLSKQAPSAQLCVGVDVAKATLEVALSDREATFAPANDAVGHQALLTLLSDLRAQGTQVDLIVLEATGDLEVVIATELQLAGYPTVIVNPRQARDFARSMGYLAKTDRLDAKVLAYMAQTLWQRGDLHKLVKPLPDETQRTLQALVTRRRQLVDMRTAEKQRLLSPDKRMLRSVSFMIDALEAELARVDAELKSFIEEHYGKLASLLDSVKGVGAATISTLLAEVPELGKLSGREVSALVGVAPINRDSGAMRGKRSIFGGRRDVRKVLYMATLTASRYNPVIKAFYQRLVASGKAKKLALTACARKLLVILNAIARAGKPFDMSLHMT

SEQ ID NO: 67602 - protein, 344 aa, unidentified
MEYYAGLDVSLRSCAVCVVDGKGTVLYERDLPCEIEEIAGYLTALPVTIERIGFESGTLSQHLFYGLKAEGFDVVCMEARQVSAALSAMRNKTDRNDARGIAQILRTGWFSPVHMKSREAHGVRALLSTRKALLSKTIDLANEVRGLLKIFGIRLPKTVKHGSFDGVVRPMIEIDEVLAHAMLPLLDARLVLYQHFLELDRRVKRAASQDEVCMRMMTVPGAGPIAALTFKAAVDDPARFKRSRTVAAHFGLTPRRYQSGEHDNPGRISKAGDRDVRATLYAAANALLMRTMAGSQIKSWGMRLMRTKGRRRAVVAVARKLAVLLHRMWADGTEFRSEKVEGTA

SEQ ID NO: 67603 - protein, 343 aa, unidentified
MDYFAGLDVSVKDTNVCIVDDTGKIIREVKVASEPDALLQVLRNATYRFKRIGLEAGPLSQWLFSALGEANLPVICVETRHMRAVLQAQINKTDRTDARGIAQMMRVGLYRPVHVKTLRSQKLRMLLTHRKLLQSKAIAIENDLRGTLRNFGLKVGMAGATKFEGRIKELIENLPDLAVLVEPLLVVRRVLREQIGVLHRRLLAVVRDDDVCRRLMTTPGVGPVVALTYRATVDVPARFRKSKSVGAVFGLTCSKYQSGEIDRNGRISRCGDEMMRVMLYEAAQSMLRSKKWSWLKAWAMQIARRRGMKKAIVALARRLAVIMHRIWVDGTEFRWTREATAAA

SEQ ID NO: 67604 - protein, 360 aa, unidentified
MFTERTSVGLDVHARSVVAHALDTITGEILRARLCLDPVEVTRWVKGLPGPAAVIYEAGPTGFGLARVLGSEQIRTVVAAPSKLQRPAGDRVKTDAHDAEHLATLLRLDAFTAVTVPDEATEAARDLVRAREDCRADLMRARHRLSKLLLRHGIVYSGGKAWTGTHEAWLRRQRFDSVLTQAAFDEAYDTVASITARRDRLEQRINVLAGDSQYTAVVRRLGCLRGISTLTGLGLAVEIGDWTRFSGNSIGAYVGLIPSESSSGQSRSQGPITKTGNSHVRRLLVEAAWHHRVRYVPGKTMQDRWDLASPAARARGDLGNRRLHQRWEQFQARKKRPTVANTAIARELAGWCWSLAVLDP

SEQ ID NO: 67605 - protein, 393 aa, unidentified
MVCVGIDVAKDKHDCFIISSEGEILADVFTIPNNAEGFDTLLQAIRRSTRPEDKIKVGLEATGHYSYNILGFLLDKGLPTYVINPLHTNLYRKSLSLRKTKTDRVDARTIAAMLMSDVDLKSYTDTVYHNEELKSLTRYRFDKVRERAKLKQSVSRLVTILFPELEKLVPSLHMASVYALLSEFPGAKQVAGAHLTHLKAVLYDASKGRYGRDMATTLREAARCSVGSVMPTKSLELQHTIRLIRELDAEIEDIADAIQSMMDEMQSPITTIPGIGVRMGAMILAEIGDFSRFDSPDKILAYAGMSPSTYQSGQLSLSGAYSHMEKRGSRYLRYALYNATKHVCHWDPTFAAYLAKKRAEGKHYNVALSHAAKKLVRLIFAMEKSQRPYCAAA

SEQ ID NO: 67606 - protein, 435 aa, unidentified
MSFVHRLSTTNANAKEESQMRSIGLDIHRDFMEVAIAEGSGIRSLPRVEMSSESLELFAGSLGADDQVALEVSGNAWEVVRIIRPHVGRIVAASPTDTGMRQARAKTDRLDARALARLLAQGQLDGVWVPDEATQAMRRRLQRRHQLIVTRSKAKNEIHAALMRRLVRKPKFSDLFGIKGRRWLDRLELTAAERETVDGCLRQLDFCDREIAAIEKLVAAEALAREEIRRLMTVPGVGAITAAAFIAAVGEIGRFPNRKKLVGYLGLDPIVRQSGSSEAAHGRISKQGSAAGRYALVEASWSVVKAPGPLRAFYERTRARRGAQIAIVATARKLACLFWCLLTRGEDYAYGQPSLLKRKLRALELRAGQPRRSTRGERIWKANDSVREAERELAAQAEAAYKRTVADWQRNQVRREAARRQAEKEGAGATPGRAS

SEQ ID NO: 67607 - protein, 421 aa, unidentified
MRIVFGIDVSKASSQVAIALETAQGCTIYEQFKIANNTQGFNELLGQLDSFKNPEIVFEATGVYSKRLNRFLTKQGYAFVQMNPLAAKRQLDNQVRGNKTDTLDAQHLAETHFKIERALFYQQKPVYDELQRMSRYYDEINEDIVRHKNRLHKALQQTFPELETILSNPDGKLYWHLVQDFPHPEIVHAFSGEDLIKIIKHACGRNENRTRLEKIASKLKTASDLAYPAVDVISYENKHVIFLAKEIEQLTARKDEIIDDMISKAYKLPELAILESIPGIGKLTAVRLIGELGDIRRFRTSNKLNAFIGLDIHQYQSGDKDLRFGISKRGNPIARKILFRAIATIATAANYHPCHIADFYNTRKALDLKYLTEKKKQSPESIKINTKKTTISAMNRLIRTIHHLIITGQFYDYTVASGKRN

SEQ ID NO: 67608 - protein, 345 aa, unidentified
MHYVGVDYHKKSSYVTVMDERGKVVKEAQIANSQEALAAFLDGRAKGASAVLEAGRNWPVMYDWLEELVDEVTLAHPAKVRVIAEAKVKTDRIDSRMLAHLLRADLIPAAYVPGAVTREQRRRLRQRMFLVRLSTMVKNRVHTLVDRHPELSRQAGGWSDLFGKAGRAWLEQIALPAGEADLLGTDLELLEAIQTHIKSSNRWVSQLAKKDARAKLLATLPGIGDFFAVLLAVEIDDVSRFSRPQKLAAYAGLVPSTYASGGYLHHGRITKRGNKWIRWACIEAVYPATRQDPALAALYQRLKVAKGANVAKVAVAKRLLTIAYRVLKEGRPYRSADEQAALTRR

SEQ ID NO: 67609 - protein, 349 aa, unidentified
MDRTTYGLDIAKNVMQLHWIEAETGEIGRKKLARAKLTAYFAELQPVRIVMEACGSAHHWARVFTGLGHQVELLPAAQVRPFVRSNKDDAADARAIWLAAQHSDIRRVPQKSVEQQGVLALHRTRSHWISVRTATVNSLRGLLYEFGVVLRGGRKAGLKALAEQRAAIDEQIPATMRALVDGQLQTLAQIGERIDALERQIAALQQQLTGARELDQVPGIGVLGSTALAATLGDARAWRSGREFSASLGLVPAHAGTGGKVRVGHLSKRGDPYLRTLLIHGARSVIEHAKDKPKWLEQLLARRPVNVALVALANKMARTAWALVAHGRTYQRDWQSARPGSAAAQAAGT

SEQ ID NO: 67610 - protein, 407 aa, unidentified
MDVLHPKCAGLDVHQQTVVACARTGAGKAVTYDVRTFGTTTAELLALSDWLTAHGCTHVAMESSGVYWKPVWHVLEGHFELVLANARHIRNIPGRKSDVNDAPWIADLLAHGLIRGSFVPPEPIQELRDLTRTRQQLVREIAQHTLRIQKTLENANINLTAVLADVLGSSGRAILRALARGERDPERLAELASDRVKASRAELVAALHGRVPPHHRFMLTLHLTQIEALEAAVREVEARLGDALAPFRAALDRLITMPGVSETVARVIVAEIGFDMTRFPSAGPLVSWAGLCPRLHESAGKRLSNRTRSSNPWLKTTLVQAAWAAARKKDSYCRAQFLRIKSRRGPKKAVLAVAASMLTAAYYMLKHGVDYRDLGADHFDRRDKAKLAKRLIARLHDLGLTVEVRAA

SEQ ID NO: 67611 - protein, 343 aa, unidentified
MAIKVLGIDIAKNTFQLHGTDDAGKAVLKKRLPRNRLSPYVANLHPCTIVMETCGGANYWARVFQQSGHTVKLISPQFVKPFVKTNKNDANDAEAIVEAASRPSMHFVPIKRPEQQDIQSIHRVRSRLVKNRTALINEIRGLCLEYGVIVAPGAARVKQSLCAIVADSGNGLTPSSRDCMQGLYEELVDVEARLKKLDARNRQLCRENDSCRRILSIPGVGELTATAIVAAVADAQEFKNGRHMSAWLGLVPRQSSSGDKRVLLGISKRGDRYLRTLLIHGARAALSHYKATDNDYGLWLARKKATLSFNKAAVALANKNARIIWSLLNSGEEFNYGVQTAAA

SEQ ID NO: 67612 - protein, 299 aa, unidentified
MLDIFDDAVGRPERIANTLQAITERVAGWRCGNVFVVFEATGVYDRELAEALRQADIRFARINPARARDFARADGRLAKTDAIDARMLAIFARKMMPAVEPAPEPARSALASLAKRRDQLVQIRAQEKNRRSEATDRTTIEGIQRHLDFLNGEIKAIEASIKTLIKAEPDISEQARLMRSAPGIGPVACMQLLAKMPELGCLGSKQVAALAGLAPFNVDSGSYRGKRAIGGGRKRVRDALYMAALNAVRRDLTMKAFYQKLRTVGKPAKLALIAVARKLLTTLNAMLRDRKAYVRPQPT

SEQ ID NO: 67613 - protein, 339 aa, unidentified
MTAKTIGLDLAKDVFQVHGISENGRVIFNKAIKRAKLLAFFESLPPCTVGMEACGSGHHWGRTLRRLGHDVRLMPANYVKPYVKRGKTDAVDAEAICEAVRRPTMRFVEIKTEDQQAVLSIHRTRDLAVRQRTQMANMIRSLLREFGHILPIGIEAVTAFAKRHLDGDHPDMPDIANGMLGMQCYQFIGLNERIAGYTKMIEQHAMLSTDARRLMRMPGIRPITASAIVATIGDAKQFRTGRDLAAWLGLTPLNKSSGGKERLGKITKQGDRYIRKLLVVGMTSRAVMAKRSPEKVDLWTAKIIADKPFRLATTAMANKAARAIWAMLTKKQEYRQPAF

SEQ ID NO: 67614 - protein, 353 aa, unidentified
MEHFIGCDAHKKFSIFASIDEKGEYGPTFRVRHDLEVFRKFLKELPAGSKIALETSGCYYWMVDEMERAEHIPLLAHALTAKRRMEGRHKTNERDARGLAMLLRNGTLPVVWIPPAELRDQREMLRWRMCLSRMRTRVKNRIHGVLQRYNVDIAVSDLFGDAGRVELLARLHELPPYSRHSLLDQLQMVDTVETQISECEQVLEEMLYPSADRDLLDSLPCVGKILSAVMALEIGDVQRFGGPDRLVSYAGLVPVARESADWKRKDRCPRDCNMYLKWAYVEAANLISIHRGHWPERHVAQLYERVKQSTKMHGKATMAVARHLAEASYWMLRKQEVYQEPNSKRKVLSSTHG

SEQ ID NO: 67615 - protein, 410 aa, unidentified
MEVLHPRCCGLDVHKETVVACLRHVSGGKVNTEVRTFETTTASLIALSEWLAQNGCTHIAMEATGIYWKPVWHILADGEFQLVLANSAHVKNVPGRKTDVNDATWLAELLAHGLIRASFVPDTQTQELRTLLRTRKQLVREKASHILRVQKTLEDANIKLESVITDVMGMSGRAMIEALIAGESDPAKLASLANYRLKTSQEKLREALRGRVTKDHRFLLRLHLNQIDALDASIATIDQQVEAGIAPFRVAVELVTSIPGVSDLGAQVIVSEIGTDMSRFPSEGQLISWAGMCPRNDESAGKRRSNRVRKGAPWLKTTLVQCAWAAVRKKDSYLKAQFLRIKARRGPKKAIMAVAASILTAIYHMLKDGTLYQDLGSNHFQSRSKGQQTKRLVKRLADLGYDVALTPLAS

SEQ ID NO: 67616 - protein, 320 aa, unidentified
MTPSTIGVDISKDKFDAARLSAQGKYKHKKFTNNPEGFAAFVVWLASFGDEEVHIGMEATGAYSIPLAEFLAEQGYAVSVINPARIHAFGKAGMGRAKTDKADAKLIAQFVQEKKPALWTPPPHNIRELQALLRRVEHLLEMRQMEQNRLDTASPTVVGSIKAILELLDRELETTRERIRKHINDDPDLRRRGDLLDSIPGIGEATLAHLLVALSDHYGFDNAKQAAAHAGLDPKIKESGKWIGKTRLSKSGDPMLRKALYMPALVAWRHNPAIRAFCERLKANGKNGKAIVCAAMRKLVHIAFGVLKSGKPFDPKLNPA

SEQ ID NO: 67617 - protein, 534 aa, unidentified
MTKHSKSLAKAKPATTSAAATNTAKPATTSALATKTAKPATTSAMATKTAKPATTSAMATKTAKPATTSAMATKTAKPATTSAMATKTAKPATTITTPTKAAKPATASATATKTAKPATTITTPTKAAKPATTSATAANAAKPATTIATATDKAKPATTIATTTTAKKKRISEQPGQAQSATPAGRFTIGLDLGDRSTAFCVLDTDGAIVAEGKLKTTQAAIDQQFASLAPARVALEAGTHSGWISRLIESYGHEVIVANPREVRKIYQNDRKNDRSDAQILARLARFDPQLLEPIRHRTAPMQADLATVRARETLVTARTKCINAMRGLVKSMGGRLPKCSTESFCERVSADVPAELEDALRPLLTAIQTLNEQICCCDKQIEALATEIYPQTALPRQVSGVGALTALAFILTIADGARFAKSRDIGPYLGLVPRQDDSGDHSSQLRITKAGDPYLRRLLVGSAQYIVGPFGPDSDLRRHGEKLMQRGGKNAKKRAIVAVARKLAVLLHRLWITGEVYQPLRNSNRQASIKAA

SEQ ID NO: 67618 - protein, 346 aa, unidentified
MMLIGCDFHPSWQQISWFDEATGEIGEQKLVHASGDAEKFYRQLPAPARIGMESTGNCQWFVEMVTALGNEVWIGDAAKIRASDVRQQKHDKRDAELLLKLLMEKRFPRIWTPSSQQRDLRQLLIHRYKLVRLRAQAKNGLQHLAMNQGVQKKRRLWSKAGQQVLRELPLKPWASRRREDLLSVMAMLDQQIQSLDLAVTEAAEKDQNARLLMTQPGVGPVTSLAFVLTLGDVSRFPRGKQVASYLGLIPREYSSGGHRRYGSISKQGNRFLRMLLVEAAQGAVRCDPQLRSEYLHRCHRKPKGVAKVAAARKLAIRLYWMLRTQKAYPAIVSIESRSRVPLVSES

SEQ ID NO: 67619 - protein, 354 aa, unidentified
MDIKYIGMDVHKETISIAVMKDDGRLVMESIIETKASTILQFIHGVRGDLHVTFEEGTWAAWLYDLLKPHVTELVVCDPRKNAVMKQGNKSDKIDARKLADLLRGGYLRSVYHGENGLRILKELARSYLTISKDLTRVMNRVKALYRSWGIPCGGQQVYAPRHRAEWLNKIGEAGVRRRAEFFYQQLDALRALRQEVRRDLLAESRKHGATKLLRQIPYIGPIWAALLIALIQTPYRFRTKRQLWTYSGLAIETRDSAQHRYVAGQLQHSKKPQQVRGLNQNHNHDMKTIFKSAATMASSREGPFHDFYQGLLTKGMEPAMARLTLARKIAAITLILWKKGAHFDAEQLKPQAA

SEQ ID NO: 67620 - protein, 335 aa, unidentified
MNEFWVGIDVSKRKLDVACLDVRDKIKSRVFSNDAAGHAALKSWLADRGARIDNTHICMESTGPYSEPPAIVLADACWQVSIVNPARPKAFAETTGVRNKNDKSDAALLARFCAKLTPDLWQPPSIEQRKLRGLVDRLQALKDMHLQESNRLEGPELLGQDSSIKSINEHLAWLDARIAELEREIDDHIDSNPTLKRDADLMTTVPGIGTTTVAKVLAYVGDLRRFSSAKALSAFIGVAPRQRQSGTSIRGRTTISRVGHAYLRAALFMPAMVALRYNPSVKAFGERLGSTGMSRKAVVAASMHKLVHLLYGVVRSGLPFDPIRARPRIDIQVSI

SEQ ID NO: 67621 - protein, 372 aa, unidentified
MQESSKIHVGLDAHKDSISIAAAEPGRMPGRLIGKVTHDVNKLLKVLAKVGNADQLHIVYEAGPTGFGLQRALHSRGYLCEIIAPSQIPRRPGDRVKTDGRDSVQLAECSRAGQLSAVWIPDPEDEAIRDLSRAREDAVNSRVQARHQLKGFLLRHDVRYTGKTSWCGAYYRWLGTLNFGAGAAQTAFTEYWQAVTAADDRVERLTKALEGSITGWRFEPVVGALQALRGVAAITAIGLVAEIGDLGRFAHPRKLMGYLGLTPSEHSSGERTSRGSITKTGNSHARRLLTEAAWNYRFKARIGKQAQIRQQALSEPIRRMAWTAQLRLTQRYAALNARGLQANKACIAVARELAGFIWAIGMQAQREHGQAN

SEQ ID NO: 67622 - protein, 316 aa, unidentified
MITVSVFVGIDVSKDRLDVALRPSGDRWAVANEEPGLATLVERVRGLSPTLIVLEATGGLEAPLTGALAAAGLPVVVVNPRQVRDFAKATGKLAKTDALDASILAQFAEVIRPALRPLPDAATQTLSALLARRRQLIEMLTAEKNRLGPAPPPVRKGIRAHIAWLARQLARTDDDLAQAIRESPVWREKDDLLQSTPGVGPVLATTLLAGLPELGTLSRQQVAALVGVAPLNRDSGTLRGRRRVWGGRAQVRTALYMAALTATRYNPVIRAFYARLCAAGKAKKVALTACMRKLLTILNAMLKHRTPWQHHVAQSP

SEQ ID NO: 67623 - protein, 422 aa, unidentified
MNTDWTQHPYFAALDWASDPHDVIVLDRLGAVRVEFRFAHTAEGWAEFTAQRQPYTGAPLTLETSSGPAVDQLLQRGWAVYPVAPTAAARYRERKVPSGTKTDRHDTWALADALRTDGHAWRPLRPQDEATATLRALCRDEIALIEQRTALVNQLQAALREYYPAALEAFDDWTAPHAWALLLASPTPAQLQAAGKRKWEKFLHTHHLWRPQTVKARLEVFAQANALTIRPAITAAKSLLAVSLAKILVTLQTQLDEYRRRITAAFRQHPDHDVFSSLPGAKATLGPRLLAEVGGVRAEYPDADALLCQAGVSLVSYQSGKVSKCRLRRACNKVLRATVHLWANASRQTCGWAQAYYQHKRAEGQNHASALRCLGKRWLKILWRLWQNGQAYDEAKYLTQLQRRGALTWTILSAAQPPKPCE

SEQ ID NO: 67624 - protein, 320 aa, unidentified
MTILNSPTVIGIDVAKAEIVVYREDLKITQAIANNREALGRWLKTLPAQSSIALEATSFYHLDTAELAHGMGFHVYVVDPYRVAHYRESIGLRAKTDPCDARLLARYLTNEQARLRIWSPPPEAYKVLKSLLRKRAALIKARVSIVLSFSNEPCLKDILARQLEVFKESDQAIQKLMREASQAAGITENINRCKAIEGIGELTAIGLATAFMRGHFVSGDAFIAFLGMDLRPKDSGKKHSPRHLSKKGDGELRRLAHNAAMAACRSPAWKPYYEAFLARGLARTQALVILARKLCRVAFALMKNQSEYQPNSRLQGSPAT

SEQ ID NO: 67625 - protein, 278 aa, unidentified
MKITTAGIDLAKNVFQVHGVDAQGKAVLRKKLDRSKMVEYFVKLAPCLIGMEACGSAHYWARKLGAMGHTVKLMSPQFVKPYVKTNKNDAADAEAICEAASRPNMRFVPIKRDEQQAVLSLHRVRQGFVKARTAQANQIRGLLSEFGEVMPQGIAYIARRLPEMMEKPDLPGSFRDLLQRLYDHLKELDKRVDELDAKIQQWHKASDASKKLAQIPGIGPITATALVASIGDAKSFENGRALAAWLGLVPRQHSSGGKSVLLGISKRGDIYVALAMLG

SEQ ID NO: 67626 - protein, 310 aa, unidentified
MIKIICGVDVAKAWLDAWISGVGHKQFANTPEGVEALAAWCREHGVELVVMEASGGLERPAFLALWKSGQACAIANARSVRQFAQSMGRLEKTDRIDAEMIARYAEAKKMVPAPPPSADQQKLTALAARLRQVTRDLTVQKQRQHTTTEPIAMASLAEAIAFFKRQAKALATEMASLIDADPLWTALDRSFRSIKGYADRGVAYLLADLPEIGTLSNRAITKLVGLAPLPDDSGQRRGQRSIRGGRAEIRSILFLLADIARKFDPSLADFKERLLAKGLTKMEARTALARKLLVRLNAKARDTRQALSAI

SEQ ID NO: 67627 - protein, 347 aa, unidentified
MRFHRPCSAFYCGVDLHAKTMYLCVLDRQGSILLHKNLPTDPKRFLQAVAPYRHDLVVACECMHSWYWLADLCRDQGIPFALGYALAMRLIHGGKTKSDKLDAEKIARLTLGGLLPLAHAYPAGRRELRDLLRRRLRFVRLRAELYAHLKTLNRQANLPPLGDEARRAGQRDGLPQRFPDPAARHNAAADLELIAHYDTAIAGLEKYLLQRAGERHARELAILQSVPGIGAILSLTILLEVDDIGRFATRQQFASYSRLVAPRQESAGKLYGSCGRKMGNPHLKWAFSEAAVQAAQHNPRVAAYLQRLSLRHGPGKAKSVLAHKLGRAVYQLLSDGTVFDEERFLRG

SEQ ID NO: 67628 - protein, 410 aa, unidentified
MELLLRRCCGLDVHKDTVVACLRIVSNGKVSTGVRTFQTMTAELLRLSEWLTENECTHVAMEATGVYWKPVWHILDDGEFELVLANAAHVKNVPGRKTDVNDAMWLAELLAHGLIRASFVPDTQTQEMRNLLRTRKQLVREQSSHVLRVQKTLEDANIKLDSVLSDLMGTSGRAMIEALIAGEANPAKLASLAHRRVKASHEELREALRGRVTKHHRFLLRLHLNQIDALDAATATLDAQVEANLGPFRTAVELVVSIPGIKNLSAQVIISEIGTDMSRFPSDQQLISWAGICPRNDESAGKRRSNRLRKGAPWLKTTLVQCAWAAVKKKNSYLQAQFYRIKARRGPKKAIMAVAASILTAVYHMLKDGTLYQDLGHDHFNRRSKDQQKLRLIKRLTDLGYAVEIKPLAA

SEQ ID NO: 67629 - protein, 335 aa, unidentified
MNKFKYYIGIDVSKLTLDVTVLQETENSTKSEHYKIENKEKSIAQFVKKQFGKYSKEEVLFCFEDTGIYSLPLAYYLNDNELVWWQRPAIEIKRSRGITRGKSDKIDSKDIAFYAYTQKHKFRPNKLAINEIQQLRLLFTEREKVLKSLSSFEKTSENEDFMKKDVFAAVASVNKTIVAQLQKALKAIEAKMLAIISSEDTLNQQYKLIISIPGIGMQTAVYLLIATKGFSAFENWRQLACYAGVAPFPYQSGTSINGRNKVHNFADKKLKSLLNMCALVAVRYDKELKDYYERKVAEGKPKMLVINNVRGKLLARTFAVTNRKTPFINTRKFAS

SEQ ID NO: 67630 - protein, 411 aa, unidentified
MRLFVGDDWAEDHHDVEVMDEAGRVLAKRRLPEGVAGIAQLHELVGRYLPEDAQDAEVLVGIETDRGPWVAALIAAGYTVYPVNPLQACRYRDRHGVSGAKSDGRDSHMLADMVRTDSHQLRPAAGDSPEAAAVKVVARTHKTLIWERTRAVQRLRHQLREYFPAALEAFEDLDAPDALELLGKAPDPARAAKLTRAQIAAALRRARRRDIAEKTDAILAALRGEHLGLPAPLTAAYAATARSLIAVITTLNEQVKILQEQVREHFGRHPDAEIYQSQPGLAAILGARVLGEFGDDPGRYADAKSRKNYGGTSPITRASGKKKVVIARFIHNDRLIDALMTWAFSALNASPGARAYYDQLRTKGIEHNDALRRVANRLVGILHGCLKTRSLYDEATAWGHRENLGQSPVAA

SEQ ID NO: 67631 - protein, 357 aa, unidentified
MRKSTSGKNGLVASIGIDLADMWSDWVSIDRTGEVIERGRVRTTAVKLRERFGSRPATVVAIEVGTHSAWVSRELRSYGHRVVVANARKVSLIHQNRRKNNRIDAEFLARLVRVDEKLLFPIEHRGESAQRDLSILRSRDILVRTRTTLINHVRGVCKAFGKPLPSCSAESFALKYQSAKPELLTEVLDVIAEQIQRLTDLIRTYDRQIEKMVSRYEAARRLRQITGVGPLTALAYVLTIEDPRRIARSRSAGAFFGLVPGSDDSGEDHAQKRITKEGDRFCRRLLVSAGQYILGPFGPDCDLRRHGLAISARGGKNAKKRAVVAVARKLAVLMHRLWISQADYVPLYNATTRSIAA

SEQ ID NO: 67632 - protein, 404 aa, unidentified
MNAIGIDVSKGKSTVAIIKPFGEIVKMPFDVIHTTKDLAELTSLILSLDGESRVVMEHTGKYSDPVVTALCNAGIFVCVVNAKLVHDYGGDTIRRVKTDKVDALKIAGYCLDKWVNLKTFIPACEHRKMLKTYNRQLSTYAKIKSVLKNNLISLLDQTFPFANELFTSPARSSDGHEKWIDFVAQFYHCECVSSLSQPVFTKTYEKWCRKNGYKFSQSKAEKVYSVANEHSATLLKNDFTKTLIVQTVRQLNSLCETVAIVKSEMEQIASLLPEYETVLDMHGVGKTLAPQLIAEIGDIGNFPKRSSLARFAGIEPPENQSGSYNQHSRRISKQGSPHLRRALFQVMCCVLQLSHENEPTFQFLDRKRSEGKPYKVYMIAGANKFLRIYYARVKECFNNLEKSA

SEQ ID NO: 67633 - protein, 334 aa, unidentified
MNQPILGIDVSKDSLDVQLIIADRGRTAVFGNNPKGHKRLAHWLRKYCGQEQAHVCMEATGMYAFPVAEALYAAGEQVSVVNPARISAYAKSLLARNKTDRLDAAIIADFCRTQSPPGWVPPREELRELQALVRLLDDLTTTRQAEVNRLKNGFHSAVVASILEDHIQYLDDQIERVEQIIKTHIEQDADLLRKKLLLLSIPGIGEKTAHTILGEILYLDSFENAKQVAAYAGLNPRQRLSGKMKGRSPISKTGNAQLRKALYFPAIVARGCNPVIHQFSVRLEENGLSSMEVVIAGMRKLLHIAFGVLKNDCPFDSNYEKSSYETQQFPTIAS

SEQ ID NO: 67634 - protein, 403 aa, unidentified
MNSVGIDISKGRSTIAVMRPFGEVVISPFEVRHTGSELSKLAKQLKSLDGETRVVMEATGNYHASVAKLLHNAGLYVSVINAKLVHGYGNNELRRVKTDRKDAVKLANYGLDRWLTLPRYIPEEDTRLLLKNCYRQYRQYSKVQTVLKNNLISLLDTVFPNANRLFSSPIRGDGSEKWVDFVAEFWHCRCVSEKSERAFTSKYLRWCRKHGYNFREAKAHTIYAEASGHIGVMPKSETTKLLVEQAVAQLRATSTALAALKHEMQSLASQLPEYPVVMDMFGVGPTLGPQLIAEIGDVRRFYSKKALVAYAGLDAPPNDSGDVTGRHKSMSKIGASSLRRTLFLVMSVYLQTAPLDEPVCQFMDRKRAEGKLYRVYMMTSANKFLRIYYATVKAYLESLEHTA

SEQ ID NO: 67635 - protein, 344 aa, unidentified
MQSMYYIGLDVHRRTISYCVKDGSGTIHDEGTIPATRFDLDRWMKTLPQPWTAAMEATVFTGWIYDHLQPHAAALKVAHPLMLRAIAAAKKKNDRIDANKICDCQRCDFLPECYMASTAIRERRRTLRYRNLLVRQMVQMKNKISGLLMEAGVSYNKQRLHKAGYFRELLATNPAIDEGLCSLLRLCRETVVRLGKTESALVRSLERDSLLIDRVERLMSIPAVGPITALTWALEIGDPQRFPSIKKTISYCGLCGAEKSSANTVQRTPLSKQRNKHLQTTLIEAAKMAPRNSPELAMLYAKEKQKGNANRATLAVARKLVAYLMAVDRGQRNFQVVQTNCIAA

SEQ ID NO: 67636 - protein, 411 aa, unidentified
MRVHHTVCCGIDVHKKSVTACLMWGPADREPEWEIRRFGTMTSQLKVMVEWLKQANCEIAAMESTGAYWKPVWNVLEGKIKLVLANAKHVRSLPGEKTDNKDGKRIASYLRHGLIRPSFVPPRDIRELRDLTRYRQKLLANGAAERNRIQKLLEDANIKLGSVLSDVFGVSGQRMLQALVNQPTTDVEQVAALAHWRLAPKIEQIKQALEGHVTAHHRFMIDLSLGHMQYIELQILRLDEEIARHIQPYQKQFQLLQTIPGIGGNASAAVLAEIGPDVSPFDDEGKLASWSGMCPGNNESAGKKFSSNTRKGNPHLASTLVESAWASTHTKNCQFKTRYYRLRSRRGPQRAIVGIAHALLRTIYVVLKTGQPYQEPLRPALTEDRRDRKTERLSRELRNLGYDVILRIKTP

SEQ ID NO: 67637 - protein, 420 aa, unidentified
MKTNDNAFTVYVGIDWADTKHDICIQAADSDKREFDCIQHKTDEIEQWAYAMHKRFGGPIAIAVELSKGPIVYALQKYDFLVIFPVHPMTLAKYRKAFSPSGAKDDPTDAEFILDLLLRHPDRFKSLRPQSVEMRTLMSLVEQRRTLVNDRIRITNRLHYALKQYFPQALEWFPRGVDTVLFCDFIARWPTLKQVKRARENTLTKFFHEHHMRFPHVLERRLKAIKAAQPLTLDEGVIRPFRLQTLVLIDQLRVTLQAIATFGSEIDEVANQHEDLSLFQSFPGAGPIYAPRLLVAFGEQRDRYANAGDAQKYGGIAPVVERSGKKVWIHWRYHCPKFLRQTFVEWSAQTINKSYWAGEYYRQQRDKGCKHQVAVRALAFKWIRILFRCWQARTPYDELVYLQALKRRGSRLVNSKTVAA

SEQ ID NO: 67638 - protein, 318 aa, unidentified
MTHTTQTTALYVGIDVSQNTLTVAIYPTDEVWTLVNDPHSHTALVQHLAQLPVQRVLLESSGGYEKAVVSALQQAGLPVVVVPAQRARYFAKSMRGDLKTDRADARMLAYFACCYPVQPVAPCSPVQAELKALWARREQLVQQVEREKKRLQTGMSEAVRASLERMIAVLKEEIAQIEARVAELIASDADLSQKAALLQTAVGVGRVVAYGLVAELPELGQVSHRAIAALAGLAPVRCESGAWVGRARVRGGRPRVRRLLYQAAVVAATHDGRWRAVYEALVGRGKAKKVALCAVARQLLVVLNAMVRDGRAYERVQE

SEQ ID NO: 67639 - protein, 451 aa, unidentified
MAKRGEKRERRSMVLEPDAAGIDIGAEEIYVAVPPDRDEESTRRFSSFTGDLHALADWLGRCRIQSVAMESTGVYWIPLFQILEERGFKVYLVNAHYLKSVPGLKSDVSDCQWIQYLHSVGLLRASFRPPEAICALRTLWRHRGSLLEMAAEHILHMQKALSQMNLQLHHVLSDITGTSGQAILDAILSGKRDPVELAHLCHSRVKSPRDKVAQALIGDYRPEHLFTLKQSLEGYRYYQKLILELDHETARLMQALPSATDDPMPPRTKPTAYQRKGNDPQFDLRSEPYRIAGVDLTDIPGVSAATAQVILTEIGTDVSRFRNASAFASWLGLCPEKRVSGGKVLSCKTRKVKHRAATALRMSANSLCRAKGYFGEFFRRMRAKLGTAQAITATAHKIARILYHVLLTKEPYAETVFHRCDEEAHRRAEMRLRKQAAQLGFQLLPIPATGE

SEQ ID NO: 67640 - protein, 402 aa, unidentified
MRFYQGQHRFYCGIDLHARSMHVCVVDQAGDIVFDRSLATRPEALLRALEPFRDDLVIGVECMFAWYWVADFCVTHDIAFVLGHALYLKAVHGGKAKNDRIDATKLARLLRGGNFPTAYAYPKGMRETRDLLRRRTYLVRKRAELLTHLQILNAQYNLTPFPKRLCFAGNREEMKIAERFHEESVQKNAAANLAVIERLDEVIGDLERYLIRTAKIDSVQTYHRLQTIPGVGKLLALILLYEMHDVQRFDSAGQFLSYARLVRCAHESGGKKLGTGGKKIGNGHLRWAFAEAACLFVQHSERAKKWKQRQAAQRGSGKALAILAARLARAVYHMLRKGEAFDEERLWAGNTRRTATGSFYEPVGVKRNSHFRIASSVGAYQARLTLRPRFYRPNSCLVPQPP

SEQ ID NO: 67641 - protein, 407 aa, unidentified
MDVLHPKCAGLDVHQQTVVACARTGAGKAVTYDVRTFGTTTAEVLALSDWLTAHGCTHVAMESSGVYWKPVWHVLEGHFELVLANARHIRNIPGRKSDVNDAPWIADLLAHGLIRGSFVPPEPIQELRDLTRTRQQLVREIAQHTLRIQKTLENANINLTAVLADVLGSSGRAILRALARGERDPERLAELASDRVKASRAELVAALHGRVPPHHRFMLTLHLTQIEALEAAVREVEARLGDALAPFRAALDRLITMPGVSETVARVIVAEIGFDMTRFPSAGPLVSWAGLCPRLHESAGKRLSNRTRSSNPWLKTTLVQAAWAAARKKDSYCRAQFLRIKSRRGPKKAVLAVAASMLTAAYYMLKHGVHYRDLGADHFDRRDKAKLAKRLIARLHDLGLTVEVRAA

SEQ ID NO: 67642 - protein, 412 aa, unidentified
MEVLHPRCAGLDVHKETVVACVRIASGGEVSRAVRTFETTTTRLIELAEWLEANGCTHAAMEATGVYWKPVWQVLAAGGFELVLANAAHVKNVPGRKTDVNDATWLAELLAHGLIRASFVPGPEIQELRGLLRTRKQLVREKASHVQRLQKTLEEANIKLESVLSDVMGRSGRAMIQALIAGETDPAKLAALAHPKVRAPQARLREALRGRVKRHHRFLLDLHLQQIDALDAGIAAIDREVDAGLASFRDAVKQLSTIPGVSQLSAQVILSEIGIDMSRFATAAHLRSWAGLCPRNDESAGKRRSTRLRTGAPWLKATLVQCGWAAARTKATYLNAQFVRLRTRRGPKKAVCAVAASILTAAYHMLKDGTFYQDLGATHFDRRRPDAQARRLIKRLADLGFSVQLKPVVAVS

SEQ ID NO: 67643 - protein, 418 aa, unidentified
MELIHPRCAGLDVSKRDAKVCVRIAGKGRAGTKSAVTTWSSMTNQVLGLREHLIEARVTLVVMEATSDYWKPFYYLLEDGPFELMLVNARHVKNIPGRKSDVSDASWLAQLGAHGLVRGSFVPPQPIRALRDLTRTRTLITRSRSAEIQRLEKLLEDAGIKLSAVASDITGVSSRAMLEAMISGQHDPAVLADLAKRRLRSKIPALTEALTGRFSEHHGFLARVHLDLIDQHTAALDELTARIEVVIAPFRHVRDLLITIPGISEGVADVVIAETGADMTRFPTAAHLASWAGTSPGSNESAGRVKSTHTRPGDPYLKGALGIAAMSITRHADTSGYLGAKYRRVASRRGPMKAIVAVERAILTATWNMITTDTTYQDPGADYFIKRNPAKARQRAIDQLTKTGYDVTLSPLEPAVAQ

SEQ ID NO: 67644 - protein, 315 aa, unidentified
MKYHIGIDISKRDFHVCFDEGEIIEKFSTAEVGIDSFLNALRKKNMTSGKTLIGMEATGSYHLPVAYQCTQAGYTVNVINPLITKKQNQTNLRRVKTDSADAKLVRQCLMNGAGYPFRETAETIKLKTLVRQRARFSMLRHRTRLRDEETQNRERYLNVKITALDKDLYDFLDERIKALDAELRRYESPTQKLLQSIPGVGPQTAVTCLSEIGDIRRFSDAQKLTAWVGLDSRVHQSGTSINGKGYITKRGNKLLRTRLFNAASVAVLHENMFQKFFLQKRSEGKAYRVALCAVMRKMVHVIHAAWTRGTPFINN

SEQ ID NO: 67645 - protein, 366 aa, unidentified
MAKRSTTVGLDVHKDTIDVVIAEPEADGEVRHFGTIGGDLGSVDRMLKRLRRPGRRLQFVYEAGPCGFQLYRHLTGQGVECAVVAPSMTPRRSGDRVKTDRRDAEALARLHRAGELRAIYVPTPEDEAIRDLVRAREDAVEIQRRARQRLKAFVLRHGFRYAGRAGWTFRYRHWLAGLRFPHPAQQLAFQEYIDTIGEAEKRVARLTEEITKALEGWCRAPVVRALQALRGVSLLTAATLVAELGDIARFATPCELMAYLGLVPSEYSSGAKTRRGAITKAGNPHVRRVLAEAAWAYQGQARVGRAMMCRQEKLPQAIRDIAGRRSFGSRLASAAWPRAGRHGRRSPRPSRVSSPGSSGTSPGTCR

SEQ ID NO: 67646 - protein, 331 aa, unidentified
MEQRKTIIGIDVSKKTLDIFIKTLDVHLQISNNSEGFKKLLAVLKASKLKLEDCFFVLEYTGGYEYRLVQFCQSKQISYVRISGLAIKRSMGMVRGKNDKIDARRIAEFGDEKQSKLEAETASLDGIMRLKRLLSQRDAFVNDRKAHQNRYNEIQYMMDLPDSDPMLKRYRKIADELQKLIDKTEDEIRKLIKANDAFQFNFDLITSIKGIGEVNAWTMIAYTENFTSFDNARQFGAYIGVVPYPYTSGTSIKGKSRTSKMANQHIKALLDMAARAAINHDRETNIYYERRIAAGKHHMGVMNEIKFKLVRIMFAVVGKQQTYVDKYKNIA

SEQ ID NO: 67647 - protein, 341 aa, unidentified
MTSYVGLDVSLAETSVCVLEADGAVRFEGRVKSSPEALVRCLAERAADVERVGLETGQTAGVLVRGLRAAGLPVICMETRHAHKVLSARTHKTDRNDARGLAELMRVGWYREAWVRGASATYIRSLLQGRKLLMQTKRTLENTLRGAVKRFGVITTKTAGRGFAQRASLAMTQDPAYAAYATPMLEVLRGVVEQIRTYDRQLRAIAREHAVGRRLMTVPGVGYLTALAFLSTIEDPSRFKRSADVGPYLGLTPRIYQSGEIDRSGRITKTGDAMTRSYLVEAANVLLVKIDRPVPLRLWGLRIMERAGLKKAQVAVARKLAVLMHAMWSDGTDFEWAQAGA

SEQ ID NO: 67648 - protein, 343 aa, unidentified
MQTVTTIGLDIAKSVFQVHGIDAEGKVVFRRQLKRRYVLAFFQKLPPCLVGIEACASSHHWSRELQALGHTVRLMPPAYVKPYVKRHKNDATDAEAICEAVARPNMRFVATKTPEQQSCLTLHRARHLFIRQQTSVINVIRALLAEFGIVAPVGRNGVDQLLGIAADANDRRLPEVARACVIALGAQLRMLKAQILEFDRMIMAWHRSSEASRRLDDIPGVGPALATALVASIADPKVFRSGRDFSAWIGLVPKQNSSGGKDKLGSISKRGDRYLRSLFTTGALAVIRYAKIHGTRHRPWLTALLARRPTKVAAIALANKIARMAWAMMAKRERYREPAALAA

SEQ ID NO: 67649 - protein, 450 aa, unidentified
MSPLALDVVTKTDKTPVLGRMLSKYVGRKTSSIENGITKARNHSRQRGNIMRVVFGIDVSKASSEVVILVNGEKVHGYTIPNDAIGFNRLLGDLKTVHQPEIVFEATGVYSRRLQAFFEDNSYTYTRLNPLESKKQLDSLRVRKTDKIDAEKLAMSQFILNRKPSYVQEALYQELRDLSRFYQNLTEDIVCAKNRLHKVLQITFPELENILSAPTGEQYWNLVITFPCNSFVLESDDATLTAIIRQSTAKRISEKRVTYLVDKLTKLANQSYCAVKKTSPVIEEVKYYAGELLRLSEHRQGVVEEMVTLAQSLPEYEILLSIPGIAETTATSIIGELGDIRRFHSANQINAFIGIDLRHYESGNFLAKEHITKRGNPYARKILFKCIHNIASASHTNPCHIADFYEKRKRQSQVTSTKPHTIASIHRLIRTMYYLITHNKLYDYTSIQNR

SEQ ID NO: 67650 - protein, 407 aa, unidentified
MEVIVVVGAGLDVHKRRITACCIDGRISPPKITKRTFGTFRDELERLREWLVERGCTHVAMESTGVYWVPVYRILEGSVRIVLGNARHMANVPGRKTDVSDAHWIADLLRHGLIRPNFIPPTPIRELRQSTRYRRRLIEMRSASELRVEKLLQSTNIKLSSVATNIFGVSGRRMLAALADGTTDPVKLAGLAKGTLVNKRIELTRALRGTFTERDAELLTVELRVISDLQKQITQLNTLIETALAPFTEQMALLDTVPGIDRALAGELIAEIGTDMRAWPSAAHFAAWTGTCPGNRESAGVRRRARSRDGNPYVKFILLRAAVSASRTVTSYLAARYRRLAARRGQRRALVALAHEIGVSIYHMLAKGEPYRPPAAADPNVIRHRKAQQLIRQLRQLGLEVSTKPLA

SEQ ID NO: 67651 - protein, 428 aa, unidentified
MDELNRSRLEAFRQLRKEVRHSGEHLIVGIDIAKDRHHAFFGTATGKTLLRRLVFSNDHEGFRKLLDQAEALEVRHGLKKVVYGMEPTANYHKPLGEYLITLGRMVVLVSGVTVKRNRESLDGRWDKHDVKDSANVADLISQGKCLYYEHPSAELRGLRGLLSLKRRLKRQEQSYRVRIRNHLIAQYFPEMDSHYGRSEREGMAIVRWCFPPSMITQIDVDPFIERVTSRRVRMEQRRRLEGVWEKAGASIGCEGVPGVEHEAKVMVEGLRQLRGMIKETEDKIEELCQQFPQYQYLLTIPGFGPDISAKVLGAIGDPDRFQNGKQVLKMGGLDLSADRSGKNSDKATPEISKRGKSDLRYALYQAAFIASTKNRDFMLYYTSKLQGRQKEKGIHTKMLVKLSAKMLLIAWTLMKKKEVFNPAYLNAE

SEQ ID NO: 67652 - protein, 412 aa, unidentified
MAMEVVNERCCGVDVHKQTVVACVIVPGKGREPIKEIRTFGTMTPDLLEFADWLNTYGVTHVAMESTGVYWKPCWNLLEGQFQLLLVNARHVKQVPGRKTDVKDCEWLADLLRHGLLKASFVPDRPQRELRELTRYRTTLVRERASEINRLQKTLEGANIKLGDVATDVVGVSGRHIMQALVAGETDINLMADLARGKLRDKLPQLQRALVGRLGSHQRFLLAQQLAHLESLEELIERLDGEVEERLRPFVEAIDRLDTIPGVGRRTAEILVAEIGLDMTRFPTAPHLASWAGMCPGNNESAGKRKTGKTRKGDKWLRAALVEAAHATGHTRNTYLGAQYRRLVVRRGKKKAAVAVGHTILTIAYYLLTRHTDYADLGPTYFDRRDEQHVTQRLIHRLQALGYAVQLEPSAA

SEQ ID NO: 67653 - protein, 406 aa, unidentified
MNGPVITVDVSKGSCHFQPYIENGKPMCKPKVLKDTIEGFDNLAKTMNKLKERSSNSTVPVVFEATGVYHRCLQKYLDDNKIPYYIISPLMSAAYRKTNINSNKTDDLDCGHIAKCFYGEQDLRVYKKQTNIYEELRHTNRYYESELNFLRQRKTSFRALLDIIYPLIDKCFKGHSSLYDEVPMTVLKLYPHPKLLLRHKEETIVNRVTSKVNHDKKFVEKIVSLMYEGASRCYPGCDEDDKEVNRLKETIMSLQEQVAKCDEILKELIDKARKVPYFKYVVSITGVGLNLASRLVAEIGDITRFENRKAITAYAGLNPKIRQSGDIDGTHLAISKKGNRHLRCLLYLGATCNYRLKKHDSLYEFNQKKRQQSTNPLKKKAANIATAHKLLVIIYALSKNNQEYNS

SEQ ID NO: 67654 - protein, 388 aa, unidentified
MPTPVANSEGVAWVGLDGADPRQAVRWQAVGSEKIESCTVEQQPEALQAWGAQLQARFPQGRSAWALEQSRGAVIDALMNYDGLWLYPVAPQGRARYRQAFFTSGAQRDVSDADWLLERVRSPRDRLRAGQPDDTLTRPWRRRVEPRRETVADRPRLTHRLGARLKTSFPQALAWAGELRSLTACEFLSSWPSLEAWQTAGRSTQRKFYRRHRRLPTAELEALLDAIAQAQPLTRDRAWVEASVLMTQTLVEPRRTVIAARARLHQTLEKLFDPPPDQPRFRGLPGAGDAWAPRRAAGFGTDRQRYQSAPEIRPFSGIAPLPEASGKQRGGHGRRACPKFLRPTFHEFAEASRQKALGARAYYAPRRPPGASHPSAIRARAYQGIRIL

SEQ ID NO: 67655 - protein, 424 aa, unidentified
MSYRIAGIDVHKKMLAVVVSDVEVDGECQFERVRYSSSPEHLRFLAQWLIAQRVEEVVMESTAQYWKPVWGALERYWKPICRERADAGPKSGTLHLAQAQSNRGRRGRKKDFPDAERLVKRLVADELVLSFVPDTEQRLWRTVTRRKYQLTRNHVRLQNQLEGLLEECHIKLSSLVSDLLGASARRMLKALAEGETNPVALAAMADRNLRATQAQLCDALGACAELTPIYRRLLKMFLEELQFIEQQISKLDQELASLLSRHHDAVVHLAEIPGLGVDSAQQIIAEVGAGATTFPSAKQLSSWVGACPGEEESAEVSKSHRSPKGNRHMRRILNQAANAAAKSKGTIFEIVYHRLVSRLGHNQTIGAIAHRLCRLIWIILHRGVRYQERGPLVNAKTRRHRTNRMIRELRSLGYRVEPSVTTAV

SEQ ID NO: 67656 - protein, 349 aa, unidentified
MSQKLDTTIAVIGIDIGKNSFHVVGLDRRGSIVLRQKWSRGQVATRLATMPRCLIGMEACVGAHHLSRKLTSFGHDTRLMPAKYVRPYSRGQKNDFRDAEAIAEAVQRPTMKFVATKTGEQLDLQALHRVRERLVSQRTGIINQIRAFLLERGVAVRQGLRLLRAELPRILATPSDALSPRMVCIIEDLAGDWRRLDERIEGLSSEIELLARRDHGCERLMSVPGIGPIISSAVVAAIGTGDAFTKGRDFAAWLGLVPKQISTGDRTILGKISKRGNRYLRVLFVQAAWAVLIKRKSWARHGLQPWLEAAKKRLHHNVLAIALANKLARIAWSVLAQGRTFEASKIQAA

SEQ ID NO: 67657 - protein, 369 aa, unidentified
MSATRKGLTDVSTTRVQGSDDVVEVVLGVDTHLDVHVVVALDQLGRPLGKLAVPTAKRGYHTLLSWAEGFGPVRCAGIEGTSSYGAGLARYLKAAGIAVVEVQRPKRRHLRRNGKSDPIDAETAARAVLSGEAAGEPKSADGRVEMIRVLRAARRSAVKAKTQAANQLQGLRVTAPEALRHRLRGLSTKELVAVAARFRPTNKLDDVEAATRLALRSVARRYRTLSEEIVKLEAQLELLVAEAAPELLSLPAVGTDHAATLLLAAGDNPERLRSEASFASLCGVSPIEASSGKTVRHRLNRGGNRDANRALHMICMVRMGSDQRTREYVSRRTAEGKSKREIIRCLKRYVAREIYRVLVPTASPSPIRS

SEQ ID NO: 67658 - protein, 395 aa, unidentified
MNKKVHYLGLDVHKETIAVSIAPQDSTEVRRYGIIGGTLEAVDKLLKKLGGENIELRVVYEAGPCGFVLCRHLRSRGIHCDLVSPSLIPKKASDRVKTDRRDADQLARLYRAGELTAIHVPDQEDEAIRDLIRARFAAVCDQRQARNRLKGFLLRLGFRYTGKSSWNEAHKRYLSGLIMPQPAQQIVFQEGIHAIDDACERLDRLTQSVEDALPGWKWEPVVRALMSLRGVQVLTAMTLVAEVGDFSRFAEASSLMHFFGLTPSEHTSSDKRVQGGITKCGNAHCRRVLTEAAWQYRLKPQVSEAMQKRQEHQSKAVRLLAWKAQERLHKRFRQLSVRKKSVVVATAIARELAGFVWGIACQVKPAEQAAAPEIIRTCRGKVYRLNAEKKFEKAK

SEQ ID NO: 67659 - protein, 318 aa, unidentified
MKANTAAVYVGVDVAKATLQVHQQGRQIELHNVPAGLTQCCKKLKALEGAHVICEATGGYERALVQALHKVKIPVSVVNPAQVRGAAQAQGQRAKTDRIDALMLTDYGQRYQPQPTPPASQSQRQLAALAQWLKQLVDAQAVAKTQAEHHEDPFVRKQHKTLLDHYQSQIEAVETKLKALMRKDPVLAQRVECLDAIEGVGLRTAFMILAHMPELGQINRQQAAALAGLAPWTRDSGTMKGMRCIGGGRSEVRLALYMSALSAARCNPVLSAFYQRLIAKGKLPKVALTAVMRKLLIYMNHQLKALDAQPAPDAQKQN

SEQ ID NO: 67660 - protein, 338 aa, unidentified
MEYGAIDLHARKTLIRIVAPDGAVVLDRTITTTREGFAQVFGGRARMRVLLETGTESEWVAQAIEAEGHDVVVADPNYALMYGVTVRAVKTDRRDVAALAEACRLGIYRAAHRVSRAQRAMRRRLRIREQLIRMRTQAINLLRAQLRQEGHRLGSGASETAAARSRALALGAELRVDLAPVLTLLDRLAPLIARCDQAAKARAQADPVVRRLMTAPGVGPIVGLTYRAVIDDVGRFADAASSTAFLGLVPREDSSGTRRRKGGITKRGPTTLRVLLIQAAWTVWRQRQGRAALHAWVERLAGRRGRRIAVVALARRLARILYAMWRDGCEYRPVPRPA

SEQ ID NO: 67661 - protein, 362 aa, unidentified
MFRPHTLYIRIRIVRKVFEPAFAMKDQDVTDVIRRKQQTAMRYIGIDVSKATFVVAYSSDKGGEIRTFNNTTTGIKQFIGALPKDSSIHCVMEATGNYSAMLLYLLNVAGIAVSMENPLKIKNFARAMLSTVKTDKIDARLIALYGEKMNPQPFKIQGEAILRLRQKRTVIRQLTKQITAMSNLRGSLACLPVPDKGATHTVDETIEFLEKRRDRLQSELTDLVEVEFSRQLALLTTIKGIGITLATALIITTGGFTYFQNAKQVSRYLGICPTYEQSGTSVNIKGHINRNGDAYTRGLLYIAAWPASRFNAQCKETYTRLRQNGKSGKLAMIAVANKLVRQAFAVVAHDKEYVDGFVSNRP

SEQ ID NO: 67662 - protein, 299 aa, unidentified
MLDCRIGMDGPELRVKNNSEGIEELAEFRRQHGVELVAMEATGGYEKLAFALLWAKGLPCALLNPRAVRQFAQAMGYLEKTDRIDAGVIAWFAQVKRIVGQPPASQTQQRLRALVSRLAQLTLLSSAQKNQRRLVSDVEVLASIDEILSTVRRQIRLFENKIAELLDSDPLWRALDRVLRSIKGVADRTIARLMAELPEIGTISNKAAAKLIGLAPIARDSGNASRPRPVRGGRRAVRDVLVVVATVVCRYDPDFIAFKQKLKNAGKPPMVIRVAAARKLLVRLNSKARDVRRELAFAS

SEQ ID NO: 67663 - protein, 340 aa, unidentified
MFTNFVGIDVSKSKFDLALIKGQNKDHVIQGVFDNTLKGIKSMSNFLEREHKVQLSETIFCMEFTGVYGYPLTDFFVKKDCHVWIEMPVNIIRSLGLQRGKNDRVDACRIALYAYKNRDDVKLWKPQREAILKLRDLLALRERLITAQKSLQMPINEKISMGDKKGAEILRKGCHKSMSSLENEIGQIDKNLDDIIKEDPQLKELFQLATSVPGIGKLTALFMICFTNEFSMYTNPKQLACYCGVAPFEHSSGSSIRGRTRVSHMANKVLKRMLHMGAMSVISRDPELRKYYQRKVAQGKNKMLVINAVRNKIIHRLCAVIKRGYEYQSEIIFKERLVLS

SEQ ID NO: 67664 - protein, 420 aa, unidentified
MKIFVPVAGVDVSKRFSDLCVLSPDNNVLLRQKIYHDMGSMNLAEKKLHEIELECGARPVVVMESTSHYHLILFQFFTDAGFEVVVVNPIQSGALKNINVRKVKNDRVDAYRIAMLYRLKVLRPSQIPTSSLRGLRLLTRQRSELKGDVARFKNRLTAYLDQIFPGYGEVFSDVGGSASRAVLHMCPTPEKLLNADGSLLAKAICEAGNKGPKFGAEKAAKLREAAGSAQVIGVRSASNASLIKNVLDIIEGLLAAIQRIEGEIKELVTQDTRLDEDVKLLCSIPGIGFSSAVVIAAEMGNISLFRKPKQLAAYFGLDPGERQSGTFKGRKNKLSKRGSPQVRAVLHMAAVSSVSRNRDGTYRNPVLAEYYERKCAEKPCKVARVAVMRKLSNIIYAVLRDRRPFELRTPQEHMALLAAA

SEQ ID NO: 67665 - protein, 390 aa, unidentified
MIYVGIDVAKDKHDCCILGPDTEELFPVFTIRNNSDGYGELFHKIESVSKDKSQIKIGLEATGHYSYNILGSLLDHGYHTFVINPLHTNLYRKGQSLRKTKTDKVDARSIAEMLVTDKTLKPYTGTSYHSEELKSLTRYRFELVKERAKLKTSVSRLVNILFPELESLVPTLHMNSVYRLLQELPGAYFIASSNLTHLKALLADASKGHYGREKAIEIRETAKSSIGSLMPAKSMELRQTIRRIDTLTSDIKEVEQSIQKIMDECGSPITTIPGIKYRMGAMTLAEIGDFARFSNADQVLAYAGLSPSTYQSGQLISSYARMEKRGSKYLRYALFNAAIYASVWDERFRLYLSKKRAEGKHYYVAISHVVKKLVRTIFRMEITHTSYQPL

SEQ ID NO: 67666 - protein, 380 aa, unidentified
MSKKVTQRLMTGIDLHGNNLFCAMVDAKGKRVFEKKLPCDLAVVLATLKPFQRQITRIAVESTFNWYWLVDGLKAAGYDVALANPAQMEQYNGLKHTDDRSDAFFLAELLRLDILPTGYICEPKLRAVRDLLRRRMMLVRKRTSLILSVKSLHARVTGQELKLGVLKAMEPEEAGALFEDASDQLIARLQAEHIEQFDRSVAEIEKAVWQETAKLPNYQVLQTLPGIGKILGLTITLETAEAERFAGPGNFASYSRCVETRRISNGRKKGENNAKCGNKYLSWAFVEAAQFARRYDDRCRHFYDRKAKQTNIMVATKALACKLAKAAWHMMKNNTTYDPARMFPGPTVAAPKPAETKAGMGPEKNQSPGKTALKKKKASQ

SEQ ID NO: 67667 - protein, 366 aa, unidentified
MASLPSGPGMVYVGMDTSMREIVCGVLQPGREVPAVERIPNDEESVRRLIGRLGDRRLLSVCYEAGPSGYELHRLITSMGAACQVIAPSLVPKGSSERVKTDRRDAVRLTLALRAGLLTAVRVPSPSEEAVRDLVRARGDLLEDRKRMQQRLNALLLRHGRVWSGGRKWTYAHRTWVDRQRFDQAALQEALDAYRGALEAREAELRAAEARLSEWAGRDPLALVVARLGAYRGIAELTALTLAAEVVDWHRFPAARAFMGFAGLVPSEYSSGARTRRGSITKAGPEGVRTALVESAQAYRYRPAAGARLRDRQAGAGPDTLARSWKAQQRLHATWKKMTARGKPHGVTAAAVARELAGFVWAEMTS

SEQ ID NO: 67668 - protein, 338 aa, unidentified
MALYAGIDLHANNSFLAVIDETDRLVEARRLPNDLELILKLLEPYRQELAGLAVESTFNWYWLVDGLEESDYRVHLINTLAAKQYQGLKYTDDKTDARWLAHMLRLGILPTGWIYPKEKRAIRDLLRRRSQLVRQKTANRLGLRNVLERTTARRLSANALKKISQDDLCEWIEDPNVRLSMTASLAVADALSQQIDTIEKTIQKHAVLEDSYRILISIKGIGPVLASTIQYETGDISRFPAVGNYVSYCRLVKAERNSNHRVKGQGLRKNGNPYLSWAFHEAAHFAVRFQPDAKRWYEKKRSRTCPLVAIRALAHKLARAAYFMMRDQVPYEPKRLFG

SEQ ID NO: 67669 - protein, 441 aa, unidentified
MTRRCIGLDVHRDFAQVAIWQDGLVRQAGQIAMTVEAIRVFADSLAPTDEVALEATGNTNAIVRALQGRVTRVVVGNPNKTRAIAEAKVKTDKVDAEILAQLLAADYLPAVWVADEDTQARRRQVARRAHIVRQRTRLKNQVQAVRHRNLIPRCPAADLFGIKGRAWLAEQQLPDDERQAVIALLRQLDFHGHELALIDRELAKIALGCQDTKRLMTIPGVDVTVAMAITSAVGDFSRFGSPEKLVRYLGLNPRIKQSGGQPASHGRITKQGRAHARGMLVEAAWVAVKTPGPLRAFYERVRARRGMQIAVVATARKLCVLCWHMITRGEDYAFARPSLTAKKLRALELAAGHRPRRGQKGSAAAYSLKAVRAREKQMAEQAERAYRQLVADWQAKAPRQVGVAAANGTRLSRPSSGQAARQASVPEPALRSGIDHAHPAA

SEQ ID NO: 67670 - protein, 337 aa, unidentified
MNEAITIEVDLAKSVFQLHGVDHNGKSVLRRQLRRSQMLEFFQKQPGSLIGLEACASAHYWARELGKFGHDVRLMQPSYVKGYVKRGKTDAADAEAICEAVSRPSMRFVPVKSEETQGQLVTHKAREFLVRQQTQIVNAIRAHLGEFGIVIPKGIQNVGRVIEACDSAKLPTAARKALNLLADKLIDTQKKIAELTTDIRADATSNEAAQRLQTIPGVGPIAASAFVATLPDIADFKSARDLSAWLGLTPKPHSTGGKERLGRISKMGNKYLRRLLYLGAMAQVSARRRGEPGDDWLWKIIQRTKPKQAAIALANRMARRIYALLKHGTEYQANYAR

SEQ ID NO: 67671 - protein, 353 aa, unidentified
MIHVGIDLHSRNMTLVAINDNGKLVAQEKLNNTPANLGRFFERFNEPVHAVVECTSYWYWVADWCDAHQVPLTLAHAKMLKAISYAKVKTDSVDARTLAELLRVGLIPEAHQCHRDQRDLRELTRGRLRMIQRRSALQSSLWQLAAKYNVIVQDVGWRYLDKLCEFLKQHLPEVARIEAQLLLDQIRLSQDHIIALEQAIEQQTGFYEAVERLKVLPGFGLVCAWTVIAEIGDITRFPTPKQFTSYCRLVPGSKDSGGKYRHRSKNKDGNRYLRVAFNQAAIIAYRDYPVVKEFYKKVTRRSGKHVARTVVGKELAKIVWHMLAKNQEYKGFKGRMTKITTPTYWPQPISPYA

SEQ ID NO: 67672 - protein, 433 aa, unidentified
MNSNHPFDRVIGLDRSDRTADLYHIDTRSAQAEKQIIATSPEALHDWLAQLRQQHPHGRVAICLEQPAANLILFLETYSWITLYAINPITLQKFREAFVTSRAKDDGKDAQYLAELLLTHHNKLKAWQPDDPQTRQLQQLVRHRRAVVDERTGLSNRLKALLKQYFPQALDLCGEDLWRPLATAFLLKWPTLQSLQKAKPASVKQFYYRHGSRSQKLIEQRLELIEKAVALTDELAVLQSHTLRVQLICRELDLLHQTLEQFDQQMAEVFGQHADREIFRNLPGAGPVLAPRLLASMGSERERFARAKNLQSFSGIAPVTKQSGGKCYVHRRYLCPKFFKQSFHEYAKESILHSRWAAAHYWQQRQKGCGHHTAVRSLAYKWQRIIWRCWQSRTIYQEEIYEAALKKSGSPLVALLDQIEVGKSPLKTMTKKS

SEQ ID NO: 67673 - protein, 343 aa, unidentified
MTQSNLIAIDLAKNIFQVAQFQGSKLKSNKQASRKALLEFLVKAKPSVVAMEACASAQYFARTAQSFGHKVMLLDPLFVKAFRQGQKTDANDAIAIAIASKVPNVRPCKILSIEEQALQSLSKVRALADKQKIQLSNQIRGLLLEFGIVINQSEAAFKAAIPDILEDAENTLPLELKHALALTYALYQQQCDNKVELQKQIERIVKQNDSCQRLMALEGVGPITAIELLSFLGDTTQFSNGRSAAACAGVTPLQHSTGGKAKIGRIPKRRGGALRRNLFLGARSIVSKLKNREPSTEKERWIKNLLVRKGVKCAAIALANKTMRTAYALLKNGTNYEPTALIV

SEQ ID NO: 67674 - protein, 373 aa, unidentified
MPKYSTAFGMDVHLRSTTVCALDADTGEAVTRRFPGNPWGEIAGWMDGFPGPSLAAYESGYLGFAPQRELAGLGVECVVAAVSKIPRSAADSASKNDRNDAARMARAILAHDISPAWVPSPEVEGIRDLAGAYDGATARLATAKQRLLAFLARRGFVYGGTTPAGNPRKYWTYDFLRWLDKVRPEDDGGVRTLAALRNEVEAAAEARADLLSEYRAAVDASPIAAEVAALQSIKGCAFALAAAFSAEVGDFTRFRSGRQVTAYFGLAPSQRSSGDSVRLGGISGAGNALVRKLAVEGSWCYAAARHQPKLMPRDTGVPLEIRMHGRKGSERLLRRREEMLARGTPAAKANAATAAELVRWLWALGMMCREGAE

SEQ ID NO: 67675 - protein, 408 aa, unidentified
MGRAAEVVAPSSSIRTDGGCPVVQVNDLSRSLAAFDPISTLVVVVEMSKASWLVSSVVPGVERQPLKKLEPDATALLRLIERWRNEAVRVGRPISRIALAYEAGRDGFWLARWLIARGIEAHVIHSASVAVSRERKRAKTDRLDAAMLMRVFLGWLRGERGHCGMVAIPTMEEEDARRPNRERESLVKERSRIINRMKSALARLGIRGFKPHLRKAPERLAGLRTAEGTGLPANIIEEFRRDMARLALVREQISSIEKTRAERLERAPDTGPHAMVRLLARVIGIGIETADMLVREILSRKLRDRRALARYAGLTGSPDESGLKSREKGLAKAGNARVRRGLIQLAWRFLMFQKDSALARWYRTRTEGPSGARKTTMIVALARKLLIALWRLVTTGEVPDGVELRTAA

SEQ ID NO: 67676 - protein, 421 aa, unidentified
MNANWSEQPFFAALDWAKEHHDVIVVDRVGTIVADFQFEHTAPGWDEFSQRMQAFGQCPVTIETSAGMAVDQLLQRGYTLYPINPLAAKEYRKRKAPSGTKTDRHDAWSLADALRTDGHAWRALHPQDEATMTLRLLCRDEIALIENRTALVNQLEAALGDYYPLALESFKEWAKPYAWAFLRAFPTPQALAKAGQRNRQKFLHTHKLWRPDTSAQRLALWERGQQLNASPAVVSAKSLLALSLATVLETLERQIQEYRSRIEAAFAQHPDHDVFGSLPGAKEVLGPRLLSLIGSVREVFPDADSLMCQAGVSPVSYQSGKICKARIRFVCDHFLRYTVHLWVDESRKTSDWAQTYYQAKRDQGHEHASALRCLGKRWLKVLWRMWRDHTRYDEAEHLKALQEHGSFVWQSLKNQLAEAAA

SEQ ID NO: 67677 - protein, 350 aa, unidentified
MKKNVKQVVGIDVAQKELVVCLGRMQDDLSNELYARKTFANTSKGFTSLLLWVKKLTDTATTVRFVMEATGVYHESLAYFLDEKGYELSIILPNKISSYFRTLDIKTITDKTASEAIAMFGLERKLQNWNRPKTIFKKMKQLTRERDQIVQERTIVKNQLHAEEVEAAPNKSTVVRIKQRIIFLNNQEKAIKEELAALIKSDKELKTDIELICSISGIGLLTAAIILAETNGFDLIRNKRQLASYAGFDVKEKRSGTSVKGKSRISKHGNKYLRKGMHLPALAAIRHDQRYKAIFVRLVSKHGIKMKAAVAVQRKLLEMTYTIFATKNKYEKNYLNKTEQGCQQEEMAMA

SEQ ID NO: 67678 - protein, 403 aa, unidentified
MNSVGIDISKGRSTVAVMRPFGEVVISPFEVRHTGSELSELARRLKSLDGETRVVMEATGNYHAPVAKLLHDAGLYVSVVNAKLVHGYGNNDLRRVKTDRKDAVKLANYGLDRWLTLPRYVPEENTRLLLKNCYRQYRQYSKVQTVLKNNLISLLDTVFPNANRLFSSPIRGDGSEKWVDFVAEFWHCKCVCERSERAFINKYQRWCRKHGYNFSETKAQTIHAVASGHIGVMPKSETTKLLVEQAVAQLRVTSAALAALKHEMQTLASQLPEYPVVMDMFGVGPTLGPQLIAEIGDVRRFYSKKALVAYAGLDAPPNDSGDMTGRHKSMSKVGASSLRRTLFLVMSVYLQNAPLAEPVYQFMDKKRAEGKPYRVYMMASANKFLRIYYATVKAYLESLEHTA

SEQ ID NO: 67679 - protein, 330 aa, unidentified
MTNAHVGESTLPPLEFVGVDMAQQGFEWAVHGVRGTHSARNDDSGFEALREALKDRRIGLIVIEASGGLERALAGYLLRHGLPVAVVNPRAAREFARSMGHLAKTDAIDAVALAHLAQTLAAKADQAGVRLTPPSAEVELLQAMVARRVQLLSMRTAEKNRLGGAVRVMHKSIEAVIKTLDKEIGKLDRDIDAHLEQHFTEQAQRFDAIKGLGMTTCAVVLAFMPELGTISGARAAKLAGLAPLNNDSGKERGKRHIWGGRSIVRSALHMATLSAVRFNPVIKAFYDRLLAAGKPKKVALTACSHKLLRILNAMARTGQPWNEKFHAVTP

SEQ ID NO: 67680 - protein, 428 aa, unidentified
MKNRNIQKLEAITPGTLVVGVDIAKETQWARFVDYRGLELRKVLKFKNHKNGFDSILASIEAICKNRRLDDVIVGMEPTGHYWKPLANYLLIHEVTVVMVNPYHTKRAKELDDNSQTKSDKKDALTIARLVRDGRYYEVYMPQDIFAELRVLSNSRISLMKRSNALKNTITAVMDEYFPEIVTVFKKPLKGKAAMQILKSCPFPSLILELGIEGVLFEIKKAVKKTVGRRKAQQLVETAKNSVGVGYGLVSAKLKLGLMIEELELLTKQLEQLETAMEKALADTGYGEIILGIPGIGVVTAASFLGEIGDPRRFDHPRQICKMAGYNLIEDSSGKNKSGTKISKRGRKNLRSVLYQMARTMVAVNAEMKELYQYLKTRPNNPLKKKQALVVISKKIVTIIYSLVKKQTGYQAELALGEFRKNQIKQVA

SEQ ID NO: 67681 - protein, 344 aa, unidentified
MEHFAGLDVSVKESSVCIVDDTGRIVREVKVASEPEALLQVLKSNAYHFRRIGLEAGPLSQWLFSALAEVGLPVICVETRHMRAVLKAQINKTDRNDARGMAQMMRAGLYRPVHVKTLRSQKLRMLLTHRKLLQSKAISIENDLRGTLRNFGLKVGVVGKVKFEARIKELVENLPDLALLVEPLLIVRRVLREQLGILHRRLLAIVRDDEVCRRLMTIPGVGPVVALTYRATVDVPARFRNSKAVGAVLGLTPCKHQSGESERSGAISKCGDEMMRVMLYEAAQILLVRSTKWSWLKAWAMQIARRRGVKKAIVALARRLAVVMHRIWVDGTTFRWTRETVAAA

SEQ ID NO: 67682 - protein, 340 aa, unidentified
MDMTTLGIDIAKSVFQLHGIDADGAVVVQKKLRRGAVLNFLGKVGPCLIGMEACATSHYWAREIAALGHEVRLIPPVYVKPYVKRQKNDAADAEAICEAVTRPNMRFVPIKTEEQQSVLVLHRARDLLMRQRTMILNAIRGHLAEFGIIAAQGPRQVMGMIARLRDDGDASLPEIARSALLALGAHLEALAGEIWALERQLMVWHRADPTSQRLETIPGVGLITATALAASVSDPSVFKSGREFAAFLGLVPRQNSSGGKDRLGRISKMGDRYLRKLLVVGATSVIRRAGSNSTKTGAWVRSLMERKPARVVTVAMANKTARIAWAVMTRGEAYRASPIA

SEQ ID NO: 67683 - protein, 393 aa, unidentified
MVYVGIDVAKDKHDCFIVNSDGEVLYDVFTIQNDMDGFEDLLFKIKTASKDLSKVKVGLEATGHYSCNILGFLKSKGLYTIVINPLYTSLSRKSVSLRKTKTDKVDARTIASIIMSDVSLKPYSDTVYHNEDLKSLSRYRFDKVSDRSKLKQSVSRLVNILFPEIEKLVSTLHAKAVYALLSEFPGAHQVASANLKHLTALLSTASKGHFGREKANEIREAARRSISSYLPAKSLELRHTIKLIHELNAEIAEIETEIKKIMDSIDSPTLSVPGISYALGSVIVSEVGDFSRFDNPDKLLAFAGCSPSTYQSGQIYSTHAKMEKRGSKYLRWALLNAAKYVCKWEPTFAVYLRKKLAEGKHYNVAVSHAAKKLVRLLYHLETTGEKYIPQTLS

SEQ ID NO: 67684 - protein, 455 aa, unidentified
MEQPQEIADEEHERVWERVAAVDVAKASGVVCTRVPDEDRPGRRKTHVWTVKATKKAVIELADHLRCHQIQVVTLESTSDYWRIWHVVLEAAGLRVQLVNARHVKNVPGRAKTDKKDAVWLARLTERGLLAPSFVPPPEIRQLREFTRLRADLVHERSRYWARLEKLLERALIKISAVASTLDTQSCRAMIEALIRGERHPRAIADLAIGKMRPKRAALAEALDGDWQPHHGELARILLDQIDALTAQIDVLTARVSELIDQIPAAWGADADGVTGPAAGYGPDAPVLPAVARLDEITGCGIIAAQAIIAEIGLDMTVFGTPGRLVSWAKRCPRTRQSGKKTTAGKAGKGNPYLNGILGEIAASASRTDTFLGERYRRIARRRGKRKAQAAIARSILVITFHLLADRGTRFRDLGPGWYDTHIDAERKTRNLIRQLQALGHTITLNGAQPGAAAA

SEQ ID NO: 67685 - protein, 414 aa, unidentified
MKSCLFVGIDTHKDSHTAAVLDGYFGVLATITFDNSSTGFTGFEGKLKKLSRGRDLVFGLEDSQGLGSFLASYLSGKGYAALEINPVTTDRGRKHTVSHDKSDERDAVVIAKTLIRERASLHPVRIDRNGVAIREMTGYRQMLVGESTRIKNRLHMVLFNQYKGVLSCFKDPFRKCALAFFLRYPAPSSLKEADPDSLSDFLKANSKGMFSREKARAILSSTDNSITDSLTDARAHIITAHIERLLGIGKELKKIQDVLEGLVKASSYYCLTSIPGIDIVTAAKIISGVMDISRFSSASKLAKFCSIAPSERSTGKKKRYEKSKYGNKSLRSTIYFVALSHISRTRDGRDKNPISRAYYLKKISEGKTKKEALTCLTRRLVDIIFAIMRDRSIYNFSKSRFIKQRDTELDSAAA

SEQ ID NO: 67686 - protein, 342 aa, unidentified
MIYVGMDISSKDFMIYAVNERKKVSFKGSIAPSKQALRKLIDDLGIEKKIFVFEAGNQMKWIADFFKKENQEIHVVHPNEVKWITQSSGKKTDKVDAKKLAELARADMLPRRVVLADGKARDLRELTAARQTLLSKRVSLMNTIRGYLKQEGVRLPAKFFVSNEWQVHLIGLKLRSSTESIVANLMYAVEQMQECEKGLNTEIQSIDDEQIKLIETIPGIGKLSARILFGALISAERFDNSKSVANYGALAPTIHQSGDMNHLGKINRDGRSEVRRAMLQCAHAVARTKTAAVKPLKEFFERIEKRRGKKRAIVALSRKLLTTVYGVMKSGEAYNPGKLVAA

SEQ ID NO: 67687 - protein, 316 aa, unidentified
MYLGIDISKTTIDCCLISDGLFFERKFENRESGFHKLQDWLAENGATDKLRCCCEATGKYYEALADFLAARHTISVENPRKIKGYATAKLQRSKTDKLDAKLIAEYCRDMNPRPWQKTDPAQTELKELTQYRQRLKRQKAAEQTKQQTAPDCLAPLIQKHIQEIQNLITEVDGQIKQFYKDHPDYKDQRKRLQTITGIGEAAADNLLSVLAAHHRFKTAKQLTAYLGLDPKLYKSGTSVNGREKISKVGSKNIRTALYMPAMHAYRSETFRSFVNRLQANGKRPKQIIVALMRKLAVIAYHLIKTGKDFEPKRYTG

SEQ ID NO: 67688 - protein, 360 aa, unidentified
MFSERTSVGLDVHARSIVGCGLDTVTGAVTRRRLTPTVEGVSAWLAELPAPVAVAYEAGPTGFGLARQLTAAGVRCVVAAPSKLQRPPGDRVKTDSRDARHLANLLRMDQIVEVRVPTVEQEAARDLVRAREDVRGDLMRSRHRVSKLLLRQGIVYYGGHPWTGPHEVWLRGQRFTAPGLQLAYDTAVETVLLTVARRDRLDRAITEMAFHSEFSPVVRRLCCLRGVSTLTGFGLAVEIGDWQRFTGGSIGAYLGLVPTESSSGAKRSQGSITKTGNTHARRLLVEAAWHHRKAYRPGLTLRARWDQAPAAARARGHEGNHRLHHRWEVFTARKKRPVIANVAIARELAGWCWSLAVLDD

SEQ ID NO: 67689 - protein, 319 aa, unidentified
MIKTSVGIEVAKLKFDVAVWVERKKYKTKVFPNTSSGFAQLLKWLSVYGDCHICLEATGVYSFPLATFLVDNGIDVSIENPSRIHAFGESELSRNKTDKGDAKMIARYCALHTPSLWTPPSLSERQLTALVRQLNNLEEVKRMHENRQSVADAIVESSLMEIIDALKQQMQTTKEKIRNHIDSDPDLKKNKVLLESIPGIGEILSASLLAYIGNMSKFSNSKEVVAYAGLNPKLQESGLFKGRSRLSKRGHPELRKALYMPALAAISCNPIIKAQWQRLVSRHKGGKVGICAAMRKLLQLAYGVLKSGIPFDENIALAS

SEQ ID NO: 67690 - protein, 364 aa, unidentified
MSDITTTIGRSKLTVGLDIGDRFTQVCVLDEDGEVLEEGRVTTTPRAFQQRFTAMPPARLVLEAGTHSLWASRLLGELGHEVIVANPRMLRFIYGNNSKNDRADADYLARVGKLDPGLLHPIVHRREESQAHLALLRSRDILVHTRARLVTHARGLVKPFGFKLPRCSTTAFVKKAQEHIPEILAPALGPVFGIISILSDQIRELDGKIEALARETYRETALLTQVQGVGTLTTLAFMLTIEDPNRFPRARAVGSYLGLRPRQDESGTLKPQLHITKVGDKFLRSLLVECAQYMLSSRGEDSDLKRWGLKLAERGGKAAKKRAVVAVARKLSVLLLRLWVTGETYEPLRNAKKRGDPVPSAAVS

SEQ ID NO: 67691 - protein, 370 aa, unidentified
MPSITQPAAPCHVPADAAEEVLLGVDTHKDVHAAAVVTVLGVTLDGRTFPATTEGYRQLVGWARSFGTLRRAGVECTGSYGAALTRHLRAEGIEVTEVNQPDKAVRRRRGKTDAIDAEAAARAVLSGRATATAKASDGPVEVLRLLKLAKGSAIKSRTQAINQLKSVLVSADAALRESLAGLSNPRLFKQCAELDDTEAAGPAGTARHVLKLLARRIQHLTVEIDDLNKRIAEGVEASVPGLLDVRGVGPDSAATLLISAGDNPERLTNEASFAALCGTSPVEASSGKTQRRRLNRGGDRQANAALYRIVLSRLRWDDRSQDYLRRRLAEGKTRREIIRCLKRYVAREIYRLIIPVRAAVDHAGPAGAVS

SEQ ID NO: 67692 - protein, 428 aa, unidentified
MNEKNHTRLQEFRQLQKEIRGSKDYLIVGIDVAKERHSAFFGTATGKTLFRRLVFGNDREGFERLLLQAEAMRVQHGLKKVVFGLEPTANYHKPLGEYLISCGHRVVLVSAKSVKRNRELLDGRWDKHDTKDSANVADLISQGKCLYYEYPELRLRELRSLLMLKRRLKRQEHGLRVRIRNHLIAQYFPEFDRYFGRSESESLAIVRWCVGPSVIEGLSYEEFVRLVAPGRRTLRQKERLRAIWQKASASIGCEVGEAVRFEAKVMVEGLRQIRETLGETEEKITNLCRGFPEYEYLLSIPGFGPDVSSKVLGAIGDPFRFTRGTQVLRMAGLDLVAARSGNRSDGVVPIISKNGKADLRYALYQAAMIASIRDREFIMWFTNRLRGRQREKGIKTRMRVKLSAKLLIIAWTVMKKKEPFNPDYLRIE

SEQ ID NO: 67693 - protein, 363 aa, unidentified
MKKLPPLSTFAKIGCETNHNPKGGSQMYYTGIDLHRKTSFLTTVDSEGRVVKKGNLINDEPTILEYFISLDEDTQVVIESTATWYWLYDLLTAHAIPVVVSNPVKTKAIASARIKNDKLDSHMLAQLLRADLLATVHVSRLQTRQLKELLRHRHKLVRDCVRMKNRIHNIIAKNNLSVPVSDLFGKKGLVFLSQVQLPSYQRHQVDTYLGLYQQLKEHTVALTEQIKQAATRDSMAQLLMTIPGVGPITAMFIAAEIEDIGRFKSYRHLASYAGLVPRLDASADKQRTGRITKQGSPYLRTALVEAAQATTRTKSRLNVFFRKRIVRSGYQKAIVATAHKIIQYAYYILRDQTPYRDSIDALA

SEQ ID NO: 67694 - protein, 329 aa, unidentified
MTNTSIPTAGIDTSKDKLDVAVYGRPGSFTVENSPDGWAMLAARLAEIGVQRVGIEATGGYERGVTRYLQQVGFTVVVLQPLQVKAFAMMRLQRAKSDPIDAGLVAACTFLLDAQNKLPPDPRFDALTDHLTFIEQTEEEIARLKTRREHIADPRLLRILAADIKRLEQRRGLELKRLAGALRRHADLARRVDLVLSIPGIGERTALALVLRLPELGRVSREQAASLAGLAPFVHQSGKRRGETHIGGGRGRLRRSLYAAALPASFRWNPALCALYARLVARGHCHRSALVACARKLLVFANAVVARGTPWRDQAAAGAAAGAARGFVT

SEQ ID NO: 67695 - protein, 347 aa, unidentified
MRFYAKQHNYYCGIDLHARTMYVCILDSKGQVVLHENMKANPKALARTIKPFQDDLIIAVECMFAWYWVADFCEDNNIPFVLGHALYMKAIHGGKAKNDKIDSYKIASLLRGGTFPMAYVYPRSMRSTRDLLRRRMHLMRKRAELLAHIHNTNSQYNLPEIGKNLRYKSNRSLVENRFDDKSVQRSVDMDVELINFYDEKLSSVEWYILKHARVHDYHSYMLLKSFPGIGDIISLVILYEIHDINRFPKVQDFASYARLVKCKAESAGKTYGTSGAKIGNAHLKWAFSEAAVLFLRCNPKAKAYVEKLAKRHGKGKALSILAHKIGRAVYFILKRKEPFNTDLFLAA

SEQ ID NO: 67696 - protein, 366 aa, unidentified
MKKTSTVRVNGNMIFKGQKLTLGMDLGDHWSCYCVLDEAGKIILEQKVAMTPEAMKQTFAKIPQSLIALETGTHSPWVSRLLTELGYKVIVAHAQKVQLITKSNRKDDRHDARTLARLARIDPELLGPVRHRSAQAQIHLTVIRARAELVRARTALVNAARGLVKSYGQRLPKCGTQQVNRELAAGLHAELREVLEPLLQEVESLNERIQEYEVRMEKIAKENYPHVELLKQVKGVGTQIALTYVLTLDDPHRFPKSREVGCFLGLCPGRRDSGESQPEMNISKEGDRYLRTMLVQGAHYILGPFGADSDLRRWGLKLAARGGKSAKKRAVVAVARKLAVLLHRLWVGGEVYEPLRNSDKATRAAA

SEQ ID NO: 67697 - protein, 361 aa, unidentified
MQSITIIAFDHHAATTVAAVLVPGQRTPALHSLSSDIPTIQRFVGRLQRQGPVTCCYEAGPCGFELQRALTARRMPCEVSAPALIPRRAGDRIKTDRRDAGQLAVLHRAGALTAVHIPSEQEEAARDLLRCREDIRADLLRARHRLSNFLLRHGRRFTATKKAWSKRHDAWLRVQTWPVPALDQTHQAYLRAVDEAGARLAAVEEDLRTLLTLEPLRARVVRLRCFRGIDDLTALTIAAELGDPRRFGSAPRLMAYVGLVPSEHSSGTTRRQGGITKTGNAHLRRVLVEAAWHYRHHPFVSAGIRARQRGATATVIAQAWTAQQRLHRRYARFAARGKPKQHIVTAVARELTGFLWAALTQ

SEQ ID NO: 67698 - protein, 320 aa, unidentified
MMAQNNVVVVGIDVAKDKVDACIRSASEQQMFPNTAQGRRKLIAWLRKHKAGQAVMEASGGYERDWAEALREAGLAVRIVDPKRVRNFARSTGQFAKNDTIDAQMIAWFAEVFGEVTTRAHDPEREKLAQIVHARQALIDVQTELQNRGEHSVPDVVGRVQARLLKKIGAELAILEAAMVALVKATPRFAELAEIIESVPGLAEITSASLIAAMPELGQVSNKAISALLGVAPFDDDSGKRRGERHVHGGRRKVRNLFYMACMGAATRHNPMLKTFYRRLIAKGKKPKVALVACMRKLIVILNVMIARRERWDVSRHAAA

SEQ ID NO: 67699 - protein, 439 aa, unidentified
MSTPSLPVLDPTAAAIDVGSEQLHVSIGGGPPKVFGTTTGQLYELRDYLLAQGVRSVAMEATGIYWLCPYEVLEKAGLQVVVVNGKYVKNLPGRKTDMKDCQWQATLHAHGLLKPGFVPPEHIRRLQDYIRLRTDHITLAGSHEQHMQKALDRMNLKIHDVISDLTGMSGLKMIEAILGGERNPVALLALCDAQIQKNKAGRLRAALEGTWKEEHLFALRQAYELWQFYQKKIAECDQAIEKVLVVLAGPEDPKNPAPPPTKRGGVNAPQITGLHGMLWRLCGNKELTTLPGVADYVLLQLLAEVGTDLGKNWQTEKHFTAWLGLAPGSRQSGKRRGNQKRGRNRPGRLFCVIARSVGRSVDKALGGFYRRLKGRRGGLVANLALARKLAELFWRLMVHGITYVEQGLKKYEEKVAQTEQHFLQKLARKYNMVLQPKPA

SEQ ID NO: 67700 - protein, 460 aa, unidentified
MNRKKWKSKIDRTMPVVHPNAAAIDIGATMHMAAVRADRAPEPVRSFGTFTADLHRLVDWFAECGVETVVMESTSVYWIPIFELLDARGFTVFLVNARDAKHVPGRKTDVSDAQWLQRLHSFGLLRASFRPKGQIAELRAYVRQRERLLEYAASHIQHMQKALTEMNLQLHHVVADITGATGLRIIRAILAGERDPEVLACLRHYSCHSSAETIAKALTGSYRPEHLFALDQALALYDAYHEKASACDVRIEAVLKELRIHRGRDHGSAPPVSRRRNRTDQANALAFDVRAALFGLLGKDVTTIDGLGPYLSLKLIAECGDDLTSWPSAKHFTSWLGLAPSNKVSGGKMLSSRTRRSGGRAAALLRLAAVTVGRTDTALGAFYRRLSSRIGKAKAVTATARKIAVLFYNAVRHGMDYVDPGASSYETRYRTRVINNLHRRAKTFGFVLQPLEPKAGAAVS

SEQ ID NO: 67701 - protein, 413 aa, unidentified
MSFFVGIDVSSSDFKVRILDERGNEPVKKLRVLNDKPGCEQIARYLSDACAKEKIDRLVIGLEATSVYSWPLQMFLAEDHSLAPLQPKIYSFNPKVVANFKKAYVDLPKNDWIDAWVIAERLRFGRLPEGSQVDFRYLPLQRLTRFRCHLIDMISREKNYFLTNLFLKFSTLAQGAVFSNTFGATSESLTLEFFSPEEVAARPLDELIDFLMEKGRSHFEDPEAKARELKEAARKAHRLRGSLLQPINLILATSIETIHTLEKQVKKIDKAIEAEIRHFPNTLITIPGIGPVLSAGIIAEIGDIRRFPNEGALAKFIGLTWRSHQSGNFTADDTPLTRTGNTYLRSYIIQAANLVRQKEPEYKAFYQRKFSESKTHHHRRALVLTARKLVRMVDALLRSNQIYMPHGNRGNVS

SEQ ID NO: 67702 - protein, 460 aa, unidentified
MGWLGNRLPTCLVWLVNEVPARRVSAAVWLERGASAVDLNSDMPAAVFPSVMSLEATVAGVMIGVDPHKGSHTAVVLDQVETVLGQVRVKARADQVEQLRRWAQEWPDRVWAVEGARGLGQLLAQQLIAVGEHVVDVQPKLAARVRLLNTGQVNKNDPNDARSVAVAALRAHDLREVGIEEDTAVLRVWSRRYRDLASLRTQVVCRLHAVLCELVAGGFSRQLTAGQAIEVLDRVAVHGAIAQARLELARDLVADLQRIDAQRREVKRRTARAVTASHTTITDIYGVGPIVAATVLGYVRDIRRFPTRDRFASYNGTAPIEASSGNRTIHRLSRRGNRQLNYVIHMAAVTQIRNRGTAGRAYYDRKIEEGMGGKAALRSLKRKISDSIYARMIEDTRHRDDNPSEDPGGHTGNDSVSSAAGSHPATPALRTSHSRVADNPTTNHPTTQQPNHARGGRRKG

SEQ ID NO: 67703 - protein, 351 aa, unidentified
MHPYFVGLDVHKQVIAYCVKTPDGTIVREGTIGATRKSLDEWVKTLPGPWHGGLEATLFSHWIYRHLKPHAAELQMGQPARMKAITAGKKKSDKLDARTLADLLRANLFPACYVIPPELEALRRQLRFRRLLMQETVRFKNKTAGLLMEVGVEYERRRLHGKRYFADLLSQPDPALDQDLRPLLEFSRSQTEELKRMDARLMRQLSRHPRLQARLNALLQIEGVGPVMALTWALEVGEPTRFRSIKQAVSYCGLASALRESAGQQKRGPLSKQRNHHLQTVLIEVSKIATMSQGKLREIYDQARAKGNANQATLQVARKLVAYLLAVDRAFFAAAETIAPNGGPAATTQAA

SEQ ID NO: 67704 - protein, 388 aa, unidentified
MNKIIYIGMDVHSTNFTLCSFEPGYGFEADKIFGQTQIKEDIFNSTVKYINKLKSMRPDVDVVCGYEAGCLGYNLHRKLKAKEIESVILAPTTMAVSRNCSKKKNDYRDAITIAKCLASSAYKAVYIPDDKDEDVRDFIRMRDDHKTALKQIKQQLNAFCLRHGHHYDKTKWTGLQLNWLRKLELSKFQRETVEEYLATYEALTSKIAALDIRIEDIASEERYAEKVNKLKCIKGIKTHTALSFVCEIGDFNRFKSADKFAGFIGLVPGECSSGNTERMLGITKAGNRHLRRLVVEISNTYRRGAVGRKSAALKERQKDMPKDVVAYADKATNRCQRKYQRMMFKGKNSNQAVAAVARELCCFIWGMMTGHHSRTAQAEVSVYRSELD

SEQ ID NO: 67705 - protein, 334 aa, unidentified
MSDVTTCGIDLAKNVFSIHAVDGHGVVVLRKTVVRARLAALVAQLPACVIGLEACSGAHEWARRFALHGHTVKLMAPKFVAPYRKSGKNDSNDAEAICEAVGRPSMRFVPVKSLEQQAMLTLHRVRLGFVEERTATINRIRGLLAEFGVVLPQRVVEVRRGAAATLDQLPSLAQRALRDLLAHVRVLDERIAEYERELEQHARRDERARRIQKLSGVGPISASAIVSSVAEAREFKNGRQFAAWLGLTPKQYSTGGKARLGRITAHGDAYLRTLLIMGARSMLQTALRRTDRLARWALAVRARRGYHRACVAIAAKHARIIWALLAKNEALQLA

SEQ ID NO: 67706 - protein, 344 aa, unidentified
MDHFAGLDVSVKETSVCILDDAGKILKEVKVASEPQALLKVLGNPTYRFKRIGLEAGPLSQWLFSALAEAELPVICVETRHMQAVLKAQINKTDRNDARGIAQMMRVGLYRVVHVKTLHSQKLRMLLTHRKLLQSKAIAIENDLRGTLRNFGLKVGMVGTVRFEARIQELVETIPDLAVMVEPLLVVRRALREQIVILHRRLLAIVRDDEVCRRLMTTPGVGPVVALTYRATVDVPARFRKSKSVGAVFGLTCSKYQSGEIDRNGRISRCGDEMMRVMLYEAAQSMLRSKKWSWLKAWAMQIARRRGMKKAIVALARRLAVIMHRIWIDGTEFRWTREATAAAA

SEQ ID NO: 67707 - protein, 362 aa, unidentified
MQKRFHGIDLHKRYATINVRDQDGTEIENILRCKDFQKYIDSLTEKDSVVIESINNAFFWADKIEETGASCIIVNPHKFKIIKESWNKTDKRDAASLSIALWMSEIRQEFKLPVVYKPDKKIRDLRKLFSHYQTITTQLTQQKNSIQAIFVENGIALNKKQTYQLFKTESDISILDAKGISGASRFCVLSSLSLLHSLEKQKAEVKNEILAMGAFFEQEIRLCISIKGISAFMVLAFLADVGDIYRFKNVRGFNAYMGLVPTVKSSGGKTQMGHICRQSRKLARSLFTQPIIHIIESSDLMKKFYTTVKQRRGVGRSRIAVLRKIVNIMRRMILTGEIYRGCDDSGYQKKLNEFDKILKRAA

SEQ ID NO: 67708 - protein, 405 aa, unidentified
MINIGIDWSETHHDICFMNDAGAVITRVTVPHSPDGFLKLETTRQQLGVTANECRVGLETAHNLLIDFLWAKGYSQVYVIPPSVVKGTRGRYRQSGARTDESDAPLLADVLRTDRTRFQPWHPDDALTRQMRVKVSLHAYLTQQTTRFSNRLRAVLVRYYPAATQVFSGLKTQIALHFVQEFPTPQAAAALSFTQFRAFAKAHGYTRRAELPVCFARLQQAQPEADPTTIAIYQDEAVALASVLLNLVQTQLTVARELVTLFELHPDYPIFHSLPGAGAFLGPALLVKFGNDRVRFPMPASVQALAGTCPVTDRSGKRRIIKFRQSCDREFRRIAQQWATTSLRESAWAQSYWQQARPRCQSDSHAYRCLANRWLAIAWKLWQARVPYDEDYHLQQRAAHSKPRA

SEQ ID NO: 67709 - protein, 272 aa, unidentified
MLKFTIGADISKNKINFALRFLNDYVLEKEVENTTSALNKFIKEVQSLVKSIAKEKKSEYILEFIMEHTGIYGNLLIECLAGHKLTMYVIAGLEIKNSTGISRGKNDKIDAKRIADYGIRFADKLKPYTLCDQTLTELKGLNTLRTQMVRIKAQLTQANDDIKKFQSKELQKKSDKLKKPVVNELDQAIEKIEAQMLELIKSDESIYENYKIAQSVPGVGKIVAVAFICATNNFTKFESAKALGSYCGVVPFGKESGKYKGKIRYLPLLTRH

SEQ ID NO: 67710 - protein, 411 aa, unidentified
MELLVARCAGLDVAKDELVACVRVPDGRGGRCQEVRTFQTFTSGLEALAAWLAGEGVTQVVMEATGQYWKPIWYVLEEQGFQLLLVNARHVKILPGRKTDVCDAAWLAELLEHGLLRGSFVPPASIRELRDLTRYRKRLIQAHSSEGQRVQKTLEDAGIKLDSVAADVLGVSGRAMLEALVAGERDPQVLAELAKGRLRAKLPQLRQALRGRFGAHHALLIRLALAHLEQLEGSIAELDAHIDRVLAPFAQARDRLDTITGVGKRAAECMLAEIGVDMSVFPTAGHLASWAGRCPGNNLTGGKRRSGKPTKGNRWLGEVLIECAWAAARSRDTYLSAQYWRLARRIGKKKAAVAVGHSILVIAWYLLTDNCTYQDLGGDYFVRRDTDRQRQRAIAQLQALGYRVVLEPVAA

SEQ ID NO: 67711 - protein, 342 aa, unidentified
MNKISTISIDLAKHVFQLMAFDDQGHPCWSKRLSRIKLKEALLNQPPCNIVMEACSSSHYWGRTFQAMGHQVQLVPAQHVTPFVRGNKNDKNDCLAIYEASRRPNLRFVPIKSEQQQAILLLHRQRERLIAARTACINQTRSLLLEFGIVMPKGRAEFKTHLLKLLDEASLHPIIQLMLSDVDKELRRLDKQIQSIEVTFKETTAQNPVATVMRSIPGIGPLIASAFSAAIDKGQAFNNGRDLGVWLGLTPLQYASGNINRLGGITKRGDGYLRKQLIHGARTVVQHAHKKDDDLNRWITELKARRGINKTVVATAHRLARLMWILLQKNECYTPQFNQREV

SEQ ID NO: 67712 - protein, 317 aa, unidentified
MEQMKLTTNCAGIDVSKRRLDVGLPFSQEAGDFSNAEAGFVALEAWLRARGVRRVGMEATGGYEQALCQHLQAAGFEVMVFQPKEVRMFARFRRIKAKTDKIDARVIGLAAMYVEAVKAANDPRLNELAERLTAYEQAADQLKRMKTCREHVRLADLKADYAAEIARLAERKKRLARDLLRRLQAHDDLVRRYRLLRSIPGFGPLIAAVLVIRMPELGDLEQGQAASLIGVAPFSRDSGQQSGRRFIQGGRERPRTFLYLAALAAKRSAGLFKALHDRLLAAGKLKKVAIVAVMRKLIEAANLVLKRQQPWIKAIPA

SEQ ID NO: 67713 - protein, 352 aa, unidentified
MQTPQLFIGIDVHKKSWSVSIRTDLFEHKTFNMPSEPDKLITYVNQHFKDYPVECCYEASCCGFIPYRKLAQAGWKVKVLNPSDIPQSAKNKDQKNDKMDCRNLAKQLQSGHLTGIHVPDEQREQLRSLFRQKNNLTKVMRKLKSQIKAELLYYGIKFPSQFENANWTKEMTTWIQDLEWKYITGHTSLQSKLRHLAFVRQEWLTINKDLRQYVTACFNDDYQLLMTIPGVGPVIAIGILSELGDIRRFSKFDQLSSYVGLIPSVYSTGETVQIRGLTYRTKSLVRSYLIESAWVSVRRDPTMQAYYRTHTGKQPNKIIIKVAHKLLRRMWHVIKTEDGYKTCLNDSAAEPG

SEQ ID NO: 67714 - protein, 392 aa, unidentified
MYIVGIDIGKNHHEASIVSPEGKQIGRSLRFATTHKGADSLMSFIFKNIGNSPCVFGMEATGHYWYPIYSFLKAKGYTIYVINPIQSDSLRKMYIRQTKNDSIDSFLIAEVIRFGQFGTTSMADENILAMRQLCRYRDSVISSRTEIKLRIGTIMEQIFPEYEKQFSSLWVSTSMGILEKYLTPENIENAPIDELFEIIKDKSHNRLTKAKAISIKEAAADTFGIKIAQDAFSFQLKQLIDRMNFLDKQIEALDCQILEYYEKFDCYLHTIPGIGIIGAATILAEIGDISRFKNSSSLIAFAGIDPTVRQSGEFNSTHNHMSKRGSPYLRHAIFLAATTCSFHNSPLNAYYKKKRDQGKHHLTATGAVARKLTTVIYAVLRDSKPYEPKKFC

SEQ ID NO: 67715 - protein, 345 aa, unidentified
MKTFFIGIDVSKEKLDATLIHYESQSDSEQQLAYTTVANNPKGFRSLVSWSKKNAGRGVKTDTMLFCCETTGGYDRALCDWLYGNGLNIWRESALQIKRSMGLRKGKDDKADSEMIAYYALRFRSQATLYKPLDGNMRSLRDLFLYRQSLVAEKRAKMVSAKEKQHISSKSKVDNFIYRDAQKTIDLLTKSIKECERRMLEIIKEDEEMYRNYLHLISCKGVGLVTSVMLIVYTDNFKGWNAKKMASYCGIAPFYESSGSSVFHKANTGGYSNRRLKGILTQAARSAITHNPTLRQYYLRMKSQGKPYGVILNNVNNKLLHILFSLVLHDCDFELDHEAKRALLA

SEQ ID NO: 67716 - protein, 355 aa, unidentified
MLIVGCDYHPSFQQIAFADTETGELGEQKLAHREGAEKFYRALAVAGQQVRVGMEASGHARWFERLVAELQFELWIGDAAEIRRKRGRKQKTDRQDAQHILGLLLKNDFPPIWVPNWENRDLRQLLWHRHRMVQARTRIMNQLQAVALNEGLLCKKRLWRERGRQQLEAFLLAPWASRRRHDLLELLDRLNPTIAELSQAIEQEAEKRPAAQRLMTHPGVGALTALAFVLIIGDAKRFQCGKQIASYLGLVPLEDSSGNRRRLGHITKQGSSMLRFLLVEAAQVTVRSLPEWRRKYVHLMMRRGRKTAKVAMARRLAVRLYWMMRQGWDYQQWSKFGSQGRKLSSHAVVTEGSTR

SEQ ID NO: 67717 - protein, 357 aa, unidentified
MRFYTKQHKAYGGIDLHARSMYVCILSQDGEILLHRHMQTSPETLLKAIAPSREDLVVAVECIFTWYWLADLCAQEQMPFVLGHALSMKAIHGGKAKNDTIDAQKIAVLLRGGMLPQAYVYPAEMRATRDLLRRRLHLTRQRAELLTHVQQTNWQYNLPEIGKKLAYKANRDGVAERFPDPAVQKSVEVDLALIDYSDQLLSDVELTIVQTAKQHHAQTLYRLQSVPSIGKILSLVLLYEIHDITRFPRVQDFVSYCRLVKCAKESAGKRDGTSGAKIGNTYLKWAFSEAAVLFLRNNPAAQKYLARLEPKHGKGKALTVLAHKLARAVYDMLTRDTVFDMQKFLNGSWSGAGEPTA

SEQ ID NO: 67718 - protein, 347 aa, unidentified
MSNHIENGQVRVLGIDLGKSVFQLHGVDARGKSVLKQRLKRDKLLEFMAQLPPCLVGMEASSGAHHWARKFQGYGHDVRLMAPQYVKPYVKRHKNDSVDAEAICEAVQRPNMRFMGIKSVAQQEILALHRVRSLAVKNRTALVNQIRGLLAEYGIVFPKSIKQARRAIVLILSDESSEMSANFRVILEDERDELAHLDERIGKYEREIEALAKAEPQCRLLMTIPGVGPITATALLASVGDVRAFKNGRELSAWIGLVPNQHSTGGKAWLTGISKRGNGYLRTLLIHGARAALRVCENKPDRRSQWAVSVSERRGANKAVVALANRMARSAWAMLVKQEAYGASAAV

SEQ ID NO: 67719 - protein, 347 aa, unidentified
MNFYNNTHPYYCGIDLHARSLYVCILNNEGKTLVHKEITASPDKLHDLLQPYLGNIVVGVECMHCWYWVSDFCELTNVDFILGHALYMKAIHGGKAKNDRIDSHKIANLIRGGNFPLAYTYPKAMRATRDLLRRRTKIVRHGAHLKAHVVNTTSQYNLPPNAINLKNACAREQLRSTFTDPVVQKNIDLDMALLDSYSKELSKVEWFIEQQAKLHNPHHLSLLKTVNGIGRILALTIIYEIGDINRFESVQKFASYCRLVKCKAESAGKSYGTQGNKIGNANLKWAFSEAAVLYLRGNDEGKKYLLKLQKRMSKAKALSVLAHRIGRCIYYMLKNGTVFDAERFIKS

SEQ ID NO: 67720 - protein, 344 aa, unidentified
MKILKQSVGIDVSKDELAVSLGRLTEELNSEIYSYKTFKNTLKGFEELISWTQKLVVSELAVYYVVEATGVYHEALVYYLTDNGQLITILTPNKTANYQKTLEIKTVTDKTSSQVIAMFGLERKLQIWQKPKEIYRDIRFLTRERGQLVEEKTAIKNQLHAEQSQAFPSKKSIDRMQARIKLLDNQQEEIMKEIRESVSLDKSATESIKIICTIPGIGLLTAATILAETNGFDLITNKRQLASYAGLDIKEKQSGTSVNGKPKISKKGNKYLRKAMHLPALTAIRHDEKYKAIFARLVQKHGIKMKAAVAVQRRLLEMAYIIYKTNTPYDKDYLKTQIDNKKVA

SEQ ID NO: 67721 - protein, 338 aa, unidentified
MSIYAGLDVSDKTTHICVVDVDGKVLRRDVVASDPDVLAKWLNRHCTDLVRVVLETGTLSTFLYHGLVERGVAIDCICARHAKGVLSARVNKSDVHDAEGLAQLARTGWYKRVHMKASATHIDRAALRIRAQLITARTSMANQLRGLLKLFGLRMGTARTPGRRAERLAAFYAQRPDLKALFAPLIATMEAIEEQLRASNRLLNDRAKADEVCTRLMSVPGVGPITALTFTATVEDPHRFARSEDVGAYAGLVPRRSQSGERDVSGHISKAGDPMLRKALYEAANVALSQVKRPFALQAWGRKMAEAKGPRRARTAVARKLAALLHSLWLNETEFRWA

SEQ ID NO: 67722 - protein, 410 aa, unidentified
MRYYLGVDWADQTHAVWVVAADGTKITARTVPHTAEGLSDWGRDLDQWRAQGIELWAAIERREGRVVDFLLDHGVVVYPVNPKALDRARDRFRQSGAKDDPFDARVLADFLRTDHSHLQALQPSSDAAQELKLLTEDYQRQIRQQTRLVNQLTTTLKAYYPRALEIAELTTTLAQEFLRAYPTPESLTGLTERKWQRWARAHRLSDARTRDLWGVLQQPQLPVPTHVVRAKARLLRSLVEQLTLVVTAVAEYRKAIEDFFARIPTAQWARTLPIGEHGITAPTLWARLGDAPGRWESFRHLQAQAGAVPVTKRSGKQQRVVQFRYACDKALRYVVDHVAFLSLLSSEWARAYYDQQRERGHPHRQALRALGAKWLKIIFVMWERQVPYDEQYHLATMTRQQLQQRQGKIA

SEQ ID NO: 67723 - protein, 427 aa, unidentified
MAEEKIGLEPEFVAFVGIDWADRKHVWCLEAAGSRKRETGELEHKVEAVEAWVAELGRRFGHRPIAVAVEQVKGALVFLLNKYECLHIFPVPSTMTAKMREALYPSGAQDDPRDADLLLDRLGQHRDKLHRLSPDDEVTRRVQNLVEERRKLTAEKTAQSNRLTSYLKIYFPQMVEWFEKLDMPLVCDLLERWPTLEELQTVSREELRTFFRQHHCHRGLRERRILAIGGAIPAGGDRAVIEAKSTVVKVMVQLIRSLLQGIAELDRKIEESAAEHPDFFIFESLPGAGAVMAPRLLAAFGSQRDGYSCADELQTYSGIAPVTERSGKRKWVHFRWACPKFLRQSFHEWAGHSIAQSAWARAYYQQQRDRGSDHHAAVRSLAFKWIRIVFRCWKDRVAYDENKYLAALAKRGSQLGKLVVVGMGTSL

SEQ ID NO: 67724 - protein, 348 aa, unidentified
MSEAYDGREVVGMDLHRRRSVLVRMTPDGRKLETARITNSPAELRRQITRAGKRPRVVLEATYGWYWAADTLAAAGAEVHLAHPLGVKGFSYRRVKNDEKDAADLADLLRMGRLPEAWIAPAEIRELRELTRYRIKLVRLRTSCKDQVHAVLAKLGISVTCTDIFGVWGNTWLDGLDLPQPYAGKVASLRALATELTAEITVLEAVIADLLACHDGYHAIRALPGIGPVLAAVIVAEIGDITRFATPARLCSWAGLTPRHRESDTKVSRGHITKQGSPIVRWALVEAIQHVPAGHPLRRRKEDILARRGDQAKNIAKIAVARQLLTWVFYAMRDGQVRDLAISSQKAA

SEQ ID NO: 67725 - protein, 375 aa, unidentified
MKEFSKYVGLDTHKDTIAVAISDAQGGKARYFGEIKNTPEAIRQMVKQLCPDGELISFCYEAGPCGYDVYRQLNRLGHHCDVVAPSLIPTKPGERVKTDRRDSEKLSRLNRAGELTSVWVPNQEQEAMRDLTRAREDMKTLERMSKQRLNAFLLRYGRNYSQGKSRWTQAHSRWLEGLKFDIEVQQIVFQEYVEAVKQSQARVAGLIKEMEKALKGWVLAPVVEALMALRGVKLITAMTIMAELGDITRFDSPRQLMSFLGLVPSETSSGKSRHQGGITKTGNGHVRRVLIESGWCYRFPARKTAHLQRRAEQCSDAVQAIAWKGQKRLCGRYKHLMGRGKLKVQVCTAVARELVGFIWAIACEVMNKKSPSVYS

SEQ ID NO: 67726 - protein, 361 aa, unidentified
MEHTTIAVDLAKSMFQVAVSRKAGRVDVERRLSRERFLEYLAKQPPATVLLEACGSAHYWARRLQPFGHTVRLLPAHDVHRYVRRNKTDRTDTKGLLEAGRNDEIHAVPVKTVDQQAIASRHRLRSTWLATRTARLNTVRGLLREFGLVIPVGAQHVVPHVRARLAESSDVPDLMRPSLASACDEIEGIEHHMRAVERQLTTLARDRDDVTLLQTVPGVGLLTATALVALVGDAQRFPTSRECASFLGLTPREDSSALRRRLGAISKQGDVYVRMLLIHGARSVLLRAKHAGVPTPFQAWARATQQRRGHNVAAVAVANKMARLVWAVWTHQRPYDADYRPTVTRQTSMASSPQQDCTELN

SEQ ID NO: 67727 - protein, 345 aa, unidentified
MPIVGGLDIHRKQITFDYLDTVTGEVKRGQIAPADRGHVRAWLARFAGYGDVAFAVEGCAGWRYVAEELAAAGIAAHLGEPADTAALRGRKRHAKTDKTDARHLRTLLAEGRLPECWIPPAQILEYRALLETYHDLRRAHTAWVQRIHAVFFHQGAPPLSEGALRTEPGLAALRAAAATHLSAAGQQQVATALDMLAATEAQLGPLRHQLRQAAAHLTGAKVLAARLYGVGPVTALALTCWLAGKDRFSSSRKAVRFTGLDITVHSSDRKGPPGRLSRQGPPVLRWALYEAGKTHARTSAPDHGYYATVADRKNSKRAALSEARKIVRQACHILTELGDDALTAA

SEQ ID NO: 67728 - protein, 387 aa, unidentified
MYYVGIDIAKLNHFASVVSADGEVLVKPFKFTNDNDGFCTLLSALASYERGSLIIGLESTAHYADNLVEFLVSKRYQVCVINPIQTSTMRKNNIRKTKTDKVDTLVIARTLIAQPHRFFSQEDIDLMHLKNLGRFRQKNIKERTRLKIQLTAYVDRVFPELQYFFKSGLHQKTTYALLKEAPTPEQVASMHLTHLAHLLEVSSHGHFNKEQAKELRILAQKSVGSSDRALSLQVTQSVEQIELLDRQINDVESEMTKIMLGLDSVIMTIPGIGYINGGMILGEIGDIHRFSKPCQLLAFAGLDPSIYQSGNFNASHTRMSKRGSRVLRYALINAAHNVVKNNNTFKAYYDAKMAEGRNHYNALGHCAGKLVRILFKMLTDDVAFNLE

SEQ ID NO: 67729 - protein, 356 aa, unidentified
MISSTKYIGMDVHKESISIAVRNAAGKIVMECVIQTKASMILQFFDGLRGDLHVTFEEGTWAAWLYDLLKPHVTKLVVCDPRRNALLQDGNQNDRVDARKLSDLLYMNKLNAVYHGDHGLRTLKELGRSYLTMMKDQCRVMSRIKAIYRSWAIPCSGKQVYGSRHRAEWLGKILEPGVHRRAELYYQQLDALRTLRQEVRKDLLAESKKHKIWKRLCEIPSIGPIRAAELLGILQTPHRFRTKRQLWTYCGFAVESSSSADHKVENDQLRRRKKRKETRGLNENCNHDLKNLFKGAAVVASIKPGPFAEFYAALLAKGMRPEMARLTLARKIATIVLIVWKKGVCFDAQYLKPQTV

SEQ ID NO: 67730 - protein, 359 aa, unidentified
MSNLPLFVGVDYHQDQLQVCVVDSRAVVRQNRAFINDAREVAKMLADLGEVKAVAIEACCGAAHFGEALLSHAPPGGFRVELAHPGYVARLKQSPDKTDFGDARLLADLLRVGYLPGVWLAPAPVRELRQLVNHRQRLVDQRRAMKLQVGAILREQRIKLQGSRWSKQWSSGAKDHPALSNEARWIVNELLEELRHVTGRIRQVEKRLREATADNPLVKKLRSTIEGVGEVTAWMLAAWIADFGRFKNGKQLSRYCGLSPRNASSGKVQADAGLINAANKQLRAVLIQAAHRLMRTNQRWKALADRLLKKGKAKCVVTAAIANRWVRSMHHRMRAADRPAAAAAAAADALQQQQDLPAQ

SEQ ID NO: 67731 - protein, 353 aa, unidentified
MAEQHLQEEIGAMGNYVGLDVSTKATAVCVIDEAGNKVWEGSCVTDPETINTVVRRQAPDLIRAGLETGPLCVWLWHALNDYKLPIVCLHARHAAAALSLQANKTDRNDAAGLARLVRSGWYRPVVVKALETHKLRTMLAVRDQLVQTSTNLINKIRGILKTFGIVLGPGRGTVFEANVRRRLPDDDIIRTVVEGLLQVWRTIQEQKREIDRRLNRLTRNDRTCRVLTTAPGVGTITAISFMTTIEDPTRFVRSKDVGAFLGLTPRRYQSGDVDIGGRISKCGDRMTRKLLFEAGHAILSRSGDSTPLKAWGQRVAVRSGHWKARVAVARKLAVILHRMWRDDVPFTPELAAS

SEQ ID NO: 67732 - protein, 353 aa, unidentified
MHTHQKSSDPIASIGLDIGKNTFHLVGLDKRGAIAMRIKVSRHQLVRRLVNLPRCLIGLEAGSGSHHIARQINPLGHDVRLIPAQYVKPFLKGHKNDYRDAEAIAEAVQRPTMNFVAIKTPEQSDLLSLHRVRSRLVRHRTAIINQIRGFLIERGITVRQGPGPLRKVLPEVLSSPPQALSPRILRLIAELDQDWRYLDERLEALSAEILSLSENDPACQRLMTVPGIGPIISSAVVASIGIGSGFKQGRDFAAWLGLVPKQESTGGRTKLGRISKRGNKYLRTLFVQAAHVVLQRRPATAMRALWPWIEQASRRLTHRNLLAIALANKLARIAWAVLARGRHYDPRITPNAA

SEQ ID NO: 67733 - protein, 337 aa, unidentified
MKRYLGVDLHRTQFVVCTRWENGEQEIRQWRIGELSKFVEQLCIEDQIAVEAMGTTARFYDAVVGRVARVVVVNPHQFKVISESVKKTDRKDAQALALYLEKDLLPEVRMKPKQNRELMHLAETRDLLVKQRSALKGKINNLLAMQGIELKREALSSKIALARVLALPVSGMVQLELRVLVEQVRALSESIAELDERLEDEGQQLPGYENLTSIKGIGSLSATVLLTVIGKISDFADENKLAAYLGLVPKIANSNESERSGRITKQGNKLARTALVQCGLVAKRYSPYLNRFYERIKQRRGGGKAKIALARKLVKIVYDTLKNQWVFEDFPSFTLAA

SEQ ID NO: 67734 - protein, 312 aa, unidentified
MTTLICGVDVSSAALDVRLGRDGVIRRFANDAAGIAELVGLCKEHQVDLVALEATGGYERLAVAMLWGAGIATAVVNPRAVRRFAEAMGFLEKTDRIDSGIIAWFAEVKQVMPQRPAGETQRRLAALVTRLRQLTELRTAQNNQRRLVTDPVALASFAELLGVIARQIKAIAEDISKLIASDPLWRKLDLAWREIKGVADRTVARLMAELPEIGTLSNKAVGKLAGLAPLARDSGKLSGNRPVRGGRSGVRSILFVVAELVRRHDPDFAAFHRRLTLAGKPKKVIRVALAHKLLVRLNAKARAVRDQIASPA

SEQ ID NO: 67735 - protein, 403 aa, unidentified
MARVFIGVDPHKLSATIEVVDRTEAVLASGRFGTDKTGYAAMRRHVACYRERVWAVEGSNGAGRPLAQRLLADGEEVVDVPAKLSARARLLDTGHNRKTDAHDAHAVAMVAVRRRNLRVLSYDADLEVLRMLIERRDELTKAKVQAVNRLHRVLSELVPGQSKKDITVLQAKAILASVRPRDQVGKTRKRIAAEHLAEAAALEEKIKASSKELKALVLARGSHLMDLIGVGPVVAARILADVGDVARFTNRNRFASWTGTAPLDASSGEQIRHRLSRAGNRKANHVIHIAAACQIRVDSPGRAYYRRKLAAGKTRREAMRCVKRRISDAIFRQLVADAQAARLKGVDAGPGGHCGASHVSSAAGLHPLTGTSDQPLPGPAPTTLPAARSTRKTTADRDLEPAP

SEQ ID NO: 67736 - protein, 333 aa, unidentified
MKVFYLGVDVSKKKLDLCLRSNGKDILYDVIPNDLSSIKSWLTRTFEKFFLSEDSLVVCAEHTGQYTYPLVCATKSIGVYLCLEDAAKIKYCHGIPRGKNDKIDACRIAMYAERYNDCLQPYTASELIIQKLKNLSTERSMLVADRAKYQSQLKDQVDYMEHSIYIAKCNRVEGIINTFTDYIAQIDLEIKELINQAPVIAHQMDLLMSVDGVGERVALKMIMETDAFTSFTDPRKFCCHAGVVPFVYVSGSSQRSKNRVSNRADKSIKHLLHMAALSVSQVKNSPLKKYYDRKVEEGKNKMSVLNAVRAKLVTIMFAVFWDECFFIIGIDKM

SEQ ID NO: 67737 - protein, 387 aa, unidentified
MLKPHDDSKACLTAFVQDNTLTVVIEMSLASWLVAGTIPGVDREPRKKIGPDPEVLLQLLYRWRDEAIKVGKEITRIAVAYESGRDGFWLARWLRARGIDAHVIHATSVAVSREHRRAKTDRIDTAMLKRGFLGWLRGERGHCSMAIVPTVEDEDAKFPHRDRESLVKLRTSTVNRMKSILIQFGVRNFNPVLRKAPEKLDSVRTPEGIPMPPNAVGALRRHMERFHVIKEQMKTIERTRLQRLQRDPAEKFNAMVFLLVRIIGLGLETAEQLVHEILSRNLRDRKAVARYAGLTGSPDESGSRRREKGLSRSGNGRVRNILIQLSWRLLRFQPESNLVLWFKKRTADAHRSRKLMIVAFARKLIIALWRYVNTGLVPEGFQFKSAA

SEQ ID NO: 67738 - protein, 416 aa, unidentified
MDFFVGIDWGSKIHTVCVVDAEGKRLLEEEVAHEGDAVLAFIDRLLRLANKDATRIVAAMESPHGVMVEALLEREVAAYSINPKQLDRFRDRHSGAGAKDDDLDAYVLATSLRTDLELFRKIDLPSAERMQLSALSRSYEAITEQVISLSNQVREQLVRYYPQMLKLGDWHQEPWLWDLFEVAPIPARAMRLSPAKIRAILSENRIRRHDATAVLETLRQTPLPVAVGVPEAAATRIQLLLPILRASHQQRIDCSRKMKSLLSSFQEETDSPEEMHHDAALLLSLPGIGVHNGAVMLTEAHSALQQRDYQAMRRLAGVAPVSKRTGGRSKRPLVQRRQACNQRLREATYHWGRVAAQRDPRTRIHYDELRARGHSHGRAIRGVVDRLLKVLFAVLKSGLRYDPSRRIGVENLALAV

SEQ ID NO: 67739 - protein, 365 aa, unidentified
MKKIAHLGIDYHLSFLMVAMMIEGNKEPDEMVRLKNDDKVIRKYVSKLSEQFEIKACYEASTNGYCFQRKMTSWGYPCDVIAPSLIPRKPGDRRKNDFRDARDLVQNYAAGRLSIVHPPSEQEESVRSLVRCRYAFKEAAKRVKQQINSFLLGQGQVWKHSKWTQQHRQWLLKMEMPHSHLKQVLSEHLAHLEYLETRLDHLDEEIETLAASAVYAPSVKKLRALKGIRTCAAMLLIAEITDFRRFPNPRALMAFLGLIPSEDSSGDHRKGGPITKAGNHRCRTLLVEAVQHYANSPRISARMRGDLSHVDGATAVIALKCVSRLHKRFWALSRKGKLRPVAITAIARELVGFIWAIMQPQAAVG

SEQ ID NO: 67740 - protein, 376 aa, unidentified
MSNLRFIGLDVHAETIAVAVAELGGEVRSLGVIPNRSEAIRKLVKKVGPAAQLRVCYEAGPTGYVVYWQLSELGVKCEVVAPTLVPVKAGDRVKTDRRDALKLARSYRAGDLTAVWVPDAAHEALRDLVRAREAAKKDQLRARHRLGKFLLRQGRRPATKMNAWTQKHLTWVKTVHFEHAAQEATLLDYLNEVEHVADRLARLERAIDDAVKSAPERMRTVIDALQALRGIAQVSAVTIVAEVGELSRFAKPRQLMGYSGAVASEDTSGKRTRRGGITKTGNAHLRRIVIEAAWAYQHRPGIGPALRKRQATVSPEVREIAWKAQHRLNARYRHLTSKGKCRQEVVTAVGRELLGFIWAIGVKVEAQGRRQQSAAA

SEQ ID NO: 67741 - protein, 387 aa, unidentified
MPQLNDLSRSLVALDQDSTIIAVVELSQSSWLVGGVLPGIERQPRKKLEPSPERLLGLLHRWRDEAVRAGKEVTRIALAFEAGRDGFWLARWLEARGVEAHVIHPSSVAVSREHRRAKTDRLDTELLKRGFLGWLRGERGHCTMARVPTIAEEDAKRPNRERECLVAERTRIVNRMKATLARLGVRNFKPTLRKAAERLATIHTPEGMPLPPNVLAELQRDMARLGFVVSQIRDIEKARQKRLEQEPETGSHAMVRQLARVVGVGIETADMLVHEVLSRPMRDRKAVARYAGLTGSPDESGAKRREQGLARAGNARVRRAMVQLAWRFLLFQKESALALWYRARTADSRVGPRKTMIVALARKLLIALWRFVTTGEALEGVILRPAG

SEQ ID NO: 67742 - protein, 350 aa, unidentified
MIIIGCDYHPGFQQIAFVDTETGDCGEQRLEHCQGAEKFYRDLAAQGKKVRVGMEASGHARWFERLLGELNVDLWVGDAAVIRAKRGRKAKTDRQDALHILNLLVKDDFPKIWVPSWENRDMRQLLWHRHRMVQARTRIMNQLQAVALNEGLRCKKKLWREHGREQLENVRLAPWTSRRREDLLQLLDGLNPTIAELTQAIEREAEKSPQARLLMTHPGVGPLTALAFVLIIGKAERFQCGKQISAYLGLVPLEDSSGERRRLGHITKQGNSLLRFLLVEAAQATTRTIPEWRSKCIHLTMRRGRKIAKVAMARKLAICLFWMMRQGWNYQQVMKFGSHVGQPGNRHGVQ

SEQ ID NO: 67743 - protein, 422 aa, unidentified
MLEQTRDEQEIIERVAALDIGKAELVCCVRVPDPGGGRRRVQEVTTYSTMTRSLQVMVDRLTDLGVTRVVMEATSSYWKPPFYLLEAHGFETWLVNAKDVKHLPGRPKTDRLDAVWLCKVAERQMLRPSFVPPIPIRRLRDLTRYRMSLVSDQGAEKNRVEKLLEDAQLKLSVVASDIFGMSGRDMMAALIAGERNPQALAQLARSRMRGKIPQLEEAFVGQFTDHHGYLLTKMLARIDALSVDIADLDTKIEARLAPFADTVARLDEIPGVGAVTAAVIIAEVGLDMTRFPTPAHLSSWARFAPGVKESAGRKKGTGSTGHGDRYLARVLGEAAVAASRTNTFLGERYRRIARRRGKKKAIVAVGRSILLIVWSLLSDPETRYYDLGPGFYDSRINPERKKRNHIRQLEALGYKVTVEPAA

SEQ ID NO: 67744 - protein, 381 aa, unidentified
MKKIMRFVGLDVHKDTIVIAVADQDRDGEVRIYGTISSDWHAMENALTKLRADGAELHIAYEAGPTGFVLYRQLRKKKIDCIVVAPSKMPVPGGRRQKTDRRDAELIARLLRAGDLTAIHVPDEIDESIRDLARTRADAVDDLTRAKQRLKSFLLRVGYKYSGKANWGEKHQRYLRELTLPLIAHKAVLEEYRLALDQCIERVSRLDDLLSAQVPQWCHYPAVQALMAMRGFQLIAATVLVAEIGDIHRFAHPRDLMAFLGLVPHEHTTGGTRRVGAITKAGNGHARWMLIETVQSALFPPKVTAALTLRQEGQPAPVKALSWKVQTRLHKRGWHLMARGVMKPKVIVALAREMAGFVWAMLHLVPVPKGPIPAGPVLRRA

SEQ ID NO: 67745 - protein, 425 aa, unidentified
MNFTQNVKINQVTDKTLVIGMDIAKRTHYACMVDERGLLLKKSFPVHQSSQVFEYFYECILSAKKQFGKSEVIIGIEPTGHYWLNLAYFLDDRGIPLVICNPMHVKKSKELDDNLQTKNDAKDALVIARLVKDGRYSYPRILRETEAELRVGSTLKGNLTEELNAIKNKMIRWTDRYFPEFQAVFPSFGKMALAVLECTPFPSEIANQEPSELLATYRMVEGMKSPQLPKTKKLIVSARTSIGVTEGQQMARIEIATLVQRYRQLEKELASLQEQLTGFIQATVEYEYLQTVPGLGDATIIDLLSEIGSFTHYNHPRQLLKLAGLTLRENSSGQHKGQKRISKRGRSQLRALLFRVMMPMIRHNQAFKSLHEYYTTRQVNPLRKKQSIVVLCGKLLKVLHAICTKHMVFDAEQMMRDIPTLERAA

SEQ ID NO: 67746 - protein, 423 aa, unidentified
MDVVFARCAGIDVHKKTVVVCRLMVGADGQRHGETQTFGTTTDELLRLSDWLAAGGCTHVGVESTGEYWKPVHNILEGSFEVWLLNAQHIKAVPGRKTDVKDAQWIAELLSHGLVRPSFIPPRPQRDLRDLTRHRTNCVRERASLVNRLQKVLESANIKLAGVASDIMGLSARKMLAALVEGEEDVVRLAELAHGKLREKRAQLEQALSGCVRPHHRFLLSELLAQIDGIEDTIRHFDAHIHHARAADAEVAALLDTIPGIGSGTAEVLLAEIGTDMRRLPSAASLAAWAGLAPGNNESAGHQRNGRARKGNVWLRTALVQAAQAAAHTKGTALSAQYHRIAARRGAKKAVIAVAHTLLVIAYYVILRHEPYHELGPDYADRQRPAATATRLVRRLQQLGFQVALSPLEPSRSSPVASAAMTP

SEQ ID NO: 67747 - protein, 423 aa, unidentified
MEITPIYKRVIGLDVHQAKITACAMAEQADGTVTVEHREFGAFKRDRRALAQWARDVGADIVVMESTGIYWKSPYATLETAGIIAWVVNARRVENVPGRKTDIADAQWLATLARAGLLRQSFIPPANIRHLRLIARQRQKLGGMLASEKNRLHKLLADAGIRLNVLVSDIHGQAGRAMLKALIEGKSITEVLDLAGRLRASREQLFDALQPEELSGPHVFVLKEVMADIEELEAPMIRFDQALIQGLDAWRPQLILLQTIPGVDLMGAAMLMVEIGADMNSFGSAEKLASWVGICPGNNESAGKRKNGKTRNGNAWVRRLLCEFAQAAARSRCALKDKFATLSIRKGHKKSIVALAHKMLRTIFAMLKNNTPYQDTSPTVFRSGLRQARVCYVQRVASFTLIRLFSILYAVAPAAISFNSAQR

SEQ ID NO: 67748 - protein, 338 aa, unidentified
MKITTVGLDLAKSVFTLQGVDERGSIVLRKTVRRAKLLELFAQLPPCVVGMEACSGAQHWARELRKFGHEPRIMAAEFVEPYRCGGKNDANDAAAICEAVSRPKMRFVAIKSVEQQAVLAVHRLRQGLVEERTALANRLRGLLTEYGVVVGVGLDRLRRALPEIVEDGANGIPGIARDVFADAGQQLRELDARVTAYDRRIAALARASEPVQRLMKIEGVGPVTATALVASVGNASVFNTGRQFAAWLGLTPRQHSTGGKQRLGAMTKHGDVYLRTLLIHGARAVLRVTANRNDAKSRWAESLRRRRPDNVAAVALAAKHARIIWALLARGQDYRPAA

SEQ ID NO: 67749 - protein, 374 aa, unidentified
MQEQAATARTEDISVAIEMSNTQWRLAFTAGDKIRQVSMPAGATAEFLQHLRTAKEKLHVPADAPVFSCYEAGRDGFWFHRFLTAHGVTNLVVDAGSMRVQRKYRSAKTDRLDVQQLLRHLLRWRAGETHVWSVVRVPSVEVEEQRRVERERQRLRKEATAHWARLWSLLKLHGIGSCPKNQFRAHLAAARTWDGQPLPERLQAELRREYTRLEELTQQLAVLEAEQVRQTTAPSTAAEQVAAKLHRVKSLGPVGACLLAHEFFGWRQFRNRREVGALAGLTDTPWSSGDLTRSQGISKAGNRRVRHVMIEVAWKWLRYQPASALSQWYERRFAHGGARLRRIGIVALARKILIALWRWVAFDEVAAGVRLRPA

SEQ ID NO: 67750 - protein, 416 aa, unidentified
MKLFVGLDVSSEKLDACFMTDDSTCSVLKEASYGNSQLGASQIKEYILEFSQKFEIESLVIGMEATSLYSFHPAMFFKEDLELNQLNLMVSVEQPNKIKKYRDMFEENKNDQIDAFYIADYFRIQRQVNSIIKEEEYLALQHLTRTRYQLIKQLVRTKQHFIENIYYKCNTLSKELKAEGGSVLSATLVTLMTEDYTMDQLAELSLEEFANLIQKLGKYRFKNPEGIAKAISKAIRSSYRLGKVHQDSVDIVLGVLAKEIRSLEKLIKDLDKAIDDLVVVLPEYQCLTSIPGIGPVYAAGILAEIGPINRFSDESKLAKYAGLYWRQNQSGNSEYENTPMAKRGNRYLRYYLVEATNSVRRYEPEYHAYYKKKYAETPKHKHKRAIVLTARKFTRLVDTLLRNHQLYMPPRSVIDK

SEQ ID NO: 67751 - protein, 338 aa, unidentified
MEHFVGIDLHSSNSYIAIIDNENRRVFKKKVKNDLENVVHVLEPQRKQIKGIVVESTFNWYWLVDGLMDNGYKVHLANPSAIKQYEGLKHSDDVTDAFHLANLLRLGILPEGYIYPKEERPVRDLLRKRLQLVQQRTALILSFENLLTRNLGTRINVNEVKKLREEDVEDIFQQEYLVLSGKASIATINFLGVRITQIEKVLHKRAKLKGEYKKLMTVPGIWKILALTIMYETGPIKRFAKVGNYASYCRCVGSKRISNDKQKGKGNRKNGNKHLSRAYVEAAHHARWNYEYVDRYYQRKMAKTNNVVAIKAIAHKLARACYYIIRDQKEFDSGKLFV

SEQ ID NO: 67752 - protein, 355 aa, unidentified
MNDAKYIGMDVHTATISAAVRDSSGNLVMEATLETKAETILQFIRGLGGSLRVSFEEGTWAAWLHDLLKPHVSEVLVCDSRKNALLRVGNKNDREDARKLAELLFLNKLHPVYHGETGIRTLRELARSYLTITRDLTRVMNRLKAIYRGWGIACAGQQVYAPRYRAEWLAKITEAGVHRRAEIYYQQFDVLAALRQQARRELLAESRKHPALRLLRQIPSIGPIRAALLIALMQTPHRFRTKRQLWAYSGLALRTYDSGEYRFVGGQLKRSKKAVTIRGLNKNHNHDLKNIFKGAAMRAAATAGPFQSFYEARIASGMKPTMARLTLARKIATITLLVWKKGVRFDAEQLKQQAA

SEQ ID NO: 67753 - protein, 338 aa, unidentified
MQKYSLFIGIDISKNRIDVCFSQNGKRKQMVHTQFSNNSAGFKKMLSVIKKYARKHQLSTWIACMEHTGVYTLPLCAFFAKQKIDYVLDSALRIHRSLGLRRGKSDKADAADIARYLYLHHKELKPYDLPCENLLKIKHLLALRKRLTKAKVGSKVAAGELKRFANPQTVKQVMEYSAQTATHLKKQLKKIDCDLVQIIKSDDQLHQLYQLVTSVKGVGLIVCAYLLVYTNAFTAFQNPRQFACYIGIVPFPFESGDSIKKPDKVSHLANKKLKALISNSAQSAILHDKEIKAYFHRKVEEGKNEFLVKNNVKNKIVKRIFAVVKRRTPYVELYQHQA

SEQ ID NO: 67754 - protein, 413 aa, unidentified
MRVIGLDVHRSFAQVAELEDGVLRQWGRVDLVRDKVLAFARTLRADDEVVLEATGNTMAIAKLLKPHVGRVVIANPLQVRVIAEAKAKTDRIDAAALARLHAAGYLPEVWQPDEATELLRNLVSRRAAIVQGMTRTKNRIHAVLHANLIPPFSGKLFMGPGRKWLAEQPLSDPERAAVDRWLAGLDGMEQELAAAEAAIATACLGDDRVRRLMTIGGINMVVAAGVLSAVGDVRRFASAEKLVSYLGLDPRVRQSGARAAQHGRISKQGRSHARGMLVEAAWAAAVTPGPLRAFYVRVQGRKGKQVAAVATARKIAVLAWHLLTKEEDYAFARPALVAMKERQMQLKAGAKSCRGGNTPGAARDYSIKELREKERALVEQAEKAYTRFVSAWSEKPKPGHARTPKGSADLNSR

SEQ ID NO: 67755 - protein, 427 aa, unidentified
MNYTQNEKILQITNETLIIGVDVASETHYARAFDLRGIELGKLLRFTNDAEGFNIVRAWIKELSIRHEKKRVMVGMEPTGHYWFNFAQYLKNHSMQIVLVNPFHVKRSKELDDNNPTKNDRKDPKTIAMLVKDGRYMVPYIPEGVYSELRTAMQTRWQIVKQLNATRNRVKRWLSIYFPEFTTVFASWEGRAALIALNEFATPAKVLQKDVDGIVASWKKAKIRAVGRKRATLLVYAAQTSVGVIEGLKAAENDLLMLLEDYAMKKQQHERVLALVEQLVYQIPGMQEIMKIKGVGLITAAGFIAEVGDITRFDHPKQLQKLAGLSLKENSSGKHKGKTTISKRGRKRLRALLFQGILPLVAKNEEFMKLHQYYTTRVENPLKKKQSLILLCCKLIRIFFALLTKQVAYDPQKMMNDIRRPEMASVA

SEQ ID NO: 67756 - protein, 429 aa, unidentified
MEEVDEVELVVQRVAALDLGKATLEACMRVPHPSKPGRRMQEIRGYATTTAALLEMAIWLRQWGIERVVMESTSDYWKGVYYLLESEGFDCWLVNAREVKNVPGRAKTDRADAVWLTKVAERGMCRPSLVHPPQIRRLRDLTRYRRALVSDRSREMQRVEKLLEDAQIKISSVLSDIHGVSGRAMMEALIAGQRDPWSLARLAKGNARKKTDRLEEALRGFFTDHHATILQMMLDNIDRIGAQIAALDARIAEAIGPFSRPAAQLADIPGVDTVAAAELIAEIGVDMARFPTAAHLVSWAKFCPQTHQSAGKSRSKARGKGNPWLAGTVGRIVFSATRTDTFLGARYRRLARRRGKPKAIVAVGNSVLTIVYHLLSDADLDFCELGPAHYESRINKNRRARDLATQLQALTGQRIVIRDGKAIITDNAA

SEQ ID NO: 67757 - protein, 374 aa, unidentified
MRKNTIKYVGMDTHKDSIVIALADNERNGEIRTYGTIPYSFDAVDKFIRKQVSQNIELRCVYEAGPIGFGLCRYLRGNGIDCIVVAPSMIPKKDGDRIKTDRRDALNLARLHRSGDLQEIYIPTRDDEAMRDLIRSRDDARHVCRKAKQRLLSFLLRHGKRYSGKTNWTQSHFNWLAELKLDHPAQQIAYQEYIGAIHEAQHRLKRLDKEISKLSKQWNKAPLVSAIQALRGVAELTAVTIVAELGNLERFTNPKQLMAYIGLVPSIYSTGTSTRYGGITKTGNGFVRRVLVEASWTYRLPARITKHLLKRNHGLPSVIQDIAWKAQVRLCSRFRRLRAKGKPRQVVTTAIARELIAFVWAISRELHSPERIPR

SEQ ID NO: 67758 - protein, 347 aa, unidentified
MDHVGIDLGKRESQIAILTEDGELINRRIRTERPRLAEMFGRRPQARILLEASTESEWVARCLEDLGHEVIVADPNCAPMYAQRTRRVKTDRRDAHGLVYACQAGTYRPAHRTSTERRDVRARLAVREAVVRTRAAWITRIQSLVRREGCRLRTGAPETFITRVEELALPPALTTVIAPLLELLGPINQQIEVLDKELGRIVATDEVARPLTTVPGVGPVTAAAFIATVDDVTRFRDAHQVEAYLGLIPCEWSSLTARWAAQTARGGRRIGGSAVRRGEWAVSARLFLADVDSRDPDGAAARSHHPSCAGESSFATQQREEKDDKPRTASPTHARPSSSQTRTRERT

SEQ ID NO: 67759 - protein, 341 aa, unidentified
MGKFIRIGVDLAKNYFQVHALASEGSPALKRKLTRSKMHWFFSQIEPSFIGMEACGSAHYWARELKAMGHDVLLMPPSYIKPYVKRGKNDAVDAEAICEAMSRPGMRFVPIKSAEQQATLMLHKTRELLVKQRTMSVNALRSHLSEFGIIIAKGIGRIDELLKLAEVDTTLPDAAKTAVKALAAILEGIEKAIGDLEGQIADAHARSDMNRLLARVPGVGKLIASVITASTPDPSVFRSGRDFAAWLGLTPRQNSSGGKQTLGGITKKGNRYIRKLLVLSATSLLRSVSKRKGALADWISALLAKKPARLVTVALANKLARIIWAIMRTGEIFRAEIFAKA

SEQ ID NO: 67760 - protein, 347 aa, unidentified
MNFYNNMHPYYCGIDLHARLLYVCIIDNTGLILVHKKIKDDPEALLKLLKPYIGDIVVGVECMHCWYWVADFCKEHTIDFILGHALYMKAIHGGKAKNDKIDSYKIAKLIRGGNFPLAYVYDKDMRATRDLLRRRTKIVRHGADLKAHVANTASQYNLPAHNVNLKNVCDREKMRYYFPDPVVQRSINLNMAILDCYHNELKPLEHYIEQMAKQHNPVHLNILQTINGIGRILALTIIYEIGDINRFSSVQKFASYIRLVKCKAESAGKTYGTQGNKIGNAHLKWAFSEAAVLLLRHNHNANKYLEKLQKRMSKAKALSALAHKLGRCVYYMLKKETVFDEAKFLKS

SEQ ID NO: 67761 - protein, 343 aa, unidentified
MQIVRIGLDLAKYVFEVHGVDTYGKVAVRKTLRRNTVPAFFANFPPCLVGMEASNGAHYWAKLLSELGHDVRLISPQFVTPYVKSNKNDRNDAEAICEAVGRPNMRFVPVKSAEQLTVQAVHRIRSRLINNRTRLVNQIRGILSEQGIVVARDISKLRRALAEMASERTGTLESLLCSLIDSLREELDELDRRIAGYDRRIKELYRNSELCQRLGKIEGIGPVTATALIAAVGDRKCFKNGRQFAAWLGLVPKQRSSGGRARLFGISKRGDRYLRTLLIHGARAALGRVRGKQDPRSLWLGKMRQRRHPNIVAVALANKNARIAWRLLSSDQVYDPRLSVGAA

SEQ ID NO: 67762 - protein, 408 aa, unidentified
MTVVGIDVSKSKSMVAAMKPGGKLVAAPYEVRHSDIELSHLALDVLCMEPDTRVVMEATGRYHEPVAAQLHSAGIFVSILNPLLIKQSGAGSLRKVKSDPKDALKIAKYGLDNWSTLREYAPMEAIRQQLKLCARQCDLYNKSIVMLTNNLISLSDKTFPGVNELFSSPEKADGHLKWVDFYRTFWHCDCINRMSPDTFGERYQKWCKRKGYHFSADAADALYAASCGLYTTLPRDNNARLLVTVAADQLIALRENQSKLEAEMLNFCKQLPEYETVMAMYGVGKSTGPHLMAELGDVRRFLHRSSIVAFAGVDPGVVGSGKMQLSSVATSKRGSPQLRKALFQVVSTYVKCKPENEAVYQFYTKKRDEGKPFFVCTTAAANKFLRIYYARVKECLNAAESATQVEEG

SEQ ID NO: 67763 - protein, 399 aa, unidentified
MDVHRDTVAACVRVPGRGRPREQHVRTFGTTVAELWQLRAWLEEHGVTHVAMESTGVYWKPVYYVLEEAVTCLLVNAAHIKQVPGRKTDVADCVWIAQLLEHGLLRGSFVPPAPIRELRDLTRHRKVLIQERQRAVNRVHKLLQDAGIKLASVATNILGQSGRAMLEALAQGTTDPAVLAELARGRLRAKLPALREALAGRFRPHHAFLVSQLLAHIDYLDEAIATMSEEVDRVLAPFAAQVAQVDTIPGINKRTAEVLIAEIGVDMSRFPTEHHLASWAGLCPGNNESAGKHKAGTTRKGDRWLRLALVEAALAAIRTRDSALGARYRRVMRHRGHKKAVVAVAHAMLRAAYHVLAEGTAYRDPGPDYYDRRRARQATRRAVALLERQGYRVTLEPAA

SEQ ID NO: 67764 - protein, 376 aa, unidentified
MAGAPFFMEWPAPPSGVVGSPELLEEESVMALAAISVLGVDLGKNVCSVVGLDGAGKVVMRRKMRRETLIGLAEKLPPCVVGMEACCGAHHLGRIFDAHGHDVRLMSPEYVRPYVKAQKNDERDAEGIAEAATRPTMRFVNLKSQDQLDLQTLHRSRDRLVGERTALTNQLRAILLERGIVAPKGRRKLEESLVALMDEQGGEGLSSRMVLLVEDARAQWAELDRRIAAFDAEFVCWAKENGDARRLATIPGVGAIVASALVAAVGHAESFDHGRDLAAWLGLVPRQFTTGGKPKLLGISKRGNKYLRKQLIHGARAALPHVAERDTPLGRWAKALMMRAHRNVAVVAFANKLARIAWALLRRGERFEASGMPATA

SEQ ID NO: 67765 - protein, 362 aa, unidentified
MTFVGLDLHKRYITACALDAAGALLGEVRHLSVAGPALLEFLSAFPAPVTVAVEATLYWHWLHTQLERAGYAVRVAHPYQAKLIWQARSKTDPIDARKLAELLRANLLPTIWVPDAATRERRQLLRGRAFLVRQRTQLKNRIHGHLTAENHLCPHTDLYGRAGRAWLASVPLSPVLRDQVDRLLRVHDGLTAEIQQLDERVRRAARAEPHIALLHTIPGVGLFGALFLAVEIGAIERFRTSHELAAYAGLVPSTRSSGGKTAHGGVGHASNRWLKWILVEIVQTLKLAPGPVGAHYRHLVRAKGKPKATTAAARKLCCYVYWMWKEGWSYDEWLRQHVQQDAGAGTARWSEVRPSQRLGALA

SEQ ID NO: 67766 - protein, 315 aa, unidentified
MNEVKQQVFIGIDVCKRELEVALRPTGNRSVFSNDDEGIAHLVDFVRSNSPSLVVLEATGGLETGVVGALAARECPVVVVNPKQVRDFARATGKLAKTDSIDAHVLAHFADAVRPEVRALKNVEAQNLDALNTRRRQIVEMLTAEKNRLLIAPSWTRGDIRSHIDWLEKCLHKVNKEINKLLKNSPVWREKDNILQSAPGVGPVLSATLLAGLPELGVLNSKQIAALVGVAPMNRDSGMFKGRRTVWGGRSNVRCILYMGVMSAIRFNPSIKMFYQRLRAAGKVHKVAATACMRKLLVILNAMLRDGRCWNVAGS

SEQ ID NO: 67767 - protein, 425 aa, unidentified
MQQPTRFIGLDVHKETIVVAVTAAGDTGKATAYGSIANTAAALDKLVGRLHQGGGGLRFCYEAGPCGYGVHRRLTRLGEDCVVVAPSMIPRKSGQRQKSDMRDAASLAELHRGGLLTAVWVPDAAHEAMRDLIRARLAAVRAVRAARQQLSAFLLRHERVYPSGRTPWTKAHRGWLADQRFSEAAQQIVLQESIEAVRAGEQRRDRVEAHLRAQIPGWTLFPLVRNLSALRGLDIIAGAGVAAAIGDPSRFATAPHFMAYLGLVPSEDSSGPKRRIGSITKAGDVHARTLLIEAAHAYRFPARVARTKLATLDAVPEAVREIAWKAQVRLCRRYRAMMAAGKLKPVVVTAIARELAGFVWAIACITSDPPGCALAAPVVPDEVAVSEAPARSRAPRRRPLKDAARGIERSTAATGSRQRRTGAMT

SEQ ID NO: 67768 - protein, 333 aa, unidentified
MLAAIAGYRARAAAIGRSIERVIAVYEAGWSGFWLARWLMRHGVEVHIVQPSSVPVDRRMRRAKSDGIDAELLLRTLLAWLRGEPRVCSMVPVPDEADEDARRCVRERTELISERVGLTNRIGAVLATLGVSDYNPLLRNRSRRLAELRTALGEPLPANAQAKIKRLLARLELVLTQIAELERERDAVVETEASDKASRMIQQLTALRGIGVQSATVLVREAFVRRFANGKALGSYAGLASSPYSSGGIDREQGIGKAGNRRVRTVMVELAWLWTRYQPAAAQVCWFRERVGSTGPRVRKIMVVALARKLLIALWRFVVDGVVPEGAVFKPAA

SEQ ID NO: 67769 - protein, 304 aa, unidentified
MNGIGIDVSKRQLDVGTTDGKTLQVSNSRSGFAELDLWLQGHPAVQIVLEATGGYEQPVLDFLHNAGHPVVRANALRARKLAQGLGHMAKTDRLDAYALAKMAALVKLRSYQPLEPWQREMRDFVRARRQAMHALTVARQQQEMVGNRELRRLLQANITCLQRTVERLGKRISEQVSKQPQLAVLKSIKGVGPGLQAVLASYLPELGKISGKAVASLVGVAPMSHDSGTMRGKRSIHGGRAEIRQVLYMASMSAMRHEPRLRDFYQSLRARGKEGKVAIVAVMRKMLVILNARMRDAQGGSIPA

SEQ ID NO: 67770 - protein, 406 aa, unidentified
MNTISSSVQRVIGLDVHPDSFTAAILCGPTPAAAIVEKTFAHVPLPRLVSWAAKQARAGDLLVLEASGNSFHIARQLRAAGYETRVLESNQLGKLKEAHANNDKLSAVRIGKAFLAGTAKEVWVPDAKTQERRDLFHAHRKAVKRAVQARNRTLSFLSDQGVRLKKGSKLTAAGDAEELLRQSKAWTTGQWRIIEGLLLELRQADQARAHWRGIIAQEVLSDPLLLSLVRLCGVREVVAFGLGAIIGDIHRFAEPRKLVKYLGLNPAFDQSGAGKWEGGIGGHGRKDLRVLLIEAAQALLRSKDPAARWGKRLMARKGSLNLAVAALARKLTVAVWYLMMGRWSQLEEVDRRLSIKVCKIVGQLKPEAIAQLGCDAKALREKTKELLQHGRVYVLNPILNANSAGA

SEQ ID NO: 67771 - protein, 388 aa, unidentified
MQTVADRPEAPTAIRTDLGAIFVSLELSRSTWLITSLSPGGGEKMSKQVVRGGDVAGLLERFARLREKARARTGKVFPFVVIQEAGLDGFWIDRALQNEGIESHVVDPASIATSRRRRRAKTDGIDGEVLVRALLAYKRGEPRVCAMIKAPTPEEEDRRRLCRERKVLIVERVRHVNRVKGLLFSQGISGYEPLRRDRRRRLDTLQTGDGRLLPVHLKAQVCRELDRLELLLEQIKAVEAERDVLLAAQQVAAPAPAAMLLDIKGIGPEFAAILWSEGLFRHFDNRRQVASYAGLAPTPWQSGSVDREQGVSKAGNPRLRTTLIQLAWLWLRHQPQSALALWFEERVRRNGGRLKKTTIVALARKLLVALWKYVTAGVVIEGAVMKRT

SEQ ID NO: 67772 - protein, 338 aa, unidentified
MSAIKTIGIDLGKSTFHLVGHDHSGQELYRHKFSRVKLLEFISAHEPVTIAMEACCGANWLARRCQEFGHTVKLIPPQYVKAYVKSHKNDFIDADAIAEAATRPKMRFVTPKSEQAQLGSVIRRIRTGYIRERTAVMNRISSILVEFGFSFPRGHANMKRLFQWLADTGRSVPPLLIFELREQLEHYNHLNEKIKEQDKKIENLNHDNELFTLLQSIPGIGPMTSACCLSAVSNPKDFSSGRNFAAWIGLVPFQYTTGGKPRLLGISKRGNKELRELFVHAARSVLWRDATAEKYFGTWLLDLKCRKPFNVALVALANKLARIAWSVMATHKTFEIRT

SEQ ID NO: 67773 - protein, 359 aa, unidentified
MREQRNKISFRGQKIYVGIDVHLKSWSVTVLSETSVLKKFSQHPSPEALYGFLTRSYPGAEYHSVYEAGFCGFWIHERLTALGIDNIVVNPADVPTKSSEKLRKTDTVDSGKLARSLRANELKGIYTPDSVSLEMRSLIRLKNSITKDTTRQKNRLKSQLRYLGIEIPQEFLTPFSNWSKRFFAWLKEIETLTPSGRQALDIHIRHLEELRRQKLELTRALRTLAKTDRFREPLRLIMSVPGFGQATGMAFLSEICDITRFRNAEQLAAYIGMIPMCHSSGEKDGTGDITIRKHAVMRCNLIEAAWVAVRQDPAMNLFYTEQCKRMPKSKAIVKVARKLVNRLFFVLKHQTEYVNSIVS

SEQ ID NO: 67774 - protein, 340 aa, unidentified
MKVRTFGIDLAKNVFLVHGVDGRGKTVVHRELRRRQLLPFMTQLQPCLVGMEACGGAHHWAREMAKLGHEVRLMSPQFVRPYVKSNKNDARDAEAICEAVGRPSMRFVAIKSQAQQDMMALHRVRSLLIRERTALMNEMGGLLAECGVVAAQGATVLRRLIATILADHDSRVSELLREILSEMSERLRLFEERLKRYDLRVAELARSDERAGRLMAVEGVGPLTATALIAAVGDARQFRSGRELSAWLGLVPRQHSSGERVMLLGISKRGDRYLRTLLIHGARTTLRYVGRKRDPRSRWAGKLKERRGPNIAAVALANKNARVLWALLTRAEEYRVPAAA

SEQ ID NO: 67775 - protein, 339 aa, unidentified
MNSMAVGVDIAKTVFQVHYIDQETGEIVNKQIKRAKFLEFFANRAPCLVGMEACGGAHHWARQLTKMGHQVKLMPAEFVKAFNIRNKNDAADTQAIWRAVQQPSKPVAVKTEMQQAVLALHRMREQLVKFRTMQINALRGLLTEYGEVMGKGRTALDKAIPEVLARVAERLPAVLIDTMREQWNGLTALDEQIAGIERRMREWKKDDPAVKAISEIPGVGLLTATAAVAMMGDPKAFRSGREFAAWAGLVPRQTGSGGKINLHGISKMGDTYLRKLLIHGARSVLTHAKEPGPWIDQISKRRPPNVVTVALANKMARTIWALLAHNRPYQKDHLSVKPA

SEQ ID NO: 67776 - protein, 347 aa, unidentified
MWIIGCDLHTRYQQVAALDTETGELVERRLEHAGEEVRAFYAARPKPTIVGIEATGHAQWFERLLGEFGHQLWVGDAAEIRAAAVRQQKTDVRDAALLLQLLVEKRFPRIWQPSADNREKRRLLLHRVKLAQMRTTVRNQLQALAMSQGLCRGRRMWSRKGQSELEALSLGVWSHQQRQDLRALDDTLSARIEAMNRALIEQAHDHPAAARLMQQPGVGPMTALAFVLTLGPAHRSKQVVSYLGLNPREYSSGGRQRLGAISKQGNTLLRWLLVEAAQTAARLDPELHRQYLRLKHRRGARIAKVAVARKLAVKLYWMLRTFQHAAQPVSPQSSPCTDLVPQLGSNS

SEQ ID NO: 67777 - protein, 399 aa, unidentified
MTNDHTRVGGVDSHKDTIHVAVISELGREVADREFTTTATGYRRAVAWLIEHGPLQTVGVEGTSSYGVGITTALTQVGVSVIEVNRTRPADRRKQGKSDRLDAYRAARSVLSGEATTDPKRASIEPLRALAMTRRSAVKAQQAAWRQIGAVLVNAPAPLRDRYRDLSDTKLLAALRNTRPDRVKDAGQTDTLHALRSLARRHRDLTDEIGELETRMLARATAANPALLAIKGVGPVIGAQLLITAGDNPDRLRTSASFAALCGTTPIPVSSGRIDRHRLSRGGDRQANAALHHIVKNRMTNEPRTRSYRDTHLAKGWTKRAVYRALKRAVAREVFAALIGRCAVPDYSDLRPARQARNLTLTTLAAQLNVWPATISQLELGQRRDDDLANAYRNCLNAA

SEQ ID NO: 67778 - protein, 399 aa, unidentified
MIRLAGIDVHKDFLEVAFRELSGRVKVIRIEYTPKGLNKLIKLLRKYGITDAYMESTGDYYLPLYYALKGAGIRPHVMNAYKIRRPEANKTDERDAVWLLEIGESDLFSDSYVPNEDIQALRFLMRKRMKLVDRISNIKREINNILWRLGLQASQLAKKLRSKKKRKLLLDLLEGRLKPDSISDSDVRELYDVLSKSEFRAYIFVLKSRLAELAYLESQLEEFDREIEALARKFEDIIRILMSVPGISFILAVGILSEIGDINRFLSPGHLASYAGLIPIAKNSGGKRRVGRPSKKTNKYLRRYMFLAGMAAVRSRSCVVREFFQRLLGRGKHYKVAVVAVARKLLCVIWYLLRRGEFWREDNYFKGSRRLSKRRRVRISVREAIGILVRAGYVVRKRT

SEQ ID NO: 67779 - protein, 482 aa, unidentified
MKKRNIYQNQSQELLHLFEGAGSSEKVMCVPMDYAKKDHLVMFCNGHGDILRKPFSVKNTPEGIAYIADQVTRSCRRRGIKKKHVFFGGEDANSFAKNFVSTLRSKGFLVANVNAHDAKKQRGNVQASTDRIDLMGIATMLLNCRANCGPAQSGIYRNLRTLVRHRRKLVQMLTEVKNRVHGIVDELFPGFLNEKNSGIIPFTQSSLYLMEDRFSPKQIRRRRRQKLIEILKRFGTSKAERTAVKLQQYAAKVLHAPVEYVDTMQLSLAQHVKHIRCLKESVAQMDKEIALNLAQTQGAFLTSVRGIGLVLAAGVTAEIGDLNEQKPLNNLASYSGIIPRVKQTGGSDGKTYTGPVAKRCNRILKDYVVKSAYHLGLHGPQDLMADYKRRDASGQHADFGMGRRYLRMAISLMRTSQVYLPPNLRRDDYTLEERAGYYLTSWPYLKEKWKKVGALEAAFAKDRPLGLWRQIVQELYDIKLKL

SEQ ID NO: 67780 - protein, 333 aa, unidentified
MLYAGIDHHTQTSHLTLIDEEGKVIKQKEIPSERKALEEALAGYSEPIKATLEASYNWGKMYDWLDQVAEEVILAHPLKVRAIAEARIKNDRIDSWTLAHLLRADLIPEAYACSAEIRGIKRVLRQRMFLVRIQTMLKNRVQALLHQHDLERPNVTDLFGATGRRWMSNLSLPDPDGQILSEDLALLAVVQERIASTEGLIKKLSRGDQAVKWLRSIPGIGDFFSVLIRNEVGDISRFRSPEKFVSYTGLIPSTYASGSKIYHGRITKQGNKYLRWAFIEAVIPAIRVSPELRSYYERIKGRKGAKDARVATARKLAELAWHVWTEERPYEMR

SEQ ID NO: 67781 - protein, 352 aa, unidentified
MRFYTGQHQYYCGIDLHTKNMYVCILDQAGSILVHKNLPTSPDALLRILEPFQPDVAVTVECIFTWYWIADLCLEEKIPFVLGHALYMKAIHGSKTKNDRIDSHKIAVLLRGGMIPMAYVYPAEMRSTRDLLRRRMHFMYKRSELLSHIQNTRSQYNLPEFDKCISRKRNRTGISEHFEDVSVRKSIELNLTLLKQYDLLLNDVELYLTRHAKEHDPNNLYILHTIPGVGKILALVMLYEIQDITRFQRVQNFSSYARLIKPQKKSAGKVTGSGNRKIGNAYLKWAFSEATLLLIREKQEVKELHLELKNKHGKARALAIISHKLGRAVYHMLKNHQAFDMRHFLQVKDRAA

SEQ ID NO: 67782 - protein, 332 aa, unidentified
METLPSTFIGIDVSKDTLVTAIPSEKGQWEVVNFGNNEDGIAALVQKAKELPGPHVVLEATGNYSMKVVFALCESQVPVSVLNPKQSKGFIEGVLLSTTKTDAKDACALALYGQLNKPKAYRLPSDKMLEINQLRVHLKQLKKQQVSISNQLHALALHVKPLAYVQESLEESLALCKRQIQDTEKRLLSISEDCFDKAYELATTVVGIGPAIAQNLLTATNGLQGFGNSKQLSKFVGACSTQCESGSSIKKRGSISKAGDPHLRALLYMGARSAKRYNQPCKELYERLRSRGKCHKVAMLAVCNKMLRQVFAVVKSGVPFDNEYHLKNEKAA

SEQ ID NO: 67783 - protein, 340 aa, unidentified
MKLYGAIDLHSTNNVTVVINEHDQVVYQKRLPNDLALILKELSVYQSELQGIVVESTYNWYWLVDGLMAEGYKVHLANTAAIQQYEGLKYTDDHSDARWLAHLLRLEVLPEGYIYPQAERPVRDLLRKRSQLVRQRTTNLLSIQNLMTRNTGESLSANQIKGLDVQQVDQLLPNGDLALAVKANLSVMCSADEQTEILERTVTQRVKLRPQFSFLKTVPGIGEILALTIMLETGDIRRFASVGNYASYCRCVGSQKISNGKKKGKGNTKNGNKYLAWAFVEAAHFAIRFNSKIKSFDQRKKAKSKAVVAIKAVAHKLCRACYYIMRDRVPFDVTKAFGPK

SEQ ID NO: 67784 - protein, 347 aa, unidentified
MRFYTKQHQFYCGIDLHARTMYACILDQHGEILLHRNMKAGPETFLKAIAPYREDLVVAVECMFTWYWLADLCAQEGLPFVLGHALYMKAIHGGKAKNDKIDAQKIAVLLRGGMLPQAYVYPAEMRATRDLLRRRMYLMRKRAELLAHVQNTNSQYNLPEIGKKIAYKANRDGVAERFPDLAVQKSVAVDLELIGHYDPLLRDMELTILKTAKQHNANTLYLLRTVPGIGEILSLVLLYEIHDIQRFPRVQDFLSYCRLVKCAKESAGKRYGTSGAKIGNAALKWAFSEAAVLFLRDHPAAQKYLARLEKKHGKGKALTVLAQKLARAVYYMLTREVAFETQTFFHG

SEQ ID NO: 67785 - protein, 342 aa, unidentified
MVEFSKVRTFVGVDAHGEHCNLKALSRQGRGVLEVEVSTKAAELCAAVKPLPGPVWVMLESSSVAPFVAWALEPVVDRVIACETRENRWIAKSEDKSDPADADRLARLLRMGEFKAVHVPKRERQELRELVLLYDKAVGDTVRSKSRLKAKFRQHGLAVSGSAVYSEAGRAVWLQKVRRRTVRFMLETLYAKLDAAEEIQERLARRLSAMLGHRREYRRLKTIPGIGEVVASILVGVIDDPGRFPDKRKLWKYAGLSVRGPWTGDPRQAKTGGSCTGNRLLKYAAMVAAERAAIGDNHFARRYREMLARGLDRIMALKTTARSILATALAMWKSGTEYRDAG

SEQ ID NO: 67786 - protein, 401 aa, unidentified
MNEFIPEQHRIEPASALELVTRAGQRERHAACIGLDVHKESIAVAVAEPGRSEPVYRGEIANKPKSVEKLVAKLSEAYDGGLLQFCYEAGPCGYVLYRQILACGHDCQVVAPSRIPRAPGERIKTDRRDALKLARLLRAGDLTAVWVPDQDQEMMRDLRRARDDMKGQERKARQQLNAFVLRHGHHWPRGKSRWTPTHYNWLESLRFERPWQQVVLQEYIDAAKAASARVAQLSDHLKRALPEWSLAPVVDSLIALRGVDKLAAIVLLAELGDISRFDSPRELMAFLGLVPSEHTSGARRRQGGITLTGNGQARRMLVESAWSYRFPARRTMHLKRKEGNASESAKKIAWKAQVRLCGRYRTLSRAGKNTKVVCVAIARELAGFIWDIVRQEMPRLAPQAA

SEQ ID NO: 67787 - protein, 349 aa, unidentified
MTTIAREVEQVEVTVGVDTHGDTHTAAVIDTAGRLLGCAQFPADARGYASLLTWAMTFGMLLVAAIEGTGAYGAGIARYLRGAGVELLEIDRPDRKTRRFAGKSDPLDAEAAARAALAGVRTGIPKDRTGQVEALRNLRVARRSAVDQRADCMRRIKTLLVTAPDELRERLRRLPDRELLHACAGLRPDTIRVGEPEQAVKVALRSLARRHAALTAEIDDLDELIEPLVTAINPALLELNGVGPDVAGQLLVTAGENTDRLRSEAAFAMLCGVAPIPASSGKTHRHRLNRGGDRQANAALYRVVLSRLRWDPRTQAYMRRRTEQGLSKKDIIRCLKRLIAREIYYVLTA

SEQ ID NO: 67788 - protein, 341 aa, unidentified
MQITTIGLDIAKNVFQIHGIDAAEKVIVRKQLRRGQVTAFFEALAPCLVGMEACATSHHWARELTKLGHEVRLMPAKDVKAYVKRNKNDAADAEAICEAVRRPTMRFVRIKSAEQQGQLMLHRARDLLMRQRTQVINALRAHLAEFGITAAQGREGIKELLAIVAQDESSRLPIDAHASLTVLAAQLQAVQTMIGSLEKRIVAQHRSNEASKRLETIPGIGVIGATTIAAVVPDPRVFRSGRDFAAWIGIVPRQDSTGGKQKLGPISKQGDQYLRRILIVGAHAVLRRARQQPETYPWLTQLLARRPFKVVAVALANKMARIAWALLAKGGTYRAPQLVAA

SEQ ID NO: 67789 - protein, 368 aa, unidentified
MNEHITIVGLDVHKATVVAAILPPTATRPTQTVTIENCPKAIERLVRRVAGEGRLVLVQEAGPCGYQVQRQMTEMGKKCVVVAPGLTPVRPGDRVKTDRRDAEKLARLYRAGELTEVHVPSCAEEAARDLVRIREDALEDRLRARHRLNKFLLRQGRVYRETKAWGVAHRAWLRRQRFEWQPLQQTFEGNLRAVEEAEARLESLDQQVRDLAQSGPYRMAVRYLRSLKGLETLGALTLAVETLDFGRFERAPAYMSLTGLVSSEHSSGGRERRGSITKAGNAHLRRILVEAAWSYRLKNTVSPALAERRRSCPPEVIQIARKAQDRLHRKFWRLVSRGKPSQVAAVAVARELAGFVWAIARQVPAAAT

SEQ ID NO: 67790 - protein, 344 aa, unidentified
MKDVRILGVDLGKNSCSIVGLDGAGRVLLRRRTRREGVIALAAKLPGCVVAMEACCGAHHLGRLLVEQGHEVRLMSPEYVRPYVKAQKNDDRDAEAIAEAATRPTMRFVALKSEAQLDVQVLHRVRDRLVGQRTSLTNQIRSILLERGIVVPQGRRSLLEALVVLSSEPDGRRVGTRVQRLLDDMLDQWRALDARIKALDDEFAEMARNDPAARRLATIPGIGVLNATALVAAIGDGRTFSRGRDLSAWLGLVPHQATTGGRPKLLGITKRGSRYLRKLVIQGARAALPSLARTATPLGGWLRGLLARAHGNTVVVALASKLIRIAWALLRHETKFVAGGAAVA

SEQ ID NO: 67791 - protein, 320 aa, unidentified
MSDSLDIGVDVDSKEFVPAVADRKAGDRIANTRAGIAQWLNTLPQRCRIGMEATGRYYELLARMAGQAGHVVYVINPRLIKHYGRATGSRGKTDAMDAEAIARYVKKENDRLREYVPRTDEQQQMHDLLRKRQTLVKTRARLEQSFGVSKSAPGELSDLFCALAGTLSELESELQRLGRDGEHGTLYKRLLTIPGIGPAVAAHLIYYMTRWPLANANAWIACTGLDPRPNESGGRTGRRRLSKQGAPVLRQMLYMAAMGLKRCRRGQPLYDELSKRGHPSTAVFNILARKLARIAWGVFKSGRNFDPAMLKVGQACFQQA

SEQ ID NO: 67792 - protein, 366 aa, unidentified
MKKISTVQVFGNEIFKEQKLTIGVDLGDRWSFYCVLDEAGKILLEQKVATTPEALKQAFAKIPRSLIALETGTHSPWVSRLLTELGYKVIVAHAQKVQLITKSNRKDDRHDARTLARLARIDPELLGPVRHRSAKAQIHLTVIRARAELVRARTALVNATRGLVKSYGQRLPKCGTRQVSRELAAGLHAELREVLEPLLQEIESLNERIQEYEVRMEKIAKESYPHVELLKQVKGVGTQIALTYVLTLEDPQRFPKSREVGCFLGLRPGRRDSGESQPQMRISKEGDRYLRTMLVQGAHYILGPFGEDSDLRRWGLKLAGRGGKSAKKRAVVAVARKLAVLLHRLWVSAEVYEPLRNSQKAIRVAA

SEQ ID NO: 67793 - protein, 388 aa, unidentified
MNTNTNTTTASTTILAIDLGKYKSVACVHDQATGEFAFTTFDTSRAELRKLIGKTQPAVVIIEACLLAGWVHDLCAAMGVRCLVANTASEAWKFKYLKRKTDKDDALRLAQLYLLDQLPTVTLPPTAVRQWRSLIACRQALVGRRVAVPNRLRALFVAQGLPTPRGAKAWAATGLAGMATWAKPLAECMADELWRGLLELSLTEYRQLCELINQAETKLDAIGKQHADVVLLETAPGLGPRTAETVAAYLHDAPRFKTGKHVSAYSGLVPRQHQSGEMDRRGRITKRGPALLRKMLVECAWCMIRYNAWARGIYQRLTGGGQRRKKQAIVALARKILVRCWAMLRDRKPWHDPQTGPKPTRPPSKQRRQAEARQRRQDKQAALTVATT

SEQ ID NO: 67794 - protein, 404 aa, unidentified
MKASGKRYLRFCGIDVGKDHHVAAVVHPEGHFLVRSQSFPHSRPGFTRLLDTLRRLGRPSDILVGLEATGPYWYSLHEFLTAHGYALVVLNPIQTAREGKKAIRKCKTDKRDARSIAVLIKNGTRPPTLIPDDLAMTCRQLSRTRYALTQKITRVKLQLWARLHPVWPEYEPIFADPFGATGRALLGRYPTPADLRQADPAELTALIRSASRGKYGPNRLETIRRAAEASIGVTKGLEGFRTTIRSGLDELAVLRNLRDALDEQIRPYVDRLPTYLLTLPGISPPRAVSLYGELHPVTNFKTPERVVAFAGFDTTVFQTGNYLAPHRAISKRGSPYLRRTLWLMAARAVQSEGDLRTFYLRKRKQGLHHLAAVTATALRLCHVIWRILTDERDYRPQGRPETTS

SEQ ID NO: 67795 - protein, 344 aa, unidentified
MEPMYYIGLDVHKRKISYCVKDSSGQVCAEGSLPATRFDLDRWMKALPQPWSAAMEATMFTGWIYDHLKPHAASLKVAHPLMLRAIAAAKRKNDRIDANKICDCLRCDFLPECYMAPTAIRERRRTLRYRNLLVRQMVQMKIKISSLLMEAGVSYNKQRLHRAGYFRELLATNPAIDEGLRSLLRQCRETVVRLSKTESALIRSLEDDRLLAERVERLMSIPAIGPITALTWALEVGEVQRFSSIKKAISYCGLCGAEKSSGNTVQRTPLSKQRNKHLQTTLIEAAKMAPRYSPTLALLYDREKQKGNANRATLAVARKLVAYLMSVDRGRCHFLVLEETSTAA

SEQ ID NO: 67796 - protein, 414 aa, unidentified
MRSWNEIAYYAGFDWAKDHHDVIIVDRSGQIVVDLQIEHNASGWQRWREHLAALDAGVAVSVETSQGVVVEQLLQSGVSVYPVSPASAKRYRERKIPSGNKTDRVDAWSLADALRLDGHGWKALAPEDPLVAELRLLCRDEVALIEERTALINQLQSALHEYYPAALEAFGDWTLPSAWAFVERFPTPQLLLAAGKRKWEKFLHTHRLARSQTYQKRLESFARAGEFVSGEALTRSKSRLALARVRMLRTLQGQLDAHRTEIEKLFAEHPDHNLFGSLPGAGPKIAPRLLGEIGSDRARYEDPTGLQCLAGTAPVSYQSGQIHKVYLRRHCNKPLRHAVHLWANSSRRYCAWAAVYYDQLRARGKSHACALRCLGQRWLKILWKMWQTGTPYDSELHTRNQLQHGSWVLKIQSA

SEQ ID NO: 67797 - protein, 448 aa, unidentified
MAKKVSYRAVPIERVTSASLAAMLVGASKLIVAIDVAKLKMMAGFGSEDGSVVRLVRFESPMQTREFVELVVATGQALRVPVEALMEPTGTYGDGLRALLVSRGVSVFMQSPKRVHDAREVFDGVPSLHDAKSCVVMAQLHRQGVSRAHSPLSEDRVRLRALVRRREVFEKPLQMHLSELEGLLGRHWPELLIDMDVWRRKTPLELLVAYPCPAEVALHREEAREVMRRASRNTIKHDEIERVLDSASRSIGTSASDEEREVIRAVAREALHVRGSIATIDKLIEKTAEEHEATRGIAKVVGRVTAVVLVAYLGPLSEYASPATLEKACGLNLKIKSSGNVVGRPSITKRGSSEARAWLYLAAVRLVKNDPLIAAWYRTRGGYRGDRKLTALIAVMRKLARALWHVARGATFDATKLVDGRALDVTPRTPLASSTSSPTSHVAPPPMG

SEQ ID NO: 67798 - protein, 419 aa, unidentified
MKDLLEISCGLDVHKEKIVACILTGPLGKPTRSEIREFSTLIPDMIALRNWIVSKNCHHVAMESTGIYWMPIYEILEDAFSGDITLLVVNARHMKAVPGRKTDVKDAEWIADLLQHGLLQPSYIPDKDQRELRELVRYRKSLVGERTRELNRLQKMLEGANIKLSGTVSDINGKSARSILEYLLTGKFIDEAKYDEMYAQKIIAHNLKATKEQIIDDLNGVMSPLQRRMMKELLNHLDELNVHIKNLDDEIDNFMKPEEKKASKAIQDVTGIGNTSAQAIISVIGTDMSRFPSDKHISSWSGLCPGDNESAKKRKSGKTRKGNSLLRTTLITCAHAAVKNKKSYFYAQFMRISAHRGPKRAYVAVAHSMLIAIYHILKDGVVFKDLGAEYYNQFNKERKINAYLKKLKALGWEAPVVAA

SEQ ID NO: 67799 - protein, 407 aa, unidentified
MFNAVGIDVSKGKSTVTILQPGGVVRHKPFDVSHSRTELAALSYFLSRLEGPTRVVLECTGHYHEPILRSLSDAGLFVSAVNPHLIKNFGNNTIRKVKSDPADARKIARYALDNWAELRQYSGMETTREQLKALNTQMDFFTKQKVASSSNLISLLDMTYPGVNKLFSSPARADGSEKWLDYASSFWHVDCVRNSGLKVFTERYQAFCKRHGYNYQPNKPKELYEGARELVPCWPKDPTYKEVILTAIQQLKATIANVERIRQEMNRLASTLPEYQTVLSMRGVGPSLGPQLIAEIGDITRFTHREALTAFAGVDPGVSQSGQFNARSNNASKCGSARLRRTLFLIMTILLQTAPEEDPVYQFLDKKRSEGKPYLVYMTAGANKFLRIYYGKVKAFLKSQEVLDQVE

SEQ ID NO: 67800 - protein, 339 aa, unidentified
MKLYVGDDLHGNNNFLAMVDRKGKRMEQKKLPNDLPVILEYLKPHQKEIVGIVVESTFNWYWLVDGLMDAGYKVHLANPSAIQQYSGLKYVDDKHDAFWLAQMLRLEILPEGYIYPKEERPIRDLLRKRRHLVKLRTSLIISLQNIISRNCGVQFQANEMKRLKEDRVSPLLEGNEDLALAGKTSKETIDHLTRQIHKIEGAIVHRVELKESYRYLLTLPGVGKILALTIMLETGPIARFAQVGDYASYCRKVPSRWTSNEKTKGRGNKKNGNKYLAWAFSEAAEFARRYDAQARAYYTRKMRKTNFMVAHSALAHKLARAAYYLMKDQVPFMPEKLFS

SEQ ID NO: 67801 - protein, 381 aa, unidentified
MRKVIMIGCDLHDRSMLLMVAVGLEKPVKKTFPTRNRAEMIAWLKDWAAQEGAARIVFAYEASGLGFGLHDELTEAGIECHVLAPTHLPHTTHRRKNKTDEKDALMILEEVRAHVLAGRQLPAVWVPDPQTRDDREPVRLRLSLGEQRTQIKNQIRSLFKRTAVELPVWFTKSGDWSRRSVQWLRDVSLGNEGSLSPGARATLARLVDLYQVFSEQLRTLDKAVAELAESDRYARKFNKLRQFAGVGTLTAMVFLTELGDLNRFANRRQLAAYLGLAPAAFESGERGDRKGHITRQGPSQVRHVLCQAAWTAIRYSSTWRERYQRIKRGSPKRNKIAIVALMRQLAITLWQTARSPEFDRWCDKFDRWCGKVQHQQQAALT

SEQ ID NO: 67802 - protein, 354 aa, unidentified
MIIIGCDYHPAFQQIAFVDTETGELQERRLEQREEAEKFYRDLAAQEMKGRVGMEASGHARWFERLLAELNIELWIGDAAEIRRKRERKQKTDRQDAQHILRLLLKDDFPRIWVPSWENRDLRQLLWHRHRMVQTRTRLMNQLQAVALNEGLHCKKRLWREAGRKQLEGFRLAPWASRRRHDLLELLDRLNPTIAELSQAVEQEAEKCPEAQRLMTHPGVGPLTALAFVLIIGRAERFQCGKQIASYLGLVPLEDSSGNRRRLGHITKQGNSLLRFLLVEAAQVTVRHLPEWRSKYVHLTMRRGRKIAKVAMARKLAVRLYWMMRKEWDYEQLKKFGSHAGQPGHRHGVQLNTE

SEQ ID NO: 67803 - protein, 341 aa, unidentified
MTEVSTIGLDLAKNVFQAHAASASGAILFRKKLRRDQVLAFFATQPRCLVAMEACASAHYWAREIAKLGHAVRLIAPTYVKPFVKRQKNNAADAEAICEAAQRPTMRFVAVKSEAKQASAVVFRTRDLLVGQRTQIINAIRGHLAEYGLIAPQGPSHVDQLIAQIEDPNSGIPDPARSCLAVLVETLRALQGKIAALDTEIAARAKRDDGARRLMSIPGIGPLIATAIEALAPPVETFRSGRDFAAWVGLTPLQRSTGAQERLGKISRMGERTLRRLLIIGASGVVRWARRKGVPAGSWLARMLARKPPMLVIVALANKMARIAWALIAKGGSYRAPAVAA

SEQ ID NO: 67804 - protein, 406 aa, unidentified
MDVVYRRCAGLDVHQETVVACVLVSAGRRVHKQTRTFRTMTRDLAELSTWLAEQQVEQVALGSTGVFWWPVFNLLEEGGHAVMLVNPQHVKQVPGRKTDVRDSEWLAELLRHGLLKARFIPPVAIRELRELTRYRAAQMAQRSSEINRLHKVLESANLQLAVVATDVPGVSGQRMLRALAAGEELADLAKGKLRAKLAELERALEGRVKPHHRLLIGIILDHIRYSTSAVARLDEQLAVALHPFTTEIALLDSIAGIGPTAAAALLAEVGADRGAFGSDKQLASWAGLCPGNRQSGGRRLSGKTTKGNVGPRRILGQVAWAAVRERGSSFGARYRRLCRRQGEQKAIVAVMHNLLRVIYHVLRDRVPYRELGADYYQPCDPARTTRRLVKGLERLGYTVTLAPAVA

SEQ ID NO: 67805 - protein, 339 aa, unidentified
MHRKQITFDYIEVESGELHRGKIRPANRQSLRSWLEHFSEQFPEHEAAIAVEATTGWRYVIEELERAGVEPHLAEPAETKSLQGRKKRAKTDSLDAGHLRDLMVIDRLPESWIPPQHIQEIRTLIRMRHSMIEERTAHLQRIHAQLFHNGYPQERNLLATERRKRLQSLQLPAASRKVVDLSLAMIEHINEELEPIEAELRAYARAQSGCKALMGHYGIGELTSVAMLAELGDTRRFPSSKKAVRFAGLDVTVHSSDGKRAAGKLSRQGPPVLRWAAFEAAQSASRRGSPDHSYYVQTKERLGGNRAALSVARKLLRRAHHTLRELGEEAISEPVRGRA

SEQ ID NO: 67806 - protein, 403 aa, unidentified
MISVGVDVSKGKSTICILKPYGEVIMSPRDYEHTQSDLKKLADQLDGFEEEVHVTMEATGNYHFPIATYLKKKDYDVRIINPLEMKRYRCQGIRNPKTDSIDATMIAQYGIDSWFRPFHDCVEDNERIELKALGMQYFKTMKTRQDRCLVLESVIDRTLPGIGGILNDYDKHTGKDKKSDFVYDFYHADKITVYSENRFCDRYASWSKKKGYRYREKEARQLYFIAKDSIPTLPPSENTKLIVQDAVKILREVDASLYDILTRMNEIAKGLPEYATVMEMKGVGISIGPRLIAEIGDPRRFHNAKALIAFAGIDAPPYQSGKFMGTERHMSKRGSRVMRKIGYELMDTINKHQKLYAGDPVCDYFLTKRAEGKKYRVAMFAAYNKFLRIYHSKVSSVLNERDI

SEQ ID NO: 67807 - protein, 453 aa, unidentified
MEQPQEVVEDEEHERAWDRVAAIDVAKASGVVCTRVPDDGRPGRRRARVWAVAATMGEVTALGDHLRCQGIEVVTIESTSDYWRIWHAVLEAAGLKVQLVNARAVKNVPGRAKTDKKDAVWLAKLTERGMLQPSFIPDYDIRRLREFTRLRAELVAERTRHWSRLEKLLERALIKVTSVASAIDTMSCRDMIEALIAGERNPKALADLARGKMRAKRKALTEALDGRFEDHHAVEARILLRHIDELTRDIEDLTARAGELLNQIPAAWGIDADGTTGTAAGREPDAIALPAIARLDEITGCGPVAAMAIIAEIGLDMTVFGTAGRLVSWAKLCPQTRQSGKKATAASPGKGDPWLKGPLGEVAATAARSDTFLGERYRRLARRRGKRKALVAIARSILVIIFHLLSDPAARYCDLGPGYYDDRATTERKVRNHVRQLEALGLTVTITPAEDAA

SEQ ID NO: 67808 - protein, 355 aa, unidentified
MASRIWAGLDVGVETTSVCIINDVGDVLQQATCDSTLKCVNQEIRWLKKRRTARIGLEATGASLARGLRSLGYSVDMYETRQLSKFLRVRRNKTDAGDALGIAEAGRLGGSVVSKVYLKSLECQALQSRLIIRRHLIRQRLATVNLICRQIDLCGGRVRRSATFWRMREQIEAELKKLFSKSADPLRSELRGLLDHCERLITDQSDLDREIRLIAMQNETCTRFMQIPGVGPICALMFWAVIGDPQRFARSADVGSYLGLAPKIHQSGLTLRQGRISKMGNKLLRSLLVHSSTLFMIHSKPGCSLRDWAMRVEQRRGRGKARVALARKLATIMLAMWKSGDIYRPTQIDKAAAND

SEQ ID NO: 67809 - protein, 370 aa, unidentified
MGNRSMFVGLDVHKETIDVSIAEGDRHGEIRHYGVIASDLEPLDKIVRALRAPNRRLHFVYEAGPCGFGIYRHLTGRGEDCVVVSPSMIPKRSGDRVKTDRRDSQMLARLHRAGELRAIYVPDATDEALRDLVRAREDAVVVGTQAKYRLKAFLLRQGRRYPGREGWTLPYRRWLTDLSFPSGAQHIALQEYRDAIAETEQRIDRLTEQLRQLAPAWRWAPVVAALQALRGVSFITAVALVAELGDLTRFRHPRELMAYLGLVPSEHSSGPSVRRGGITKAGNPHVRRLLAEAAWAYQGIPRIGRQHAYRQEALPKVVCDIAWKAQLRLTARFKRLVARGKAKPKVATAIARELSGFVWAIAHEVPPTPQ

SEQ ID NO: 67810 - protein, 369 aa, unidentified
MDKAITYVGLDVHKETIAVALAEAGVRGDVCEYGKVANTPGAVKALATKLSRVGNALRFCYEAGPCGYGIQRQLTLAGHDCVVVAPSLIPRKPGDRIKTDRRDAINLAKLHRAGELTAVWVPDPAHEAIRDLVRARLAAVRSLRQARQQLSGFLLRHGRHYNRPTWTLMHRRWMAGLRFEQAAHHIVLEDCIAAVEAATVRRDRLEAHIEAALPDWSLAPVVRALQALRGMALVAAATVIAELGDITRFANPRQLMAYLGLVPSEHSSGATRRQGGITKAGNSAARRMLIEAAWSYRFPARISREQLLRQKGLAKPIRDTAWKAQERLCRRYRKLSRAGKSPTVVTTAIARELAAFAWAIAKHVQTANP

SEQ ID NO: 67811 - protein, 333 aa, unidentified
MHYVGIDVSKRSLDVCLLAEGSKGSRKTKTLSNGQDSAQNLAKWLILQKCELSQTHVIMEATGIYHEYLACGLHQMGILTSVINPCRSREFAKAMGIFTKTDAVDAYVLAFYGCLKQPEAWTPPEEEVRKLRALLQHRDSLLNDKLRIDNRLNTLKSTEAVQEVMDSLSLVNQYLKSEVARIERLISSHIAQHPGLKRDLKLLMSVDGLGKQIGWNMLAVLRGNNFKSAEQLAAYLGVVPVERRSGTSVHGRARLSKIGSSNIRAKLYMGALTAISKNSHIKALYERLLAKGKMKMSALGAAMRKLVHLCYGVLHTQQPYDEKYKAKIINFSS

SEQ ID NO: 67812 - protein, 384 aa, unidentified
MKNDSILFVGLDTHKTNTEVAYVIDGRENSPQHFGKILTNKQAFIKLARQLQSKYPNATLHFVYEAGPCGYWIYRLLTSLGHCCYLVAPSLIPKKPGQRIKTDKRDALMLTQLLKNGDIDPIYVPEPEDEAVRDLSRARETAMRDLNDTKYQLHAFLLRNNIRYAGTANWSLKHMRWLTEMILPHPAQQIVLQELIQAITERMNRLQRLDNELTHQVKKWRYYPVVKAIQALRGVRLLVATGVVAELGDLSRFDHPRKLMSYVGLTPTEHSSGGARKLGGITKCGNSRARRLLVEGAHSYRYAANISKELQIRQEGLPKQVIDTAWKAQLRLCKRYQKLMQRGKHRSVVITAIAREMVAYIWSISREVVLPRVDPKLRLSRVPA

SEQ ID NO: 67813 - protein, 492 aa, unidentified
MKLRKNQPKQSQKLKPKKTARTAHCPQTVGWHEMNRKQRREMARKIQAEDLSLEVVHPHAAGIDIGNESHYVAVPPARDEQPVRRFGCTTAELKAMAVWLKQCEIRTVAMQSTGVYWIAVYDILEAAGLEVYLVNARETKNLPGRKTDVQESQWLMKLHCYGLLRTSFRPSQEVRTMRTYWRQHQDLVQAGGRHIQRMQKALTQMNIQLANVLSDITGKSGQAILHAILEGERDPYELAALCNPNVKASEEEIARSLEGNWQEDLLFMLKQEQEGYEFCQKQMAECDEQLQQYLRQRKDQSAGARLPEEKRKARRNKNRKNRPQFDVREQLFRTTGVDLSRVDGIDVLTAMTVISEAGWDMSKWPDEDHFVSWLRLSPDNRVSGDRVIGKGRLPTNNRLSVALRMAANTLRESNSYLGAQFRRLKRRLDAPVAIKAMAAKLARLIYRMLRYGMQFVDQGAEVYEAAHRQREIHYLKHKAASLGFHIIEAAAS

SEQ ID NO: 67814 - protein, 434 aa, unidentified
MRKIRNNTAGIDIGAKNIFVGLESKEVKCFETFTEDLNNLAIYLLSNKITSVAMEATGVYWVILYDILETHGIDVWLVDGRSTKQVPGRKTDVKDCQWIQQLHSYGLLNRCFIASELVQELRGYQRLREDHIRSSAMHINHMQKALILMNIRLKEVISQIHGVSGMRIVRAILKGERDAEKLATLCNSRILNKKRNQVLKSLNGHYNSSGLFALRQAVECYDFYQKQISKCHKELSKVLTKMSWGKKQGKSNIKRKPIRHHKPDVEDLGLHLLKIFNQKDATVLPGITDYNWMQLLSETGTDLKRWKTEKQFTSWLGLAPKQHNSGKMRRNYKAKGTPKAGLIFKQAAVSILSSKNIALGSFGRKIKFKKGGNVAIKAVARKLAVLYWKLFVKGLDYVEKGIKVYEEKILINKQKAVKLMAKELGFTISLNTVS

SEQ ID NO: 67815 - protein, 403 aa, unidentified
MNMNAVGIDVSKGKSMVAILRPYGEIISKPFEVKHTVSGIRSLIEQIQSIDGESRIVMEHTGRYYEPLVRELSKADLFVSAINPKLIKDFGDNSLRKVKSDKADAVKIARYTLDSWTELRQYSLMDEIRNQLKTMNRQFDFYMKHKTAMKNNLISILDQTYPGANTYFDSPAREDGSQKWVDFSATYWHVDCVRKLSLNAFIDHYQKWCKRRKYNFSRSKAVEIYEASKEIVSVLPKDDLTKLIVKQAVEQLNMASQTVEQLRAMMNEAASKLPEYPIVMAMKGVGRSLGPQLMAEIGDVSRFTHKGAITAFAGVDPGVNESGSYEQKSVPASKRGSSTLRKTLFQVMDVLIKTKPQDDPVYLFMDKKRAQGKPYYVYMTAGANKFLRIYYGRVKEYLSSLPE

SEQ ID NO: 67816 - protein, 319 aa, unidentified
MKTTSSARIANTERNVGIDVGKSTLDVLILEPDIYLQEPNSPDGIKRLVSKLSRYKLSRIVVEATGGYERHLVEACAEKALPIIIVQPMQVRQFARAQGLQAKTDKLDARLIAQFGAIMKPEPRPIASKKVRYIKDLLSRKRQLNETRTQELNRHHKAPTTLMPSHNRLLKLVDKEIAWINDKLAKEVAEVTEWQRTYEILSSVPGIGDGVAFTLLGELPELGALSSREVGALCGLAPYNRDSGSMKGRRRIKGGRAPIRTVLYMAMLSAIQHNKIMKTFYQKLVAQGKHKKVALTACMRKMMTILNAMVRDNQEWQTH

SEQ ID NO: 67817 - protein, 463 aa, unidentified
MSKKKQSNSQLKTDRLKGDWKALEIVHPHAAGIDIGGSEHWVAINPERDEQPVRSFDCFTADLEQMADWLVDRGVRSVAMQSTGVYWIPVFEILQQHGLEVFLVNARHTKNLPGRKSDIAECQWLLKLHTFGLLSNSFQPSDEVRTARTLWRHRGELVAQASSAIQRMQKALIEMNIQLSNVLSDLSGVSGMAIVQAILNGQRDPRKLAALADPQVKASKKVIAKSLEGNWRPELVFVLRQQVEMYRMCHDKIAACDCQLQLHLQSMAPRVELEAQPLGPRPKRRRARGNAPKFDLRTELYRITGVDWTQVDGIDVQVAQSVIAEVGVDLKAFPSEKHFANWLGLCPTNETSGGKVLNRRTPKVVNRAKVAFRQAASTLIRSQSYLGAQYRRLRTRLGAPKAITAMARKLACLFYRLLQHGQQYVDKGTEYYEERYREQQVRFVIQRAKQLGLQIVTPAPSNH

SEQ ID NO: 67818 - protein, 425 aa, unidentified
MKVTACADSRLEPDAAVLAFDVSMDVVNLYTELGAESLEFEFENRTDVIERHLVDLEARALRLSYKRVLVVAEATGGYQECLMRVACRLGLEPAWVNGEAVAKMRVVESNDSGKTDIKDPRVIHLVARMGKTLKYRELDELYGALREWHKVYEAAHSGVAHAKGAMHRRLKALFPDYSFAKDFLYHQSGRALMDRYGANPYRIVASGKAPFARVMRKAAPRIQHRSIERLWRDASISVRNRLSGEQARIREVRLRQSWEEFLLHDERKIETATEMESIYEQLRMRDRRLPPAQKGVVSTLMLARIVAETGPLSDFSSKKKIIRFAGLNLRERQSGKYRGKTKLSKKGRTSLRNALDQAVLPLVKKSALFGEYYHRKKEQQKMPGTKAIVAVARLFLKMLFGWYKSGQAFDHNRVFACETSYKMAA

SEQ ID NO: 67819 - protein, 407 aa, unidentified
MNPLYVGIDVGSRNNAVYIMLPDGSKHSSFSVQNNLGGAQTISKRVASALTEKNLNAVTIGMEATSVYGDNLLCFLREDGALGQFEPKLHVLNPKQVKKFKDSYSDLPKNDPVDAFVIADNLRFGRITCAVYMDDYRYKALQNLTRTRFHAVQNLTREKQRFMNYLFMKCSGLAQEKVFSSNYGAAALAVFEKFDTPDDIADMDVEELAAFIAEKGKNRSPRPEEIAREVQAAARGSYRLPKTVNDSVNQVLSISISSMRAMQAQIKALDKEIVRQFENIPNTLTSVPGIGPVFSAGIIAEIGDINRFHEQGAVAKYAGLAWTQYQSGQFDGQNTRLIKSGNRFLKYYLCEAAFALVRCDTEYRRYYDLKFKEVNKYQHKRALALTARKLVRLLFRLLKDNRLYIPA

SEQ ID NO: 67820 - protein, 415 aa, unidentified
MKEEKEKVKRYYVGVDWSDEFHQVWVSDPEGKKVMEKKVLENVEGLAEFGRWLDESRAKGIELWAAIEKPAGRIVDFLLDHGVVVYPVNPKALDRVRDRFRMSQSKSDSFDAYVLAEFLRTDHAHLRALEPSSEQAQELKLLTRDHHRLGRHKTRILNLLGRTLKEYYPRPLEVFGDLESKIALDFLTKYPTPQALSNLNRRQWNRFAKREHHLAEARCKELWDNLHKPQLKVPEHVVRAKAQLLTVLVVQLKTLIQAVESYSERVKSFFASMPAAELVQSLPGGKSGTILPMLWAELGDAKSRWESFKHLQAEAGAVPVTRSSGKSSYVQFRFSCNKHMRYAAYWFAFVSLNRCEWANKYYRDQRARRKSHHQALRALGAKWLKIIFVMWRDHKSYDEKFHLANIALQKMRQAA

SEQ ID NO: 67821 - protein, 392 aa, unidentified
MSLIEDCAGLAGAEPQTWGTGLMTDIVFVGLDVHKATIAVAVAEGARGGEVRGLGNFINHPDHIKKLVERLAKGGRSLSFCYEAGPCGYGLYRQLIALGHECVVVAPSLIPMKPGDRVKTDRRDAVMLAKLHRAGELTAVWVPDDAHEAMRDLIRARSTAVRVLVKARQHLQGFLLRHGRIYAGKKGWTLAYRRWLTTIRFDHCAQQVVLQDYINAVTNAEERVERLTQQIADLGKTWSQAPVVAALQAMRGVAFIVAVTVVAEVGEFTRFANPRQLMAYLGLVPSEHSSGCTVHRAGITKAGNALARRALIEGAWTYRMQARVSRKLHDRIDGLPQTVRDIAWKAQVRLCARYRRLAAAGKPKVVVTTAIAREMLGFIWAIAQTVQAPRAI

SEQ ID NO: 67822 - protein, 408 aa, unidentified
MQVLYPRCAGLDVHKDTVVACVRCVSEPEHHETRSFATTTRELLALGEWLVEHGCSHVAMEATGIYWRPVWHVLEGQAELVLANAQHIKNVPGRKTDVNDAMWIADLLAHGLIRSSFVPPQPIQELRDLTRTRKQLVREISQHSLRIQKVLEDANIKLGSVLSEVLGVSGRAMLGAIIEGESDPHRLADLAQGTARRKHDELVEALHGRIRPHHRTLLRLHLNLIAALEHTVGEVDAAVGKSLEPIHQRARLLTTMPGISEVSAEVIVAEIGIDMTRFATPGHLISWAGLCPRNDESAGKRRSTRLRKGGTWLKTALVTAAWAAVRTKASYLRAQFQRIKARRGARKAIIAVAASMLTSAYFILRDGVPYRDLGPTHFDRQHRDKTVRRLLRRLHDLGYSLPHQLTPA

SEQ ID NO: 67823 - protein, 428 aa, unidentified
MPYNIAGIDVHKRMLHVVFSDVEVDGEYQFVRQKFDTSPSQLRMLADWLLEQQVEEVAMESTAQYWKPVWETLERYWKPVCEKREGAKPESGTLHLAQALSNRGRRGRKKDFRDAERLVKRLVANELILSFVPDPEQRLWRTVMRTKYQMTCNRVQLQNRLEALLEEAHIKLSGLVSDLLGASARRMLKAIADGESDPAALAALADRKLRATPQQLSDALGACTELNPVYRRLIKMALEDLESIEKRIVQLEQEMADLLRPHEDQVKRLAEVPGLGVDSAQQIMAEVGATAATFPSAEHLSSWVGACPGDEESAEVSQSHRSPQGNRHMRRILNQAANAAVKLKGGIFEILYRRYVPRLGHNQTIGVIAHKLCRLVWKILHQGVHYEERGPAVSKVSKQKRTQRMLRELRALGYRIELAATQSGSPSA

SEQ ID NO: 67824 - protein, 418 aa, unidentified
MKSSKTKKVTKINDKTLIATLDIGKNVHYGYFRAPNGNDVKPFAFYNSKNSYHEFWNKLCQFKDTEGLEEIVIGFESTGPYAEPLCHFLRKKPVKLVQVNPVHTKRVKELTGNSPNKTDKKDPRVIADVICLGHALTLIVPEGPAAELRRLSQARERAITDRTAMINQLQHLIFVIFPEFLKVLNISTKTARYFIKHYPTPEKIYVLGLEPVGQIVKQVSRGKLGQDRAKQLHEAAGNSVGITEGKASIVFEIEHLVTRVEAEDQFIDRLEQQMRTYLQQVPYSQYILTIRGLGEVTVAGLIGEVADFNKFDTISEVMKLAGLDLYEISSGKHKGQRRISKRGRPLMRKLLFFAAINAVKSKGIMHKKYHQMLDRGMLKMKALVAISRKLLAIIFAIVRDQTKYVENYSNRNHYKLAA

SEQ ID NO: 67825 - protein, 402 aa, unidentified
MNNQTLFVGIDVSKLKHDIAFMRPDKQLLGQPFVINDDRDGYQTLLERLQSVAGRHHIQHYKIGLEATSDYWKNIYYFLKQQPDNFQLTVINPLQTHNWAKTELRRATTDPLDAKNIALFMVEKNPLPSLTRAPLLDIIKDIDRQLCALKKQLTMSKNRLRLELTKVAPELEKATSSLNTKRILSVLNCFPTAKEIASASVEDLRQITYGKRNYSLPASFIEKLKILTEHSIAYKTGIGAGYVVQSLVRQIIDSHQEMARLNEQIVRLYQQVNDQQSLLTTIPGIGRETAIALEAYIGDVNRFPNAKKIVAYFGLNPVIHQSGKSKRKSRLQKKGSPMVRQKLFMAVLGIVSNKGGPIYRFYQRLVDSGKPKMVAIGAAMRKLLVTIYAMLKNQQTFDENKM

SEQ ID NO: 67826 - protein, 457 aa, unidentified
MSQRSQKKKSRKFQVTQLPAQLQHINLNAAGIDIGSERHLVAVPAGRADVSVREFGTFTADLEALADWLKKCGVTSVAMESTGVYWIPVFEVLERRGFEVKLVDARHVKNVSGRKSDVLDCQWLQQLHTYGLLAGAFRPPDEVCVLRSYLRQKEMLTQAASMHIQHMQKALQQMNLLLHNVVSDITGVTGMKIIKAILAGERDPKVLARNRHGLCKNSPSTIAKSLIGNYREEHLFALRQAVELYEMYQAKIADCEQAIIKQLEKQPNVSDDEPPPADKETQARSRMRADVDVQELLYKKTGIDLFAIPGLAADTLLTLASEVGFDMSPWKTEKHFASWLGLCPGTRRSGGKVLNSKTKRNPNRATQAFRMAASSLSRSKTALGAFFRRLKMRTGGPQAITATAHKIARIYYAMLTKRTSYIELGQQAYEQRYQQRRINSLKNQAKLLGFQLVPYAT

SEQ ID NO: 67827 - protein, 384 aa, unidentified
MKLDRTDTPTKAEYGTVYVAFELSKAKWKLGIVVPGSEKMSRFTITGGDLAALAARLAAARAKAERHCKSVRIVSCYEAGYDGHWLHRWLLEHGVVNYEIDSSSIEVSRRARRAKTDRIDLDKLMRAFLAHLRGEPRACSVVHVPSVENEDCRRVTRERERLLKERTGHTNRIKGLLHGQGIRDAMPRKPGFIGSLADLRTGDGQPLPRRLREEIEREHQRLCLVDKQLSDLEGGNRDELRTAAPGSNAGKVVQLAELKGIGVAGGQKLVNEMFYKKFDNRRQVGSYLGAVGTPYDSGETRREQGISKAGNHRARATAIELAWLWLKHQPDSELSRWFRARVGDTKGRIRRITIVALARKLIVALWRYLETGVVPTGAVLHRSI

SEQ ID NO: 67828 - protein, 429 aa, unidentified
MNYNTQNAKIASITEKSLIVGIDVGSETHYARAFDWRNYEYSKKPFAFNNDEAGFAAFKAWMEDIAEKHGKEVVIPGMEPTGHYWLNLGAYLQEQGMKPVHVNPHHVKKSKELDDNNPNKNDRKDPKTIAGLVNEGRFSYPYIPTGIYAEIRNLSNLRIQTQEELTKIKNRIARWFSIYFPEIKVVYKNPDAVSGMMVIKKAPLPCDIKELGVDGVNQVWRDAKLKGAGLKRARTLVSAAEHSIGSTEAPGSARIEIRNLLNDYEVYKNRMDDLMREIEAKLSEIPYIDKLMEINGIGLKTVSCFIAEVGDIRRFDNPKQLQKLAGYAIVADSSGKHNGESRISHRGRKRLRYALYEAAISVIGKNKEFREIHDYYRTRKQNPLKKMQSVIAIACKLIRIFYTILTKGVAYDGQKMLSDIVRPEIIMAA

SEQ ID NO: 67829 - protein, 396 aa, unidentified
MATIGIDIGGRSHAVARCREGLARADREVLRVSQSRAGFAALDTWLERQAEPVSLVTMESSGHYWMPLASHLRRQDVPVAVVNPLSAKYFARSRLARTKSDPADARSLAEMGMRDQPAARDPLAGAELRQAARFAMTLVDEQAKVCQRLIRLVELGFPELGELFDDPTCRTAREVLRIAPTARAATKRRTTTLANANAGPGHRRLGQTKAERLQAAAADSIAVPELDAEVAFEVGILLDQYDLLERQIEVADARVAGLLDGETARRLRTIPAVGPAIAATFLAEIGDIDRFSDFDHLAFAGVHPAERSSGRKGSNPETAWHMSKAGNSHLRAAAYRMAAVVGVQHNPVIRAHYERKRAAGKSKMNALGHCMRKALSLVWGVWRNGQDFDPNWGLEA

SEQ ID NO: 67830 - protein, 338 aa, unidentified
MSEVTTVGLDLAKQVFHVVCCDAHGKVVGKRMLRRAQVLRYFANLPVALVGMEACGGAHYWARELQALGHAVKLLPARSVKAFVQGNKNDYNDALAIAEAVVRPEMRAVAVKTAAQQDIQALHRMRQQCVATRTRLCNQLRGLLGEYGMVLPRGVGSLRRRLPALLEDAENGLSTFFRRLLAEGYQQLRALDEHIATYDTEVVQHSRQDDACQRLRTIPGFGPIVASVFHSQVGDGQAYRRGRDVSAAMGLVPRQHSSGGKAVLLGISKRGDRYLRSLLVHGARAVVRQAAHKDDRLSRWVNRLKAQRGHNKAVVALANKLARIGWAVLHNRSTYQAA

SEQ ID NO: 67831 - protein, 353 aa, unidentified
MTYTGIDYHKRYSVACTLDEKGRRLLERRIEHNAPEAFAAYFAELGAPSEVVIEACWNWGTLYDLLEQVPGVTRVVLSHPAKNRIIADAQIKNDRVDAHALATLLRGDFVARVHVPNREVRQRRNTVRQRLWAAKVRTMVRNRIHTVLDRHPGLDRPVYKDVFCQRGVSWMRAAELPAPDRELLTEDLELHTLLERQMAGLERRIEADSATSDDARRLRTLPGVGKVLGPVIALEIDGIRRFRTSDRLCAYAGLVPTTRSSGGKTSHGRMLPFCNHWLKWAFIEAAWVAVGCSDYFGGFYRQHRARGKCANEAITITARRLAKIAWQMLTAQRDYRRVPTKPDPLSPAALATD

SEQ ID NO: 67832 - protein, 432 aa, unidentified
MKFNQSNKQNQRISRISERTLVIGTDIAKHNHVARAFNYRGIELGKRCLFQNEDSGLLNLLAWAESIKQEHGLTDVLLGVEPTGHYWFPLFHFLKQRGIEVVLVNPHHVKKTKELDDNSPTKNDIKDAKVVAKLVIDGRYTQPQLPEGVYADLRVLMNQRDRLSGDLNRVKGRIHNWLDRFFPEYKQVFKDWEGKASLITLMNFPLPQDVVTAGETTVVAIWKKNGIKRAVGPKRAELLYRKARKSIGLTEGVTAAKHELAMYLEQYAMLCRQNEELMELVANLVEQIPGAAHMMGIPCIGLITVAGFLAEVGDLNSYDHSQQIVRHAGLNLWENSSGLHKGETTISKRGRCRLRALLYRAVLTMVAKNPEFRALHQYFTTRRDNPLKKKQSMIAICSKLIRVMFELGRKQKNYDRSKILGPHREAQMRKAA

SEQ ID NO: 67833 - protein, 344 aa, unidentified
MVHVGVDLDKRSSQIAVLTEDGEVAQQRLPNDVARLEKFFAELPPHTPVAIEASGTWWWLVDLLEHLGHDPILSHPKQTKAIAAARLKNDRVDAERLALLLRGDLLPTVWIPSAALREARELVRHRVQLVWLRCIVRNRLHAMLARRNLQPVSTKSWLTQRGQRELQRVPLADTPHRIREDCSALLPLLDAQIRRLDSELGARWGRDPRVQRLTTIPGIGPFIAIVLVLELGDIARFPSAKQVASYVGLTPRIRASAGRIRAGHISKEGNRLLRWVLVLAATQAVRRPGPLRTWFHAVKKRRGKKVARVALARRLAEIVFHVWKHECDYFTVVRHGVVRGELGR

SEQ ID NO: 67834 - protein, 318 aa, unidentified
MANSTRLTAGIDTSKAKLDVAIHGQTRGCVFENNPAGWQVLQAHLTQEGVGRVGIEATGGYERGVTRHLQAAGFTVTVLQPLQVKAFAKLHLRRAKTDRIDAFLIAACTHLLDAETKMAPDPRFDALGDHLTYIEQLQEDIVRLKTRLEHSADERLRRLVTADIKRLQKRRKEELKRLQATLQSHVDLARRLDLVVSVVGIGAITALSIVVRLPELGQLSREEVASLAGLAPFVHQSGKRKGETHIGGGRARLRRALYAAAQPASFRWNPALQALYRRLTERGKSHKSALVACARKLLVYANAVVQRGTPWTASLAAA

SEQ ID NO: 67835 - protein, 375 aa, unidentified
MQNKVRFLGLDVHAETIAVAVAEPDGSVRSLGTTANRADSIRKLVKKLGPVEQLKACYEAGPTGYVLFWQLAELGVQCEVIAPTLMPVKAGDRVKTDRRDAERLARSFRSGDLTAVWVPDAGSEALRDLVRAREAAKQDQLRARHRLSKFLLRSGQRPAAGLKAWTQLYMSWVRRLRFEQAAQESTRLDYLHEVEHMAERVVRLEKAIAEAVKLASPEIQEVVKDLQALRGIAQISAVTIAAELGNITRFESARQLMGYSGAVPREDSSGKRTQRGSITKTGNAHLRRIVVESAWSYRLRPGVGPALRKRQEGVPEELKEIAWKAQNRLHKRYSKLTAAGKDQRKIITAVGRELLGFIWAIGTKAEAAAKQRKAA

SEQ ID NO: 67836 - protein, 347 aa, unidentified
MRFYTETHQHYCGIDLHARTMYVCILDREGQVLLHRNLPCDPERFLRTVAPYREDLVVAVECIFTWYWLADLCAREGIAFVLGHALYMRAIHGAKAKNDKIDSKKTAALLKGGLLPQAYVYPPAMRATRDLLRRRLHFVRHRGQLLAHIQNTHHQYNLAAPGKRIAYRANREGIGEGFEDASVAKSIEADVALIDHYDMVIRDLELTVLRRARGHDLDSFERLKTVPGIGKVLALTILYEIHDIARFARVQEFASYSRLVKCQASSAGKIKGTSGAKMGNAHLKWAFSEAAVLFLAKCPEGKKLLARLERRHGKGKALSILAHRIGRAVYFMLQRKRAFDLDRFLRM

SEQ ID NO: 67837 - protein, 344 aa, unidentified
MSNLDTCGIEVSAKELVVRLRRGEDGEPLRNFTNTPEGHTSILRYLQRAGRVVRVCMESTGLYGLDLALALSEQKGIEVMVANPRAVRHFAQALMKRSKNDQIDAGVLEQFAAHMPFKPWQRPSLAMLALHALARRLRELVEMQTAEKNRQHAAGLSKAIPAVVRRDVARSLRAQERAIARLTRQARQLIAQDPQLTERFELLDSVPGIGETSAVQLLGELGVLAPDLEARQWVAYAGLDPREYTSGSSVHKKPRISKAGNKHLRHALFMPALVAVQHDPHLRAFYQHLLGKGKFKMQVLVAVMRKLLHALHAMFKTHQPYDGSKLFRLNSAPVQEVTPARVTP

SEQ ID NO: 67838 - protein, 415 aa, unidentified
MPEQYELFVGIDWASESHEVCVLNAERRVIDRKNIEHSGSGIAQLADLLVKLSSNQPSRVAVAIETPRGAVVETLVERQFEVYSINPKQMDRFRDRHTVAGAKDDRKDAYVLADSVSTDRHLFHRVQLDEAQVIRIRELSRTEEDLLQEQVRAGNQLRELLRRYYPQMLNFCPGVDEEWFWDLIEMAPKPEAVQKLSRSRVEKLLKAHRIRRLKAEEILAALKVPALQLAPGAVGAASEHVLLQIPRLRLLDRQRKDVASRIKAVLEEMNEPGQPGEHRDVAIILSLPGVGQKVAATMLAEASQALAQRDYHALRSYTGAAPITRRSGKKKVVLMRKSCNPRMRNALYHWSRVSVQCDDHSKNHYAELRRVGHSHGRALRGVVDRLLAVLIAMLKSGTLYDPNRRKKIPEQATAA

SEQ ID NO: 67839 - protein, 482 aa, unidentified
MKPKPQEKTKKATDHPRQQHWREMNRQQRREMMRNIQSEDISLEVVYPNAAGIDIGNESHYVAVPPSRNSQPVRRFGCTTAELKAMADWLEQCGIRTVAMQSTGVYWIAVYDVLEQAGLEVYLVNARETKNLPGRKTDVPESQWLMKLHTYGLLRNSFRPSQEIRMMRTYWRQRNDLVQSAGRHIQRMQKVLTQMNIQLANVLSDVSGVTGQAIIKAILGGERDPHKLAAFRNPRVKASEEQIARSLEGNWQEDLLFVLKQEQDGYEFCEKQMAECDRQLNHYLKQRADRSHGAPLPEEKRKGRPKKKSGNKPQFDLRTGLFRMSGTDLTRVDGIDVITATTILSEAGWDMSKWVTEDHFVSWLRLCPDNRISGNKVIGKGRLPTNNRVTIALKMAASTLRLSDTYLGAQFRRFRTRLGAPVAIKAMAAKLARLVYRMLCYGMKYVDKGAALYQAQHRHLQIKQLNRKAASLGYQLIPVPAA

SEQ ID NO: 67840 - protein, 302 aa, unidentified
MQNESIPDARGPVFCGVDTHADSHWLYVLDWRGRKVLSRRFPADAAGYEALAGAIAAAGEPACIAMEGTSSYGAGLTRHLASLGMPVREALSPARTQRRRPGQGKCDEADAERAARAAMSGSRLGTPKSQDGWVDGVRCMLAARSGAVKARTSAINTARSLLTTAPEGLRSRFRGIGGPRLMEELPSVRAKGALGAALGALADLWAAARDAALDMERAIEASLEENCPALLAMYGCGPVSAAKLAVAAGDNPGRLRSEASFAAICGACPIPASSGKTVRHRLNRGGDRQANSALQIASKMLV

SEQ ID NO: 67841 - protein, 466 aa, unidentified
MRTDKKLWRNRKARKELARRLQSENPGLEVVHPHAAGIDVGNGAHYVAVRPDRDPQPVRRFECFTTDLYRLADWLQSCGVRTVALQSTGVYWIPLYDILEERGFEVYLVNARHTKNLPGRKSDVQESQWLLKLHTYGLLNNSFQPPSKIRILRTYWRQRLQHVTGAATCVQRMQKALTQMNIQLANVISDLSGVTGQLIVRAIVAGERDPWKLAELSHPRIQASREEIAKSLEGNWRQELIFVLQQEIEMYDTYQRRVAECDQELQKHLRAFADTVPPPVKEALPPKKQKKQNKNNPHFHLADELQRITGVDLTRIDGVDVMVAQTLISEVGLDMSRWKTEAHFASWLGLCPDNRISGDKVLARGTRHVLNRAANALRLGASTLLKSQTYLGAQYRRLRSKLGAPKAITAMAHRIARLVYRMLKYGQHYVDKGAEYYEQRNRQQQIEFLRKKAARLGLQLAPAHPS

SEQ ID NO: 67842 - protein, 342 aa, unidentified
MQVTTVGLDLAKHVFQVHGIDQNGQVLIRRQLRRGELIGFFRRLPPCLIGMEACSTAHFWARELAALGHEVRLMPAAYVKPYIKRGKSDALDAAGICEAVTRPTMRYVAIKSPEQQAVLMLHRTRELLVRQRTMLVNALRGHLAEYGIIAPQGLPSVPKLREVAEKARGAAVPDLAWRCVRLIIAQLEEAHVQITEAEQEILAWHRTNEVSQRLETIPGVGIITASALAATISDPGSFRSGRHLAAWIGLVPRQSGTGGKVRLGHISKQGDRYLRRLLVLGATTLLRHARGKASAAAGWINALLARRPAGIVKVAIANKLARVAWAVLQGNQGYRAPAAAAA

SEQ ID NO: 67843 - protein, 412 aa, unidentified
MNHPKMGFTYVGIDSHKDTHTAVFMDCFFEKLGEIQFNNLPSEFGKFLAEAEKLKMPETQLLFGLEDVSAYGRNLTIFLQGQGQQVKHVNAGLVARERKNRNIVEKTDAVDAECAARVLLSRLGEMPDATPDDKYYILRTLVTRRDFIVKNNTCLKNHLHSLLTQHYPTYTSYFDNIDCKTSLAFFMTFPSPKTLEGVSIADLTDFLKEPSFGKVGEAKARQILDSLEDTAVEFQEIRDMAVQSSIRQIESNLRELEQVEKTMAKFLNKFDCTLTTMTGIDIVTAAQLLSCIGDIHKFATAAKLARYSGVAPITYASGKKDHQFANQRGNRELHSLLYNLAVRVSATVGSTNKVINPFFYEYYHRKQSEGKTKRQALKCVERRLVNIIWTMLTNGEEYINPPMFDVPKEKSK

SEQ ID NO: 67844 - protein, 347 aa, unidentified
MRFYTKQHPFYCGIDLHARTMYLCILTQEGEILVHRNMPAGPDPFLKTIAPYRENLVVCVECIFTWYWLADLCAREGIPFVLGHALYMKAIHGGKAKNDKIDAQKIAVLLRGGMLPQAYVYPAEMRATRDLLRRRLHLTRKRAELLAHIQNTNSQYNLPEIGKKLAYKANRDGVVERFSDPAVQKSVEVDLALIGYYDQLLSDVELTVVQTAKQHDAHTLYRLQSVPGIGKILSLVLLYEIHDISRFPRVQDFVSYCRLVKCAQESAGKRYGTSGAKIGNASLTWAFSEAAVLFLRNNPVGQKYLARLEKKHGKGKALTVLAHKLARAVYYLLRRDTVFDMNKFLHG

SEQ ID NO: 67845 - protein, 426 aa, unidentified
MNERGGSRQHEKRCWAGLDWGGSGHAVSVVDDRRRVLASFAVGASLEDLESLSRRLRACGEVAGVAVEATRHPVVGHLLSAGFPVYAVNPKQSKNWRGCASVSASKSDARDGLVLAVELAGRHESLRPLRREDPAVAELAGLCEKVRELVDERTALVQRLKATLGQYYPGALGFFSDWTSPVAWRFVKRFPRPKTLAQARKQTLCAFLKSNRVGLRPVWLERIEARGDAARWPLPADSAALEAVALATVAQLLALQPHIDKMDRLIAEQSKEVPQTKLMQSLPGAGKRLAPALASMAALTTTGEKHDLEALRCVSGVAPVEDKSGKRQRVRARRRCNRHWRDVLYLFAHCSINCCDWARAFYDMHREQGDNHAGALRKLADKWLKIIHRMVEANEPYDDLRHVQSLRNHASWFHRAPCGKPGGKLH

SEQ ID NO: 67846 - protein, 359 aa, unidentified
MRIIGCDLHSRQQTLAMLDTTTGEIEKTTLKHEENIVREFYSNLPRPVRVGIEATGSMQWFVNLMEELGIECLVGHPAEIRAAEPRKQKHDRRDADLLLSLLVEERFPTIWLPTKELLDIRALLRHRHQWVGLRVKIQNALQAIALANGLRRGPSLWTQAGQRAIASLPLPPHAAYRRNELQAMYVKFETEIEKLNQRVEQQARERSGARLLMTHPGIGPITALATDVFLGDPSRFAGSKELASYVGMIPGEHSSGKRQRLGGLTKQGNPLLRFLWSEAAIHAVRRDPELKHFYHRKLIQKGLGKARAAAARKLGIRMWIMLRDRIEYHEFCRRGQMQQTSGDARAGMPGPRYGAKVTG

SEQ ID NO: 67847 - protein, 334 aa, unidentified
MENKYILGVVVGKIRLEFCLLFGDKVLKQGEVMNETTAIRQAFSLLLNEFHISNDQLLICAEHAGQYNYPLIYTCESGLYKLWLENPGRMKYYCSGLQPAKNYKLNCKQIAVYASRNADKIAMCQPPDSDVEHLKQAYNELNMLEGDSAKLQSQLFEMKNYMSEEVFDVNAKRLVDLIKGLEAAIAAVENEIKCIFAGNSHLARQMELLKSIEAIGKDVALKMIVDTDAFTRYENSRQFCSHAGMAPVHKDLKAVQHLQQNGIVTRDKSIRLLLNQAVEFILKKDDSELKNYYIRKVNEGKDEKVVINAIRVKLVARMFAVIKNNQVYQPVIQE

SEQ ID NO: 67848 - protein, 320 aa, unidentified
MMAQNEVVVVGIDVAKDKVDACIRAFKLRQTWLSTAQGHRKLVAWLRKYQVNKAVMEASGGYERAWARVLREAGIEVRIVDPKRVRSFALSAGRFAKNDAIDAEMIAWFAETFSEAPSQPHDAASEELQALVKARLDLIDFRMRLVSQSEHAAPGLVQKAHAHILKSLASEIAKLEAAISAKIKSTPDFAERAEIIESVPGFAQTSSANLVAGMPELGQVSDEIAAALIGVAPYDDDSGKRRGERHIKGGRRWVRNAIYMPCVGAATQNNPVLKAYYQRLLAKGKEPKVAIIACMRKLIVILNTMIARRQKWDPSRYVLS

SEQ ID NO: 67849 - protein, 400 aa, unidentified
MMTPDDIDVWVGLDVGKSAHHAHALDHDGNTLYDKPLKQDEKAIRTMLGKLSKHGRVLLVVDQPNTIGSLPLTVARNMGIAVAYLPGTAMRRTAQLLPGDAKTDRRDAHVIAWAALKLPETLRDAGPDDETLAALKLLAGHDEDLAHESTRHVNRLRSLLLQTHPAFERALKGERITRDATLALLERYGGPMGVKRAGIEDVKDWAKSNGLRAGRIIDDMFKAIGEQTVTVPGTGMAETIIPSIARDIKAIKDRRREIGTQVEALLEDHPLLTVLTSMPGIGVRTASNILLGIGGDIANFKSSAHLAAYAGISPVTGQSGTSIKGERPSRRGNKRLKNALWQTAFVASTKHPPSVAYYKRKREQGKHHNAAIICLARRRCDVIYSMLKNGVLYQEPALVA

SEQ ID NO: 67850 - protein, 422 aa, unidentified
MLEETQEREEIIQRVAALDIGKAELTCCVRVPSPGKRGRRAQEVRTYPTMTRRLLVMVDRLREVGVTRVVMEATSDYWRGVFYLLEAHGFETWLVNARDVKHLPGRPKTDRLDAVWLCKVAERQMLRPSFVPPRPIRQLRDVARYRADLVAVRTAEKQRVEKLLEDAQIKLSVVASDIFGVSGRAMLAALIAGERDPKRLAQLARARMRAKLGLLEEAFTGFFTDHHAFLLTRMLDRVDALSADIAALDTRIEALVGPFAHAVDRLDEIPGVGQTAAHLLLAEVGVDMTRFPTAGHLVSWAKFAPGVKESAGKRTGRGATGHGNPYLARVLGEAAVAAGRTDTFLGERYRRIARRRGKQKAIVAVARSILVIVWHLLADPTARYQDLGAGFYDRRVNADRAKRNHIRQLEALGYKVTLEPAA

SEQ ID NO: 67851 - protein, 397 aa, unidentified
MFYCGIDIAKHKHEASVIDSEGKALIESISFSNTKEGCEKITAVFEKLGASVSDVVIGMEATGHYWLSVYTFFLELGFSVKVINPIQSEAFRKMYIRQTKNDSVDSFIIAQIMRFGEYSSSSLAEEYIIALRQLSRYRLALVDACGDCKRRVIALLDQVFPEYNSLFSDTFGKTSEEILLSCPTPEELLEVSTRKLTNILNKASHGRFGKEKAEQLKTAAKETFGIAFAKDAFSFQIKQLMEQIVFLENQLSELEEQISGLLHETNQYITTISGIGDTIGAIIVSEIGDINRFERPNQLVAYAGLDVTVKQSGEFSGTKNRISKRGSPYLRRAIWLASQRAAFCDPILSEYYQSLRARGKHHLTAVGGVARKMCNIIFVILKENRPYQPLPPKHFKN

SEQ ID NO: 67852 - protein, 342 aa, unidentified
MHATTLIGMDISKYSFELCGVDDHGKHTLHKRIHRDQLSLFFSNFPRCTIAMESCAGSQHWARELKNLGHQAMLIPAQHVVAFRQGSKNDRNDARAIAEAAQRPQMRTVPVKTAEQQDIQALHRIRERLVNNRTSLVSELRGLLMEYGIVCAKGYQKFRLWLKNQFIVCLETLSLMAQQTFNMLRDELYALETRIAELEKRILEVFKSNPVCQRLATVPGVGPLIATALVASVADPQRFKNGRQFAAYLGLVPRQHSTGGKPKLLGITKAGNNYLRKLLIHGARSIIYHHRKKVDQRSKWVKELVERCGINKTNVALANKNARVLWKLMTTPEEVFKEKLAA

SEQ ID NO: 67853 - protein, 371 aa, unidentified
MGESSKTLYVGLDVHKDSIAVAYAPEDRGAEVASLGSIGTRQCDIDKLIRKLQSKGATLVFVSEAGPCGYWLYRYLTRKGLSCHVVAPSLIPKKPGDRVKTDRRDAITLARSMRSGDLTAVYVPQIEDEAIRDLSRGREDAMRDLKATKHRLKAFLLRQDIRYEGRANWNAAHLRWLSEVVCPTRAQQIVFQEYARAVTEQHERLQRLETELHEEVKGWRLYPVVEAIQALRGVELTGAVIVIAELGDLTRFDTPRKLMSYLGLTPSEYSSGERRRQGGITKAGNSHARRALVEGAWAYRYPAKVSRHLQLRLEKLPAEVQAISWKAQVRLCKRYRQLTARGKHVNQVVVAIAREMAAFAWAIARTVPLAP

SEQ ID NO: 67854 - protein, 368 aa, unidentified
MGESEFPNSKTGYLKLTKWVKNTSELGRSFDSSLVLFCGEHTGTCSIGLCEYLYAKGMKIWLESALKIKYRSGLKRIKDDKADAEMIAYYAKRFYEPGSCALFEPDSADLKTLRTLYQFRNRVVCDRVAIGNRISSGAFDCSTLVRNRMVKHHKEAQKDEKDIEKEMVKLMETSEELASNYQILISFKGIGPITAAALIIYTSNFKKFDNPRKFACYCGIAPFGKQSGTSINTKPHVSRFAHIGIKAAIVQACKSAMQHNAVIKAYAQRLYAKGKHEGIVMNNVKNKVMHIIFKMIQTQTLWEQEYQQKHMKECKAIPGKNGIGATEAAPIINATLKTSSSVVECTFLEEHSFQKNSKKTSSFSCVET

SEQ ID NO: 67855 - protein, 372 aa, unidentified
MIPNILHVGLDVDDTQYHGSAFNKETGEVIDFRCRPTLKGLLTQLDKLQRHFQGCSIRLCYEASYVGFCLQRDLRAHNVHCDVVAPSSIPSPRGKAVKTDRIDAGHLAQFYANDLVTIVQPPDAEQEQDRDLLRTRQKLLQQRTQLRTHLQALLRRNGLHFKAQTGYKSHWTKPHYAWLRRTIKGSAGSLQVNLSLLLRQIRGLDEVLAEYGQHLEALAVTPRYREAVQSLTCYKGIKNLFALTMITEIGDIKRFAHPRQLMSWSGMDVREYSSGGKHNRMGITKQGNRYLRTAFVEANQRGYRSNRIGKDVKARRNETPPELVRIADRCLRRLNKKGNRLLLAGKHPNKVKVACAREMVGFVWESLNAVAA

SEQ ID NO: 67856 - protein, 350 aa, unidentified
MVVVGADVHKRTHTFVAVDQAGRKLGEKVVAATTVGHHKALVWARAEFGNELVWGIEDCRHLSARLERDLLSAGQQVVRVPPKLMAQTRASARTRGKSDPIDALAVARAVLREPDLPVASHDAISRELKLLIDRREDLVAQRTSAINRLLWRVHELDPERAPKPRSLDLAKHRELLRAWLATQPGLVAELARDELADISRLTEAINALAKRITERVRVVSPALLALPGCAELTAAKLIGETAGVSRFKSESAFARHAGVAPIPVWSGNTTGRVRMTRSGNRQLNAALHRIAVTQVRLDGIGRAYYRKRRDAGASKTEALRCLKRRLARVVFHHLHTDHQTRNQPCQTAAA

SEQ ID NO: 67857 - protein, 338 aa, unidentified
MIVIGLDVHKQSVTAVAVDEAGRPLDEAVIQVGSDALLGWASSLSSERLWAVEDCRQLTRWLEQQLLSVGEDLVRVPPKLTVPERRAGRTRGKSDPIDALAIARAALREPDLSRPRADERVYWEIKLLVDHRDDVVDQRRRTQQRLRWHLHQLDPTFEVPLRMLGRSSHLERVGRWLARRDKELQVKLARELVSTIRSLNRAVAELDQELEHRVSEAAPKLLELPGCAAVTAAKLLAEIGPIDRFKSDAQLARHGGVAPLEASSGRVQRHRLDRGGNRQLNSALYRIAITQARYHAPARDYLERKRAEGKTRGEALRCLKRLLVRVVYQTLKASPALT

SEQ ID NO: 67858 - protein, 419 aa, unidentified
MCVLRLPTRRIKKRRVYDIVAGIDVHKKWLYVVIATEGGTEERLRVGSTSRELQKLAKQLKAAGVECVVMESTANYWRPVWAALEGEFPLYLAQAQSNAAPHGRKTDYGDAIRLIRRFRAGELRLSYVPEAEQRGWRLLTRTRVQYRRDITRLRNRMEGLLEECRIKLSGVLSDLLGSSGRRMLRALIEGETDTQKLAALGDASLKATPAELADALNGQLGDTHRLLLEQSLERIEALEADVEDLDKCLGEAQQAQQEVIRRLCAIPGVGVIAAREIVAELGPTAASFPTAAHAASWIGVCPGRQQSAGRSYSDACAKGSRNMRRILNQCAWAAVRTQGSWFQEWFRKKVPRLGIQKSIWAVAHRLERVIWIILHEGVEYQERSTSGNQAEYLKRRLKSTLRAMRKHGIDVQAALAEGS

SEQ ID NO: 67859 - protein, 349 aa, unidentified
MSISMIGLDTAKSVFQLHGVDESGKTVLRRKLQRSEVVSYFEKLPPCTVVLEACGAAHFWARTLIGLGHDAKLIAPEAVRPFVKKHKKNDPADAEGLVTAGNHKGTKFVPVKDTEQQGILSIHTARALLVKQQTMLSNSVRGLAAEFGHTAAKGTEKLAELASEVAADEMMPARARQAIVGLYDQFRALDEGIQTLEAEIVAHAKSNEKARILDAIPGVGPITASLVVATVSDWSVFKTARDFAAWIGLVPRQNGTGGKVRLGKITKAGNKLIRKLLVSGATSMVRRAERWDSAMGRWTASLLKNGRPVRLVTVALANKVARVMWALTTHNDVYRPQGAVKPAAAVAAA

SEQ ID NO: 67860 - protein, 422 aa, unidentified
MELSALQPLAALIGLDWGDQRHDVALQATEATTVETSRLDHTPVAIAAWLTTLAARFHGAPIGIALETSRGAIVHALLEAPFVVLYPIQPRSLKRFREAFSPNGAKDDTPDARLLLALLVHHRAHLTPLHRDETATRALDRLVRHRRALVAQRTDVTLTLQAALKEYFPLALHVIGPDLAAPLATDFLARWPTLAALKRARPATVRTFYTQHQCRSAARIAERLAAIATAVPLTTDPALIEPTARYVQALARQGRVLATSIREFDTAIADAFAAHPDASLFQSIPGAGAVLAPRLLAAFGADRTRYPSAADVQRAAGIAPITIRSGTSCVVRWRWATSSFLRQTFHELAAASIPAADWARAYYARQRQRGKSHHTAVRALAFKWIRILWRCWQDRTPYDDARYARALANRHSPHSSPQPILA

SEQ ID NO: 67861 - protein, 434 aa, unidentified
MNCNTQNAKIKSITEKTLIVGIDVGSETHYARAFDWRNIEFSKKPFAFSNDEAGFASFKAWLEDIKEKFGKTIVLPGMEPTGHYWFNLGAFLQDNGMKPVHVNPHHVHKSKELDDNNPSKDDRKDPKTIAALVNEGRFNYPYIPTGVYAEIRSLYGLQVMTQEALIRVKNRIARWLSIYFPEYKDVYRSCDAISGVMVLKVCPLPADIVMLGADGVNKIWRDAKLRAAGMKRARTLVEAAKHSVGSTESPEAAKYEMGLLLGDYDVYTKRLEELTEKIEVKLEEIPYVDKLLEIKGVGKKIVSGLIAEIGDISRFDNPKQVQKLAGYAIVACSSGKHKGESHISYRGRKRLRYVLYEAAISLIGQNAEFKEIHRYYLTRQNNPLKKMESVIAVACKALRVFYAILTKGVSYDGKFMLESIRYPENQVLGNRIAA

SEQ ID NO: 67862 - protein, 349 aa, unidentified
MQYIGVDNHKKFSYLAIMDEKGKILKEGKIGNSRESLKKFLGDSDEPQKAVLEAGRNWTVMHDWLEEDMEEVKLAHPMKVKAIAEAKIKTDKIDAKILAHLLRTDLVPEAYVPEKRTREVKNVLRQRMFFVKLSSMTKNRIHNILDRYPDIRGRIDPSDLFGKQGIKWLKVVELPEEARKLLDEELELLEYLKEKIKRSDSVVAHLGSKDKRVKRLMTIPGIGKFFALLIAVEIDDIKRFRNKSKLASYAGLIPSVHSSADKTFYGKIVSHGNKHLRWAFIEAVWPAIKKDLRLMEMYSKVKQHKKVNIAKVAVARRLCEIAYRVLSEDRDYVANYSGRPHNLLAVAEN

SEQ ID NO: 67863 - protein, 323 aa, unidentified
MQGKVSFQEDAMPVVYAGVDVSKEWLDVHLHPLGESRRFSNDKTGIRQLKRLLARHRPERIVMEATGKFHRPVHRSLWLDGFAVAVIDPLRARMFARACGYLAKTDRLDARFLALLAESLRPPAAAPPSPHIEALQELVNARSAAKDDLTALQNRSKTATTAVLRGELNRLVRRLEQHIDRLDKEIERYVGKEPQLCRKAEILTSIPGIGRITALALMAGMDELGSCSGKQAAMLAGLAPIANDSGARTGRRSIRAGRPAPRRALYMAALSACRYNPALARFAETLKAAGKPAKVVLVAIMRKLLVLANCLLSQDRLWTPNPP

SEQ ID NO: 67864 - protein, 321 aa, unidentified
MYKVMNKKLFVGIDFSKETFDAAILKVSEESSIDPKIIGNEQFKNDVPGCKRFVKWLNKTCALSGDYSSVLVGGEDTGNYSITLPKQLYVLGIDCSLQNAYSIKCGSGKIVRDKTDKIDAEKIAYYFYRFRDQIRLYKPLSKDMESLERLYSYRYGQVRERARLKCQIKEYKHILKSEPNDETLKFMIQRLEKQERFLKKEIKAIEAKMVEIIKANEELNEIHKCLLSIPGIGKITSLLLIVVTRGFTRFDNPKQLACFLGVSPHPNQSGTSVQNGNHRSWFADPYFASLLHMAALSASRFNSKFIDYKKKLKSKKLLHRW

SEQ ID NO: 67865 - protein, 352 aa, unidentified
MTVTIVETPTHARAITGGVDTHAGVHVAAALDPIGGLLGVAEFAASPAGYAYLLEWLGGFGTVCLVGIEGTGSYGAGLARHITAAGIRVVEVDRSDRQDRRRRGKSDPLDAVSAARAALSGRAAGTPKGRDGQVEAIRALMVAKRTARSERIQTINQARSLIVTGPDDLRARFAGHSADDLVAELASLRPRPGSMIRYHTLLSLRELGRRVAFLDGQLQRLDALIVPLVTARAPGLLALYGVGHDTAAKLLIAAGDHPERLRSEAAWAHLCATAPIPASSGKVTRHRLNPGGDRQANHALYRIVITRMSSHPPTRAYVERRTKEGLSKKEIIRCLKRYVAREVYRHLRPPVG

SEQ ID NO: 67866 - protein, 456 aa, unidentified
MAKKAKSCKTKEGLKLKIVNPNAAGIDVADGELQVCVPEDRDGDNNRRWGSFTCDLRVISEWLKACRIDTIAMEATGVYWVNVFFYLQSQGFEVILANPASIKNITGKKTDEADAEWIMLLHSYGLIKPSFNPDTMARKVRALSRHRSAMIKSASKEVQHMQKAMELMNIKLSTVISDILGKSGQAIIRAILDGNHDPMSLSQLADPRCKASKETIAKSLEGIWDEEQLFILKQSVELYDYYQTEITECEKKIEEIISKYAAALGNDPERIAMVKKCKGRKNPLSFNIERYAYAIYGVNVMAIPGVNDSLILNSIGELGYDFIKKFDSSRKFNKWLNIVPNNKITGGKLISSKLQKRKNIMGQAFRMSANAVKNQQNEMGRYFRRIKARDGYAQAVVATAHKIATIFYTMIKNQLEYNGNLVGCDEKTILEKKLRRTQQQLDRLKMRQDELDKQPA

SEQ ID NO: 67867 - protein, 343 aa, unidentified
MKIIRVGVDLAKDVFQVHGVDRDEKPVWRRKLNRAEWLKVLLEKIEPGCEIGMEACGGAHHWARQLQAKGYVVKLIAPQFVKPYVKSHKNDANDAEAICEAMSRPNMRFVSVKTVEQQDIQALHRVRAALMDQRKAKANQVRGLAAEYGIVAPKEWLYLRRAIPCWLEDAENGLSGRFRKLLNGLWHDLQLLNDRVTELDQEVALIAASDPMARRLQQLRGVGPMIATALLASVGDAHQFANGRQMAASLGLTPRQNSSGGKDRLLGISKRGDSYLRSLLVHGARSMIRTAKLKDDRLSQWVTCLATRRHPNVAAVALANKTARMAWAMMTSSKDYQPELAAG

SEQ ID NO: 67868 - protein, 446 aa, unidentified
MDVVFLRCAGLDVHKKSITACRIVPDPTGQEAEGIAELRTFGTMTLELLALADWLTEASITHVAMESTGEYWTPVYNLLEGTFTVFLVNAAHVKNVPGRKTDKADARWLAKLTRFGLLQASFIPPKGQRDVRDLTRYRTKLVQERVREVNRVQGVLERANIKLASVASDIMGVSGRAMLEALIAGKADPATMADLAKRRMRSKIPLLEQALTGVVRDHHRQLLAMQLAHIDFLDEQIDALNTTIETALRALSADEPLSPQPLPRAAASSALPLTVSTPLTFTRAVELLDTIPGVDQRGAEVLVTEIGIDMSRFETAPRLAAWAGVAPGNDESAGKQRSGKTRKGNRSLRAILTQLAHGAVRTKGTYLSALYQRLAARRGKQRAIIAVAHSMMRSVFHMLSRNEAYRELGANYFDERRRHYTVDRLARRIEHLGYRVSLEPVAAPAV

SEQ ID NO: 67869 - protein, 317 aa, unidentified
MVNNSMVCAGIDIGKRKLDVAVCGARTSLQVDNTSAGHEKLVRWLQRHKVERVGVEATGGYEQGVVQALRRESIPVVVFQPIQVRAYARFRLKLAKNDKIDANLIAACVASVDNVRAPPDPRFEAFAAAQTLIDQLTDDVVLYKTRLETARDEFSRAFWKGEIAGRKAQLRGVFKTLRTDMRAHADIAAKLDLITSVEGIAEKTAIAILIRMPEIGTLSREQVAALAGLAPYDDDSGRRAGSRHIQGGRSRLRSTLYAAALPAAFFWNPQLVTFYKRLRENGKTHKMTLVACARKLLIFVNTVVARASPWQPKSALI

SEQ ID NO: 67870 - protein, 332 aa, unidentified
MYYVGIDLHKRDLVIAVEDERGPVGKPRRFACRDEAAIVAHLSALRPFRAVIEASASYRWLYDRLKPLGEVILAHPLRLRASIARPAKTDKLDAALLAHLLRMGQIPEAYAPPAAYQELRDLTRARARLSRSATEAKNHLHGLLAARNIHPPYRNPFGVRGRRWMRSLEMGVVGNLERDELIGRLEHYDAQRDRLDGALEESAASFPQIESLQDIRGIGTYTALLVVAEIGEPERFSEPGQVASYAGLATRVYQSGGHDYHGHITRQGSPWLRWVLVQAAMKAIGRDRRLANFYERVRKRSSRHIARVAVARKLAEICWIRLRRWHRERAAA

SEQ ID NO: 67871 - protein, 411 aa, unidentified
MDVYCGIDWAEDHHDIALADRDGKLLARRRIGDDAAGLAQLLELLAGHGDSAGDLIPVAIETPRGLLVACLRATGRKIYPINPMAVARYRDRHSVAGKKSDHGDSVVLANVLRTDIGMHRPLPDDSELAQAIAVLARAQQDAVWDRTTAHNKLRSHLREYFPGFLVAFADARGGITRPEARAVLAAAPTPAAAAALTLTQLRALLKKAGRSRGIDTEAARLREAFTVSQMRQLPLIEEAMGRQSLALLGQLDAACTAADDLEQAAAQSFNLHPDAGIITSFPGLGPLTGARVLAEIGDDRSRFQDARGLKAYAGAAPVTRASGKTKSVTYRRVKNNRLNATGYTWAFSALTASPGARAHYDRRRDDGDRHAAAQRNLFGRLLGCLHRCLATGQHYDEATAFPASTKLPAAA

SEQ ID NO: 67872 - protein, 344 aa, unidentified
MHIASVGIDLGKTTFHLVALGDRNTILFRRKFSRSQLLAYTANLPTSLIGLEACAGSHFLGAALREQGHQVRLIPAQFVKPYRKSNKNDFIDAEAIAEAVLKQNMRFVPIKTEEQLDWQAMHRVRDRLVRRRTSLINEIRGFLLERGITFAAKPIHLRKNLPAVIEDAEQNLSPRLRWLLARMWQEWQQLEIDIQAITGEIERISTEDGLCRRLRQIPGFGPLVSTATVAAIGNGAAFRRGRDFAAWVGLVPRQYSTGGKQKLFGISKRGNVYLRRMLIHGARAVLLRVKGDTGGFGRWVHRLAARAPRNKVIVAIANKLARIAWAVLSSGQDYRHQPLQSAAA

SEQ ID NO: 67873 - protein, 408 aa, unidentified
MKTLHKRCAGLDVHKAEVVACVRLISKRKVEREVRRFPTTTQGLLALAEWLESAGCTDVAMEATGVYWKPVWHILEGRFALILANAAHVRNVPGRKSDVNDATWLADLLAHGLIRSSFVPPPAIQELRDLTRTRRQLTREIVQHVQRIQAVLEEANIKLCSVITDIMGASGRRMLKAMIAGETDAEKLAALGHERLGCTRAELVEVLTGRVREHHRFLLGQHLRTIEQLKDSVAAFDARIEAALSPFHDSVERLEEVPGLAATSTETVIAEIGTDMSLFPTAGHLLSWAGFAPRLDESAGKHRSTRIRKGAPWLKPVLVQAAWGAARKKNSYFQAQFLRLKARHGAKKAAIAVAASILTTVYHMLRDGTCYQDLGPEYFTRRNPAQAAARLANRIRNLGYHVEIRAAA

SEQ ID NO: 67874 - protein, 401 aa, unidentified
MRIVGIDWARRKHDLVVMDRHGQVQARRTFEHTAGGLQTTADWLAAFEPNPAEVHIAVEMHDGALLAFLLDRGYRVFGINPKSAQRARDRYRPAGGKDDASDAFILADMLRTDRGTLRSITRDSEATQALRSLVDVRATRVHDRTALFHRLRQRLDEWAPQISRLCDDLHRDWQRDLLSRWPLIQDLNKVHGKTVNAFVRQHRIGEKAASHLDRARQAQAIALPAGREQAVRLDIEQLLAQIEQLNEAIAALDQRIADQVAAHPDAQVFQSLPIKADNTVAHLLAGFGQDRQHPRSAQALAAAWGVAPVTIQSGRYKTVRRRRAADQTMNQALLHFAFNTAMKSECWASDFYRRKRDQGVAHYTALRCLAQRWVKILHAMWKHNTPYDEQHHRQRLAKATG

SEQ ID NO: 67875 - protein, 368 aa, unidentified
MPSVTSKDPGCIHLGMDTSIDAIVVGILAPDDQTPAVDRIFNDEPSVRRLIARFPDRSVLAACYEAGPGGYGLHRLLTSLGVSCDVVAPTLIPKGSSDRVKTDRRDAIRLARLHRAGELTPIRVPSPAEEAVRDLLRVRADLVAGRKRVQQQISALLLRHGRIWRTGKKWTQPHRAWLARQAFDEPALNTALSAYRSALTIRESEVTALEAELHALAANAAMAPLVSRLACYRGIAELTALTLAAEVIDWRRFATARAFMSYTGLTTAEYSSGTRTRRGAITKAGSASLRTALVESAWSYRARPAVGYRLQVRQRGATADTIARSWAAQQRLCGKFHKMTAAGKTPVVAATAVARELAGFLWAEMTTA

SEQ ID NO: 67876 - protein, 349 aa, unidentified
MIVVGIDPHKQTHTAVAVDAATGRSLAELTIKARTPGFERLVEWARELDHDRVFAVEDGRHVSGHLERHLIARGERSVRVPPRMMGEARRTDRVWGKSDPVDATAVARAALRHPELPEATLAGVEREIGLLVAHREMLVNERTDRICKLRWLLHDIDPDLAPPLRTLSRFTTLDDLARRLRALESSAAIEICLELVARCREITCRANELERRIGELVRTHAPSLLEIAGCGALTAAKIVAEAAQVGRFPTEGHFARYAGTAPIPASSGARHRQRFNRRGNRQLNAAVHRIAVTQIRMHEPARDYVAKKRAEGKTKTEGIRALKRHITRAVFKTLTSIDQPTDRLTAVAA

SEQ ID NO: 67877 - protein, 315 aa, unidentified
MTILKKSKSVINVGIDVGKSVLDVCIHEKQIHWQDENNPEGIKRILKRLAHYQVERLVMEATGRYEFDLAQAAYDKGLPVCIVKPLRVRRYAQSMELLAKTDKLDAQLIAEFAAKGQPDITPSKSKNLLAIKDLIARRRQLMTMRTQEMNRTHIMGKSLETSCRRMVRELDKEIARIEKRLAQHIESETEWSEKQAILKSAPGVGDALVYTLLADLPELGDLSRGAVGKLVGVAPMNRDSGTLKGKRRIQGGRHSVRTMLYMATLSATQCNPVIKAFYQQLVAQGKHKKVALTACMRKFITMLNAMVRDRCEWAY

SEQ ID NO: 67878 - protein, 334 aa, unidentified
METTFASSQSTASSESTNLFVSIELSRAKWLVTSLSPGSSKISRHGVAGGDAAGLLQLLTDLRVKAERHIGMEVKIVTIQEIGFDGFWIHRVLAANSIESHVVESASIAVPRRRRRAKTDAIDGELLLRTLMAFKRGEPRICAMVVVPSPEDEDRRRLSRERKTLVRERIEHINRIKGIMACQGISDFEPMRANARQRLAELRTGDGRPIPERMKAEIGRELDRLALLRSQIAEVEAERNALLSAGTKAELGTEAEERETDSPGAQLMKLRGIGPEFAMVLWQEGLYRRFANRRQLAAYAGLAPSPWQSGDVNREQGISKSGNARLRTTMIEAA

SEQ ID NO: 67879 - protein, 380 aa, unidentified
MKYVGVDLHKHVIVLCVVVLDAGRPKVVKRARFGCHESSAIRAFFRKLRTFQVVVEATAAYEWFFLLIENLADRLVLAHPKKLRVIAESTRKTDKIDAEVLAIFLALDMIPQAYRPTPRIRQHRVLVRHRCWLQRRITSLKCKVRNVLGHYNADIAELFTQKGEQHLAAAPLSPADRFTVQALQDQLALFQHQLGEADRQLARFAETAPLVECEARVLLDTIPQIGPVTIDVVLSELGDWRRFRSQKAVSAFAGLDPGFRKSAGKCLELHISKEGSRLLRWAMIQAAWRLAVRSSRWRSMLVRLQINTGSKKKAIVGVARHLLCMMFAMLQSGKVYELLGVPNVNQQTTKAQPPATSARARQKGATPSRRCLDRSRCAIG

SEQ ID NO: 67880 - protein, 488 aa, unidentified
MSTPRKRKEKKGSDAQRSASKRKARDSHCQQGDGNRRRSKLTITNPDAAGIDVGARIHYVAVPEGRAEVSVRSFGAYTAQLDELVQWLKDCRIKTVAMESTGVYWIPLFQKLEEAGFEVLLVDARQAKHVPGRKSDVQDCQWLQQLHSYGLLRAAFRPEDSICRLRTLQRHRKNLVESAAMWIQHMQKALNEMNLHLHHVLSDISGRSGLAILDAILAGERDPKKLASLADRRVEKSQAQIEAALTGDYRPELLFVLSQSLHNYRQMQEQIAQCDLSIEKQLAKMADCPNPNQASEPIQQSQDSAGSKPRKRKPKDALELSLAGHLKRILGVDLTTIPGLNILAVLNLLSEIGTNMAKWRNEKAFVSWLGLSPNNKISGQRVLSSRTRKVVNRAATTLRLAVMILGKTNTPLGSFYRRKRAQLGAPKAITATARKLGCLIYRLIKNGQGYKEPDLHTYELKYKDQILNSLRKRANSFGFDLVEVPKAA

SEQ ID NO: 67881 - protein, 327 aa, unidentified
MYVCILNQDGDIVVHRNLPTNPEALLKTIAPYREPMVIAVECLFTWYWLADLCAQEGIPFVLGHARSMKAIHGGKAKTDKIDAHKIAVLLRGGMLPQAYVYPAAMRATRDLLRRRIHLRRQRAELLTHVQHTNGQYNLPDLGNKIAYKANRAGVAERFTAPAVQKSIEVDLALIDSDDQLLRDLELAIVTMAKPHDANTLYLLQTLPGVGKILSLVLLYELHDIARFPRVQDFVSYGRLVKCAKESAGKRYGTSGTKIGNASLKWAFSEAAVLFLRNNPAGQKYLARIEKKHGQGKALTVLAHKLARAVYDMLKRGTAFSMDQFLHG

SEQ ID NO: 67882 - protein, 343 aa, unidentified
MEHFAGIDVSLELSSVCVVDGIGKIVHEAKVASDPEALVGFFRGLETRVTRIGLEAGPLSQWLHAGLVAAGFEVVLLETRHVKAALSAMVVKTDRKDARGIAQLLRMGWFRPVHAKSPAAQEVRALLVARKLLQTKLLDVEFSIRGILRGFGLKMGEVSKGRFVARVRELAAGHAMLERITEPMLRAREALRTEYARLHGEMLAIARPDPVCRRLMTVPGVGALVAITFKSAVDDPGRFARSRVLGAHFGLTPRKYQSGETDVTGAISRVGDAMVRMALYEAANVMLSRVTRFSSLKRWALDVAKRRGLKRAKVALARKLATVLHRMWVDGANFHWGKQAAAV

SEQ ID NO: 67883 - protein, 387 aa, unidentified
MSQTVAAVMPAPVDHERTLVLAIEVSNKSWVLAAQVPGLPQTKAKRTVDPEAQALLAAIAGYRGRAAATGRSIERVIAVYEAGWSGFWLARWLMRHGVEVYVVQPSSVPVDRRTRRVKSDGIDSELLLRTLLAWLRGEPRVCSMVPVPDEADEDARRCVRERSELISERVGLTNRIGAVLATLGVSDYNPLLQNRGRRLAELRTALGEPLPANAHAKIKRLLARLELVLTQIAELERERDAVVETEASDRAGKMIQQLTALRGIGVQSATVLVREAFVRRFANGKALGSYAGLACSPYSSGGIDREQGIGKAGNRRVRTVMVELAWLWTRYQPGAAQVCWFRERVGSTGRRVRKIMVVALARKLLIALCRFVIDGVWPEGAVLKPAA

SEQ ID NO: 67884 - protein, 346 aa, unidentified
MLHAGLDLSRKRLDFHLLDERGETVEVGAAPPDADGLYHLAVHLRRHRQPLRAAIESMTGARFVHDQLELHGFQVEIADAVKVKGLAPLACKTDRIDAWVLAELSRRELVPAIWLPDPQVRAERERARFRLHLVRHRTSLKQRVHATLLTHGKPCPVSDLFGLRGRELLARLCLPEPWAGDVEASLRLLDELEREIDGCEAELRTLGAEHRYVPLLITIPGIAWVLAYTIAAEIGDITRFSSPAKLVGYTGLCPRVYQSGESDRRGPLSKMGPRYLRWALIEATTHASRHPAYSERYERTKRRLGKQRGPRVAQVDLARRLAEAIWHMLTHNRPFAPAGATAPMTA

SEQ ID NO: 67885 - protein, 412 aa, unidentified
MEPIRDKVAGLDVHRDAVVACCRVQQRGRSVAVTRRSFATTTTGLEDLAAWLTESGVTTVAMEATGVYWKPVDYALEGLFPELWLCNAQHVKNVPGRKTDLNDAEWLANVAAHGMVRPSFVPRPETRQLRELTRYRKTQVDMRTQQIQRLEKVLQDAGIKLSSVASGVWSKSAREIIESMISGERDPKVPAQMARSRMRPKIPQLEEALWGHFGEHHAVVCRHVINHLDYLDRAIADLTTEITRLLVPFDAAVTVLCSITGVSQTTAQVMIAEMGVDMSRFPTPGHLCTWAGVAPAGCESAGKRRPAGTRQGGTWLRRSLIEAARAAVRTKGSYFSAQYVRIARRRGPNQASVAVANSILVVAWYLLTTGALYDDPGADYFNTRHDPAIEAKRLQHRIEALGFVITVTEYAA

SEQ ID NO: 67886 - protein, 408 aa, unidentified
MNAVGIDVSKGKSMVAALRPMGEVALLPQEFLHTEVGLEQMAYAIVALGEDTRVIMEATGRYHEPIAAALHEYGIYVCVLNPLFIKQSGGGSIRKVKTDKADAMKIAKYGLDNWVELREYTPMDTVRQQLKLCSRQYNLYMKTVVSLQNNLISLTDKTFPGVNELFSSPERADGHQKWVDFVMTFWHCDCICRVSEKAFTDRYQKWCKRKGYHFSTEKALDLYAGSCGHFTTLPKNDNTKLLITTAAQQLLAGKTTLTALRTEMTRLAKQLPEYDTVRAMYGVGETTAAQLMAEIGDVRRFPRRSSIVGFAGVDPAVDQSGKHSAKSVPTTKRGSPHLRKTLYQIVCTYLKRSPADEPVYQFLDKKRAEGKPYFVYMTAAQNKFLRIYYARVKECLEAFDERQDTVQN

SEQ ID NO: 67887 - protein, 347 aa, unidentified
MEYVSTIGLDLAKHVFQVHGADIAGSPLFNRKLRRGEVLRFFEKLPSCLVGMEACGGAHYWAREIANLGHDVRLIPPAYVKPFVKRGKTDAADAEAISEAVIRKTMRFVPIKTAEQQADAMVLKTRALLVQQRTQSVNALRAHLAELGIIAAGGLPSVAALMTIVREGEDTRLPAAARFALMAVADQIDALADQIFKLERAIVTEAKRDEDMRRLTTIPGVGAITAATIKALVPDPGGFKSARHFAAWVGLTPRPHSSGGKERLGGISKMGNPELRVLLVLGATAVLRIARNDDRARPWLKALLARRPFKVAAVALANKMARIIWALLNKGGIYHRPEPLSIAAVAR

SEQ ID NO: 67888 - protein, 454 aa, unidentified
MRKPQVVPDEDHEVVYERVAAVDVAKASGVVCLRAPDPARPGRFVNRIWDNVPAMRAQIAELGGELLRCRVQMVTLESTSDYWRIWYYVLESIGLAVQLVSASQAKNLKGRPKTDKLDAMWLARLTQWGMLRPSFVPPAAIRRVRDFTRARQDLVAERTRCLQRVEKLLEDAMIKVTSVAKDGMKAKSVVAMVAALAAGERDPRALADLAKGPLRARRDQLAQALDGMFDSHHGMIARSLLDQVAFLDRQITLMEDQAIAALAGVPESWGVDADGQTGPQAGTSPDSPVLAAAHRLAEIPGISLWLAIVIIAEIGLNMTCFPTPAHLVSWMGLCRSAASSGTRHGKGKPKKGNSYARAAAGQAAIGAARTATFLGERYSRIARRRGKAIAQAAVARSIMIIAWHLLNDPQARYRDLGPDFYASRINRDKKIRNHIRGLQALGLTIAITGDEQAA

SEQ ID NO: 67889 - protein, 232 aa, unidentified
MFNEFKTTVSGYKQLAKWVEQNSYGIDPSLWLFCGENTGDYSKGLCSFLYGKGYDMWLENAKSIKDASGLRRLKSDRADASMIAEYAMRNYDKAIMYEPLSESLAQLRELFLYRQMVVRHRCSFQVRRGEKKLTMEKSPIKTIISQSGRHIVSELNKEVEKIDKRIAELIKSDEELTEVFTIVTSVPGIGTHNAVCLMVYTDNFRRFNYDSRKIACYYGIAPFGKDSGTSVH

SEQ ID NO: 67890 - protein, 358 aa, unidentified
MNRNTGMNAGQIIGTMNGQQVIGLDIAKHVFQMHTVNMGTGEIINVQIKRAKVQEHFANLAPCLVAIEACGGAHHWARELSKLGHTVRLLHAKIVRPFVSGNKTDATDARAIWLAVQQPGVKFVGTKTAAQQATLTLHRQRELLMKMRIMQTNALRSLLYEFGATFAKGKRALFKEIEATLEGLAHTLPQLVRDSLHEQVARIKAIEVDMQAIEARLQLQLKQDPQMQRIAQIPGVGLLTATAAIATMGEASAFKSGREFCAWLGLVPKQTGSGGKVKLLGISKRGDGYLRCLLIHGARSVIAHAKEPGPWLHSIKARRPSNVVFVAQAAKMARTIWAITAKAQDYDRGFKSIRPQAA

SEQ ID NO: 67891 - protein, 341 aa, unidentified
MKNLFIGVDFSKEKVDVAIIFADGLTETATRVFNEFKTTVSGYKQLAKWVEQNSYGIDPSLWLFCGENTGDYSKGLCSFLYGKGYDMWLENAKSIKDASGLRRLKSDRADASMIAEYAMRNYDKAIMYEPLSESLAQLRELFLYRQMVVRHRCSFQVRRGEKKLTMEKSPIKTMISQSGKHIVSELNKEVEKIDKRIAELIKSDEELTEVFTIVTSVPGIGTQNAVCLMVYTDNFRRFNYDSRKIACYYGIAPFGKDSGTSVHSDPRVHYMANCQIKAMLTQAALAAVNFNPVMSRYYMRLVERGKKKQVALNNVKNKLVHLVTAMVRNRQTFTPEYKISA

SEQ ID NO: 67892 - protein, 355 aa, unidentified
MSQNLDVSPAAIGIDIGKNSFHIVGQNQRGAIVLRQKWSRGQVEARLANLPPCRIGMEACVGAHHLSRTLKALGHDARLMPAKYVRPYSKGQKNDYRDAEAIAEAVQRPTMKFVATKTADQLDLQALHRVRERFVGQRTGIINQIRAFMLERGIAVRQGLRFLRAELPNILATRTDALSPRMLRILEDLSADWRRLDARIEDLSSEIEALARQDKGCERLMTVPGIGPIISSAMVAAIGTGDAFSKGRDFGAWLGLVPKQLSTGDRTILGSISRRGNRYLRTLFVQAAWVVLVKVGPKHWDRYGLKSWIEAAKKRLHHNVLAIALANKLARIAWAVLHKGRAFECVKTNEAYRPA

SEQ ID NO: 67893 - protein, 422 aa, unidentified
MKKRRYKATNVKRVNWERISAQTQGQRIIFGTDVAKEDFFAVLMKADQSVIETLKWVHPQQSRELVEHLLDDLKCSHLEVVMEPSGTYGDALRGYLSERGVSVYQISPKRVHDVAEVYDGVPSLHDAKAAYLIGRLHLEGVSKPWQALSDARRDQQALVAELDLFESARQRNLNRLEAALSRHWPELEHILDFKLVSVLSLIGEYGSAQEVAAHRSEAQQLMQRIGRSRLDAEKVQQVLDSSATTLGIPCSEGERHFLQVLARELVRSHQCMQEIEHRIAHAVAADPLLTHMATVVGKTTSVVLGATVGTPVDYPNPHSYLKALGLNLKERSSGKHKGQLKITKRGPGEARKYLYFAALRWLYKDRVIGAWYQNKIKRDGNRKGKAIVAIMRKLVLALWYVAQGEVFDSRKLFNVQALGLAA

SEQ ID NO: 67894 - protein, 316 aa, unidentified
MTSTRFVGIDISKATFDVAFSADLRAVYSNDPAGFTQFRQALADDDHVVMEATGTYFLKLATFLSAQDITVSVINPAVISYFARMRLVRTKTDRVDADIIREYGCFEALSAWTPTEDVFIELNQLDSHLNGLQGDRNRVIGRLEALQQCAKINAYTLEDLQQQLTDLEVRIKQTEKELVVLTQAHFPELLTLLTSIKGIGQKTAIMFIVLTRGFTRFSSPKHFASFLGLSSFIRQSGTSVRGSGGISKMGNPRMRQLLYMAALTARTRNSACKTFAERLAGNGKPPKVVRIAVANKLIRQAFAVCLKGESYSECYV

SEQ ID NO: 67895 - protein, 284 aa, unidentified
MGIDISKDTLSVDAGDLFKGDVPNTPKGRAGLVARLRKAARGAVLHLCFESTGPYGAPLFEACCKAGIRASLLNPAKVRHFAKAMSRSAKTDPIDASVIRHFAQTRKPAPSHAPGANERRIRQLVLARDALTKNVVQLSGTLDSLTDAGAKKHAEKAIRMSKGEIRLLDRQIAETVKGDERLEGLTETLAGIDGVGALTAAKVVALAPELGTLGRRGSAALAGVAPFKRESGKYKGKAFIHGGRASLRQALFMPAMVAIRCNTVLKAAYEKLVKAGKPHKVALV

SEQ ID NO: 67896 - protein, 349 aa, unidentified
MVVIGADLHKRSHTLVAVDESARKLAEKTASATPAGHLEVRRWAAQWPDRAFALEDCRHLSRSLERDLLRAGERVVRVPPKLMAGARRSAREPGKSDPIDALAVARAALREPDLPVASLDGPERDVRLLVDHRDDLVSTRTQDQNRLRWHLHELMPGEEPAPRSLDRAHVLATLEERLADEPGVVGRLARELVVRISELTVTIDLLEREIGRLVADLAPSLLGLTGCGPLTAAKLVGEAAGVGRFRSKAAFARHNGSAPVPVWSGNTVRHRLSRGGNRQLNLALHRIAITQLQRPGPGRDYIEHRRIAGDTKPEAIRALRRRISDEVFRRMRDDEAAQAANRAPLGQAA

SEQ ID NO: 67897 - protein, 337 aa, unidentified
MIYRWFVGIDVSKAELAVCIFDAIENARYRLTVRNNPQGFAKLVRTLLARQVDVSQAVVCLENTGVYDDRLVAHLHENGWAVSIGKTTMLKSVRPEHHRKDDGFDADLAAEYAHRFQDKLRLDIPSGPVIEELRALYRERRRLITRRATLDQLLGEAHLYTHPTHNLVASWKRVSAFYKREIEELEACMFDLVQQDEDVHRRFRQMKAVEGFGEKTALMWVSLFFGQKRLNARHVASRFGHAPHGDQSGTMKKPDRSTGHGKGEVRRLFTMCAWSAGKNKPKFIAYKRKKLAEGKNKTLITNNIINKLIRVACAVWNQDGEFDPNYRSPFEKMTPAA

SEQ ID NO: 67898 - protein, 348 aa, unidentified
MNSLHYIGFDVHKKAISFCVKTAAGEIVEEGSVLAQREVLRQWASVRPQPWRGAMEATLFSAWIYDTLKPYGEQLEMAHPAKMKAISAGKKKSDTIDARTIADLVRCNLLPACYVAPPRIRELRRLLRYRSLLVSEAVRMKNKMAGLLMETGALYVKEKLHRKKYFASLLEELEEVPESVIDLLRLSRGALEMFENTQKRLVRELLADPALAQRVERLMTIPAVGEITALTWALEVGDPQRFPSCSDAMSYCGLTAALKSSAGKQQRGPISKQRNHWLQTTLIEAAKLAPRWNPQLAALHARELEHGHRNRATLAVARKLVAYLLAVDKSRQPFQVRAPSQEPTQKAA

SEQ ID NO: 67899 - protein, 422 aa, unidentified
MSDFLSAPLALFYVGIDWAAETHAVCVLDDTGRVKSRFTIAHTADGFADLIRRLGRLGECADVSVGIERPDGRLVDALLEAGHPVVPVSPNAIKAWRDGEVISGAKSDAGDALVIAEYLRLRHHRLRVATPFSDQTKAVRTAVRTRGDLVEMRVAATNQLSALLDMHWPGAKTIFADVESPIALTFLSRYPTPASAARLGEKRVAAFCAANGYSGRRPAAELLTRLRAAPAGTTSPALTDALKHAVLAMVTVLSALNAAVKDLDRTVVAHLGEHPDGQIFTSLPRSGQINAAQMLAEWGDCRQAYGSADAVAALAGLTPVTKESGKHRAVSFRWACNTRFRVAMTTFADNSRHASPWAADIYNRARAADKDHPHAIRILARAWTRVIYRCWLQATPYDPTRHGNATALAARPAAATQTVVAA

SEQ ID NO: 67900 - protein, 420 aa, unidentified
MAKRKEKQQRRSVVLEPDAAGIDIGAEEIYVAVPPDRDEESTRRFSSFTCDLHALADWLGRCRIQSVAMESTGVYWIPLFQILEERGFKVYLVNAHYLKSVPGRKSDVSDCQWIQYLHSVGLLRASFRPPEAICAIRTLWRHRGSLLEMAAEHILHMQKALSQMNLQLHHVLSDITGTSGQAILDAILSGQRDPVALAQLCHSRVKSPRDKVAQALVGDYRPEHLFTLKQSLEGYRYYQKLILELDQETARLMQALPSATEDPMPPRTKATAYHRQGNDPQFDLRSELYRIAGVDLTDIPGVSAATAQVILTEIGTDVSRFRNASAFASWLGLCPEKRVSGGKVLSCKTRQVKHRAATALRMGANSLCRAKGLLWRVLSAHAGQARHCPSDHRHRTQNRTNSLSRLIDERTLRRNRFPPL

SEQ ID NO: 67901 - protein, 339 aa, unidentified
MNKVSTVGLDIAKKVFQVHGVDAAGVVKVRRSLRRSQVVTWFAKLAPCLIGLEACATSHYWGRELRKLGHEVRLIPPAYAKAYVRRNKNDAADAAAICEAVSRPGMRFVAIKTEAQQAIGGVHKVRALLLKQRIMLINHLRGLMAEFGLVVATGPQHVGELLAILADPEEGGVVEPLRGALLGMTEVLRGLERRIEAIDRQVVAWGRSNTTYRHLITIPGYGPILASAVAALVIDPTTFRSGRDFSASLGLVPRQEGTGGKVKLGPISKRGNGYLRRLLVNGAMSVLGSKRARQNPWIAKLLASKPRKLAAVAVANKLARIGWAIMMRQEDFRTQPAAA

SEQ ID NO: 67902 - protein, 349 aa, unidentified
MAIIADEFDFVVGVDTHARTHTFTAVHTATGAVVDTAAFPATSPGMDRAIAWIRRRTGGERVFAAVEGTSSYGARLTQALLAANIEVGEVRPPTRSSRALTGKSDPIDAEAAARTVLGRPRDQVTEPRAAGTRAAIRILLASRSLLDHQRTANRNALTALLRGTDLGIDARASLRDAQITTIAAWRSSNSTDPVIRIARAEAKRLALAIQDLTGRLSENHKELAQLTEELAPGLQSVAGVGPVTGAIIICAYSHHGRIRSEAAFAALGGVAPRPASSGNTTRHRLNRSGDRQLNRAFDVIVRTRMSFDLGTKDYAARSRATGKSNREIRRNLKRYVCRSIFRQLQTIMA

SEQ ID NO: 67903 - protein, 354 aa, unidentified
MYIGVDTHKQTHVLVAIDEAGRAGGSRTIANTPEGWAAALQWARGQQQQHPRWGVENSGSLGKGFAQFLLAQGEAEVREVVPHRTAQYRRRGRTQDKTDTADALAMARLLRAEGELLPRVQADDRSTELRLLSDHRDNLVVDRTRLINQLHAQMLQLDPSYAERSGPLTRAAGVRYCRDLCLPEADAIVQTRLLVVRQLAARLLALDGDIAAATAALEERVRALETPLLAVRGVGAVVAARLLGELGCSPRVHSAAALAALAGIAPLTVASGGHHAHRVNPGGNRKLNRAIHIVALTQRRCEPLARAYYEKKRAEGKTARAAMRCLKRRLVDVIFRQLQRAPQERSPSMTAVAA

SEQ ID NO: 67904 - protein, 388 aa, unidentified
MIYVGIDIAKLNHFAAAVSSEGEILIEPFKFTNDADGFQLLISKIESFDKDSTIIGLESTAHYGDNLVRYLVASLYKVCVLNPIKTSQMRKNNIRKTKTDKVDTYVIAKTLMMQDSLRFVSFYDLDLMDLKALGRFRQKTIKQRTRLKIQLTTYVDQVFPELQYFFKSGLHQNAVYALLNEAPSPNEIASMHMTHLANLLKVKSHGHFTKEQAKELRVLAQKSVGANDSAISIQITQTIQQIELLDSQLNKIEAEMTDIMNFNDSVIMTIPGIGYINGGMILGEIGDIHRFLSPNKLLAFAGLDPSVYQSGNFQAKRTRMSKRGSRVLRYALVNAAWNVVRNNDTFKAYYDAKRAEGRTHYNALGHCSGKLVRIIWKMLTDEVEFNLE

SEQ ID NO: 67905 - protein, 393 aa, unidentified
MQKLSYTCGIDIAKNSFTVAIKNGTFIVKDKTFSMDREGFDKFDSLMKDFKEDSLIGIESTGIYHNNLFDFLGNKGYSSVVVNPYMVHQFFKFTSNKPTKTDMKDARTICEFVELKKDELVKENQQNKDEKDRLKYLVREKEEITHRIAQTKTEIRRILYLLFPEIENKVGLFGEEMRALLFEFSSAHKIRSISKNDFIKKVNKLTVNKGRGTRVNLEKIYELACSSIAQDHPSYEELLKMKFKRLAFLFEEREHITRLIDASADKDFAKEIEILISIPGVGRESAIYLIAEIVDIKRFPHWKKLVGFCGLDPVIKQSGKFRTNCKISKRGNSHARRILWIMAGCAKRRSPYFRDYYLKKRAEGKSYREAVIATSTKLLRVIYALLNKERRFQ

SEQ ID NO: 67906 - protein, 424 aa, unidentified
MKVTYQICCGVDVHKSFLVATIVKTTGGIEPSYQKKRFSTFNNSIFEFKQWLLDNDCRDVCMESTGKYWVPVFNLLEDEINVVIANPKWVKAVKGNKDDTKDSKWIGDLFRLGLVKGSYIPCKIVRILREYTRYRCKLVSCRSSEKNRYQNALTVCNVALDSVVSDIFGKSSTSIIDYLLEQSGTSINHEEIASKLLRSLKSKEDAVIESVEGYQMTDAQKYRMRLVRAHMDYITAEIKDVDKMIENMISSNPDFENAVQFLCTIPGVKCDSAITIISEIGTDMSQFSSSKRLCCWAGLTPGSNESAGKKKSVRITRAGVYLKPALVQCAHAAVKSDQSPYYKKKYESLVKRRGKKRAIIAIARMILTAIYQMLSTGEQWNPSDLYKINVPEALIEKQKAKAIKQAKKLLQREGLLPPDEPVAS

SEQ ID NO: 67907 - protein, 407 aa, unidentified
MELPAIFPCVVGLDVHQAKISACALIEQPDGTVTVEHREFGAFKRDRRALAEWVRTLGPDLVVMESTGIYWTSPYAALEQVGIAAWVVNARHVKNVPGRKTDVADAQWLATLARAGLLRASFVPPADIRHLRLIARQRQKLSGMLASEKNRLHKLLADAGIRLNVLVSDIHGQAGRAMVKALIEGQPLPEILDLAGRLRASREELFEALQPEQLSDAHRFVLSEIMAHIEELEARMGRFEQSLLAGLVAWEPQLVLLQTLPGVDRIGAAMLLVEIGTDMASFASAEKLASWVGICPGNNESAGKRKSGKIRKGNAWVRRLLCEFAQAASRSRCGLKEKFKALSIRKGHKKAIVALAHKMLRIIFAMLKNHTPYQDQAVDYEALLVQRNAPRWIKMLLKHGFISPAST

SEQ ID NO: 67908 - protein, 343 aa, unidentified
MQTITTIGLDIAKSVFQVHGVDAAGQMVIRRQLKRRQVQAFFEKLPPCLIGIEACASSHYWSRELQALGHSVRLMPPAYVKPYVKRQKNDMADAEAICEAVTRANMRFVPTKTPEQQSCLMLHRTRHLFIRQQTAVINSIRAHLAEFGIVAPVGRKGVTELLHVVADPNDKRVSDIARACLAALGTQLLSLKQQILEFDRMIMAWHRSDQTSKRLHYIPGVGPMLATALVASVADPRTFRSGRNFSAWIGLVPKQHSSGGKERLGSISKQGDRYLRSLFVAGALAVIRYAKIHGTGHRPWLTALLARRPTKVAAIALANKIARMAWAMMAKGERYRNPVALAR

SEQ ID NO: 67909 - protein, 426 aa, unidentified
MSERDYSKQVARRQRIGNTTLVVGVDIGCASNAVGFMNKEGKVLGSDPDMPNSRGGFEQFVKMTEGLKAKHGLNDMLIGLEPTGHYWRKFAYFAKEKGWEVRFVRTTALKHHRELDESSSAKSDQRDALTITNITREGKYIDTVIEDGSRRQLRTLVKVREKIQKRNGSAKNSLHAALDDYFPELKEIFWSMHSRGLWALLQRCPFPADVVSLKVSVLKELIGRASRRRLEASRKAVAVYQAAKESIGLRQIGSADRYRLRMCLDEVKRTELMVKDMEGEIKRMLKEIPDAQYLLSIPGIGPISAAVFLGELGNPSYFQRARQVVKYAGYDPQESDSGYRVGRRFISKKGRWLLRKHLFFMSMRVVVLSRYFQQYYQRKLQTKNRFGQLPRKKEVLCAVAIKLIKVIFALLRDKRNFEDTVAYSVE

SEQ ID NO: 67910 - protein, 398 aa, unidentified
MKTSGLDVHKDTIFCAIYDGKSYSAVKEFSTTTVSIRSLGAYLQSEKVKKVAMESTSTYWVPVWDILYEMEFELKLVNPLHIKQLPGRKSDAKDAQWIAELLHKNMLRGSLVPSPLIQELRSYTREYRTLVNQRTKVLTQMDRILVMCGIRLSSCISNIDSKSFMLIVEALICGETNPDSLVKLVYGNRENKESGKLKECLTGNMKAHHRLKLTTCKQQLDLFESQIQLYLNEMQKLCEEHFSEEISNLTTLPGVSQISAMIIVAETGGDMSVFENSGKFTGWTGLRPRNDESAGKFKSTATTKGNKHLRATIVQVAWAASRTKGSFFMDKFTKLAIRKSRKKALVAIGRKMLVIIWHILSEKTQYNPNLVHIYDPVKVEHKIKYHEREIERAKKLIV

SEQ ID NO: 67911 - protein, 414 aa, unidentified
MDVIVERCAGLDVHRDSVVATVRVPGKGKSRRRRAQETRTFATTIAQLEQLGDWLEGFGVTLVGMEATGVYWKPIFYVLERRFECWLINAQHLRNVPGRKSDVIDSRWCCELVELGLVRPSFVPPPEIRRLRDLTRLRTTQVQERSRAVQRLEKVLQDAGIKLTSVASAVYSVSARAMLEALLGGVSDPVVLAELAKGRLRKKIPQLEEALASRFDISHHGVLVAGLLAHIDALDQAVGTLEARIGIATRPYADLIELLYTIPGVGVRIAEILIAECGVDMTVFPTAGHFVSWAAICPGTNQSGRRRRSGKTRHGDTWLRTALTEAAHAAVRTKNTYLASHYWQLRGRRGEFKAIGATRHDILIAYYHIVSDRVPYHDLGPDWLARRHSPEHRTRRLVKQLEALGHRVTLETAA

SEQ ID NO: 67912 - protein, 428 aa, unidentified
MDELDRNRLEQFRQLRGEIRNSEQYLIVGIDVAKDRHHAFFGTATGKTLLKRLVFSNDQEGFRKLLDQAEALQVRHGLKEVVYGMEPTANYHKPLGEYLIHLGRCVVLVSGVTVKRNRETLDGRWDKHDGKDSANVADLVSQGKCLYYEYPRAALRGLRGLLSLKRRLKKQEHGYRVRIRNHLIAQYYPEMDREYERLGAEGLAIVRWCFPPSEMTVLEVEEFVQRVTTRSVRMEKRRRLEGIWEKAGETIGCDGVPGVEHEARVMVEGVRQIREMLKETEGKIEELCKEFPEYEYLLTIPGFGPDVSAKVLGAIGDPDRFQNGKQVLKLAGLDLSADRSGKDSDKAIPEISKRGKADLRYGLYQAALIASTRNHGFMVYYTRKLRGREKEKGIHVKMYVKLSAKMLLIAWTLMKKKEAFDPAYLNAE

SEQ ID NO: 67913 - protein, 391 aa, unidentified
MVCVGIDVAKDKHDCCILDSDGTIRADCITIPNNMDGFKQLLQTIRDCTKKSDKIKVGLEATGHYSYNILGFLLDNGLPTYVINPLHTNLYRKSLSLRKTKTDRVDARTIATMLLSDVDLKSYTDIAYHNEELKSLTRYRFDKVQECAKLKQSVSRLATILFPELEGLVSSIHGTSIYALLSEYPGTKQISEVHLTKLTNLLTTASKGRYGKEKAIQIREAARASIGSVMPAKSLELKHTIKLIQELASEIDEIEDSIQKIIDELNPPILSIPGMGVNSAAVILAEIGDFSNFSSPDKILAYAGCSPSTYQSGKLTNCYAHMEKRGSRYLRHALYNATKYVCYWNPVFAEYLAKKRAEGKHYNVALSHAMKKLVRLIYALQKSGKTYLTAA

SEQ ID NO: 67914 - protein, 354 aa, unidentified
MRFHTSTTRYHCGVDLHARQMYVCVMDSQGNKLLHMNIKDNDFEFFLKKIAPWRHDMTVCCECLFCWYWFADACDKAGLSFVLAHALYLKAIHGGKNKNDRIDSEKLAHLLRCNLIPPAYAYPAAKRPVRDLLRQRTSYVWQRVELLQRISTRQMAAGDSPVSKFSNNREKWLEALLEATEDPRKRFALTRDVQLVMQYDTAIKDLEMELLKITKRQYPREFALLRSIPGIGKTLALTILYEIDTIERFPSAQDFLSYCRLVKGTVASAGKIKGLRGAKLGNPYLRWAFGEAAVLGKRHHEDLDAYSRHLEKKHGKFKGNSILASKLARAAYFMLKNGTCFNLNLLTGQPTRTT

SEQ ID NO: 67915 - protein, 377 aa, unidentified
MGLPLGVAFSAAASQDDGVAGSERVGPKHQRETAVEHFIGIDVSLESSSLCVVDATGRIVREAKVASEPEVLAGFCRGLGLTIVRIGLEAGPLSQWLHAGLAGAGFETVLLETRQVKAALSAMTVKTDRKDARGIAQLLRMGWYRPVHCKTVPAQEIRALLAGRRLLLGKLRDVELSVRGLLRGFGLKVGTISKGRFEARIRELVAGHSMLEQVIEPLLRARNALNREFQALHRAMLAVVRRDEVCHRLMTVPGVGALVAVTFTSAVDDPARFGRSRAVGAHFGLTPKRYQSGETDVVGGITKVGDGMVRAVLYEAANVMLTRASRSSSLKRWALDVAKRRGLRRAKVALARKLAVVLLRIWTTGGVFRFGKEAVAA

SEQ ID NO: 67916 - protein, 347 aa, unidentified
MTIVEAARGITGGVDTHRDVHVAAALDPLGGLLGAESFSTDSAGYKALLRWLETFGDVTKIGVEGTGSYGSGLARYLRRVGVEVIEVDRPDRQKRRRAGKSDPLDAIEAARAALGGRATGKPKSRDGAVEAIRVLVVAKRSARQARVKALIQMRHLGYSAPEQLRCRLKGLSVPALVAEGIKLRPTRSADPVTAATKASLSSLAHRISSLDAELAELDQRIEALLVATVPDLLDLFGVGPDTAAALVMAAGDNPERLHSEAAWAHLCGVSPIPTGSGKNSGKVRPHDGGDRQANSALWRIVMVRIAHDPETQAYFERRVKEGRTKHEVIRILKRYVAREVYRYLPRG

SEQ ID NO: 67917 - protein, 429 aa, unidentified
MSYRIAGIDVHKKMLAVVVTDVEIDSEYQFEQRRFGSNPEQLRSLAAWLLEQEAEEVVMESTAQYWKPVWEALERCWKPICETRKGARRKSGTLHLAQALSNRGRRGRKRDFPDAERLVKRLVARELTLSFVPDAEQRLWRTVTRKKYQLRCDRIRLQNQLESLLEEAHIKLSSLVSDLLGLSARRMLKAIAEGETSPATLAALADQRLRATPEQLCDALGACTELNAVYRRLLKMALEELRLIDEQIGQLDQEMANLLSQHQDSVKRLAEVPGLGVDSAQQIIAEVGPTAATFPSEKCLSSWVGACPGDDESAGVNYSHRSPKGNRHMRRLLNQAANAAARTKGSIFEIVYRRSVPRLGHNQAIGAIAHRQCRLIWLILHQGVRYEERGPAVTKRSKQLRTWKMIRQLRTLGYRIEPPNPQPSRAPAQ

SEQ ID NO: 67918 - protein, 369 aa, unidentified
MPHVTSIGLDVHARSVAAAAFNPFTGEVVHRDFGTDAAEIAEWALGFEEPRACYESGPTGFHMARELRALGLDCAVAAVSKMQRPAADARRKNDRRDAEFIARMLATHNIVEVPLPDAAVEAARDLDRALDDATAEYRRARQRLNMFLIRLGHVWDERNADGTRKGSWTRAHWRWISGIRLEGPQRDVLEYYVTAARCAESDRRQLEKKVLALARTDRWRPAVEALSCIKGIDTLTAFRLAAEAGSFTRFRTAPAFASWCGLVPSERSSGETERRGGITKTGNRLARTALVESAWHYLTCTPRPKAPAPGADVPAAIRARADACTARLCRRREALAAAGKSSCKANAAVARELACWVWEIGRRAEGTLG

SEQ ID NO: 67919 - protein, 346 aa, unidentified
MLYAGLDLSRQRLDVHVLDEEGTTVDVTAVRPDADALRTLASHVYRHGQEVTAVIESMTGARFVHDQLELRGWDVAIGDAVKVKGLAPLAAKTDKIDSWVLAELARRDMVPEIWLPTPDVRAERERARFRLHLVRHRSALKNRIHATLITFGHPVPVADLFGVAGRELLARMDVPAPWSETLAKSLRMVDELDERIRICTEELRTLGADHPSIPLLMTVPGVGWVLAYTIASEIGDIRRFPSPKKLVGYTGLCPIVRQSGGRDVRGPLAKNGPKYLRWALVEAAIHAARDTHYKERYERTKKRLGRQRGAKVARVELARRLAEVTWHVLSKNEPFAPAGPAIALVA

SEQ ID NO: 67920 - protein, 305 aa, unidentified
MISWVGIDISKSNLVVWVQPQKDGFEVPNTVEGFDVLVARLAQYTVGRVLLEATGGYERRVMAALQQASFSVLRINPRRARAFAVAMGKNAKTDPIDAAVLADFAEALHASREKPISPEREALRELIQLREHFVQQRDDNKRRLQQAQLPAAIEAIKDHIRYLQTQIKQFGKAIDRSMRELDAEKADRLISVKGIGTVATASLMVYLPELGELDRREIAALAGIAPYNDDSGNHSGKRQIYGGRARVRRALYMSCWVVIRHQADFKARYESLRERGKSAKVALIACMRILLIRLNAMLRDGTEWR

SEQ ID NO: 67921 - protein, 267 aa, unidentified
MEFYVGLDVSLKQTSICVVDQTGLIVREGVVDSDPEAISVFMKSKAPDAVRIGLETGPTSTWLWTELKRLGLPVICIDARHAKAVLKMQINKSDRNDAIGIARIMQTGWFKEVHVKDIDSHSVRALLGSRALLVKIKRDLENQVRGLFKNLGLVIGRGTFNVFAVRAEELIEDRPELVAAVRPLLEARNVVELQVSELDRKVMKLARRDAQVRRFMTVPGVGPITALAFKATIDDPARFARSRSVGAYVGLTSRRHASCVYRELYPC

SEQ ID NO: 67922 - protein, 365 aa, unidentified
MRNLSNWIGIDDHADKWTIAHYRGTRGEPEREWELEPSESGYRKLIGWLKEMRGPVQIVYEAGPCGYELQRRLKGSGLDCSVAAPSLTPRKPGDRIKTNRRDARKLARMGRAGELTLITIPDERQESIRELVRAREAANKDVLRARHQLSKLLLRHGYRYRDGKPWTQRFWVWVNQIEFPQQYSREVMQQHVRVIEHRIAIVAEYDRMIEQIARDSEYTPLVQALGVLRGIDWLTAMTILVELGDLRRFGSAPQLMAAVGVVPSEFSTGDKTKHGAITKTGNAHVRRVLIEAAWHYQHYTRPGPRVRRRRDGQPVERLAIAERCDRRLHRRFTRLTSRSKRSTVAAVAVARELAGFIWAIGQIAY

SEQ ID NO: 67923 - protein, 315 aa, unidentified
MRSTVAQSVGVDISKDTLDVAIHPGGESFRITNNPEGHRALIKRLKGFDIARIVFEATGAYHRLFQQALVEAGLPWVKVNPCQARRFAQATGKLAKTDRCDALMLARMGAVLDLETRAPASKTVEVMRELVNARDALIKDRVAALNRQAIAVSPLIKRQLAQRLRQIDGQIEAIDRRLKTLRNADSDLCQRFDILTSIPGVGEVTANVLVVETPELGRLEHAQAASLVGLAPIPRDSGRTLGKRSIRGGRPRTRQALYMPALNAIRLTPQFKAKYEAMVKAGKPAKVAIVAIMRKLLILANALIRDQRKWAPAKT

SEQ ID NO: 67924 - protein, 344 aa, unidentified
MIWIGLDVHQRFSRMGCFDPASGEIHDLGSVSNDTSALEEALEGLPCPKTVVLEAGRSSYHMAGLLESMAEEVWIVDPGEVRRLQHTISKTDRRDAAALAWWAAKGVLKPQWRPDGQTMDLRELTRGKTALTRMSTQVRTMIRMLLARHGHECPHRDLMSERGQLWLEEVEMEGHAGQMLAGLREILVVVQSKADDFERLVEQTSKEHPVARRLRTIPGIGPFLSLALAVEIGDINRFPGPAQLRGYSGLVPAVYQSGEKDARGPLTKTGNKWLRYAAVLAAQRIGQMKEPDPRLKRIFLSVAFRHGRNPGKIAVARRLLDLIYILLKKGQDYRAPKPRVATAP

SEQ ID NO: 67925 - protein, 372 aa, unidentified
MADCSEVFVGLDTSKLRNAVAIAEGGRNGEVRYLGEIENAEAATRKLVRKLAASHQRLTFCYEAGPTGYGLHRQIKALGHECVVVAPSLIPKKPGDRVKTNRRDALNLAKLLRAGELTAVWVPDARHEAMRDLVRAREAAVDDLKSKRQQVLSLLLRLGLHYTGKRTWTRTHMRWLVGQKLAHREQRIAFEGMLLAVRQAEERVIRLEQAISAAVPEWSLAKVVTALMAVRGLNLISATIFLAEIGDLSRFASPRQLMAYLGLVPGEESTGDRVWRGGITKAGNHRARRILVECSWSYRHPPRVGKKKLAKVEAAPPAVQEIAWKAQARLTARYRALARRGKRPTLVVTAIARELSGFIWAVSRAVGAPATM

SEQ ID NO: 67926 - protein, 454 aa, unidentified
MIAAVVERCAGIDVGKRFLKVCVMVGPLSEEPRFEIRKVDCTSTGLEDLRRWLKSEGVTHVVMESTGPYWVPVFNVLEGDVKVVLANPVEVKNRKGHKTDAQDSWWLAHLLRHGMIRASFIPEKATRDLRELTRRRKKLVGQVAQERNRVQKQLEYGNVKLGNELSDVFGLSGQLMLKALVDEKRTAEQIAELAQGSLKKKKPAIVEAVRGQRLSETQKEMIRSSMRHMTFLELEIEQLDGLVAGLIRESGQQKPYELLQTIPGIKEEAAGNLLAETGSDMKQFPDAGHLSSWGGVCPGNNESAGKHKSRHTTHGNPWFRATLTECAWSASRTKGSAFEAKYNSLKPKIGHQQALVAVAHLLSHAIYYVLSRGEAYRETTPKELNEIQRRRIIRHHTRRLRRLGCWLSAEKLTPLQQWYATHCIPNMDPPQPKRRGRKKGQLQDGASQRGAVNG

SEQ ID NO: 67927 - protein, 350 aa, unidentified
MLIVGCDYHPGSQQIAYVDSETGEFQEQRLAHREEAEKFYRDLAAQGMKVRVGMEASGHARWFERLLAELNIELWMGDAAKIRAKRVRKKKTDREDARHILKLMLKDDFPKIWVPSWDNRDLRQLLWHRHRMVQMRTRIMNQLQAVALNEGLRCKKRLWRKHGRAQLESIRLAPWASRRRRDLLELLDRLNPTISELTQRIEQQVEQFPVAQRLMTHPGVGALTALAFVLIIGEAERFECGKQIAAYLGLVPEEDSSGESRRLGHISKQGSGLMRFFLVEAAQVTVRSDAEWRNKFFHLAMRRGRKIAKVAMARRLAVRLYWMWRQQWDYAQLKKFGPHAGQPGTGVGVQ

SEQ ID NO: 67928 - protein, 309 aa, unidentified
MKEQKVYVGVDVAKAYLDIACAEGSWRVSNDAPGRSALVARLDKITGSVQVICEASGGYERALLQALQRGGIEVSLVQATRVRQYARARGILAKTDSIDAQLLASFGEAIRPKAATPPKPQQDKLREWETQRRHLSRLLVAEQNRRAQLTDHALLRLNQRLIRQIKEQIAQIDLLIEQLIKQSEELSSKAQKLTAVAGVGPRTAALLLAQMPELGELNRREAAALAGLAPFNRDSGTARGKRAIFGGRRAVRCGLYMAALVATRHNPILAEFYQRLRSAGKPPKLALTATMRKLLIVLNSALKNDPLLA

SEQ ID NO: 67929 - protein, 329 aa, unidentified
MDVSKAHLDLAVWLDGKIVAQFAPANGVSALRKCVLEMRRLDGFAMSQAVFCVEHTGIYCAHLLEVLQQAKGRVALVAAVEVQRSLGLQRGKNDQVDARRLAEYAARFSDKLRFWQAPRPVLRQLKQLATLRQRLLNAKIQLQVPLDEGRPFTDKVDQKILEQHSQGPLKALQKALEEIEEQIRSLIQQDEDLRGLFEQITSVPGVGVVTACEIITTTNEFKDFDDPRKFACHAGVAPFEHQSGSSVRGKPRVSHKANKTLKTLLHLAAMSAIRSKSDLQVYYLRKTAEGKAKLSVINAVRNKIIHRIFALVKNHTTYQKNYQLLLAKP

SEQ ID NO: 67930 - protein, 319 aa, unidentified
MAILGIDISKKTFDATLITQQGQKHHRPCDNNEKGFKKLQRWLKKHKVVELHACMEATNIYWEELAQFLYDQGYQVSVVNPARIKGFAMSQLRRNKTDKVDSDVVADFCAAIEPKLWRPPSPEQRKLRALVRHQEALQKTLTQQRNRLATCKDPDVRSSLHRLIDTLQTELERLEQQIQSFINHHPDLKKQQKLLVSIKGIGAKTAIKLIAEMYDLAEYENAQAAAADAGLTPSHHRSGTSVRRKPRLSKVGKASVRGALYWPAITALQHNPIIRALKERLAAKGKCDMVIIGAAMRKLLHLAYGVLKNQTPFDPNYAN

SEQ ID NO: 67931 - protein, 362 aa, unidentified
MRIIGCDLQTREQTLAMLDTETGEVVKKTLTHEGNNVREFYSALPRPSCVGIEATGSMQWFVNLMEELGIECRVGNPAKIRAAEPRKQKHDRRDADLIQSLLVENRFPAIWLPSKELQDLRALLRHRHQWVRMRTRVQNALQAIALANGMRRGPSLWSRDGPHAIASLPLAPHTAHRRSELQAMYVKFESDIEKLNQRVEEQAGQRPGARLLMTHPGVGPVTALATDVFLGDAKRFVDGKTLASYVGIIPREYSSGGRQKFGGLSKQGNPLLRFLWGEAGAHAARRDPELQRFYRRKMVQKGLGKARMAVARKLGIRLWIMLRNEIDYHEFCRRGQKQQNSGAACAGMPGTRYGATSHRPVD

SEQ ID NO: 67932 - protein, 450 aa, unidentified
MDKKSKAIESLQLAVIHPRSAAIDVGSMMMMVAYTDKDGNQNLLEVDAFTESLQHLAATLHKAGVTHIAMEATGVYWIVVYEILEQQGFQVTLVNARHFKNVDAQKTDVKDCQWLHQLHASGLLRASHIADEVYRELRSYLHERNLLQKQKSDTLNRIHKLLTQMNIKVQHLISDIEGVSGMKLLCGIASGITDAKELLALIDVHKLKAGEEDLLKSLQGIYKKQYVTILKNTLRSYDFFKAQMRVYEKLIEEVLNKMLPEDGNGNKAVIKSKTSYTRKNQYRINLKEYLKHIIGVDVTRIDGIDEISALEIIAVTGLNMSKWPSAEHFASWLNLSPRPKISGGKIIGYEKRPTNNNATQAFRMAAQTMWQNKGSLGHLYRRLSAQKGSKKSNKAIARKLAVIFYHMVKNKTEYNKNKLQVNTERQRAKRISFLNKEARKYGYVLQNAVD

SEQ ID NO: 67933 - protein, 415 aa, unidentified
MNSFCGIDWAEGHHDIAIVDGEGKLVAKKRINDDSAGFTALTEMLAAAGDSFDDAIPIAIETPRGLLVAALRATGRPVFAINPLAVARYRERHSVAGAKSDHADAMTLANILRVDSHLHRRMPADSELAQAIAVLARAQQDAVWRRSKASNELRSMLREYYPAFLDTFAGKSATNLAKPEARAVLAIAPTPAHAAKLIKTRVAAALRRAGRKRGIDGLAVNILEHLQAPQLRQPELVEKAMGRQALALLAMLDAACTGADELAQTAAEEFRKHPDYAEITSFPGLADLTGARVLAEIGDDRDRFADDRALKAYAGSAPITRASGKVTSITHRRIKNDRLAAVGWVWATYAYINPGPAQDHYRRRRGHGDRHAAALRHLFNKMLGQLHHCLQTRQTFDPIKAFGQPRTAPREPAAA

SEQ ID NO: 67934 - protein, 338 aa, unidentified
MMIIGCDFHPGFQQIAFVDQETGEYGERRLNHPGEAELFYRSLAGRKLRIGAEATGNFRWFRKLMQELGHEFLLGDASAIRAACPRRQKTDKRDARHILNMLVEDRFPAVWQPPVENDELRQLLLHRCRMVRMRTRVKNQLDSMAKNEGLLSSRVWSPKRRQEIEALPLPNWYAQRRSDLLGVLDELNKRIKPLDEAVLQAAEENTEARLLMTHPGVGPVVSLTYVLTIGDWKRFPRGKQIGSYLGLIPAEESSSDKRRLGHISKQGNTLLRWLLVEAAAKAQRYDPGWHRQYVRLSMNKHHGVAKVAIAHKLAVRLYWMLRSGQDYKQVMERGSHVG

SEQ ID NO: 67935 - protein, 338 aa, unidentified
MGSYSFFVGVDVSKATLDFCLARPGGQPLHFKVSNDRAGYSKALRQLSAVPGFTCGSCLLCMEYTGLYLYRAAIFFKQKGVTVWVVNAASIKQGTGTVTRGKDDKVDAARISEFAYRFHDRCTPWEPPREAVRQLAELQAAREQLKRAAHLIRVGTRERRAATGIKGVNERGMEAVLRRITEEIKAVERKSRELIKADPVLARLHKLITSVKGVADITAIAIIVATNEFRKFRTARKFACHAGCAPFPHSSGTSVSGRSKVSHKADKRLKSLLHQCAVAAISSKGDLRDYYLRKQAEGKHKLLVINAVKGKLIQRIYACVRDGRIWTPIPPQPPAKPD

SEQ ID NO: 67936 - protein, 338 aa, unidentified
MKLYGGLDLHANNSVVVLLDEQDQVVYQKRVPNELALVLEALAPYQPDIHGLVVESTYNWYWLVDGLMAAGYIVHLANTAAIQAYNGLKYTDDHSDARWLAHLLRLGLLPTGYIYPKADRAVRDLMRKRSQLVRQRTTNLLGMQNLFARNTGVGLNSNRLKQLTPDAVQQLVPDPDLALAVLSNLAVVRCLDEHIAALERVVKARVHLRPAFHPLLSVDGIGLILALTIMLETGEIRRFPTVGDFASYCRCVGSTQLSNGKCKGHGNTNNGNKYLAWAFVEAAHFAIRYNAQIKRFYQRKMAKTHRMVALKAVAHKLARACYHVMRDQAPFDVQRAFA

SEQ ID NO: 67937 - protein, 419 aa, unidentified
MFSDTALIVGVDVHQHTNVALVMDGGGDVVDTHQHFANNGTGTDRFVRYLARMAETGGFATIHIAAEATNNFWLPFFCQLERQPPPSVSPVTLYPFNPRLVHNFKKALGEEEKTDLRDAGAIAERLRFGKKLPRPFAMEEMYLPLRTLTRYRYHLVQELVRVKSYCLSLIYLKATDYTDKKKRPFSDTFGATSQAVLRQFATLDEIAAMPFDELVEWLDVKGKRRFPNPEENARKLQQVATDAYHLPNEWAAVIHDIIALNFRHIDLLENLIDRVETAIAQQMESIPHTLETIPGIGPVFAAGIIAEIGDLARFEYDEAKVAGYAGLRWPRSQSDEFEADDRPMSRSGNRFLRYYFCEAAQAVRLHAPEYRDYYNRKYKEVRKHQHKRAVVLTARKLVRLVVRLLTTNEPYRLRQSSIE

SEQ ID NO: 67938 - protein, 358 aa, unidentified
MNSLAGSVDAVIGVDTHRDTLAAAIVTPVGAVLASTQAGADAHGYRVLLAFAQARAPGRRCWAVEGAGSYGAGLAAFLGENGEHIVEVCRPKRPPRAGARKSDAIDAVRAAREALSTEHLISPRRRGEREALRVLMSTRSSAVTARTRAANHLKALIVSAPEILRAELRGKTSDAQISYCANLRSRSAQSIEHRMTVTALRSTASRILALRAEADDLEREITQLVTAAQPQLLALPGVGAISAAQILISWSHTGRFRSEAAFAAFSGAAPIPASSGLTTRHRLSRSGDRQLNRALHTIALTRARVDPDTRAYLTRRTAEGKTTREARRCLKRVIARQIFRHLQGKPDPDLQPSPVDRT

SEQ ID NO: 67939 - protein, 311 aa, unidentified
MQEIFIGVDVSMDWLDIHHPCPGHRRGAQQIANGGRELTAFARRAARAGAWVIFEATGGYDRALCEALEQAGARFSRVNPARARDFARAIGVIGKTDRVDAQMLALMGERLRPALTEPVPPARRALQAQVTRRFQLVEMRKQEATRLKQTADSGACADIRSHIALLGRRIARFDARIETLTTEDEAFARIERRLRTAPGIGPVVAATLIAELPELGSLDRRRIAALAGLAPVARDSGKRNPPRAIAGGRPVLRRMLYLAALQASRRHPVFMAFRARLQNQGKSPKAAIIAVARKLLTILNAMLRSQTDFVT

SEQ ID NO: 67940 - protein, 374 aa, unidentified
MSKIARIGIDTSKGSFELHGVNEKDEVVLRRTVRRRQFLEFMAKLEPTVIGLEACGASHHWARELRRLGHRVMLIPPQAVKPYVSPGRKNDKNDAEAICEAMSRPRVRARLVPVKSVEQSASQMLMGVRDSLLKRRTQLCNTIRGHAAEFGLVAAKGLDKIEPLLVRIAGDDGLPALAREMFADLGQEHAELSKRIAQIDRKLAAFHRSNELSRRLMEIPIVGPVGAGLLITRIINPRGFRSGRLCAAWVGLTPKNHSTGGKQRLGGITRAGDESLRAVLVSGATAYIQQVRRGRIVPSPWLAALLERKPPKLAAVALANKTIRIAWKLMTSGERYDPTHRVDREGLGASLYGGLRAEPLAPSPTGGDSHAVAA

SEQ ID NO: 67941 - protein, 454 aa, unidentified
MAQRKKRSKKFQVTDLPPHLQHVNLNAAGIDIGSDQHWVAVPEGRDKVSVREFAAFTTDLLALADWLAQCGITTVAMEATGVYWIPLFELLEHRGFEVKLVDARRVKNVPGRKSDVLDCQWLQQLHTFGLLAGAFRPADQLCILRGYMRQREMLVQASSMHIQHMQKALQQMNLLLHNVVSDITGVTGMKILKAIIAGERNPKVLAKHRDARCRHSAATIAKSLVGNYREEHLFALTQAVSLYEIYQAKIGDCEAAVARHLSSQPQRTDDEPPTSQKRSQAKDFMRAEVDMRAQLFKLTGVDLFSIAGLGADTLLTLAGEVGFDMTPWKSEKHFTSWLAVCPGTKKSGGKILNSKTRRSSNRAAAAFRIAASTLLRSKTALGAFYRRLRARIGAPAAITATARKIAVLYYSLLKNGTTYVETGQAAYEQKYQQRRFKGMQKQALAMGYQLVPIN

SEQ ID NO: 67942 - protein, 317 aa, unidentified
MKTLPQSIPVVHLGVDVAKSELVVDLLGTIRAFANDTKGIAALLKAAVRTAPAVHLVCEATAGYERPLAAAAVLAGIPVSVVQPQRVRSFARSLGRLAKSDPLDAAMLSRFGTHATPVPMEPKDAIRQQLDELVRTRAELVESLQRELNRAGHHVLPAVARIHKDLAARYRKHIAALDAAAAKLIASSPELAKADELLRDVAGVGDQTSRVLLALLPELGRTGRRGIAALAGLAPYDHDSGKTKGKRFIQGGRGRVRKVLHMAALVAARCNPVLKVVYLRLRQAGKPFKVALVAVARKLLIHLNSIMEKYYRNPLAA

SEQ ID NO: 67943 - protein, 355 aa, unidentified
MNDAKYIGMDVHTATISAAVRDSSGNLVMEATLETKAETILEFVHGLRGSLHVSFEEGTCAAWLHDLLKPHVTEVLVCDSRKNALLRVGNKNDREDARKLSELLFLNKLHPVYHGETGIRTLKELARSYLTITRDLTRVMNRLKAIYRGWGIACAGQQVYAPRYRAEWLAKITEAGVRRRAEIYYQQFDALAALRQEVRRELLAESRKHPAMRLLRQIPSIGPIRAALLIALMQTPHRFRTKRQLWAYCGLALRTYDSGEYRFVGGQLKRSKKAVTIRGLNKNHNHDLKNIFKGAATRAAATAGPLQNFYEARIANGMKPPMARLTLARKIAAITLLVWKKGVRFDAEHLKQQAA

SEQ ID NO: 67944 - protein, 354 aa, unidentified
MIIVGCDYHPSFQQIAFVDTETGELKERGLTHREGAEEFYRALAATGQQVRVGMEASGHARWFERLLAELQFELWMGDASEIRRKRGRKQKTDRQDAQHILSLLLKDDFPPIWVPNWENRDLRQLLWHRHRMVQARTRIMNQLQAVALNEGLLCRKKLWRERGRRQLEAFPLAPWASRRRHDLLELLDRLNPTITELSQAIEREVEKCPAAQQLMTHPGVGPLTALAFVLIIGDATRFQCGKQVASYLGLVPLEDSSGNRRRLGHITKQGSSILRFLLVEAAQVTVRSLPEWRRKYAHLMMRRGRKTAKVAMARRLAVRLYWMMRQGWNYQQRSKLGSHAGQPGNRDGVPSNIE

SEQ ID NO: 67945 - protein, 376 aa, unidentified
MERGSLMLNTTTFVGLDVHARSIKAVALDAMTGEVRSATFAYDAAAVAEWVRSLDPAAKCVYESGVTGFDLQKRLAALDVDCVVGAVSKMIKPSADRKRKNDRNDAEFLARMLSVGNVVEVWVPDDGCEAARDLSRALDDAREDLKRCKQRLSKFLLRHGYVFSETTPTGRRKGNWTAAHWAWIKSISFPEKADDDVLAYYVDAVRQAMEDKARLERLVEAEASKPRWKRRVDSVRCLKGIDVTSAADLVFEAGEFSRFKSARSFAAWLGLTPSERSSGESVRQGGITKAGNKHLRRVLVESAWHYLGCSPHSKDLAKGQVPDPAARRHAAKGVRRLVERRRAMLERGVHKNKANVATARELACWCWAVGRMAENG

SEQ ID NO: 67946 - protein, 351 aa, unidentified
MPRTSAVHAVTTLGIDMGKNTLHMIGLDTRGGIVLREKVSRGRITSRLANLPPCLIGIEAGMATHYVARELAALGHDVKQVPPTYAKPFRQGHKNDFRDAHAVAEAVQRPTTRFVPAKTNEQLDLQALHRVRSRLVSERTAVINQIRGFLLERGIIVRQGLRFLRQALPDILAKRTDVLSPRMVRMVADLASDWRQLDERIEAVTDEIKTLAKSDDSCRRVMTVPGIGPIISSAMVAAIGSGAAFARGRDFSAWIGLVPKQMSTGDRTILGRISKRGNSYLRTLFMQAARVILLRRASWPKHGFGIWLARAAQRLHPNVLAAALANKLARIAWTVLVQQRGYEVRITKATA

SEQ ID NO: 67947 - protein, 456 aa, unidentified
MDQYYLGGDVSKGYADFVILNANKHPVEENFQLDDTFEGHCQLFGKLQEFYENHPDSKIYAAVESTGGYENNWYNSLIKFQAVLNLETARLNPLGVNANSKAGMKRNVTDKISARNVAEFLVAHPEKVSYQRQDYLASLRKQWTFIKMLTKQSTQLANQLESLLYSANPELLAYCREGMPKWVLKLLTCYPTAAKLSRARISSVARIPYVSADRARELVAITRKSVASATDEVTEQLIVATVKQIIHLQKTIQAQTKIMAKDCSLPEVALLGTFIGISEFSAIGLMLEIQSVERFPSVKKLASYFGLHPVFKVSGDGSSAIHMSKQGRKEPRQILFMVALTAIRYNPLIQEIYQERVQKGMEKMAAIGLCMHKILRVIYGMLKHNKAFDPEIDRKNRVKTGENDKRIRPDKNRRYQEFDPKAPISRRQKMARRERELSQSDNVTKNGIVVPVPVST

SEQ ID NO: 67948 - protein, 404 aa, unidentified
MIFVGIDWSEHHHDVCVVDEQGTQLAKVRVPEGMQGVVKLHETIADHAEEPEEVIVGIEIDRGLLVGALVAAGYRVFAINPLSVDRYRDRHATSGAKSDPGDAKVLADLVRTDRHNHRPVAGDSELAEEIKLIARTHQSFVWERQRHVNRLRSALREFYPQALEAFGTELASADAIAVLKIVPTPELGRRLSRSKIAAALRRTGRQRNLEPRAEQIQRALRSEQLRASEGLERTYGVIVSSLTGLIEGLNTQIAGLQDDLERSFEQHPSAEILRSLPGLGIVLGARVLGEFGDDPTRYADARARRNYAGTSPITKASGTRRVVLARFARNERLFDACFLWAFASLTKSPGARRYYDLQRARGKTHNQALRALANRLVGILHGCLRQGELYREDVAWRGRESLAA

SEQ ID NO: 67949 - protein, 364 aa, unidentified
MKISKKQGSVTAVPSQPLPVVGVDLGDRYSYYCMLSNRGECLEEGRIQTTVAALEKHFGSEPAMRIALETGTHSPWVSRLLKSFGHEVIVANPRKIPTLTGSKSKNDRNDAEQLARMAAFDPKLLHPIEHRNLERQQDLNLIHTRSVLVRARTMLVNSARGLVKSAGGRLPGCSPEVFAEKASAAVPQELKAACEPLLKQIAQMNRTLEAMDKQIASLAKKYPEIALLRTAPGVGPVVAGCYVLTVGHPEAMETNRQAGAYVGLRPSQKQSGACDPQCRITKTGNSYLRSLLVQSAQYILGRFGPDSELRRWGLKLAASGGKRGKKRAIVAVARKLAVILLSMWRNGKKFEPFPQSATQLAKAV

SEQ ID NO: 67950 - protein, 338 aa, unidentified
MHITTLGIDVAKNVFQLHGVDARGRAVLSRRVTRSQLVHAVASLPPCVIGMEACGSAHHWGRAFEQLGHTVKLMHPKYVKPYVKTNKNDGRDAEAICEAVSRPTMRFVSIKTVEQADLQAVHRTRSLFVKHRTAVINQIRGLLAEYGLVVAPSPEKVRPALVRVLDDAESGLTACARETFSELYAQLTELDSRIERVTHRVERVSRAHPVCQKLAAVPGIGPLTATALVATVGRPQAFRNGRHLAAWLGLVPRQYSSGGKERLGGISKRGSRYVRTLLIHGARAVVQRAERRTDTQGRWLCALKHRKGTHVAAVALANKNARVIWALLAHDEEYRQPA

SEQ ID NO: 67951 - protein, 344 aa, unidentified
MTYYAGLDVSLRTVNLCVINDDGELVAETKLASDVQDIVAYLDELELEIASVGLEAGTLTQYLTYGLQAAGFEVVCMEARQVKGALSAMRNKTDKHDARGIAQILRSGWYSRVHVKSMQSHHIRMLLSSRKAVLSKCVDLENEVRGLFKIFGIKLPPKLGHGAFDVAVRDIIEVDKTLSHALLPLLDARLVLYQTFRILDNRTRKMAHADPVCVRLMSVPGVGFITALTFKAGVDDPHRFKRSRTVGAHFGLTPRRFQSGEMDIEGHISKCGDADVRCALYTAANAMLTRSRRWSPLKAWGMKLAKTRGHRKAVIAVARKLAVILHRVWIDDTQFRWGTEGVRS

SEQ ID NO: 67952 - protein, 403 aa, unidentified
MNSVGIDISKGRSTVAVMRPFGEVVISPFEVRHTDSELSELARQLKSLNGETRVVMEATGNYHAPVAKLLHDAGLYVSVINAKLVHGYGNNDLRRIKTDRKDAVKLANYGLDRWLTLPRYVPEEDTRLLLKNCYRQYRQYSKVQTVLKNNLISLLDTVFPNVNRLFSSPARADGSEKWVDFVAEFWHCGCICERSKKAFVSKYQKWCKKHGYNFGEEKACAIYAEASGYIGVMPKSETTKLLVEQAVAQLRATSTALAALKQEMQTLASMLPEYPVVMDLFGVGPTLGPQLIAEIGDVRRFYSKKALVAYAGLDAPPNDSGDVTGRHKSMSKIGASSLRRTLFLVMSVYLQNAPLDEPVYQFMDRKRAEGKPYRVYMMASANKFLRIYYATVKAYLESLEHTA

SEQ ID NO: 67953 - protein, 336 aa, unidentified
MLDIEGKIVGERSLPNGGAGLAALCDWLLATTGATPAEIAVAIEVPHGPIVETLLERGFLVYTINPKQVDRFRDRFSMAGANDDRFDAHVMADVLRTDPIIVELREWLRIGDELKQEQTRLANSVRVQLWRYYPPALKLSDSVAVDWFLDLWELVPTPARAAEITEQAIGNLLKAHRVRRVDAATALEILRETPITVAAGTTEAATAHIRAVADRLKLVNLQIREVDRQLDVLCDMLAGEPGIPDAPSDATILKSCPGIGRIVVSTLISEASEILKRRDYQALRPLCGVAPVTRRSGKAKVVLMRRACHNRLRNAVYHWARGPSHMTKLVVSATPP

SEQ ID NO: 67954 - protein, 342 aa, unidentified
MEYYAGIDVSLECSSVCVVDASGKIVREAKVASEPQALIGWFASLGFGLERIGLEAGPLSQWLFAAMKAAGLAVELLETRHVRKAFEAMPVKSDRNDARGIAQLMRLGWFRPVHCKSTSAQETRSLLTARKLVQSKLIDVENSLRGILRGFGLKVGKTTKQTFAGRIEELVAGHPHLQMIAKALLAVRAVLRTEFAAFEKQTRRMVRSDMQARLLTSVPAVGPIVALTYVSAIDDPARFKSSKQAGAHFGLTPKKHQSGETDYTGRISKIGDAAVRTALYEAANVMLTKPVKGCSQLKSWAMRIKNRAGMNKAKVALARRLAVIMHRMLADGTTFNAAAAAA

SEQ ID NO: 67955 - protein, 374 aa, unidentified
MSMAIKYVGLDVSKDKIVLAIANEGRSEPRYWGSIDHTKEAVRKLVNQLTKEGDVKLDVCYEAGPTGFDLQRWFLELFVECSVVAPTTLTRNTRIKTDKRDAIRLAQLWRARELTPVYIPSVEDEALRDLVRAREDAVEDQNRSRQRLTKFLLRHQRLLPKDKKPWSFAHEQWLDTLRFEKECEDIVFQEYRNCIRECGQRILRYEKEMEKQATSSSQAPMIQAFQALRGVALITATTLAAELGDISGRFVHPGQLMSYSGLVPSEKSSGGSRWQGGITKAGNAHIRRVLIEAAWNYRHSPAIRRGLRERLDGLSPTIQDISWQAQKRLHKKYKNLSAKGKQRGTIVTAIARELLGFIWAIAKEMEKQKQVSCS

SEQ ID NO: 67956 - protein, 356 aa, unidentified
MINATPSDVIIGVDTHKEVHAAVAISGSGAHLATTTVPATSKGYGALEAWAKSMGPVHSFGIEGTGSYGAGLSRFLRERGHAVFEVNRPNRQLRYQRGKSDAVDAESAARAVLAGQAAGRPKSGTGTVEMIRHLKIARDTAVKARTQAMQTLKAIIVGSPDVLREQLDQVSGKMTLVRRLAALRPGPLTSRLASAKASLRAIARRWLMLDTEIKQHDAHLDALTAARAPDLLEAHGMATGTAAEMLLLVGDNPERISSEAAFAKLCGACPIPASSGKTNRHRLNRGGNRQANAALYRVVIVRMRGHQPTLDYVRRRTAEGKSKSDIIRCLKRYVAREIFGYLCTKADLTNATANSP

SEQ ID NO: 67957 - protein, 386 aa, unidentified
MFIYMNRNRTVAGLDVHKDSVYLCIMGYNESVIFQKTYGVLTTELRQMRDDMLCHGVTECAMESTAVYWVPVWNELCGSMELKLVNPYFIKQLPGRKSDVKDAQWIAECVLKNLIKGSFVPEPVVQDMRKLNRRIMDLNEDMTYNCNKLDAALQRCGFRLSNYVSSTTSKSYQSVLQAIIGGQTCPEELVKLVHGRTLNKHGRDIVKDAVTASFSKTDLTVFRQLKETIDLVGRQIEECQKELTALCKEHFPKQYERLQTIPGVKERAATAIIAETGIDMKMFATAACLVGWCGLKPRNDVSNGHYKSRKVTHGNRYLRQILIEIAWAASRTRNCFFSNFSYVQTTVKKKSKMKIQVAIARKILVAVWHMLSKEEDFIGNYSAMQG

SEQ ID NO: 67958 - protein, 429 aa, unidentified
MIMGFTKPIEHFNLQRKKVITMNTLYVGIDVSSKSNVVYLMLPNGDKHSNFSVANSHEGSTQLVKRILSVLTSHSLDTVLIGLEATSVYGDNLVYFLREDATLAPFNRKIHVLNPKQVKKFHDAYNDLPKNDYVDSFVIADCLRFGRINKEVYMGDYRYKALQNLTRARFFAVQNLVKEKQRFMNVLFKKYSTMTQEKVFSDTFSTTALAVYDEFESAEALANMDLHELTDFIMEKGKNRFPDPDAVAKAIQKAARSSYRLPKTMNDSVNQVLSISITSMKALESQIKEFDKAIKAQMELLPNVLISIPGIGPVYSAGIMAEIGEIDRFNSQAALAKYAGLAWKQHQSGGFEAEVTRLIPSGNRFLKYYLCEAAFSLVRCDKEYSDFYRLKYKEVNRCQHKRALALTARKFVRLVFRLLKDNRLYCPAK

SEQ ID NO: 67959 - protein, 428 aa, unidentified
MNFTQNKKLNQVTEDMLLIGTDIGENTHFARACDWRGVEISRRAFKFKNSREGFETFLAWTVEMQKKGGKKKLLVGCEPTGCYWFTFQHYLKKHGIRLVLVNPFSVNRSKELDDNSPEKDDQKDPKTIVGLMKDGRFCDPYVPEGIYAEIREAQNCRDQIMKQHVRLSNQIQGWLQEYFPEYLGCYKKFDSESGMLVLRHAALPKDIVALGAEGINQIWRDAKLRAVGMKRAQTLVEAARASVGIEGGTGARMTMQILVEDYRRKQKQLEMVDKLLEEAVMKVPNVEKLLAIKGVGLSTVAGFIAEVGDIGRFTDPKQIQKIAGLEIVKNSSGKKKGRPRISKRGRVRLRRVLYEAAGSLVSWDEAFHEVFLYYRKREKHPLGRIQARVAVACKVIRVFYVILKTGCDYDQEKLRSDIRRPKALEEAA

SEQ ID NO: 67960 - protein, 350 aa, unidentified
MREPAVEQITRIGMDTSKNVFQLHGVDAAERPVLRKRLTRREMIRFFEKLQPTVVAIEACGSAHYWARLLGSFGHEVKLIAPQLAKPYVKRGKNDAADAEALCEAMNRPSMRFVPAKDAEQQAALMLVGMRTRLIKKRTQLANAIRGFAAEFGIAAASGMCRIEPLRERIAAEETIPELARDLFALHRQEYAQLQHEIERIEAKVMEWHRNDECSQRLARIPGVGPIGASLLKMKAPDPRMFKSGRDFAAWIGLTPRDHSTAGKLRLGSITRAGDELLRSTLVVGANAVVQHARRTGGRNASPWLLGLLERNKPKLVAVALANKIARIAWKLMVSGDQYRKADTSLAVAA

SEQ ID NO: 67961 - protein, 364 aa, unidentified
MRILSCDWATKKALKIYDSQTKKVKTIQNSIDEFEKFLKTLGGSAEREVNNSVFELPSSKVTFLFEHGGGDTFKIMAFRTGHQVLQVPGKKINDYRESLGKEKTDEGDAKLIYDYYKEASTDYEVNKNSEHPLSRLKDNKAGSAKEKMRNSKAILPSFFSLFTEQNADIAEIKILFREHEDLKKDMVREKLKKIAFKRKFEIAQVADDRIKKMLFHKDAAIVAKEKEVEQIKKILEKKVKQFRIWDNYLEGVKGIGPVIAAGLIGELGGRQFDSDESLKHYAGMLPRNDSHNYNRYVKVVLFQFAEGIIKQRTPVWRDLYDSMKEFYRNKHADWRPGKIDAYAKKFVETKFLLEFWKEWNKFEE

SEQ ID NO: 67962 - protein, 337 aa, unidentified
MKSYLFIGIDISKSTLDVCILSPSDITNIHYHSFCNSSKGFMQLMRWLKQKSEGVGVEDWRICMENTGIYSLELNCFLNEKSIWQSMENALQIKRSMGVVRGKTDKADSKTIALYAYRFIDKLKPYVLPTPTLLRLRALFSQRERLVSMHSQLLLACQSIKGYSKELVKDIQVQNEMLLENLAVQIKATNKSINECLQQDKDLQHKSKLIQSVPGIGQQTAAYLLIVSQGMKNFATARQFACYSGCAPFAHQSGVSIRGKTKVHFIANRKMKMLLHMAALNAITFNDELKTYYQRKVAEGKNPMSVLNAVRFKLICRIFSVIKRNEKFKKEYGKIAA

SEQ ID NO: 67963 - protein, 416 aa, unidentified
MNAVGIDVSSRKSTVAVLRPLGEVVCLPFDVTHDIAGLASLAEKLKAIDGETRVVMEHTGRYYEAVAKALHEAGFFVCAVNPLLIKEYGANSLRRVKTDKADAIKIARYALDNWADLRDFTPMDAIRYDLKTLNRQFQLASKQRTASANNLIALLEQSFPGIRKCFDSPVRSDGTQKWVDFAHSFWHVDCVRKQPFAAFCERYRKWCKLHAYFFKLRNAEKVYALAKSAVVLTPKAKVVKVLVQEAANQLISISRSVEVYRAEMDRLAAMLPEYPVVMAMYGVGKSYGPQLMAEIGDVRRFERKQALVAFAGIDPMPNQSGDKNVRSNKSSKRGSPYLRKTLFNVIRTYLQCAPQDEPVFQFLNRKQAEGKPFYVYMLAAANKFLRRYYAKLRDYFASLDTLQPAAPIPTILKAAL

SEQ ID NO: 67964 - protein, 352 aa, unidentified
MTKITTIGLDLAKKVLQVHGVDVEGKVVVARQLRRKEVLAFFAKLSPCLVGMEACGGAHYWAREITKLGHTVKLMPPKYVKAYVKRGKTDAGDASAICEAVTRPSMTFVPVKSIEQQGLSMLHSVRSQLVSQRTQLVNAVRGHLSELGIVAERGVLGLAELAETVRDKSDERLPVAARSALLVMVNQIETLGAEITRVDTALRKENKATDLGRRLETIPSVGPVIASAFRARVTKPELFKNGRHLAAWIGIVPENDSTGGKPKQKGLSKKGDRYLRALLVSGAMAVVRQARTHPDKHAWVASLLARMSAKQAAIALANKNARIAWVIMVRGGVYEAGHRAPAYRDAALSAVA

SEQ ID NO: 67965 - protein, 444 aa, unidentified
MTKSYYIGLDVHKETIAIAYAAGGTRDDSVYHGPCGGSVLAAERALRKLAEKLGVEFTSLKVCYEAGPTGFVLARRLIRYGLDCVLMSPSKTERKPNEKIKTDKRDACKIARLFRNGDITKVRIPPALDEAVRDACRARTDASDDLSRAKQRLNAFLLRNGFNYSGKSKWTPAHMRYLRELVMPHDAHKFVLEEYMQAIDTGIERVARLVDRMKQLLEGWEWEQVVRALMACKGFQEVAAMTVISELGDLRRFSHPRMLMSFLGLVPGENSSGPKHRQGSITKCGNSHCRWMLVECAQHFRKAPKVGSRLTTRQQGQSKEVKELSWRMQNRLHKRYVKLKARGKNENKAIVAIVAIARELSAFIWELQVKLNLPIPGTETPVASGKGTSAKHGAAAPNPAERTPARPRLISPPNPHPGASPLPSPRGGGGRSLKKPPHTTDTLP

SEQ ID NO: 67966 - protein, 478 aa, unidentified
MVTARAAGLNRKQRKELARRLRVEDPGLEVMHPHAAGIDVGNSAHYVAVRPDRDPNSVRRFECFTADLHRLADWLQQCGVTTVAMQSTGVYWIPLYEILDARGLEVYLVNARHTKNLPGRKSDVQESQWLLKLHTYGLLRNSFHPPTEIRVMRTYWRQRGDHVHAVSTCIQRMQKALTQMNIQLANVISDLSGWTGQRIVRAILAGERDPDKLAALSHPGIHATRDTIAKSLEGTWQPDLLFVLQQEVAMYDAYQERIAECDQALEQHLKGVGDKAAERAADGEPSPTTPRKGLRSGPKRRRKAGSHAPQFDLGRELHRISGVDLTRIDGIDVGVAQTVISEVGVDMTRWKTEAHFASWLGLCTDNRISGGKVIRKGTRHVVNRAATALRLAATTLLRSQSYLGAQYRRLRARLGAPKAITAMAHKLARLVYRMLQWGHEYVDKGLQYYEQRHREQQVQLLKKRAAKLGLQIVEPDAA

SEQ ID NO: 67967 - protein, 424 aa, unidentified
MKVTFQTCCGVDVHKSFLVATIIKTSSGIEPSYQKRRFSTFNNSILEFKKWLLENECLYVCMESTGKYWIPVFNLLEDEINVTIANPKWVKSVKGNKDDTKDSKWIGDLFRLGLVRGSYIPCKKIRILREFTRYRYKLVSCRSSEKNRYQNALTVCNVALDSVVSDIFGKSSTSIIDYLLEQSGTSIDHEVIASKLLKHLKAKEDAVIESIEGYQMTDSQKYRMHLVRAHMDYITAATNDVDSEIESLIAFDPDYENAVELLCTIPGVKYDSAITIISEIGIDMSQFCSSKRLCCWAGLTPGSNESAGKKKSVRITRAGVYLKPALVQCAHAAVKSDKSPYYKKKYESLVKRRGKKRAIIAIARMILTAIFQMLTTGETWNPCDLYKIDMPEALLEKQKQKAIKQAQKLLIREGLLPPTEPIAS

SEQ ID NO: 67968 - protein, 392 aa, unidentified
MIDVGIDIEKDKHDCFIINSDGEILFHTFTISNNHEGFNTLFQRIESVSDDFTKVKVGLEATGHYSYNLLGFLLDKGLPTYVINPLHTNLYRKSLTLRKTKTDKVDSRTIATMIMSDMNLKSYSDISYHNEELKSLTRYRFDKVKERAKLKTSVSRLVNILFPELEELVPSLHLSSVYALLSEFPGAAQIAASHLTKLSNLLSQASKGHYGKETAILFRETARSSIGSVMPAKSLELKHTIKLIQELTAEIDEIEAAIKQIMDEEIHSPILTIPGISYRMGAMILAEIGDFSRFDSADQILAYAGMSPSTYQSGQLDNCHSHMEKRGSRYLRYALYNATKYVCHWDNSFGAYLQKKRSEGKHYNVALSHAAKKLVRLIFAMEKSGRTYQPEA

SEQ ID NO: 67969 - protein, 348 aa, unidentified
MNVTTYGLDLAKRVFQVHWVEPDTGELKRKALARAEVAAFFARRAPGVVAMESCGSAHHWGRVLSGLGHQVRLIAAQFVRPFVKTNKTDAADAEAIWEAVQRPGMRFVALKSEEQQAVLSLHRMRAQQVKIRAMQAYQVRSLLYEFGVVAPKGFAALKAKAATVLAEPTGCPVPELARVELLSQLEGLQSLTARIEALERRIGSWQRREAECERLAAIPGVGRLTATAVVATIADARSFRSGREFAAFLGLVPRQSGTGGRVKMLGISKRGDPYLRTLLIHGARSVMFTQSRAERVMDPWLKELLARRPKNVAIVALANKMARTIWALLAHGRSFDPNWGRTAIVALA

SEQ ID NO: 67970 - protein, 411 aa, unidentified
MQTMIARCCGLDVHKAQLTACVRLLVDGVVSEVIETFGTTTSDLLALRDWLKAHDVTHVAMESTGVYWKCVYYMLEDEFELLLVNATNIKHVPGRKTDTIDAQWIAQLLACGLLRGSLVPPKPIRELRDLTRYRKALIYERSRAVNRLHKLLEDAGVKLSCVATDVMGVSGRAMMRALIDGQADADALAELAKGKLRNKLPELRKALQGSFRAHHSFLLERMLAHIAGLEDDITAISQRVEEQLAPFEKAVELLCTIPGVQQRTAEVIIAETGGDMSAFPSAKHLASWAGVCPGQRESAGKRKSAKIRKGSPWLRATLIESARAAARTKDSYLSERYRQLARRRGDKKAIIAIAHEILTATWHMLSTGELYRETGPAPLREHAAQRARNRAIKQLERLGHKVILEPLPQAA

SEQ ID NO: 67971 - protein, 334 aa, unidentified
MKSPIAIAAVAALGIDIAKLKFDVCLIKPNGKAKHKVFVNTRHGFEQLIRWLDSHQVTNLHACLEATGTYGEPLALFLFEAGRLVSLVNPAAVRAFANAGLSRTKTDKADAELIARFCLAQQPKAWQPPAPEVRQLQALVRRLESLVEMRVAEENRLSSGVSTEAVRQSLEEHIAYLIEQIKQTEALIRQHINHHPDLKEQSDLLDSIPGIGETTAALLLAEIVNIKQYTSARQVAAYAGLVPRERRSGTSVRGRVCLSKIGNARLRKALYFPAITALRCSDFFKAWAEPLRTRGKSKMSVIGAAMRKLIHLAYGVIKTGKPFDPNWAKAIEIA

SEQ ID NO: 67972 - protein, 351 aa, unidentified
MNTQITATPKLFIGIDIHKRSWKVHCATDLSSGKTFSMPPRAELLYEYVTKHYPGYDVSSAYEAGCCGYHAHRCFVSYGWRSLVVNPADIFRRGKERHTKTDRIDAQLIARELKDGRLNGICVPDKCREQLRSLFRRRNDLVKDMRQIKSYIKMQLLYYGIGIPVDLDNDHWSHKFRDWLDDLDFEYDAGKEVLRSRMRSFRFIDQEFRDVSTLLRRYTKIHFKKDYMLLRSIPGIGPIVASGILSELGDLRRFKNIKHLAGYVGLAPGIYQSGDTIRHTGVSMRAHRLIRSYFIEASWQAIRTDPIMQGYYRKHHGKNVKSVIVKVARKLLSRTLAVIKTDTPYVIGVLE

SEQ ID NO: 67973 - protein, 370 aa, unidentified
MNGSIFVGLDVHKATISVAVAEAMRGGEVRNLGIIPNRGDQIDKLAKKLGKGDRQVSFCYEAGPCGYGLHRQLTRLGHNCIVVAPSLIPMKAGDRVKTDRRDAAMLAKLHRSGELTAVWVPDAAHEAMRDLVRARATAMRVLGKARQHLQGFLLRHGRIYAGKKGWTLAYRRWLTTVRFDHPASQIVLQDYIHAVTDAEARVDCLTKRIEELAPQWSMTPFVEAVQAMRGVAFIVAVTVVAEVGAFSRFDNPRQLMAFLGLVPSEHSSGATIRRGGITKAGNALARRALIEGAWTYRMQARVSRKLHDRNERLPQAIRDIAWKAQVRLCARYRRLSAAGKPKVIVTTAIAREMVGFLWAITRQVQLGPAA

SEQ ID NO: 67974 - protein, 433 aa, unidentified
MSKFFNSPTVGIDVSADFSFVAILAPNGDVFKKPFRIKHDVSGFTHLLKEIKKVEEEFNMKTGIFMESTGVYHLSLFHFLNKNFDNTFVINPLVTKCNKNVDIRKVKNDKKDALSIAQIGKFQNIKLSQSVSMDIFPLKSLVREYYKLTDNCSTYKKKLSTDLRVIFPGYKNVFSNVTSNSSLAILNDYPTPEAVLNAPKDIIIDILIKKSKRGLTWAENVYSNLINYANEAIIIGLPLYGFSVKITSTIKIIKTLEDEIKNLLKQIEYLINSPNFSEQIRKNIELINSIPGIGRLTAITIIAEIGDIDGFVKPKHLVAFFGIDSSVNESGKFKGNQNKISKRGTRIGRRALYAAALACIRTNRNGVPINKVLLDYYQVNLNGKKPKVALVAIMHKIINYIFAVLRNQTPFELRDPRIHKQMYLENNSIDYVA

SEQ ID NO: 67975 - protein, 362 aa, unidentified
MNRNTGMNAGQIIGTMGGKQVFGLDIAKHVFQLHTVDMSTGEIANVQIKRAKVLEHFVNKPKSLIAVEACGGAHHWARELTALGHTVRLLHAKIVRPFVSGNKTDATDARAIWLAVQQPGVKFVGIKTAAQQATLTLHRQRELLMKMRTMQTNALRGLLYEFGATFAQGRKALFKDVEQTLEDLSAQLPQMVRDSLREQVARIKAMSDDILTIEKRLGLQLKADPHMQRIAQIPGVGLLTATAAIATMGEASAFKSGREFCAWLGLMPKQTGTGGKVRLGGISKRGDTYLRTLLIHGARSVLAHAKEPGPWLAQIQARRPANVVIVAQAAKMARTIWAVTAKEQSYQRGFQSVRPNASMQAA

SEQ ID NO: 67976 - protein, 345 aa, unidentified
MEHTTIAVDLAKSVFQVAVSSYPGRVDAECRLSRARVGPYFAKRPPAIVVLEACGSAHYWGRELQRLGHTVRLLPPHHVRRYVPRNKTDRTDAKALLEAHRNEDIKPVPIKSVEQQAIASLHRLRARWLATRTARLNTVRGLLREFGITIPVGAQHVGPHVHALSPSADPTSPVPPMVHRMLADAMAEIAGIEGYMATVDQQLRTLATHLPDATLLQSIPGIGPLTATALVALIGDINRFAASRAFASYLGLTPKEDSSAYRRRLGAISKQGDAYLRMLLLHGARSLLWHAKRKAQPTGFQHWALRTQAHRGHNIAAVAVANKLARIVWAVWTQRRPFQDWPADR

SEQ ID NO: 67977 - protein, 349 aa, unidentified
MRCFQPPAETRFYAGVDLHARSLYLVVLDRDGQTRFGRNLPAQPEPFLRAVEPFRDGLLVACECVHPWYWLADTCRDHQIAFVLGHAWAMKAVHGSKTKCDRQDAFAIARLLKGGNFPPAYAYPRERRGLRDLLRARLRLVRQRAELYGHVHTARRQANLPPVSSDVKYKGKRAAITADIADPFVRRRVETDLALLEPLDTAIRRLEAEIEEAAQEHYPAELAVLQSTPGVGPVLSLTILLEIDTIGRFATRQQFCSYARLCGAAQESAGQRTGTGNRKAGNAWLKWAFSEAAVLSAQKDERIGRLLERLASRLGKAKALSALAHKLGRAFYHILHTKEVFDVNRFVRH

SEQ ID NO: 67978 - protein, 391 aa, unidentified
MVCVGIDVAKDKHDCCILDSDGMVRADCFTISNNMDGFKQLLQTIRNCTKKSDKIKVGLEATGHYSYNIPGFLLDNGLPTYVINPLHTNLYRKSLSLRKTKTDRVDARTIATMLLSDVDLKSYTDIAYHNEELKSLTRYRFDKVQECAKLKQSVSRLATILFPELEGLVSSIHGTSIYALLSEYPGAKQISEVHLTKLTNLLTTASKGRYGKEKAIQIREAARASIGSVMPAKSLELKHTIKLIQELASEIDEIEDSIQKIIDELNPPILSIPGMGVNSAAVILAEIGDFSNFSSPDKILAYAGCSPSTYQSGKLTNCYAHMEKRGSRYLRHALYNATKYVCYWNPVFAEYLAKKRAEGKHYNVALSHAMKKLVRLIYALQKSGKTYLTAA

SEQ ID NO: 67979 - protein, 428 aa, unidentified
MKKIKIDYLSTLFVGIDIGSRTNVISALNFDQDFLIRMVPVANAQGGAEQMEEMVAQVLSQHHEFRAVIIGLESTGFYGVHIANYLSTSEKLLAPFSTKVYCLNPNEVKQYKKSFNSLDKNDGIDSFVIADFARVGRIHTEPWRGAQYLALQRLTRHRLHITECIAREKTYMLNNIFLKFSEFAMLNKDEHPFSDKYGATAEAVLTDYLSTEDIVDASVDELVAFISSKSRGRIADPEQTTYLLQKAAQDSYRLDKCLYEPLTVSIGCSFNCISAFEKELKAINAAIQRAVKGLNPTEYQILTSVPGIGPVYASGILAEIGTIKCFKSNDALAKYCGIVWRENQSGEFEAEDTPMNKAGNRYLRYYMIEAAGSVMLHCPEYKAFYDKKFAEVRTHQHKRALALTSRKLIRMLFGLLANGKLYSVEKSR

SEQ ID NO: 67980 - protein, 342 aa, unidentified
MPHYVGLDAGKRSTSICILDNEGVMIAEGEVPTEPAAIMAFLRGRGFRYRRIGIEATGISAWIYEGLARAGMPIILIETRHAHGVLKARRLNKTDRNDARGIADIMRVGIYKAVHMKSQASQEARVALTARSLLTRKRMDIDGSIRGMLLQFGLKIPRHRRKTFEGQVRPLVEKDDLLRTTIELLLDVRRVIVERIKTLDDLVAARAKADPVCRRLMTAPGVGPIVALTFRSAVDIPERFPRSRTVGVHFGITPKTRQSGEDRRLGHISKCGDKSVRTALHLAAKSLLQGKKPSDLATWGREIASKRGYMKGVTAVARRLAVILHRMWMAETDFRYPAAPTI

SEQ ID NO: 67981 - protein, 474 aa, unidentified
MSKSSGNGTTRGDRRRNARRDRLRMLLPRDGAVIGIDLAEDKQAIAVIDHDVRVLARKTVRVKAFRLGEALDWAAGRARAAGFAKVTVACEPTGPRWLQVQRMCAERGLPLVCIQPLMSHIAREQQDFTTHKTDEADCVLIARLAVELHCYIPEELDETWAHLRHLGRRRQQLITAATASAQRIQDFLSVAWPVVTETCARPLESLTWLAAVQAVTSRCGADPGKLAGMGQEAFTALVRSAVPGWGGQKAWGPIAARIFAALTSTEGVVVASRRGLLRRVADELGDLQRTRAQLRAVEADMVAVLDELGLSRLADIPALSAVGAAAILAETGDPRRYDSSSSLVKHAGMSPSDNASGAFYGQAHISRRGRPGLRLAVWRAVWPMLRSNPVMAAKYAAMTSAADDAAQAAGVHDGTLAGSRPASAAAAAARAQRAKARVACAAALLRWIYFIVVHDASWDPAAASGTATCPAEVA

SEQ ID NO: 67982 - protein, 351 aa, unidentified
MMIIGVDYHPSFQTIAFLMEETGECGEQELHHSEGKAEKFYRGLKQRGICVRVGMEATGYSRWFERLLAELGFEVWIGDPAEIKTRRVKKQKTDREDARLLLKLLLENRFPRIWVPDPENRDLRQLLWHRHRLVQMRTRIMNQLQALAMNEGYRWKKKLFSEQGRAQLEKLTLAPWASRRRQELLELLDRMNPTIEELTAAVEREARKRPAVQRLMTHPGVGALTALAFVLIIGTWERFPRGKQIGNYVGMIPSEDSSAGKQRLGHISKQGNSLLRFLLVEAAQAAARVHPDWRRRYIHLAMRRHKSIAKVAMGRRLAIRLYWMWRNGCEYSQSLEFGSYAGQLGIRHGVK

SEQ ID NO: 67983 - protein, 387 aa, unidentified
MLADELDYVVGVDTHRDEHVLVAVAAPTGAVVAREAVGADARGYREALRFAAQYAPGRRAWAIEGTGSYGAGLARLLAGRGETVLELSRTPRAERRLRGKDDSLDAARAALAGETLALPRSGQRREALRLLLLARRSAVDVRREALGQLRGVIVTAPDQLREELRRLPTGRLLERCRRLRRSSSASADELATRLVLRSLAHRIEAATLEAAELEQEILAHVRALTPQLLDEPGVGPIVAAQLIVAWSHRGRVRSEAAFARLAGVAPVPASSGQTQRHRLSRGGDRQLKTELAGRILASKSGLTRVVDRMEEVGLVRRERPEGDRRVILIFITPEGLQALQAARVVHRRGIDEHFVRHLDERDLAALKRIFEKVRDHVRPLRPGRVSG

SEQ ID NO: 67984 - protein, 345 aa, unidentified
MDHFSGLDVSVKETSVCIVDETGKIIREVKVASEPDALLPVLTKPAYHFKRIGLEAGPLSQWLFSALVEAGLPAICVETRHMRAALKAQINKTDRNDARGIAQMMRAGLYRPVHVKTLRSQKLRMLLTHRKLLQSKAIAIENDLRATLRNFGLKVGVVGTVKFEARIKQLVENVPDLVVLVEPLLVVRHALREQIGILHRRLLTIVRDDDVCRRLMTVPGVGPVVALTYRATVDVPARFRNSKAVGAVLGLTPSKYQSGEINRTGAISKCGDEMMRAMLYEAAHIMLVRSTKWSWLKAWAMQIARRRGLKKAVVALARRLAVIMHRIWTDGTEFRWTRGQTTAAT

SEQ ID NO: 67985 - protein, 424 aa, unidentified
MKVTYQTCCGVDVHKSFLVATIVKTSGGIEPSYQKKRFSTFNNSILEFKQWLLDNGCHDVCMESTGKYWVPVFNLLEDEINVVIANPKWVKAVKGNKDDAKDSKWIGDLFRLGLVKGSYIPCKEVRILREYTRYRYKLVSCRSSEKNRYQNALTVCNVALDSVVSDIFGKSSTSIINYLLEQSGTSINHEEIASKLLRSLKSKEDAVIESIEGYQMTDAQKYRMRLVRTHMDYITAEINDVDKMIENMISSNPNFENAVQFLCTIPGVKRDSAITIISEISTDMSQFSSSKRLCCWAGLTPGSNESAGKKKSVRITRAGVYLKPALVQCAHAAVKSDKSPYYKKKYEFLVKRRGKKRAIIAIARMILTAIYQMLSTGEQWNPCDLYKIDMPVALVEKQKAKAIKQAKKLLQREGILPPDEPLAS

SEQ ID NO: 67986 - protein, 337 aa, unidentified
MTIVGCDFHPSYQQVAVLGTETGEVEEHQLAHATADGEPFYRQLARPALVGMEAVGNSQWFVWLLEQLGHDVWIGDAAQIRTSYIRQQKTDRRDAGLILKLSIEGRFPRIWTSSAEMRDHRQLLVHRHRLVQLRTRVKNEWQHLALNQGMQWKRKLWTAEGRVKPEALTLERWTARRRHDLLQLLAMLEGQLESLNQAVAEVAEAYPRVRLLLTQPGVGPVTALAFVLTIGDVRRFSHGKQLSSYLGLIPRERSLGGKQRMGAISKQGNQLLRTLWVEAAQSAVRFDPAFRKEYEHRCHQKHRAVAEVAAARKLAVRLYWMLRTQSPYPDVFAPRAA

SEQ ID NO: 67987 - protein, 445 aa, unidentified
MHYKRLLTFIDGVSSYLSVGLDVGADFTWMSIALPNGSFIGKPFKIVHSDPRSRDLAVAKIKEAQETYFLKSRCFLESTGIYHIPLLCFLRDKGFDCSVINPIITKNSTNINIRKLHNDKFDSKKAALVGLNVSLKTSILPDDSVVDLRNLVRDYYYFKDLQSAVALKLTAELKVSFPAYAKVFSKVTTQSSLKLLSSYPLPEDMLAASKEDIVDIIRSTARFGEAYALRKYDAIIAAAQDAAVFGRALPSNAVRIRLYIDTYQEYQKHLDALLKALHETVEKLQDTLIYDQICLLQSLRGVGFLSAVVLIAEMGDFKLFSSPKKLYAYFGLDPAVKQSGKLNGDKVHMSKRGSSLARRILHMAALNNVKVDKGSGTPVNPVIYDYYTRKCSGKKKTVAMGAVMHKICNIIFAMLRDNKPFEIITPEEHCRRFATEHPDKIRKAA

SEQ ID NO: 67988 - protein, 410 aa, unidentified
MDTLIERCAGLDVHKETVVACVRVPTRGGGREQCVQTFGTTTAQLLALRDWLVAHGVTRVGMESTGVYWKPVYYMLEDAVECWLLNARHLRNVPGRKTDVADAAWICQLVEHGLVRPSFVPPKPIRELRNLTRYRKAQIEERTREAQRLDKVLQDAGIKLSSVASDVLGVSARAMLRALVAGTRDPELLAELARGTLRKKIPALREALHGRFGPHHALLVGTILAKLEFLDEALAQLSAEIEQVIAPFTAEAALLRTIPGVDRRTAEALIAEIGVDMTRFGAAGRLASWAGWCPGNHESAGRQGSGKTRKGSKWLRTYLTEAAKAAAGAKGTYLAAQYARLRGRRGSARATVAVGHSILVAAYYILDRHQPYRDLGPDYFRRRHSREHQMRRLVRQIEALGFRVTLEEAA

SEQ ID NO: 67989 - protein, 334 aa, unidentified
MQNITLIGIDLGKHSFHIHCQDKSGKALLRKKFTRTKLMQFLATCPPSVVVMEACAGAHFMARCISDFWHETKLISPQFVRPFVKSNKNDFVDAEAICEAASRPSMRFVQPRTETQQAMRALHRVRESLIRDKVKTTNQIHGFLLEFGISLPIGDAVIKRLSLVLAEHEIPEYLSRLLVRLHTHYFYLVEQIAELESELSQSINADDTAQRIMTIPGVGPITASLLSSQLGDGKQFSCSRDFAASTGLVPRQYSTGGKSTLLGISKRGDKNLRRLLVQCARSFIMRLERKHGKLAEWVREQLNKKHSNVVTCALANKLARIAWAITTQKKEYQA

SEQ ID NO: 67990 - protein, 480 aa, unidentified
MQILVSRVCGIDVHKDMLAVCVLIYRTGEKPEARYKEFATHQKALSALQHWLSAQKVTHVAMESTGVYWKPVWYALEGHFQLLLANPFQVKALPGKKTDKRDSYWLAELLAHGLIAGSFVPPEKTRALRDLTRYRVKLSEEMNRIQNRIHKVLEDASIKLDTVVSHILGGTGRSIIEGIIAGKESPHQLAERAQGSLRGKRAQLELALYGRVSDHHRFLLKELLEDLQFVEAKILRLDKTLSSSVDWELVTRLCTIPGVDVITAWTLLAELGSDMRVFANSKKVASWAGLCPGNKESGGKRLSGRTRKGNRWLRRGLCQAAWGASRKKDCFLSAFFQRHKAQQGAQKAIIATAHRLLVIAYCILRDGTTYQERGGDFYDQLNAARTRQRLVERLRRLGVQVTISLPVPPVPSASTSIALAPALPAQALAQSADNLPPPSPPVNKRRPGRPCKCAERHIPCTHHRLPLAPTPLATPPVATP

SEQ ID NO: 67991 - protein, 416 aa, unidentified
MNDLIRIGMDTSKSVFVVHGVDAAERPVLRKKLRRRQVIEFFAKLPPTQVGMEACGGAHHWARELGILGHEVKLLPAQRVKPYVARNKNDTADAEGVCEAMSRPRMRFVPVKTSEQQAALMLAGMRDRLVARRTQLSNAIRGYAAEFGLVAAKGLDKVEPLLARIAADATLPALARELFAVLGEEYAQLKPKLGKIEAQLMAWHRQNELSQRLAEIPSVGPTGAALMVMKVTDPQAFRSGRDFAAWLGLTPKDHSTAGKLRLGVITRAGDETLRRVLVLGATAVIQQVRRGRGRPSPWLVALLKRKPPKLAAVALANKTARIAWKLMVSGERYRGALATGAGHDNACCEGASSQPRKARAVLAAIKARPGGAATRRTESATAGIDGGCARRATTTAVGTKKRSAVEQRNESHGHSV

SEQ ID NO: 67992 - protein, 407 aa, unidentified
MKNRVAGLDVHRDTVVGCVEVFDGTEVSVSKDRFATTAKGVRALAEWLANAEVELVVMESTGVYWKPIFYGLENLFDEVWLVNAQHVKNVPGRKTDMSDAEWLADVAAHGMVRASMVPEPEIRALRELTRYRKTQIVARGTEIQRLDKLLQDAGIKLTSVASKVWSKSSRAMIEMLLAGQADPEVLAELAKGRMRSKIPALREALEGRWAHHHNVVAQAIIGHIDFLDATIEELTDEIVEATRPFDPLVELWSTIPGVSTLTAQTMLAEIGADMGRFTDDKALAAWAGLAPASYESAGKRRPAGTRQGDRHLRKALVEAARAAARTKGTFLSERYKRISRRRTANIAAVAVAHSILVAAYHMALHGEVYHELGADYYENRKEPKAKVNRHVKELQAAGYTVTLTPAA

SEQ ID NO: 67993 - protein, 320 aa, unidentified
MVKKKSDSFVGIDVSKELLEVAVHESEYHFGCPNKVTAFANLIAELVDLRPALIVLEATGGLEKPVVNVLRSVGLPVAVVNPRQVRDFARSTGQFAKTDRLDARVIAHFGAAIKPPVRVLKSKEEQELEALRGRREQLVDMLADEKNRRASAPTAKIREAIEKHIGWLEKGLADLDKQLKALIKSSDQWQLKDQIFQSTPGIGAVVSTTFIAELPELGQLSRQALSKLVGVAPLNNDSGKKRGTRHIYGGRARVRRVLYMAAFNAIRWNPLIKEFNARLIARGKPYKVALTACMRKLLAILNTMVRNNTKWISKTETVSA

SEQ ID NO: 67994 - protein, 339 aa, unidentified
MYPFYLGIDLHLKRTYMVLMDAKGEIINKGRISNQEITKYLQEKVPQETYAVLEATRNWPFMYDLLHEHVDKVDLVHAKGVRAIANAAVKTDQIDASVLAHLARMNYIPKAYAASKEMRDLRQLLRHREWMVNQRSKAKNRIHAVLAAYNLISPVTDLFGVAGREYLHEVMEEDLRPSARQVVEDHLAMIDHLIERIRAIEKNISLNERQNHIVNILKSMPGVGRLIALILLAEIGDISRFHSPKALCSWAGLTPRVHSSDAVVQHGHITKEGSRYLRTAMVQAATTACRVSPKWYRVHEHMALRCGRRAARVAVARRLLTVIYYMWKKDQPYQENYGQ

SEQ ID NO: 67995 - protein, 492 aa, unidentified
MKTSRKIQSVYRNQNALIRAVFERAGDDRKVLCVALDYAKRKHLALICDGNGDVLKASFPVENNAAGIAHLIKEISATARHRKIPKDQIFLGGEDEASYVANFTEALRAKGYLVVRVNAYEAKENRENHLASTDTLDLLGIAKTLLSRRARLTGETDAVNPAYHHLREITRCRRTLVRQKTAASNRIHALADQLFPGFLNASKSALTPFTDASLELMKERFSTTEIARRKPASLANLLRRHRVQQPDETASQIILLAREALPPAAHRVATLQRTLAATVDLYVCLQRNALELRADAALTLATTPYVMLTSIPGIGFVLAAGLAGELGDPKRLGKLDSLCAYAGIVPRTHQSGGPDSPAIQGHASPRCNRILKDWTVQSAQKIHLYGPPELKDRITRWNAEGKHGIFAAARHHLRLTSTLVKNEHPYLAPSGRGHRAAPEQVASAAHATWAVLQRKWRAVSGGLDLILDEAHPMGFWRKVMLELHGIDLPERQ

SEQ ID NO: 67996 - protein, 434 aa, unidentified
MMQLQKIRSNVAGIDLGSSHVFVATEQWVRTYRTFTVDLNALRDDLLDLQIESVAMEATGVYWIWIYDLLIEAGMEVYLVNPSSVKMVPGRKSDVQDCQWLARLHAYGLLNPSVVLTGELRQIRQYIRMRENHIEQKSRCINRMQKALVTMNIRLKDVISQVHGVSGMRIIRAILQGERDPEALCALCHWRILQNKREEVIKSLQGIYNLASLFELQQAVEGMEFFQRQIAACDRQLEQHLEECLTHIPKPEQKPKASPKPIRWHRPQVNNLHEKLFHLTGCEASVLPGMTDYTSLKLVGELGTDMSKWPTEKQFVSWLGLAPGKNQSGKQNRRSRKRYTTRASQIFLVAAQSLLRSKYNALGEFGRRIRARRGAKVAVKALARKLALMYYRLHVHGMEYVELGAAKYRQSQLARKRRYIRNQALKLGMKVADM

SEQ ID NO: 67997 - protein, 423 aa, unidentified
MSYRIAGIDVHKKMHALVMTDVSEGGEYTFERCKFGGSPSDLRTMAQWLIDKGVQEVVMESTAQYWRPVWQALEQHWQPECRKLGGAGLLHLAQAESNRARCGRKRDFEDAERLVKRLVAQELILSYVPDAEQRLWRTVSRRKYQLTQDKVRMRNQLEGLLEEAHIKLTSLVSDLFGASGRRMLHGLAEGESDPAVLAGLADSRLRATQEQLCDALGACAHLHQAYRDLVKMSLEELNLMEEHIAKLDKQTAELLKAYQGAVERLAEVPGLGADSAQQIIAQVGPAAAAFESAKNLASWVGICPGREESAEESKSNRSPKGNRTLRRILNQAAHAAVRCQGSIFELTFRRLVPHLGYQQTVWAIGHRICRLIWLILHQGVRYEERGPAVRETVRKRRVARMLRELRSLGYQIDPVQLADGSAR

SEQ ID NO: 67998 - protein, 319 aa, unidentified
MPQQGRIVGIDVSKLKAEACIRSLQLRLSQPSTPAGEQELIAWLSDNRVGLAVMEASGGYERGWAQALRKAGIAVRIVDPKRVRYFAKSAGRLAKNDPIDAEMIAWFAETFATEAPPAPDPDRDGLDRLVTERRMLVRLSAQIGQLGEHQQPRVVETAQRAIIKAIGAQLAKLETAIGAQIQANAVFAARRAIIQSVPGFGAHFVAGAIAWLPELGRISNKAATALVGIAPYNDDSGAHHGERHIKGGRREIRDLLYMATLGAATRHNPVIKAYYQRLRARGKRAKVALVACMRKLIVILNTMLARAQMWNPAGATAIA

SEQ ID NO: 67999 - protein, 435 aa, unidentified
MPERQDVFVGIDVSRRNHQCSFVNNERKPVCKTLKINEDREGFQTLKEKMCAIAHEKGSVRFLIGLEATGHYHQNLVAFLQSIDNLDVRVSCINPVQTKRFIQMLMLREQNDKVDSRAIAEFMCVQRPDQTSKKRSEMRPLRDLSRLRDQLVSQKTAHINQLHALMDQVFPEFEQVFPDIKNEPLAWAVLHCYPCPRNILTAKTSQLMTVQNRKGGRYLGEEKALQLKALATQTIGSSKGEVYVFQIKVLTQNLRSLHQQIEDTEKEIENTVNSMDLPPWKTIPNLGVLTMATLLGDVGDPRLFGTAKKFSSFLGLTPRGKQSGSSVNRKGHISKCGPSHIRQKLYMCVVSALATKKNPLILDVYNRLVSKGKPKNLAIVACMHHLARVIYGVFKYNQPFDPEFIVAKRSLGLPQNGNFSTSIHGINIPRPINKI

SEQ ID NO: 68000 - protein, 373 aa, unidentified
MSEATTAGALFVGVDPAKRTLAAYAVDRAGGGVAGAHFPRTQLGNEALWAWAAAHGDVVRWGVEGASSWGRHIALFLVAQGAEVREVCPNRTGRSDRRGRGKSDRLDAERIARETLAHPDLPAAFKRGPDSEGGLDEGHDLLRVLHRARKSLLQDRQHLLNEAEALLNDLPDEVREPLGDGSAVRPRLGALAHRDRARDAQFKAPIRTRLEILDDYTERIIALDRRDRDYAKRLEGEVTAAGSTLTDLRGIAARSAAAILVETGDPRRFSPETFARFNGTAPIPAATGDGGKPTRWRLNRGGNRRLNAVIYTMAITQLRCHPPARTLYDNARARGHTKAEALRILKRHLSNTIYRHMINDLHPQPKPPATNPT

SEQ ID NO: 68001 - protein, 346 aa, unidentified
MKVLLKQTVGIDVAQNELVVSLGRMDQQISIEVYAYKVFPNTQKGFSSLVSWVNKQTLTNAEVRYVMEATGVYHESLAYYLCTNKKQVSIVLPNKISNYVRTLDIKTITDKSASQAIARFGLERQLEVWQPPLKIFNDLRQLCREREQLVQERTMLKNQLHAERTSATSSEKSIKRTKKRIAMIDKQEKEIMEEIATLIKGDEAIAKKMKVITSIRGIGNLTAVTIIAETNGFELIKNKRQLVSYAGLDVREKTSGTSVKSKPRISKRGNRNLRKVMHFPALAAIRTDENFRYIFLRLASRHGIKMKAIVAIQRKLLELTYILWKSNTSYCPNYHSQSITTETITM

SEQ ID NO: 68002 - protein, 416 aa, unidentified
MTFKIVRFICGGMDVHKNLIVATIGTTDKQTLTTEYIQQSFSTFYSDLIRLKEWFISHDCYDVCMESTGKYWIPIYNVLETELNICLTHPKYVKAIKGKKTDKRDSKWICDLYKCDLVKHSFIPEKEIREMREIARYRCKLVYMRSSERNRYQNCLTVSNIGLASAVSDPFGKTATNIMKELMQSEVIEDDKILKLIHKNCKDKDKILDSLQGYHIESDQRFKMDTVMNHIEYLDKQIQACEAELIKRAYPLRDYFQHITHIKGISALSAILIVSEIGTDMNQFESDKQLINWAGLSPANNESANKKKSVRISKAGQYLKPLLVQCALSSIKDKNSYFGIKYCRIKKRRGHKKAIIAIARMMLVCIYHMILTGEEFNPCDYESLTNPKPKKEPTMTVESALQFLKDSNFDFSSIQL

SEQ ID NO: 68003 - protein, 351 aa, unidentified
MLIIGVDYHPSFQQIAFLVEETGEYGERQLSHSEGEAERFYRDLKQRGVPVRVGMEATGYSRWFERLLAELGYEVWIGDPAEIKAKRVRKPKTDPEDSRLLLKLLLEDRFPRIWLPSPENRDLRQLLWHRHRLVQMRTRIMNQLQALAMNENKCWKGKLWSEAGRAALEKLPLAFWASRRRQELLGLLDRMNPTIDELTAAVEKEAGKRPEALRLMTHPGVGALTALAYVLIIGTPERFACGKQISNYVGLIPSEDSSGGKQRLGHITKQGSSLLRFLLVEAAQAAARCNPHWRRRYRHLAMRRRRNIAKVAMGRRLGVRLYWMWRNGCEYSPSFEFGSHAGKLEIGNGAH

SEQ ID NO: 68004 - protein, 338 aa, unidentified
MKKLSVTYFFGIDVSKKKLDFAFAKGLAFLSHQQIDNNYISIIAFIRAKLKAEKISIAQCCFCMEQTGIYCNHLIRVLLDLGAQFSVSHSAHIKLSFGLTRGKNDKVDAKRIAEFAYRFNDKLKPYKPKRAVVDELDTLCKLRKKLMKMKNQISVPLNELKSFGAEAKHKLYKSNTAKSLEAIALDIKSVTKAIRQLIKSDERLKELDTWIGSVVGVGAVTTPAVIVVTNEFTNGFSAKQMCSFCGVAPFTHQSGSSLNGKNRVSHKANKYLKTLLNMCAMSAIQTNSDLGRFYHRKLSEGKNKMSALNAVRNKIIHRIFAVVAGERKYERKLSLPAS

SEQ ID NO: 68005 - protein, 423 aa, unidentified
MNPITTYQATIGLDWADQKHDLWIHPADGAKPQHLQLEQTPEAIHQWVAQLRERWGSGAVAIAVETSRGPILSALRAYDFIVVYAVNPKGLKDYRAAFCVSGAKDDRTDAYLLEEMLRLHADKLKPLRPDDELTRKLGGLTEARRGLVDQRTEMVNQTHATLKTYYPLAERILGSEMNTLMAAEFLGRWPDLASLQAASSQSLRTFFYKHNCRSAKRIDQRLQAIKEAEPLTTDSAIIEPARALVLARARMLKCLSQSIAQLEAQIQQAMDQHPDAPIFRSFPAAGPALAPRLLAAFGTQRDRFEDADQVAQLYGIAPVVIQSGNSKVVRVRYRCPKFGRQTFHENAACAAKTELWAQSYYQRQRQRHQDKHHQACRALAYKLIRIYFACWKNRTPYRSDTYLAALQKNGSSLYKEITQAPGE

SEQ ID NO: 68006 - protein, 404 aa, unidentified
MIFPEAALRACPGLYDYSIRKNRPVLSDGGPDAVSGLRLSRLFRRSFAPDRRSFSCDKPDSIMDRLSPVTRICKVGFTMENELHFIGIDVAKAKLDVDILRPDGRHRCKKFDNTLSGHEALVRWLRGHDVNRAHVCMESTSTYMEDAAAHLSDAGYTVSIINPALSKAFAQSEGLRSKTDKVDARMLAHFCREKRPSAWEAPHPTERALKALVLRHQALTEMQTQEKNRRETAPEVQLASIDILLGCLSAELTRIEKQIKDLTDNDPDMKRRRKLLNSIPGIGEKTAAVLLAYTGLKLKFGTARQFAAYAGLTPVQHESGSSVMRASRMSKAGPVQLRKALYMPALSALYHTAWGKAFRKRLEESGKRAKVIIGAMMRKLAQVAYGVLKSGKAFDASQHELLIA

SEQ ID NO: 68007 - protein, 346 aa, unidentified
MSQKTAATVAHTIGIDTGKNILHLIGLDDQGAIVLREKIARGRIAARLANVPQCLIGIEAGMATHYVARELGALGHDVKQVPPAYAKPFRQGHKNDFRDAHAIAEAVQRPSTRCVPVKTDDQLDLQALHRVRSRLVGQRTAVINQIRGFLLEHGIAIRQGLRFLRQQLPDILANRSDVLSPRMIRIMEDLSGDWRRLDERIQHITEEIEVLAHGSESCRQLMTVPGIGPLIASAMVAAIGDGAAFAKGRDFAAWLGLVPKQMSTGDRTILGRISKRGNRYLRTLLMQGARVILLRPANWAKHSFGPWLTAAANRLHHNVLATALANKLARIAWTVLMQARSYEARV

SEQ ID NO: 68008 - protein, 345 aa, unidentified
MEHYVGLDVSLKLTAICIVDRTGKIEREGVVSSDPEAIAIFIKSHAPHVVRVGLETGATATWLWTELNKLGLPVICIDARHAKAALKMQINKSDRNDAVGIARIMQCGWYKEVHVKDLDSHAVKALLVSRALLVKIKRDLENQIRGLLKNLGLVIGRAKMNVFAVRAAEMTEDRPELAAAVVPLLSARAAIEQQIADLDRKVMRLARNNAQARRFMTAPGVGPITALCFLATIDDPTRFKRSRSVGAYLGLTTRRYASGEIDWTGRISKCGDKMLRSYLYEAANVMLTRVARWSALKAWGIRVAKRTGLRKAKVAVARKLAVVLHRMWIDGTEFKWSKEAANQPA

SEQ ID NO: 68009 - protein, 352 aa, unidentified
MSQPHNPKEERKMKLYGAIDLHSTNNVTVLIDEEDKIVYQKRLPNDLALILKDLSVYQPRIEGIVVESTYNWYWLVDGLMEQGYKVHLANTAAIQQYEGLKYTDDHSDARWLAHLLRLGVLRQGYIYPRAERPVRDLLRKRSQLVRHRTTHVLSIQNLLTRNTGSSMKANQVKGLDVQQVDRLLPDGDLALAVKANLAVMLSADEQVELLEQTIVQRVQLRSQFRFLKTVPGIGEILALTIMLETGDIRRFASVGNFASYCRCVGSQKISNGKKKGQGNTKNGNKYLAWAFIEAANFAIRFSATINGFYQRKKAKTKGVVALKAVAHKLCRACYYIMRDQVPFNITKAFGQK

SEQ ID NO: 68010 - protein, 343 aa, unidentified
MSEYDGRQFVGIDLHRRRTVIVRQGESGEQLGSSRIVNDPLALAAEIGKAGPSPEVVLEATYGWYWAADVLAEAGARVHLAHPLGIKGFAARRVKNDLRDAADLADLLRMNRLPEAWIAPPEVRELRELVRHRAKLVAVRSGFKAGVHAVLAKQGLHIAVSDLFGPRGRAELAQAPLDTAYRARVNAYCRLIDTLDQEIELAAGWIAARLATHPGYRAIQQIPGVGPTWAAVFVAEIGDVTRFASARHLCSWAGLTPRHRESDTTVHRGPITKQGATLVRWAAVEAVQKLPPTAGWLVSTREQIAARRGRNIAKVAVARKLLILVYYGLRDGHIRALHNASAA

SEQ ID NO: 68011 - protein, 405 aa, unidentified
MQYIEGCAGVAGTEPHAWETGLMDTITYVGMDVHKATVSVALAEAGRGGEIRQFGVFENRPETLRKLAARLSKGRHRLSFCYEAGPCGYGLHRLLTGCGHDCVVVAPSLIPLKAGDRVKTDRRDAMMLAKLHRAGELTAIWIPDAAHEAMRDLVRARATAGRVLSKARQHLQGFLLRHGQIYRGVRAWTLAYRRWLTTVRFAHPAQQIVLQDYIHAVADAEARRDRLTRQIEELLPSWSMAPVVEALQAMRGVALVVAVTVVAEVGDFRRFANARQLMAYLGLVPSEHSSGSTIRRGGITKAGNALARRVLIEGAWTYRMKARVSRKLHDRLEPLPAEVRDIAWKAQVRLCARYRRLAALGKPSVVATTAVAREMVGFIWAIARLAQPAVEDQRTQRAHAEAPRC

SEQ ID NO: 68012 - protein, 391 aa, unidentified
MFAGIDVASETHTLARLDGAGAPIGRPIPITEDRAGYDALLAALGPPPALIVLEATGHYWKNLFAVLTAAGHEVALVNPLVARRFQQASLERTKTDAIDASALARLAFEKRPAPTRLHDEVAEALRELVRHRDRLRQDFDDRVRQLHRLVDLGFPEFTRYVRTLASQLATCLLAEYPTAHAFARATPRRLARLRYDGRHRVGPELATQLIEAARRSIGQHHGPAYALQARHICQDLDLWRRRLADIERDIENLLDTHEVGKLLTTIDGIGPQTAARIIAALGNPARFHSPGALAAHLGLVPALRQSGKRNPARAATTHLGNARLRTALWMPTLSAVRRNPWLRAFYERLRAAGKPPKLALLAAMRKLLLAVYVTARNLRPFVITTQQAPAA

SEQ ID NO: 68013 - protein, 426 aa, unidentified
MSVRIEEEEAPAAPVVRERCAGLDVHRSEIVVCATFPLGGGRLQKKWNEFATTAAGLAQLVAWLEELGVTYAGMEATGVYWMPIYAALERAGCFDITVVNPHHAKALRKRKTDMKDAEWLAYLVRHDQVNKSFVPAKPFRDLRDLTRYRRSLVETQASERRRLIKLLEAADIKLAGVMSDVFGVSGRAILRALILGRDSPTEMAKLARGKLRKKLYQLIDALSVELDMHRRQMLAMQLARVEATEADIAAIDRQIGEHLTPYQDYVALLITVPGIDRVVAAVIIAEVGVDLSTFPTVHHFAAWIGVCPGNNQSAGKTKPIGARRGNPYLTTALCNAATAGARRRGSFFKATYHRIKARRGGGRAALAMAHKLAIAVYYMFTRGTPFRDLGEGHHDARHTRRSVNRYVQRLKSLGFTVTLQPIDAAA

SEQ ID NO: 68014 - protein, 344 aa, unidentified
MQIVRIGLDLAKYVYEIHGVDAHGKTVVRETLRRHAVSTFFANLPSCLVGIEASNGAHFWAKALSDLGHDVRLISPQFVTPYVKSNKNDRNDAEAICEAVGRLNMRFVPVKSPEQLAVQAVHRIRSRLVADRVRLVNQVRGLLGEHGIVVAKDIGNLRRALTRIVGDNEDHALHDLVRSLMGELREELIELDARIGGYDRKIRELYRNSEICQRLGKVEGIGPVTATALVAAVGDRSSFKNGRQFAAWLGLVPKQRSSGGRARLFGISKRGDRYLRTLLIHGARSALGRVRDKQDPRSLWLGKMRQRRHPNVVAVALANKNARIAWSLLASDSAYDASLSVGAA

SEQ ID NO: 68015 - protein, 357 aa, unidentified
MLIRKVTQRTTRGKPAAPARTTLAGGLMAGKSVVEYDHYVAIDWSLKIMAIAHLSGRDQIPRVFERPTDLKELKTYLGSLKGRTIITFEESGFAHWLYLELLDCADRILICDPFQNRLLFHGPKTDKIDARKLCELLRSGLLKEVYHSDSALYELRLLVSAYDDVVRSGIRVLNQKAALKLGHRDTGKSAAFVGEILKENIDLYRQSKQQYERRFHELARRNKLVRFHREIDGIGTIGAVKVVACVVDAQRFPYSGKHLSYCELVKHEKLSGGRSYGRRKPRYSRVLKSVYKTAALAALKGNNPIREYYDHLLAQGVAEHNARHAVARYIARISYGMLKSGTRYEPYRWRNAQRTSI

SEQ ID NO: 68016 - protein, 412 aa, unidentified
MSIALPNQQFVGKPYKILHNSIDSLATAVSKIKEAEESYSLESRIFLESTGIYHYPLFCYLRDKGFNCSVINPIITKNSTNINIRKVHNDRFDSKKAALVGLKPNLKVSLMPSDLALNCRNLSREYYDLMDNRSAYVNKLQGELRMAFPQYLGIFSKVTINTSLTLLETYTSPSAFLEADKQEIIDIIKSTARFGLTYAQNKYNAIIQAATDANQFGYIIDSNIKRIRLYISFIRKYDEAINSILESLHELVDANEDTDFVKQIHLIETFKGAGFLSAVSIMGEIGDFSAFSKPKQLFAYFGLDPAVKQSGKFEGTKVQMSKRGSAIARRVIHTLTLQSISISRNGKAKNPVLREYYLQKCDSKPKLVAMGAVSHKVCNMIFAILRDNKPFKIIAPHEHIKQYNAAKCDIAA

SEQ ID NO: 68017 - protein, 452 aa, unidentified
MSNVTTPSAAPKARGPHERPLVTRGLRREQEKRRRRRLRVPPDTLVLGIDLARERQAASFSHDGQILGRRRINCAAYEIDRLFDEAQTLAEHHSLPHILVAFEPAGLYWCLAAEACERAGLDYVLVHGLTVKREREITRYTLEKTDPRDADLISLLPAQGKFLDSRLPATAERDALAKLARDYFLVRSLCAAERTRLKNFWSRLLPEFFTVLREPTSSTALAVSAALAPFSELATLTPRSWLARVRRAAGGHRILASRAAALLPLFKGAHADPVRRSGEGLPARIRHAAERRRLLEAQKLEIRSDMLARYAAFPEHALLDSIPGSDPFYNACVLGLVGDFNLFDDPRTMPKLAGSEVNHFSSGDRDGSSRMSHRGRSALRAAAYQQARLLVRRNPDYRSRFFSLINRTDRPSLLQLPAYVAVMNSYLRTAHALVTRNQLYLPPDQRPTPGGT

SEQ ID NO: 68018 - protein, 409 aa, unidentified
MRVIGLDIHRAFAEAVAWDEGKLKRLGRVDMRRHLLEAFAKKLAKEDVVVVEATGNAASVAAVITPHVKRVVIANPKQVRVIAHAKIKTDTIDASVLAQLYVSGFLPEVWVPGEPTQALRRQVTRRNQIVRQRSRLKNIIQSILHSHLIPSCPHADLCGASGRAWLFHQVLPEDERLAVERHLREFDRLGEDLKVIERDLARSALANEGVKRLMTIPGVDMVVALAIVAAIGDAGRFERPEKLVSYLGLNPSVRQSGPGPAYHGRITKQGRGHARGMLVEAAWAAARAPGPLRAFFLRVRARRGQHVAAVATARKLAVIIWHLLRKGESYAWARPALHAKKLRDLELKAGYKAERGQRGAAHAYNAKSHRDQERRWVEQAETAYARFVTGWNPRGPKRARTGAANEGRQ

SEQ ID NO: 68019 - protein, 428 aa, unidentified
MISRAYRATRVNDVDWDRLARGNEGVDITLGIDVGKRDLWPVCRWQTGRFERPWRVKNPLEIPTLVALIQRMSVGRKLVVAMESSGTYGDALRQALADGKIPVLRVSNKAAHDYAEIFDGVPSQHDGKDAAVIAELAALGKAQPWGYEPPSEWDQELSYQVEWMVTQRQILTNWQGRLEGLVSRHWPEATRVLKLSSVTLLRALEHYGDPASLAADPNAAEQLARWGGPLLAPEKVEQLVKEARSSVGVRAGEWQRHQIKEYAREALTARQRIKEAERRLHALAAGNPVLQAQGAVVGIPTACVLWTSTGDPRTYHAAAAYRKAMGLNLKERSSGAYQGQLRISKRGSARSRQWLYFAALRLVQRGGVRPWYEAKKARKGDDARKVVVIVMRKLAVALYHVGVKGEAFEPRRLFAGIERRGAQGSSKG

SEQ ID NO: 68020 - protein, 323 aa, unidentified
MSQPNLQCMGIDVAKLSLDIATTDTIEPFTVGNDVDGFAVITDKLKHTKINLILMEATGGLEAAIACKLQSEGYDVVVINPRQARDFARSMGYLAKTDKLDAAMLAQLALVIDRHPDRSRYIRHLPDEARAVLATMVVRRRQLNHMLVAERNRLYPSHPQSRKSIDNIIDALQNELDRINEQMKQHMTAFFQEQARLIGSVKGVGDITVASLIAELPEQGKLNRREISALTGVAPLNRDSGKMRGKRTTFGGRAGVRATLNMAALVATQFNPAIKLFYQRLLAAGKPKKLALVACMRKLITILNTMLRKGEEWNASFQSQVIS

SEQ ID NO: 68021 - protein, 347 aa, unidentified
MARSTVHAVTAIGIDMGKTTLHMVGLDSRGAIVAREKVSRGRIASRLANLPPCLIGIEAGMATHYVARELAALGHDVKQVPPTYAKPFRQGHKNDFRDAHAVAEAVQRPTTRFVPVKTDEQLDLQALHRVRSRLVSERTAVINQMRGFLLERGIIVRQGLRFLRQLLPDILAKRTDVLSPRMIRIVIDLAGDWRQLDERIETVTDEIETLAKSDDSCRRVMTVPGIGPIISSAMVAAIGSGAAFAKGRDYSAWLGLVPKQMSTGDRTILGHISKRGNGYLRMLFIQAARVILVRPANWPKHGFGAWLVRAAQRLHPNVLAVALANKLARIAWTVLAQERSYEARVMK

SEQ ID NO: 68022 - protein, 415 aa, unidentified
METQRNRVCGADIHKKFLVATILSRDGTKKTKRFGMTLDDLLDFKSWVMENQCEQVAVESTGVYWIPIHSVLENAVDLIVANAYKIKHIPGRKSDLIDSEWIAELCLNGMIEPSRIFPKDDRELRRLTRAREGYVNDMTREKNKIHHALESCGIKLSSVLADVFGKSGRYLLNCLLKGIELEEMIEGIPVKSVKLKADQIKEAVKGSLETTQIILIRGGLELIGSIQRRIDELEREIKNRIASRRVDLKIAMSIPGIGFISASTILAEVGDFNDFDKAEQLAAWAGLVPTVYQSADKLITGSITKHGSRHIRRILVEVAQAISRSNKGKLKRFFRRVQAKKGYNVATVALARKVLCILYHLLMNREMYQEDDVIRTKTIDVNSSSLPTKLGFEEMIQILAKAGYEIRKTTSGTGG

SEQ ID NO: 68023 - protein, 357 aa, unidentified
MSATTLQTQAVDRPRVVAGVDTHQRTHHVALIDTSGRRHGDREFPVSQAGYRDLLDWVARHGPIAAFGVESTGCYGAGLTRHLLTAGIDVYEVTRPEKATRVKVGKSDPIDAYSAATQVLTGRATGRPKIKTGIVEALRAIKIPRDSAVKERTRAYSQIRDLITTAPTTIHDTLIGATARRRVTIAAAYRPDLNQLHDPLHATKLALRTLAQRVHHLDAEITSADKALAALTKQACPTLLALRQVGPQTAARLIITAGENITRMHSEAAFAKLTGVAPLPASSGKTTRHRLNRGGDRHANSALYMIATGRMKNHPPTQAYVQRRRAEGLSNPEIIRCLKRHLARSIYRALRNDLMTT

SEQ ID NO: 68024 - protein, 343 aa, unidentified
MQVVRIGLDLAKYVFEVHGVDNHGKVVVRKRLRRDAVAGFFANLPACLVGMEASNGAHYWARVLTELGHQVRLISPQFVTPYVKSNKNDQNDAEAICEAVGRPSMRFVPPKSTDQLAVQAVHRIRRRLVADRVRLVNQIRGLLSEHGIVIARDIAQLRRGLAVIVGNINDDLSEMLRALMRELQEELSELDTRIAAYDRRIREIFRTSEQCQRLGKIEGVGPVTATALVAAVGDRSCFKNGRQFAAWLGLVPKQRSRGGRARLFGISKRGDRYLRTLMIHGARAALSRANGKQDPRSLWLGKMRQRRHPNVAAVALANKNARIVWAMLTGGAAYEPALSVKAA

SEQ ID NO: 68025 - protein, 345 aa, unidentified
MNRIIKIGMDVHTTNYTLCIFEPSFEHDGTVHCITQVKPEVKNIIHVIETFKKKHENEELNIVCGYEVGCLGYSLYHELKEKCVECVILAPTTMKTEKGGRKLKNDYRDAKMIAECLAYGGYSAVHVPTELDNSVKEFIRMRDDIKENLKSIKQQIIAFLTRNGKQFEGKSFWTRKHIDWINTVSFSEPLLQDTLKEYMIEYNHLCDRVETLDKQIEEISLKEEYVEKVQQLQCLIGIKTHTALSLIVETSDFNRFKKGNMYSAYLGLIPGDDSSGGQENKLGISKAGNSHLRKLLVEAAQGYTRGKVGFKSKVLKSRQENCSSEVVAYADRANERLRKKYYRMT

SEQ ID NO: 68026 - protein, 343 aa, unidentified
MYTVSVDIHSASFTMAVFNEKKNLCRTFTCSTTVENLIEQVSEIPNPKTVVVEECHLAQLVKEVLEEHVDKVVVADPVQNRWIAEAEFVNDKKSAIKLGKLYLNDDIREVFHPDADGASIRSEFLHYRDLDGHLTRSKNKLKATFKQGGVKHPSDWGEIFTRKKQLLGQLGERPHLQFRARHFYEMVSSFGHMKQQTYTKLLKRAKKEPVFKLLNGIPGIGALSAIGYMAIIITPHRFSRRNKLWRYAGLGNQYHVSDERVYRNRASRSGNREMKWLIRQQFNAGVLITKKQNRFKGKYARLLQEGHSKKEARREVQRSMLSVVLAVWKKGEPYQDKHVSRRG

SEQ ID NO: 68027 - protein, 405 aa, unidentified
MNAVGIDVSKDKSMITVIQPLGVVVAEPYEVRHTESELKELAGFLKSLSGETKVIMEYTGHYYEPIARYLHDAGLFVSVVNAILIHDYNENTKVRKGKTDEKDAVKIASWGLSHWLDLPKYTPEDTVRQELKICNRQYIQYSKIKTMLKNNLISHLDQTFPGVNTLFSSPARKEDGHEKWVDFALYFWHRECVSEISVNAFKKKYEAWCHKHGYQYRESKASEIHSKARASVSDLPKDETVKFLITQAITQLNTVTETLAAFCKEMERLASLLPEYDTVMQMYGCGPVLGCQLMAEIGDIRRYTSRKALVGYAGIDAPPNQSGKVDVSSRSISKRGSASLRKTLFQIMAVLLQNSPPDEPVYHFLDRKRAEGKPYKVYMIAAANKFLRIYYARVKACIESTTASD

SEQ ID NO: 68028 - protein, 378 aa, unidentified
MSSSINFWVGLDVHKDSITAAVFKDRDPEPLHVDRLPYDFRKIRRYFQRLQAQGTVRACYEASGAGYVLQRSLLQWGVECHLAAPSLIPRRPGERRKTDRRDAIKIGRDFRDDRLVLIHIPTEEDERVRDLVRCRETFQREIVKSRHYILKFMRRRGFVFREANNWTVRHLNWIRQVLAPGTLAEEDHTVLSEYLALLEYKLQRRDELDRRIEALALTPRYKPVVERLCCFRGFKTQAAMVIATELGDLRRFSSPRQLMAYVGLVPSEHSSGPRQRLGSITKAGNSRVRHTLIQAAWPYRKRPAVGAPLRRRQQGQDPGVIRHSWKCQQRLYSLFHRLAVKKPAQVAVTAIAREMVGFLWAVLHEVDVSKLQEVSATA

SEQ ID NO: 68029 - protein, 341 aa, unidentified
MLIIGCDFHPSFQVIAMWNSETGEEQTQRLIHPREAKEFYRALAGQQVRIGIEATGNFRWFRRMVQELEFEFRVGNPVEIRASMPRNQRTDKRDAQGILRLLREDRFPAVWMPSAAEEDLRTLLGHRCRLVRLRTRVKNQLDSMAKNEGLIGTPISTKAGRQRLQAAPLSGWDQQRREDLFQLLDDLDQRINPLDLAVAKAAATRPEAQRLMTHPGVGPNVALGFLLALGNWERFPRGKHVASYLGLIPTEESSGNKRRLGKVSKQGNAMARWLLVQAASLAQRQDPAWHRQYLRLSLQKHHGVAKMAIAHKLAIRMYWMLRSGQDYEGVRERGSHVGQSE

SEQ ID NO: 68030 - protein, 348 aa, unidentified
MIAIGADVHKRTCTLAMQGEDGQLTMLPSMENTRENWLHRLAKLPPQAEIALEVSTSGHFVMSVLEEAGWRERAHWVHTAGIDSLKKQKNDRLDAKRLARKLSVAERDPLPEAWFPPPPIRELRLRARQRCWTAVGRAQCRNRLRSLLQMYGLRPKGSPFTPQGRAWLEKQPLPPAAREYVERTWRVHDFLSAERESSEASLVAASASFPEIARLQTIPGLGHILAAVIWSEIGDLRRFASADALVNYTGLVPSLYESGEVSHHGGITRQGPAWLRWALITAAHAVTRSKSPLARRYWRLRRRKRPNVAKTAVAGSIARCVYGVLKHGGAYQEERWGRQTGDELKQEA

SEQ ID NO: 68031 - protein, 349 aa, unidentified
MEGYDGPQIVGMDLHRRRSVLVRMAEDGHKLSTARIANSPARLAAEIKRAGLHPKVVLEACYGWYWAADTLTAAGAEVHLAHPLGVKAFSHRRVKNDELDARDLADLLRMGRLAEAWIAPAEIRELREITRYRGKLVQLRTSCKDQVHGVLAKLGIEVTCSDIFGAWGTQWLDELVLPQPYSWKVASLRQLTGWLSAEITVLEQVTADLLAGHDAYRAVQQLPGIGPVLGAVIVAEIGDITRFRHPARLCSWAGLTPRHYESDTMVVRGRITKQGSRPLRWALIEAVQRTPAGTPVRQARDAIIARRGPQARNIAKVAAARKLLTYVFYAMRDGHVRALDTPAAEHEAG

SEQ ID NO: 68032 - protein, 324 aa, unidentified
MISSVAENTTPINIGIDISKALLDVATHPDGEICQFTNNIKGFRQLAKWLASMNVTCITFEATGTYHRKLERFLGERGLPFARINPRQARYFAEAFGKLAKTDRIDALMLARFGQLLKPRQGSVKCQTIETIGELVAARRALIKDRTAIKNRLHNLQTTLLMRQARQRLRQIKNQIEAIDAECQALSEADEELARRLAILLSIPGLGEVTAFTLLAEMPELGSMNKRQTAALAGLAPITRQSGKWKGKSFIRGGRANLRHALYMPALVAIRFNGEFKRKYEAMTTASGKDAKPPKVAITAIMRRLIVLANALLRDGRKWTKITA

SEQ ID NO: 68033 - protein, 419 aa, unidentified
MTKSNISKQLKQVPAGALHVGVDLALEKNVAVVINEKAERLDQFSFTQDRGGYDHFLRRLEGVRQKHHASSIVVAMEPSNYFWKLLAKELEEQKIAYHLVNAYTVKKHREGNQLDRSKDDRRDAGQIAELSRNGHYTQTRLQKGAYEELRQYAALYHRLVQGIRCERQVLWGLVGQVFPEYFQVFKDLGGETSRACLESCACATAMRRITEEELIAKVWAVYTGKKLSVSKIRRAYRWAATSIGVAEGLQAIQLTVRLHLAQLQSLQAQMEQVTHAMLACLVSLPETPYLLSVKSLKAVSVALFLAEVGDPSRYQTAAQWVKLAGIQPAANTSGKKQRSQTPMSHQGRSQLRTLLYFTCLRLVRFDPHFAQLYAALQRRPKNPLTKMQALGVLMNKLLHILWALIHNQTFYDPSFASSI

SEQ ID NO: 68034 - protein, 343 aa, unidentified
MQISTIGLNLAKNVFQVHGVDEVGKLTITRRLRRGQLIGFFKKLPPCLVGMEACATAHYWARELVKLGHTVRLMPASYVKAYVKRSKNDAADAAGICEAVTRPSMRFVPVKTAESQAALMLHRSRDLLVRQRTQLINALRAHLAEVGLVAATGVDGLKSLLAIIREAGETGQLPGPMRQALQPLVDQLAALQAQIGQLERSIHAQHRASDVSRRLETIPGIGVIGATAIAATVTEPGAFKSGRELAAWIGLVPRQHSTGGKQTLGSISKQGDRYLRRLLIVGATAVIRHARAHPDKHPWIMKLLAKMPAKKVAVALANKTARIAWAILAKGGTYRAPALAEHA

SEQ ID NO: 68035 - protein, 255 aa, unidentified
MQSMYYIGLDVHKRKISYCVKDPSGAIHSEGWIPATRFDLDRWMRTLPQPWSAAMEATMFTGWIYDHLKPHAAALKVAHPLMLRAIALAKKKNDRIDANKICDCLRCDFLPECYMVSTAIRERRRTLRYRNLLVRQITALTWALEIGEVQRFSSLKKAVSYCGLCGAQQSSADHVQRTPLSKQRNKHLQTTLIEAAKMAPRYSPTLALLYDREKQKGNANRATLAVARKLVAYLLAVDRSQTHFLVVDRETCAAA

SEQ ID NO: 68036 - protein, 359 aa, unidentified
MPVARSIILGSSRPFDSKIPAGLMRFSPNSRLGRCFGKPASARKGKLMESVMIGIDVAKDELQVATPNGASSWPNDPDGHRRLIDELAQWSLEAIVLEATGGYERAVVAELAAAGLPVVVVNPRQVRDFARATGRLAKTDAIDARVLAEFGRAVRPERRPLASDQQQQLQAQLARRRQLVQMLTAESNRLQQATDKLVRQSIQAVRDTLSKQLVALDAELQHVIQQTPAWREREILLRSVPGVGPQTALALLAELPELGTCSRQQIAALVGLAPLNRDSGRHRGQRTIWGGRATVRSALYMATLVATRYNPVIKAYYQHLQTLGKRKKVALVASMRKLLTMLNAILREQKPWKHQLTSH

SEQ ID NO: 68037 - protein, 377 aa, unidentified
MGIDVAKDKHDCCILGPAGEILRDSFSFANTRQGFEALRTAIQEAVGSQDNLQIKAGLEATGHYSENLVAFLRTSGVEPVVFNPLRVKLFRQALSLRKTKTDKVDARCIASLLMSDDSNPVAQSYQIQELKSLTRHRSRLVSSRAKAKIHLARLVDILFPELPSVCWSLSQKSILSLLKELPGATRIAGCRIDRLTNLLSESSHGKYKQGKAEEIKVLARQSVGRGSEALSFELIQVIESIQFFERQIHVLDKQLAGFVKALGTPLLSIPGIGCTLAAIILAEIGDINRFASPDKLLAFAGLDPSTYQSGRFVAGKTPMVKHGSTYLRWALMQAARLVAMRCPDFRQFQAKKLAQGKHHFVVLGHVAKKLVRVIFTF

SEQ ID NO: 68038 - protein, 379 aa, unidentified
MESITQNEKVLYIGIDVHKDTYALCCFDFQRNELSDEMTVKATTKAVIKYLEALKKKHKEEILFVCGYEAGPTGYGLCRGLQKADFACVVMAPTTMANPEGKRRVKTDRIDARAIARILAYKSYSQVHLPSEEMEALKEYTRARDAKKRMLKKAKQELLSFLLRNGKTYPESGNYWTAKFFTWIKTVQFSEKWMQEAFNEYLAEVYSLKAKIEIMDTKIREIAELEIIKDKVDKLVCFAGIDVTTAVETVVEIEDFTRFATAAQFVSYLGLCPGEDSSGKTKIMLPLTKAGNRRVRALFCESAKAIKRTNPYGEKSKRMKVRQKNASAEIVAYADKATKRIRTKMKQLEGRGKNYNVASAAGARELACFVWGMMNDKIA

SEQ ID NO: 68039 - protein, 423 aa, unidentified
MEAMHERVAGLDVHKDNVVACVRTVCGGKTTRECRTFDTRTDGLLALLEWLRLCRCELVVMEATGVFWMPVWKILSDGAFKLVVANAAHIKAVPGRKTDMKDAEWLAELAAFGLIKASFVPDEEQHELRALMRTRKQLVREQTRHVQRIQKTLTEANIRLDSVISDILGRNGRRMIEAMIAGVRDPRKLAALADQRLKATPKELYDALHGRLTEHHRFLLQLHLGQWDILDATIRNIDREVATRVSRMDAEVAADKAKFSDLIDQLATIPGVSRLSALTILSEIGCDMSRFETAGHLVAWAGMCPGQNESAGKRKRTRLRKGAPWLKTMLVQCAWAAKRKKDSYYKAQFFRLQTKRGPQKAICAVAASLLTAIYHMLKDGTNHQDLGAGYFDQRAPHIKVKRLVNQITRLGFEVTLQPIATAA

SEQ ID NO: 68040 - protein, 407 aa, unidentified
MQVFLGIDWSHTHHDACFLNERGQVLSRLTVEHSVDGLAQLDQAREQLGVTRPECRVGLETAHTLLIDFLWDQEYPHVFVIPPGAIKGARRRYRQTNAHTDQSEAWVIADVLRTDPATLYPWRPDGLIVRQLRAKVSLWQFLTKEIRRLGNRLGAVLARYYPAALHVFHDPASPIALLFLQAFPTPEAATPLTRQAFGQFARAHRYRQREPVLSAAYARLQAAYPLASATTVAAYRDEAVWLAQHLLAAIEHKKAEIARLQELFQQHPDHELFASLPGTGDFLAPALLAKFGDDRERFPNPGSLQCIAGTCPVTEQSGKGRRVLFRQACDHEFRQIAQQWAKASVAQSSWATTYWHSVRQHSRSNSHAYRCLANRWLAIAWKCWQSHQPYDEAVHLQNRARRLATRA

SEQ ID NO: 68041 - protein, 523 aa, unidentified
MARTVGSKKRRSARAHLIHKPGGIIHPRVQAVGPEHFGIVSVDCAKARSKWMLADFYGKVLVPPTPVEHNRNGLDAMVQSVCLAIERFDLRDVIVAIERTGRYHLPVKRAFIQARFDTRSVHPLTSKQFRQPANPGNKTDDTDLNAIHRAAVNGFGLIEQPLDPVSVRLQLLARHRRDLVEKTTALRCQIHEHLQAIMPGYAKCFDDIYECHIPLVIAKSLGSAAEILRVGLPGLTQVVRQAGIHSHRPTLEKTLAWARTAAAATAEAPIHHRIMRELDDDRVAKVQAIQVVEGELAELLVQTPYVLLLGIPGINVVSAADFGGEMGPIQFYTKARAITGRAGLFPSRYQSDEVDRPDGKLVRCANHRLRYAIMMIADNLIRCNDHFRVLATQWQLEGKDPRAIRVRVAGRFCRIAYQMVAGRTTYRHPSCRQRDYILCKLMTFCIEHDIDIIRIMKHLDAAVAQLPGAEHREEGAALAAELDQLQKKRGSGPRSLAQILPAVLAKLGVQLISSTKSGEADLT

SEQ ID NO: 68042 - protein, 340 aa, unidentified
MSQSPAYQLVVGIDIAAASATLVELPYQASPSRPRTIPQTPASHTALLAQLQQRGLPLSRILIVMEATGTYWIALATTLAQAGLPVSVINPAQAHDFAKALLKRSKTDAIDALTLAQLGSLLQPACWTPPPAVYHELQQRLLQRDALLELRQQLRNQLHALIQQPVVISSVRTRLESLISTLSEQISAVEQELAAAVELDQSWAATAERLQTITGIGLLTAAWLLVTTLNFTVSRDAAQAAGYAGLVPRQRQSGSSLRGRAALGHSGNSRLRRALYMASLSATQRNPAIKAFYARLRTRGKPMKVARCAAARKLLQIAWAVATKEQAFDPNYAEGRQQQG

SEQ ID NO: 68043 - protein, 344 aa, unidentified
MSEVSIIGLDIAKHVFHAHGADERGRVIFSKRIGRGKLLDFFAAQPSCTVALEACGGAHHWARQLTQLGHDVRLIPPAYVKAFVKRQKNDAIDAEAICEAAQRPSMRFVAVKSEEQQAAGLVFRTRDLLVRQRTQLINAIRGHLTEYGWIAPKGPSHVAMLADLIEEDEMANALPEAAHAMFRLMLDLLAGLNGKIADLDKEIARRAREDEVSRRLMTVPGIGPICATAIAALAPPVETFAKGRDFAAWLGLTPLQRSTGGKQKLGATSKMGERTLRRLLIIGSSAVVQQASKRGAPKGSWLEQMLARKPRMLVTVALANKMARIVWALLVKQENYRAPVAAKA

SEQ ID NO: 68044 - protein, 394 aa, unidentified
MDVLHPRCCGLDVHKSSISACILLREAGRVQKHQRRFGAMTQELQELAEWLRQFGVSQVAMESSGVYWKPVWNILEGQFTVVLANAQHIKNVPGRKTDQKDAEWIAQLLQYGLLRPSYVPCEIIRDLRDLTRMRASLSQEASRISSRIQKVLEDANVKLASVATNVLGKSGRAMLEDIISGEDDPEHLASLALGHLRVKIPQLRFALEGKVRSHHRFLLRRLVDQIQFVEHEIGLLDERLEEIAQQRPELSQAVARWDTIPGIDRVAAWALLAEIGDNMAQFPTAGHLASWAALCPGNHESAGKRLRGTTRQGSPWLCRMACQCAWAAARTKNTYLTSQFRRLAARRGKKRAIIAWRIPSSSLAITCRRTRATMRILAETTSIASTPTVSNGTW

SEQ ID NO: 68045 - protein, 341 aa, unidentified
MNHYAGIDVSLKYSSVCVVDANGKIVREGTVASEPEALIAWFSELRLEMTRIGLEAGPLSQWLYAAMQKAGLAVELLETRHVHDAFKAMPVKTDRKDARGIAQLIRLGWFRPVHCKSIEAQETRAILSARKLVQSKLHDIEMSLRGTLRGFGLKVGRTTSNRFAARINELVEGHPTLQVIATSLLAVHAALLREFKVFEKRVRIMARDDERARLLMSTPGVGALVALTYASAIDDPGRFKSSKQAGAHFGMTPKKYQSGETDITGRISKIGDKGVRTALYEAAHIILTKPVKGSGLKSWAARLAKRVGMNKAKVALARKLAVIMHRMLVDRTPFNPAAAAA

SEQ ID NO: 68046 - protein, 335 aa, unidentified
MDIKVLGIDLAKKVFQLHGVNEVGKPVLTKKVARKDLLKIIVKLKHCTIAMEACGSCHYWAREFRKLGHEVKLIPAQHVKAFLKTNKNDANDAEAIVEASIRPSMRFVPVKELQHQDIQALHRCRERLVAEKVALINQIRGTFLEYGVLTPDSRKKMISGLSVLIEDNADQLTPISIELLKAGQAELRELADKIEKIELRLKSILKQNPVCQLLETIPGVGLMTATAVFGAVVDPSQFKNGRDFSAWLGLVPAQHSTGGKSRLLGISKRGNPYLRKLIVHGARSRVSMPVLQSQWMVEVEKRRGRNKAVVAQANKNARIIWAVMSSKQEYKARVA

SEQ ID NO: 68047 - protein, 413 aa, unidentified
MRVMIERVAGLDVHQETVVVCVLIGKPGERPTKEVRTFRTMTRDLEALREWLLSLGVTHVGMESTGVYWKPVYAVLEGSFELIVGNARHIRNVPGRKTDVKDAEWIADLVRHGLIAKSFVPPPPLRELRDLLRYRRKLVESQAAERNRLLKLLETANIKLASVVSDVFGVSGRAMLRALIEGTASAQIMADLAKGQLRRKRADLVLALEGRVEEHHRFLLGMQLRRLEAAEEEIAALDARIDEKLEPYRAPHALLMQIPGVDRLVAAVLIAEIGIDMSVFLSVYHLASWAGVCPGNHESAGKQKSGRARNGNVHLRTMLVGAAISASRAKGSYLKDKFYRLKARRGSMRAALAIAHKILVAAYHMLAKGVGYREIGEAYLDQISQTRTVANLKRRLERLGFHVTLQSKAQPTA

SEQ ID NO: 68048 - protein, 340 aa, unidentified
MQTPRHIGIDLHRNQFTCCVRLENGRNYLTDWKLEDLPRFVKKLRPSDQIAVEVTGNTRLFHDAVTPYVKRVVAVDPNQFKVISHSVKKTDPNDARNLALYLEKDLLPEVRMKDRTQAQLASLTQTRDTLVKLRTALKNKVNNILSAHGINLEREALSSEKKLNEILAMRFDAMVKVELEVIIEEIRSLNQRITKLEKTIADEGSKLEGHKNLISIKGIGPLTGSILLSVIGDINDFADEGKLAAYFGIVPRVSNSNETERSGRITKRGSKLGRTALVQCALIAQRFSPYLKRYYEHVKARCGTGKAIIALARKLLGIIYRTLKNKWVFEDFPNFVLAEE

SEQ ID NO: 68049 - protein, 273 aa, unidentified
MKQYVGLDVSQKETSVCVVDDAGRTVYEGRVKSDPGALTELLRKRAPHAERIGFETGAMASWLWHELRRVELPVVCIDARHAHAALSVRVNKSDRNDAKGLAELVRVGWYREVKVKSEESQRVGAILVARSRLVSIRRDIENQVRSIIKEYGFLFRRAIGLQFRNQVIELLGEDHHLRAIIDPLLSIHEQVCRQQDKFDDEVRHLAKSDETTRRLMTVPGVGVVTALTFRHTIDEPSRFRSASAVGAYLGLTPRRNQSGEADTNGRISRWGDR

SEQ ID NO: 68050 - protein, 316 aa, unidentified
MANLTQSKSSVNVGVDVGKTFLDVCIHEKQLHFQEDNTAKGIQAILKRLAYYKVERLVVEATGRYEFALAEAAYLKELPVCIMKPLSIRRYAGAVEQLAKTDKIDAAIIAEFAAVIKPKPTPQKSKNLIAIKDLLARRRQVMEMRTQELNRVKIMGKSLEASCKRIIKVLDKEVERLEKSLSEYVDEQSEWSEKRELLISTPGVGKTLVYTLLADLPEIGTLNNKEIGALVGVAPMNRDSGSMRGKRKIKGGRATVRTILYMATLSATQCNPVIKHFYKKLVEQGKHKKVAIVACMRKFITILNAMVRDKKEWCHG

SEQ ID NO: 68051 - protein, 499 aa, unidentified
MSGHNRKSPPSQRHPRPTPRAPCPGQTDDLRRAARSAAHDRRCVEECAKIVALPVQHEHAAGIDAGDASHWVCVDATPDGSDTVREFPAHTPGLRKLVAWLRQCGVTTIAIEATGAYGHVLFLMLLEAGFTAILTPPQFARQVKGRPKTDRRDCQWIQRLHKHGMLPSVFQPDETTQTLRDYVRQRGNLVRLSGQHIQRMQKALELMNLKLTKVLGDITGVTGLKIIRAILKGRRDPKELAALRDRRCHHSVAEIATALDGRYRPEHLLELRCSLEMWEKYLEMIAEVDQAIAAQLRLMQRKTELPPLPPQPRARGRKPHDPRFDVRTALYFATGVDLTAIEGIDALNALTLVSELGCDYTKWPTVKQFTCWLGLCPNWKKTGGKVQSSHTRRGKNRAARALRLAAWSLVRSKSYLGAYMRRQRGRLGKPQAITATAHKLARILYNLMRYGVEYTKQSEAAYAEQVHERLEKQLRRRAQELGFELTPITPPPMPVATQQ

SEQ ID NO: 68052 - protein, 314 aa, unidentified
MMKITFIGGDVAKSQILFAQHGKDPVEQAANSKTDLRRFFKRLPTGSALAMEATNTYHELAAQLAYDLGIDVYVLNPRDVSHYANSIGMRAKTDPCDARMIARYLAREHTDLHRWKPATQAQEALKALINRRSTLVSSRVAMQQSMGTESELKPVLNGLKKAFAKAVAAIDKAILRRLKEEPELARHADMLKDIPGIGPVVSAALATLLSRHPFASADAAVAFVGLDPRPRESGTWRGQRKLSKRGPTEIRRLLYVAAMTTARNVAMRGEIDRHKAKGLSATAIYNIIARKLLRTAWSMLKHQTPFAMDRFSAA

SEQ ID NO: 68053 - protein, 449 aa, unidentified
MNNLLRIMYERVAGLDVHKKTVVATRMRVTEEERFEWETQTFGTTTPDLLILHDWLAEWSCTHVAMESTGDYWKPVFNLLEDDFEVLLVNAQHVKHVPGRKTDVLDSEWLAELLLHGLLKPSFIPPKPQRALRDLTRYRTKLVQERTRVVNRVQKLLEGANIKLASVATDIMGVSARAMLEEIAVGQTDPKLMAELARGRMRNKIPELEKALTGLVGPHHRFLLAKQLAHIDFLDEQINDIGGEIARWFETQSQRPGEGGNGNGSESDTPETPASEEESPLTWEEAVALLDTIPGVNRKTAEDMLAEMGLDMSQFPTDKHLASWAGLAPGNRQSGGKRYSGRTRKGNRTLSSVTVQAAWSAVRTRDTFLKSRYHRLAARRGKKRAIVAVAHSILTSAWHMLTYRQPYHELGGDYFDQRRKDAKVSYLTRQLEKLTGGAVRIELQVAAVA

SEQ ID NO: 68054 - protein, 318 aa, unidentified
MSSAAPAFVGIDVAKAELVITIRPSGEHWTIANDVAGIHTLVQRVRGHAPTLIVLEATGGYERAAVAALAAAQLPVVVANPRQVRDFARATGQLAKTDRIDADILALFAERVRPAPRALPDDAAQALDALLTRRRQVLEMLIAERNRLEHAVPTVRRGITQHIRWLERQLADVDQDLDDTIQASPVWRAKENLLRSTPGVGPVLSRTLIGELPELGTLPRKQIAALVGVAPLARDSGTLKHKRLVWGGRAPVRAALFMAALVGTRCNPVLRAFYRRLLEAGKPKKVALTACMRKLLTILNAMMRTNTAWRHIDLSPTT

SEQ ID NO: 68055 - protein, 338 aa, unidentified
MTLYCGIDLHSNNSMISVIDDNDRLISEKRLDNDLNTISHHLLPYQNDMTGVVVESTYNWYWLVDGLIDKGYPVHLANTLAIQQYNGIKYTNDATDARFLAHLLRLNILPTGYIYPKSQRHVRDVLRRRLLLVKQHTAQLLSLQSLIGRHTGQRLTSHQVKQLTTDSLVRYFDDAASLFSARHALLLQQQLKAQIEEIEAFVLSTCQRSEHYARITSTPGIGKILGMTILLETGPIERFAQVGHFSSYARCVPSDKISNGKSKGKGNTKNGNRYLAMAFIEAAHYACIWNPVIKRYYQRKCKKVPLMVAKKAVANKLTRACYHMLKDGTTFDVARAFG

SEQ ID NO: 68056 - protein, 374 aa, unidentified
MRHCKRYVGLDESKDSIQVAVAESGARGEVREYGAIANTPDALRKLVRRLGNPRDLYFAYEAGPTGYGTYRELRALGANCIVVAPSKTPRRSGDRVKSDRRDAVNLARLHRAGELTAVWVPDEQTEAMRDLTRAREDAKYAQTRCRQRLGAFLLRHGRVFAGKSRWTKTHLNWVRRQSFQHASQQVCLDEYLEAVEEATRRVKRLEDQVRELLPTWDRAPVVRALMGNRGVSLVVASTTVAELGDLPRFTKARQAMGFVGLVPSLQASGLSHRTGSITKTGNAHVRRVLVEAAWAYRHPARRSVELQRRLEGLPEEVQQICWKAQLRLCARYQRLRARRMQHNKVVVAIARELMGFLWATARAVSINNTSIVTR

SEQ ID NO: 68057 - protein, 411 aa, unidentified
MAQPTPLFVGLDVHKDSIAVAHAQGQSADPPVFVGAIGPKQSDLDKLIRRLQGKTPELVFAYEAGPCGYGLHRYLTGQGFTCQVVAPSLIPKKPGDKVKTDRRDAVDLARLLRSGDLTRVYVPTVEDEALRDLCRARDAARLTLKNAKLRLKAFLLRLGLNYVGRADWNDAHRRYLAKVVCPTPTQQIVFQESVRAVDEQVDRMHRLEAELLERAPAWRLYPVVQALQALRGVQFLVAITVVAELGDLTRFDSPRQLAAFVGLVPSEYSTGPSRRLGAITKTGNGRARRALIEGAWAYRHPAKVSEHIQRRIDHPAETDAGHRLEGASAVVQALSSADRARQTSERGGHGDRARTDRVHVGDCEGGADPDVSVVHQVSGRRRGAAPVIRAALVDVKRRLRPILVPRSRQAR

SEQ ID NO: 68058 - protein, 418 aa, unidentified
MTAIDTTASILLVAIDISKHRHEVLIGVPGKERRRRMTVTNTLDDFQRLVLVLADHGLPVRIGFEATGNYHRTLAHHLGRAGFELKLVSSVGLARTREALHNSWDKNDPKDAQVILHMLEIGAVQFFHDPLVAGTADIQELSKTHEIVSRSKTELWHRILTHYLPLYFPEAERFHRGSRTDWFLAFLEKYQSPYMISAMNRDAFITDAWQVVGRKVSKERLLSDIYATAVDTVGLPVHPDSDPVRMFRLVLAEGRNLIRQRNEIEARAVELLSDLPDYKLLTTIQGIGPINAMTILAEAGDLRRFRHHRQFLKFCGMDLATVQSGMFRGQSRISKYGNARLRRTLWMAGQTAVLKKTNSFRDKFERYISEDRHNAHLRRKAYTAIAAKMARTAHAVVKHGEPYRPFFEGMSPGGRTSL

SEQ ID NO: 68059 - protein, 474 aa, unidentified
MNEIIRVAIDTSKSVFQVHGVDAAERPVLRKRLRRREVLPFFAKLKPTRIGLEACGGAHHWARELKGLGHDAVLMPPQLITPYVQRNKNDGRDAEAGCEAMGRPRMRFVPVKSAEQQAAQMLLGVRDRLVRCRTQLANAIRGHAAEFGLVAPKGLSRIEPLLARIAGDASVPDLAKDLFAIQSQEYAALAVRLRDIEARLMAWHRNNEMSRRLAEVQGIGPIGAAMLVMKVPDPAAFRCGRDLAAWLGLTPKDHSTADKQRLGAITRAGDEELRRVLVAGATSVIQKVKYQHRPGSPWLVDLIDRKPRKLAAVALANKNVRVAWRLMVSGERYDPHRQTRMVAPVGAGPTHHSWTLMPATDQHATVLAAVNDKPGGGPKREPSLTAAARGGLTRLRSGRKNACGAVKQKNGTKATGSGAQPAGGSAPGDPDQPRGRTSKPRVNLTPATASLGRAHPQLRADRSAPARPPLPNRP

SEQ ID NO: 68060 - protein, 359 aa, unidentified
MQRNKISFKGQKIYIGIDVHAKTWEVCVLTESGYKERHPQQASAKTLFDFLKKHFPDGEYHAVYESGFSGFSTYYALKEYGINCVVTHAADVPTTQYEEVMKTDKVDAAKLARSLRAGDIRPIYIREKENIDDRSVIRIRKTIQKQLSGYKARVKHLLHCNGVEIPERFVRPGTHWSRAFIKWLKEDVVLLSSSRLSLDLLVKQVETIRKTLLDATKSIRRLAQTDRYRNNYELLMSIPGIGVSVAMCILTEIYDVKRFRNENQFASYLGLIPTCHSSGEKTASGEKTFRGNKHLGPMIIEAAWIAIYRDYGLGMAYARYKQSMKPQEAIVKIARKMSNIIFSVLKNSRKYEPYRWDKE

SEQ ID NO: 68061 - protein, 304 aa, unidentified
MFGIGIDVSGENLDVAVHEQAFRQFKNNKRGWASLIRWLQRWPAKQVVLEASGGYEQKALDALHEAGLPMVRINPGRGRSFASATGRQAKTDRIDAMVLAHMADALKLTRYVPPAAWQRRLGELCQRRRHLVQMRVSEHQRMRAFSEPCLISMLNQHLDEIQKSIKQLDATIAALLAEQDGWRDFAKLKGAGPVLMATLACELPELGKLSGKAISALVGVAPMNRESGTWKGRRNITCGRAVVREALYMAALTAKRYEPRLKEFFESLVNQGKPGKVALVAVMRKMLVILNARKREAEAQMASA

SEQ ID NO: 68062 - protein, 366 aa, unidentified
MQKSSTMRRTTSKIFKERQLTIGVDLGDRWSFYCVLDESGKVILEEKLATTPDAMKQTFARIARSRIAMETGTHSPWVSRLLTQLRHEVIVAHAQKVDLITKSTRKDDRHDAKTLARLARIDPELLGPVRHRSAKAQIHLTVIRARAELVSTRTVLINGARGLTKSYGERLPKCGTQQISRGFGAGLSAELREVLEPLFREIESLNERIKEYDRRIEKIGKEMYPETELLKQVKGVGELIALTYVLTIEDPHRFRKSRDAGCFVGLQPGRRNSGDSEPQMHISKQGDEYLRTLLVQGAHYILGPFGADSDLRRWGQKLAERGGKNAKKRAVVAVARKLAVLLHRLWVSGEVYEPLRNNQKVMRTAA

SEQ ID NO: 68063 - protein, 420 aa, unidentified
MVYLERGYNLKELPWSKIVSNSFLFKEACMILVGVDVAKDKHDCYIMTSEGEVLFKSFTIANNMEGFNQLYEKILSVIDNFDNVKIGLEATGHYSYNILGYLLDKGLTPYVINPLHSNLYRKSLSLRKTKTDKVDSRIIASMLMSDVSLKPYSNTLYHNEELKSLTRYRFTKVQERAKLKISISRLVTILFPELEKLVPTLQMNSIYALLYEFPSAHAISKAHLTRLTNLLNTTSKGHYTKDKAVLIREAAKNSIGSNMPAKSLELKHTIKLIKELTSEINEIEEEIKIIMNKINSPILTIPGIGLSTGAQILAEIGDFKNFSSPDKLLAFAGLSPSTYQSGNMYSSNTKMEKRGSKYLRFALFNAAIYVSYWEPTFSQYLKKKRVEGKHYYVAISHVVKKLVRFIFHLEKTNERYSTVV

SEQ ID NO: 68064 - protein, 363 aa, unidentified
MPLRATRSSAVIWLSPPTCEVDTSEAATRKLVAKLAAKYGKLTFCYEAGPTGYGLQRLIESLGHTSIVVAPSLVPKRAGDRVKTNRRDAEGLAKLLRAGELTSVWVPDERHEAMRELTRARDAARQDLTRKRQQVSSMLLRIGRHYPGIKTWGARHRAWLANQKFVHPEQRLAIEELLLAERQAAERIERLGQAIRAAVSDWSLAPLVPALQAMRGIDLVSAVTILAEIGDLSRFETPRQLMAYLGLVPSERSTGDSVKRGPITKAGNGRTRRVLVEAAWAYRHPPRVGYEKQAQVAAAPRPAREIAWKAQVRLCARFRALSRKGKKSTVVATAIARELAAFIWAISREVAGSIEAADAPRCA

SEQ ID NO: 68065 - protein, 276 aa, unidentified
MKIVGCDFHPRWQQIAVFDTETGEISERKLVNGEGEAERFYRALDWPALIGIEACGNSQWFIELLERLGHQVWIGDAAQIRASYVRRQKTDRRDAGHILKLLMEGRFPKLWVATAEQRDLRQLLIHRHKLVEIRTRVKNGLQHLAMNRGLQKRSSLWSVRGRADLEKLSLPGWAGRRREDLLALLTGLDAQIGELDAAVEHAAQDHAQARLLMTQPGVGPITALAFVLTIGEVSRFQHSGKVASYLGLIPSEHSSGGRQRLGAISKQVTCPVFLNQ

SEQ ID NO: 68066 - protein, 457 aa, unidentified
MRQRGKRTKGIEEAHPFAGMSQVNENAAGVDIGAEEIVVCVAGDDNTQIVKAFGNYTVDLQSIGQWLKEHNVKTVAMESTGVYWIPLFEVLENMGFDCLLISSRSLRRVPGRKSDIQDAQWIQTLHSYGLLESSFRPQADLVALRTLLRHRAQLLEHRAPHILHMQKSMLQMNVQLSQALSDITGDTGIAIIRAIVAGERDADNLAAFRDRNCKKSAEEIGRALTGTWRAEHLFVLKQSLEMYDFYTQQVAACDAEIDRMYALTRPDWEEGELKPPSKKKRNSHSKNAPKNQEEIRKHLKRISGVDISAVDGVGVMVAQTVIVESGTDMRKFPSDKHFSSWLGLAPKHEISGAKVLKNRTLKTKNRAGQAFRMAAQSVKRSDCVFGMMFRRFRSRMDNRQATVATAHAIARVVYRMLKYKVEYEEIDVTEYEKQYEEQQIKYMKKKAAKLGFQLVPA

SEQ ID NO: 68067 - protein, 358 aa, unidentified
MSKYGPKTGKSKFGDVSEGDVVYVGLDVHKSSVHAAARINGRVVTMVMPAMPEHILATLEPLRPACRKIVYEAGPTGFGLARALEGVQWPVEVIAPGKTPKPANQGSKTDRLDCIKLAEYSEKDLLKRVAIPTEQEEADRLVGRLRNQLVKKQRRVKQQIKGLLLLHGIKEPPGLENWSLGSISALREISLRREARFALDILLDEMEHLHGLLNRVMREVRRLAKEDRHAEKCARLRTHPGVGITVAMKYLTEVFEPGRFSDPSQVASFVGLAPRISQSGDKRREGPLQKAGQGDLRSLLIQASWQWIRRDRQAMAVYLRLLRNTGRKQMAIVGMARRMAVNLWCMLTRDQDYHPLAA

SEQ ID NO: 68068 - protein, 352 aa, unidentified
MQTVTTIGLDIAKSVFPVHGVDAEGNVLIRRQLKRRYVLAFFEKLPPCLVGIEACATSHHWSRELKARGHNVRLMPPAYVKPYVKRQKNDAADAEAICEAVTRANMRFVETKTPEQQSCLMLHRTRQLFIRQQTSVINAIRAHMAEFGIVAPVGRKGVEQLLDVVADARDRRVPEVARACIAALGAQLRLLKAQILEFDRRILAWHRSNETSRRLDELPGVGPALATALVASVADAKAFRSGRNFSAWIGLVPKQHSSGGKDKLGSISKQGDRYLRSLFTAGALAVIRYAKIHDTQHRPWLTALLARRPTKVAAIALANKIARMAWAMMARGKAIENPSHLRRRRDHAGHPA

SEQ ID NO: 68069 - protein, 402 aa, unidentified
MRVTFGIDVSKATSEIAIVVNGQAVSHFKITNNQPGFNKLQKSLNDFQNPEIVFEATGLYSRRLRVFLDDYGYRYTQLNPLASKKQLDRLRPNKTDKNDALHLAETQFEIRRALTYQQDPIYQQLLDWSRFYDEITCDSVANKNRLHKALQCTFPEAGGVLNSPTGHLYWHLLQAFPIASMVRQSSSMELSQHIRKFCQLSVPNSQALAARLRQLASESYPCVGEDSGVVMQVRYLATELLRLDDLKNDIIQKMARLAQDLPELAILESIPGISVNTAVRLIGELGDIRRFTSANKLNAFVGIDLRHFESGEYIAVDHISKRGNPYARKILYRTILNMMVSARTKPSHINDYCRERKKQSSGKADFKKIAMGAISRLNRTIYHLILNNQKYDYLKTRPKAES

SEQ ID NO: 68070 - protein, 316 aa, unidentified
MNTSSPFVGIDVAKDELVIALGPSRDLVAVPNDESGIRHVLEHLQAACPELIVLEATGGYETAAVAALAAAGLPVVVANPRQVRAFAKAMGILAKTDNIDAHVLALFAERVRPPIRPLPDEALRMLDALLTRRRQLIEMLVAERNRLAHALPPVEKSLKQHIRWLERRLADVDSDMDQAIQQSPVWRAKEDLLRSVPGVGPVVSRTLLADLPELGALNRKQIAALVGVAPLAKDSGTLRGKRMVWGGRAPVRAVLYMGALIASRHNPVIRDFYQRLVAAGKPKKVALTACMRKLLVILNTMVRNNTRWGERYALSA

SEQ ID NO: 68071 - protein, 338 aa, unidentified
MEILKQNVGIDVAKDSFVATFTILLKDLIVKNKATKEFKNNSNGFENLYQWCKKLQEDNLEVNYTMEATGVYYESLAYYLYEKDVTVHVLLPNKAKKFAESLNVKSKTDKIDSKVLGQMGVERNLEKWVLSSEIYRHLRSLHREKQQIVKERTAIKNQLHAEEYSGDPVKTIIRRMKNRIKYLNKQIESIEKELEDLVSKDDYISERVKKITKTPGLGFRTVIAVIAETNGFANITSIKQLSSYAGYDVRIRESGKWKGKSKISKKGNSHIREIMYMPSLSSIQYAETYKKFYKRLNEKKQNGLISGTAVQRKLLGLIYTLWKNNTEYIENYEMKKAS

SEQ ID NO: 68072 - protein, 338 aa, unidentified
MNYVGIDHHRQYSHMTLMDQEGQVLRSGRVPNLRAEIEKFLEGGEAMEAVIETGRSSYTMVDVLEEMGVAVKIAHPNEVKAIARAKIKTDKRDSEVLAHLLRMNMIPEVYRRSAENRQSQRVLRQRAFYVSAMTALKNRVHAFLAQQREEIREVVARETNIFSEKGQKALLELDLARGEKRLLEALLKTYRHLETRIEESTALVGKLYEESREAQLIRTIPGFGKYLSVLVAVEIADLNRFSDAAHLHAYAGVIPSTHSSGDKTYHGKIIRAGNRWLRWAAVEAVWPAIRADFDLRCFYERLARGKGANKAKVATARRLLTIIYKVWKEQRNYIPYRR

SEQ ID NO: 68073 - protein, 467 aa, unidentified
MPNQASSKQSQEQAELKLLDLNAAGMDIGAEEIYVCVPSDRDESPIRAFATYTVELHALADWLQACGIKSVAMESTGVYWIPVYEVLEARGFAVSLVNARHLKNVPGRKSDVADCEWLQQLHTYGLLRSSFRPDEEICALRALVRQRHNLVRSRSRQIQLMQKAMEQMNVKLTEVVSDITGLTGLSIIRAIVQGERDPKRLAELRNTRCKKSEEEIAMALEGTYQFEHLFSLRQALATYDFYGQQLQDCDQAIESHYTSMPDRPPGEETSPPKTSNQKRRKNQPHFDLASSLYQTVGVDLTEIDGIDALTVQAVIAEIGLDMSRWPTVKHFTSWLGLSPHNDISGGKILRTRTKKTKNRANTALRIAAQTLHRSDSALGAFFRRMRAKHGPAKAITATAHKLARIIYFMIRDRTPYQDPGAQQYEEQYQERLIRNLKRKAARLGMQLIPAESASDTVPSSLEPAVVS

SEQ ID NO: 68074 - protein, 308 aa, unidentified
MDTTVVGIDVSKDRLDVHVHPDGTALSFSRDASGIEALIGKLAGLVLQSVAVEATGFETVVVASLAAASLPVVVVNPAQVRAYAKALGKRAKTDPIDAQVIAQFAAAAKPQVRPLPDAATQALADLVTRRRQIIHMIAAEGQREKRASPRARKSIARMLKTLRAELSVIDAEIDESVRGSSIWCEKEKLLDSVPGVGAVTVRTMLAELPELGSLDRREIAALVGVAPFTRQSGQWRGKSFIGGGRASVRAVLFMAAMTAMRWNPTLRAFHQRLRAAGKPKMVALIAVARKLLTILNAIIRDNKPWQTA

SEQ ID NO: 68075 - protein, 341 aa, unidentified
MGRYYYVGLDVHKRVIAFCVKGADGAIVKEGTVRARRGELGAWLEGLPRPWTAGMEATMFSGWIYDFLRAQGAEVRVGHPYLMRAIVAGKKKNDRLDARTLADLLRCELFPSCYMAPEPLRELRRVLRYRQLLVREAVRMKNKTAGLLMELGVDFTKTRLHGRKYFERLLQELEEVPASVQQLLRLSREAMELFEANQKWLLAELQKHPALCERVQRLTSIEGVGEVTALTWALEVGEPGRFRCVKQAISYCGLCSAQRESAGVAHRGPLSKQRNKHLQHALIEAAKLAPRWNPQLAAVYDQARQRGANPNQATLAVARKLVAYLLYVDKSGNRFERRAAA

SEQ ID NO: 68076 - protein, 375 aa, unidentified
MKEKVRFLGLDVHAETIAVAIAEPDGEVRSLGTIANRAESIRKMIKKLGSVEQLKACYEAGPTGYVLYWQLAELGVACEVIAPTLAPMKAGDRVKTDRRDAERLARSFRSGDLTAVWVPDEGSESLRDLVRAREAAKQDQLRARHRLGKFLLLTGQRPALGVKAWTQSYLAWVKQIHFTQAARESTLLDYLHEVEHMAERVIRLEQAITEAVKQASPQMQQVVRGLQAMRGIAQISAVTIVAELGELSRFESARQLMGYSGAVPSEESSGKRTRRGSITKTGNAHLRRIAVEAAWNYRLRPSVGPALRKRQEGVSEEIKEIAWKAQHRLHKRYMKLSAAGKDQRKIITAVGRELLGFIWAIGIKAEAASKRQMAA

SEQ ID NO: 68077 - protein, 337 aa, unidentified
MKYCGIDLHSNNSVVIVSDEEDRIVFSKRLPNDLGQIRAALEPHREDLAGVVIESTYNWYWLVDGLMDTGYQVHLAHPSAIKKYEGLKHSGDFADATYLAHLLRLGLLAEGYVYPREERGARDLARKRLQLVRYRTAQILAIEGILMRQTGARLKGEAVKRLTAEQVDAFAFAPDVSLAVQANRAVSQTLSQQIEALEKRLQQRVILRPEYRLLKTVPGIGEVLATTIMLETGTISRFTRVGNFSSYCRCVESLKESNGKRKGEGNTRNGNKYLAWAFVEAANFALRCCPQARSFYDRKKSRSNRILALKALAHKLARACYHMLQDQKPFDVHLCFG

SEQ ID NO: 68078 - protein, 349 aa, unidentified
MRFYHGQHQHWCGIDLHARTMYVCILDAQGQVLVHKNLRAAPEAFLETIEPYREGLVVAVECIFTWYWLADVCAREGIPFVLGHALYMKAIHGGKAKNDRIDALKIATLLRGGMLPQAYAYPAGMRATRDLLRRRLHLVRKRGQLLAHIQMTSHPYNLAPLGKRIAYPANRAGVAEHFEDAAVRKSIGLDLALLERYDELLTDLEADLVRQAKQHDPQAFALLRSIPGVGKVLALTILYEIHDITRFDRVQEFASYARLVKCAKESAGKRYGTSGAKMGNVHLKWAFSEAAVLFVRHSAEGKKLLAKLEKRFGKGKALSILAHKLGRTAYFMLRRGKAFDAERFLATVS

SEQ ID NO: 68079 - protein, 407 aa, unidentified
MLLIGDDWAEDHHDIELQDEAGRKLAAATLPEGVTGIGRLHELIARHGGELEPGKVIVGIETDRGSWVQALIASGYQVYAINPRQVARFKERYASSGAKSDKGDAHALADMVRIDRDQLRPVAGDSDQAQAVKVVARAHQTLIWERTRTFQRLRSTLREYFPAALNAYADLALTSTDALELLIKAPTPDTAVKLTRTQITAVLTRQRRRNRDAKAATIQTALRERQLALPEPVTAAYAAAVTAHARLIIALNEQIAAMEEEVKAHFLNHPDAEIYLSMPGIGEITGARVLAEFGDDPARYASAKARKNYAGTSPVTRASGKSHTVQARYVRNNRLADALQRQAFCALQASPGARRYYDRQRARDVDYNPALRQLGNRLVGILHGCLKARTSYDEAIAWSHHAHPQAA

SEQ ID NO: 68080 - protein, 403 aa, unidentified
MITFFAGLDWASQTHAVCIIDAHGAVFERFDIDHTAAGLAELRRHLVAAGSPPVAIERPSGLVVDTLMEAGFTVIPIHPNAVKATRPRYRSHGAKSDASDAYLLADLLRTDGHRFKPLAPQGEEIRALRALVRGRDDLVATRVQLANQLRSLLDSFWPGAVAIFADVDSPIALAFVERYPTPESASRLGPKRMAAFCAQHAYCGRRTAEELLARLHHAPITDTGELEADAKGELARSLARTLTRLVEQIRLLTSRIEHHVASLDDGQIVMSFPRAGRICAAQILAELGSVRERFDSDAQLAAEAGVAPVTYQSGKSKSVTFRWACNHRLRAALTCLADNSRHASAWANRVYTAARSRGCDHPHAIRILARAWVRILWRAWTDRKPYDPAHHQGARLAFESTQG

SEQ ID NO: 68081 - protein, 384 aa, unidentified
MKKNTTAKKNQKAVSKTYKNQIRQMAAKQRLTIGLDLGDRTSRYCILDEAGEVVSEDQLPTSKTGFRSLFEKMPASRVALEVGTHSPWVSRHIASMGHEVIVANPHKVKLITQSVRKNDRIDARQLARLARVDPKLLSPIRHRGEAAQADLAVIRARAELVECRTGLINCARGLAKPMGERLKKCDADQVKEALADGLGEAVQTVIRPLLKSVEAISEQIAVYDEKIGGIAKRYPETELLTQVYGVGTLIALTYILTIEDAQRFEHSRDVGPFLGPQPKQRDSGSSQPQLGISKSGDRLLRSLLVQGAHCILRKGAPDSDLRAWGLGKLASGGKRAKRRTVVAVARRLAVLLHKLWVNGEVYDPLYNRKAMAAAKARAKAKAAA

SEQ ID NO: 68082 - protein, 339 aa, unidentified
MKVLYVGTDLSKNSFPCSIWVNEKSTELGQFENNQSGFKELAVAVALNKEKYGYDSVHIILESTGGYELHLLSFIQSQGWAFTLPNPKAVRDWAKGVGYRAKTDRVDGRILAHYGGERRPKAQQPVPEIVEQLDSLLQRQDDTQKTLRQELNRQHALSYHPNASASAIKSIERTVTFLESEQQQLADDIALLLKNNPELRTQSEQLLTVAGVGKKTVLPLLVMFHRFDARTNGEGTGKQITAYMGLDPKPFESGDTVWKRPSISKMGNSIMRSRLYLAALGGVRGKKSPLRHFYLRLVERGKAKKLALVASARKVLIWAWAIFKQGVEFDASRLATPSD

SEQ ID NO: 68083 - protein, 379 aa, unidentified
MKKPCIAIDVSKGESHVEAYLGLNNLFIKATKIKHDVEGFNYILDVVKKIEEKASEKPVVLFEATGVYHRTLEFFVTEHKLEFFVINPLHSAKFRKRELRSVKTDKRDCSNLARMYYNGLLKESYKEEEIYNELRQLNRYYETQVSHLVKCKVSFNEKLDIVFPGYNELFSKLYSDISLLIIKKYHHPKNIVSKEIYDIAKYLEDKTIHTKIYCMNLAEKLINFSKQCCPGCDKKSVDVDILLGLINELEYYQDLCEKTLNRIINLAKNLSYFNILHSIPGIGENLAARLIAEIGDITRFENTKQLTAYAGIDPIIYQSGQMSGEHLKMSKKGNKRLRRLLYLAITCMLRNKSDNNSIRDFYKKMRLELLNFSKFSNLL

SEQ ID NO: 68084 - protein, 358 aa, unidentified
MAGKVTETAVVGGVDTHKDLHVAAAVDQNNKVLGTQFFSTTRQGYRQMLAWMTSFGALKRIGVECTGTYGSGLLRYLQNAGLEVLEVTAPDRMERRKRGKSDTIDAECAAHAAFSGIRTVTPKTRNGMIKSLRVLKTCRKTAISVRRVALQIIHSNIISAPDELREQLRNMTRMQLIRTLGSWRPDASEYSNVTNVYRISLKSLARRYLALHDEIADLDVMIAAIVDELAPELIKRNAIGYESASQLLITAGDNPQRLRSESGFAALCGVSPVPVSSGKMNRYRLNRGGDRAANSALHIIAIGRLRTDDKTKEYVARRVAEGHTKMEAIRCLKRYISREVYTLLRNQNRQINSIPITA

SEQ ID NO: 68085 - protein, 343 aa, unidentified
MNEVITIGVDLAKSVFQVHGVDAEGAVIFRRQLKRGQVLPFFKKQPPCLVGMEACATSHHWARQLLELGHEVKLMPPRYVKPYVKRNKNDMADAEAICEAVTRPTMRFVEIKTPEQQSVLMLHRTRHLFVRQRTTLVNALRAHLAEFGIVAGVGRNGLERLLNVIEDGEDDRVPSAARDCLLTLRDQFEMVKHQILDADRRILAWHRASEVSLRLDDIPGVGPLIATALVASVPDPHAFKSGRDLAAWIGLVPRQNSTGGKERLGHISKAGNRYLRMLLVVGALSVIRRAKQVGYTRRPWLTKLLERRSTKVAAIALANKIARTAWAMMAHGTFYKEPVSQAA

SEQ ID NO: 68086 - protein, 344 aa, unidentified
MRKYIRIGVDIAKNSFQVHALESEDCSATKRKLSRSGIVKFLAEVEPCAIGMEACGSAHYWARRFRAMGHEVKLTPPIYVKAYVKRGKNDAADAAAICEAMSRPNMRFVAVKSEDQQATLMAHKTRELLIKQRTMSVNALRGHLAEFGVIAAKGISHVEELVERAAAADLPAMVQATLGVLLAQLRSLDAAIDELERAIVADHRRDPVSRLAASVPGVGALAASAILASAPDPHAFKSGRDFAAWLGATPKQNSTGGKEKLGSITKQGNRYIRRLLVLGAISVLRAAPKRKGALCDWLAALRARKPAKVVAVALANKNARIAWKLMVSGERYRPAKPITGFNSP

SEQ ID NO: 68087 - protein, 355 aa, unidentified
MTSAKYIGMDVHKESISMAVRNAAGKVVMECVIETKASMILQFFAGLRGELHVTFEEGTWAAWLYDLLKPHVTRLVVCDPRRNALLQDGNQNDRVDARKLSDLLYMNKLNAVYHGDHGLRTLKELGRTYLTITRDQSRVMTRVKAVYRSWAIPCSGKQVYASRHRAEWLGKIHEPGVLRRAELYYQQLDALRALRQEVRRDLLAESKKHKVWKRLCEIPSIGPIRAAELLGILQTPHRFRTKRQLWTYCGLGVMTSSSADHEVAKGQLRRKKKPAQIRGLNENCNHDLKNLFKGAAVVASIKPGPLAEFYAALMAKGMRPEMARLTLARKIATIVLIVWKRGVCFDAQYLKPQTA

SEQ ID NO: 68088 - protein, 348 aa, unidentified
MTIVGTNPDAVVGGVDTHVDVHVAAAVNHVGGVLGVEAFSTTRAGYRRLVGWLRSHGELTLVGVEGTGSYGVGLARYLTRAGISVVEVDRPNRQARHRQGKSDPVDAVAAARAALSGTATGSPKSRDGNVEAIRVLMIARRSAVDSRIETLNQLRHLVFTASPEIRAKFTGLTAVSLANKASGLRPRTGDDRVRYTTLVTIRALGNRVQYLREETKRLNRLLRPLIRESAPELLTVFGVGFDTAAKLLVAAGDNPERIRTEGAWAHLCGVAPIPASSGKTTRHRLNRGGNRQANSALYHIVITRMRHDQATRDYVARRLAEGKTIGEISRSLKRYAAREVFKHLPRPA

SEQ ID NO: 68089 - protein, 341 aa, unidentified
MKNKSFIGIDISKNVIDASIFCEGTPIKDFPHAVFNNSRKGFGEMCTWLKKNHVVLSNCLFGMEFTGSYSMELEKFLNARKFQFCMLSTHVVKHHPMGPKDKSDKIDSAKIADFLYRYDGTECVKPYKMPDKTMQRLKALTNERKFLVEQRTCFMNRRQLCTTKEDAQLYDGYIKKFSRDIENIELEEQKLLATDDSLLATYKNLLTIPGIGFVNAINVIVITRNFTAFKTARQYASYVGVAPHSHTSGTSVKWRPRPSARCDGQAKADLSMAATVAVQYDAELQSFYNRKLGGKQDSDTKRKTLNAVKFKLILRMFAIGKQNRKWEPLDSKSSNEKLAIS

SEQ ID NO: 68090 - protein, 347 aa, unidentified
MPVYIGVDFHARKQTVSYLTTEDGENQQVELEHEKDVVRAFYEQFRGQKVIVGFESSGYAAWFEELLEELEYETWIGHATAIRQLARRRQKNDRRDADLILELMVRGDFPRLYRYSRESRETLQQLRYRQRLVKMRTMVINSLRFMVGSRGVSLRGTLQSRPGQARLQQVVLPGPLSQQRDELLRLLIEIQQKVETVEEWLKQKAEADPRVQRLRTHPGIGLLTGLGLVHTLESIERFSDSRKVTAYIGLDPVEDSSGERRRMGSISKQGSRLLRLLLVEAGQVAARRDPELGQVYRRVTLRRGHATAKVAVARRLLVRAFIMLRDEIDYAEFCRRGVAARSSRGNA

SEQ ID NO: 68091 - protein, 356 aa, unidentified
MTHVSTTLSGNTIGVDLGDRTSHFCILDAEGEVIERGKLETEGACFQHAFSRWAPSRVVMEVGTHSPWASHMVESLGHEVIVANARNVRAIYDCDNKSDRVDAEKLARLGRFDVKLLHPIRHRSPQAQADLVLVKTRTFLVSQRTATSNRIRSLVKTAGGRIPSDIGPEALAKKARAHIPSELKRGLEPLLRHLAFTVTQIREVEKEIRKLCRERYPETALLRQVNGVGEITSLSFVLTIEDPERFERCRDVGPYLGVVPRRDASGQRDPELPITKAGSKHMRWLLVQCAQRILGRFGKDSDLRRWGLELKDRGKKKAKKRAVVAVARKLAVLLLSLWKSGEEYEPLKNREPSRAA

SEQ ID NO: 68092 - protein, 322 aa, unidentified
MSVSVLGIDIAKQKFDAALLVDGKTKHKTCKNSVEGFETLVIWLEKQGIKKVHACMEATGSYGEDLAIYLHEAGHIVSIVNPARIKGFAQSELLRTKTDKLDAALIARFCLAMKPGAWIPPSPEIRSLRALVRRVDGLIDMRSQEKNRISTAHESVISLIKGHIAYLDQEIEKIRQQIAGLIEQDPNLKRRKELLESIPGIGKATIPAILAELDDLEKFTHVRQMVAFIGLAPRETLSGSSIKGKPRLCKMGHTRLRKTLYMPALVSIQCNPVMIAFYNRLKEKGKNGKVIVCAIMRKLVHVIFGVLKSGKKYDPNYKPASA

SEQ ID NO: 68093 - protein, 493 aa, unidentified
MATRRATTDTQTQPRSAYRRRKARARAKAARAHEAEERRVEGLPVTQAHAAGIDVGSRSHWVCVGAGAGDPAAVREFPAHTAGLHQLLDYLRQHHVTTVALESTGVYWIPLYELLESNGFEVLLVDPSYTKQVKGRPKTDRLDCQWIYRLHSVGLLAAAFRPDEKTCQLRSYLRQRANLIRYAGQHIQHMEKALEQMNLKLREIISDITGVTGQAILRAILKGTRDPQKLARLRNQKCKASEAEIAQALHGSYRDEHLFALRQAYEAWQFYQKQLDQVEEQIQQQLARMKQDRALPPLKPRPRTSGRKPNQPRFDVRTALYYVVDIDLTEIEGIAELTALTIISEIGPDVSKFATVKHFCSWLGLCPQLKKTGGRVKSSRTRPGVNRAAVAFRLAANSLYASKGALGAFLRRQKGRLGAPQAVTATAHKLARIVYLALKHGLAYVRQSQQEYEAKVREQQIKGVQRRARQLGLEVIEKQPPTSTAAQTAAVPC

SEQ ID NO: 68094 - protein, 393 aa, unidentified
MFYVGLDIAAEKHDCCIMTEERQVLKQFVFRNDAEGFEFLKKTLTKLAPTEEIKIGLENTGVYGSNLVQFLRRNGYKTYTFNPLLINKSIQATTLRKTKTDKADAKFLAQYLTWDNSQPDHDVSYHISELKSLSRLRFSLVQQRSKCKTQAKGVLAQVFPELTQVFSDVFGTTARTILSLCPSAQRIAAYPVPQLADLLRTTSRGQLGLEKAELLHALAVHSVGNSSIALELQLQIYLEQITQLSFHICRCEAALRTILAQMDSPITTIPGIGTVLGATILGEIGDIFRFSSPAKLLSFAGLEPSITCSGKSVSAPGRMVKHGSHYLRWAFGQAARCIILRDQTFAAYASKKRAEGKHFNVVCSHVAKKLMRLVFALLKNHSSFIPNYSSLAA

SEQ ID NO: 68095 - protein, 360 aa, unidentified
MRIIGCDLHSRQQTLAMLDTATGEIEKTTLKHEENIVREFYSNLPRPVRVGIEATGSMQWFLNLMEELGIECLVGHPAEIRAAEPRKQKHDRRDADLLLSLLAEERFPAIWLPTKELLDIRALLRHRHQWVGLRVKIQNALQAIALANGLRRGSSLWTRAGQQAIAALPLSPHAAYRRNELQAMYVQFETEIEKLNQRVEEQARERFGARLLMTHPGVGPITALATDVFLGDPARFADSKALASYVGMIPGEYSSGKRQRLGGLTKQGNPLLRFLWSEAVIHAVRRDPQLKHFYRRKLIQKGLGKARAAVARKLGIRMWIMLRDRVEYNEFCRRGQKQQTSGDARAGMPDGVMVRKSPAE

SEQ ID NO: 68096 - protein, 529 aa, unidentified
MVLSSPSLNLVRTQSLEPGTVVSTLRWMNTRRNVFSSSQASFARRSKEHFVKENLRRCCGIDVHKNSVTVCVLAAAGQRHIETKKRKFRTFTRDLKQLRAWLKNCQVTEIAMESTGQDWRPLWNLLEGEFTKLILVNPQHIKGLNGYKTDPKDAQWIADLLDSGKLRGSWVPPRSIRELRDLTRHRVNILEDLNRAKNRIEQLCQSGNIKVSSVATDLFGVSGRKMLKAIVENQHDAGWMADYARGQLRNKRRELELALQGTFTDEQRWLLEKELRQVEWLEGQVEGLEEEIERRVSGFEEAIQRLRTIPGIDRKTAWTIVAEVGVDLSAFADAKHLASWAGLCPGNRESGGKRMSGRTRKANRYVKRAMCQAAWAASHSKNTYLSAFYRRMAIKKGAPKAVMALAHHMIVVIYQVLSRKEEYVEMGGDYYDQRNKPRTIARLVARLGRLGYQVDLKLLENAMPADPTEKDNESEPPSQPDAVPEEGLGAKRKRGRPCKCRQRGIICKHQAAREVNPLIQQPPSEGKFS

SEQ ID NO: 68097 - protein, 385 aa, unidentified
MSELNDLSRSLTSLEQDKTIIAVIEMSQSSWLVAGIVPGIERHPLKKLEPSEEELVRLLMRWRTEATKNGHTITRIAVAFEAGRDGFWLARWLRARDIETYVIHPTSVAVSREHRRAKTDRLDTGLLKRVFIGWLRGEPDHCHMAAIPTLAEEDAKRPNREREGLVRERTRIVNRMKSCLARFGIRNFKPTLRKAPERLATLATPEGVPLPPNTLLELRRDMARLRFVMDQIKEVEEARAQRLEQAPQEKTHAMVRLIARVIGVGIETADMLVHEILSRQLRDRRAVARYAGLTGAPDESGNKRREKGLAKAGNARVRRGMIQLAWRFLVFQKDSALARWYRTRTESAGKKRKTMTVALARKLLIALWRLVTIGEVPAGVLLRAA

SEQ ID NO: 68098 - protein, 366 aa, unidentified
MQKISTVRVSASKIFNGCQLTIGLDLGDRWSFYCVLDEVGKIILEQKLPTTLAAMKQTFARIPRSRVALETGTHSPWVSRLLTPLGHEVIVAHAQKVELITKSTRKDDRHDAKTLARLARIDPELLGPVRHRSATAQIHLTVIRARAELVSARTALINAARGLTKSYGERLRKCGSQQVSRELAMGLSAELREVLEPLFGEIESLNERIKEYDRRIEKMAKEAHPEVELLKQVKGVGDLIALTYVLTIEDPHRFRKSREVGCFLGLRPGRRNSGQSEPQKRISKEGDEYLRTLLVQGAHYILGPFGEDSDLRRWGRKLAERGGKNAKKRAVVAVARKLAVLLHRLWVSGEVYEPLHNSQKVMRAVA

SEQ ID NO: 68099 - protein, 340 aa, unidentified
MAVTVLGIDLAKNVFALHGVDHKGHTVLCKPKVSRAKLLEIVANMPPCLIGMEACSSAHFWARAFEKVGHEVRLIAPKFVAPYRLSGRTGKNDAADAQAICEAVQRPHMRFVSIKSEEQQSIQCLHRARQGLNEERTSVCNRIRGLLTEFGVIAPLSPERLRNEFEAMKIHLPALATTCIDGLFLHVDNIERKLLKFDRLIKTTAEQDERCQQLMKLKGVGAMTASALVCAIADGKEFNNGRQLAACLGLTPSQYSSGGKQKLGRITKAGDNYIRSLLVQGARSIMASAGRKDAPLSKWVCDVKDRRGYWRAAIALAAKNARHCWAILHYGESFESCYST

SEQ ID NO: 68100 - protein, 412 aa, unidentified
MAVVMNQDSGFDIWCGLDVGKTGHHACALDAAGRKVFDKPLPQDQKRLEELFDKLQTHGRVLVIVDQPNTIGALPIAVARSMGIQVAYLPGLAMRRAADLYPGNAKTDARDAFVIADTARTMPHTLRRVDAGEETLAELKVLVGFDEDLAAEATRLSNRIRGLLTQIHPALERVVGPRLTTKQGLAVIEQLGGPQAMAAASKSKLLRVISKAYPRGTQEFADAITTALAEQTVIVAGTAAAEQVLPQLAASLRQTLDQRHALAAQIEQVVDAHPLAEVLTSMPGVGVRTAARILLDVGDASQFPTAGHLAAYAGLAPVTRRSGTSIRGEFPARSGNKHLKRALFLSAFAALRSDPTSKAYYDRKRAQGKKHNAALICLSRRRCDVLFAMLKNREPYRAPTPTREPSPLPLAA

SEQ ID NO: 68101 - protein, 393 aa, unidentified
MICVGIDVAKDKHDCVILNSEGKILAGVFTIPNNADGFDTLLQKIRSCTSSDDKIKVGLEATGHYSYNILGFLINQGLPTYVINPLHTNLYRKSMSLRKTKTDRVDAKTIATMLMSNVDLKSYTDTAYHNEELKSLTRYRFDKVRERAQLKQSVSRLVTILFPELEKLVPTLHMSSIYALLIEFPGAKQITEAHLTHLKSLLKDASKGRYGRDMATEIRDAAKHSIGSVMPAKSLELRHTIRLIRELDSAIEDIESAIEAIMDEIQSPITTIPGMGFRMGAMILAEIGDFSRFDSPSKILAYAGMSPSTYQSGQLSLAGTYSHMEKRGSRYLRYALYNATKYVCHWDPGFAAYLAKKRAEGKHYNVALSHAAKKLVRLIYAMEKSRQPYKRAA

SEQ ID NO: 68102 - protein, 453 aa, unidentified
MKEKNVSMKVVNPHAAGIDVGSRSHFVAIGQDDDQVREFGAYSEDLNSLAQWLIANDVKTVAMESTGTYWQNLYTVLQGAGLEVILCNGKFTKNIKGRKTDVQDCQWIQKLHTLGLLSGSFLPDEASEQLRTYCRHRTNLLGLAASTTHKMQKYLQLLNLRLDIVVKDVTGLTGLSIIHAICNGESNPEKLASLRNGNCKKSEKEIAKALQSNGRKDYLFTLTQEYKLYLSVQEKIKECDEEIEKMLQEQINGDEEKKQHFIGKKVHKRVNKNTPKNIDINLLAYQYYEGVDLLAIEGVSHATILTLMSEIGTGINKFSTAKEFSSWLRLSPNTKISGGRVLSSKVAKGSNRLKIALRNAANAIGNLKDTALSNFFRRIAFRKGRVSAISATARKLAVIIWNMLVKKVPYKPETDYEFLDQKRKRKVMEMKKLIHKFDITPDDLGLQLNINNL

SEQ ID NO: 68103 - protein, 398 aa, unidentified
MYNAVGIDVSKGKSTVAVLQPAGVIIRKPFNVNHTSSELDELAKYIGSLEGETRVVLECTGRYHEPVVKTLSEAGLFVSAVNPHLIKNFGNNSIRKVKSDPADAKKIARYTLDNWIELRQYSSMDNTRTQLKTLNSQFSFFMKQKVAAKANLIALLDNTYPGVNKLFDSPVRDDGSEKWVDYAYSFWHVDCVRKIGLKTFTERYQAFCKKHHYNFQPAKPAELFLASKDLIAVFPKEASYKLLIQQLNLASSHVEELRSKMNELASTLPEYTTVMGMYGVGKTFGPQLIAEIGDISNFSHREALTAFAGVDPGVDQSGTHNSKSNKASKCGSNRLRKTLFQIMSTLLQTAPEDDKVYQFLVKKRAEGKPYYVYMTAGANKFLRIYYGKVKECIRNLEQ

SEQ ID NO: 68104 - protein, 351 aa, unidentified
MGKSITDFSSVTTVGLDLAKHVFQVHCVDASGRVVVANSVRRNKLLEFFASLPPCLVGLEACGSAHHWARELVKLGHDARLMPPAYVKAYVRRQKNDAADAAAICEAVSRPSMRFVPLRSLENQAALMHHRVREMLVAQRTQVLNALRGHLAEIGVIAPQGPKNARDLARLIAADDAALPPVVRAALAPLVRQLDRLDDEIRLADDAIKTMAKADDNARRLMSIPGIGPVTASAIAASVQDVSSFSGSREFSAYLGLTPRQNSSGGKERLGRVSKMGNRYLRKLLVVGAHAVLYNRKGHADALRTWASKLMETKPFKLVAVALANKLARIAFAVMRDQTPYSAKEVSPAQG

SEQ ID NO: 68105 - protein, 427 aa, unidentified
MSYRIAGIDVHKRMLHVVVSDVQVDGEYDFTRRIFGSLPEALRSLAAWLLEQQVQEVVMESTAQYWKPVWGTLERYWKQICQTREGALATSGTLHLAQAQSNRGRRGRKKDFRDAERLVKRLVAHELVLSFVPDVEQRLWRTVVRTKYQLTRNRVQLQNRLEALLEETHIKLSSLVSDLLGASARRMLHAIADGETNRETLAALADRGLRATQEQLQDALGVCQELNPVYRRLIRMVLDEVASIDKRIEQLNQEMANLLRPHEDQVKRLAEVPGLGVDSAQQVIAEVGATAATFPSEKHLSSWVGACPGDEESAEVNYSRRSPQGNRHMRRILNQAANAAVKHKGSIFEILYRRYVPRLGHNQTIGIIAHKLCRLVWKILHRGIRYEERGPEVSKASKQKRTRKMIQALRRLGYRIEPSPSQSAIPA

SEQ ID NO: 68106 - protein, 339 aa, unidentified
MNIKTLGIDLAKKSFQLHGLDANGRVVLRRKIMRRDLSAFMVKLPKCQVFMEACGTSNYWGRKFIAMGHDVRLIAAQFVKPFVKSQKNDQNDAEAIVECGLRPSMRFVAVKDTWQQDIQVLHRARRRAINARTAIINQVKGLLLEYGILIEECGSKFKAEAWDKLEDGSLELTSTIRSVIRENLREYDFLVQQVAHFDQEIKTAGMASEDCQRLLKVPGVGILGATAFIAAVGDARVFKNGRHVGGWLGLVPRQHSTGGVARLLSITKKGDPELRSILIHGARANLLSMKRKKKPDALSTWALGLLDKKGWGKASVALANKMARMMWHILAYKENYKVV

SEQ ID NO: 68107 - protein, 316 aa, unidentified
MSNEHNNIFIGIDVSKATLDISISGKHFKINNNIKAISAFIKAEIDSKKMAPSLVCLESTGGYENVAMQAFHEASIAIHKAHPNKVYNFAKFSNHFAKTDKLDAKLLEKYAKYVYLEGEEKGDIPATQATAELQALSSVQSALNDNLHAAQCRLKLLKGKAAKYTEKQIIFIKKQLESIEADIKKVIDSDDDLSQKREILKSFKGVGEKTTNILLAELSELGTLNKKEIASLVGVAPKLQHSGIKSPGGHIFGGRFYVRKALYMAALVAMRYNEKMKVFYQQLVQAGKPKKVALTAIMRKIAVCLNSMLKNNTFYA

SEQ ID NO: 68108 - protein, 350 aa, unidentified
MSEITLVGLDLAKNIFRINAVDKNGKRIMNKNIHRGSMVTFFANLPSCTVAMEACSSCHYWARTIESLGHEVQIIHPRYVTPYRIGDKNDANDAAAICSAARRPDMRFVRMKSQNQSDMQSIHRVREGLVKEKITTINRIRGLLAENGITIKQGPTWVFTLVPVIISDENNGLSGIMRNLLRVQHEHLVHLRAQINELEVTLKTLAAQDEACKRLMLVPGIGLLTATLLSSEIGNGAAFHNSRAFTAYLGLVPRQYSSGGKSKLRGIGKTGNRQLRTLLIHCARAVQRSVNQGKTPFGGGSLEQWVRDLMDRRGKNKTTVALAAKLARIAWKILAKEEAFNKELFVAQAA

SEQ ID NO: 68109 - protein, 389 aa, unidentified
MKIYVGIDIAKLNHFAAAISSDGEIIIEPFKFTNDADGFQLLVSKLESFDKNSLIIGLESTAHYGDNLVRYLVTELYQVCVLNPIKTCQMRKNNVRKTKTDKVDTYVIAKTLMIQDNLRFVSFFDLDMMDLKALGCFRQKTIKQRTRLKIQLTTYVDQVFPEIQYFFKSGLHQHAVYALLKEAPSPKEIASMHMTHLANLLKVNSHGHFTKEQAKELRVLAQKSVGANDSAISIQITQTIQQIELLDSQLEKIEAEMTDIMKFNDSVIMTIPGIGYINGGMILGEIGDIHRFSNPNKLLAFAGLDPSVYQSGNFQAKTTRMSKRGSRVLRYALVNAAWNVVRNNATFKAYYDAKRAEGRSHYNALGHCSGKLVRVIWKMLTDNVEFNLK

SEQ ID NO: 68110 - protein, 490 aa, unidentified
MSRHQRPPAQAKSPTGKAPPKSRPRPPRAQPPAMPLLNPNAAGIDVHSDMHMVCVPPDRVPPAAAATADSPANVRRFGANSCDLVAIADWLAECGVTTVAMESTGVYWIPLFELLESRGFEVWLVEPGQLSHCGARPKTDVLDVQWIQRLHSYGLLRPSFRPPDSLLALRGYYRQRQMQVRYAASHTQHMQKALEQMNVKLTEVVSDITGLTGRRIIAAILKGQRDPAQLAALRDPQCKNDAATIAKALEGTWRPEHLFALRQAYDLYQFHHQQIAQCDQMIHAELARLPSRAGDKPFTPKPRRCGRKPNDLNFDACGPLFKALGVDLTQIEGIDVGTALVILAEIGVDVSRFPTEKHFASWLGVCPRQHESNKTKQKRAPRKGKNRVAIALRMAAQSLGRTQSPLGLFYRRIKSRIGGKGAVTATAHKLACLVYRMLKYGTEYVQQSMQEYERKVRGQMERALQRKAAALGYQLIRTQALSAEPVQAPM

SEQ ID NO: 68111 - protein, 404 aa, unidentified
MKQGGKVFAGLDWASKTHMVCVVDDAGEIKIRFEIANTGKTFTGLVKRLTKLGVEGVAIERCDGPLVEALLEAGLRVVVITPRQVKGLRSRYSGSGAKSDAGDAYLLADVLRTDGHRLAALSRDSETTAVLRALSRTRKDLVEARVGLVNQLHAQLERVFPGAIGLFARLDSDVAIAFLRRYPTQHAATKLTQARLNAFLRRIAYCGRRPATELFARVHEAPAAGLGAAEADGRAACVLALLRAIDTVRHEERELEAEIIERPDAHADAHIFTRLPRAGHGVRAATLLAEIGDVRSRFPDEQSLAALAGVAPVTRASGKMHTVAYRYACDKKLRNAIIDFADHSRHASPWAAKIYNDAITRGKRHPHAVRILARAWIRVIWRCWQDGAAYNPEQHRSAVMLQAA

SEQ ID NO: 68112 - protein, 388 aa, unidentified
MSQSFDTSRSLTALEQDNTIVAVIELSKAKWLIASLVPGFKRQPLKKIDADAPSLLKLLQRWRDEAGRTGRQIKRIAVAYEAAGDGFWLARWLRARGIEAYAIHPASVAVSREHRRAKTDRLDTELLMRAFLGWLRGEKRHCSMAPIPTLEEEDARRPNRERETLVGDKTRIINHIKAILARFGIRSFRLSLRQAADRLETIRTAEGTPLPDNTRAELYRFLERLSLVREQIRTIEQERLRRLAAAPAAANGPHAMVRLLARVIGVGVETADMLVHEMLSRKLRDRRAVARYAGLTGSPDESGKRRREKGLARAGNARVRRGMIQLAWRFLRFQKDSGLARWFQARTADGRKTTRKTMIVALARKLLIGLWRLVITGEPPQGVTLRAA

SEQ ID NO: 68113 - protein, 387 aa, unidentified
MIYIGIDIAKNSHFASAVNSDGEVLIKPFSFENSRDGFNLFLNKFKDFSVDDCLVGLESTGHYGDNLICFLFPKGFQIGMINAIQTNSLRNSNIRKTKNDKIDTFLISKCLILGDYTLIQEKDISTIKLRTLCRFRFDVIQSQTRLKTQLTTCLDLLFPELHIFFKGNLHLKTSYALLEKYSSPQEISKTRIDTLTKLLASASRGKYSYDDAINLKNIAKSSIGVDNPAISIQIKCLIKQLNLLKEQIGSIDKNIKEIMDELNSPILSIPGIGYTLGAIILSEIGDIKRFSNPTKLLAYAGLDPSVRQSGNFNAKTTRISKRGSKHLRYAIHRASFVIVYNNDVFYEYYTTKRSKGKSHNNALGHVCNKLVRVIFKLLTENIPFNLS

SEQ ID NO: 68114 - protein, 362 aa, unidentified
MKKLSKRGPQKEEGKDRATITVGLDLGDRFSHYCVLNEEGDVMEEGRTQSTDVALRRHFPAEPRLRMALECGTHSPWVSRLLKEQGHEVIVANARKIPSITGSESKNDRNDAEKLARFAAYDPRLLSPVRHRSQARQLDLNLITVRATLVRARTMMINSLRGLVKSAGGRLPAGSAESAPARFKAAIPAALAQATGPLVVQIAQLNRQIKCLDQQIEKLPRKYPEIALLRTVPGVGPVVAAAYVLTLDRADAVADNRQAGAFLGLRPRQSQAGASDPQGRITKTGNSYLRSLLVQSAQYILGRFGPDSHLRRWGLKLAESGGKRGKKRALVAVARKLAVLMHSMWRSGCRFEPFPQTAGPAA

SEQ ID NO: 68115 - protein, 414 aa, unidentified
MDVVYKSCAGLDVHKEVVVAALIVLDALGRGYKETRTFGTMSIDLLALSDWLQSHGVTHVAMESTGEYWKPVYNILENNFELLLINAQHIKAVPGRKTDVNDAEWIADLLRHGLLRASFVPPVGQRELRELTRYRSTFVRARATLVNRLQKVLESANIKLASVATDVMGLSGRAMLEAIIAGQAQPEEMAELAKGRMREKRAELAKALSGRVKAHHRFVLAELLCQIDSLDETIGRFNEQIEEYCRPFEQAVVLLDTIPGVARETAEVIVAEIGVGMSRFPSANHLAAWAGVAPGNHESAGKRYSGRMRQGNQALKTALTQAAHAAAHTKDTYLAAQAHHLTGRRGKKRAIMAVAHSILVIGYHLIQRQEPYRELGGNYFDQQRPEATAKRLVKRLERLGYQVSLQSQAVTAAV

SEQ ID NO: 68116 - protein, 400 aa, unidentified
MNIIDIDVNQGESHATLITEEAEKVAFKFKHNKSGFQILNSYISSNTIIIFETTGVYSAQLTAYLKSKKVKFYELNPLEAKLRMASLRRNKTDKNDSFKLALLGATQLTEIKNHCNKQSALPYDFLRILSLRYKQLIKCRTRILNFLRSSLELTFPELNQIFKKAYAVLALQVFRMYCHPDFLAGLTLKEMTNRVYQFVSRRIHKDVIQSYCAQVWLAAKDSYPAVPADSLEIEIISEYCDEIESYNKEIAYIQSKLIKTAVGLDDFKVISSIPGAGQLNSALLLGFTGDIARFDNYKQLNAFLGLDLNRYQSGKYGKGDTINRRGSSQGRAVETDMIRSMLRNQGKIQNHLVDYYYKLKKPPFNKHDKVALIACANHLNCTIINLVHTHQLYNYSKAIH

SEQ ID NO: 68117 - protein, 335 aa, unidentified
MEQEMSAPMASEQARRAIVGIDVAKAKIDVALKLPAGKWKTKVVANNPSGFAELRAWLGKHGVDCAHVCMEATGVYWERLAEDLADHGFAISVINPAQIKKFAGALGVRTKTDAVDAKVIAQFCATTAPRLWVPAAKSVRRLRALVGRRDALVDLRTQEMNRLEVAATDEVRRSIQSVIAHLDLQVQEIDRQISKDVDDDPTLRDQRELLASIPGFGDRTTAMFLAHFGGILRFARTRQAVAYAGLDTRKHESGSSVNAKPRISKMGHSEIRRALYMPAITAMCRTPWGKEFAGRLLAAGKPKKLILGALMRKMVAIAYGVLKSGIPFNPAIHAA

SEQ ID NO: 68118 - protein, 457 aa, unidentified
MYRELHSLRQALREELKGTLPPLTGVDPDKMLETYLNQLTLYVGLDVADKTVTLLAMNANQEELGHLLDAPNTRPGYAQIGDWLERLRVQHHLRIIAVAGETTGVYYWGVWDSLAQRPNVARVLYNPRTTAHMGEVLSKRVRTELVDALLLAEQLRLGSTPEVVLTDNAELLSARLCSRAARDAAQMINRRKNQLRSLLRGYNPMISQVFPGSKFHHPAVYAVLQQYVFPNEFVTAGVEALTTILTEHSRSAFGTEQAQKLVELCQGYLARPIRPEIVRQRVHDLIEEITLTRKHQQAMLKAGYALIKDRPEAIVLKASTGAGISNTLALVSELGDIKRFPDGEHAASFLGLTTSKHISGTSIYHSKHITKQGAPNGRYAAVNMALHLAVRVPKYQAMYKAIKSRKPPRKGHFVALVAIARDFVTNVLYDMWRYNRPFFIKVEDYRQYRKDHPRPTS

SEQ ID NO: 68119 - protein, 416 aa, unidentified
MNAVGIDVSSRKSTVAVLRPLGEVVCLPFDVSHDADGLASLAEKLKALDGETRVVMEHTGRYYEAVAKALHEAGFFVCAVNPLLIKEYGANSLRRVKTDKADAIKIARYALDNWADLRDFTPMDAIRYDLKTLNRQFQLASKQRTASANNLIALLEQSFPGIRKCFDSPVRSDGTQKWVDFAHSFWHVDCVRKQPFAAFCERYRKWCKRHAYFFKLSNAEEVYALAKRAVVLTPKSKVVKVLVQEAANQLSSISRSVEVYRAEMDRLAAMLPEYPVVMAMYGVGKSYGPQLMAEIGDVRRFERKQALVAFAGIDPMPNQSGDKNVRSNKSSKRGSPYLRKTLFNVIRTYLQCAPQDEPVFQFLNRKRAEGKPFYVYMLAAANKFLRRYYAKLRDYFASLDTLQPVDPIPATLKATL

SEQ ID NO: 68120 - protein, 415 aa, unidentified
MLKIVYPICCGIDVHKTFVVATIATTDRENITTYQTKRFSTFTRDLRALALWLSNNQCVHVCMESTGKYWIPVYNILEPSCRITLAHPKYVKAIRGKKTDKKDSVWIADLHKHGLVPGSFIPPADIREIRDLLRYRSKLVSFASSEKNRVQNSLTVSNIMLSSVVSDTFGKSASAILSHLLKHPDDQDFDFRPLLHGSMLKKQDDIALAIDGTISEVQAGKITLCLSHMDVIKSYIAQIEATALHLAVSYSGAIKIIQSVPGISQLSALVILSEIGADMAAFHSAKHLCSWAGLAPSNDQSAGKKKSVRISRAGVYIKPLLVQCANAAIKDKDFPHYRTRYEAIKRRRGHKRAIIAIARMMLTAIYHMLSTGELFNPSLYEKSQCKPGFVASSEQHAVKLLQRLGYSVVKITESA

SEQ ID NO: 68121 - protein, 345 aa, unidentified
MQSMYYIGLDVHKKTISYCVKDGSGMVHAEGAIPATRWDLDRWMKMLPQPWTAAMEATIFTGWIYDHLKPHAAALKVAHPLMLRAIAAAKKKNDRIDAYKIADCLRCDFLPECYMAATEIRERRRTLRYRNLLVHQAVQLKNKISGLLMEAGVSYNKQKLHKVGYFKELLATNPDINEGLRPLLRLCRETLVRLQKTESALVRSLQRDSLLAERVRRLMTIPAVGPITALTWVLEVGDVKRFSSIKKAISYCGLCGAEKSSADTVKRTPMSKQRNKHLQSVLVEAAKMAPRLSPELALIYDREKQKGNANRATLAVARKLVAYLVAIDRCQRDFLVVEKENCAAA

SEQ ID NO: 68122 - protein, 417 aa, unidentified
MRVLHERCCGLDVHQKTVVACVLITALEGAVQRRVQTFGTMTADLLALSDWLDGYGVTEIAMESTGVYWRPVYNILEGEARAITLVNPQHMKAVPGRKTDVKDSEWLADLLRHGLVKPSFIPPAPIRDLRELTRYRKTLVQGRTQEVNRLHKLLEGANLKLGAVAADILGKSGRAMLDALLGGEQEPTVLAELARGRMRAKLPLLRQALEGRLRPVHLVLLAAILGHIDYLDAMIARLHDEIAADLAPFAEAVELLQTIPGISAVAAATIVAEIGVDMARFPSHKQLASWAGVCPGNKQSGGKRLSGKTTKGSVWLRAVLTEVAWANARSTTGYLGAQFRRLARRRGRLKALVAVAHSVIVIIYHVLREHRPYVDLGADYFATLEAERVERHHVRRLNALGFSVTLSPLPAPEPVPA

SEQ ID NO: 68123 - protein, 459 aa, unidentified
MGMTLGIDLACRAAHVASLAGPDGALVWRGRSFFTRPADLEKLWRDVDCVPAELTVVMEPTRNAWIPVAAWFRRRGAKVVLVPTTQSADLRAYYAKHTKNDRLDSAILARLPLLHPEGLREHVGDGPADPLRRVVKQRSSIAKRRSAIFHRLDAQLELLGPAWYDALGTDYGKATLQLLAHYADPATVIRLGQARLARFLQRYSHGHWREGKAAELIAAAKESLQLWDTDGMDFAELAVDIAVEAEQAMMLTAQLADLDERIANLYAEADPAGIIRSAPGVGPVIAGIIAGRLGDPHRFTSLAAVRSYSGLVPKVNQSGKAEHVGGLTKAGDPLLREAMWMAAEQARKLDPQLAAKYKRLMDSERHHGTAVCHIATTLLTRIATSWRNNEPYQIRDLNGTPLTQDEGKRIVQEQYQVNKNPKKQYKRATNHKAGREPQESPSAPTSRPATTKPTSPRAA

SEQ ID NO: 68124 - protein, 424 aa, unidentified
MKVTYPTCCGVDVHKSFLVATIIKTTGGIEPSYQKKRFSTFNNSILDFKSWLLENECHDVCMESTGKYWVPVFNLLEDQINVTIANPKWVKAVKGNKDDTKDSKWIGDLFRLGLVKGSYIPCKSIRILREYTRYRYKLVSCRSSEKNRYQNALTVCNVALDSVVSDIFGKSSSSIIDYLLEQSGTTINHEEIASKLLKRLKSKEDVVIESIEGYQMTDAQKYRMRLVRAHIDYITAEINDVDKQIESLISSVPDYVKAIRFLTTIPGVKHDSAITIISEIGIDMSQFCNSKRLCCWAGLTPGNNESAGKKKSVRITRAGIYLKPALVQCAHAAVKSDKSPYYKKKYESLVKRRGKKRAIIAIARMILTAIYQMLSTGEVWNPSDLYKIDMPAPLVERQKAKAIKQAKKLLQKEGLLPPDEPLAS

SEQ ID NO: 68125 - protein, 391 aa, unidentified
MVCVGIDVAKDKHDCCILDSDGMVRADCFTIPNNMDGFKQLLQTIRNCTKKSDKIKVGLEATGHYSYNILGFLLDNGLPTYVINPLHTNLYRKSLSLRKTKTDRVDARTIATMLLSDVDLKSYTDIAYHNEELKSLTRYRFDKVQERAKLKQSVSRLATILFPELEGLVSSIHGTSIYALLGEYPGAKQISEVHLTKLTNLLTTASKGRYGKEKAIQIREAARASIGSVMPAKSLELKHTIKLIQELASEINEIEDSIQKIIDELNPPILSIPGMGVNSAAVILAEIGDFSNFSSPDKILAYAGCSPSTYQSGKLTNCYAHMEKRGSRYLRHALYNATKYVCYWNPVFAEYLAKKRAEGKHYNVALSHAMKKLVRLIYALQKSGKAYLAAA

SEQ ID NO: 68126 - protein, 342 aa, unidentified
MDQITRIFIDTSKSVFQLHGVDAQERVVLRRKIRRSQLLEFFAQLPPTVVGLEACGASHYWARELRALGHEVRLVAPQHVKAYLKRNKNDARDAEAGGEAMSRPTMQFVPVKSAERQAALMLAKRREGLVRDQTRLANRIRGFAAEFGFVAPKGLGAIAPLLARIAHAPHVPGLARELFADLGAELAQAQAAVAKVDDQLKAWHRQDPVSQTLAQVPGVGPIGAALLVLKTPAPNLFPSARHFAAWLGLTPTDHSTAGKVRLGVITRAGDEMLRSVLVTGATAIVANARRGRGKGVSPWLLQLVARKPPKLAAVALANKIARIAWAIMARGELYDPARALRA

SEQ ID NO: 68127 - protein, 422 aa, unidentified
MSADQTACGVIELKTDRFVAFDISKRSSVVAAVDRTQQIVLQPRKIPIEKLQQWVSQNLKPTDKVVIEATVNAWYYYDLLAPLVREVVVANPHKVRLIAQSRVKTDARDALALAKLLAAELVPTVWVPPVEVRELRALVAQRTRLVKARTQAKNRLMAVLTAHHLLPPAGEPFSLKNRGWWQSLKVSASTTLLITQELTQLDSLQPLISQTEQELIKLSNTGRWASQSAFLLQLPGVGVLTAMVILSAIGDIERFASAKQLVGYSGLGASIHSSGQLTRTGSITKEGRRELRTALVEAAWAAVVYDEFWKALFERLALQLGRGKAIVAVARKLLVVIWHVLKEGVADRQANEERVTSKLLRWGYKLGSAGRKGLSNPSFARLQLSWLGLGARLTTLEWYGRKVSLPPPLGVGAQAVGTIQTG

SEQ ID NO: 68128 - protein, 355 aa, unidentified
MKQEKYIGMDVHQATISVAVMDGKGKLIMECILETKADTILEFLHGLRGTVSVTFEEGTSAAWLHDLMKPHVAHLVVCDPRKNALLKDGSKSDRIDARKLAELLRGNQLHAVYHGERGVRTLKELGRSYQTLTKDVTRVMSRIKALYRSWAIPCSGTTVYAPRHRAEWLAKIPQPGVRLRAERLYQQLDLLQPVRQEARGDLLRESRKHEAVQRLRQIPAIGPIRAALLVALLQTPHRFRTKRQLWAYSGFAIETHDSGEYRYVRGKIQRNRERITVRGLNDSHNHDLKNLFKGAALSASTQPGPLRDFYTALVEKGMRPTMARLTLARKIAAITLTIWKKGVSFDAQQLHRQAA

SEQ ID NO: 68129 - protein, 376 aa, unidentified
MVTGVGSRHRPRRDRKPAAVSDVKPRMSLELRSLLPYPNSCPGTSPHQQGRDTKMPMLSYCGIDVSKDRLDVAVLPDGECFSVRNDAAGWAELVERLCSFSIAAIGIEASGGYERGVMRHLLAAGMPVRQVNPFRLRQFAKASGVLAKNDPIDARMIASFVAIMPTRPAQRHAPALERLTEILAIRRQLSAEKVAAENASRLLENAMLRRLSRRRIARLTADIDSLDKYLLEIVVSDAALGHRYELLTSMPGVGPLLACTLIALLPELGTMSRKQVAALVGVAPYAFESGTLKGKRCIWGGRAPVRHMLYMAAMSASNWNPVLRAFHARLKGAGKLPKVAIVAVMRKMIVALNAMVRDDVAWADRYRGRHPVPSAR

SEQ ID NO: 68130 - protein, 353 aa, unidentified
MMIIGCDFHPSFQQIAYVDQETGEYGERRLNHREEAVRFYGSLAGSKVVVGLEATGNDRWFRKLVLQSGHELRVGDASAIHAAAPREQRTDKRDARHILRLLEENRFPAVWQPSVANEEQRQLLLHRCRLVRMRTRIKNQLDSIAKSEGLTGSRSWSGRRRGQIEGLPLTGWYGQRRADLLQLLDGLELRIKPLDRAVEAAASQDAEARLLMTHPGVGPVVSLAYVLVVGDWRRFPRGKHVGSYLGLIPSEASSGKRQQQMGHITKQGNTLLRWLLVEAATTAQRYDPGWHRQYVRLSMSKHHGVAKVAIAHKLAVRLYWMLRSGQEYGQIKERGSHARQSECPVGRSTRPIE

SEQ ID NO: 68131 - protein, 408 aa, unidentified
MKTLHRRCAGLDVHKKEVVACLRLVIRGKATYEVRRFATTTRGLIELADWLGHAGCTHVAMEATGVYWKPVWHMLEGRFQQILANAAHIKGVPGRKSDMNDATWIADLLAHGLIRASFVPPQPIQELRDLTRTRKQLSREIVQHTQRIQAVLEEANVKLSSAITDILGASGRRILKAIVAGETDPAKLSELGSPRLAATKSELSDALLGRVRPHHQFLIGQHLKTIEQLEETIATFDERIEAALEPFRDIVERLKEVPGLSQTSAQILIAEIGTDMRQFPTAGHLLSWAGLIPRLDESAGKRRSTRVRKGAPWLKPVLVQAAWAASRKKNSYFEAQFLRLKARRGPKKAAVAVAASILTTAYHMLADGTYYQDLGVDHFARLNPSRTAAKLATRIRNLGFHVEIRPAA

SEQ ID NO: 68132 - protein, 406 aa, unidentified
MNMNAVGIDVSKRKSTVAILRPGGKAVGKPFDVPHLSADFQSLIKRIRELDGETRIVMECTGRYYEPVARELSQAGFFVSAVNPQIIRNFQGQDNPLRKVKTDKADSVKIARYTLDSWANLKQYSLMDELRSQLKTMNRQFDFYMKHKTAMKNNLIGPTDQTYPGANAYFDSPAREDGSQKWVDFIDTYWHVDCVRKLSLTAFINHYQKWCSRKKYNFSKSKAEEIYGKAKELIPVLPKDSFTKHIIKQAVGQLNVSSQTVEQLRSLMNETASKLPEYPAVMAMKGVGPSLGPQLMAEIGDVTRFTHKGAITAFAGVDPGVNDSGDYSQKSVHASKHGSPALRKTLFQIMDVLIKTKPDDAVYLFMDKKRAQGKPYYVYMTAGANKFLRIYYGRVKEYLAALPTSN

SEQ ID NO: 68133 - protein, 332 aa, unidentified
MRLEELFLMTFYLGCDVSALKLDISLVDEQGVEQWHDQVSNEPVAIATFLLTVSGTYPDDRLVGVAEATGILHQPFADTCVTLGYTCLVYNPIQTNQQIRATIRGKKTDRTDAVMIARIGMMGQARPYVPDSYRAVKYYTRGQAKLSGMSSTLSRYANHLSAVMEDELTDEAKQLLDAIQSQITAAKKQFVSDTLAAAPAGLMERLRSIPGVGPYVAACLIGEIQTMERFTSAKALIAYAGLDAKIRQSGHSINNIGRLSKRGSPHLRRALFIAANIARRYDPDFGAIYEKKRNEGKRHTVATIVTARYMLKVIRAVWLRDTPYVVSGTGEQ

SEQ ID NO: 68134 - protein, 408 aa, unidentified
MDLEALEPVKSLLGGITMIAVGIDVSKEKHDCFITNSDGEVLFKAFTIKNNLDGFDELYQKIESVMEDASKVKVGLEATGHYSYNLLGYLLDKGLATFVINPLHTNLYRKSLSLRQTKTDKVDAHTIASMLMSDVNLKSYSDTSYHNEELKSLTRYRFDKVKERAKLKTSISRLVCILFPELEKLVPTLHQNSVYELLYEFPGAKQVANAHLTRLSNLLETASKGHYTKETSIAFREAARTSIGSNMPAKSLELKHTIKLIRELDSEIEEIENEIKVIMDEINSPILSIPGISYRMGAMIIAEIGDFSQFDSPDKILAYAGMSPSTYQSGQLDNCYARMEKRGSRYLRYALFNATAYVCLWDPTYKAYLAKKRAEGKHYYVAMSHATKKLVRLIYHLERTGQQYQKAI

SEQ ID NO: 68135 - protein, 385 aa, unidentified
MTTQSQNSVFVPRDYDIFAGLDVDKKSMAITFADHAQLSKSLRLPYSSEYLLNYVRKYFPEQRVAFAYEAGPTGFGLYDDLVAEGHPCLVVAPSMVPTAPGQRVKTNRLDSKKLSEGLRGGQLQSIHVPSPIYRELRHLVQLRDTQVRQLTATKCRIKSLLLYQGIAFPGADEKWSRSVLRELKELACSGAVRFKLDQLIATLEFHHLSAVSVQKEMRRFCKNDPELRKSIELLTSIPGIGWIVASHLVARLGDWREIKNVRQIGGFLGLVSSEHSTGDKENRGSITRSGDSRLRNKLIQGAWVAIAHDLELRAFYRRIYQRHPKKVAAKKAIVAVARKMTTRIYAVLKQQRPYFFRADSSTAPLTAEETAGPRERLDGAQSEQP

SEQ ID NO: 68136 - protein, 357 aa, unidentified
MRTDHFIAWDVHCAFTEMVVVTSGARVTRRERCDTTIPALVEALEQVPRPRLLTFEEGPLAGWLARNVAAHVDQVLVCEPRRNRLIAKESDKDDPLDAEKLAQLFRGGYLKAVHHPQELERAILKEHVTFYYERVRERVRLSNQTLGRLRQHGIFVRSGALADPDERRGLLRRLPTSRVLRGDLELLFAQYDLLVAHEEQAYQELVRLARREAPVRRFEKVPGFGWIRALTYYVYLDTPWRFRSKAALWRYCGIGLERRHSGSGPVRSQLDHRGNRRLKNILLGAARSAIASTDNPFAEKYHYWTEEGMPLPNARRNVARSLATTLWSLWKTGHEYNPRQVRGAGLSTAAAAVGKET

SEQ ID NO: 68137 - protein, 381 aa, unidentified
MDHDAIAGTPSTKAVLYGALELSKNTWLLALQLPDRAQPSLYPIRGGDTEGLMAKLTAAGDRWAKISGKAPSIVLCYEAGYDAFWLARFLKARGIECLVVDAASMQVNRRARRAKTDRIDVGMLLRALIKWGQGDHHVWSVVRVPGVDEEDLRRSHRERDRLVCERTAHINRIKGLLFGQGIRGIKVKSKYKTLQIDKLVTGDGRPLPPRLASEITREIARLALIQEQLATLDRERDQAPTPCKATEKKRVQLMSLTGIGPAIAAVMTREVFYRQFDNRRQVASFLGLATSPHDSGDVERSQGISRAGRGQVRGTIVQAAWLWLKHQPKSAITRWFVQRTAGQSGRIRRIMIVAVARKLAIALWRFLEQGLVPQGATLASR

SEQ ID NO: 68138 - protein, 443 aa, unidentified
MSKKRVSHLRGERGQAFAELIRGVSAERILCVSIDISKYFHVAMIHNGLGEIVQSPFEVDIYQSGFDQLCQAIDQAKAHTQAQVVLVGMEPTSHYFENLARHLLERPDPVKLVNSYAVKQNREQQLMRREKSDQIDAAAIGDLLRRGEGTPYQPAQGIYLQLQQLDRVRLGKVKIAGILKNQILGHLDRIFPGLVLIDESAKERYTPLFNANFWKCQTLQDLIRVCPNPHELVKLSPTALVQTFHAQGCRLGPVTAAKIIALAHRTLLPDPELAAIRHELLQYDLALLEHVLTLIDQLEQRLNQLVAQTPFLAWTHLKGLSSVQVASLAAAIGAPTHYASAAQVFRRSGLVSGRNDSGNRQRRGKGNHVLKTGDVYLRRALMNTVATLLLHQPVLMRYNHHLQHTKHPGVARVATARKTIGILWAVLRDQSSNSLIYCKGAEM

SEQ ID NO: 68139 - protein, 281 aa, unidentified
MTKGHIRKAMQWIKKQKPKLIVLEATGGYEHTLVAELVTAKLPVAVINPRYIRDFAKAKGVLAKTDKIDAAVIAHYAAALQPQVTIVLSKEQFRLRALVLRRRQLVSIRASEKNHKEHIIDKDISSSIQTVTQSLSDEIERIEKLILDIIQSDPDMQDKIQRLTSVPGIGKTTAAMLISDLPELGALNRRQIAAMVGVAPINRDSGQFRGKRMTGSGRDKIRTGLFMAMLSIIRCNSKLKKFYQKLLTNGKAKMVAIIASMRKLLVILNTMIKTEQNWQTV

SEQ ID NO: 68140 - protein, 343 aa, unidentified
MDHFAGLDVSVKETSVCIVDDTGKLVREVKVSSEPEALLAVLKNPAYRFKRIGLEAGPLSQWLFSALAEAGLPVICVETRHMKAVLKSQINKTDRNDARGIAQMMRAGLYRPVHVKTLRSQKLRMLLTHRELLQSKAIAIENDLRGTLRNFGLKVGMVGKVKFEARIKELVENLPDLAVLVEPMLIVRRVLREQIVILHRRLLAIVRDDEVCRRLMTTPGVGPVVALTYRATVDVPARFRKSKSVGAVFGLTCAKYQSGEIDWSGRISRCGDEMMRTMLYEAAQSMLFHSKKWSWLKAWAMQIARRRGIKKAIVALARRLAVIMHRIWVDGTEFRWTREVTAT

SEQ ID NO: 68141 - protein, 352 aa, unidentified
MESGVLVTVGVDTHGDAHVGVALDHLGRRLGEAVVQNEVAGYSRLLEWALNFGELDRVGVEGTGSFGAGLSRFLRTRGVRVVEVNRTSRQHRRRHGKYDAADAEAAARAVLSGDATGEPKAANGKVEMLRALKVARRSAVKARTQAANQLHALVMTAPEHLRADLRGLPAKKLAQKASRFRCGLEPADPTAATKFALRSVARRYQQLSEEISELEGQIERLVKKASPELVTLEGVGPDTAATLMIVAGDNPERLHSEAAFANLCGAAPIEASSGKTVRHRLNPHGNRDANRALYVVALNRIRREPRTQEYVARRTAEGKSKREIIRCLKRYIVREVYREILLNAEIYDQQKG

SEQ ID NO: 68142 - protein, 319 aa, unidentified
MSQIVLGIDVSKRTLDVALIFDNRTFCKQFKNSSEGFKSLAAWLASLQTSRVHACLEATGTYSEAIALFLHGQGHTVSVVNPLRIKGYAGANMQRNKTDRLDACLIADFCRTQTPESWQPPSESVKHLQSLVRRIEVLEEMRQSEENRLANAAPEIKPSIERMLTLIKEEINQLERQTKRHVNCNPDLKEQSELLQTIPGIGERTANLLLSEIEFERYSSARAIAAQAGVTPRKRQSGTSLKQTSLSKLGNARIRRALYFPAIVARQHNEIIKEFANRLKKRGKTPMQIVCAAMRKLLHIAFGVLKHKRAFDASLAFSA

SEQ ID NO: 68143 - protein, 358 aa, unidentified
MDATTVAVDLAKNVFELAVADAQWKITQRARLTRQQFSRWFDNRQACTVVMEACGSAHHWGRVLREKGFEVRLLPPHYVRPYVKRNKTDAADAAALIEAFRCADVKPVQIKSVEQQALQSLHRARSLWMATRTARINALRGFCREFGLVVATGSRVGLEQIARLLADPTSAIPALLRPTMVQLLVEVRLLEARISQLERQLTEAAKASEACSRLLTVPGIGLLTATAMVAATGGSVSHFKSARHFASWFGLTPKESSSGQTRHLGRISKRGDRYLRMLLTHGARSVLRAATVAQRAQRPLDPLRQWATALQARSNHNKATCALANKLARICYASMRDQEPFAKSRLTDKSDRQTYATA

SEQ ID NO: 68144 - protein, 351 aa, unidentified
MACKRDVAVAHTIGIDTGKNTLHMVGLDETGAIILREKVSRSRIAARLVNVPPCLIGIEAGMASHHVARELLALGHQVKQVPPAYSKPFRQGHKNDFRDAHATAEAVQRPSTRCVPVKSADQLDLQALHRVRSRLIGNRTAVINQLRGFLLEHGIPVRQGLRFLRQQLPQILATRTDVLSPRMVRIVGELIADWEYLDERIERVTDEIECLARADENCRRLMTVPGIGPIIASAMVAAIGNGAAFAKGRDFAAWLGLVPKQMSTGDRTILGRITKRGNRYLRMLFIQGARAILLRPAGWAKHSFGPWLAAAARRLHRNVLAAAFANKLARIALTVLVQGRSYAARIEPRAA

SEQ ID NO: 68145 - protein, 368 aa, unidentified
MSKIDKYVGLDVHKDSISIAVAEAGRSEPRFLKRIPNSGARLLAILRMLGHESSLHCAYEAGPTGYGLHRFLTAKGVKCDVIAPSEMPQKKGKRVKTDRLDAMALAHHLRSGNLVPICVPDEEIEAMRDLTRGREDAKEVEKSAKHRLSKFLLRQGRRYSGKTAWTNMHLDWIRKQSFSHEAQDLVLREYLTSLERARAQVARLTDAIERLAKASSLAPLVAAFRGVRGIDTITAAGLAFELIDLERFPTAPKLMGYLGLVPSEYSSGGSRSQGGITKSGNKRVRRLLVEAAHNNRFQPKVTASLRKRQEGLSPEVIDLAWQTQERLHHRFCTLSARGKPRQCVVTAMARELAGFIWNIGRQQHLLAN

SEQ ID NO: 68146 - protein, 323 aa, unidentified
MQGKVLSEPNATPPVYAGIDVCKEWLDVYVHPAGQSFRVANDGGGLRRLKRLLVKLAVTRVVMEATSKYHRAAQRSLHEAGLHVAVVNPLRARLFAEACGQLAKTDRIDARLLALMGLALDPVETVPASLAMEALQEMIGARSAASTERTALVNRLATLQNPFLRAELKRRLKALDSHLVRLEAETGRLISADPALARRYVILTSIPGIGPTTAATLLAGLAEIGTLNAKQAAMLTGLAPVAHDSGPRQGRRAIRGGRKGVRNALYMAALSASRYNKDLATFATRLRNAGKPAKVILVAVMRKLVITANALVAQDRIWSPDAP

SEQ ID NO: 68147 - protein, 459 aa, unidentified
MILRMGIDIAVRAPHQASLADERGELLWSGHRFRTTVADLDALWARLPKEFQAAEVTVVMEPTRNAWVPLAAWFRRQGARVVLVSAERSSDLRAYYAKHTKSDRLDSVLLARLPLLHPEGLHPQRGLGPGDPLRRATKMHSTLVKRRTTSIARLDALLEILGPDWHAAFSADLTNKTPLQFLAAGYADPHTVCRLGRARLTRFLYRHSRGAFGEIHAERILAAARASLDLWGEDICFPDLAEDIAVEARLALALTAEVKELDERIAVLVRDRDPHGIITSAPGVGAITGAVILGRLGDVSRFQSLSAVRAFSGLVPSLDASGVSGRHGSPTKRGDHLLREALFISANQARRLDPTLAAKYHRLMIDGKHHNSALCHIATTLLTRVAACWRAQTPYQIRDADGRPFSAHEARAIISERYSVPTKIRQARTTTGTGRRSKESLSAPSTGPSNTHAKHTGAA

SEQ ID NO: 68148 - protein, 421 aa, unidentified
MKRAETGKVRGVKDDALIVAIDVGMEMNRGYCTTPDGRDIKPFKFDNSREGLDKLWGMVMASKNRFKCNEVIIGYESTGPYGEPLVHYLAKKSVKMVQVNPMHTKRLKELNDNSPLKTDDKDPRVIADIIKLGRALSIVIPEGDAAYLRRLNNSRERHVKERTALVNQLQQLVFLLFPEFKKVMKDIKCRTPLYILKKYPTPEAISVLDKHVLGEEMRKKSRGKFREPHAEMLINLAQNTIGIKEGVSGLTMDIRHILLQLEMLKTLIAEVEGEMEMALGRVSYSSKLLSIKGLGVVSVAGIIGEIGDFKNFKTRPEIMKLAGLDLYEISSGKMRGQRRISKRGRSLLRKILYYAAIQTIRKNGILHDYYTRLTDRGMKRMMALVAVSRKLLGIIYAIVRDDSEYSVDFEFTKRQVIKKAA

SEQ ID NO: 68149 - protein, 337 aa, unidentified
MRQIKFFIGTDVSKEWLDMCIILEGEVIHRQQIKNKETAIRKWLKQTQKQYGYSMQDSLFTMEFTGIYNHHLLELLHQAGANIWLIPGLEINASRGLQRSKNDKDDARLIAEYAIKNLKKVRLWKKPRTVLKQLAALLMMREKLMTSKHQYQTTLKEYKSFSTKDEYLIIKDYSSAILKTICQDLKTIEHQIKDIIEGDEQLKELNEYITSVDGVGIITSANTLVETNEFLDISEAKKFSNHSGVVPHKDESGKKIKKPKVSHKANKKMKKLLHLAAMSVIRKKGELRDYYERKIAEGKNKMSVLNAIRNKLVLRIFACVNNKRKYEKNYVYSLVNP

SEQ ID NO: 68150 - protein, 427 aa, unidentified
MITGCTRSSGVTQCGTGFVPSIRSVHRCDGLHVVSAAAGGARDLREACREARPCSVRDHQQPLSGPLRSNETESIMMTERADLVVGGVDTHKDEHVAVVLDVAGRRLGVESFPATTAGYVALRAWLVGFGAVLAVGIEGCGSYGLGLRRELTAAGIVVHEVCRPNRQLRHRRGKSDAVDAEAAARAVLAGQEMITPKSADGPVETMRVLRLARRSAIKARDTATNQLHALVVTAPSELRERLDGLPIGSVVQLLVDDDVAVTVADGGYVLAMRSLARRWQQLDKEAADLRAALHRVVGEAAPDGLLEQQGVGPDVAAALMIAAGDNPDRLRSEASFAALCGVSPLDASSGKQQRHRLNRGGNRDANMALWRIVLVRLRWDPITRAYLERRIGEGKTRREAMRCLKRYIARDVYRILTISRDPRQLAA

SEQ ID NO: 68151 - protein, 335 aa, unidentified
MKKTVIGIDVSKEKLDVCILNETKVQEEAIIENQTKKITIYLKEIQKKYTPEEILICAEYTGQYTYPLSIVCEEMQIALWIENPAQIKYRSGVQRGKNDKLDARKIAQYAERFQEEAKLFSMPEKSMVSLKQLISERDMYVSDRAKYQGQLTDQERFMDKADYKKKSKRLQALIQELDEAIKQIEKEIQKIIDSDETLSNQHKLLCSIEGIGERTAVKMIVETNAFKDFTNPRKFCCHAGVAPFSYTSGSSQHSRNKVSNRADKSIKALLHMAALIAATRMHGELHDYYLRKVGEGKNKMSVLNAVRAKLVYRMFAVIKNNQLYQKNYLNPLLKS

SEQ ID NO: 68152 - protein, 391 aa, unidentified
MFIVGIDVAKRSHEVCMITSDGQTVQRPFSIRNNCTGYNLMLEKIRKHTNIKSQIVFAMESTAHYWLALFTRLRKDGYHVILLNPIQTSAMRDMFIRKIKTDAKDSFIIAELIRFGRYAESNVAQDRLLALKELCRNRFYLVDMAGDLKRKLIALIDRVFPQFDTIFCKSSVAVLKKYPTPQKLSNAHLDKLTELLWNSSNGHFGEWKARELKELARNSFGVEDCDGAYSTLILLMLDQIQSLSGKADALEKEISRLFQSFDTTVTTIPGVGPIIGAVILSEVGDISRFSSADKLAAYIGVDPSVNQSGEFQAAHAHMSKRGSPYLRRCIWMASQVAVQRDPMFRAYYEKKTAEGLKYMTIIGHVTRKMTAVVFAILRDHKVYEPILPTAA

SEQ ID NO: 68153 - protein, 338 aa, unidentified
MLYSGIDLHKRTAVIATVDETGKVVCEASLPTSRFAVARYFAELPDSTRATVEATSSWYWLRDLLHQEGVPLTLAHAKFVKAIAYAKVKTDAVDALTLAQLHRVDLIPRAHMVSPELRPLRDLLRTRLQLVEKRVSAKNSVHRLLEKFNVPDPASLPDEAALSASLYEEQIELLDSQIRRIEQQLQPRLIPEPDIQRLLWIPGIGKITAFTLYLEIDGIDRFPSVRQFFSYCRVVPGAHNSGGKNRHGRRKDGNRYLKLALSHAAVRAIQYYPEIKRFYQRKARQKNPAIARTLVQKELARSVYIVLAEGVEFNHTFKGQPLERRKQSKWPRRASPDV

SEQ ID NO: 68154 - protein, 403 aa, unidentified
MSFKIIKNNCCGLDVHKTWIFACIGITDSNNRTEYKQARFSSFTKGLNELCDWLAKYNCNDVCMESTGKYWIPVFNILEQHNLWVTLSHPKYTKPMKGNKTDRKDAKWICDLYMCGMVKPSFIPSADIRELRDLVRYRYKLTCMITGEKNRAQNCLTVSNLKLDEVFSDVFGKSSRSITEQILQHPGEAFDVAHFVHGRCKTPIEEIQAAVDGAISKEQAVKLRQCLDHIDELNKHISEIEQEILRLSDKYETALNLIRTVPGFDKNPLTAVQVLSEIGGDMSVFPTAKHLVSWAGCCPRNDQSNQKIKSTRISRAGSYFKPILVQVANALIKSKKHSEFTNRYKRIKARRGHKKAIIAICRMILTAIWHILSDLEPYTPEGFLESRPVKGEKFFPLHRHLIF

SEQ ID NO: 68155 - protein, 319 aa, unidentified
MAYLHFFGIDVSKDHIDVAVYTTKATKAAKPKRYPNSSEGFAAFLADNTNKICQSFIVLEATGGYETALLNALCARGIAVHRATPLQAKHFIRSLGKIAKTDKLDALALARYGFERHESLPLFVEKSPEMQLLSDLLMRREDYIAMRKAEMNRVQHPRYASTKADVEKHLAYVNEQIRLIEKQVKDLVKASCELKKKLDILTAVKGIGEQTAFVLLGLMPELGELTRRQTASLAGCAPHARDSGKMRGYRQVWGGRHTIKTALFMASLSACRSNPQLSSFYKRLVLDGKKKMVALNAVMRKLIVILNAKLRDAKNLSPA

SEQ ID NO: 68156 - protein, 433 aa, unidentified
MQDVQDEPLFCERVAGLDIAKAEVEVTIRVPSDTTAGRRQQETRTFGTTRRELESLGDWLACWGVTRIGMEATGDYWKPVFFLLESRGFDCHLYNAAQVKALPGRPKTDRADSIWLARITERGSVCSSFVPPEPIRALRTHTRYRRHLTQARTAEKQRVEKLLEEGHLKLSSIISDIHGVSGREMLNAIAAGQRDPRVLAQLARGTMRAKIKRLEEALDCAFFTGEHAAVLAMMLVTIDHYTTQIDSLTAKIEVLAEPYLHQIRQLDEIDGVGPVCAQDIIAEIGTDMTVFPTAPHLVSWAKWSPQVKQSAGKRKGSNATGRGNPYLSAALGEVSISAGRTQSFLGAKYRRLARRMPKKKALVATGNSALTIIHALLSDPAARYTDLGPDYYEQRMHARRQARNHVRSLERLGYKVTIQAINPDTGELLAAAG

SEQ ID NO: 68157 - protein, 418 aa, unidentified
MAMKIVRFNCCGMDVHKNLVVATIGITDRKTNVTEYFQRSFSTLNSDLYRLKDWLRSHHCSDVCMESTGKYWIPIFNILEDEINVHLTHPKYVKAIKGKKTDKKDSKWICDLFKHDLIKFSFIPPKEIRELREIARYRYKLVCMRSSERNRYQNCMTVSNVGLASVVSDPFGKTASNIMKEVMKSNVIDDDKILKLVHKNCKNKDKILDSLHGYRIESDQRFKMEKSLDHMEYLDQLIDSCEVELIKRAYPFRRSFQHITQIKGISALSAILIISEIGIDMSQFGSDKQLVSWAGLSPANNESAGKKKSVRISKAGQYLKPLLVQCALSAIKDKTSYFGRKYSNIKKRRGHKKAIIAIARMMLVSIYHMILTGEEFNPCDYESFMDPKPNVDRSLTVEKALNFLKQSGIDISSIPINL

SEQ ID NO: 68158 - protein, 458 aa, unidentified
MAKRRKRTKSRNFKITQLPAELRHMNLNAAGIDIGSEHHLVAVPEGRDEVSVRQFGTFTADLEALAAWLKKCGVTTVAMESTGVYWIPLFELLERHGFEVKLVDARHVKNVSGRKSDVLDCQWLQQLHTYGLLAGAFRPPDEVCVLRSYLRQREMLTQSASMHIQHMQKALQQMNLLLHNVVSDITGVTGMKIIKAILAGEREPKVLARNRHELCKNSQTTIAKSLVGNYREEHLFALRQAVELYEMYQAKIADCDHAIIKQLEKQPNVSDDGPPPLDKPLPPGSRLRDDTDVHELLFKKCGVDLFAIPGLASDTLLTLASEVGFDLTPWKTEKHFASWLGLCPGTKRSGGKVLNAKTKHNPNRAAQAFRMTACSLYRSQTALGAFFRRIKARSGGQQAVTATAHKIARIYYAMLTKGTSYVDLGQQAYEQRYKQRRIDHLKSQAKSLGFQLVPCAAS

SEQ ID NO: 68159 - protein, 409 aa, unidentified
MRYYLGVDWADQTHAVWVVEERGTKVTMRTVPHTAEGLSEWGRELDEWRAQGIELWAAIERPEGRVVDFLLDHGVVVYPVNPKALDRARDRFRQSEAKSDPFDARVLADFLRTDHLHLRALQPSSDAAQELKLLTDDYQRQIRQQTRLVNQLTTTLKAYYPRGLEVAELTTALAREFLQAYPTPAALTALTERQWQRWARAHRLSEARARELWAGLQRPQLPVPAHVVRAKARLMHSLVAQLTLVVEVVGAYREAIEDFFARIPAAQWIRTLPIGDHGITAPTLWARLGDAPGRWESFRHLQAQAGTVPVTIRSGKQQIVRFRFACDKSLRYVIDHVAFLSLRWSEWARAYYDEQRARGHSYRQALRALSAKWLKIIFIMWERHVPYDEQYHLATMTRQQLRLRQKKLA

SEQ ID NO: 68160 - protein, 369 aa, unidentified
MERLVYVGLDVHADTIAVAAADDGRNGEIRFHGVIEHTADAVLRLTKRLSGAGVCPVFCYEAGPCGYGLHRLLTKLGFDCAVVSPSMIPRRVGDRVKTDRRDAEMLARLWRAGELTPIWTPDEEQEAMRDLIRTRKQALEALKIAKQQLLSFLLRHGLRFNRPTYWTKIHWRWLNELRKFRYPHQQLAFEELKRAIHQIEERIQTLDLAIEDAVKSWRFADVVDALRALRGVNTTIAATLAAEIGDIGRFTNPRQLMAWLGLVPSEHSSGNTIRRGRITKTGNALARTMMVEASWSYRHPPRERHLHLKRSHHLPQEIRDIGWKAQTRLCKRYRDLSKTGKPQPRVLTAIARELTGFIWDIARKVPLSA

SEQ ID NO: 68161 - protein, 348 aa, unidentified
MDREGTLPGYQLFVGVDIAATTATVAWRGPSESAGRTITIEQSPQGFAALQRRLVALGHAPADVLVVMEATGSYWLSLATALATAGFAVSVINATQAHHFAKALLKRAKTDAIDAQTLAQLAALLQPAPWSPPPAIHEELRQRLAQRDALIAVRQQVRNQRHALIQGPHVVGSVRERMEALLGMLDTQIAAVEAELAAVADQETAWTDAIKRLQSIPGVGLLTAAWIVVGTLNFTLCATAEQATAYAGLAPMPRESGSSLHGRATIGRGGNGRLRTALYMATLSAAQHNPVIKPFYQRLRAAGKPPKVARCAAARKLLHLVWAIGTKDKPFDPRYQQQQYATSPQLAA

SEQ ID NO: 68162 - protein, 351 aa, unidentified
MLIIGCDFHPGFQQVAIFDNRTGAIQERRLPHREEAEQFYRSLSGPVRVGMEACGHYPWFERLLEELGFELWWGDAAEVRASVVRKQKTDRRDAEHLLHLLLENRFPKIWVPSREVRDVRQLLVHRHKQVQARTRTKNQLQAMALSQGVQKKWKLWTKLGRAELEQLPLLPYAAERRQRLLEALDGLEAELVELNRRVDEEVRKRPEAMRLRTHPGVGPVTALAMVLTLGPAERFASGKDVGSYFGLIPREDSSGGKQRLGKISKQGSSFLRFLLVEAGQTAARYDPQLKRFYRRLAMRKNRGVAKVAVARKLATRLYLMLREQWTYPQLCQAVMQVSPSHSVVEPEKPTA

SEQ ID NO: 68163 - protein, 385 aa, unidentified
MHVPSSYFIACGGSRDSVLESAIHSLCRYRLGRIKHDICLQAGDDNHRQFDCIPHQVDRIDEWAKALHPRFGGPIAVALELAKGPIVLALLKYDFFVLFPINPSTLAKYRVAFKPSRAKDDPTDAELALDLLLRHPERFTALRPQSVAMRSLLSLIEQRRDLVNDKTRFTNRLCNTLKQYYPQALEWFEQRDTLLFCDFLTRWPTLLSAKRARKTTLEAFFYAHNGRRATLIEARLASIRAASALTEDAGIIEPCRLHVLALVEQLRTVLTVIDRFDKEIERVASALPDYTLFRNLPGAGQHLAPRLLAAFGEQRERFHGAEELQKYSGIAPVTERSGKKSWVHWRWQCPTFLRQTFVEWAGQTINKSFWAGAFYRQQRAKGSTY

SEQ ID NO: 68164 - protein, 360 aa, unidentified
MTTMTETRCRVTGGVDTHKDAHLATALDEVGRVLGTEAFPATLAGYRQLSRWLRSFGEVVAVGVEGTGSWGAGLARFLTAAGVAVIEVTRPNRQHRRRHGKSDPADAIGAARAVLSGEATGTPKAQTGTVEAMRMLRVARRSAVKARTQAANQLHAVIDTAPADLRQRLGSVNTEQIVAVAARFHRRHPGTPAEAARLALRTLARRWEVLDDEITMLDAHLDELTAAVAPALRAINGVGPQNAAALLAAAGDNPDRLRSAASFAALCGTSPIDASSGRQQRHRLNRGGDRQANCALYYIVMSRLRWHQPTKNYMARRIAEGRTPQEVIRCLKRYVAIEVHRAITTDLSTRTTSKPSRIAA

SEQ ID NO: 68165 - protein, 388 aa, unidentified
MNFIGVDLHKKSITLCVLNENLKVLARKTVFCDQTDQIVEFFRQFRPFKVVVEATASYLWFVELVEPLAEEVVLANPKKLRVIAESTKKTDRLDAQVLAEFLARDQIPRAYMPTPRQRQHRRLVRHRQYLREPMTSVRCKIHHILSDYNADRKDLFSTQCGPAYFKEISLSDADRFVIKQLWSEWEDHQSRLLAVTKKIKAFIVKAPNREKEARAILKTAPSVGFVTAEVILSEVGDVSRFHNAKKICAFAGLVPAVRQTGGKKSKDLPITKQGSGLLRWALVESAWRLVKTSPKWSAFFSQLRKRSGSKRAIVAVARKLLCVLYAMLKTSTPYKIVATETKAPKTTGKRLVRISTPEQVVPAQTKAPRTTRRRRLVRTSTLEKTVTT

SEQ ID NO: 68166 - protein, 408 aa, unidentified
MRVMYERCCGLDVHKKMLVACIITPEGQDTRTFSTMTKDLLELASWLAEHGVTHVAMESTGVFWKPIYNLLEEDFTVMVVNAQHIKAVPGRKTDIKDAEWIADLLRHGLIRGSFIPDRPQRELRELVRYRRCLIRQRAQVVNRIQKMLEGGNIKLSCVVSDVVGASGRAMLEAMVRGVEDPHALAEMAKGRLRDKRPALEEALRGLMSAHQRMMLQSQLRHLDFLDEEITRMDGEVSQCMRPFQEAIERIDEIPGVGRRVAEQVLAEIGLDMSRFPSAEHLASWARICPGNYESAGKNKGGRTGHANPWLRSALVEAAWAASHTRNSYLSAQYHRLAARRGGKRAIVAVAHTILVTIYHMLSNHSTYQDLGGNYFDQLHRASTLNRAVHRIERLGYKVTLQPLQAAFS

SEQ ID NO: 68167 - protein, 343 aa, unidentified
MQIHSVGIDLGKTTFHLVALGAAGKVLVKKKFTQRQLLTYTANLQTSLIGLEACSGAHFLGRALRKQGHDVRLIAAQFVKPFVKSNKNDFVDAEAIAEAVERKNMRFVPIKTDDQLDLQAIHRVRDRLISRRTAVINQLRAFLLERGMVFAQTPAKLKAAMTDILENADADLTPQMRNLIDMLWSEWKTVEQQIEELTTQLERISAADAGCTRIRQIPGIGPIVATAIVAAIGNGAAFRKGRDFAAWLGVVPRQYSTGGKAKLLGISKRGNVYLRKVLIHGARAAVLRIKRDRAPIGPWLDRLDARAPKNVVVVAMANKLARIAWAVLSSGQDYRPLPSASAA

SEQ ID NO: 68168 - protein, 314 aa, unidentified
MTQTNTTTAGIDTSKLKLDIAVHKRTVRWQVTNALPGWRTLASNLAQAGVTRVGIEATGGYERGVVEHLRAAGFTVLVLQPIQVKAFGRVHLHRAKNDALDAVLIAACAATLDQPRIAPDPRLAELAGYLTFLEQTEEDIARFKTRLEHIDEPQLRRIVTSDLKRLKARKAAQTRDIAKRLRAHDDLAKRLDLVLSIPGIGERTALALIIRMPELGQISREEAAALAGLAPFDDDSGKYKGQRHIAGGRGRLRRSLFAAALPAAFRWNKALIDLYGRLTAKGKAHNAALIACARKLLTYANSVVQRGTPWVEAA

SEQ ID NO: 68169 - protein, 351 aa, unidentified
MKTELSAELKLYIGIDIHKRSWKVHCATDLFAGKSFSMKPYAEELYKYVDKHFSDYEVTTAYEAGCCGYKAHRSFESYGWKSLVVNPADIHRKGKERFTKTDKIDAQLISRELKDGRLKSIPVPDKEREELRSLFRRRNDLVKDYRRIKSLIKMQLLYYGVHIPEEHDNDHWSHKFRQWIDELEFDYSTGKGSLESKMRSFRFIDKELREVSNQLRAYCRKHYKKDYYLLRSIPGIGGIVACGILSELGDLRRFSSLKHLAGYVGIAPGVHQSGSNYKTLGMNPRAHRLIRSYFVEASWQAIRTDPVMQNYYRKHLGKDTKKIVIKVARKLLSRTLAVIKTEIPYEIGVIQ

SEQ ID NO: 68170 - protein, 328 aa, unidentified
MTMNPALSAFNHVVAFEVAKDSLVIHVLPAGKQSFSANKPKAIREALIAEMRRNAEASLGPLLVVCEATGGYERHVLEVCQELGIAAHKAHGSRVRYFARYLGLLAKTDPIDARVLALYGLKTTDLRLYVPPAPEALALRDLRTRRDQLQQMLFAESNRLEHARHLSVSRSLKAHIASLRKALAALEAEIAACLKASETLARKARLMQTLKGVGPVTVAAILAYMPEIGAFTKAGAACMAGLAPINDDSGKLKGPRHIEAGRAAVRKALYMPALVAIQHNPVMRLFADKLKRNGKPAKVVIAAVMRKLIVTLNAIVRSGEPWSHAKIA

SEQ ID NO: 68171 - protein, 365 aa, unidentified
MKIIYWIGIDDHADKWTIAQYRGDEERPSKVFELVPDEKGYRRLLSHLKGLDGEVRIVYEAGPCGYELYRRLTKAGYQCQVAAPALTPRKPGERVKTNRRDATKLGRYLRGNDLTFVVVPDDDRESLRDLIRSRESTIKDVGRMRKQIIHLLLRYGHRYRGGQAWTLRFWSWLKKIELAGAHSRFVLDEMISELEHRISKIERYDERIELAAQKTEYQPYLAALRTLRGINTLSAMTVLSELGDLRRFGTAPQLMAAVGVVPSEYSTGDKTNRFAITKTGNAHVRRVMVEAAWQYQRRPSLGRNIKARRKDQPKEIVEIAEKCEKRLNSKFNRLTSRNKKSTVAVVAVARELLGFVWAIGQIAHP

SEQ ID NO: 68172 - protein, 408 aa, unidentified
MQVTFGIDVSKSTSTVCELIGESKNELTITNNRPGFIQLLHELTAFSKHPQIIFEATGVYSRRLQAFLEDYGYEYVVLNPLKAKKEMNMGLRYNKTDKTDAYHLALIQRLYHHPVNQSESQTYKQLNALSRFYDQLTADLVMAKNRLHQALQSTFPEIENLFSIARGKNYWQIVARYPHCDLVRKDDKKQIINWLMKLKGIAFNHAQKTTDKLIELAHLAYPVVSCSDIEVQQAQYYARRLLNLSNQRQRIITKMVKLAKTLPNHDLENLESIPGFAQTTAVRVLAELGDLRRFSNPNKINAFIGIDPGRYQSGEMDSNLSITKHGNAVARKLLYRAIGQIDNAAKTNPCHIADYYESKKLSSQTKGFKKIAIASIHKLIRTIYALIINDQPYDYNVATHNQKDFSRN

SEQ ID NO: 68173 - protein, 386 aa, unidentified
MKNTIVHHEGVASLKVAVNKIGLSGSVIKIGLDVHARLYVAVAQYDQLLPKPARRLAPTEFVPWVRQLLRAGHTVHVVYEACGFGFGLYRELKALGVHCYVIAPRKLDEGCTRVKTDPRDATTLCQRLSRYVEGNTRELAVIRVPSEAEEQARHVSRQREQLVRHRQKLEAQGRSLLINHSLPAPAHWWKNQTWLRLSKLLPAWISLRLEVHRPALLTLQQQISVLSAELEAAAPADVPAGVGKLTTVVMTREICSWERFRNRRAISSYTGLCPGEHTSGAKRIPGSVTKRGNPRLRAALVECAWRMVRFQPNYPPVNNPTQIVALTSVLQQVASAVDIRIAQLDAERTRLLDQKSKLSTLLTEFSKPSALDHLRKTILEGQNSCR

SEQ ID NO: 68174 - protein, 343 aa, unidentified
MEHFAGLDVSVKETSICIVDDTGKIVREAKVASEPDALLQVLKNSAYRFKRIGLEAGPLSQWLYGAFAEANLPVICVETRHMRAVLKAQINKTDRNDARGIAQMMRAGLYRPVHVKTLRSQKLRTLLTHRKLLQSKAIAIENDLRATLRNFGLKVGMVGAVQFEARIRELVENLPDLTALVEPLLVVRRVLREQIAVLHRRVLAVARDDDVCRRLMTIPGVGPVVALTFRVTVDVPTRFRNSRAVGAVLGLTPCKHQSGESDRTGAISKCGDEMMRVMLYEAAQIMLLRSAKCSWLKAWAIQIARRRGMKKAIVALARRLAVIMHRIWVDGTEFRWSKNAVAA

SEQ ID NO: 68175 - protein, 354 aa, unidentified
MIIIGVDFHPEFQQIASVDTDTGEFQEKRLTHCEEAEKFYRAVAASGQKVRVGMEASGHGRWFERLLAELQIELWIGDAAEIRAKRVRKQKTDRQDAQLILRLLLEDRFPQIWVPSWKNRDLRQLLWHRHRMVQARTRIMNQLQAVALNEGLRCKKRLWRERGRQQLESFRLAPWASRRRRDLLELLDRLNPTIAELSLTIEQEVEKCPEAQRLMTHPGVGPLTALTFVLIIGEANRFQCGKQVASYLGLVPLEDSSGNRRRLGHITKQGSSMLRFLLVEAAQVTARSLPQWRSKYLHRMMRRGRKTAKVAMARRLAVRLYWMMRQGWDYQQWSKFGSHAGQPGNRDGVPSNTE

SEQ ID NO: 68176 - protein, 343 aa, unidentified
MEYYVGLDVSLRQTSICVVNQTGSIVQEGVVDSDPDSIASFVRSKAPGTVRIGIETGPTTTWLWTELKRLGLPVICIDARHAKAVLKMQINKSDRNDAVGIARIMQTGWFKEVRVKDLDSHSVRALLASRALLVKIKRDLENQVRGLLKNLGLVIGRAKFNVFAVRAEELIEGRPELVVAVRPLLEARKAIEQQVDDLDRKVQKLARHDAQVRRFMTAPGVGPITALCFKATIDDPTRFKRSRSVGAYVGLTTRRHASGEVDWSGRISKCGDAMLRMYLFEAAGVLLTRVPKWSGLKAWGAKLTKRNGLRKAKVAVARKLAVILHRMWIDGTEFNWSTKKAAA

SEQ ID NO: 68177 - protein, 323 aa, unidentified
MTPATSSLRVLGCDVAKDTITVFDSHLGAAQTLENKPRVLKSLFARLKKQEPNLFVVCEATGGYEAALLAAACEADLPIHRADPRKAKAFVRSLRTYGKTDELDAEALTAYGLERHNSLVLWQPLPQAVDDLQKLVRLRTDLVQSRADYKRRASAPGNGPDKRYIKAFIKDHDRRIKAVEKEIDVCLSQDDHIAKIVEVIEAIPGCGHISAFTLAGLMPELGQMSNKQAASLAGLAPHPNDTGKSLGYRSTRGGRRQVKITMFMAAMAARRFNPTIKEKYEAFLAQGKKKMVALVACARKLITIINAKIRDEIFNNKNKLQLS

SEQ ID NO: 68178 - protein, 348 aa, unidentified
MMTPDDIDVWVGLDVGKSAHHAHALDHDGNTLYDKPLKQDEKAIRTMLGKLSKHGRVLLVVDQPNTIGSLPLTVARNMGIAVAYLPGTAMRRTAQLLPGDAKTDRRDAHVIAWAALKLPETLRDAGPDDETLAALKLLAGHDEDLAHESTRHVNRLRSLLLQTHPAFERALKGERITRDATLALLERYGGPMGVKRAGIEDVKDWAKSNGLRAGRIIDDMFKAIGEQTVTVPGTLMAETIIPSIAHDIKTIRDRRREVGRQVEKLLEDHPLLTVLTSMPGIGVRTASNILLGIGGDIANFKSSAHLAAYAGISPVTGQSGTSIKGERPSRRGNKRPPYCKKLSLTQRQ

SEQ ID NO: 68179 - protein, 331 aa, unidentified
MFPVGIDVSKNTLDLCMLYDGIKGRIKTRNIQNNRHSVENILRWLRLQHCSPEDVHVVMEATGVYHERLATELHDAGFRVSLANPHRSREFARGMGIMTKTDKVDAYMLACYAFLKKPHRWEPPAPEIRYLGALLRRRDVLLGDALCEENRLEKYLSTDTPADIISSCRRMAQLLREEVSNIERQIKAHIKASPALRRDYTLLTSIKSVGPQLGMHMLVVLRSHNFVSAEQAAAFLGVVPIEKRSGTSVRRRPRMSKIGPPQLRAKLYMSALCGKIYNKRMRNIYDEMCLRGKPKMVAIGALMRKLVHWCYGVLKTGTVFNDEDLKPVLST

SEQ ID NO: 68180 - protein, 320 aa, unidentified
MTNVILGIDISKLTFDVTLLIDNKVKNRKFDNNKKGFDTLIQWLKTKGVDTGYACMEATGSYGLKLARYLYENNFKVSVVNPARIKGFAQSKLCRVKTDKADSDLIAHFCQTMKPDLWKPTSLHIQELQQLVNRLDALISIKNQETNRLEGLSDLVATNIKDHIIFLNKQIKEVEQLIANHIKTHQDLSEKSTLLASIPGVGEKTISQVLTFLSNIDNFNSSKQVIAFLGLNPKQRQSGTSVRGTSRISKTSNAELRKAFYMPAIVSLKYNPVIKGFVKRLSITGKPKMVIVIAAMRKLIHIIYGVLKNKTLFNEKIKVV

SEQ ID NO: 68181 - protein, 433 aa, unidentified
MQDVQDEPLFVQRAAGLDIAKAEAEVTIRVPSDTTPGRRQQETRTFGTTRRELDSLADWLRCWGVTKLGMEATSDYWKPVFFLLESRGFDCELYNASQVKALPGRPKTDRADSIWLARIVERGMISSSFVPPEPIRRLRTHTRYRRHLTQARTAEKQRVEKLLEDGHLKLSSVISDIHGVSGRDMLDAIAAGQRDPRALAQLARGTMRGKIRRLEEALDCSFFTGEHAAILSVMLATIDYYSSQIGALTARIEALAEPYLRQVEQLDEVHGIGAVCAQDIIAEIGADMTVFPTAAQLVSWARWSPQVRQSAGKRKGSNSTGRGNPYLSAALGEAAISAGRTQSFLGAKYRRLAKRMPKRKALVATGNSMLTTIHALLSDPAAEYQDLGAGYYEQRMNTRRQARNHVQSLERLGYKVTIQAISPETGELLATAS

SEQ ID NO: 68182 - protein, 417 aa, unidentified
MKLIVGLDVSSTELDVCFLTDDDNFPVLKEASFENDQMSATQIKNFILHYVEELNIDQIVIGMEATSLYSFHPAMFFHEDPELSALNTSVFVEQPNKIKKYREVFEESKDDRIDAFYIADYFRVNRNGVSILKEEQYVALQHLTRTRLQLVEGLVRTKQHFTENIYYKCNTLPKELKSDDQSTSIFSATIIELMTADYTLDDLKVLSLEEFTALVDQLGRGRFKDPEKVAKNISKAIRGSYRLSKTHEESVDRVLSVLVRQIRSFEKSIKEIDKAIEDIVELLPEYQCLTSVPGIGKVYAGGIIAEIGQIDRFDNQAQIAKFAGLFWPHKQSGKMKSDNTYLAKRGNRYLRYYLVEAANSVRRYEPDYRAYYQKKYDETPKHQHKRAIVLTARKLVRLVDVLLRNHQLYAPPKERIK

SEQ ID NO: 68183 - protein, 372 aa, unidentified
MSETIVAYQSFVGVDLHKTTVTLVAVAPDGATIAQLTINTKCREKIAAWLLALPRPSRLAVEAVGFVEWFIECFRPRVDRIDIADATELVNRRGKRRKRDPGDARDVALRLARGECPLGYIADDELMQLRKLGRHWRQLSTVQARAKQCMKSMLLAANLRGPKFDGASAQRWLLAHGHLLKPAQRRAFANFTHVVQLIELQRQPLRFAIIEACRSERFAPLTKLLRSVPGIGEIWSCIIAAEIGPFDRFPNADALEFWAGLTSDLKESAGRTQPGPITKAGSRTLRWALCNAAVTLCQSDAKQEAIRQRLIRKTGGIKGKANTAMGRRLVRILYAMVRDGKPYQAGPSRRRNAAANKARAAKIARKTRKEAA

SEQ ID NO: 68184 - protein, 341 aa, unidentified
MGEYIGLDVSLKETAISVRRDGKRIWRGKCPSDPSLIAEVVRKHAPEPKRVVFETGPLSVWFYHALSAEGLPAICVDARHAKAALDMAPNKTDANDADGLAHLAEVGFYREVRVKGYDSMLVRTLVAARSRLVQITTELSNQIRGLMKTFGLVVPRSKGGTFEAEVQRLLVGQDELARIILPMLEAWRSVRTRASALGRQLLACARQSAACQQLMSIPGVGAITATSFTAAIEDPANFKTSRSVGAWLGLTTRRYQSGEVDYDGHISRRGDAHLRGLLYEAATVILTRTHADSDLRRWGLMLRERIGFKRAAVAVARKLAVIMHAMLKSGEVFNRAVSAPA

SEQ ID NO: 68185 - protein, 373 aa, unidentified
MGVEGGLTLESMKTNTLSNSKVMLFAGIDFHKRYSVVHVVDSLGAAVKKGRIEPNSLAGFSAFFAGFPPGSVRAVFESSMNWGYLYDLLHEVEAVADVTLANPYKTKIIAEASVKTDKIDARWLATLHRGGLIAESHASSVEARRLKELLRQRSFFVRQRTAIRNRIHVLLGTQRNLEMPQVSDLFGKKGVEALRKLRFDQPHRQLMLQQDLDLLKELDARIKEDEKAVAEAFDGGEDYGVIRSVPGIGAVLGAVIATEIDGVGRFSSAKKLLGYAGLAPTTSSSGGKTYHGRMIRACNHWLKWAFVEAAWGSVGCDPYFGGLYRAARARGKGANTAITIVASRMATIVFHLLKEHREFTPFPPNASKPPAAL

SEQ ID NO: 68186 - protein, 343 aa, unidentified
MQTVTTVGFDIAKSVFQVHGVDVAGRVVIRRQLKRRQVIAFFQKLPSCLVGIEACASSHYWSRELQALGHNVRLMPPAYVRPYVKRQKNDMADAEAICEAVTRANMRFVPIKTAEQQSGLMLHRTRHLYMRQQTSVINAIRAHLAEFGIVAPVGRRGIEELLRVVADPSDKRLPEVVRVCVATLASQLLSLKKQILDFDRMIMAWHRSNQTSKRLNGIPGVGPLLSTALVASVPDPKTFRSGRNFSAWIGLVPKQNSSGGRDKLGSISKQGDRYLRGLFVAGALAVIRYAKIHGTKHRPWLTALLARRHTKVAAIALANKLARMAWAMMATGERYNYPASLKV

SEQ ID NO: 68187 - protein, 342 aa, unidentified
MDHFAGLDVSVKETSVCIVDDIGRIVREVRVASEPEDLLQILSNPAYHFKRIGLEAGPLSQWLFSALAEAGLPVICVETRHMRAVLKAQINKTDRNDARGMAQMMRAGLYRPVHVKTLRSQKLRMLLTHRKLLQSKAIAIDNDLRGTLRNFGLKVGVVGKVRFEARIRELVSNFTDIAALVEPLLIVRRTLREQFCVLHRRLLAIVRDDEVCRRLMTTPGVGPVVSLTYRATVDVPARFRKSKSVGAVFGLTCAKYQSGESDWSGRISRCGDEMMRVMLYEAAQSILHSKRWSWLKAWAMQIARRRGMKKAIVALARRLAVIMHRIWVDGTEFRWTREVAAA

SEQ ID NO: 68188 - protein, 418 aa, unidentified
MRIAIGLDVSSKTTDFSVVVNDDQQLREAEHGKLSNDLLGFGRLLKIIHKYSDTRDGKLPEVVFEATGVYSRRLRYFLQTNAISYTQLNPLKAKKDLEAVSDLHRRKTDRMDALGLAQSQLILKRAKAYVQDPVYIELKDEERFYQEANSDLVADKNRLHRALQLTFPELEGIMSTATGDFYWRLVQTFPHPDLVLKSEKSFGTLINTIQHLTPKTLSVKRAEYVAQKLVDSASVAAPAVPATPLETEQVQYLAGDLIRLSAHKQHIISEMVELAKDLPELPILESLPGAAATSAVTLLAELGDLHRFRKTTQINAYIEIDLRHYESGRFVASDHISKRGDPYARKILFKMIGTMDSVARNPNHSNHIVDYYEKRKQSSQSRGTKKIAIAAISRLIRTIYYLIMHNQTYDYQKATVGR

SEQ ID NO: 68189 - protein, 386 aa, unidentified
MQTLNNLSRSLIALEPASTLIAVIEMSLSSWLVAGIVPGIERQPLKKLAVDESALLRLLHRWREEAEKAGCRIERIVVAFEAGRDGFWLARWLKARSIEAHVIHAASVAVSREHRRAKTDRLDAELLKRAFLGWLRGERNHCKVVAIPTLKDEDAKRPSRERESLVGEQSRIVNRMKAALIRLGIRGFNPKLKRAAGRLDSLRTPEGEPIPPNTLAELRRDMERRRLISNQIRQIEEARLKHFEQAPNDGPHAMVRLLARVIGVGIETADMLVHEVLSRNMHDRRAIARYAGLTGSPDESGRKRREKGLARSGNGRVRRGMVQLAWRFLTYQKESALAQWYRARTENARGARKPMIVALARKLLIALWRFVWQGVVPDGVVLRPAQ

SEQ ID NO: 68190 - protein, 319 aa, unidentified
MQSKLTIGMDIGKAQVVVACHESAFAVLKMANAVPVLRRWLATLPAGSRLGLEATGGYHEPVAQLAHSLGFTVYILNPKDVHHYARALGARGKTDRLDAQVIAAYVAEHNARLHAFVPLSADEKLLRELARRRATLVNAKSMLQQSLRVLPGFEREGRELLRAMGSFADRLERKLAEIAARSSERAALVKRLQTIDGVGTLTSIRCATLFTRVPLHRSDAAVAFFGLDPRPHDSGQHRGRRRLSKRGPSEDRRLLYNAAMSAIRTPTWRPLYQHLRNRGLASTEAIIIIARRMVRIAFAMYQNHSDFNPRLVPRPSCPA

SEQ ID NO: 68191 - protein, 394 aa, unidentified
MKLIGIDIGKNKHFFCVMDQQTGEIISQPVSFSNDKEGFDFLVQKIKSYPKDSILIGMEDTGHYHFALLKYLLDLQYTVALINPKTTDFNRKMQGGITKNDKLDTINICDVLDTPERKKQYRITKVNSFDLYEQKQLTRHHHNLKEEENVHKNRLQKCIDIVFPEFNKLFNSKYGIVYMNILKMFGSAENIANTDIRTIRKCFEIEGRGNRISLTPERLKECARSSIGISSSAEVIQIKHLTAQIELIEEQLTEIDKKIEEFSIQNNSPILSIPGISHFSGTSILAELGDISNYSKPSQIIKFAGVAPLHYESSQFNAQHTAITKKGSKYLRKTLYQIILPVIRHNPVFNKYYQLKISQGKGHRCAQGHCVRKLLRIIYHLLKTNQQFDPQLLR

SEQ ID NO: 68192 - protein, 355 aa, unidentified
MESVKYIGLDVHQSTISVAVLSSEGKLLMQLVMATKANAVLDLLKGLRGVLHVTFEEGTYSAWLYDVVVRQVARVVVCNPRKNALLKSGNKSDQIDARKLAELLRAGMLSPVYHGEQSTRTLQQLVASYTALTEDTGRAMRRIKAVYRSQAIGCAGKKPFGKRHREEWLARLTDSGQRRRAEWLYQELDAVQVLRREARQAVIAECQKNPAAKLLRTMPFFGPLRAAVLIARVQTPHRFRTKRQFWTYCGLGLETSSSADYVEKDGQIQRRRKPVYIRGLNWNYSHELKNVFKSAATTASAMDGPFRAFYEMRVANGMLPAMARLTLARKMAAIALILWKKGETFAAEHLKLQAA

SEQ ID NO: 68193 - protein, 351 aa, unidentified
MVYIGVDLHRKKSQIAALDQEGKLVFNRKVRTGPAEMQQLIDELRPQPIQVAFEATFGWGWFANLLAELGIPAHMAHPLKTKAVSSARVKNDAVDAKMLAHLLRADLLPEGWIAPPEVREARRLVRMRAALVRVRAKLRAQIHALLGEHGIQPEVVDILSKRGRALLSELQLPPVSRGRLEACLRLIGEVSLEILIAEREIYQTVKDDERLKRLLPIPGIGPIIAATILSEIGDVTRFPTADKLCAWAGLTPKEHSSADNVRRGHISKQGSRWLRWVMVEAAVHAFRDVELRQLFVGIARRRGTKVARVAVARRLLTLVFYALRSETGCRSYPISSNPKVEARSLAVMASL

SEQ ID NO: 68194 - protein, 391 aa, unidentified
MSTYFVGIDISKYKHDCCIINAADQSIVAKFTIRNDKEGFNELLTSLQSLSTPDDIKIGFESTAHYALNLELFLEKAHHSFMEVNPVLISEYKKSTSLRRTKTDSVDCESIARWLMTVEYKPHSKGFYHAYSLKSLTRLRDRLIRQRSFYLVKITNILDHTFPEFKPFFQERFSKTALYLLENYGSAEKMARMNSASYDNLRRISRGKFTPQKFLELKALAANTVGVNNSIFDTELTCLLTLYKEAAKQVSVLEAQITELIEEVHPHYMSIPGIGPISAAVIYAEYGDISNFSSPAQMLAFAGLEPGISESGTESHRGRMVKRGSSQLRYTLMNCALPLIRFDMTFAAYYAKKRSEGKPHRVAISHVTKKLVRVIFALERQNTDFVATALR

SEQ ID NO: 68195 - protein, 349 aa, unidentified
MVILGIDAHKRTHTVVVIDERGRELGSKTTKATTTADHLELLRWAERFGDEREWAVEDCRHLSRRLEADLLTAGERIRRVPPKLMAKARESARTYGKSDPIDALAVARAALREPDLPLAQLDGPARELRLLVDHREDLVKDRTAHINRLRWHLHELDPSWDPPARSITSYKSLDAIAARLVALDGMVARIALDLVERIRSLTVTERALQREIAQRVIAMAPCLLALVGVGPLVAAKIVAEVADIRRFKHKDAFARHNGTAPLPAWSGNPNRHRLSRTGNRQLNAAIHRIAITQLSHHADARAFRDRRVAGGDTGTEALRALKRRLSDVVFRALLTDAQPAQPSRLEQAA

SEQ ID NO: 68196 - protein, 400 aa, unidentified
MLSIGIDVSKGKSTVCGMKPGGEIVYAPFEVQHTREGMSELVSLLRSSGEEVRAVLESTGSYHCPVVAALLENGIFVSVVNSLRMKRFCSQSIRKVKTDRIDAMQIALYGLAYWQELQPARLPEDTYRELQLLARQYYQMTSMLIKAKVDFNAICDQVLPGMQELMNDHAGRHKLSDFVLRYCHTTHILEMGETRFRKDYCKWAEKKGYRNCERMAVLIFATAQNGIPVLPNAPSTQIVITEAIRVLHTVEASRDAILTQMQALAKTLPEYSLVREMPCIGDTLAPRLIAEIGDVRRFHSKRALIAYAGIDAPPYQSGKFCANNRHISKRGNRYLRKTGYEVMQSYVMHKPANDPIFTFIEKKRGEGKSGKLAMVAGLNKFLRVYYGKVTELYRSLPAIE

SEQ ID NO: 68197 - protein, 449 aa, unidentified
MAEPQEIEDEEYEQILERVCAIDVAKASGMVCTRVPHPSRPGQRRTRVWDVAATTNAILELGEQLAGEGIERVTLEATSDYWRIWFYLLESCGLAVQLVNASDIKNVPGRPKTDKLDSVWQAKCTERGMLRPSFVRPAEIRRLRDYTRLRTDLTRERTRHWQRLEKLLEDALLKVSAVASTLDTLSVRDMLEALIAGERDPKVLAGLARGRMKAKRAALTEALTGRFDDHHAELARMLLDQIDALTAQIGTLTTRVGELIAAIPAAQGIDADGATGPGAGTGPGAPVLPAIARLDEIPGISPLGAQIILAEIGLDMTRFPTAGHLVSWARLCPRTIQSGARNRSGKAGKGNPYLKGVLGEIAAAAARTDTFLGERYRRIVKRRGKLKALVAVARTILVIIWHLLADPAARYHDLGAGYYASRTDTGRKTRNHVRQLEALGFIVTLAPAA

SEQ ID NO: 68198 - protein, 369 aa, unidentified
MKSITYIGMDVHTTNYTLCCYSVEDDRFFAEVDVKPDYQEVLKYINRVRSQRGKEAEILCGYEAGCLGYSLYHQLMYHGVECVILAPSTMPVTPGKKIKTDRMDARRISKCLAYHTYSAVYVPTAEDDAVKEYIRMRDDENNTLRRIKQQMIALCTRHGKQYDGKSYWTKRHLDWLEGLNFGNGVLNEVLKEYLVLYYQAQEKVEVYDKRIEELSRSEKYREPVEKLGCFIGIKNHTALAFCCEVGDFRRFPSAQQFASYLGLVPGENSSGEKQRHTGITKAGNSHLRRLLIEAAQQYSRGAVGKKSAALKARQVGCPMQIVAYADKANERLRRKFYRIALRSKRNIAKTAVARELACFIWGMMTEHYA

SEQ ID NO: 68199 - protein, 387 aa, unidentified
MPAATSVSERPAAIRVDLGAIFVSMELSRSKWLITSLSPGGGEKMSKHVVAGGDLAGLLDLFAALQAKAQARTGHSYRTIVLQEAGLDGFWIHRALEKEGIESHVVDPASITTSRRKKRAKTDRIDGEALVRTLLAYKRGEPRVCSMVRPPSPEEEDRRRLVRERKALITERVRHSNRIKGLLFAQGISKYEPLRRDRRARLAALRTGDGRELPAHLKAQISRELDRLELLLEQLKAVEAERDALLAQEQVHANAPAGMLLKLKGIGPEFAAILWSEGLFRHYDNRRQLAAYAGLAPTPWQSGQIEREQGVSKAGNPRLRAALIQLSWLWLQHQSQSALARWFEARVARNGGRLRKSTIVALARKLLVALWKYVNAGVAIEGAVLAS

SEQ ID NO: 68200 - protein, 455 aa, unidentified
MQQPVEVQVDEHEQIVERVAAIDVAKASGMVCLRVPHETIPDRRVTKVWAVAATTAALVELGDHLRCERVARVVLESTSDYWRPFYYLLEAAGLTVWLVNAAQVRNVPGRPKTDKLDAVWLAKLAERSMLSPSLVPAEPMRRVRDLARARFDLVEDRTRVKQRIEKLLEDALIKISSVLTDVLGVSGRAMIEALIAGQRSPKVLAELARGRARTRRADLERALHGRFTDHHARLARLLLGQLDELTARIGQVTELLDAAISALPTPTPATGCDQADRTEGDASADGPAQGGYNSAIARLCAVPGGGPDSVRAVLGEIGLDMSVFGTPQRLCSWARVAPRTVQSGRKHGRARTGRGNPYLKSALAQIATGAAKTDTFLGERYRRLIKRMPKAKALVALQRSILVIFFHLLADPTAEFTDLGADFYTRRIDRARRTTHLLRQLHALGYQVQLTETAA

SEQ ID NO: 68201 - protein, 365 aa, unidentified
MVEITRAPVARVGVDLSKRVFQVHAVDRSGRVVQARAMPPDRFYAWCAELPAGCLVAMEACGGAHHVARRLQLLGLDARLIAGHFVSPYRMAGKRGKNDANDAQAICEAAGRPHMRFVPVKTVEQQGQLSVHRLREGYKEERTALINRIRGLLAEFGLVFPRSPEALRAVLASVIEDAGNELPGVARLALQRAHLHWIDIELQMAWCDERIASHVRSDERARKAATLLGVGPTTASAVVASVGDFKQFANARQFGAWMGLVPSQNSTGGKARLGRITKRGDDYLRTLLIQGAKSAVMSAGKRSDRISQWLVQLKERVGWQKAVVALANKNARILWAVLTRDVAFDPDHVPQPPAARSGLEPQPAA

SEQ ID NO: 68202 - protein, 455 aa, unidentified
MTGAKSLGAEALSMVNPGAAAIDIGSTMHMAAINPQAGDNPVRAFGTFTGELHEMARWFKASGVTSVAMESTGVYWIPAYEVLEEHGFHVILVNARYAKNVPGRKTDVSDAAWLQRLHSYGLLRGSFRPEAGVATMRAYLRQRERLIEYAASHIQHMQKALMEMNVQLHHVVSDITGVTGMRIIRAIVAGERMPITLAEMRDVRCHASVETICAALSGNWRDEHIFALCQSLALYDFYQTKILECDRKLEVALKALEIDKGYDIRGLSKVRTKRRQVNTPDFEVRSALYRVLGVDLTQIHGIGPSLALKLVGECGTDLAAWPSSKHFTSWLCLAPGNKISGGKLLSSKTRRSSSRAAALLRLAATTIGRSDTALGAFYRRLAARAGKAKAVTATARKIAVLFYNSLRYGMAYHDPGATQYEERYRNRVIGNLQRRAKAFGFSLQELPPEPNMAVS

SEQ ID NO: 68203 - protein, 418 aa, unidentified
MDTIYSKVAGLDVHLKSVEAAVRCRQETGKLFCQVRSFGTMTRDLRAMADYLESQGVTHVAMEATGVLWKPVWNVFEGRFTLLLVNPHHLKKVPGRKSDVSDAQWIAQLLQCGLLRGSFVPPRPLRELRDLTRHRAQLAGEHTRVANRIHKLLEDANIKLGAVASDILGKSGRAMLRALLDGEQDPGRLADLAEGVLRKKIPQLRLAMEGHVTEHHRFMLQRLLSHLNYVEEQSDRFSQRITPRLNELLPWKDQRRLDAIVGVNITTIENVIAEIGVDMSIFPDEHHLCSWTGICPGNEESAGKRKRSRTRKGNRWLRRALAEAAWAASHAKGSYLAAQYRRVAARRGKKRALLAVGHSILVIIYHLLKNQDVEYRDLGEDFFHRLQPERLRRYLVKRLEQLGYDVTLKSKEPDDQAA

SEQ ID NO: 68204 - protein, 355 aa, unidentified
MDNTKYIGMDVHQATISIAVLNAPGKLVMESVIETKAITIVQFVRGLRGDLHVTLEEGTWAAWLYDLLRPHVREVLVCDPRKNALLKTGNKSDRIDARKLAELLRGGQLSAVYHGEHGVRTLKELSRSYLAISGDLARVMTRLKAVYRSWAIACAGKQVYAPRYRAQWLGKISEAGVRRRAEFYYQQLDELSALRQQARREMLAESAKHQASKLLCQIPSIGPIRAALLIAILQTPHRFRTKRQLWAYGGLAIETHSSADHRYVEGQLRPAKRQVSLRGLNRNHNHELKNIFKGAAIIAATKAGPLQEFYAALVAKGIRPEMARLTLARKIAAIAWIVWKKGVSFDAEHLKLKTA

SEQ ID NO: 68205 - protein, 330 aa, unidentified
MGRNSTTKFIGLDVHSKTISVAIADEGRKGEVRHYGTIENTTEAIEKVIKALTSTGAEPRFIYEAGPCGFALYRYLAGNGFKCIVTSPAMIPKRGNVRLKNDRRDALTLARLYTARELTGIYVPEPEDEAIRDLGRARDDARVAERKAKQRLNSFLLRNNLIYPGKKKWNRTYFNWLGLVGMKYPAQKVALQEYIEAVNECTGRVARLSEQIGLAVEEWRMAPMVKALQALRGVSLICATVTVTELGDLSRFQNPKELMAYLGLVPSEHSSGETIRRGGITKTGNGHARRVLVEGAWTYKHHARVTLPLIKRQRELPKSICQISWKAQLR

SEQ ID NO: 68206 - protein, 341 aa, unidentified
MEEISTVGLDIAKSVFQVHAISYAGEVVVRRQLKRRQVLQFFAGLRPCLIGMEACATAHHWARELMKLGHDVRLMPPRYVKPYVKRNKNDAADAEAICEAVTRPTMRFVPVKTVDQQSVLMLHRTRQLFIRQRTTLINSIRAHLAEFGIVAGIGRNGVEVLLELIAKGDEDIVPAEARACLLALAAQLELVKRQIVEMDRRVLAWHRASGLSRSLEAIPGVGPLISTALVASIPDPKVFRSGRDLSAWIGLVPKQNSTGGKERLGGISKAGNHYLRQLLVVGALAVIRRAKQLGYTRHPWLVRLMERRSVKVAAVALANKMARIAWAMMARNEPHRAMLTA

SEQ ID NO: 68207 - protein, 371 aa, unidentified
MGIFAALDVSQDETAVCVVSQDGTILAETKVATCPDAIADWLSTWRDGLERVGMETGPLAVWLWNALVSRNLPIICLDARHASGVLKMMPNKTDRHDARGLAQIIRTGWFKPVQIKSHEAYVNRALLTARNTLVGMRVRLENEIRGLLKTFGIMFGKRVGGFKRRAEEIIARDLVVAPELVPIFEALIKARHDILARISDLDRQIRAIAKEHATVRLLMTAPGVGAITAMAVVAAFDDIDRFKRSSSAGSYLGLTPRRYESGEISRNGRISKRGDATSGEKSRTLRSIMERIRFGHAILSRRGTQKYTPLRLPCIIVTTTTRNRRTNAQEPRAHSSTSTSVTNSAKGLKNKLPNVLCANKEIWKHGVVVMG

SEQ ID NO: 68208 - protein, 330 aa, unidentified
MPSKKDVEVVRAIGIDTGKNTLHMIGLDEKGTIVLREKVSRGRIAARLVNMPPCLIGIEAGMATHYMSRELLALGHEVKQVPPAYARPFRQGHKNDFRDAHAVAEAVQRPSTRCVPIKTDDQMDLQALHRVRSRLIGDRTAVINQIRGFLLEHGIPVRQGPRFLRLQLPQILATRTDVLSPRMVRILGDIVDDWQYLDERIERVTDEIEGLARTDVSCGQLMTVPGIGPIIASATVAAIGNGTAFAKGRDFAAWLGLVPKQMSTGDRTILGRITKRGNRYLRTLFVQGARAILLHPTSWAKHSFGPWLAAAARRLHCNILTTCTLYPLIE

SEQ ID NO: 68209 - protein, 371 aa, unidentified
MKSIIYIGMDVHKKTYSLCALLKETGEIIGETKIPADVSLIIKFIENAKKSVDSDDVQIKTGYEAGCLGYSLYWQLAAKGIECDILAPSTMHRSAKNKVVKNDRRDAKNIAANLANGTYKSVYVPTNEDVEIKEYIRMMHDFKIELKKVKQHINAFLLRFGHHYPGKSKWIPAHIKWLKELELSDMYREILDEYLSQLEILSEKIERFKHRLEELSQKETYNEKIGQLRCIKGIDTTAAMTMHAETSDFDRFPTANAFASYCGLTPGEDSSGESYHRLGITKQGNSMIRTTLVEAAQVLVRGTIGKKGKKVKSKQKDQDVKVIDYADKAVIRLQKKYHRMIFRGVKRNIAITAVARELACFVWGIETGHIS

SEQ ID NO: 68210 - protein, 315 aa, unidentified
MDKIAQVAGIDVSKDKLDVHVLASNQDFAVGRDESGLGDLVRRLRQAGIDEVAVEASGGYEREVIEALEAAGLVVHLLNPTRVRRFAEAIGKLAKTDPIDARLIALYCQHFPEAGLTRRPEQANRLGEFLTVRDMLLKAIDEARNRLEHLREPTLRCLLERVLEQARDDLKSIDAGIARVIKEDEEMRRKAEILRSMIGVGPVMTANLLARLPELGQVGRRPAALLCGVAPADRQSGKNRRPSRIAGGRDQLRPILHMVALAAIRSNPAITAFAYRLSAAGKPRRLVIAACSRKIVVILNAMLRDQTSWRNPKTA

SEQ ID NO: 68211 - protein, 583 aa, unidentified
MTTKLLAISRLKPGEVKTFHIPFASRQFASGCDIDKLVGTYCVLYAAAEGFQAQVKQFTNSPSGCQKALAWVLSHAQKHLSPAKKPLFIIESTGCYHQLPVKIFNDATEVVVVNPHRIKAILRVDGKDDVKDAVTLTKLVLSFDLKKSVLAVGGQKRLRKALRMKRKLVDNRTQISNRIGSLLTENGIPLPNVIKVMTISGRAMCHAIAQGQTNRNLLMLLWKGKNLPSPGQELVVRGKSFLQALALFAPTMKKKEVKRLKEIYDVLYYVDSLDDSIRRLLSQQLRLLETYDQEIDVIEQEIVAAIEAYKIELPGGGQRSAREMIDLLCTAPVFSEESARMLVAEASLNFPEIYGSADALVRTLGLTPGNSKSAGKVVGKEVVKGNQHYKPVIVQAATAFLRRRLEPGQSGWLLWLWGRRYQQRSDGQHARIALARKITRSAYFMCRHWQPYDDSQHRHIRQDHVLQTAKRLANTAQELSASDIIGLETAAQLKQAAKAINQSLGIQVSRYKLCPFDHDFPVNALDLSTRAVNLLLKNDIANVSQLVLRLVSGTLMSLNGLGLKTAQEIEYALIFKNIVAVQE

SEQ ID NO: 68212 - protein, 430 aa, unidentified
MLEGTHMNNSQNKKIAQVTDETLVIGVDIGSDTHYARAIMGRGYEVSKKPFDFENTREGFDRFVNWAYQLAVVHQLTRIFVAVEPTGHYWFNLADYLKAYDVTLVMVAPQHVKHSKEMDDNTQMKNDRKDPLVIARLVLEGRYMIPYIPDDVYAELRSAFNRRCDLVEALNRNINRMIRWFDMYFPEYRTVYEKANAISGLLILMRAPLPSDILELGVDGICRIWREAKLRAVGISRARKLVAAAENSIGLKGGEAIRRELWQLMEVHELLKKQLSDLMQIIEGLLRKIPGADKLLKVPGAGIVTVAGFLSEVGDISRFTDPKQIQKLAGLAVVENSSGKRKGKPGISRRGRSRLRWVLFQLAMTTVKSNKEMKAYHLYYTTRKNNPLKKMQSLMAIAGKMTRIFYGILKNGTEYNPEIVMKDFKKEATM

SEQ ID NO: 68213 - protein, 452 aa, unidentified
MEENKITMEIVNPNAAGVDIGSRSHWVAIGQGTNDYREFGVFNEDLYKIVEWFRENRIKTVAMESTGTYWQSLYAVLISEGFQVILCNGKFTKNVKGKKTDIQDCQWIQKLHSLGLLSGSFLPDEVTEQLRTFCRHRANLLDSAASASKKMQKYLRLLNLRLDVVVNDICGLTGLNIIKAICKGETLAENLASLRHGNCRKSEEEIAKALHSNGRKDYLFALNQELEMYEIFQSKIVQCDNEIEKMLSHIIDNDDNKRQHHLDSKPHKRINKNTPKNIGLNLRSYQYFEGVDLMAIEGMSYSTVLAVMSEVGLDGIKKFPTAKHFSSWLRIAPNNKISGGKVLSSKVPRGSNRLKIALRNAANAIGNLKDSTPLRDFFQRINFRKGRVSAISATARKLAVIIWNMVAKGIPYHNPKEYLFLDQKRKLGLVKRIQKQITKFELKAEEFGFVTH

SEQ ID NO: 68214 - protein, 355 aa, unidentified
MDGTKYIGMDVHKESVSIAVMNSAGKVVMECVIATKASMILQFVDGLRGDLHVTFEEGTWAAWLYDLLRPHVTRIVVCNPRRNALLKDGNKSDRIDAQKLAELLYLDKLKPVYHGEHGLRAVKELVRSYSTVTKDLTRVMSRVKAIYHSWAIPCTGKQVYGLRHRAEWLAKITEPGVYRRAEFYYQQLDTLRALRQEVRRELLKESKKHKTWGLLCRIPSIGPIRAAMLMGILQTPHRFRTKRQLWTYSGFGIETRSSADHRSVEGQLRRARKPASIRGLNENHNHDLKNLFKSAAIIASNKPGPFQEFYGALLTKGMRPEMARLTLARKIAAITLHVWKKGASFDAQYLKPQTA

SEQ ID NO: 68215 - protein, 318 aa, unidentified
MEDTKTYVGVDVSKDTLDMAVHPRQQAKSFRNDELGINQAVTHLEKLAPTLVVMEATGGLEMSLAAALSAVGIPVAVVNPRQVRDYAKSMGRLAKTDAIDAQVMADFAAVVHPEPRPLADTQTRELKDILTRRSQLNEMITAEKNRLKRARRPVSDHIQAHIVWLERELDDMNTNLRRFIHESPVWREKDDLLQSVPGVGPVLSSTLVAELPELGILNRRQIAALAGVAPFNRDSGRFRGKRTVWGGRAKVRAVLYMATLVATKRNPVIRCFYERLVAVGKAKKAAITACMRKLLTIMNAMMKHRTPWGHISNPAVIS

SEQ ID NO: 68216 - protein, 350 aa, unidentified
MELNAIGIDLGKTLFHLVGLDASGNVVVRKKCSRTQLLKYTANLRVQRIGMEACSGSHFLGRALREQGHDARLMPAQYVKPFVKTNKSDSIDAEAIAEAVQRPTMRFVPIKTEEQLDLQAVHRLRERWVMRRTAVVNQIRGLLLERGVTLPKGRSHVDEALPEILQDADLKLSGSFRLLLSELQLELEQLAEHIQQMDSAIQHTVKENEACQRLTTIPGVGPVIATALIAAIGNGSGFRKGRDLAAWVGMVPRESTGGKQKLLGISKRGNNYLRMLFVQGARAVMRYRAKQAPGLEPLVDSTSGSHASECRHCCLGEQADPDGLGGALQERSVSSAGASRLRLARPTKGS

SEQ ID NO: 68217 - protein, 341 aa, unidentified
MQITTIGLDIAKNVFQVHGIDAAEKVVVRKQLRRNKVIAFFEAVPLCLVGMEACASAHYWARELRKLGHEVRLMPAKDVKAYIKRNKNGAIDAQASCEAVRRPTMRFVAVKSAEQQGQLMQHRTRDLLMRQRTQVINALRAHLAELGIVAAQGREGLKGLLAIIADEKDERLPVDARASLIVLAAQLQAVQTLIGSIEKRIIAQHRANEASKRLQSIPGIGIIGASAIVSTVTDPTAFRSGRDLAAWIGLVPRQDSTGGKQKLGPISKQGDRYLRRILVVGAHSVLRRAKHNPEKYPWLTQLLARRPFKVVAIALANKMARIAWALLARGGTYRVPALAAA

SEQ ID NO: 68218 - protein, 317 aa, unidentified
MNFVGIDVAKDSMEVMVHESSKRWNFMNDESGLHKLIAKMKRLSPCLIVLEATGGYENTVATGLQCKGFSVAVINPRQIRDFARSIGTLAKTDILDARVIANFAAKIQPPPRILPTEEAKRLGAILMRRRQVVTLLTAEKNRLLQANPAVRERVKKHVTWLKQELSDISKELKQMVQDDPEWKEKDKIIQSVPGVGPILSVTLLADFPELGTLNRKQIAALGGVAPFNRDSGKMRGKRTIWGGRGVVRTATYMAAFAAIRCNPLLTSFFNRLVAAGKPRKVALVACMRKLLCILNAMLKNRTRWTCYSPQLVGPCYC

SEQ ID NO: 68219 - protein, 345 aa, unidentified
MKHTIVGVDLAKDVIQICVVKRNKVISNEEISADEFTAWLAIQKPATLVFEACGTSNYWKQIAIRHGHDARLISAKLVAKIRQNQKTDRNDALAIVQASQLVDINFIRGKTFKQQELQAIMRMRELAVKHKVAIRNQVEALLLEFNIKVSPRSGGLSGTVQTVLEDAENGFCMQFRQALDITWKLYLQTVQNIKEKETLLAQTIKSHPDCEKLLDLEGVSTINAVNLFISIGCGDAGVFQSGRDAAACLGLTPLQHSSGGKTKIGSIGKGIKNVAVRSYLVNGAMSVINHVAQREPKTRKEQWIKQLLERKSKKCVAVALANKTVRTAFAILTQGTRYKAEPLMV

SEQ ID NO: 68220 - protein, 423 aa, unidentified
MLGMGIDWAEAFHLVALGRPAEGVIQLRRVEHTPAAVDQLIAQIATLEPDPAEVRVVIETRHGLLVERLLDAGYVVLPVNPDLIARRRGPARKKDDAKDARIACLLALDRHTRLRPLIPHGELAAELRAIARDDERAARDQRRLGNRLRQDLLSTFPAALAIAGDNLGAPTMLRLLERWPTRDQLASASRQQLVAFARTGRHGWPDRFADRIAQALAADHVPPPGAWLVRAKADTIRLAATQLLAIGTQRHLWEQRLAALLLGAPRHGRIRQPREDNPGQALPGGKIYLSFPGLGDRLAARVAGEIGDHPQQFGSPNALACYAGKAPVTRRSGKSELVVATRLACNRYLADPVQQWAFCSLRYSGWAREFYDTQRARGKTHHAALRALGNRWLEILWHCLTRDQLYNEATHLANRNRALGKAA

SEQ ID NO: 68221 - protein, 392 aa, unidentified
MACTLLPCPSGQPRKEVRTFGTMTQDILALRDWLEAQGCTHVAMEATGVFWHPVYNLLEGGALELLVVNAQHIKNVPGRKTDVKDAEWIATLLRHGLLRTSFIPPRPQRELRELTRYRSSVRAERADEVNRLQKTLESANIKLASVASDILGLSGRAMLEALVAGESDPGVLAGLACGTLKAKRAQLAQALQGHVGPHQRFLIGLHLAHIDSHDALLARLDAEIAARLAPVAATVARLDAITGIGRLTAEVLLAEIGTDLSRFPSHRHLASWAGLCPGQNESAGHQRSGRTRKGSPWLRAALVEAARSAGRTQTYFGALYRRLAARRGPRRAAIAVAHAILVTIYHMLTRQTPYQDLGVDYFARRQEASVEAHLVKRLERLGYEVALQPRAS

SEQ ID NO: 68222 - protein, 346 aa, unidentified
MEKAFPTRVQVFAGIDVSARELSVAMQCGVEAGIAVTTFSNKAAGHKALLLYLLRGNARARVCLEASGNYSLDLALTLQAHPQVEISVVNPRRARRFAESLGERSKTEEVDARVICEYAVRMRWVPWVPPNLAALRLRAITRAIEDLVTMQTQEKNRRHSLQASRALPALVMRELEQHLRYLKTRIARLRREALRLIGRHPELNRRFHLMLTTPGLGETSTLQILGELPVLPETLDARQWAAFSGLDPAQFSSGTSIEKKSRISRGGSRHLRRALYMPALVAIRREPFVRGFYQRLLRRGKAPLQAVVAVMRKLLHALFAMFRLDQPYDGSKLCPGEFARDTAVCA

SEQ ID NO: 68223 - protein, 365 aa, unidentified
MPSFHPDTIHLGLDVHKDSISAGILNPGHETPDVEKIFHDEESVRRLIGRFPDPRLVRACYEAGPTCYDLARLLVSMGVRCEVIAPSMIPKAPGDKVKTDTRDCRRLARLHRAGELVAIRIPTPTEEAVRDLCRTRGDMVEDLTRARNRLTKFLLCHSRVWRGGSNWTVKHEAWLAAQTFSEPALATTFGHYQAVVLARDAALDAVEADLVVWFDRAPFSEGVHRLGAYRGVTRMGALALQAEVCDWRRFGRAASMMGFVGLVPSEYSSGGSTRRGHITKAGNAHLRAQLVESAWAYQHRPYVGPEIAKRHVGLEPEVVARAWAAQLRLCGRFRHLAARKNTKSVVAAAVARELAGFLWAEMTAA

SEQ ID NO: 68224 - protein, 357 aa, unidentified
MKGTKVMIVLGADMHKSSHTIAAVGATSGELLGDKSIAVGDRGFAAALDWARGLEDERVWALEDCRHVSGAFERFLVVHGERVVRVATRLMAGERRGGRDRGKSDLIDAMAVARAALREGVDRLPVAELAGVELDIRLLVDHRERLVRMRTALYNDLLWHLHDLWPEQTFPGCALLSKKWTTRIARRLGRAEQTARVRIARDELRHLRELSMTVDALEAEIADLVAEVAPQLLAEPGFGPLTAGKLIGEIAGAQRFSSDAKLARAGGIAPIPVSSGKTNRHRLDRGGNRQINTAIHRVAITRARCHPETKAYIERKRAEGKTNRDAIRCLKRHLARRTWHLLQPPPPDLTTPPTSIS

SEQ ID NO: 68225 - protein, 387 aa, unidentified
MLKYCVGLDISSKHFHACLSAIDQLQKVTVKCSAKFSNNPAGFNDFEAWLFKHHKQKDIALVVVMEATGVYYENIALFLHLKGYKVSVILPNKAKKYLQATGLKSKNDSIDAQGLSRMGSEQALEIWQPKDEYFYQLRSLTRQHQSLQELKTNVNNQLHADQHGMYQNELVTSQLMLLIKTINSQIADMEAAIATHLNKDNEVAKLVEGITLIKGVGALSIAIVLAETNGFALFKNISQLVSFAGYDVVENQSGSHVGKTRISKKGNGHIRRCLHMPAFNVVRYQQSPFIQLFNRTLQRHGIKMKSYVAVQKKLLVLIYVMYKKKEAYQPIRNIKYSGEQEQVSSSLLSFAEAGQLNEKQNSANPKAALHKVNILSNQSQYVSSLLL

SEQ ID NO: 68226 - protein, 329 aa, unidentified
MKDLLEISCGLDIHKEKIVACILTGPLGKPTHSEIREFTTLIPDMLALRDWIISENCHHIAMESTGIYWIPIYEILEDAFSGDITLLVVNARHMKNVPGKKTDMRDSEWISTLLRAGLLNASFIPEKRIREFRDLNRYRKSIIRDITSQKNRVEKFLQSSGFRLSSFISDIFGASGRNIILHLMEHGQIDKMSLDSYLKTKTRKRIDEILMSVNGTLSEHQKSFLKILMCHYDSMKEHLIEIETHLQEDMLPFALQIEQLNTIYGISTTASCAIIAEIGTDMKPFKTAEHICSWAGLCPGNNESAGKRESTSITKGNPYIKVCFVRLPG

SEQ ID NO: 68227 - protein, 340 aa, unidentified
MDEYDGRQYVGIDLHRRRSVIVRMTPGGERLGRPVRIDNDPFTLAEQVASWGESPEVVLEATYGWYWAADVLAQAGAQVHLAHPLGVKAFAYRRVKNDERDAADLCDLLRMGRLPEAWVAPPEVRGLREAVRQRCKLVAIRSGLKAQVHAVLAKQGVAVKMSDLFGVGGNELLDTLRLDAPFAARVGSLRRLIDAFTVEIDILAKRTGADLRAHPGYRAVQAIDGVGPVLAAVFVAEIGQVGRFARAEQLCSWAGMTPRHRESDTKVHRGRITKQGNRLVRWAAIEAVQRVREGPVAGTRTRLTEQRGANIAKVAAARKLLTLVYYGLRDGHIRCLARPA

SEQ ID NO: 68228 - protein, 388 aa, unidentified
MKDVPVLSIDVSKSKSYATMFRSYGDMYLKPFPFNHCPTDLDYLTSQLVLLEQETGKKPSVVMEATGNYSKPISSFFRENGYNVFVINPLQTHAQKKKSVRKVKTDPIDTNRIAQVFYLDDSPLEYCYEPHILELRNLCRQYESFNNLYTETQNKYRAILDLCFPKFELVFSHMRSPTALNILSLFPSPADLLAASRSELLESLKPARKSRDWNEMKVDQLIMAAKESLPFNQAQQSSVRVLRSYIDLLLSQQKILADLRAQMIYWANLSPYYALLYSIPGVGEITATTILAEIGDIERFPSSKQLVAFAGLDPSVFESGNFKASKNRISKRGSSYLRKALYQATVAGISNRQGGPLNKILYAFYSKKLAEANRLKLLLLLLLTNLLG

SEQ ID NO: 68229 - protein, 339 aa, unidentified
MKSLLSTKYHKFMKSIYVGIDISKNTLDFCIKSSNGISFQKIDNKIRNIRKLLKTLVKMNVKVFIAMENTGYYNYNLYQVLESFDFNVYVLDPKHIKRSIGLVRGKNDKVDAKRIAFFIERNHQAFECWGPCSEAVKSLKILMGQRKSKIKQRKGIKQQMTDLRDIAFNSSTRKLIKINQKAINELDRHIKEIETLIRAEIKSEPALGAQVKRIKTVPGIGDVTAWMITIKTEGFQRLTDPRKLACFAGVVPFEQQSGTSLKTKPRVSKMADMALKSVLQMAAMRAVRMKNDLQAYYLRKVEEGKNKMSVLNAVRNKLIHIAMALIKNQTNYKNRLELS

SEQ ID NO: 68230 - protein, 426 aa, unidentified
MRFIGLDVHLDFCEIAIIEQGRVRSGGRVPSSPEGLQVLANSLGRDDQVALEATGNALAIALLLEPHVARVVVATHKELRAITEAKVKTDRHDARTIARLLAAGLLNGCWLPDEKTRSLRRRLARRAQLVRQRTRCKNEVHAVLMRNLKGRPPMTDVFGKSGRVWLSELELPGDERETVDGCVRQIDFFNAEVAILEREIAKHALASKDIRRLITVPGVSLMTAATFMAAVGDIDRFHSPSKLVSYLGLDPKVRQSGSEPARHGRISKQGPAPARGMLTEAAVVAVNTDGPMRAFYQRVRARRGNPIAIVAVARKLAVLFWHLLKRDEDYAFARPALTRHKLRELELRAGAERHPGRRNLANKSGYHQQANRDRDRELAAQAELAYRRLVTDWKAAGPAKVGAGATPGRASNRPSKGKAARQTTSP

SEQ ID NO: 68231 - protein, 424 aa, unidentified
MNLTQNDRLKQVTSDTLIVGVDVGSQTHFCRAFDWRGFELSRRVFKFSNTGMGFLTFLRWTEELMNKTEMKKVIVGCEPTGCYWLTFQKFLQDHDIQLVTVNPFTVNRSMELDDNSPEKSDLKDPKTIALLVKDGRYSTSYLPSGVYAEIREASVCRDQIMKQHVRLSNQIQGWLQKFFPEYFECYAEWDSTSGLMLLKEAPLPQDILKIGAGGINQIWRDAKVRAAGIKRAQTLVEAAQNSVGLEAGEAARLEIWVLVNDYILKAEQLKRLDEYLEEKVKEVPNVEKLLVIKGVGMSTVIGFIAEVGDIGRFTDPKQIQKLAGLEIVKKSSGKKKGQPRISKRGRRKLRRTMYESARALMQWNPAFQDVFLYYRNRTRKPLGSMQAKIAVACKAIRVFYVVLQTGCDFDEEKFRRDIIRPEVA

SEQ ID NO: 68232 - protein, 463 aa, unidentified
MAKKNTTSRKSKSKARKSVLERINPNAAGIDIGANFHLVAIPEDRAEENIRKFGPFTSDLHRLADWLTEHHIETVVMESTGVYWIPVFQILEQRGFEVKLVNAAHVKNLPGRKSDVSDCQWLQQLHTFGLLNGSFRPKDEVCILRTFLRLRDTLVKDCSSHVLRMQKALTEMNVQIHRVLSDITGYTGMAIIRAILTGERNALTLAQMKHPQVKASTEQIVKALEGDYRTEHLFALQTAVELYDVYQLKITECENKIEQQLEQFESKLDFEQVLEQSGALKVRSAKVRLELQRQAYLTSVCGVDLTRLPGLSTLAVEVIISETGLDMNCWKSEKHFCSWLKVCPDNRISGGKVLSSKSRKTKNRAAGMFRLAAQGAMQSKTAIGAFIRRIRARLGAPTAINAGANKLARLFYRMLKFGAAYVEHGQTYYEERYKDRLLHNLSKRAKEFGFQLTPFEPATVSVS

SEQ ID NO: 68233 - protein, 322 aa, unidentified
MSVVVLGIDIAKQKFDVALLVEEKTKHKTCKNSAEGFEALTVWLEKQGVGKVHACLEETGNYGEDLGIYLHEAGHTVSIINPARIKGFAQSELLRTKTDKIDAALIARFCLAMKPEIWTPPAPEIRSLRALVRRVDSLIDMRSQEKNRISTAHESVVLLIKEHIVYLDKEIENIRRQIDDLIGKNPYLKQRKDLLASIPGLGKATIPHLLAELDDLNKFTHVREMVAFIGLAPKETLSGSSIKGKPRLCKIGHARLRKALFMPALVSIQCNSAMIAFHNRLKERGKNGKVIVCAIMRKLVHVIFGVLKSGKKYDPNYKPVFA

SEQ ID NO: 68234 - protein, 367 aa, unidentified
MFNERTAIGLDVHARSVRAAAIDTLTGEVIEARLPAGAADVLAWVMQVSARLGPVHAGYEAGPTGFGLARKLEAAGIAVTVAAPSKIIRPTGDRIKTDARDAVLLARLLKMDELVAVRVPTQAEEAARDLVRARDDARTDLLAARHRVGKLLLRRGLVYAKDRAWTGAHDAWLRQMRREGLDGAGPGTLAAFDAGYDAVNSILARRDRLDRDIAAMATDSPFTAVTNRLCCLRGISTLTGFALAAEIGDWDRFTGRTIASYLGLVPSEHSSGGSRSQGAITKTGNTHARRLLIESAWHHKPVYRPGKIMKDRWAAAPAAAAARGDAGNRRLHHRWIVLDAHKKKHTVATTAIARELAGWCWSLAVMT

SEQ ID NO: 68235 - protein, 322 aa, unidentified
MGTLSFCGIDVSKDRLDAMVLPEQQSSCMGNDPAGWAQLVEWLSDFSIAAIGLEASGGYERGVMRALLAAGLSVRQINPFKLRQFANASGVLAKNDRLDARMIASFIAVMPTRAAQRRTPGIEQMSEIVTVRRHLSDQKIAAENATKLLEDAMLQRLSRRRIAQLASDIAQLDNRLAEIVAADSALSRRYQVLTSMPGVGLVLACTLIALLPELGRMSRKQIAALVGVAPYDFDSGKLKGKRCIWGGRAPVRHVLYMAAMSAGNWNPTLKAFRHRLKTAGKVPKVTIVAVMRKMITTLNAMVRDDVAWADHLAGRRSAPTAR

SEQ ID NO: 68236 - protein, 355 aa, unidentified
MLSTKYIGMDVHKETASIAVLNSSGKLVMESILETKANTIIQFVQGLRGHLRVTLEEGTWAAWLYDLLRPHVTEVVVCDPRKNALLKVGNKSDRIDARKLAELLYLNRLKPVYHGEHGVRTLKELSRSYLAISGDQARVMTRLKALYRSWAIPCAGKQVYAGRYRSEWLGKITEAGVRRRAEFYYQQLDALHALRQQVRRELLAESGKHQASKLLCEIPAIGPIRAAQLIAILQTPHRFRTKRQLWAYGGLGIETHSSADHRYVDGQLQPSKRQVSLRGLNRNHNHELKNIFKGAAIIAATKPGPLQQFYGALVAKGMRPEMARLTLARKIAAIILIVWKKGVCFDAQYLKPQTA

SEQ ID NO: 68237 - protein, 373 aa, unidentified
MKKRISSQRSQKRTVKAKRTRESVTIGVDLGDRSSRYCMLSGDGAILREGQVPTTKAGMTATFGSLGRARIAIEVGTHSPWVSRLLGNLGHEVIVANPRQVKLITESSRKDDRLDAQTLARLARIDPQLLRPIQHRSEKAQAALMVIRVRAALIAVRTSLVNTSRGLAKAMGERLPKCDADQMGVLKAESVPAKLRQLLEPLLKEVESLTEKIKDSDREIEQIAREDYPETALLQQVGGVGPLIALTFVLTVDDKNRFQKSRDIGCYVGLRPRRSDSGQRQPQLRITKEGDPYLRTMLVQGAHYILSRRGPDTDLKRWGLRLAERGGKRAKKKAVVAVARKLGILLHRLWVTGEVYEPLRNQNLRKLQKEMAA

SEQ ID NO: 68238 - protein, 394 aa, unidentified
MTTATTLKSEPIAVAGILHLAFELGAKKWKLGFSTGLGQKPRERDITAGDTAALLAEIELAKRRFGLEETVRVVSCYEAGPEGFWLHRFLVAQGVENCVVDSSSIEVNRKLRRAKTDTLDVRSLLKLLIRHLLGEKKVWRVVHVPPAAVEDRRQLHRELAALTEDRTRMRNRVRALLKTQGVVLPKGGAWKRVAETLEAHRLWDGSPLGARLRERIGREVQRLELVDEQIRTIHRAMAADLKDAAESGGPVVMMQRLLALRSIGVQISRVLVMELFSWRDFHNRKEVGGSIGFNATPFQSGTSFREQGISKAGNVWVRRIIIQLAWSWVRLQPHSPLTQWFKRRFATGGRRERARGIVALARKLLIALWRYVHTGEVPTGAVVGPQETYVLKVA

SEQ ID NO: 68239 - protein, 383 aa, unidentified
MDTTATRTREYSAGGTSLYLAFELGNAEWKLGFSVGFGQRPRVRTISARDLEELQREIELAKKRFGLPETARVMSCYEAGRDGFWLHRYLVEAGVENLVVDSSSIEVNRRFRRAKTDRMDVAKLVDQLMRYERGEKKVWHVVRVPGAEAEDRRHLHRELEDLKAERTQHINRMKGLLAGQGVQLEIEAGFLERLSAIQLWDGRPIAEGLKARLQKEYGRLQFIQEQIHELEAERVEAIRRSADPEVEMVRQLMRLKGIGLNSAWVDTMEFFAWRDFHNGKEVGGLAGLTPTPYQSGDSSRERGMSKAGNRHVRALAIEIAWGWLRYQPESELSQWYQRRFGDGSSRVRRIGIVALARKLLVALWRYLETGLIPQGAVLKTRLI

SEQ ID NO: 68240 - protein, 358 aa, unidentified
MESQDIKYVGIDCGKKSLEVVRIHSENSLKERRQFSTTEIGINNLLKWLTQNDIVGLEAGTQSFRIAKSILNKGIQVIVLNPGDLATIYQSLKKTDKEDSLKIARLIQRYPMEELPVVPVPTDEEEDNRRLCTEQENWTRQLTQGKNRLHSLFTQAGLTEITKKHLRTKSSRETSVTLLPSRYQKEAERILQVLDLVEQNLKLIEEETKDALKKNPAYVQTIMSMPGIGMVTSLAIMSYMGDCKRFSSGKQAAYYAGLVPRVDISGDTVRYGKIVSRGCHSIRRLIVQAAWSLVRCQHGGKLKEFYERLYSKKGAKKSIIAVSRKMIEVLYSMIRTGALFDSMPEEVLHRKLAQHGLM

SEQ ID NO: 68241 - protein, 340 aa, unidentified
MNIVFLGIDLAKNVFQLCGLSQAGKPVYTKRTGRKELLQALANIPACLIGIEASTGAFYWQREFEKLGHKVKIISPQYVKPFVRGQKNDGNDAQAIAVALMQPTMQFVPPKSPEQQDIQALHRARQRIVNHRTATVCQIRGLLLDRGIPIGSAVSRARRAIPLILEDAENGLSSRMRRTIAELYDLFNELERRIHFFDKEIETVFRQSEACQRIAKVKGIGPKTATAVVAAIGKGTEFKNGRHFAAWLGLVPRQHSSGDRLVLMNMTKKGDKHLRTLFIHGARAVVRVATNNDDGYMNQWVNQLKERRGFNKTTVAVANKNARIIWSMLRNETEYQAVGS

SEQ ID NO: 68242 - protein, 428 aa, unidentified
MDEVNRNRLEEFRQLRQEIRHSEEYLIVGIDIAKDRHHGFFGTATGKTLLRRLVFSNDHEGFRKLLDQAETLRVRHGLKRVVYGMEPTANYHKPLGEYLITLGRTVVLVSGVTVKQNRESLDGRWDKHDTKDSANVADLISQGKCLYYEYPSAELRGLRGLLSLKRRLKKQEHGYRVRIRNHLIAQYFPEMDRDYERLGAAGLSVVRWCFPTSQITELDVEPFIERVTSRRIRMETRRRLEGVWEKAGASIGCEGVPGVEHEAKVMVEGLRQIREMIKETEEKIQELCKQFPEYPYILTIPGFGPDLSAKVLGAIGDPYRFQNGKQVLKLAGLDLSADRSGKDSDKAIPEISKRGKADLRYALYQAALIASTKNQDFMRYYTRKLEGRQKEKGIQTKMWVKLSAKMLLIAWTLMKKKEAFDPVYLKVE

SEQ ID NO: 68243 - protein, 339 aa, unidentified
MKVSTLGIDLAKNVFQLHGVGCNGQTVLKKKLTRVKFLPFLMQLEPCLIGMEACASSHHFARVLRQYGHEVKLIPPQYVKPYVKTNKTDAADAEAICEAVARPNMRFVQIKTAEQQAILVLHTERNILIRERTACANSMRAILAEFGIIMPRTLSQLYKKIPERWEEYDNELSPFVRCSVARQLEHLQGVEDQITLIEQELSRWAKTQPACQRVMKVPGVGLMTATYLVASVGNGQQFHSAKQFAAWLGLVPREFSSGGKQRLGRISKRGDRYFRYLLVHGARAVAAVIERHKDNMPWLYRLLNKKAYNVAVVAQANKTARILWSMLVHHTEYRTLSAV

SEQ ID NO: 68244 - protein, 340 aa, unidentified
MGNITTIGLDLAKNVFQIHAVDQAGSVVMRKRLRRGQVLAFFAGIPSCLVGLEACATAHHWARELISLGHEPRLMPPTYVKAYVKRNKHDVADAEAICEAVRRPSMRFVPIKTVEQQSALMMHRARDLLIRQRTMLVNALRGHLAEFGLIEAQGLHKVARLIAIVMDENDGRVPDIARQVLKEIVNQIEDTQTRIAGLERQVLAWHKNNPVSQRLATIPGIGPIIATAIAATIADPNIFRSGREFAAWLGLVPRQNSTGGKARLGGISKRGDSYLRRLLVNSAHTVLLCSKQAKTDPWLTSLLSRKPRLVAAVALANKTARVAWAVMCRQDTYRHAGVSA

SEQ ID NO: 68245 - protein, 310 aa, unidentified
MEITVGIDVSKTRLDVHVQPAGEGFAVGNDEAGVAELLDRLGRLDGLAGIGLEASGRHERLAAAALAAARLPVVVLNPAQVRHYAQALGLRAKTDPIDARVIALFMAAVRPPIRAIADAATTELEALMARRRQLVVMLVAERARRAQAQPGPVRLSLARVVTTLEADLKELDAHIDKTVRGTPVWRDKEDLLASVPGIGKTIARTLLAELPELGHLSPKQIAALAGLAPYTRQSGRWRGRSFISGGRSAVRAALFMGAMVAARHNPMLKAFRDRLVAAGKPKLVAVIATARKLLVILNAIIRDQKPWTHA

SEQ ID NO: 68246 - protein, 342 aa, unidentified
MKSATTIGIDLAKNSFSLYGVDDKGKTVLSRTLTRAGVVRFFANLPSCLVGMEACASSDYWARTIESLGHEVRRIHPQYVKAYLLGAKNDTNDAAAICEAVQRPNMRFVPHKSPEQIDIQCIHRTRQGYIKSRTALVNQARGLLAEYGIIIRQGISAIRNQLPLIIADEENALSGLMRRNIASLYESICFFDSQILEQDKLLKTVAKENEACQQLMQVPGIGIMTATILLTVAGVASNFKNGREFAAFVGLVPRQNSTGGKTRLLSISKRGDCYIRTLFIHGARSAITRILAGQTPKYRPNPWVIELIARRGRNKACVAMANKAARIAWSMLAQGTEYRHAA

SEQ ID NO: 68247 - protein, 320 aa, unidentified
MNTSMQAAVPTAPLAIGIDVAAAELVVASWPPGEAWTVANNAAGIAQLVPQLQALAPGLIVLEASGGYERAALAALAAVELPVVRLNPRQVRDFAKALGQLAKTDRLDAQLLARYAATVQPAVRGVPSDNLQLLRDFVAWRRQLLAMHTAEQQRARHVDPRLAARMAEHEAWLTAEVQAVEQEIAALVATEPAWQAAMTCLVTMPGVGLVTAATLLALLPELGQLSRGQIAALVGVAPLNRDSGQHRGKRSIWGGRAVVRQALYMACLSAMRFNPILKAFKERLAAAHKPTMVIIVACMHKLLTHLNAMLRDGAAWTAEA

SEQ ID NO: 68248 - protein, 339 aa, unidentified
MTIQSKKIVQELKSRFAGIDVGAEELILVIRKNGTPYKPQKFTNTPADRARLVKKLSNLPGIIVCLEATGVYHFDLSIALHDAGVALMVVNPKSSHNFAKALMKNSKTDAVDAETLAQYAERMDFVAWTRPSDEKIALRSFARRIDALTRQKAAAKNNCHALSVSRETPKAVLRDVKLAISQLEKRINCLSKEVLVLIGKHPELERAFLLLTGIKGIAQTSAIALMGELLLLPPGLSHREWVKFAGLDPRAFDSGKSVHKQARLSKAGNRHIRSALYMPAMSAKQHDPYVKAYFQHLVDNGKRPLQALCAVMRKLLHAIHGMLKHDKPFDNTRFYAIPA

SEQ ID NO: 68249 - protein, 378 aa, unidentified
MPSETTVYVAVELSVSSWLVAARSAGAEKSRLHRIQGGDTTMLLALITKLRSRASTKLGRVVDVACCFEAGRDGFWLHRLLTAHGIAAYVLEPTSILVNRRARRAKTDRLDAEGMLRVLATWLAGDRQVCSMVRVPTPEEEDAKRPHREREHLVQERLRIENRIEALLFTQGIRKRPSLRSWVRDVAELRTGDGRELPCLLRIELERLRRRLVLALELIHEVEADRAEALAATADDKMTQKIAALQRLRGIGPNFAAVLVREVLYRSFANRRQLASYVGIAPMPYQSGGMDRDRSISRAGNPRARTTLIQLAWLWLRYQPGSALATWFRERVGMLQGRTRRISIVAMARKLLIALWRYVETGVMPEGVEIRAEADATA

SEQ ID NO: 68250 - protein, 357 aa, unidentified
MTVYCGVDFHARCQTISYLDTSDGEAHQQELRHQQEDVRAFYEKLSGEVIVGLEASGYASWFEEMLESLGHTVWIGDATEIRRLARRRQKNDKRDADHILELLLKGEFPRLHRQTAESREVLRQLRYRQRLVKISVMIKNNLHAIALGAGLSLQAQLSTNKGRERLRALPLSESVAQQREAWLQLLERVREQIVNVERWLKQQASGDPGVVRVRTHAGVGLLTGLCLVHTLGDVSRFPTTRKVAAYVGLEPMEHSSAETKRYGSISKAGSRLLRFLLGEAAQVAVRTDDELRTFYKRLLVRRGKAKAVVAVARKLLVRCFIMLRDGIDYAEFRRRGSAEQGVARSGLPALTHGLTSA

SEQ ID NO: 68251 - protein, 320 aa, unidentified
MQTPTQVLNIGADVAKDEIVVACSEGSFPVRKLENQRTALRAFLKGLPQGSRIGMESTGIYHELFANLAHKLGFIVFVLNPKDARHYAKGVGMRGKTDRVDAELLARMVAKEHADLHAWVPPTPEQREINRLLKRRAKLSSLRQALGMSLKGMVGFSTDLKTLRQRFDQVIARIDQRVKELVEANPDRKEHVTHLRTITGVGPVVSAALVNSLERMPLKNADAFVAFTGLDPRPDDSGQHRGKRRLSKRGPSELRRLLYLAAMSAKKTKAWKPLFEHYRAKGLSTTACFVILARRIARTAWSMYTYKTEFDPGRLTKGLT

SEQ ID NO: 68252 - protein, 354 aa, unidentified
MNYVGVDIHKRYSVHVAVDERGRELARGRISGNSVHAFAQFFEALQGPGKVVLEACWNWGRIYDVLSEIEQVEEVVLAHPLKTRLIAEAQIKTDSLDALALATLLRGNLIARAHVPSKATRARKELLRQRLYWARLRTRVRNRVHAVLDRQRELEMPQCSDLFGRKGLNALSKLRLAEPDATLLSEELDLLKLIDSQIKAQEGRIVAFNANEQATQYLQSLPGMGKILAAVAAAEIDAIERFDGAAKLCAYAGLVPTTYGSGGKVHQGHLLKSRNKWLQWAFIEAAWVAVGCSSYFGGIYRYQRARGKKANIAITIVARRMCRIAFTLLKERRNFQEQHRTFPGRSAVRLTAAA

SEQ ID NO: 68253 - protein, 430 aa, unidentified
MKSTQNKKIEQVKETSMIVGIDVGSEKHYFRAFNWRGIEITRKPIPFSNSMAGFDMFHSAVVELMETNHLEEALVGFEPTGHYWFNLGQFLSGKNIKFVMVNPHHVHKTKELDDNSPSKNDRKDPRIIANLVKDGRYFYTYMPTGVYAELRNASNRRFVLVEEHTRAKNRLHKWVAVYFPEYKGVYTQIDAKGGLMVLKKAATPDEIIKLGVDGIQQIWKDAKLRGSGRKKAMQIVTAATNSIGLKEGLEEAKMELLDLIEDYELQTKRIERVNDLIKNLCSQIKYVDKLLEIKGIGITTVAGFFAEVGDITRFDNAKELQKLAGLELVSADSGKHNGRTKISKRGRKRLRYLLVQAAVSVIGKNDEFKEIHRYYTTRDNNPLKKMQSLIAVACKLIRVFHVILTKGVDYDASKMLGDIRRPGVADRKAA

SEQ ID NO: 68254 - protein, 426 aa, unidentified
MKNTQNEKISQINISTLVVGIDVAKETHYARAFDYRGIELSKLLKFSNTAEGYERLAQWMHSISQQHNKTDIIVGFEPTGHYWFTLGDFLKERGHRLAMVNPFHVKRTKELDDNSPTKNDRKDPKTIAMLVKDGRYREVYLAEDIYQELREVVAERDRLVQRLTSINNQVIRWLDIHFPEFQNIFRDWRRPTAFITLRHFPTPEKIAAAGTKKIEETWKALMKRSAGQKRAQELFIIAGESIGRKTGLVAAETSLQNLLTEYELYSEQYKELEQLMLDLLKQVPHAEKLLEIKGVGLITAATFVGEVGDISRFQDPRQIQKLAGLNLVENSSGKHKGKTQISRRGRRRLRHGLFMSMITILATNSEFRMLHQRNLTREKNPLTKMQSIIALCGKLIRVFYGLLRTGRDYSAEKMLGDIDQGMKTAA

SEQ ID NO: 68255 - protein, 348 aa, unidentified
MGYFAGLDVSLEDTAICIVDAAGRIVRESRAASEPEALVAFFKACGMTMERVGLEACSLTAWLHAGLTEAGLPAICIEARQAKAAMAAMPNKTDRNDARGIAQIMRTGWYRAVHVKSPFCRSWRALLTARRMVLNKRRDVENGIRALLREVGLKVGTPSRKDFPARVRELTADEPVLAGLAESLLSVVEVMTKEVERLTKRVLDEVKAEPTCRRLMTVPGVGPLTALAFRATIDQPGRFRKSRDVGAHLGLTPRRYQSGETDVQGGISRCGDELARTALYEAAHSLLIRSTRWSALRAWGMNIAKRRGMARARVAVARKLAVILHRMWVDGSEFRWGKQAAAPVVAAV

SEQ ID NO: 68256 - protein, 334 aa, unidentified
MAKITTVGIDLAKNVFSVHAIDENGAVLIRKTVSRAKLTAMVAQWPACVIGMEACSGAHEWARRFQEFGHTVRIMAARFVAPYRKSGKNDGNDAEAICEAVLRPNMRFVPVKSAEQQALLSLHRVRQGFVEERTATVNRIRGLLAEFGVVLPNRVLEVRRGAARAAESLPALARHAIEDLLEHLRALDARINAYERELEQLARSNEAATRLMDINGVGPMTALATVASVGPAHEFANGRQFAAWLGLVPRQWSTGGKTRLGHITKRGDAYLRTLLILGARAMLQRAAHRTDKLSRWALAVKARCGYHKAVVAVAAKNARIIWALLASGSTFRSA

SEQ ID NO: 68257 - protein, 330 aa, unidentified
MEITTYGLDLAKSVMQLHWVDMETGEIHRKQLKRRRLLEFFANHQPGVVAMEACGSAHYWARELLKLGHEVRLIAAQFVRPFVKTNKNDAADAAAIWETVQRPDMRFVAVKTEEQQSVLALHRMRSQLIKVRTMQVNQIRGLLYEFGADLPQGRQRGLKEVPDALTNLENSISPMMLDTIRQQLKRLEEMDKDIAEIEKRLTLWKKDQEAVTRLMAIPGVGLLTATAIIATVGNMKSFRSGREFAAFLGLVPRQSGTGGKVRLLGISKRGDTYLRSLLTHGARAVVNFQIKNRNPWIDKLLSRRPHNVTVVALANKMARTIWALLAARRF

SEQ ID NO: 68258 - protein, 387 aa, unidentified
MRKPNDMSKCLAAFDQDSTLVAVIELGLKNWLVAGIVPGIERHPLKKMEINERALIELLYRWRDQARKAGHPIKRICVAFEAGRDGFWLARWLRSQGIECYVIHPTSVCVSREHRRAKTDRLDAEVLKRAFIGWLRGETNHCSMAAIPTLEEEDAKRPSRERETLIGERTRIINRVKACFVRLGIRGLKLNWRKAADVLAKLRTPEAKPIPPNTLDELKRDLARLLFVSDQIKEIEKTRLARLRTAPKSGPGAMVRILANVLGNGVETADMLVHEVFLRKLRDHRAVARYAGLTGSPDESGRKRREKGLAKSGNARVRRGMIQLAWRFLWFQPTSDLAKWYEARTSDGRKDTRKRMIVALARKLLISLWRLATLGEIPAGVVMRPAA

SEQ ID NO: 68259 - protein, 335 aa, unidentified
MKKIYVGIDISKEKLNLCYREGLEIVLEEECMNDVKAIKKGFKTALKAFGATIDEVLVCAEYTGRYIYPLTVACQELDIFLWMDDPTRIKNSMGITRGKNDKIDAARIAEYAYRYCDKAVRYTIAEDAMVSMKNLLADREFLLTDKKRYQSQITDQKRYMAPGDFKHKNSRWKKVIKAIDDQIKAIDAEIDGIIASNPVLTRQKELLTSIDGIGDRIAINMIAITGGFKRFENARHFCSFAGLTPYKYDSGTSVRSKAKISKRANQTMKALLHLAAVSAATHMKEGEYRDYYERKTKEGKHVMCVLNVIRAKLVHRMFSVIRRNEMYTKSYQPAS

SEQ ID NO: 68260 - protein, 371 aa, unidentified
MSVISKAPDSVVIAIDPHKASWTAAAVDASSQPVATIRVPVSRGGYRALLQFASRWPDPTWAIEGATGLGAPLTARLRADGMDVVDVPAKLAARVRMLSTGHGRKNDDADAFSVGVAARSARTLTSVTVEGTVTALRAIVEHRDDLVKTRTQTVNRLHVVLTNLVPAGAQRELTANKAAELLRGTRPRDAAGKTLRGLAADLVTEIRHLDRRITKAATDIETAVTASGTTLAELSGIGALTAGTILGRVGSISRFRSAAAFATYTGTAPIDVSSGDVVRHRLSRAGDRQLNRCLHVMALTQIRLDTPGRTYYLRKRTDGKGHKEAMRCLKRRLSDVVYRQLRSDANRREAGPGGHSGAALKSSAASSNPAR

SEQ ID NO: 68261 - protein, 393 aa, unidentified
MIYLGIDVASKKHDCFMVSADGVIYGDVFTIPNNRKGFESLVDSISCFIEICKDENIRIGLESTGVYSNNILNFLSKQGYQVSLINPLLTNMDRKATSVRKTKTDKVDAKAICRFLSRNQDLESYTPPSYHSQQLKTLSRCCKKVTKQLTREKVALYTLIVKVFPEYLNVFASLYSKGSLALLHKYGTPSIIVSTRVDAVGNLLNKASKGHHGLTEAKKIKGLAQSTIGEQNDIYAFEIRLLIERIRMLTNHKSEYEKQITKLLKENYAIILSIPGVGPITGGFIIGEIGNINRFDSPDKLLAFAGLDPSVYQSGEYDANKTSISKRGSSYLRWAIHIAATGIVRNDVTFSKYHQKKLKEGKHYYVAIGHVTKKLTRVIYSLLKYNKAFIPQA

SEQ ID NO: 68262 - protein, 341 aa, unidentified
MMIIGCDFHPRFQQIAFLDQETGECGERRLNHLEEAEKFYRSLTGCQVRIGAEATGNFRWFRRLMQELGHEFLLGDASAIRAACPRRQKTDKRDARHILTLLVEDRFPVVWQAPAENDDLRQLLMHRCRLVRMRTKVKNQLDSMTKDEGVLSSRVWSAKRRSQIEALPLPGWYGHRRTDLLGLLAELDERIKPLDEAVREAAEDNQEARLLMTHPGVGPIVSLAYVLTIGDWRRFPRGKQVGSYLGLIPAEESSGGKRRLGRISKQGSTLLRWLLVEAAVHAQRHDASWHRQYLRLSMTKHHGVAKVAIAHKLAVRLYWMLRSGDDYSKVMERGSHAGQSV

SEQ ID NO: 68263 - protein, 418 aa, unidentified
MADEIMAEETIRWFAGLDWGSATHQACLLDEAGTVVGERAFAHGGAGLAALCDWLVSLAGDPGSVAVAIEVPHGPVVDALLDRGFAVYAINPKQLDRLRDRISVAGAKDDRRDARVAAAGLRTDPHLFRRVLAGDPSVIELREWSRLAEEVQQERVRLGNRVRQQLWRYYPQLLALSDDVTAEWVLALWNMAPTPAQAARLREATLARLLRQHRIRKLDAPAVLAILRQPAIPVAPGVTEAAVLHLRSLVARLRLANQEFRQAERKLEELCTALSETQPTAQDSGPGDATILRSLPGVGPVTLATLLTEATGPLARRDYPALRALSGVAPVTKRSGKSCIVVMRYAAQVRLRNAVFHWARVAVLNDRRCRGRYEALRARGHSYGRALRGVGDRLLGVACVLLRRGMLFDPDYGSSASA

SEQ ID NO: 68264 - protein, 432 aa, unidentified
MVRFDTGEGVVLEEDSQDGEIIARVAALDIGKAELVCCVRVPHEGKPGRRLQEVATYSTMTGSLLAMSDHLRSLGVGRVVMEATSDYWKSVFYLLEAQGHEVWLVNAKDVKHLPGRPKTDKLDAVWLCKVAERQMIRPSFVPPPEIRRLRDVSRYRIDLVGVRTAEKQRVEKLLEDAQIKLSVVASDIFGVSGREMMAALVGGQTNPKVLARLARGQLRAKIGALEEAFTGYFTDHHRFLLAKMLARIDALDADIAELDATLGELIAPYAPAVDKLDEIPGVGTTAARVIIAEVGVDMSRFPTPAHLASWARFAPGVKESAGKNKGKGTTGHGNRYLARVLGEAAVSAGKTNTFLGERYRRLARRRGKKRAIVALGRSILVIVWHLLSDPQARFHDLGPDFYDNHIGPERKKRNHIRQLEALGYKVTLEPAA

SEQ ID NO: 68265 - protein, 350 aa, unidentified
MTIKHYIGFDVHKKTISYCVKAAEGNIHEEGILRAIPMVLREWAGKRQEPWHGAMEATLFSGWVYDALKPFASALEIGNPSMMKAISAAKKKNDKLDARKIADLVRCNLLPACYVAPQEMRELRRLLRYRNVVVAQAVRMKNKMSGLLMEVGAEYSKQRLHSKKYFSELLDQLEEVPESVKDLLRLSRGSVEMFETMQRQLLNRLQKDPLLVKRVQLLRSIGGVGEVTALTWALEICDPQRFHCIADAVSYCGLSSALVSSAGKQQRGPISKQRNAHLQTVLIEAAKLAPRWNRQLAELHERERKRGNRNRATLAVARKLVAYLLAVDKSGQAFQVRNPPPAEPGVDKVA

SEQ ID NO: 68266 - protein, 408 aa, unidentified
MNCNQNFKISQVTEGTLVLGIDVGSNTHYARAFDWRGLELSKVFKFKNSFEGFQSFVLWVNDLCCKYNKSKVIAGLEPTGHYWFSLGELLKENNITIAIVNPYHVKQSKELDDNLQTKNDSKDPKVIAKLVIDGRYSFPYIPEGIYGELRVADKLKNDITQQIISIKNKIHRWLSIYFPEYEKIYSSIDSKSGFLLLKETPLPKDIVELGSEGIVERWKQTKLRAVGLDKAKKLEEAAKKSIGCKNITSSARFEIKLLIEDYEYKQNQLNSITEELNKLCEKIPMIKEIAEIKGIGIATAISFVAEVGDIRRFKSAKQVQKYAGLALKENSSGKHKGLTRISKRGRKKLRTILFRATIPLIGFNKEFSSIYNYYIERKDNPLKKKQALTAICCKMIRIFFTILSKGIN

SEQ ID NO: 68267 - protein, 353 aa, unidentified
MVPGVHRDPLKKLAADENTLLRLVHRWRDEAVKAGHRITRIIVTYEAGRDGFWLARWLSRHGIEVHVIHPTSVAVSREHRRAKSDRLDIGLLKRSSLGWLRGEDEHCTMVAIPTLEEEDAKRPYREREHLVGRCTSITNRMKATLVRLGIRGFNPTLRKGPERLGTLRTPEGELIPANTLAELQRDMAHLRFLKDHIKQIESAREEGLKQAPEKPANSKVLDLQRVRSIGVDTADILVHEVFSRELRDQRAVARYAGLTGSPDESGARRREKGLSKAGNARVRRSMIQLAWRFLTHQKQSALTQWFEARVTAGKRRKTMIVALARKLLIALWRFVTAGEVPEGVVLRPCVMSN

SEQ ID NO: 68268 - protein, 356 aa, unidentified
MAIVADTYTYVVGVDTHAATHHYAIVETRSGGQIAHGKFPTHAAGLLRAVDWISRRTSVDDNPAVDQVLISMEGTGSYGAQAAELLAARGYRVVDAPSPKRARGSGKNDHIDALVAARGALPKDSERLADRRAGHTRAALQILLTARDSMRRDRTRSKNQLTALLRTHNLDIDARKGINKAHISLIAGWRKRPTDTTLARIARTEAHRLATRIHTLDADLDSNEKAINALVRELEPTLLDLPGLGPINAAIVLTVWSHPGRIHDEAGFAKIGGVCPLEISSGNSKDHRLNRTGDRQLNSALNSIANTRMRHDETTKAYVKKRKQQGQTKPRIRRCLKRYIARQIFRHLNTTTLDKT

SEQ ID NO: 68269 - protein, 669 aa, unidentified
MTVMIGVDPHKRSNTAVAIGDDEVAVATIEVRAGGGQLDELTRWSTRFGECVWAIESANGLGYLLGQQLVSAGERVLDVPPALAARVRVLANGRSNKNDANDALSVAIAARRAPRIHTVRPADHAVVLRLLAKRHHDLSRLRNRTACRLHALLCELAAGGIVGEITPNKAQRLLEGLEPATPVERVRHQLAADHLTDLRHLDEQMRTSKQRIADAVAASGTIVTDVFGVGPIVAAMILGHTRNLGRFANRDHYAAYCGTAPIEVASGGRSVHRLSLRGNRQLNHAMHIIAITQIRHRHSPGRPYYDRKIAEGKTSKEAIRALKRRITNAVFAQLHADATQSGPGGQTGTTVQSSVADITPRKPALRRSHSRTNPNATTPQPRTSQARRNRRSRHRQQRGDRSVLGVVLRTERRTRASSRRCHCFTATPRSSAQTRSWAICRFDGSRPFTHSRDCSDHSRRVVVFVIAHTVDEPNAPVVSYRLQLPTAIPSWPRWPATSTPIHSETGGRARNNVRSALMNCSPSPLELAKGFGRSAASAARTAGDRSSPATSCQRSRVQSCLRSALQNPPGVSSRISQPPFSSVSPGAGSVSGSGTSHIGARQGSPAGCGPPRSNSALARATSASVLRIDTSRTQTRRPLRMMDVFTCSADIGGERNMSTVRRAILSSGS

SEQ ID NO: 68270 - protein, 350 aa, unidentified
MLIIGCDYHPSFQQIALVDTGTGELQERRLGHREEAEQFYRTLAAAGAKVRVGMEASGHAGWFERLLAELNIELWMGDAAKIAAKRVRKQKTDRRDAQHILTLMLKDDFPKIWVPSWENRDVRQLLWHRHRMVQTRTRIMNQLQAAALNEGLRYKKKLWREAGRQQLESLPLAPWASRRRRDLLEVLDRINPTIAELTRAIEQQAEKCPEAQRLMTHPGVGALTAIAFVLIIGEADRFSCGKQIASYLGLVPEEDSSGERRRLGHISKQGNSLLRFLLVEAAQVTVRSDTRWRNRFFHLAQRRGRKIAKVAMARRLAVRLYWMWRREWNYEQLERFGSHVGQLGNPHGVQ

SEQ ID NO: 68271 - protein, 322 aa, unidentified
MQANAVLGVDISKKKFDVCLLVGNKERYKVFQNNHDGFEKLVAWCNHHGAELIHLCLEATGCYSEDIVNFMYDLEHNVSVVNPAQIKAFGRSELLRNKTDKSDAAMIARFCIANKPNLWKPAPPEVRRLRDLYRCLQALKDDKLQQMNRLENKNTDSHCKQAILEVIATIDTQTAALEKEINEHVNNHLHLKNITEKIKTIKGVGHLTAVAVVAEMPSVDNFDNARQFTAFAGLNPEHYQSGSSVSKKSRICKIGSERIRKALYMPAIVVKNHNSYFQKFCQRLASKGKCPKVIIVALMRKLMHVFFGILKNDQPFNGNLVR

SEQ ID NO: 68272 - protein, 315 aa, unidentified
MQTPLDIGADISKDYVIVACTQHSFDRPKLANQRAVLLAWLKTLPAGSRIGMESTGSYHELLAHLAHRLGLSVYVLNAKDVRHYGQATGQRAKTDRVDAALVARYVAKEHEHLHLWYPPSAAQRQLQRLMRRRAKLTSTRCTIRATFKDVASLRTHSRALLKGFDALIAQIDAQARELIKADPEREQAFQRLDAIPAVGNAVGVGLLASLERWVLPRADAFIAFIGLDPRPEDSGKKSGRRRLSKRGDPELRRLLYVAAMSASRTRVWAPLYQRALARGLSRIEALVVLARQIARTAWSIYTHKTHFDPQRLQKA

SEQ ID NO: 68273 - protein, 407 aa, unidentified
MRFIGLDVHRDFCEVAIAEEGAVRSAGRVKTTPEALALFAGSLAVDDEVTLEATGNALAIARIIEPYVGRVVLANPKAVHASATSALKTDKVDARTLARLLAGGLLPEVWLPDERARRRRRLISRRAQLVRQRTRAKNQVHAALIRNLKERPPMRDLFGVAGRRWLARQDLPDDEQETVASCLREIDFLAEEIGWLEQTISLEVLACEEMRRLMTLPGISGVAACTLIAAIGEIGRFQTPGQLVSYFGLNPKVRQSGSEKPRHGRISKQGPGEVRHVLVEAAWHAKRTPGPLHVFAERIAAKRGVNVAVVAVARKMVVIAWHMLAKREDYAFTRPSLVREKIRRLELLTGTGRKRGEKGPTPTYASRKERDLELDLARQAERAYARLVRDWQPAMRKGAGAAAGRAS

SEQ ID NO: 68274 - protein, 439 aa, unidentified
MPESVAYVGVDISRDEAVVCWLLADGREPVPRWAVPNRQSGATALIDRLAELAAQHGVTELRVGLEATGLYWWHLACSLKDAPALAAYRPRVYALNPKLVHDFRRNYGALPKTDRADAFLIAERMRFGRALPPPFQVDVRYAPLQRLTRFRVHLAQTLAREKSYFLTFLFLKFSGFGQVHPFKDPFGATSCAVLEEFTTEELARADLAELASYLEAKGRGRFADPDVLAAMLQRAARDSFRLDQVLDEPLTLVLGTTMATIRTLQAQLKAVDKTITQELRALPQTLSSVPGLGPVWTAGLVAEIGEIGRFADEAALAQYAGLVWKAHESGQFQAEDTPMTKTGNTYLRYYLVEAANSVRLHCPEYAAYYQAKRAQSPKHAHKRALVLTARKLVRLVDALLRTGALYRPPETRRDPTEVTSPSTHRPARNRRSSRASAVV

SEQ ID NO: 68275 - protein, 341 aa, unidentified
MQIDILGIDLAKRVFQLHGADRQGRTVYAAKVMRAAFLETVRESRPRIVAMEACGSAHHWARCFRAMGIEVRLISPQYVTPFVKTNKNGRNDAQAIVEAASRPTMNFVTVKSVEQQDIQAVHRVRELLVQQRTALINQARGLLAERGVSIAQTRQAFKREVPKIVGTCEGEVTNVCQAMVLEISQQIHALEERIKHAETWLKSFMKQSALCRKIAAIDGVGTITATAMVASVGEAKEFKNGRHLSAWLGLVPRQHSSGGKSQLRGISKRGDKYLRTLLVHGARSVLRYAVGKTDVQSRWLQDLIARRGYNRAAVALANKNARVIQALLSSDMPYRPIAATR

SEQ ID NO: 68276 - protein, 371 aa, unidentified
MKKSSMFIGLDVHKNSIEIAIAEAVCDGEVRSYGGIDGTLGALDKVIRKLVSKGCNLHFVYEAGPCGYDVYRHLTAQGFDCVVVAPSKIPRQSGNRIKNDRRDAQMLARLHRAGELTAVYVPFAEDEAMRDLTRAREDAKAVEKKAKQRILAFLLRHGHRYSGKSSWSRAHFRWISILKMPHPAQQIVLQESLDALAECTRRVDRLTEQIQTLSPQWRLFPVTQALQSMRGVSLIVATTTIAEIGDLTRFGRPAELMSYLGLVPSEHSSGQKTRRGSITKTGNGHVRRVLVEAAWAYRLPARVSRKLLIRQEGLSQEVCAISWKAQLRLCARYKRFTANGKSHQLVVTAIARELCAFMWAIAHEVQGPVKM

SEQ ID NO: 68277 - protein, 407 aa, unidentified
MDLLKTVFGIDVSSRKSNVCIMVNGQKVDDYAISNDMVGFNQLLDDLKQVTKPQIIFEATGVYSRRLQAFLDMHKLRYVMMNPLEAKRKTKDDLHQNKTDKLDALYLAKLQSEHPQRLAYVQSKEYQELMANNRIYEQASHDLITNRNRLHKAIQLTFPEIEHLMVNPRGKNYWSIVLRFPHPDIVLETKEADIIDFLKGLSGIGKKRANDIMQKLIRLAKVACPAVKKDSAYVHGLKIAINNILSAEEECQTALQEMAKLAPKRDLEILTSIPGIGENTALRIISELGDIRRFKNPNQLNAFVGVDPQVYESGNLTAHLSISKRGTAIGRKVLYLAINQIQSAKKAGNPCHIADYYEKRKRSSETASHKKAAIASIHKLLRTIFALIKNDQLYSYDVAKHNQRLLS

SEQ ID NO: 68278 - protein, 353 aa, unidentified
MKRDQYMGMDVHQATTVVAVLDAEGKVVLETVVATEASAIIRLVQSLSGPLHVTFEETTQSAWLYDVVRSFVAEVIVCDPRRNKLLSEGSKADKQDARKLAELLRAKLLRGVYHGHQATRTLKQMVRGYETLSGDTQRAMVRIKAIYRECGIPSSGRGVYQAQQREPWLERLTEPGRRQRAEWLYSELDYLRPLRRQAKQAMVMESRKHRAVELLRTIPQLGSIRAAQLVATIDTPHRFRTRQQLWSYSGLAVVTHMSSEYEMKDGRPVRRRKPIATRGLNRNCNHRMKEIFIGAATGGSQTEPYRSYLQSLEKRGIRKEMAKLTLARKIAAIVLTIWKKGEAFDPKKLNWTT

SEQ ID NO: 68279 - protein, 384 aa, unidentified
MQSDMSKSHVVLAQDSTLIAVIELSLSSWLVAGLVPGLKRQPRKKLGPDCGALLAVLRRWRDEAVKAGRTIERITVAYEAGRDGFWLARWLKARGIEAYVIHPNSIPVAREHRRAKSDRLDTELLQRSFLGWLRGEAKHCMMVRIPDIEEEDLKRPNREHQRLVGERTSLINRLKACLIRFGIRNFDPKLKRAAEQVGELVTPEGVALPANTLTELGRDFARLHLVKEQLKAIESTRCKQLAKTPNERHTAMVRSLTRVVGLGIETADVLGSEAFCRDLSDGRAMARYGGLTGSPDESGKRRREQGLARAGNGRVRRAMIQFAWRFLTFQEDSPLAQWYRQRTQSARKDVRKLMIVALARKLLIALWRLATQGVLPEGMRLREI

SEQ ID NO: 68280 - protein, 298 aa, unidentified
MAEHAIGVDISKSHLDVFRLEDGAAQRFDNSAAGFRALIKWLGKAPVARIVFEPTGPYHRGFETALSGRFPLVKVNPLQARRFAEASGTRAKTDAVDAHVLARMGAALALEPDRSVSETSGELRDLQVARTGLVKERTRLRNRGQTRGNRVLKRQTRTRLALVERQIKELDAEIAKRIAGNEAMARKREILRSIPGLGQVAAAAILTFLPELGTMGRKQLGSLAGLAPHTRESGQWKGKSFISGGRKPLRDALYMPALVAMRFNPDLKAKYTALRAAGKPAKVAIVAFVGKTAPHAVF

SEQ ID NO: 68281 - protein, 356 aa, unidentified
MNKRSKLNFSGQPVYIGLDVHKKSWSVSIFTQHGEYKSFSQPPEAETLINYLQRHFPGAQYHSVYEAGYCGFWIHDQLREKGIQNIVANPADIPTQDKERRNKRDRVDCRKLARGLRSGDIKGIYTPPRWKLEDRSLIRTRLSMGRKQGRCKNQIKSMLLFYGVDIPEQREMGHWSRRFIRWIEGIRMERASGDVALKIHIEELCHLRQIIAKLNRAILALSRTEEYPGWVSLLRTVPGISTLTAMIVLLELGEITRFPSLDQLCTYVGLIPDIQGSGEKEHVGGMTQRGHSYLRWLLVEASWVAVRKDPAMMEAFNEYCKRMKKSKAIIRIARKLLNRIRYVLKNKAEYVPCVIE

SEQ ID NO: 68282 - protein, 312 aa, unidentified
METKHPVYVAIDIAKDSLQIQTDHAAWSVPHTDAGHRQLLERLQPLGPVQVVCEASGGYEQPLLVFLHQQGVPVSLVNPARVRAFARSEGQRAKTDPLDAAMLLRFAHEKRPLPTPPPAPQQAALAAWLDRRAQLSEPLAREKNRLQKSPVLLHPGIRVMIAFIEDQLAAVDRQLHSVVQADATLRDRAAVLQSVTGIGAVTTWSLLAYLSEIAATDWHRNQLVALAGLAPWNRDSGKWKGKRSISGGRAKVRRCLYMAAQSAAQHNPIIREYVQRLIARGKPYKCAIVAAMRKLLIHLQSLLKHHQNALAS

SEQ ID NO: 68283 - protein, 376 aa, unidentified
MRGKLRFLGLDVHAETIAVAVAEPGGEVRSLGTIANREDSIRKLIKKLGSPEQLRACYEAGPTGFVLYWQLTQLGVECAVVAPSLVPKKPGDRVKTDRRDALKLARSHRSGDLTAVWVPDEDSEALRDLVRQREAAKQDQLRARHRLTKFLLRTGQRPPLGLKAWTERYMRWLAQVRYTQPAQEVTLRDCLNEFEHMSARVKRLEEAILEVVKLVPQPMQEVIRGLQALRGVAHISAVTIAAELGNISSRFESARKLMGYSGVFPSEDSSGKRMRKGSITKAGNAHLRRIVVESAWCYRHWPRVGAKLRKRQQGIPAQITEIAWKAQNRLHKRYMKLMNAGKDQRKVMTAVGRELLGFIWAIGIKAEAACEQQLAA

SEQ ID NO: 68284 - protein, 359 aa, unidentified
MQYRTCVGIDTHSTKNEAFALDTETGETWRATLSSDPRDLGRFLCSLPIDREGTMCVYEAGPTGFGLARSLATAGGGCVVAATSKLPQRIDAMKTDRIDAEWLARCLAAGAVRPVRVPTAAEESLAHLSRLRGECAREKRAARQRVSSFLLLTGERYTLTKSLWTKTFRRWAETHEFADPADTYVFRDLFREAEHQAARVAECEAEIARIVGADPELSERVARLMCLPRVGRVTAFSLVCEVYDFSRFRSGAAFANWMGLTPSERSTGKRRSRGGITKRGNSELRRLLVEASSAYSASAAPARVDASGVSEAVAEKARSCCARLRRRRLALKARGVQANKAKVAVARELAEWVYHIMVM

SEQ ID NO: 68285 - protein, 317 aa, unidentified
MESTEISFEQAVRVGCGIDVHQAVIVATISKGQENYETKEFSAFTSSLTDLREWCKRAGVTHVAMESTGVYWKPVFNILEEDFEIILVNARHVKNVPGHKTDKKDSKWISKLLLAGLLKGSFIPPRDIRELRDLVRYKKKQVAHVSSEKNRMIKILEDANIKISSVLSDVHGASGSKIIHDIIDGKTDVDELIKHIHGKVKASREDIRKALEGRLTAHHRFMLKIIRKSIEEKEGIIKELEDQIDVATAQYAVEVELLQTIDGVGKDSAIGIISEIGVNMEQFPNEHHLSSWSGMSPGNNESAGKKKAQGPSKETNI

SEQ ID NO: 68286 - protein, 312 aa, unidentified
MTSETYVGIDVSKRWLEVRVHGEAESRKIGNDPDGFTSLIAELKAVQPQLIVFEATGGYESRAVKALSEAGFAVAVANPTRVRRFAEALGILAKTDKIDAQVIAHFASVVRPAVNGRLTPLEEQLAAFMERRRHLLVELVAEKNRLSTCPDCVREGIEEHIAWIEAQVDNLEAKIQASILQNSEWRERAEIIDSAPGVGPVTASTLVAELPELGQLSHKKIAALVGVAPFNKDSGPKRGKRRIFGGRSGVRRTLYMAVLSATKHNPVIRAFYESLLKRGKEKKVALIACMRKLLVFINAMVRNGEAWRSSPA

SEQ ID NO: 68287 - protein, 323 aa, unidentified
MNKETNYFGIDISKDVFDVMDEKDIHHQFKNNASGFKKFCKLLNRTSHCVIEATGYYHYKLAYYLLENETNVSVENPLSVKRYIQMKLSKIKTDKSDAKMICSYAKDVDLRLWKGDSKDQQACLQLTRSLSLYTKQSTAIKNKLHGEEVLGIPSKDVFRSLKRLLKSIQKEIKILEEKLHELIKKEHQELLTLMESIPGIGRKTGVMLLVLTDGFNRFQSAAELCSYAGITPVIRQSGSSVRGKARISKIGNQKLRNLLFLCSFNACKYNKACKALFDRIVAKGKSKKLALLAVCNKLLKQAFAVAKSRTPYNENYRSSLIVN

SEQ ID NO: 68288 - protein, 343 aa, unidentified
MKIYALGIDLGKTVFHLVGLDSSGQVVVRKRCSRTQLLAFTGNLQVQLIGMEACSGAHFLGKALRAQGHDVRLMPAQYVKPYVKTNKSDYIDAEAIAEAVQRPRMRFVPIKTEEQLDLQALHRVRERWVMRRTAVVNQIRSLLLERGLTLPKGRSHLGQMLPRILEDAELKLSGAFRVLLAQLKLELEQLAARIEQMDMVIQQEARENESCQRLTTIPGVGPVTATALIAAVGNGSAFGKGRDLSAWMGIVPGEYSTGGKQKLLGISKRGNKYLRRLFVQGARSVLQHRDKQAPGLNCWLAQLLARTHQNVVVVALANKLVRIAWAVLCKNENYRAPVLAATT

SEQ ID NO: 68289 - protein, 377 aa, unidentified
MSTLLFVGLDVHAETIAVAVAEAGGEVRSLGVIPNRLESVRKLVRKLGPVEHLRACYEAGPTGYVLYWQLTQLGVSCEVIAPSLVPTKAGDRVKTDRRDAAKLARCHRAGELTAVWVPDADHEALRDLVRAREAAKKDQLKARHRLGKFLLRHGRRPDGIKAWTKEYLEWIKSKVHFDQAALEATLADYLEEVDHVAARIVRLDKAIDEAVRQAPAGIRAVIEALQSLRGVAQTTAATIVSELGTLVRFERPRQLMGYSGLVPREHSSGNRVQRGGITKTGNGHLRRVLVEAAWAYQHRPNVSGSILHRQKNLALDDEVKKMAWKAQQRLYKRYTALAARGKNKNQIVTAVGRELIGFIWAIGVHTERQQRRLTQAA

SEQ ID NO: 68290 - protein, 355 aa, unidentified
MRFYTEHHQFYCGIDLHARQMYVCIVDSAGEVLVHRNMSAKPGELLRALSPYAGKDVVVAVECVFTWYWIADLCAEREIPFVLGHALYMKAIHGAKTKNDKIDSRKIALLLRAGMLPQAYVYPPSMRSTRDLLRRREYFMHQQSELLGHIENTNSQYNLEPFAKRISRRSNRIGIAERFDDPQVASSIEADALLLDVYHQILLDLEAQVLKAARVHDPVGLQLLRTIPGVGKVLALVLLYEIHDVNRFPSVGQFLSYARLVKCPHESGGKRTGGRGNKIGNVHLKWAFGEAAVLFLRGNEAAQRYHEKLVSRYGKGKAMSLIAKKLGRVVYSILKKRQPFDPKKFFSDAAHESAA

SEQ ID NO: 68291 - protein, 342 aa, unidentified
MPQPAPTQVTVGVDTHTDLHVAVAKDSFGRCLDTTSIPTTPAGYAELLDWAQCLGQIEAWGIEGTGSFGAGLSRYLRSRGQVVVEVNRPDRQARRRRGKSDPLDAEAAARAVQAQQGSIPKAGDGQVEMIRSLRVARATAMKARTQAINALKGLLVTAPAELREQLRGLSAVRLVQAAAALELGPVTTPLAAATLGLRTLARRYQVLSAELMVLDTELDRLTRAAAPRLVALFGVGADSAGALLVAAGDNPDRLRSNAAFSMLCGASPIQASSGKTRRHRLNRGGDRQANAALHRIVVARLRHDQPTKDYLARRIREGKSKKEAIRCLKRYVAREVFAVLPR

SEQ ID NO: 68292 - protein, 386 aa, unidentified
MQKLNDLSRCLTPLEPDGTLIAVIEMSQSSWLVAGIVPGIERQPLKKLKVDESTLLNLLHRWREEAEKAGHRIKRISVAFEAGRDGFWLARWLRARDIEAHVIHASSVAVSREHRRAKTDRLDTELLKRAFLGWLRGERDHCKMVAIPTIKAEDAKRPNRERESLVGEQNRIINRMKATLIRLGIRGFNPKLKKAAERLEGLRTPEGEPIPLNTLAELHRDMVRRRLVSDQIRQIENVRLEHLKQAPSDGPHAMVRLLARVIGVGIETADMLVQEVLSRNMRDRRAIARYAGLTGSPDESGTKRREKGLARSGNARVRRGMIQLAWRFLMFQKNSALAQWFQTRTKNARGTRKPMIVALARKLLIALWRFVREGVVPDGVVLRPAS

SEQ ID NO: 68293 - protein, 391 aa, unidentified
MIYVGIDVAKDKHDCFITNSDSEVLFKAFTIFNNLDGFNDLYQKIESVMDDVTKVKVGLEATGHYSYNLLGYLIDKGLPTYVINPLHTNLYRKSLSLRQTKTDKVDARTIASMLMSDVNLKSYSDTSYHNEELKSLTRYRFDKVKERAKLKTSVSRLVCILFPELEKLVPTLHMASVYALLSEFPSAKHVATAHLTRLTNLLSKSSKGRYGKDTAITFRDSARASIGSNMPAKSLELKHTIKLIQELDSEIDEIENEIKIIMDEINSPILSIPGINYRMGAMIIAEIGDFSRFDSPDKILAYAGFSPSTYQSGHLYGAYAHMEKRGSRYLRYALYNAAKYVCHWDPTFAAYLAKKRAEGKHYNVAISHAVKKLVRVIYHLEKTKQQYIKAT

SEQ ID NO: 68294 - protein, 334 aa, unidentified
MQNITLIGIDLGKHSFHIHCQDKSGKALLRKKFTRTKLMQFLATCPPSVVVMEACAGAHFMARCISDFGHETKLISPQFVRPFVKSNKNDFVDAEAICEAASRPSMRFVQPRTETQQAMRALHRVRESLIRDKVKTTNQIHGFLLEFGISLPIGDAVIKRLSLVLAEHEIPEYLSRLLVRLHTHYFYLVEQIAELESELSQSINADDTAQRIMTIPGVGPITASLLSSQLGDGKQFSCSRDFAASTGLVPRQYSTGGKSTLLGISKRGDKNLRRLLVQCARSFIMRLERKHGKLAEWVREQLNKKHSNVVTCSLANKLARIAWAITTQKKEYQA

SEQ ID NO: 68295 - protein, 339 aa, unidentified
MKSTIIGIDLAKNVFEVYVEDATGQVVKRCRLSRKKMLPWLANRAPALVGMEACGGAHYWARELEKLGHEVRLIAPQYVKPWVQTNKSDSVDARAICRAVQEPGMRFVAIAGEAQQAVQAFHRVRSRLMGNRTALVNQIRGILLEYGVALPQGVASVRKALPLLLADERWSPLVRQFLVEQQAELLDWDTRIAVVTGHIQRESATQPVCQRLEQVRGIGPLSASALWLKAGGHPYVNGRHLAAGLGLVPKHTGTGGKIRLGGISKRGDRYLRWLLIHGARAVVAHLGEKQDRLSCWLRRLVARRGMNKAVVALANKNARVAFALIHGEQPYDVTKMCQE

SEQ ID NO: 68296 - protein, 393 aa, unidentified
MHKPKQQDKPLNDLSRSLTPFDPNQTLMVVIELSKESWLVAGIIPGVERQPLKKLTSDEDNLLKLLERWRTEAEKAGHKINRIAVAFETGRDGFWLARWLRARGIEAYVIHAASVAVSREHRRAKTDRLDTEGLKRAFLGWLRGEREHCKMVAIPTLAEEDAKRPHREREMLVGEQTTIINRIKATLARLGIRNFNPKLKKAPERLQHVRTPEGEPIPPNTLAELMRDLERKRLVHEQIVNIEKARLEQLKRAPKVGPNLMVLLLLRVIGIGIDTADMLVKEVLSRNLRGRRAVARYAGLTGSPDESGKRRREKGLARSGNARVRRGMVQLAWRFLKFQKDSALVKWFRARTENTPRLRKKMIVALARKLLIAFWHLVRDGIAPEGIVLRPTH

SEQ ID NO: 68297 - protein, 352 aa, unidentified
MSTQRKDWTGQILFAGIDVHKAKWVTTVRTNEVQLKTFVTVADKEVLLKSFHHLFPGAAIEAVYEAGCFGYHLADFLNTHGIKTMIVAPHTIPKVPGQFVKTDTIDSRKLAAELAKGTLVGIYLRPEESLYDRGLLRKRAQLVKRRVQLQNQISADLRFYGLDFQITARSYWSRWLLADLKALSFPNEYYREAFQMLVADFETIRGQIRQLDRLLVKIADSDKYRQRIQLLRTIPGVGCLAALTFLIEIGDITRFSSAEKFASYLGLTPSEYSSGEHIRKGSLTGMGHSSLRSLLVQIAWLSIKRDPVLLSKFQRLCAGKSRCRAIIPVAKSLANRLRRVLLFNEPYVIGVV

SEQ ID NO: 68298 - protein, 338 aa, unidentified
MNAVGIDVSKGKSMVAIMRPFGEIVSTPFEIKHTASDIHSLIELINSVEGESRIVMEHTGRYYEVLAHQLLEANLFVSAINPKLIKDFDNDSLRKVKSDKADSVKIARYALDKWQNLKQYNVMDELRNQLKTMNRQFGFYMKHKTAMKNNLIGILDQTYPGVNTYFDSPARSDGSQKWVDFASTYWHVDCVRKMSLNAFIDHYQNWCKRKKYNFSQSKAEEIYGKAKELVPVLPKDAITKLIIKQAVDQLNSASTTVESLRTLMNETASKLPEYPVVMAMKGVGTSLGPQLMAEIGNVSRFTHKSAITAFAGVDPGVNESGSYEQKSSSNFQTRFLCS

SEQ ID NO: 68299 - protein, 338 aa, unidentified
MAIVFVGVDLAKNVFAVHGVDEAGRPALVRPAVARAKLLETVAALPPCTIGMEACSGAHHWARLFQAHGHTVRLMAPKFVAPYRLSGKRGKNDAADAAAICEAVQRPSMRFVPPKSVEQQSRLMVHRARQGFVEARTATLNRIRGLLSEYGIVLPLKASTVRTQAAERLEDLPGWANTVIGDLLSEVHRLDQRIDEYDRHIATMAREDDRVARLMRLSGIGPTTATALVASIGNGHEFRNARQLSAWLGLVPGQYSSGGKTRLGRITKAGDAYLRSLLILGARAVLNSAAGKTDGISRWAQALAERRGYWRAVVAIAAKNARMAWAVLTRGENFVMPA

SEQ ID NO: 68300 - protein, 359 aa, unidentified
MNVANNKILSFKDQDFYIGIDVHKKQWTVSVISQNMLLAKTVSIDPLPETLLTYMTRRYPDGNYFAVYEAGFSGFWAARQLNQFGIKSMVVHPADIPTKQKERLNKSDPVDSRKLSRSLSAKELTAIYIPEKEAEEYRYLNRYRLQLAKDQTRLKNRIKSVLHQFGITIPLEYEERRWSGHFIQWLLLAPFDTEYAKFAFDDLVDHLIQIRNRIKNILQKMRQLAKEESFRKLIPLLFSVPGIGFITAMTLATEIIDMKRFSSLDKLASFVGLVPAVQSSDEKEKNLGISQRRNKFLRTMLIEAAWKAVKIDPALTMKFGELSKRMHRNKAIVRIAKILLNRIRYVWNNQKPYVYSVVS

SEQ ID NO: 68301 - protein, 337 aa, unidentified
MKRYLGVDLHRTQFVVCTRWENGEQEIRQWRIGELPKFVEQLRSEDQIAVEAMGTTARFYDAVAGRVARVVVVNPHQFKVISESVKKTDRKDAEALALYLEKGLLPEVRMKPKQNRELMHLAETRDLLVKQRSALKGKINNLLAMQGIELKREALSSKIALARVLALPVSGMVQLELRILVEQIRSLSESIVELDERLEEEGQQLPGYENLTSIKGIGSLSATVLLTVIGKISDFADENKLASYLGLVPKIANSNESERSGRITKQGNKLARTALVQCGLVAKRYSPYLNRFYDRIKQRRGGGKAKIALARKLVKIVYDTLKNQWVFEDFPSFTLAA

SEQ ID NO: 68302 - protein, 330 aa, unidentified
MKHNHVGIDVSAKTFTTIIDHEGERTEAFDLPNDPKGFKKLIRMITKKGFTAQVVLEATGNYSLDLALALHRAKRIEVMVANPRAIALFAGAFLRRSKTDALDANVIVEFSIRMPFEAWKPPEAHCFNLRAISRRIEALTKNATQEKNRLHAATTFDEMTDVVRNDIEVNIRHLERRIERLREQARELIREYPDLESAFLHLISVKGIAQAAGIQILAELSILPKDMDVRQWVAHAGIDPMQFQSGTSVNKPSRISRRGNVHLRRALFLPALVAAQHEPHVTAFYQKLLGRGKTKMQANVAVMRKLLHAIYGMLKHDQDFVGEKFYVLGA

SEQ ID NO: 68303 - protein, 482 aa, unidentified
MKKIKNIFRDGNQRFKVITDKHSLNEVLVVAIEIGKFNSKGIIADMYGDLIMDNFQFPNNQRGYRFLTGKIKSASQIAESKLVFIGMEGTGHYHENIALQLKSDGFSVEIIHPYDSKYERENKNAKTDGIDLLSIARMLITNKGRRSTLSVGIYSKLKVVARSRRKLVFMRTSLKNRITALVDRIFPGYWPKEVDEEIFSDNWGKASLLVLEHYPHPEKITMMGVKRLANFLKKQKTKLGEETARKLVEAAKNSLSRPFKDMDSHCLTLKCLISAYRTICENIETLEKEMAVLLIETPGTYLLSVSGISVIYAAEFMAEMGDIARFSYPKQIMSFAGNCPYVSQSAEYEAKGLPLTKKGASGLRPLLNQISLSLNSHCPQFGRYYQKKHFEKCDRPGIARIATGNKFIRLAFCLIKHQKLFVPQGFDPSLMSYKDYYREVFSQIRYKLCNYKIVPSDLSGCEENYFGKIKSRLEDAYGLNLG

SEQ ID NO: 68304 - protein, 421 aa, unidentified
MNQLAQMAFTAHIGIDWADAKHDICVQAPGSEDREFERIVHKPEAIEVWAQALYQRFGGPIAVALELTKGPIVWALQKYDFFVIVPIDPIRLAKYREVFTPSGAKDDPTDAELALEFLLCHPKKLKVLKPQSVPMRKLRYLVEARDRLKADQSRFVNRLIQALKQYYPQPLDWFSERNTVVFCDFLIQWPTLEQVKRARKAKLETFFKTHNVRFARVIEDRITAIKAATPLTHDTAVIHAHRLQVEVLVEQLRLTIHAMKRFDKEIVAIAEHLPDYELLFSPLPGAGKVIAPRLLAAFGEDRERYPCAEEVQKDTGIAPVTKRSGKSTWVHWRWQCSKFRRQTFIDWSAQTINKSAWAGAYYRQQRAKGASHQAAVRALAFKWIRILYRCWQDRTPYDESKYLEALRRSGSPLLKQLAEVA

SEQ ID NO: 68305 - protein, 307 aa, unidentified
MADKPAVGVDVAKDWLDLCVAGSAQRIDNTAAAVAAWLDRVRPGLVACEPTGGYERVLLGALKARAIPFVRVHPNQLVAFRKSQGLRAKTDRIDARLILAFVCHRLAQRGLRTAIPGNPALAARRRQLIDSLHAERCRLAMADIDLLRHSHQAVIAVLRESLEAIEAELAALIAADPQTAKLTRLLQTIYGIGPAVAAALIADLPELGLLSAKQIAALVGLAPHTNRSGKAQHREPTGHGRPGVRRALFNAARAAIRHPSPFRDFYHRLVKQNQRPGKVALTAVMRKILVCANAVARDQQPWKLANP

SEQ ID NO: 68306 - protein, 405 aa, unidentified
MDVHRMEHVATILLEQEDGTVSNETRKFGGFKRDMRALVDWLRSHRIQLVVMESTGIYWKSVFSHLEAAGIPALVVNAFHVKNVPGRKTDVSDSEWLAQLARFGLLRGSFIPPKDLRELRVVSRYRRKLVQTLTGEKNRLHKVLDDAGIKLGGVVSDIDGVCARKMVEGLIAGKTPAELSALGRGKLKSSDEVLQASMDGDLSPRHRLVLSTAWNHLRYLEQQVAQLDRYLIEAIKPYAWAWRLLQTIPGIDEISAAMILIEIGVDMQRFGSASRLASWTALCPGNHETAGKRKSGKIRHGNPIVRYLLCEAANATRRTKTVFQAKYTSLVIRRGHKKTIIAIAHKLIRTIYFVLTRRKPYHDTTVDYEAAIVARNAPRWIKALKKYGYWPKAAAANPATATAMA

SEQ ID NO: 68307 - protein, 418 aa, unidentified
MTKSVDSTFIQIIHPVCCGLDVHKDKISACLITLDGNGKEQSEIMEFSTFTKDLLKMKKWLSENDCPILAMESTGVYWHPIHNVISDSMEVILVNARHIKNVPGRKTDISDSKWLAGLLRHGLLKGSFIPPENIREWRELTRLRKTYTESFADYKRRIHKLFITANIKIDSVVSDLFGLTGRNLIDLLCNEADLTLANIEKCTKGSLKKKSLELHESLQGFFKEHHRFQLIGMMDTIITFEKRVTEINERLQHLTKGHQDLLDRLDEIPGIDKKSAQSIVSEIGVTLDEFMTMSALVSWAGLCPGNNESAGKRKNGRNSVRNHPFKTILVQVAWAAVKTKGSYYKAKYYKLKARRGAKKAIVAIAHRIAKAIYKIIKHGDTYRDLGEDYLAAPSRQKVLMNLNKKAKEMGFKLVPCEA

SEQ ID NO: 68308 - protein, 354 aa, unidentified
MSNKSTAIVATMGIDIGKNWFHVVGLDRRGAIVLRQKWSRSQVEARLANMPPCLIGMEACVGAHHLSRKLQLCGHDARLMPAKYVRPYSKGQKNDFRDAEAIAEAVQRPTMKFVAIKTADQLDLQALHRVRGRLVSQRTGIVNQIRAFLLERGVAVRQGLRFLRTELPIILATRSDVLSPRMMRMIEALAGDWRRLDERIEGLSNEIEAVAYHDPACERLMTVPGIGPIISSAMVAAIGNGAVFTKGRDFGAWLGLVPKQISTGDRTILGAISRHGNRYLRALFVQAAWVVLIRIKDWDRYGLKAWIDAAKKRLHHNVLAIALANKLARIAWAVLRKECAFECMKRRAMASRPA

SEQ ID NO: 68309 - protein, 358 aa, unidentified
MSRYATLEKKNNTVKCAVATFAGIDYAKRFSYITVGDENGNVIHQEAVPNEVGRLAHFFDQYPKMTIAIEACRGHEWLVDWLRERKYVVHVGNVYAIKQIAQSRCKTDKIDSKILMELLSKEFLPTTYQPTKKERDYRELLRWRASLVKSQTQYKLRVHSLLDKENKGIPDPFSAAGREALKSVQLVGQKQQILTESLEVLDFLEKQIADQEVKIRRLARYNPDVYRLKQIPGFGIITAMVFVAEVGDVTRFRNAEQLAAFTGLVPRVYASGGKMNTGRITKTGPRLLRRMLVQSAWASLRCCPVLRSRFASISRRRGKKIAIVAIARMLAEIAYHVYLEKTPFDEMRLGAGLVRAFV

SEQ ID NO: 68310 - protein, 389 aa, unidentified
MKNFEYFVGIDVSKNSFSVAVKNTSSFTTYRQFPMEKEGFDALDIILSQIRNNCIIGMESTGIYHANLFYFLKNKGYNTYVINPYKMKQFFKFASEKPTKTDKKDAKIIAHFMEYSKENNNTISDEVKYHLRYLVREKENITHQIAKTKTDIKRILVLTFPEIEKFNVFSPYILSILLKFPSASSIKKLPEKQFIKKVEKYAPKNGRKSTLTPSYIYQLASNSIASTYPVFENILMLKIQSFLSLQNQLKNIKKLIEETADTFFKREIQILTSIPGIGKTAAIHFISEIIDIKRFKNVSKLVGFCGLDPIIKQSGKYKGQWKISKRGNSHARRIVFIMASCVKRSCPQFREYYIKKRNEGKSYTEAVIATSTKLLRTIFALLSENRLFI

SEQ ID NO: 68311 - protein, 407 aa, unidentified
MDVVIERACGMDVHKDNITACIITNEGKEIKTFSTKTVFLLQLVDWIKLHGCTHVAMESTSVYWKPIVNLIEAEEMEFLVVNAQHMKAVPGRKTDVKDAEWIAKLLRHGLLKASYIPDRNQRELRELVRYRRSIIEERARQHNRIQKVLEGANIKLGSVVSDVMGVSAREMLDAIAEGEEDPEKLANFARRSMKKKKEELELALKGYIHSHQRLMLKTILGHIDFLTEQIKMLDQEVANRMSTHQEDIERLDSIPGIATRMAEQILSEIGTDVKKQFPTAAHMCSWAGLVPGQNESAGKRKSAKTKKGNKYLRSALTEAAHSVGASKNYLGALYRRTASRKGRKRAGIVVAHAMLRISYYLLTRKEMYVDLGEDYFDKQRQQSIVRHSLRRLESLGYIVTLQEPKAS

SEQ ID NO: 68312 - protein, 334 aa, unidentified
MEKITTVGIDLAKRVFALHGVDGAGRVGLRKTVRREQLVETVAALPPCLIGMEACSGAHEWARRFQELGHTVRLMAPVFVAPYRKSGKNDGNDAEAICEAVARPNMRFVPIKSTEQQAVLSLHRVRQGWIEERTATINRLRAVLTEFGVVLPNRAQHVHRGARAAAEALPELARRAVEDLRAHLGVLDERIAAYDRELEAQARASEAAQRLMCIRGIGPLTAVAMVATVGCARDFRSGRQFAAWLGLTPRQHSSGGKPRLGHISRRGDAYLRCLLVQGARSVLLTAMRHSDRLSRWALSVQARRGYHKALVAIAAKNARIAWALLSKNQTLQTA

SEQ ID NO: 68313 - protein, 403 aa, unidentified
MMAVIIGIDPHKASHTAVAISTAEEPLGELRVRTSAVQAGRLLDWATAWPERTWAVEGAGGMGHLLAQQLLAAGERVLDVQPRLGARVRLLAAGDTNKNDPNDARSVAIAALRSPGVREVTADDHAAVLKAWSKRHRDLGRTRTQIVCRLHAVLCELIPGGVSKEIITAHAARLLASITPAGAVQAARCELAADFAGDLRHIDAQMRQTRKKLTAAVRASGTSLTGLFGVGPIIAATIIGGTGDVSRFPDRDHFAAYNGTAPIEVSSGDRKVHRLSRRGNRRLNHAIHMAAVTQIRQRHSAGRAYFDKKLTEGKTRKEALRALKRRISNTVHARLQADARRAARAKDPGGQPGNDSAASAAGSHPEHRLFGQATPGPDPTLRPRPAPRPHAKTTTARQPNRTP

SEQ ID NO: 68314 - protein, 349 aa, unidentified
MSMMATSTRPVTGGVDTHKDTHVAAVVDHLGGVLGTASFPNRSLAHGALLAWMRGHGAVVCVGVEGTGSYGAGLARHLRNEGVVVLEVNRPDRRTRRIHGKSDDIDAVAAAQAALAGRHAGVPKAGDGIVESIRMLRMLRRSAVRARTPCANQIHTLIDTAPAELHDTWAKLTLNRLLEIADHLPTPGDMAQPATSAPWARTALAGRWHWLDDQITELDYHLDRLVPVAAPSLVTLFGVGTDTAGALLVAAGDNPDRLRSEASFAALCGVSPLPASSGRTRRHRLNRGGNREANQALWRIALVRMAHDPTTRAYVERRTKEGLSKPEIIRCLKRYIARQVFPRLGRDLT

SEQ ID NO: 68315 - protein, 330 aa, unidentified
MKKYVDVIGIDVSKLTIDAHIYNRGVHRVFSNTSKGYKALLSWVEKHLGKDLCFFCFENTGHYSTNLSVYLSENNIDYVEESPLTIKRSSGIVRGKTDQLDSAMIARYAWLYKEELTLSSPKAQDIQELGRLLSFREQLVRDRTGKMSSLKEMQTLLSSPSTDDCCIIVKKMIHYLTKQITTLEQSIKKLIRSDEFLEKNYQLLNTLKGVGLILSCQLLYHTNNFKRFDSWRQFSSYCGVAPFEHSSGTSIYRKNRIHKIGDRKMKTLLTLASVSAIQCDKELKQYYEKKVAEGKPKLVALNNVRNKILSRAFAVVKRGTPYVELQKFAA

SEQ ID NO: 68316 - protein, 336 aa, unidentified
MTITTIGLDLAKYVFQVHGVDAEGNVIEKRRLRRSQVIPYFASIPPCLVGMEACATAHFWGRELRKLGHEVRLMPPQYVKAYLKRGKNDAADAAAICEAVGRPSMRFVPIKTEEQQAVLVMHRARDLLVRQRTQLINALRGHAAEFGIIGAQGRWNVARLLVAIGESRAVPELARAIVEMLAFQLDAISKRIDEVDARINAWHNASPVSQRLATIPGIGPLIGTAIAATVADPAAFRSAREFAAWVGLTPRQKSTGGKQRLGRISRQGDQYIRRLLIIGAQTTLLRSKAARANPWIQSLLARCPRLKVAVALANKTARIAWALMTKGESYRQIASA

SEQ ID NO: 68317 - protein, 402 aa, unidentified
MNAVGIDVSKGKSMVAIMRPFGEIVSAPFEIKHTASDINSLVELINSVEGESRIVMEHTGRYYEALAHQLSEANLFVSAINPKLIKDFDNDSLRKVKSDKADAIKIARYALDKWQNLKQYNVMDELRNQLKTMNRQFGFYIKHKTAMKNNLIGILDQTYPGVNTYFDSPARSDGSQKWVDFASTYWHVDCVRKMSQNAFIDHYQNWCKRKKYNFSQSKAEEIYGKAKELVPVLPKDDITKLIIKQAVNQLNSASTTVESLRTLMNETASKLPEYPIVMAMKGVGASLGPQLMAEIGDVSRFTHKGAITAFAGVDPGVNESGSYEQKSVPTSKRGSSDLRKTLFQVMDVLIKTHPQDDPVYQFLDKKRAQGKPYYVYMTAGANKFLRIYYGRVKEYLASLPES

SEQ ID NO: 68318 - protein, 323 aa, unidentified
MQGKVSPERSAATGVYVGIDVCKGWLDVYLHPIGQGFRVANDRIGLKRLKRELALHEVWLVAVEATGKFHRLVQRHLHAAGLAVAVTNPLRSRLFCEAIGQLAKTDAIDARLLAIMAESLNPRATPPPPEIVEELQEIVRARAAAVEDRTALLNQKAAARVGLLKSELARRIAAIERCLVRLEKAIQAIIARDTMLARRFKILLSIPGIGPIAAVGMLAGLAEMGARSGKEIAMLSGLAPVACDSGETNGQRRIRGGRSHVRTAISFAALSASRYNPDLARVYRRLIAAGKKPKVALIAVMRKLVVLANTLVRQDRLWQPNPA

SEQ ID NO: 68319 - protein, 355 aa, unidentified
MSQEKYIGMDVHQATISVAVLDSRGKLIMESILETKADTILEFLQGLNGSLSVTFEEGTSAAWLHDLLKPHVSRLVVCDPRKNALLKDGSKSDRIDARKLAELLRGNQLTSVYHGEHGMRTIKELGRSYLTITKDLTRVMSRIKALYRSWAIPCSGTSVYAPRHRGEWLGKIPERGVRLRAERFYQQLDLLQPVRQQARRDLLTESRKHHAVKLLRQIPSIGPIRAALLVAQLQTPHRFRTKRQLWAYSGFALETHDSGEYRYVRGKLQRNRERMTVRGLSNNHNPDVKNLFKGAAISASTHPGPLYDFYIALLAKGMRPTMARLTLARKIASITLTIWKKGVDFDATQLRRQEA

SEQ ID NO: 68320 - protein, 311 aa, unidentified
MTEATIGIDISKDHLDAFRLEDRAAQRFENSVSGFRALLKWLGQTPVARIVYEPTGPYHRAFEVALSGKVPLVKVNPLQARRFAEATGTRAKTDAVDARMLARMGATLKQEPDAPISRHLLVLKDLQTARAALVKERTRLRNQGHVQTTPILKRQIKARLTLVERQLTEIDAEIASQIASDEALERKRHILRSIPGLGPVAAPLILTLLPEIGTLTREQAASLAGLAPHARESGQWKGRSFIGGGRKPLRDALYMPALVAMRFNPDLKRKYESLRAAGKPAKVALVALMRKLLETANALVKADRLWTPKPA

SEQ ID NO: 68321 - protein, 367 aa, unidentified
MSDKEGINNEAQSFVGFDVSKASVDALSLPDGEYQRFENTDCGLQQCLAWVQGKRHCLCVVEASGGYETALAGVLAAAGVPIAVVNPKHVRDFARGMGILAKSDRIDARVLALFAQKRRPPIRALPGEAQRRFIDLVDRRRQLVSMRAQEQTRLTQAKGRPRKSIQAHIKWLNAAIDDVDRNLNDTLRGCELWLVDSQLLDSVPGVGKVTICTLLARLPELGHLDRAAIAALVGVAPFVRESGQWRGRRFIWGGRAEVRSVLYMAVISAIRCNPVIKAFYQKLLAAGKAPKVALTACMRKLLTILNCMMRTRTPWNPPLAQTLDTVAPPLRKGGNKLPGWRQHCSSAAKSNALTHHGYPLPCEAGEG

SEQ ID NO: 68322 - protein, 370 aa, unidentified
MTQSSTLYVGMDVHKDSIAVAYVVQDHGAEVISLGNIGTRQCDIDKLIRRLQSKSPRLVFVYEAGPCGYWLYRYLTKKGHVCWVVAPSLIPKKPGDRVKTNRRDAIKLARLMRSGDLTPVYVPKVEDEAIRDLCRAREDAIHDLKAAKFRLKAFLLRHDIRYTGRATWGPAHLRWLSEVVCPTPAQQIVFQEYVRAVTEHTERLARLEQELTDQVQTWRLRPVVDALQALRGVQFTVAVTTVAELGDLTRFENPRQLMSYLGLTPSEYSTGERRRQGGITKAGNTHARRALIEGAWAYRYPAKVSRHLQLRLEKVPKPIQDLSWKAQVRLCKRYRQLLARGKNANQVVVAIARELSAFMWAIAQEVSPTP

SEQ ID NO: 68323 - protein, 410 aa, unidentified
MNCAAQPFRWCQQEELKMNPKTSKSRHGRKMPLVHPNAAAIDVGATMHMAAVRADRAPEPVRSFGTFTADLHRLIDWFTQCGVETVVMESTSVYWIPVFELLDARGFTVCLVNARDAKHVPGRKTDVSDAQWLQRLHSFGLLRASFRPKGQIVALRSYVRQRERLLEYAASHIQHMQKALTEMNLQLHHVVADITGATGLRIIRAILAGERDPQALAALRHYSCHSSAETIARALTGSYRAEHLFALEQALALYDVYREKVSACDVRIEAVLKELSIHRGRDHGAVPPPRRRHRTDQVNALAFDVRAALFALLGKDITAIDGLGAYLSLKLIAECGDDLSSWPSAKHFTSWLGLAPSNKVSGGKMLSSRTRRSGGRAAALLRLASPSDAPTPHLAPFIGGSRPASARPRR

SEQ ID NO: 68324 - protein, 372 aa, unidentified
MSRPSNILLRAINYDHTLVLAIELSNKSWVLAAQAPGFPQTKAQRTIEPNKNALLAAIDGYRARAAAVGYAVDRVITTYEAGWSGFWLARWLVAQGVEVHVVQPSSVPVDRRLRRAKSDGIDAELLLRTLLAWLRGEPRVCSMAPIPDEADEDARRSVRERTELLSDRVGLTNRIGAVLATLGVNDYNPLLQSRRRRLAELRTGLGEPIPPNALAKIERLLARLELVLAQIAELERERDEVAAADAPDRAGKMIQQLTSLRGIGVQSATVLVREAFVRHFSNSKALGSYAGLTSTPYSSGGIDREQGIGKAGNPPAPNGDGRVGMAMATLPTGHRAGGLVPRSRRLNRPPYSQGYGGGSRAQATDRFMAICH

SEQ ID NO: 68325 - protein, 340 aa, unidentified
MVHVGIDLDKRSSQIAVLTEDGEIVQQRLPNEAARLEKFFGQLPPQTPVAIEASGTWWWLVDLLEQLGHRPILSNPKQTKAIAAARLKNDRVDAERLALLLRGDLLPTVWIPPAALREARELVRHRIQLVWLRGVVRNRLQALLARRNLQPTSGKSWLTQRGQRELQRLALPETASRIREDCATLLPTLDAQIRRLDGELVARWGRDPRVQRLTTIPGIGPFIAIVLVLELGDSQRFSHAKQVASYVGLTPRVRASAGRVRAGHISKEGNRLLRWVLVLAATQASRRPGPLRTWFHAVKKRRGKKVARVALARRLAEIVFHVWKQECDYFTVVRHGVVRG

SEQ ID NO: 68326 - protein, 343 aa, unidentified
MGEIYVGLDVSKEKIVGMWKDRDGKNVSLETFPVNEKGMEKLAERTADSTRIAVEASTTGVYVYDYLASRERPVVMSPPSRIRLIAESDKKTDRNDAEILVDLLRNDMLPTCYVPDKGTRELRDLVRHRRTLVEISSKLKTKIRMILTREGLTCPQTDVLGDEAIRQLNNSPLQPIQKIAMNKFVVLGLYILDEEKDFNLKIYERFLSDKHAQLLETMPGVGPLSAVTLMSEIGDIGRFPSHSELASYAGLVPRVYQSGNTRHDGSIKPGSKIMRHILVQDAWQAIRRSRKLRKFYQKLKRKKGSKVAIVAVARKMLKIMWFMLTREEEYLAEKPFRARSARS

SEQ ID NO: 68327 - protein, 408 aa, unidentified
MQVLFPRCAGLDVHKDTIVACVRCVSAPAHQEVRSFDSTTAGLLALADWLALHGCTHVAMEATGVYWKPVWHILEGNFELVLANAQHIRNVPGRKTDVNDAMWIADLLAHGLIRSSFVPPAAIQELRDFTRTRKQLVREISQHSLRIQKVLEDANLKLGSVLSDVLGHSGRAMLKAIVNGEDDPERLAALAQGNARKKSAELREALRGRITEHHRTMLKLHLDIIGALEHTLAELDAVVGKALAPIQQRARLLTTIPGVSDLTARVLLAEIGVDMTRFPDAGHLVSWAGLCPRNDESAGKRRSTRVRKSGTWLKTALVTAAWAAVRVKTSYLRAQFLRIKARRGAKKAILAVAASMLTAAYHMLRDGVEYADLGPDYFDRHHADKTIRRLLKRLADLGCHVDPIAHPV

SEQ ID NO: 68328 - protein, 477 aa, unidentified
MTPHKDAFPDPCPPPPTPPQPAVLTLPLPLYHPHAAGIDIGEAEHGVAVPPDRAPQPVRRFGTFTADLDALADWLLDCGITTVAMESTGVYWIPLFELLEARGVQVFLIDPRQAKRAPGRPKTDRLDCQWLQRLHAYGLLAAAFRPDDQVCVLRAYLRPRQMLLTYGAHHIQHMHKALQQMNLKLSQVVSDLTGATGMAILKAIIAGERDPLTLAKLRNPHCQHSEDEIAKALQGTWRAEHLFALQQAVELYQFYHQQLTVCDQQLQAHLGTFADKSAGQPLPPKPRRHKKANEPRFDARTPLYRLAGVDLTTIEGIEEGTALVILAEIGTDMSRWPSVKHFCSWLGLSPQHKISGGKVLSRRVRPGAHRVAVALRLAARTVQQARTALGAFYRRLRSRLGAPKAVTATAHKLARLVYSLLKHGSASVKQGLDDYESQYRERTVKAMARQAKALGYTLVELTVPATPRNDAVAPATP

SEQ ID NO: 68329 - protein, 430 aa, unidentified
MKSNTQNAKIESITDKTMVIGIDIGSETHYARAFTNRGIELSDKPFSFSNTESGFQEFKAWMEDLMKKNGMEAVAPGMEPTGHYWFNLGAFLQDSGIQPLHVNPYHVKQSKELDDNNPTKNDRKDPKVIAGLVNAGRYSKPYIPRDVYAEVRCLSNQRLQAQENLTRAKNRLARWFSIYFPEYKDVYSTPDAVSGIMILKKAPFPADIIAFGVDGINQIWREAKLRGSGLKRAKTLISAAEHSIGSREAQEAARIEVAYLLDDIERYTKRVKDLIELLDQKLAEIPHVDKLLAVPGIGKRTVCGFIAEVGDIGRFDSPKQLQKLAGLSIVESSSGKHKGETHISYRGRKRLRYVLYEAALSVVARVPEFRAVHDYYTHRRQNPLKKMQSLIAISCKLIRLFYAILIKGIDYDGTKMLSDIRRPGGQIEAA

SEQ ID NO: 68330 - protein, 407 aa, unidentified
MATPDTVDVWIGLDVGKEFHHAVVLDDAGNALFDRRVANTETDLVKVFDAAATHGTTALAIDQPGSIAQLALALARQRDIPVAYIPGLVMRRAADLYPGEAKTDRRDAMIIGDTARTRRKQVHWLTIDDELLLQLRVLNGLDTDLAADSTRHANRLRDALTSISPALERAVGAKLSHAGVRDLLAKYPTPTALRSAGKARIRNTIAKRSPRLKVSVTERVWAALSQQTVTVPAEETVGRVIAELVVELDRIRDRRDRLEKEIEVVFLAHPLGPVLITMPGIGPRTGARTLAEIADGSGFANGSKLAAYAGLAPVTRQSGTSIKGERRSRRGNHRLKNALFLAAFASLSDPDSRAFYDRKRAEGKKHNAAIICLARRRCDVILAMLRTGEPYLTSTQLAERAETNNAA

SEQ ID NO: 68331 - protein, 389 aa, unidentified
MKINKISRAFRNVHESQEWPVTASLDIHDDSTYLFSVHKETGEVLKDLNIRGSYKKALKHMVNLGRKESVLVLLEAGPHGFAPYRYFQRQGYSVKMIAPSSIPHSGDKRKTDREDAIDNLDYHLSGKLRYVTVPDEEDESARECLRARHQSVCLVTKEKQKIIALMKRLGQIFEETKSTWTKAHYQWLRKVVLSPCARLVLDMRLLRLESLERDVAELTDTVLAYIAQRPGYAKLSQMYQYFSGIGTVRAAVLILEGRDLNRFTHPLPFMKFTGLIPGKHQSGGKDPALRITKAGNKYLRTAIIGAAAFFRDYRLLRSTAEMKAHPEVLREFITRCQNRLHLRYRNLIHKGKHSNKVKTAVAREFCGFLWEFATRIVPALNLDENKQVA

SEQ ID NO: 68332 - protein, 410 aa, unidentified
MIRLGDGRRGWLYRGKLYAHLRGEPFPRRDGSGSGWLLRDTQHYVAVFELSKESWLVAGIIPGVERQPLKKLLADEDQLLKLLERWRTEAEKAGHKINRISVAFETGRDGFWLARWLRARGIEAYVIHAASVAVSREHRRAKTDRLDTAGLKRAFLGWLRGEREHCKMAAIPTLTEEDAKRPHREREMLVGEQTTIINRLKATLARLGIRNFNPKLKKAPERLEHVRTPEGEPIPPNTLAELMRDLERKRLVHEQILNIEKARLEQLKRAPKVGPNLMVLLLVRVIGIGIDTADMLVKEVLSRNLRDRRAVARYGGLTGSPDESGKKRREKGLARSGNARVRRGMIQLAWRFLKFQKDSALAKWFRVRTENAHRLRKKMIVALARKLLIALWHLVRDGVVPEGVVLRSAH

SEQ ID NO: 68333 - protein, 367 aa, unidentified
MENHSIVWVGMDTDAKRNHVALYRGWEKEPAAEWEAGMDGKGIKKLIERLKKEQGEVRCVYEAGPSGYPLCRKLRQAGIGCDVIAPSLIPRKAGDRVKTNRRDARNLGRLYRAGELTAIEVPNEAQEAVRDLTRAREDVREDLTRRQHRLSRFLLRHGYIYQDGNKWTGKHWVWIGKIRFEDCNLQTVLEESIRAVQQSQEQLKSYDARIEETAQKPEYEKKVGRFKTLRGIQTVTAMTIVAEGGDLRRYATAPQFMGSTGLVPSERSTGDQERRGKITKTGNAHLRRVLVEAAWHFRHRSIAGAGVKKRRNGQPAAVVTIAERADQRLCRKFRKLVDRYNKKPVIAAVAVARELAGFVWAIGQQEL

SEQ ID NO: 68334 - protein, 460 aa, unidentified
MPFLDQLRQDLPARYYLGIDIGYKEHVAVVIPLAAFLHGGTQWQRARCLHFASTQQGLAQLDAYLAGFSADRAAFLGLCEPTGGYYGATLFEHLIEQGYPMQWIDNGAVHKMRDQLFPQLVKTDEMDPRVMARIGYLHEAVGEEFNLRPLVLPSADDADLLALCRDHWKLSTLICRARNQFTQLMAVVFPELKTFFTSSVSTLAPVQLMARYASPADLSAATVDDIAALLHQVRAHKHAGRAAELQALARTSAGVLPDAGRVWRIAWLTTFLRDNFAHDEQLEKRIEQMVRRRADYGLVEPVPYAGPGTLGLILAATGDVNRFSNYRRYVAYTGYFAGLEVSQTIDRTKMSKRGNRDLKRALFQIVAPLVWLDKEANPYKTLYQRKLAEGRPWYSAMPFACAALARHLYHCLKTKDPYDVAQAFRRPLSARACSDALAELHGNLDDKIEEMEASLSQMIP

SEQ ID NO: 68335 - protein, 341 aa, unidentified
MESYVGIDAHCNTGLELAAIEARNGELLWRDRCRLDAQLLREAVSRAPRPCAVVFEQGELATWLYLTLSGSCDSLVVADPRHNRLISTSPDKDDPFDALALAQLARGRYVREVYQPPVPFLNLRLQVRHHYRLNQHITVLKNQTKALFRQHGIPVSGTAVYSPDNRAAFLKSLPAAARPPGEDLFAMLDVAEERKQAALRLLLQYGRRFPPVRRLVTLPEIGIVTAATFAAFLVTPSRFPSRSHIWSYCGFGLTRRKSGSHTEPVRLRRGFNRHLKRVVKSAVERMVQRQASPFAAAYQLRLERGTLPTRAKLAIARKLIDVLCALWNSKEDYDPERVRVV

SEQ ID NO: 68336 - protein, 373 aa, unidentified
MEEFIKYIGMDVHGKTIAVAVADSRSSEVRFIGQIVNTPEAITKLVDQLKASDARLSFCYEAGPCGYGIHRQLLLLKHDCQVVAPSLIPKKAGDRVKTDRRDALMLARLHRAGELTAVWVPDGEHEALRDLTRARGDIKDLERRARQRLLAFLLRHGRRHEGKSHWTQAHFRWLETVKFEHPVQQIVMQEYIDTVVSCGKRVLALDKQIEQAAAKSVVWPVIEALMALRGVQLLTATITVAEIGDLKRFAKAAQLMAYLGLVPSEHSSGERQRRGGITKTGNSHVRRVLVEAAWTYRFPARKTRTLQKRAERCDEKVQAIAWDAQKRLCHRYRHLTEGGKLKVQATTAVARELAGFIWAIGQAVPTPVAKTGH

SEQ ID NO: 68337 - protein, 356 aa, unidentified
MTIVAHAHPFVIGVDAHARNHAVAVLACPTGEVVDEAQFPATVAGLQRAVSWVARCTGGDLDVLWVIEGVGTYGARLARVANDTGYAVAEAGRMNARANRGVGKSDPLDARRIAQSVLAVDETMLRRPRADDGVRAAVRVLVASRDHLSAERTSAVNALTALIRVADLRIDARRPLTAAQITAMAGWRGRDEDLATAVARQEAVRLAKRVIAADREIAANTKQLTDLLNASPARVLLDKPGIGPVTAAVTLAAWSHPGRVRSEAAFASLAGVNPIPASSGNTVRHRINRGGDRRLNRALHMATVTRIRMDPRTRAYVEKRTAEGRTPREIRRCLKRYLARQIYRQLNAAETALNPT

SEQ ID NO: 68338 - protein, 339 aa, unidentified
MKLYVAIDLHSNNNVIVVLDETDKVLFEKRLPNDLSVVLEHLNPYKDKVQAIAVESTYNWYWLADGLMEAGYNVKLVNTLAVKNYDGLKYTGDEHDARHLAHLLRLGLLPTGYIYPKQERAVRDLLRKRAQLVRNRTMHILSVQNLIIRNSAKRISADAIRKLNDEALNGFCAGDAVLIMAIKSSLAVLFCLDDQIKSLERAVLTKARLKPEFKVLLSICGVGEILGMTIMYETGPIERFAEVGQFASYARCVESNRWSNGKKKGEGNRKNGNKYLAWAFVEAAHYAMRYNERIRSYYQRKKARTNGAVAVKAVAHKLARACYHMIKDRKNFEEALAFA

SEQ ID NO: 68339 - protein, 342 aa, unidentified
MKIIGCDFHPSFQQIAMVDAETGEHTEKKLTPAEAVQFYSQLPGPVLVGMEACGNTLWFERLLAPLGHELWLGDAGKIRALEVRKQKTDRRDAELLLQLLLEKRFPRIWVPSPEQRDLRQLLLHRHKLVGMRRQVKNQLQHLALNQGVQQKHKLWTAAGRKLLEELALTGWTAQRREELLLLLDDLEPRIGKLDQAVKAAAEKDRVAQRLQTHPGVGPITALAYSLTLGEIGRFRHSRQVVSYLGLNPAEHSSGGRQRLGSISKQGNPMLRSLLVEAGQSAARLVPELKRAYQRLKHRKHSSVAKVMVARKLAVRLYWMWRNEQPNSATRMQGSPSHPVAEV

SEQ ID NO: 68340 - protein, 376 aa, unidentified
MSIKKEVSLRVTSQTRSAELPAIAGSEIRAVVGIDLGDKRSSYCSLDTRGGDLGEGVVATTADGLGLVFAGKGKMRIAIECGTHSPWVSRLLQELGHEVIVANPRRLRLIAESNRKNDKADARTLATIAQAAPSLLKQVHHRSERVQLDLATIKARDTAVQARSRMVAAIRGIVKSTGGRLTVCSTGAFAKKALESCPATLRDALTPLMRIIEQLTAEIRQYDRLIEHKMKSEYPETAPILTIPGVGPLTALTFVLLLDNDPSRFSKSRDLGCYFGLQPKQQDSGKFVSQLGITKAGDQLMRKLAVQCSHFMLGRFGRDSALRRWGLALCLRGGSNAKKRAVVAVARKLLILMHRLWKTQTAFVPFPGAQTVPQAA

SEQ ID NO: 68341 - protein, 353 aa, unidentified
MRAVFGIDVSKASSEVVILVNGEKGHGYPITKDVIGFNQLLGDLKTVHHPKTTGVYSRRPQAFLDDHGYAYTRLNPLEAKKQLDSLRVRKTDKIDAEKLAQPQFVLNRKTTYVQEEVYQNLRDLSRFYQNLTEDIVCTKNRLHKVLQVTFPELENILSASTGEQYWSLVMAFLFKELVLRLTQSELMAIIFRFTSKRISDKRATYLADKLRELAKQSYCAVKKTSPILEEVRYYAQELLRLSERRQAVLNEMVFLAQPLPEYNILLSIPGIAETTATSLIGELGDIRRFQSANQINAFIGIDLRHYESGNFLAKERISKRGNPYARKILFKCIHNIASASHTKPYHIADFYEK

SEQ ID NO: 68342 - protein, 418 aa, unidentified
MNRTLTKKLAQVKPGTLYIGVDLGRKHNVAVVLNERAERLARFRFPNEKDGYDYLHRRGAALQERQQAPAVLVGMEPTNYFWKLLAADLEQRKVEYRLVNAYTVKKHREGDQLDRSKDDARDAFTIADLLRTGKFTETQLLHGGYAELRQYVALRDRLSKDIRRQKNLIHNTAGQLFPELSSVFKSLAGQTALAMLRRHGAAAVIRHMPLESFIAGVRADLRGRRLMVSRLRRAHELAATSIGLQDGIPALQLAQRSYIETLEKLQSQMKTVQSALLETFLALPESRYMLSLSGLGAITAAIILAEVGDPSRYRNASQWIKLAGIQPVPNLSGRKTRSRTPMSHKGRVRLRTALYFAVLRLVRTDEAFAREYQRFQQRERNPLTKMQALGALMNRLLRILWALVRHQQLYDPRYQLTA

SEQ ID NO: 68343 - protein, 406 aa, unidentified
MADIFALDVSMGKSYCVWYRGKHCLKEFSLVHTRAGFNALRDMIKKAQKPIIYFEATGIYSRVIEHFCETNGLRFCRLNPLELHLKSESLRRVKTDQKDAHRIALTVQENTFRLTVPWKKDYLQLHELSRFYNQLNADWNYRLNHLHTALEQVFPELKQLFVNRTSKLALNIVELFPHPALVRPYSRVKLKNILMASTDKRISKMKAYKYADRLIDLAQKSYPAVSGDAIQVDEVRYYARQLIALTRKKEEVIKRMESIAQRLPEYILYCSFPGIGKQTAAQLMGELGDISRFDNANQLNAFVGIDIRRYQSGTYLGQDHINKRGNPIARKLLYFTVGNMIRQQHANSNHIVDYYYRLKEKRPHPKLNKVAMVACMNKTLKCLLPMIKHHEKYHYRYTDSMVPVKA

SEQ ID NO: 68344 - protein, 400 aa, unidentified
MVYETGKENEELYAVSFYDLRGRIGEWAESPKRDMLRRKGGYGMRIDVGVDLHKTQMTVYVRTGKDEGEGGEYATGEEGYREFLKALGKWRSKGADIRVAVESTGNTRYFMHQLEARGYPVVVINTMKFKVITQSVKKTDRHDAYTIAEFLSKDMLPESKLCSEKSEEVRRLLKVRSMLVRTRVSIKNQIHGLLVSRGMEDTRACLQSKRGRQEIQDTLAEAGNGLVVQPLFDTIEALGEEIKAIEAEIEKLMAADKAVKLLQTIPGVGAILSYVIAYETGDIHRFPSASCFASYAGTTPSVHASGGKVRYGHTASDVNHYLHWAFIEAANVISMRHEVLRFRHTARLYERLRQAKGHGIAVGAVARHLAEATYWILTTKTAYREPNQNKQVVVVSSKEG

SEQ ID NO: 68345 - protein, 349 aa, unidentified
MKKDNVTIGMDLGDQNHIVVVLDETGEEIALENIRNTESSLKKFFSRYQNPTVALEAGTHSPWISRLLQELGCTVYVGNPRKLRIIWDSYEKSDKRDARILAMVCRVEPRLLWPIKHRDRQAYADLGVIKARDALVKNRVRLISHIRSVIKTCGCRIPKCSTNSFSQKAPAYIPNELKESIEPLIGTVDQLTERIKELNHQIKKLCGKYPETEKLLQVTGIGPVTALAYVLTIDDPYRFRKSRQLGAYLGLTPRLDQSGKCDKQLRISKAGNSYLRALLVSCGHYIIGPFGPESDLKKYGVSIVARGGKNAKKRAAVAVARKVAVLLHQLWINGKPYDPFYKNAENCIA

SEQ ID NO: 68346 - protein, 467 aa, unidentified
MSAGGLEMNRKRSKSRVDRTMPMMHPNAAAIDVGATLHMAAVRADRATEPVRSFGTFTTDLHRLVDWFTECGVETVVMESTSVYWIPIFELLDARGFTVFLVNARDAKHVPGRKTDVSDAQWLQRLHSYGLLRASFRPKGQIAELRAYVRQRERLLEYAASHIQHMQKALTEMNLQLHHVVADITGSTGLRIIRAILAGERDPEVLACLRHYSCHSSAETIAKALTGSYRTEHLFALEQALALYDAYHEKASACDVRIEAVLKELCIHRGRGIGSVAPAPRRRHRTDQANALAFDVRAALFALLGKDITTIDGLGPYLSLKLVAECGDDLSSWPSAKHFTSWLGLAPSNKVSGGKMLSSRTRRSGGRAAALLRLAAVTVGRTDTALGAFYRRLSSRIGKAKAVTATARKVAVLFYNAVRHGMEYVDPGASSYETRYRTRVVNNLHRRAKAFGFVLQPLEPKAGAVVS

SEQ ID NO: 68347 - protein, 416 aa, unidentified
MNAAGIDVSSRKSTVAVLRPFGEVVKVPFDVSHSVEALSEFAQQFKALDGETRVVMEHTDRYYEPVANVLHEAGLYVSAVNPLLIREYGGNSLRRVKIDKADAMKIARYALDNWADLRDYTPMDTIRYDLKTLNRQFQLASKQKTATSNNLIALQEQSFPSIRKCFDSPVRKDGTQKWVDFTYSFWHVDCVRKHSLNAFSERYKKWCKRHGYIFKQSNAEEVYNLAKSAVVLVPASETTKLLVQEAANQLTSIARSVETYRAEMNCLATQLPEYPAVMEMYGVGESLGPQLMAEIGDVRCFEQKKSLVAFAGVDPMPNQSGEKNVCSTRSSKRGSPYLRKTLFNLMGIHLKKSPVDEPVYQFLDRKRAEEKPFYVYMIAGANKFLRRYYGKVRDYLATIEDLPPVDMDSTGLAQSD

SEQ ID NO: 68348 - protein, 389 aa, unidentified
MIYVGIDVTKDKHDCCILGSEADKLFPVFTIPNNKAGFDELYEKMFSVTDDKTKIKVGLEATGHYSLNLLGSLIDKGLPTCVINPLHTNLYRKGLSLRKTKTDKVDARSIAMMLMTNKTLKPYSDISYHNEELKSLTRYRFDKVQERAKLKSSVARLVNILFPELEKLVPSLHMASVYSLLSKLPGASYITECHLTHLKNLLETASKGHYGRDMAITLRNTARDSIGSVIPAKSMELKHTIHLIKVMTEEIDEIEDSIKSIMDTCNSPIMTIPGISYRMGAMILAEMGDFTRFNYADQILAFAGLSPSTYQSGQLDSSYSHMEKRGSRYLRYALFNAAKFVCKWDENFGAYLSKKIGEGKHYNVAIGHATKKLVRTIYRMELTGEAYRR

SEQ ID NO: 68349 - protein, 427 aa, unidentified
MSITEANRYEAYCQFRTSVRGNRHYLLVGIDVAKERHHAFFGTATGKTLLKRLIFDNNREGFEQLIERAEQLMVAHSCRYVAFGLEPTGNYHKPLANWLLVKMQLLVLVSNKAVADNRESLDGRWDKHDTKDSANVADLMAQGKCQFFEKPSAELSALRSLLSFRKRLKRDEHSLRMQIRNGLLVRHFPEMDHLWGKCLKENLAIVRSFLDPRTISAMPFNDFLRRVTDRDRGLRQVKRLQRIYDAAAVSIGCPADAAARFEARQLVDRLDDLHERIERTEKRIARICQRFSSYRRLLTIPGFGPYVASQVIARIGDPHRFAGRKQLIRLAGYDLNAKRSGKRSDTAVPVISKRGNSELRYALYQAALIATYHNTGFRALFTRYLQGRQRERGIKTKMRVKLAVKMLVIAWCMMRNDTDYDPALLRV

SEQ ID NO: 68350 - protein, 459 aa, unidentified
MNNHEELIGIFKSVGHEKTIFIGFDIGKYYHVCQICNGYKEPLMSAFKFNSTESGYKEFKLAFDDILKINMPDYMIFGCEPSGTYYLNLMNQLSIDYPNADFRLVNPLATSAQRKMEMEHNKSDPIDVNAILELMLQGLSYPLPIQDQVYDEIKEYVRYYDKLSSQLVGLRNRILLCIDELYPGFRIPNSTYFNSQAGKQFLRVLPDPRLLKDMNLVDVLKYFEEAGEHLSAQMAMRFSIAAKDILIPDKPVIKAKINTLKGVIKQYELTEELKIQTKLEIEQIASQFTFSKEILKLVGLGPLTLGRIIAYLNNPYRFSNGDQVAKYAGLVPRHSSSGIYSGKESLTHMGHPQLRSVTVQLTQHLISSTGYFTAFYNHLVIDKGKDINLAIVATAHKVLRVIYHMMIFNEKFNPPSARNSELSSNKIERVTKQKLKQRNRKGTVIPLTQINSEKYHTRV

SEQ ID NO: 68351 - protein, 484 aa, unidentified
MAFVSFLLNARVRIVDYCSAVPLQNAYCFTSKFKVMQKKKQQATKELSIQIINQNAAGIDVGDMLLSVAVPPGRDEVCIKEFGAFTEDLHAIAQWLRQCSIETIAMECTGVYWKNIYTVLIQYGFEVCLVNARHTRNVSGRKTDEKDAQWIQRLHACGLLNSCFLPDDLIQTVRTLVRQRRSLTQDSTRCILRLQKALEMMNIKLHAVISNITGKTGTAIIKAIIAGERKPENFLPLVRKGIKADKETLLKSLQANWRSEQLFLLEQSYRIYLFTQEEIKHCEKQIELALQNLAAATNDGIIEQINLTAAAKRTTKNKLSFNTKAYLHKIHGIDVTAIYGISEIAAMEILAETGTDLSKWQTENHFVSWLNLCPNNKISGGKLISSQMLKKKPNAASQAFRFAANGLQRSDHWLGDYFRRMKAKGGNKYAIVAASRKLAIIYYKMVRYKQPFQPFDNDEYKQKFQRAKIAYLERALARLKSEVA

SEQ ID NO: 68352 - protein, 456 aa, unidentified
MAKRKEKAVHRSALLEPNAAGIDIGAQEIYVAVPPDRDEHATRRFTSFTCDLQALADWLQGCRIRTVAMESTGVYWIPLYQILEQRGFEVYLVNAHYLKSVPGRKSDVSDCQWIQYLHSVGLLRASFRPPDAICAVRSLWRHRSSLLQMASEHTLHMQKALSQMNLQIHHVLSDITGVSGLAILDAVLAGERDPVHLAQLCHAFVKTPREIVAKALVGDYRPEHLFTLKQSLDGYRFYKKLITELDEETARLMQAVPSAGKQLAPMPTRTKHTVYQRNGNDPSFDLRSELYRIAGVDLTDVPGVSAITAQVILTEIGPDVSRFRNASAFASWLGLCPEKRVSGGKVLSCKTRKVKSRAALALRMGANSLCRAKGYFGEFFRRLRAKLGTAQAITATAHKIARILYHVLLSKQPYTESIFHLCDEQAQFRVEKRLRKQAALLGFQVVPIPAVPELVP

SEQ ID NO: 68353 - protein, 378 aa, unidentified
MHAAKVVAVTADRESGELRSRRLPGRTGEVVEFCAGLPGPVRVAYEAGPTGFTLARALGDVGIECVVAAPGKIERPSQDRVKTDRRDAERLMRLLMVDGLHPVRVPGTEEEALRDLVRAREDVRGDLMRARHRLGKLLLRHDIAFAGPGANWSVAHRQWLGRLELPERGAQVTLLDYLGAIDALLVRRGALEATIGELVLLSPWAQTVARLRCLRGIDTLSAVGLCAEIGDWERFERAGQLMSFLGVVPSENSSGEQRRQGAITKSGSRHARRLLVEAAWHYRRMPAKGLALRRRQEGQSQHVIALSWKAQQRLNRTWRRLDSERGKRRTIVAVAVARELAGFCWAIANPTDPSSTKSVKEAAGRTWPPRARAPAISL

SEQ ID NO: 68354 - protein, 429 aa, unidentified
MSYRMAGIDVHKKVLAVVVSNVEIEGEYQFERRMFGSNPDQLRSLAAWLLEQEAEEVVMESTAQYWKPVWEALERYWKPVREKREGARRRSGTLHLAQAQSNRGRRGRKRDFPDAERLVKRLVARELTLSFVPDAEQRLWRTVTRRKYQLRRDHARLQNQVESLLEEAHIKLSSLVSDLLGASARRMLKALAEGETNPAALAALADWKLRATPEQLCDALGACTDLKPVYRRLLKMALEQLQFLEQQIGQLDQELATLLHPHQDAVERLAEVPGLGVDSAQQIIAEVGPTAATFASGKCLSSWVGACPGDEESAGVNYSHRSPKGNRHMRRILNQTANAAARTKGSIFDIVYRRSVPRLGHNQAIGAIAHRQCRLIWLILHQGVRYEERGPAVTKQSKQRRTWKMIRQLRSLGYRIEPPNPQASQAQGQ

SEQ ID NO: 68355 - protein, 359 aa, unidentified
MNVANNKILSFKDQDFYIGIDVHKKQWTVSVISQNMLLAKTVSIDPLPETLLTYMTRRYPDGNYFAVYEAGFSGFWAARQLNQFGIKSMVVHPADIPTKQKERLNKSDPVDSRKLSRSLSVKELTAIYIPEKKAEEYRYLNRYRLQLAKDQTRLKNRIKSVLHQFGITIPLEYEERRWSGHFIQWLLLAPFDTEYAKFAFDDLVDHLIQIRNRIKNILQKMRQLAKEESFRKLIPLLFSVPGIGFITAMTLATEIIDMKRFSSLDKLASFVGLVPAVQSSDEKEKNLGISQRRNKFLRTMLIEAAWKAVKIDPALTMKFGELSKRMHRNKAIVRIAKILLNRIRYVWNNQKPYVYSVVS

SEQ ID NO: 68356 - protein, 336 aa, unidentified
MSHYCGIDLHSNNHYVVVIDDEDKRVLEQRLPNDLAVTLNTLSPYQETLQGVAVESTFNWYWLVDGLEEHGYDVELVNTLAVKQYDGLKYSGDRHDAFHLAHLMRLGILPTGYIYPREQRAVRDLLRRRLFLVRTASAQLISVQSQIWRSTGVRIKSADLRKPDFEPCGIEGYTLQAVAAGLAVYQAVQREIDALEQSAQEAIKLSDDFKILQTVTGIGPILAMTIMLETGTIRRFAAPGNYASYCRCVDSRRDSNGKKKGEGNAKAGNKYLSWAFSEAAHFAVRFEPLAQRFYERKKAKTNGIIAIRAVARKLARATWMMLKHQVPYDARLMFPG

SEQ ID NO: 68357 - protein, 327 aa, unidentified
MTVLALDVGSRKHALAASVEGLCPEGEVANEQAALAALFARLATEDPGAWVVMEATGVYHWDAAMLAHAAGLRVAVLNPKVTANFAKALAVRSKTDPIDARTLLAFGQRMPLTPWQPPRSTLIELRAISRYLLVLNEQLTATRNRLHAGQSMGDTPTFVLREYRTEVQRLETRITKASAEAMVRIRADAELKTQFEALDSIVGVAQASAIALLGELAFLPTAMRAKACVAHAGLDVRHHLSGTSVAKPGRLTKHGNHHLRRALYMPALTAIGHDPHAKAFYGRLVARGKKKMQALCAVMRKLLTAAWALMRSGERYDGSRLFARMEG

SEQ ID NO: 68358 - protein, 373 aa, unidentified
MANVEKDFAKGKPIYVGIDVHKRDWVVTVLCQGEELYQARVVPDARALVRLLRGFKASEVHTVYEAGPTGYGLHDALTEACFDSIVTPPSLVPRIGGRVKTDHRDSRKLVSMLAGGFLKRMHVLTPEERAHRQLLRTRNQIEHHRQHTQNQIKSLLLFHGKRAPTTLREHWSGAYVQWIETIEWDHPALKTSIGALLDLFRHLDGQYKALTREIEVLALTEKYRERAQLLIRIPGIGIFTAMAILIELQDIERFRRADQLASYLGLTPSQRSSGERIRMGHITHCGNVHLRTRFVQSSWTLIRYDQAMRSRYERIKHQTGSGKKAITAIARGLALRVRRVLLDKAEYKLNYSDTLCQERGQTGQFKRLILRPA

SEQ ID NO: 68359 - protein, 302 aa, unidentified
MVPRYCDQHERQITISLRDENGDVLLARQVSTQPEKIQAFFQQLTQDRLQKGEEFVAILEVCGFNDWLIRMLQDYRCHKVILIQPDERKKCKTDRRDAAALSELLWVNRARLLAGKPVRGVRQVDIASSTDQENRRLTTLRKEARQARTRVINKIKHIVRRHNLRWHLPTKTFPTQSAIAWLKALVLPAIDRLEINYLLADLEHLEQRYLDLEKVIAERCIASEQAGILSSMPGVGNFTATALACRVGRVERFPRSHSLPNYWGLTPRCRNREKKSAHSSWAGCAKGENVPHAPLGRPMPLR

SEQ ID NO: 68360 - protein, 371 aa, unidentified
MKQQSKSSHITVGLDLGDRRHRFCALDERGEVVEEGSICNERDSLRKLAGRYHGALGVMEAGAHSPWISRFLEALGWRVVVSNPRKVRAIYQHERKSDQRDALMLARIGRMDLALLYPVRHGTAEAQQDLLRIKLRDSLVRARVAVINSVRFTLKSLGYRVRNPSSARFHKVVMEEVPESVREMITPSVQALAELTARIKMLELEINTLAQMKYPQSAQLQQIPGVGPITALYFVLKIEDPNRFAHVRDVGAYAGLCPRRDQSGESDPQLRISKRGDAYLRRLLVSAAHYILGPFGPQSALRAYGLMLAADGTARAKKRATVAVARKLAVLLLSLWKSQQPYQPFPKARLNGQQEDRRSGTIALHRMEATD

SEQ ID NO: 68361 - protein, 348 aa, unidentified
MDIVGGFDVHRKQITFDYIEMESGEVHRGKIRPANRQSLRSWLEHFSEQFPEHEAAIAVEATTGWRYVIEELQRAGVEPHLAEPAETKALQGRKKRAKTDRLDAGHLRDLMVIERLPESWIPPQHIQEIRTLMRLRHSMIEERTSHKQRIHAQLFHNGYPQQKNLDSIEGRAHLEEMELPAAARQVVALSLNMIDHINEELEPVEAQLRAYAGSQAGCRALMEHYGVGELTSVALLSELGDTRRFSSSRKAVRYAGMDVTVHSSDEKRAAGTLSRQGPPLLRWAAFEVAKRAWRKGSPDHNYYVHNKERIGANRAALSIARKLIRRAHHTLRELGEEAMSEPVPSSSA

SEQ ID NO: 68362 - protein, 331 aa, unidentified
MTIHVGLDVGSRTTAMAWRQKGSPAGTWVIDQTPKGRKIALKKLLALKPLSVVMEATGIYYLDLAIELSSAGLPVSVINPKSARNFARLMLQHNKTDAIDAQLLAEYGERMTPRLWLPPSPVQLELRAIGRHINRLTSHRTRAKNELHALQVTETTSPMLIEDEEEAIAMFDKRIERFRKAGRDLIRNCTSLDASFTHMLAAPGMGDVSTLAVLAELTTLPDTLKSSQVSRHAGLDVRLTQSGTSIDKPSRLSKCGNAYLRSALFMPALSAIRCDRYVKAFYETLVGRGKRKMQAICAVMRKYLTGLWACMKSGEDFDTAKLFSEKHLLKA

SEQ ID NO: 68363 - protein, 471 aa, unidentified
MGHNRSRNDQQRGSKRKIVSPSLLKRINRDAAGIDCGSETHYVAVAPERDPEPVRSFKTFTTDLNRLADWLVACGIKSVAMEATGVYWIPVFEILEQRGFEVVLVNARHLKNVPGRKSDVMDCQWIQELHSVGLLRGSFRPSAEIASLRAYLRHREKLVQGAASHIHRMQKALVQMNLQLHNVISDIMGVTGMRILRDIVAGVSDPKALAAHRDGHCRASAEEIAASLTGNYRPEHLFTLRQNLEMFDAFQRQIQACDAEVESVLNVLAAVSKRKPDASPPPPRCKPRFSDNEPRFEIRDPLFRLSGADITQIDGIGPYTALQLTAEIGTDMTRWRTHKHFTAWLTLAPRNKVSGDRLISSKTQPSANRAAALLRMSAMVLGRTSTALGAYYRRIAYRIGKPKAITATARKLAVLVYRVLSGDLNYADPGAQAYEESHRTRTLQNLRNRARTLGFGLVDLATGETTPGIVS

SEQ ID NO: 68364 - protein, 409 aa, unidentified
MNVLHERCAGLDVHKETVVACRRVMADAQVVREVRSFPTTTRGLLALADWLGEAGCTHVAMEATGVYWKPVWHVLEGEFELVLANAMHIKNVPGRKSDVNDATWIADLLAHGLIRSSFVPPGPIQELRDLTRTRKQLVREVVQHKQRIQKVLEDANVKLGSAVSDVLGASGRRILRAMIAGEQNPDKLAALASERLAASRETLAEALHGRITRHHRFLLKQHLEMVEHLEKTVGEFEAQIEAALEPFRGVIDRLVTIPGVSHTAASVIVAEIGVDMTRFPTVGHLISWAGLCPGLNQSAGKVKSRTLRDGAPWLKTVLVQSAWAASRHKDGYLRGQFLRIKSRRGPKKAIVAVAASILTAAYYLVRDSVPYRELGSLYLLRLDHERAATRLTQRLRNLGYEVEIRKVAA

SEQ ID NO: 68365 - protein, 339 aa, unidentified
MNHTTVGVDIAKSVMQLHWVEPETGEIINKPVKRAAFLEHFANRTPCLIGMEACGGAQHWARRLIEMGHQVKLMPGKFVKAFVMGNKNDTADARAIWMAAQMPSKAVAVKTEAQQAVLALHRIREQKVKFRTAQVNSLRGLLTEYGEVMGKSRAALDKAMPGVLEKLTERLPAMLIDSLREQWNGLAELNRQIADIERRLKNWLKEDKACKAVAEIPGVGLLSTTAAVATMGDPKSFRSGREFAACIGIVPSQTGTGGKVQLGGISKRGDTYFRTLLIHGARSVLAHAKEPGPWVEQISKRRPPNVVTVALANKMARTIWAVLAHDRPYEKGHVSVKQA

SEQ ID NO: 68366 - protein, 415 aa, unidentified
MALKIVHKICCGIDVHKTFVVACIASTDKHGVTSYERHRFSTYTKGLKNLLQWLLEHNCKDVCMESTGKYWIPVYNILEKDCSIVLAHPKYVKAIRGKKTDKKDAKWIADLFKHDLVAGSFMPPADIRQLRDLMRYRFKLTCFKSSEKNRLQNCLTVSNIQLGNVVSDTFGKSAQAILDKILENPEDTSFDLEPLVFKSLKKKLPELRDAIDGYITPEQAGKLKIIKAHYESLESRKAELEELILALAAPYQRELAILQTAPGISSDFTAIGIISEIGTNMEAFPSAKHLCSWAGLTPTNNESAGKKKSVRVSKAGCYIKPLLVQCANAVVKSSKHPEMRNRYLRLKKRRGHKKAIIAIARMLLTALYHMLKNGENYNAELYRKSDLPPVDREITVEQAILIARNQGYKIKSATA

SEQ ID NO: 68367 - protein, 335 aa, unidentified
MNNIALIGIDLGKHSFHVHCQDNSGRALIRKKYTRAKLFEFLANTPSAKVVMEACAGSHFMARRISSLGHEAKLISPQFVRPFVKTNKNDYVDAEAICEAASRPSMRFVQPKTENQQAMQAMHCIRDSLIRDKVKTTNQMHAFLLEFGIGLPKGTAVIKRLSTILTENELPPYLVQMLTRLHAHYCYLESQIKELDQLLQQELKHDDTGQRLLTMPGIGPITASILSAQLSDGKQYASSKDFAASTGLVPRQYSTGGKNTLLGISKRGNKNLRRLLVQCARSIMIHLDKYSGSLANWIRNQLCRKHSCVVACALANKLARIAWAITTSKTDFKFS

SEQ ID NO: 68368 - protein, 350 aa, unidentified
MMIIGCDYHPGFQQIAFMDSESGEWNERRLGHREEAEQFYRDLKVRGVKVCVGMEASGHARWFERLLGELQFELHIGDAAEIRSKRVRKQKTDRQDAKLLLTLLVEDRFPSIWVPNWENRDLRQLLWHRHRMVQMRTRIMNQLHVVALNEGVRLKKALWRPAGRAQLESLLLAAWASRRRQDLLELLDQLTPKIQELTRALEQEVEKRPVTRQLMTHPGVGPLTALAFELVIGTPERFGSGKQIASYVGLVPCEESSGDRRRLGHISKQGNSLLRFLLVEAAQITVRCDPDWRRQFLHLAMRRERRIAKVAMARKLAVRLYWMWRKGWDYEQLKKLGAHAGEPGNRQGVQ

SEQ ID NO: 68369 - protein, 409 aa, unidentified
MEQLVERVAGLDVHKKTIAVCVRVPGERGERAQYVRTFGTTATELVTLRDWLEAHQVTHVALESTGIYWKPVDYVLEEVMTCLLVNAMHVKKVPGRKTDVQDCVWLAQLLEHGLLRGSFVPPPPLRELRDLTRYRKVLLQERTREANRRHKVLEDAGIKLAAVATDILGVSGRAMLQALVGGTTDPDVLADLARGTLRKKLPALRQALAGHFRAHHAFMVSQHLAHLEYLDEAVTTLSTRIGEALAPFASELARLDTIPGVAQRTAEVLIAEIGVDMSRFPTAQHLASWAGLCPGQNESAGKHKSARTRSGNKWLRVALIEAASMACRTRNTAFAARYHRIARHRGHKKAVVAVAHAMLVTAYHLLARQVDYQEPGADYVDRRHPERATRRAVRALERQGYRVTLERAA

SEQ ID NO: 68370 - protein, 453 aa, unidentified
MNELITQTKSPKNPLPSQPPEPAPAAKPILCWVGLDWADQKHCLVVRTEPTGPAQTHHLEQKPEKLDEFFLGLHGRHPQGRIAVAIEQSRGPVLYALMKYDFLVLYPVNPRTLADYRRAFKLSGAKDDPLDADLLCELIARHADRLRPLVLEDESTRKLRLLTEARRGFVEERTGLSNRLGATLKCYYPLGYELVGEDLASPMAQEFLRRWPNLARLQAAKAATLRAFFYAHNSRSEDKINARLAAIGAARPLTEDPALVEPLQLQMQRLVAHLRTVQQTINQYDEQIGLVFATHSQAWLFAPLPGAGPVLAPRLAAVFGTIQANFPEALGLLCFTGVAPVRRQSGNQEGVHFRYARPIFVHQSIVEFAKCSIAKCPWARLLYEQALRDGKSKWMAIRKLAFKWLRILWRCWQSRQPYDETKYLRSLQRDGVQLYRSLYEALPPLPTTTVNKS

SEQ ID NO: 68371 - protein, 443 aa, unidentified
MPDSHPFDLVLGLDRSDRKADLHLIDTGSGQTRRQTIATAPEALHDWLHLLRQQHPHARVALCLEQPAASLILFLETYAWITLYAINPITLQKFREAFVTSRAKDDGKDAQYLAELLLTHHNKLKAWQPDDGQTRLLQQLVRHRRAVVDERTALTNRLQALLKAYFPQALELCGEDLWRPLATAFLLKWPTLQTLQKARPATVKKFYYLQGSRSQQLIAQRMETIVRAVALTEEAAVLESHGLRVQLICRQLAELQRTLGQFEQRLAEVFGTHPDREIFQSLPGAGPVLAPRLLASVGSERERYEEAASLSSFSGIAPVTKQSGGKHHVHRRYRCPEFIKQSFHEYARESLRHSRWAAAHYRQQRAKGSGHHAAVRSVAFKWQRIIWKCWQTRTPYSEARYEAALEKSRSPLARLLDTIELEKPPPKPVRTKLKKPLVGSPQR

SEQ ID NO: 68372 - protein, 331 aa, unidentified
MSEEGNILKETKVATIPDEVGKFIRSFGKKDKLKLVLEPISQGAFYADYIESLGVEVHLAHPKKVKAIASARIKTDRIDAQVLAHLLRSNLLPESYHAPLSVRLLKEQARGRLSLVANRTRLKNKVHGILFRNGIIYSKTTLFTKQGREWMKGLSLKEEYRHHLDALLSLIDGVNDQIKTLEKYLEQTVEESEQMKLLKTIPGIGDVTALTILSEIGDINRFPHQRNLQSYAGLVPSVRTSGGHSQYGNITKEGSTYLRYVMVEVAHHQLLLKRKYVGLKWYYQRLALRKNNQTAAVATARKLLTVVFKVLKEKRPFEERLPKTISIISST

SEQ ID NO: 68373 - protein, 319 aa, unidentified
MAQNDLVVAGIDVAKDKVDVCIRALSLRRTFAATAEGRRELASWLRRQKVGKAVMEASGGYERDWAKALRGAKIEVRIVDPKRVRSFAQSAGRLAKNDTIDAEMIAWFAETFDEARSQAYDATREQLRQMVHARQALKDMQAKLENQGEHAMPAAVQRMHARILKTISVELVKFEAAISTMIQATPHFTELAEIIESVPGLGRTTSAALIAAMPELGQANNKIVAALLGVAPYDDDSGRRRGERHVKGGRRRTRNAFYMACLGAATRHNPVLKAFYDRLVAKGKEKKVALIACMRKLICILNVMITRRQKWDANRYALS

SEQ ID NO: 68374 - protein, 319 aa, unidentified
MSKAILGIDVSKKKLDVALMFDGRTLVRTFENGPKGFRLLEGWLRSLHFGDLRACHACLEATGAYSEAIAEFLYEKNCKVSVVNPLRIRKYAESDLKRNKTDTADARTIANFCLEKDPDEYHPLPQEIKHLQALTRRIEALEEILAAERNRLEQAPREIRPSLKRMIRALEKEIGSVEQLIKEHFDDHPGLKQQRELLQSIPGIGEKTASLLLSEIEFSAYRSARSVAAQAGVTPGKRQSGSTIDRTRLSKIGNGRIRKAMYFPAIVAVRHNAAMIRFANRLSQRGKTPMQIVCAAMRKLLHIAFGVIKNNRPFDPNLA

SEQ ID NO: 68375 - protein, 426 aa, unidentified
MRSIGMDVHRDFSEVAIAEDGVVRAAGRIATTPEALELFARSLAPDDEVAIEATANALAIARIIEPHVRRVVLANPKAVRETSRRAKTDKIDAKVLAQLLAVGFLDRVWAPDEAARTRRRLISRRGAMVRQRTREKNQIHAVLQRQLVRRQPMSDLFGVKGRAWLAEQVEGLPLDERLTVGAGLRQIDFTERELGELDKILAADALSDPDAMRLMTLPGVSAVTAIALLAAIGDISRFKTPRHLVGYLGLDPRVRQSGNEPARHGRISKQGPGDVRGLLVEAAWHAARTAGPLRAFHQHLAARRGSNIATVAVARKLVIITWHLLSRSENYGFMRPALHAEKIRKLELAIGAPRQRGRKLPIRAFAPRSVKDAEREQAAEHEAAYARLTAGWQPSRPQEKVGAGATPGRASQKPSKGKAARQATSP

SEQ ID NO: 68376 - protein, 350 aa, unidentified
MIIIGCDYHPGFQQIAFVDTDTGELRERRLQHPEEAEQFYRDLAAPGMKVRVGVEASGHARWFERLLAELNFELWIGDAAEIRAKRVRKQKTDRQDAQHILRLLLEDRFPQIWVPNGENRDLRQLLWHRHRLVQARTRIMKQLQAVALNEGLRCKKRLWRERGREQLESFKLAPWASRRRRDLLALLDRLNPTIAELTEAIEQEAEKCPEAQRLRTHPGVGRLTALAFVLIIGRAERFQCGKQIACYLGLVPLEDSSGDRRRLGHITKQGNSLLRFLLVEAAQVTVRSDQQWRSKYFHLAMRRGRKIAKVAMARRLAIQMYWMMRKEWDYEQVKKFGSHAGQPGNPHGVQ

SEQ ID NO: 68377 - protein, 346 aa, unidentified
MMIIGCDFHPSWQQVSWVDTETGDCGERKLVHADGDAQRFYQQLAVPVLIGMEATGNSQWFIELVEDLGHEIWIGDAAQIRASYVRRQKTDKRDAAHILKLVVEGRFPRLWTPDREQRDLRQLVLHRHKLVIIRSRVKNELQHLSLNKGVQRKHKLWSQAGQKMLRELPLKPWASCRREDLLGLLAMLHQQIGQLDDAVQHAAEENPQAKLLMTQPGVGPNTALAYVLTIGDASRFPRGKQVASYLGLIPREESSGGRQKLGSITKQGNRMLRSLLVEAAQVAVQHDPGLRKQYLHRCHQKPKGVAKVATARKLAVRLYWMLRTNVAYPEIVGIESSSGLPLVGAS

SEQ ID NO: 68378 - protein, 341 aa, unidentified
MRKTLFCGVDLHSNNAMYVIMDGRDKQLFRKRLPNRLPIILECLEPFRQRLKVVAVESTYNWYWLVDGLQDHDYPVVLANPSQMEQYNGIKEADDLTDAAFLAHLARLNILPTGYIYPKEDRPVRDLLRRRTLVVQHRTALKQSLQNMAIRQTGQSFGWRTLRKLSDPERTELLGDNDCLGFVASQQVDLIELLSEKIKRFEEKILEHAQLKPAYVCLLTLPGVGMILALTIMLETGDIGRFKTVGDYTSYCRCVRATRTSNNKSKGKNNSKNGNRYLAWAFVEAVHHATRNCPQAKRFYDRKCAKRNGALATKALAAKWSKAAYYIMKRQEAFDLTRVFG

SEQ ID NO: 68379 - protein, 354 aa, unidentified
MYYTGIDLHRDTCTCCTLDQAGTTVTVETLPTDPEEITAYFTALPGTHQAVVECTTGWYWLSDLCQALGVELLLAHAKHLKAIAYAKVKTDTVDATTMAHVLRLGFIPEAHQISRERRGLRDLLRHRLRLVETRSRLHTQAQAVLFKFNHGPVAGQYLRDIDQVEGKLATTFPEAYRLQLKTFAAQLQQLDTSLHTIRAQLRTALIQHPDVQHLLTIPGVGLLTALTLYLEIDGIQRFPTVGHFFSYCRLVPGAHNSGGKQAHARRKDGNRYLKMACGHAAPKARQYYPVIRRWFERKKRAKGFPIANALLAKELAKSAYYVLRKGEPFHGQWKGQPLDHQKHRHWPQPVTAPH

SEQ ID NO: 68380 - protein, 542 aa, unidentified
MAIANPYHATDVHGEFELAEIGDLVLEEGPTLRGCQFQRSLRDAAYAGKWGCGRPPTSTLLGAGETVCQFDAGGCFEGLRIVLRARGSDSSVPRRPLRAATPVPVVATSGVVMEEVVEQELYVERIAALDLGKAVLEACVRLPHPTRPGRRVQEVRTYPTTTARLLELADWLRCNQVTTVVMESTSSYWKGVYFLLEAEGFECRLANAREVKNVPGRAKTDRADAVWLAKVAERGMYRPSLVHPEPIRRLRDFTRYRRSLVRDRTRERQRVEKLLEDAQIKLGSVISDIFGVSGRAMLDALAAGQRDPKVLADLARASMRPKTGVLAEALTGFFTAHHGELLAMMLTNVDRLTEQITTLETRIEELVAPFCHQVEQLAEITGIGRTAAAEIIGEIGVDMTRFPSAAHLVSWAKFAPAVHESAGTKKNKKRPKGNPWLAATLGNTAGSLTRSRTFLGARYRRIARRRGKGKALVAVGNSILTIAYHLLSDPAATFHDLGPDYYETRINTERRARNLAAALEAVTGQKILIRNGKAIVIDREAA

SEQ ID NO: 68381 - protein, 426 aa, unidentified
MDVVHPRVAGIDVHKKIIWVAVRLPGDRPGERTVITKSFRTFWRQLQKMASWLAELGVTDAAMESTGVFWWPVYHALAGAGIEACVCNAAHMRNVPGRKRDIADCQWIAELHEHGLLRASLIPAAEVAALRQRTRYRKRLIEQRTSEGQRLSKALEDGGIKIDSVASELLGKSGRAMIEALIAGERNPGVLADLARGVLRRKTDELQMACDGRFTASHAQMCRLHLDAHDHLTAKIAELDVLVADAAAPFQRLIARLVTIPGIGPRTAQVIVAETGGDMSRFATSARLAAWAGLAPGDNESAGKRKKAAARKGNQHLKTAMTESAWTVGRTATRPGARFRRLARRFGRGNEKKAAFAVAHTLICIAWAVLRYDADYADAGADYYQQRDARNHDHLVRHHQQALARLGYHVTLTPPDDGSPPPAQAA

SEQ ID NO: 68382 - protein, 356 aa, unidentified
MEKIGNVKDAPSVEEVILGVDTHLELHVAVALDQLGRRLGEITVPTSTRGYARLLRWAEGFGTVGCVGIEGTSSYGVGLARYLHSAEIPVVEVERPKRHHLRRNGKSDSIDAEAAARAVLAGEAAGEPKSGDGQVGMIRALRSACQSAVKARSQAANQLQALLVTAPEELRHSLRKLPTKALVTTCARFRPIKEPDNVRTATKIALRSVARRHEALSEEIAKLDERLDRLVARTSPGLISLPAIGTHHAATLLCVAGDNPRRLASEASFASLCGVSPIEASSGKVVRHRLNRGGNRDANRALHMVCVVRMGSDRRTQQYVARRTAEGKSKREIIRCLKRYTAREVYRVLVQPTATS

SEQ ID NO: 68383 - protein, 344 aa, unidentified
MQYIAFDVHKKYTWATVEDQSARVVRQGRIDHRRGALRAFLSACAPDLPVAVETVGNWYWVVDEIEAAGFDPQLVNARLAKLMIGQVNKTDKLDNRGLNRLQRSGTLPTVWIPPAAVRDARELPRTRMMLVGQRTQLKNRVHSTLAKYGLSLPEVSDLFGKAGRQALSRLMAHLPPHTLQATAAVLEQLDGLEQAIKAVQQRIAEAFDDTAENKLLRSLPGVGPILSVVIATEMGDCGRFGSAERFASYCGTVPRVHVSGMKSYSGRVRMDVNAYLKWAFVEAANAALLQGDRYGHVRRLYDRIRARRGHGKAVVAVARHLAEAAYWVLTKQQPYQEPRRSTRG

SEQ ID NO: 68384 - protein, 382 aa, unidentified
MQASTVGTPTAGHNGTIFVAIELSQKTWLVTVHSPDRERMSRHKLDGGDHAELLALIERTRARVAAKLGSAPRVVSCYEAGYDGFWLHRLLEAAGITNFVFDAASIAVEQRARRAKTDRIDGELLLRTLMAYLRGEPRVVRIVRVPSVEAEDARRASRERDRLVTEQTAHTNRIKALLRLQGMAVGNPRRRDWLAWLARQRDWQGQPLPAHLLAEVTREHARLMLMRDQLAALEEAQAAQAPAVPASTAERRDQLLRLKALGPSFTATLVNELFYKDFRNRREVASYCGLTPSPWKSGGIDREQGISKAGNRRARHKAIELAWLWLRHQPDSALSHWFRTRTANAGKRAKRIAIVALARKLIVALWRYLTTGLIPEQATMKA

SEQ ID NO: 68385 - protein, 310 aa, unidentified
MGGLNAAIDVGKHQLNVALGSNGALFEEPNQARAIARLAKRLAKLGCARVLIEGGSYQNVLVAALRAAELPVVIINPRRVREFARSIGQLAKTDHIDARVLADYGERIQPPVRELPGKQSQVLRGLWVRREQLIEMLGMEENRLEHAPKALHRSLEAHIAYLRKQIKQADHDLDREVRNSALWDTYELLSSVPGVGRVLSVALLSDLPELGRLNRREIAALAGVAPFNCDSGTLRGQRKIQGGRKRLRRVLYAATIASVRCNPVLRPFYARLREIGKPTKVALVAAMHKLLTILNAMLKTKTVWRPPCPA

SEQ ID NO: 68386 - protein, 420 aa, unidentified
MKSASITPHNTLPEFPPNDLTAGIDWAVDDHAVAIADGRGREIHRCAIEHTAAGLRQLINVLGKHGVAEVAIERPDGPVVEALLAADLTVVVISPNQVKNLRGRYGSAGNKDDRFDAYVLADTLRTDRARLRPLVPDRDDTVALRSACRARKDLVKHRVAAANQLRAHLRLVLPAVVGLFNELDSAISLAFLARFDTQDKIDWLSPKRLGDWLTKQGYSGKVDPAVLYQRIIDATRGATDVHGTTQAHITTSYVTLLRALIEQIKTLEKQIDHQLNAHTDAHIFTSLPRSGRVRAARLLGEIGDCRARFPTPESLTCLAGAAPSTRQSGKLRAVGFRWSCDKQLRDAVTDFAADSRHANPWAADLYDRARNRGHDHAHAVRILARAWLHVIWHCWQDRLAYNPETHRALKRVLAQQNEAA

SEQ ID NO: 68387 - protein, 315 aa, unidentified
MAKDSLSVDAGEVFKGEIENSTDAIRGLLNKLTKRCVDDQVVCICFESTGPYGERLFLECCEAGVPACILNPAKVRHYAKAMSEAAKTDPIDARVIRLFAENKRPEPTPPPSAATIHLRKLVLTRNALMKSVVQLSGTQETVVGSAAGEVLAKAIAELRMRIKELDRLITHAIAGDQRIAGLAAALAEIDGVGKLSAAKMVAMVPELGTLGRRRSAALAGLAPFTRDSGRYKGKTFISGGRAEVRRALFMPATVAIKHNPVLRDAYQNLRKNGKPYKVAITAIMRRLFQHMDAVAAQWLKDHAISLAETAVPVAS

SEQ ID NO: 68388 - protein, 482 aa, unidentified
MKATPKEPAPKATGQSTQPNWHQMNRKQRRDMERKIQRADLTLQLVHPNAAGIDIGNESHYVAVPPDRDSQPVRHFRCTTAELRTMADWLKQCGIRTVAMQSTGVYWIPVYDLLEQAGLEVYLVNARETKNLPGRKSDVQESQWLMKLHTYGLLRNSFRPSQQIRRMRTYWRQRKDLIESAGRHIQRMQKTLTQMNIQVANVLSDVSGVTGQAIIQAILAGERDPQKLAAFRDPRVKASEKEIARSLEGNWQEDLLFVLKQEQAGYEFCQKQMAECDRQLEQYLRQLEDRSQGASLPEEKRKDRLQKRKGNKPKFDLRQQLFRMAGTDLTQIDGIDVMTAATILSEAGWDMIKWKDEDHFVSWLRLSPDNRISGDRIIGKGRLPTTNRVTVALKLAASNLRTSQSYLGAQFRRFRARLDTPVAIKAMAAKLARLVYRMLRYGTKYVDRGAQFYEVQQRTRQIRHLKQKAAKLGFQLVQAPAA

SEQ ID NO: 68389 - protein, 354 aa, unidentified
MGNSTTIAVDLAKSVFEVAVSEVPGRVSERKRVNRAGLVTFFSKRPASVVVMEACGSAHHWGRELEKLGHEVRLLPPARTTKYRIGNKTDRADADAILEANRNEKIHPVPVKTIPQQMLSTVHHLRRAWMETRTARLNALRGVMRELGVAIPVGAKVVLPKVSEALAQGRVPEALQPLLLASMAEIRKLEENVKEGDLLLARLARSTPVARALQEIPGIGPLGSTALIAAVGDPNRFRSGRKMSAFFGLVPREFSSGDKRRLGSITKRGDIYVRTLSIHGGRSVLRAAHQRKDPDRLQRWALEVERRQGRNRAAVALANKIIRIAWAVWARGTRYDGALGGPSAQTTARTAGAF

SEQ ID NO: 68390 - protein, 366 aa, unidentified
MSSVASAAGLIHLGMDTSKNTIMVATLLPGEENPVTDRITNEEAAIRRLVGRFADRSVLRCCYEAGPGGYELFRLLASMGVACDVVAPSLIPKGGSDKVKTDRRDSRRLARLHRAGELTAVRVPSPAEEAVRDLVRARGAVLEDRKRAQQRLTAVLMRHGRIWRGASYWTAAHRAWIAAQRYGEPALAAAIGYYRATLAVREAELAALEAELAPWAGREPLAGPVARPGCYRGIAELGGLTLAAEVVDWRRFPAARAFMSYTGLVPSEYSSGERTRRGHITKAGSEPVRTALTEAAWSYRHAPAIGAGLRRRQAGATPETLARSWTAQRRLHARYTHLLHGGKAAPEAAVAVARELAGFVWAEMTA

SEQ ID NO: 68391 - protein, 320 aa, unidentified
MSNIILGVDISKLTFDVALLNDNKVKTKKFNNTSKGFSELKQWLKNKGIDTVHACMEATGGYEAKLAQYLYDNNFKVSVVNPARIKGFSMSKLARVKTDKADSELIARFCQAIQPDLWQPTPKHIQELQQWVRRLDSLIANKNQENNRLDEASDVIAINIRTHIEFLDKQIKEVEELISNHIKEHKDLNDKSKLLDSIPGIGEKTIGVILAFLTVENFDSAKQVAAFVGLNPKPKQSGSSVRGTGRISKTGDADLRKAFYMPAVVSIRFNPIIKDFAKRLDSAGKSKMVIVIAAMRKLLHIIYGVLKNETPFNENILLKN

SEQ ID NO: 68392 - protein, 416 aa, unidentified
MGLDWADQKHDLWIRPADGSKAEHLRLEQTPEVLHEWVAKARERFANRRIALAVETSRGPVISVLMAYDFIVLFPVNPKCLKDYRGAFSVSGAKDDRTDAQLLEEFVRLHRDKLRALEPDTELTRKLAGLVENRRRLVDERTRLVNQVHATLKTYYPMAETLLDGQMNTAMAADFLARWPDLESLQKVKPEVVRSFFYKHNSRGAKKTEERLAAIQKAEALTTDAAIIVPARHLILAFAGMLRPLHQAVARLDKEIQQAMDQHPDAAIFRSFPGAGPALAPRLLVAFGTNRDRFQKSQDVAEFYGIAPVVVQSGTSKTIHVRYRCPKFGRQTFHENAGCALKKEPWARCYYEQQKERNKGKHHQACRALAYKLLRIYFACWKHRKAYEPSRYLKALKDHASPLHRKLENLTAALCE

SEQ ID NO: 68393 - protein, 333 aa, unidentified
MDTMYERCCGLDIHKKTIEACFRSGKKKTHMSFGTTSAELRKLTMWLVENDCQSVAMESTGSYWKPIFNILELSGTDMKIIVVNARHMKNVPGRKTDVNDAEWIAELLQYGLLRPSFIPDREQRELRELSRYRKSLVEERAREINRLQKMLEGGNIKLTSVVSEVTGYSSRRLLDRLLRSDEPMTEDVISGLVHTSLAGKSKELETALDGLLSELQKELLIKVLDHIDDMSRRIADLDDFCRKQMKKYEDALDKLDEIPGIARRTAETILIETGLDMSRFPTAKHFARWAGLAPGNNESAGKRSSGRTTKGNPTQEYADTKCEGGCSQKGLIL

SEQ ID NO: 68394 - protein, 354 aa, unidentified
MTSLTDLVEVVIGVDTHVDTHTAAAVDTRTGGVLAEVTVTTDPVGYAELLRFADRHSRLRAWAIEGSGGHGNGLARALTERGEVIVEMDRPQRPARRGGEKSDPLDAIRAAREAMSRSKLATPRSTGDRQALSVLLAARRSAVQAAADAQRQIFALVITAPETLRARFRGKKLPAMLTIATRLRAHPTWDTETATTATVLRDLARRALSLASEARRHEQAILAIVRSWKPELLDQRGVGPIVAATILCAWSHPGRLRSEAAFAKLAGVAPIPASSGQTIRYRLSRHGDRQLNSALHTITLSRLQYDPATKAYANRRTIEGKTPREIRRCLKRYIARDLFRLLENPPHHETLNTP

SEQ ID NO: 68395 - protein, 315 aa, unidentified
MTTRMMTTCAAGVDVGRDWLDVAIAPDGRGFRVANAPSGVTAMIVRLKRAGVVRVVLESIGGYGMTLVRGLAQAGFEVGVVDPRRIKALRTAEGRRAKTDRLDAALIARFALLMIDTVRPAPSLAAYEVRALSTRRRQLVELAAVEKTRLKQALDPEIAQSCRDMIALLTAERGRIEARLRDRLNADPDTVRKTRLLQTIPGVGPAVAMTLLADLPELGNLDRRAVASLAGLAPHPNDSGVRNGAAHIGGGRPCVRAALYMAALTAARSDRGFKIEYAALRAAGKPAKVALVAIARKLVVVANTLIKTNQQWNRP

SEQ ID NO: 68396 - protein, 337 aa, unidentified
MKYCGIDLHSSNSVIVVTDECDRIIVNRRYPNELNKMLSLLAPHQAELAGVVVESTYNWYWLVDGLMAEGYSVKLANTVAMRRYDGLKHSDDEDDAAHLAHLLRLGILPTGYIHPPAERALRDLARKRSQLVRTRTQQVLSVENILARETGSRLSSAAVKRLTTEDVATLGLKEDIALAMRANVAIIGALNREIAQLEARLLANVKLRPDYALLKSVPGIGEVLAIVIMLETGDITRFAAVGNFASYARCVDSARYSNGKKKGEGNTKNGNAHLVWAFIEAANFTRRFSAEAKRFFERKTARTNKVIATKALAHKLARASYHMLKERQPFDVKRCFG

SEQ ID NO: 68397 - protein, 482 aa, unidentified
MKKRNIYQNRSQELLSLFEEAGNSAKVMCVPMDYAKKDHVVMFCNGYGDILRKPFSVKNSPDGVKYLVDQATRSCQRRGIKKDHVFFGGEDVNSYAENFVSTLRSKGWVVAGVNAHDAKKQRANLQASTDRLDLMGIATMLLDCRANCYPAQSGIYRNLRTLVRHRRKLVAMSTEVKNRIHGVVDRLFPGFLNEGKTGIVPFTSSSLYLMEDRFSPIQIRRRKREKLIEILKRFGTSKAEKTADKLHQYAAQVLHTPADYVDTLQLSLAQHVKHLRCLQESVNQLEKEIAVNLAQTQGVFLTSVRGIGIVLAAGVTAEIGDPNEQKPLNNLVSYSGIIPRVKQTGGADGKTYTGKVAKRCNRILKDYVVKSALHLGLHGPQDLMADYKRRDASGQHADFSMGRRYLRMAMSLMRTSQIYLPPRLRKGDVSLEERAGYYLKIWPYLRGKWKKLGALEAAFIKDRPLGLWRQIVQELYDIKLKL

SEQ ID NO: 68398 - protein, 358 aa, unidentified
MAGKVTETVVVGGVDTHKDLHVAAVVDQNNKVLGTQFFSTIRQGYRQILACMTSFGALKRIGVECTGTYGSGLLRYLQNAGLEVLEVTAPDRMERRKRGKSDTIDAECAAHAAFSGIRTVTPKTRNGMIESLRVLKTCRKIAISARRVALQIIHSNIISAPDELRERLRNMTRMQRIRTLGSWRPDASEYRNVTNVYRISLKSLARRYLELHDETADLDVMIAAIVDELAPELIKRNAIGYESASQLLITAGDNPQRLRSESGFAALCGVSPVHVSSGKTNRYRLNRGGDRAENSALHIIAIGRLRTDDKTKEYVARRVAEGHTKMEAIRCLKRYISREVYTLLRNQNRQINSIPITA

SEQ ID NO: 68399 - protein, 357 aa, unidentified
MPMLADLVDAVIGVDTHRDTHHAEIAHPSGAAITTCSIPNDSTGYTQLLSWAFEHAPGPRLVISIEGTRSYGTGLARAAAAAGLTVIECEQPTRKTRRGKGKSDPIDAHLAVLTALQLSVDRLPTPRADGDREALRILLCARQELTTTNTAQTNRLRALLRDGDDTDRRLARTRLSDTVLAGLARRRQPASATREQAIRHAEIRRLALALREAARALKANRTELAAIVNDLVPGLTNRPGIGPISAAQAIVSFSHPGRCRNDAAFAKLAGTSPIEASSGQTTRHRLNRNGDRALNRAIHTIANTRIRNDPRTQAYLLRRRTEGKSDREIRRCLKRYITRQLYRTLTTAMNPNTAANT

SEQ ID NO: 68400 - protein, 319 aa, unidentified
MDKTSTAPTTAGIDVAKAKLDIALPETGEHWQVENATGGFRQLAGRLEKAGVERVGIEATGGYERGVVRYLRKCGITVIVLQPAQVRHFGHSRLGYAKNDRLDAMLIARCAALAEPGSVESDERMIDLAGQLTFIEQIEADIVRWKTRKEKAGKAQKPCIEREIKRFEELRKTELARLEMQLRKHADLANRLDLVRSIRGIALRTALALVIRMPELGCISREAAAKFAGLAPFDDDSGRRQGKRTIRAGRRRVRRSLYAAAQAAVNFGHNRQLAAFHRRLVDSGKPQKLVFIACARKLLIYANTVLQRGTPWQMEPAAA

SEQ ID NO: 68401 - protein, 346 aa, unidentified
MTMVETTRPVTGGVDTHLDVHVAAAVDASGGVLGVQPFATTTAGFVELHAWLETFGSLERVGVEGTGAYGAGLARYLRSRDLEVIEVDRPNRQLRRRAGKSDTIDAIEAARAALSGRASGIAKTADGNVEAIRVLLIAKRSARDTRIKCLNQIRHLGFTGPDELRERLRGVPRGRLAGTAAGLRPTAGSDPVVYATKLALQTLGRRVVDLETTTQRLDATLDQLVCATAPNLVAVAGVGIDTAAILLVAAGDNPERIRSEAAFAHLCGVAPIEASSGKTVRHRLNRGGNRQANHALWRIVFTRMSADARTRAYVARRLEQGRSKPEIMRILKRYVAREIYKHLPRD

SEQ ID NO: 68402 - protein, 378 aa, unidentified
MRKVALDLGAKKTTYCEVREGRVVGRATVATVESLVSLLGPKEPPSVVAIEACREAWHVHDLLESWGNEVVLVDTTRSRQIGIGQHGRKTDRIDAEVLALALERGGIPQAHVLSPHRRELRRWLGVRRALVESRAQMVTTARGIAREYGTPLRRCSTACFTSNARKWQLDPELLASIEPLLHLVEGINTQLQVVEGELAKLCATEPVVSLLTTAPGVGPIVAASFVSVVDDAKRFQTAHHVESYLGLVPSEDTTGGKRRLGAISKQGNSYLRSLLVQSAWTVLRTADRNDPLRLWAEAVAARRSKRVAVIALARRLAGVLWAMWRDGTVYDAALLAKTGSRGKHRAAQTLEFQAEALKSAGKKLSMKKFTAREVTPAP

SEQ ID NO: 68403 - protein, 425 aa, unidentified
MNRNMNHKINQVSEDTLVIGIDIAKKKHFACAMDDRGRVLQKSFPFFQSQAGFEQLDKRIQSLQALHEKSKVIVGFEPTGHYWMNLAAYLVDQHIQFVMVNPMHVNRTKELDDNLQTKNDQKDARVIASLIRDGRFNYSRTLEGVEAELRNGSSLRSKIQEDLTALKNRMIRWIDLYFPEFHHVFKSFGKNACAVLEKTPLPIDFDGKSDEALIELYKSVEGLKCLSVSSIKKVKAAAPQTIGLKEGLEMARFEMNTLITQFKSLSNQLEILSARLTELAEQMPDYEYILSMDGLGENTAVDLLSEIGSLSRYEHPRQLIKLGGLTLRENSSGQHKGQKKISKRGRRKLRAILFRVILPLIQHNAAFKALYHYYTTRTVNPLKKKEAMVVLCGKLLKILHALCTKRVHFNENLIIADLHCLQEAA

SEQ ID NO: 68404 - protein, 380 aa, unidentified
MRRVSGLDVHKDSVFLCIMDEDGVVFQSKYGVLTPELEQMAGVMVEYGVEEAAMESTSIYWMPVWRVLEPYVALRLVNPFFIKQLPGKKSDVKDAEWIATCLQKELIKGSYVPDELIQQLRQYDRRIFDLSKDIVYKLTKLDAALQRCNIRISNYVSTTKGKAYQEIVRLISEGKTDSEELVKHIHGRTVNRIGKEVLVSALSGVITAADIDTIRQLREEVELAQRHKDECQAKMDEICKQYFPKQYANLQTIPGVQARSATAIIAEVGTNMDAFQTTAHLVSWAGLKPRNEESAGKIKSRRVTHGNKYLRKTLIECSWAASKTQNCFYNRFSYIQCTVRHKNKMKVQVAIARKMLTAVWYILHDNVPYRDFTPDIVPSE

SEQ ID NO: 68405 - protein, 402 aa, unidentified
MKLTRIGMDIAKQIFDLHGVDRRGKLVLRRTVRRERVREFFAQLQPCTVGMEACGGAHYWHREISQLGHTVRLLSAHKVKPYVDGNKNNRHDAAAICEAMSRPAMRFVQPKTTAQQDLQTLHRARALLVRDLTALSNQIRGLLHEYGIVMRKGAAALRCALAELLEGNDERITAVLKAVVAEQFERFKYLAQRLDRYDRQIGELCKQDQRCQRLLKVPGIGPLSATALVAALGNGHEFKNGRHFSAYLGLVPGHSNTGDKTVMLPITKRGNRYLRTLLIHGGRSAVYAARRRSDPRSSWLNRLRETSCYNVAAVALANKNARVAWAMLRYGEDYRASRAHRQSADPTAARSARPAKRTLAFAPPGARPASQGRAHFSAPPSAQTKGGTKKMLRQNQKKPRQN

SEQ ID NO: 68406 - protein, 357 aa, unidentified
MEQSNRISFKGQNIYVGIDVHLKSWSVTILSETSVLKKMSQGADPDALHRFLTSHYPEAEYYSVYEAGFCGFWIHDRLTELGIHNIVVNPADVPTMSSEKLRKTDAVDSRKLAVSLRAKQLKGIYTPDSEALEIRSLIRLKNSITKDMTRQKNRIKSQLRYLGIEIPTEYLEPHSNWSKRFLNWLREVEMRTPSGRQTLDILIMQFEALRKQKAEMTRRLRALSHTDRFEEMLGLLMTVPGIGQTTGLALMAEIVDITRFDNAEQLAAYVGMIPMCHSSGEHEGVGDITLRKHAILRSNVIEAAWVAIRKDEAMQLCYLNNCKRMVPSKAIVKVARKLVNRIYFVLKRHQPYVNAVA

SEQ ID NO: 68407 - protein, 343 aa, unidentified
MQTITTIGLDIAKSIFQVHGVDAAGDVIVRRNMKRRYVLIFFQKLQPCLVGIEACASSHYWSRELQTLGHTVRLMPPAYVKPYVKRQKNDSADAEAICEAVTRANMRFVPTKTPEQQSCMMLHRTRHLFIRQQTAVINAIRAHLAEFGIVAPVGRTGVEQLLGVVADSHDKRLPNIARACIAALGAQLQMLKARILEFDRLIMAWHRSNQASKRLDELPGVGPALATALVASVADPKAFRSGRDFSAWIGLVPKQNSSGGKDKLGSISKQGDRYLRSLFTIGALAVIRYAKIHGTKHRPWLAGLLARKPTKVAAIALANKIARMAWAIMAKGERYKEPVALAA

SEQ ID NO: 68408 - protein, 332 aa, unidentified
MKETRNEVKPKEACMAYVGIDVSKDTLAIDAGDLYTGTIRNNKSALGKAVRAIRKAAGGRDARITYVAEHTGCYSLLVHLELAKAGEAVSMVDPKRVRHFAKVMSVAAKSDPLDAAVIRKFAEFAKPEPTPLPSENLVESRETIRSRGLLMKVRVMLGALAGVTISATCKTALKAVIAAIDRQVDNLDGRLLELFEHADATTRRKVVEMEKIRGVGRLTAFSIATAVPEIGTLGPQRAASISGLAPFVRQSGKWKGHQKISAGRSEVRRALYMPAVCAIVHNEVLRKVYRHLIVDLHKPKKVAITAVMRKLIIHMDRVCAALPDAGATVVGE

SEQ ID NO: 68409 - protein, 312 aa, unidentified
MNQSHPTVYCGLDISKASLQLDLERRVLDVANTVPERRKLLQRLQRVSAVHVICEATGGYERSIVTDLQNAGLAVSVMNPGWVRNFARAQGRLAKTDRIDAAVLTAYGHAFQPAPTPAPTPVQKQLAELVARRAQVMELVVAEKNRAPMHLLPAVRKLSRQLLRQLQAQLDHLEKLIQQLMAEDETLLARVQRLDQIAGVGLITAITVLAEMPELGQLNRQQAAALAGVAPINRDSGPWSGRRFTGGGRAALRCALYMAAISACRCNKVLKPFYDRLRQAGKPAKVALIAFTRKLIVLMNHLLKNPNFILAN

SEQ ID NO: 68410 - protein, 353 aa, unidentified
MKTYYVGMDVHRASIVIVVLNGAGKVVMQLVIETGAERVRGFLKQLRGKVYVTFEEGTQAQWLHEVVRPLVTEVVVCDPRHNKLLQSGNKNDRVDAQKLAELLRNGALKAVYHGDNGVRALKELVRSYDCLVSDTTRVMNRLKAIYRGRAIGCAGHDIYRQDRREQWLEKLRERGAKQRASFLYQQLAALKPLRHEAKRLMVKEARQQTAYPWLLSVPQFGSVSVAQLLAIVSTPHRFRSKRQFWTYLGLAVVTRTSADHEIVNGVLRRSRRPVSTRGLNRNHNHLLKRVFKNAANGACHGGPFKAAYELRVTQGMVPSLARLTVARQLAAITLAIWKRGEQFNPERMKQQAA

SEQ ID NO: 68411 - protein, 421 aa, unidentified
MPNIEIGVDSMDKENFIYVGIDLHKETHTAVMIDCYNQKLGEITFPNRPVDFPKLVTKVKKCNTDGKEVVYGLENAYGYGRALAVWLIDKGYLVKDVNTAISHQQAKHRGAMYRKSDSDDAKAIALATLNMLDKLPDACPNDAYWSLGQLVHRRDNIMKQRTRLVNQLHEQLCIAYPSYKQFFNDISRPTALYFWEHYPSRKYLKGKSVEDLRAELVPVSHNKCSTKTCEKILDAVASDKVKNNAYQDARDMVTLSIVSDLQHYDSQLAEVDKMLEQMYKMLGCTLTTISGVNVITAVKILAEIGDIKRFSNANKLAQFAGIAPLHLSSSGKGKDVATKQGNRRLQATIYFLAIQMVQVSSKGTPRNPVVRAYYEKRKAEGKTSQQALICISRRLISIIYGMLKYGTEYRMPVVENAGEKL

SEQ ID NO: 68412 - protein, 386 aa, unidentified
MKKNSKNETTKSKRETKKVAELAAPRLTEREANTLVIGIDLGDRTSSYCVRTLGQQIVKEATVATTATAILEAFQGLRRQRVVIETGTHSRWVAQLLELMGHEVIVANARKLKLISENNQKSDKVDARLLSQLGCMNVEWLHPVYQRSQDAHCDLLLARAREALVETRTALINHVRGSVKSFGSRLVKCGSERFVGVARVTLPDALRPAMSGVLATLEEINEQIYNYDCQIEHLCHTKYKEAAKCLMQVNGVGPVTTLTYVLTIEDKDRFEQSRDVGPYLGLVPNKRQSGQRDPQLGISKAGDEMLRKLLVNCAHHILGVNGQDSDLRRWGLELVRAVERKGKKGARKLAAAAVARKLAVLLHRLWVTGAEYEPLRNRGAQQTPAA

SEQ ID NO: 68413 - protein, 378 aa, unidentified
MPSSVNFWVGLDVHKDSVTAAVFRNRDPEPIRVDRLPYDPHKLRRYFQRLQASGSVRACYEASGAGYVLQRALLNWGVPCELAAPSLIPQRTGEHRKSDRRDAIKIGRDFRDDRLVLIQVPTEADERVRDLVRCRETFQREIVKSRHYILKFMRRRGFIYREGTHWTARHLAWIRHVLAPGTLADEDQVVLAEYLALLEYKLQRRDELDRRIEALALTPRYKPLVDRLGCFRGFKTQAAMVLATELGDVRRFDNPRQLMAYVGLIPSEHSSGERRRLGAITKAGNTRVRHILIQAAWHYRKRPAVGAPLRRRQRGQDPVVIQHAWKCQHRLYTLFHRLAAKKPRPVAATAVAREMVGFLWAVLRDVDVTQLQEARRAA

SEQ ID NO: 68414 - protein, 385 aa, unidentified
MCRPDKSVVLKPITFANAWEGWQIWEEKLNRLDALPNQILIGMEATSRYGENLYHELEQRGYVLRLLHPGQTHHFHQQQGLRAKTDRLDAMTIARVLLSGEARIGYVPSEQIATYRELVRLHTQLSDTAAGYQNEIQALVVVLFPEFTQVFADPCLLTALAVLKAFPSAQALAEAGVEPLLQLLRAQPSAHYGRPTAQKLVAFAKQSVSSGRAIAGRSVSLRILCDQLEHTRANLARLDAEIEQHLRTDPGAKGLQQVPEFGPKTLAVLRAELGDVQRFARTDEVIAYGGMDIQIKESGLWKGKAKLSKRGSGLLRRMLYMTALRCIHREDSAFGVYYQRLVERGLKKGSALMAVMRKLLAVAAHLLMHEGEEYDPRKVCGSRAG

SEQ ID NO: 68415 - protein, 373 aa, unidentified
MTQSTTSTTLFIGLDVHKDSIAVAYVAYDHGAEVTYLGTIGTRQTDIDQLARKLQSKAKHLVFVYEAGPCGYWLYRYLSKKGHTCWVVAPSLIPKKAGDRVKTDRRDAIQLARLMRSGDLTPVYVPKLEDEAIRDLTRAREDAIEDLKAAKFRLKAFLLRHDIRYTGRANWGAAHLRWLSEVLCPTPAQQIVFQEYVRSVNDITERLQRLEQELQDQVQSWRLNPVVDALQVLRGVQFTVAVTLVAELGDLTRFTHPSELMKYLGLTPSESSSGERRRQGAITKSGNTHARRVLVEGAWAYRYPAKVSRHLQLRLEKQPKVLQDISWKAQVRLCKRYRQLIARGKHANQVVVAIARELFGFIWAIAKQVTIKP

SEQ ID NO: 68416 - protein, 387 aa, unidentified
MPQRNDLSRSAASLDHESTLIAVIEMSQSSWLVAAIVPGIERHPLKKLEANEEALLQLLRRWQGEAAGAGRTIARVAVAFEAGRDGFWLARWLRAHGIEAHVIHPTSVAVSREHRRAKTDRLDTGLLRRAFLGWLRGEPDHCSMVAIPTLEEEDAKRPNRERESLIGERTRIINRMRGCLARLGIRSFRPTLRTAPGRLETLRTPEGVTLPPNTLAELRRDMARLRFVTGQITEIEQARLERLRQAPDERPHAMVRLLARVIGVGIETADMLVHEVLSRDLRDRRAVARYAGLTGSPEESGARRREKGLAKAGNARVRRGMIQLAWRFLRFQEASGLAVWYRARTADARGGTRKTMIVALARKLLIALWRLVTTGETPDGVVLRPAA

SEQ ID NO: 68417 - protein, 470 aa, unidentified
MGARNAIGIDPDSEGFVCAYVKVGEAKVTTKSYLTSDADVERFLRWVEREGEIIVAIEGSNGLSKPIEKALREGGIIFYSFKPADTDKFRKAVLGQNKNNARDAESVARYAMALESQGKLDQWRRVWFPDAELQLLSRSYERTSRDMTAATNRLWKLLRQASPDLYLALKGNNPEVSLEEQVLTGQAFLSLLSTKPNLGEWKSLSQDQVFEAMGGRNYVGRGLLIEKLQKLAPSSEPTSPAITLLIENHARQILRFKQEELSMTKMLEDLIKDSHAARALLEIRGIATITASAMMAEIIDIRRFAREDSLACYCGLGLKEHSTGKTVQMIPTPFFNHRLKDAFMTAARNFVRYNPDSHLSGYYRNLVKKGMSTKEATKRVARALVRVIFKRLTSLIETETHEVQSQKCEEGESDMANGNGRGEDAHPSNMSLSSLLDNTTRAKQVNETPLARKTGDKSMRRKRKGRKKTA

SEQ ID NO: 68418 - protein, 342 aa, unidentified
MNHYAGIDVSLECSSVCVVDASGKILREARVASEPEALIAWFRQSGFEFERIGMEAGPLSQWLFAGMKAAGLAVELLETRHVRKAFEAMPVKSDRSDARGIAQLMRLGWFRPVHCKSISAQETRSLLTARKLVQSKLLDVENSLRGILRGFGLKVGKTTGQTFAGRIEELVDGHPHLQMIAKALLAVRAVLRTEFAAFEKQTRRMVRSDMQARLLTSVPAVGPIVALTYASAIDDPTRFKSSKQAGAHFGLTPKKHQSGETDYTGRISKIGDASVRTALYEAANVMLTKPLKGCSQLKSWAMRIKKRAGMSKAKVALARRLAVIMHRMLADGTPFNATAAAA

SEQ ID NO: 68419 - protein, 367 aa, unidentified
MESQIYREKRIIQENFSGEKIYCGVDVHKNSWKVSTYIGTNFHKTHSQESDPVVLKSYLENNFPNAEYHACYEAGFTGFSISRTLQAFGINCCVVNPADIPTTNKDKFSKTDVRDSRKIAEAFAKGLLTPIWEPDMELEGLRKLIRLRSNILKTYESRRQHIKSLLFTIGLKLPFHFDKPHISNNYLKWLQEIDVKQMTIRITMDELVDQIRDLRKRLLHLNKEIKKIAESEKYKQMNDLLISVPGIGLITATTFIAEIGDINRFESFRKFNSYVGICPSEFSSGEKERKSRITPRANKILRSLVIEAAWRVKNSDPAMAKSYHELTTKKNKKNKDAIVIIARKLLSRVYSVWKNQTLYVCGIKMIQ

SEQ ID NO: 68420 - protein, 391 aa, unidentified
MIYIGIDVAKDKHDCFITNSDGEVLFKAFTISNNLDGFNELYQKIESVMEDTTKVKVGLEATGHYSYNLLGYLIDKGLPTYVINPLHTNLYRKSLSLRQTKTDKVDARTIASMLMSDVNLKSYSDTSYHNEELKSLTRYRFDKVKERAKLKTSVSRLVCILFPELEKLVPTLHIASVYAMLSEFPGAKQVANAHLTRFTNLLSEASKGRYGKETAIAFRDAARTSIGSNMPAKSLELKHTIKLIQELTSEIDEIEHEIKLIMDELNSPILSIPGINYRMGAMIIAEIGDFTRFDSPDKILAYAGFSPSTYQSGQLDGAYSHIEKRGSRYLRYALYNAAKYVCIWDPTFAEYLAKKRSEGKHYTVAISHAVKKLVRVIYHLEKTNQQYIKAA

SEQ ID NO: 68421 - protein, 400 aa, unidentified
MLLFFEVITMIFVGIDVAKDTHYAAVSDNSGAVLVKPFAFQNNAEGFCLLLKKLSEFDRSKLLIGLESTGIYSENLICFLYESGFRLAVINPIQTATLRKTAIRKTKTDKVDTMLIIKSLMVNSYRLYSQRDADSLKLRTLCRFRQNLKKSKARLKIQLAGYVNLVFPEFGKFFKSGIHIAASYALLKKYSSPKEIAALRTSTLCILLSKASHGRFGKDTAEALKSLALSSVGVKNPYISIQIAQTIAQIELLEQQIKDLNSAIEEAMESINSVLMTVPGIGAVNAACILGEIGDIKRFSKPCKLLAYAGLDPTVRQSGQFTAKSTRMSKRGSALLRFALINSAWQLTLNDTTFKAYYDLKRSQGLNHYGALGHVAHKLTRVIFKLLTSDTPFNPAKLVA

SEQ ID NO: 68422 - protein, 406 aa, unidentified
MLNAVGIDVSKGKSTVAILRPAGDVVRKPFNVSHSVKGLSDLISCVKDLDGETRVVMETTGHYHEPVLKAFLDAGIFVSAVNPSLIKYHDSDKNPLRKVKSDPADARKIAKYTLDKWEHLRQHSAMDTSRAQLKTLNTQFHFFMQQKVSLKNNLIFLLDLTYPGVNKLFDSPVRSDGSEKWVDYARSFWHVDCVRKIGLKAFTSRYQNFCKHHGYNFQPGKPEELFNASKDLVAVVPKDPIYKQLILSSIEQLNTVSRQIELFRHTMNELASTLPEYTTVMSMYGVGPSYGPQLMAEIGDISRFDHRSAITAFAGVDPGVNQSGLVNHESNSASKHGSPRLRKTLFQIMTTLLQLAPADDPVYLFMMKKKTEGKPYQVYMTAGANKFLRIYYGKVKECLAVQSISE

SEQ ID NO: 68423 - protein, 350 aa, unidentified
MMIIGCDYHPAFQQIAFVDTDTGELRERRLQHPEEAEHFYRDLAAQGMKVRVGMEASGHARWFERLLAELNFELWIGDPTEIARKRERKQKTDRQDAQHILKLLLKDDFPKIWVPSWENRDLRQLLWHRHRMVQARTRIMNQLQAVALNEGLRCKKRLWREHGREQLESIRLAPWASRRRRDLLELLDRLNPTIAELSQAIEQEAEKFPEARCLITHPGVGPLTALAFVLIIGRAERFQCGKQIAAYLGLVPLEDSSGKRRRLGHITKQGSSMLRFLLVEAAQVTVRSLPEWRSKYFHLMMRRGRKIAKVAMARRLAIRLYWMWRKGWDYEQVKKFGSHAGTLGTGDGVQ

SEQ ID NO: 68424 - protein, 308 aa, unidentified
MNITRVGVDIAKSVFHVHAVDRRENTQWQAKLKRSQWLESLCEHVDPGAEIGMEACASAHHWGRELQKRGYRVKLIAAQFVKPYVKSNKNDRVDAEAICEAMSRPGMRFVAVKSVEQQDTQAAHRIREELVGHRTAKANQIRGLVGEYGIVAPVGIQKLRFALPQWLEDAENGLTDEFRVLLAELADDLRHLDGRISGLDERIAQCVKNDPVAWRLLELRGVGPLTASALAGALGDGKGFRKGRDFAASLGLTPRQHSTGGKDRLLGISKRGDSYLRKLLVHGARAVLRHAKARDDGLSQWLNELAAR

SEQ ID NO: 68425 - protein, 351 aa, unidentified
MDATTVAVDLAKEIFEVALANRAGRIVDRKRLTRRQFERFLDGLPADTEVIMEACGTAHYWGRRCQAHGLRPRLLPVQYVRPYVRRNKTDRTDTEAMLEAARCADIRPVPVKTVEQQTLQALHRVRTQWQAARTARINVVRGLLREQGLPVPVGARTVLARVAAILEDAEIALPDRLRHTVALVVEEIHGLEHHIALIDQQLGQVAATHPVAQRLQQIPGVGVLTATALVGAVNHIHAFRRGREFASWLGLTPRESSTGGRRYLGRISKRGDVYLRCLLTHGARAVLLSAQRTSRTSPQRLTRLQAWAVATAARRGHNKAAIAVANKLARVVWAVWQKEVDFHSPLQATAA

SEQ ID NO: 68426 - protein, 390 aa, unidentified
MTTKALDIALELSQDKWLLACATAAAEKPRFRPVPARELARLDQEIAKAKERFGLPAEAPVYTCYEAGRDGFWLHRALTSRGIHHVVVDSSSIEVDRRKKRVKTDPVDAAKLLNLLCRYHSGERKVWRVVQVPSVADEERRQLHRGLKDLQRQQTECSNRIKGLLASLGLTAEVDAKFRTTLAELRDWAGQRVPAALAQRLLQEYAVWEALHAQVREACTEQERRLRTGTEPYLEQVRRLLGLKAVGVRGAWILVAELFAWRGIKNGKELGALVGLTPVPYNSGRSERDQGISKAGNKHVRGLIVELAWLWLRWQPGSALSQWYEQRFGAGNKRARKVGIVALARKLLIALWRCLERGEWPDGALAKDWRLTVDSTARRHATKARAVAAA

SEQ ID NO: 68427 - protein, 361 aa, unidentified
MKKVSRELPKMEAGIAKPEMTVGLDLGDRYSHYCLLNSDGEVVEEGRVQSAEAALRRHFEGEDCLRIALECGTHSPWVSRLLNALGHQVIVANARQISAITGSESKNDRNDAEKLARFAAFDPKLLSPLEHRSEERQVDLNLIHARSTLVRARTMIVNALRGLVKSAGGRLPACSTEFLPARALAAIPPALSAVATPLVEQIGLLNAQVDGMDKQIAKLSAKYPEIVLLRTAPGVGPIVAAAYVLTLGQPDAASNRSAGAFLGLRPAQSQSGAADPQRRISKSGDSFLRSLLVQSAQYVLGRFGPDSELRRWGLKLAATGGKRGKKRAIVAVARKLAVVLHALWRSGQRFQPFPQQAAVAA

SEQ ID NO: 68428 - protein, 400 aa, unidentified
MSTAHGRIWVGIDAGKGHHWAVAVNTDGETVFSTKVVNDESQILTLIAAAREKAGEVRWAVDISGRASALLLALLVAHGQQVVYVPGRTVNRMTGAYRGEGKTDAKDALVIADQARVRRDFAPIETPPELVSTLQLLTGYRRDLIADRGRLINRLRDLLVGICPALERAFDYSAVKGPVVMLTEYQTPAALRRIGVKRLTTWLERRKVRGADTIAAKAVEAAQSQMTALPGESRAAKLVRDLAHQLLALDERIKDNDREIHETFRTDDRAEIIESMPGMGPILGAEFVAIVGDLSGYRDADRLASHAGLAPVPRDSGRRTGNYHRPKHCSRRLRWLFYMSAQSAMMRPGPSRDYYLKKRAEGMVHTQAILSLARRRVNVLWAMLRDKRLFTPVPPVTQAA

SEQ ID NO: 68429 - protein, 345 aa, unidentified
MKKIPVGVGIDYADSGVQVCVGKTQGGAGANQVQDLVLRNKKVANSWEAIAAMVRPDESVQFAVVEACTGAADLADELHGKAGWPVVLAMPGIVKKMKMNPDKSDLQDGQLLFDLGRVNYVPRVWLAPKAVRELRLVVRYRQQWVKQRRAVKQRMGALLREQRVHLPGKRWSKPWRQALSRGKELSEQARWVMGQHTQALLWLEARIATIARHLEQIAREDEMVKELRTYKGIGLVTACVMRAEIGSFTRFGSGKKLARYCALTPRNASSGERQADAGVVQAGNKMLRTVLIEAAHRLGRLDPRFHAMRNALKARGKSGSVVAVAIANRWVRGLHHRGVAIERAA

SEQ ID NO: 68430 - protein, 385 aa, unidentified
MMLIGIDPHKSTHTATAIAPDTNQEAASIRIDATLREYRRMLTWARQWPQRRWAVENAEGLGRHLTSWLLARGEDVVDVPTTATARVRQLSRGGGRKNDRIDAGAAACVAALQGDARPLEAESYVDAMAVLDERRVNLAQSRVRAVNQLHALLRALIAGGAPRDLSATTAAALLRTVRPNGAVEQARKAVAKDLVTEIRTLDTQLKANAQAIARLVAATGSTLTEVVGVGPIMAGRLISRTGRASRFLTASAFANYAGAAPVEIASAEKSRHRLPRHGDRQLNSALHTIAITQIRIPSSRGHRYYNSKIAEGKTPREAARCLKRRLADHLWRTMINDERRAVSPGGQLGTTLQSSVAGPTPTTNSSDKSLPGPATHDSTTAKPAA

SEQ ID NO: 68431 - protein, 409 aa, unidentified
MDIAPIYKRVIGLDVHQAQITGCAIIELPDGSVTHERREFGGFKRDRKALAEWARSIGPDVVVMESTGIYWKSPYAALEAVGIVAWVVNARHVKAVPGRKTDVADAQWLASLARAGLLRASFIAKADLRSLRHIARQRQKLGGMLASEKNRLHKLLTDAGVRLGVVVSDLHGQSARAMVKAIIAQKSIPEILNLASKRLRASREDIFEALQAEKVTPAHRFVLSETMAHIEELEARMARFDAELIRSLEAAGYAAPLRLLQTLPGIDLMGAAMLLVEIGSDMSVFGSAQRLASWVGMCPGNNESAGKRKSGRIRKGNAWVRRLLCEFAQAAGRSRCALKDKFQALNVRKGHKRSIVALGHKMLRTIYAMLRKNTHYVDKAVDYEALMVARNAPRWLQMLVKHGFVPAHA

SEQ ID NO: 68432 - protein, 420 aa, unidentified
MAKLKIVYPICCGMDVHRDFVVACIASTNAQGVTDYKSKRFSTYSGGLRNLRDWLTLHNCRDVCMESTGKYWFPVHNILESTCHIVVTHPKFVKAIKGKKTDKKDAQWIADLFKHDLVRGSFIPPEDIRQLRDLCRYWVKLTSYSTGEKNRAQNCLTVSNFKLDSVFSNVFGKSASAIISHMLEHPGEQFDVAPFVDGRCKTPISEIQAAADGSFNPFQAEKLKIIRRHLDDLGYLKALLETQIFALAMPYAHQVELLLTVPGISDPMTAIRIIAEIGVDMTVFESAKHCCSWAGLTPQNNESAGKKKTTRIGKAGQYIKPLLIQCALAASNPRSSKYPEIRSKYQQLKKRRGAKKARVAIARRLLTAIFQMLLKDEPYTPYIAPAQEAIPSNRVLTPQQALAHMRSNGFIILDDLPSPA

SEQ ID NO: 68433 - protein, 343 aa, unidentified
MYTIGGDIHLRTSTFCVLDAQGNKVARKKLENDPDDILAFIRDVPSPKQVSVEATYNWQVFYDLLQGEVDSFVLLHPKKLRQIVESQSKNDNKDSELLAELTWRGRVPQAYTSNAETRQFRRLLQARVKTSQQIASIKNRIHAYINATVWYSQRPKNFKDLFCKRGIEYLRTVKLPDNERFIIDTLLKQIEELEKTKRAFDEYIEQVDYHSTDIALLSTVPGLKRGKLLKYIIGSEIDQIARFRNARALIAYAGLVPKERSSGDKLRYGKLRTECNTFLRWAIIEACLGAILADKGLKAYYKEVKLRSNASNAKVACARKLLTAIYHVIKEQRPYFNFSDNHR

SEQ ID NO: 68434 - protein, 354 aa, unidentified
MSYTTILAIDLGKFKSVLCIMDVASRTHRFATIESTPQSIGEAVKQHLSTDPAQTQVVFETCDSCGWVHDSIVDLGVAIVIVNANDERWRWQRVKRKTDQDDALKLARLALLDQLPTVHLPDPRQRQRRRLMIHRRSIVSRRTQCRNAIRSIFSQQGLTLAKGQKQWTVAGVQQLQGYAASIDTCCIDDLWKGRLNSELLLMTSINTQLKALDAKLDELADGRMKLLQTLKGVGPRTAEAVVLYIDDPTRFKSGAELASYAGLVPKQLQSGEMNRLGHITHRGPGLLRSLLVEAAWTIYRHNPWAQAFVNKISHGSKSRRKLAIVALAKKVLIILWGMLKSNQPFRSPAAAAAG

SEQ ID NO: 68435 - protein, 370 aa, unidentified
MTLIRKEPSMTTTYYIGADVHSNTTELAIEKSKKIVARYSVPTTIPAISNVLDSLQGKRLLVFEEGPMAGWLYRNLNEKVDELIVCDPRRNNLISSDGDSDDKIDAAKLALLLRGGYLRAVYHSDNDERAELKHWVNLYHDRVRDAVRNINKIRARCRMFGLSIPRAVLRNPAHRLKWLLQINHPVLARQLKMLWIGYDATAKQARIGKRQLSVLGKEHDIIKLWGRLPGIGLIRATTLFAYLDTPWRFKRKNKLWKYCGVGLQRAASGTDKKGRPKPARLQLPWAVNRTLKNAVLGAAISAINQKDNPFKDYYERMVQNGVITSNARHAVARKMLTAMWGMWKTSSQFDGKLLCLLSGHNRPTGSVSSR

SEQ ID NO: 68436 - protein, 341 aa, unidentified
MKTFIRIGVDLAKNFFQVHAIEREGAVAVTRKLTRTKFRDFFRGMTACRVGMEACGSAHYWARELKAMGHDVVLMPPAYTKPYVKRGKNDAADAAAICEAMSRPEMRFVPVKSAAQQSVLMLHKTRDLLVKQRTMNVNALRGHLAEFGLIAAKGIHRLEELLALARAQGALPSEAREALEMLALQIEQLDASIDGLAKSIGKTNAKNPTSRLLMEVPSIGPLIASAMTASYPDSSVFKSGRDFSASLGITPSQHSSGGKEKLGAITKKGNRYLRKMLVVGCTSVLRVAAKHKGGLADWIAAMRKTKPERVVAVALANKIARICWAIMTTGEGFREELFAKA

SEQ ID NO: 68437 - protein, 350 aa, unidentified
MKTHVGVDLHQRFCYVTAVSARGKVLRHGQVLNEASALRGWLQKLSGERQVVVEASGFWPAFERAVRGHAERVVMVHPQRVKAIASAKLKNDRVDSATLAHLSRADLLPEAWMADEATQQLRLRVRLRIALGRQRARAKNQLQSVLHQEGFKKPVTDLFGTRGRAWLRQIELSPAGRMVVDTWLREVDHLDAEIGAQTKALEQMARQDVGARCLQTVPGIGAYGAMVILAELGDVNRFQNKRALASYAGLVPVVRESAGKQKRGGITHQGSNTLRWMMLQAAQVAARSSPAVRAWYAGMRRRKPAQVAKVALARKLLTAIWALLRHGVCFDEQAFAQETKSKATMGIAIG

SEQ ID NO: 68438 - protein, 407 aa, unidentified
MFVGIDVAKDSLVACAMDNQGEDVFHSYSVENNRPGCLKLINLIADNANLLQPDIIKIGMEATNVFWEHCYRLIKNHEKLNSNFNLQIYTVNPKVVSNFKKAYTDIPKNDSVDAWVIADRIRFGRVGNSSSPEALYRALRQITRHKFKLAQHIKAEKSRALNLVFLKFSDFTQKSPFGAFTKASMALLENYTLREIVDTDIHELAEFLHQNSNNRLGGSTPIEKIITALKKAARNSYRLKPEIDQAITQTLSMTFDNIRFYQSQSKRLKRVLKRQLKAIPQTLITVDGIGPVLTAGIISEIGDIHRFDKETNLASYAGLTWSQYQSGSFNAEETHLTKKGNKYLRYYLVEAANSLRVHNDRYKSYYYKKYNEVPKHKHKRALVLTARKFVRLVFALLSKGEIYQPRR

SEQ ID NO: 68439 - protein, 362 aa, unidentified
MRIIGCDLHARQQTLAMLDTATGEIVNLALKHEGDNVREFYSKLPHPVRVGIEATGSMQWFVNLMEELGIECRVGHPAEIRAAEPRKQKHDRRDADLILKLLVENRFPAIWLPSKELQDLRALLRHRHQWVRMRTRIQNALQAIALANGLRRGTALWSHDGQNRIASLPLAPHTAYRRSELQAMYAKFEAEIEKLNQRVEEQACGRVGARLLMTYPGVGPVTALATEVFLGNPARFADSKALASYVGMIPREYSSGERQRLGGLSKQGNPLLRFLWGEAGAHAVRRDPELKRFYRRKLVQKGFGKASVAVARKLGIRLWIMLRDQIEYNEFCRRGQKQQKRSDACAGMPETPNGAKSHRPVD

SEQ ID NO: 68440 - protein, 340 aa, unidentified
MDYYAGIDVSLECSSVCVVDSTGKIVREAKVQSEPEALIDWLKGLGLDLARIGLEAGPLSQWLYAAMRKVSLAVELLETRHVRDAFKSMPVKSDRNDARGIAQLMRLGWFRPVHCKSLDAQEVRAVLTARKLLQSKMLDLEMSLRGMLRNFGLKVGPTTPTRFARRIEDLVNGHATLETIAKALLAVHAALLHELNGFEKRVRGMARSDARVRLLLSAPGVGAIVAMTFVAAIDDPTRFKSSKGVGAHFGLTPKKHQSGEKDVTGRISKLGDGSVRAALYQAAHIILTMPVKGSGLKSWAAKLARRAGMKKAKVALARKLAVVLHRMWIDNSPFRPAAAA

SEQ ID NO: 68441 - protein, 332 aa, unidentified
MSDGICFVGLDVHARKTAAAAVLLGSGEVFRAQLSGSSSAAIEWLQTLPGPVRAVYEAGPTGFGLARAARVAGIEMMVCSPGAIPKQPGDHTKTDQRDALKLARLLAAGQLRPVVVPEPAFEALRDLVRCREDLRGDLMACRHRISKLLLRRDVVWNGPGATWSVRHLKWLSAIRFEDPIVEMVFGEHLAHRETLLARRDRLDGLLADRAAQGPWATTVARLRCLRGVDTLTAVGLVAEIGDISAFEHPRRLTSYLGLVPSEQTSGTKRRQGSITKAGSSHARRLMIEAAWHHRRPPRISMTLRRRQAGQPTAAIDAAWRAQLAPAPSLGTP

SEQ ID NO: 68442 - protein, 449 aa, unidentified
MNRTAVGVDIAKNVFQVHYIDQETGEIVNKPIKRAKFLEHFANRAPCLIGIEACGGAHHWARQLTKMGHEVKLMPGEFVKAFNVRNKSDAADARAIWLAVQQPGKPVAVKTEMQQAMLGLHRMRQQLLKFRTMQTNSLRELLTEYGEVMSKGRSKLDKEIPVVLERLAERLPAVIIDRFREQWNGLAKLDEQVAQIERRMREWKKEDKSVKAIGDIPGVGLLTATAAVAMMGDPKAFSSAREFAAWVGIVPRQTGSGGKVNLHGISKRGDTYQRTLTGRWRSVSRRQLRYHRLVCESEISSSNPPVLSGAWRVSLCLRGAGYIQRWSRSAVPRLDVQDDPCDRVGLCGLWSELDLGERDDAESDDHKRSGRGDAGKVFHRDLILMANQEPAKLTGVSNHLQRHVCPQPGNAGHGRQIAFADRTGFVQCTINGLFACAVRHPVASGFLIA

SEQ ID NO: 68443 - protein, 415 aa, unidentified
MLFIGDDWAEGHHDVVAQDDAGKTLARRRLPEGADGIARFHEMVASCLGEDAEPDPARVIVVIETDRGPWVKALAAAGYRVYPANPGQAARHKETVANSGKKDDFFDAGCLADMGRTRRHQMRELAADSDVAEAVKIAARAHQKLVWERTRHLLRMRSALREYFPAALEAYADLTLAGKDALELLAKAPDPESAARLTVTQITAALKRAGRRGDLAQRARDIQAALRAPHLAQPDVIAEAYAASVQAAAAVITALNEQVKIMEAKVSGLFRRHPDVGLYLSQPGIGDITGARILGEFGDAPGRYASAKARRNYAGTSPLTIQSGKKKSVHARYIRNRHLIDALHAQALSALSVSPGARSYYDDLRAREIGHDDAMRRVASRLTGILHGCLKTGREYDEATAWSHRAETPEAVEAA

SEQ ID NO: 68444 - protein, 448 aa, unidentified
MSKSKTKKEKVKRISQLTVINPTAAGIDVSDTEMMVAYPISPEQLEIRVFGCFTRDLHSIAKCLKENGTTTIAMESTGVYWIPLFLILQEYGFEVYLVNAKHVKNVTGRKDDESDAEWIQKLHSCGLLNASFQPDNMERTLRSMVRHRKNLVRTSSTYLNRIQKALELMNIKLHTIISDIDGKTGLLILESILAGERDPEVLADLRDKRIKASREDIIKSLEGHWTEEHLFELRQCYQLYCTHRQMIEECDKEIEKQLIAQIASKNEGLIPDIPKVKRKATAKHKVPFNLTAYLKEILGVDVTEVCGISEISALTILSEVGKDMSKWKNEHHFTSWLGLAPNTKISGGKVISSKIMKKKHYAGQAFRMAANGLYKSKSPLGDYFRRIRAKAGAPKAIVAAARKLAIIYYKMVTNKEAFNPKALDDYRKKYNEKKINQLKKKIALLEAA

SEQ ID NO: 68445 - protein, 341 aa, unidentified
MKLIRVGVDLAKNVFQLHGVVHSEKTVWRRKLVRGDWIEALLKRIEPGCEIGMEACSGAHHWARLLQAKGYTVKLIAPQFVKPYVKSNKNDANDAEAICEAMSRPSMRFVAVKTVEQQDIQAVHRVGSGLMDQRKAKANQLRGLTSEYGLVAPKELLHLRSAIPRWLEDQENGLSERFRRLLRGLWRDLLAFDERIEELDREIEQIARQDPVAVRLQQVRGIGPLTATALLATVGDASQFSNGREMAASFGLTPKQNSSGGKERLLGISKRGDAYLRSLLVHGARAVIRTAQAKTDRLSIWVMRIAMTRHPNIAAVALANKTARVAWAMLTRGTDYQPQAA

SEQ ID NO: 68446 - protein, 336 aa, unidentified
MDVPKKSWTAHFKTDLFDNKTVTMPAESESLINYVEKNFAGHAVSCCYEAGCCGYWIARSLQQRGWEVKVVNPADVPRRNKQDWQKTDRIDSRNLCKHLSDGNLKGIYVPGEEQEQLRALFRRRVHLARNLRSIKNHIKSQLLYFGIKLPAQYDNPNWSREMKTWIANIKWKYNSAAESMKSRLKQLEFMWYEELHISNELRAYCRKHYKKDYYLYKSVPGIGGITAAAIIAELGDIRRFNRLDELAAIVGLVPGIYQSSENKINLGMTQRSNHQLRSLLIEASWVAVRDDLGLQQYYRKHSHKEPNKAIIKVAHKLLSRIRAVIHSDIPYQKGLL

SEQ ID NO: 68447 - protein, 387 aa, unidentified
MPHPNDLSRSLVALEQDATLIAVIEMGQASWLIAGIVPGLERQPLKKLAADPDTLLQLLHRWRNEAMQAGRSIKRIALAYEAGRDGFWLARWLRTHEIEAHVIHPASVPVSREHRRAKTDRLDAELLKRAFLGWLRGEPKHCTMAAIPTLEDEDARRPSRERESLVGECTRIVNRVKATRARLGIRGFRLTLARASEHLKSLRTPEGAAVPQHTLAELRRDLARLSFVKQQIKEIEASRTERLEATPGEGRNAMVHLLARVVGVGVETADMLVQEVFSRTLRDRKALARYAGLTGAPDESGRKRRERGLAKAGNARVRRGMIQLAWGHLLHQKGSPLAEWYRRRTADARGGTRKTMVVALARKLLIVLWRLATTGEAPAGLRLRPAA

SEQ ID NO: 68448 - protein, 353 aa, unidentified
MDILYERCCGLDIHKRTVVACLIVPSPAGRPRKEIRTFGTMTADLLQLSDWLTSESVTHVAMEATGVYWQPVWNVLEGSFTLLLAKARHIQAVPGRKTDVRDGEWIADLLRHGLLRPSFVPDRPQRELRELTRYRTALIRERSAEVNRRQKTLEGANLKLAAVATDLRGRSGQAILAALVAGQTEPTALAELVKRRLRAKLSELERALAGQFDGHQRFLVAQQVAHLASWAGMCPGNHESAGKRQSGRTRKGNAWLRSALTEAGQAAGRTKHTYLGAQYRRLAARRGKKKATIAVGHTILIIAYHLLTEHTTYQDLGVDYLEQRHRHAVERRLVRRLEALGNKVTLEPIDPAA

SEQ ID NO: 68449 - protein, 361 aa, unidentified
MSESMALVGLDVHKSRTVAAVLDPATGELRMERLRGEPERVVPVFLEELDRPVAAVYEAGPTGFVLVREADRRGLDVRVVAPGSIPRAPGDRVKTDRRDAKRLVRLFAAGELRFAFVPSEPDERFRDLVRCLDDVRRDLMRARHRLSKFLLRRGVRFSGKTWTQQHERWLCTLAFEDPLSQAVFVDYLSAVQGLAQRRKTLIGVLEAAVPHSSHAETIGRLRCFRSIDTLTAAGLCAEVGDFTRFRTPALLSGFLGIVPSEYTSDEKRTHGQITKAGPANARRLLVEAAHNYRHRPRVGENLKARQSGQDPRVVEIAWRCQRRLHGRWMHLAAKRGKPTGTVAIAVARELAAFCWEAATLD

SEQ ID NO: 68450 - protein, 341 aa, unidentified
MTTIDAEKPDTKVEVILGVDTHLDFHVAVAVDHLGRRLGELSVPTTTKGYERLLCWAEGFGPVRCAGIEGTSSYGAGLARYLKTSGTEVLEVERPKRPQRSSRRHLKKSDPSDAERAARAVLAGEPSGAPKSGKGRVEMIRTLRAARRSAMKARTQAANQLQSLRLTAPEELLNRLRALSTKELVSVAARFRPGDDPNDVPTATKFALRSVARRYEALSAEIAELDAQLDRLVTQVAPELVCLPGIGTDHAATLLIVAGDNPQRLRSEASFASLCGVSPIEASSGKVVRHRLNRGGNREANRALYMTCLARMRRDRRTQEYVARRTQEGKSKREIIRCLKL

SEQ ID NO: 68451 - protein, 336 aa, unidentified
MTKYIGLDAHSSTCTFNVTDERGREIDNTTLETNGRLLVKYLRGIGGVKKLTFEECELSNWLYEILNPEVDELVVCNPVANKDYKKIKTDKMDARKLAKLLRGGFLIPVYHNGSSRERFRSVMSAYQDLVEESVRLKNRYKSLFRKEGKKAKGESLYHDESFLEGLERGDFQFIGRHIYDLLEKMEQGRKEYIKEIIKYSKKFKEIKYLKSIPGIGPIQAARIASQVIDPKRFADKYKYYSYCGLVRHKRISDGKEYGSCKIWGNRILKSVYKTAGLSVLQGSSGLRKYYDCLRSKGISHDNAYNAVCRKIAAISLSVWRKSERYNDEIITGNLTK

SEQ ID NO: 68452 - protein, 389 aa, unidentified
MMFPDRWGDWGLTRMIRVAAPLGMIGRGPVCIGHKHRGEAAVGYFAGLDVSLEETAICIVDDEGRILREARVASERYALVAFFNALGMTMERVGLEACSLTAWLHQGLSEAGIPAVCIDARQAKAAIGAMPNKTDRNDARGLAQIMRTGWYRAVHVKSPSCRSWRALLTARRMLLNKRRDIENGVRALLREAGLKVGAPSRKDFPARVRELASGDAVLTGLVESLLSVIKVTTDEVARLTKRVLDEVRVEPTCRHLMTVPGVGPLTALAFRATVDRPDRFRKSRDVGAHLGLTPRRYQSGETDVQGRISRCGDELARTALYEAAHSLLIRSRKWSALRAWGMQVAKRRGIARARVAVARKLAVILHRMWVDKSEFRWGKQAATAAKAAR

SEQ ID NO: 68453 - protein, 402 aa, unidentified
MNCVGIDVSKGKSTIAVMRPFGEVVVSPFEVCHTASELSELARLLKSLDGETRVVMESTGNYHAPVAWLLHGVGLYVSVVNAMLVHDYGNNSLRRAKTDKKDAVKLANYGLDHWLTLPRYVPEEDARLMLKTCYRQYQQYSKVQTMLKNNLISLLDTAFPDANRLFTSPPRADGSEKWVDFVAAFWHCECVCGLSKKAFTTKYQKWCRKHGYNFSEDKALDIYVSACGRFGVMPKTKTAKLLVEQAISQLRATSAALAALKQEMQSLAASLPEYPVVMEMFGVGPTLGPQLMAEIGDVRRFHSKKALVAFAGIDAPPYQSGQMDVRSRSISKRGSASLRRTLFLVMGVLLQCAPMDEPVYQFMNKKRSEGKPYRVYMMASANKFLRIYYASVKTYLDSLEHD

SEQ ID NO: 68454 - protein, 411 aa, unidentified
MKRFAGVDIGSERHVVAVVDEHGAVLLKPTPFGEEAAGYRRLAELLGSPQGCLVAMEATGHYWRNLFAYLVAESFTVALLNPVRTRRFAEEELERTKTDAVDALGIARFAAQKGPPANPPVEEGLDELREVVRLRERLLQDLGDRMRQLHRALDLSFPEFTRYVRRLDSELATTILARYPTASALRNVSVKRLAGLRYDGRHRVGDDLAHALLDAARISVGSHQSEPYRLRISYACEDIVMLRCRLHELGADIERRLEQHQVGKLLTTIEGIGPQTAACIIAELGDPARFGSVKALASYVGAIPRLHQSGKRRLSGRRMLPLGNARLRRALWMPTLSAIRVNPWLRAYYLRLRGAGKRPKVALIAAMHKLLAAIFSVARRRQPFVASLVSPPATVVAGGAVVDPAVALTAL

SEQ ID NO: 68455 - protein, 400 aa, unidentified
MLLFFEVITMIFVGIDVAKDTHYAAVSDDSGAVLVKPFAFQNNAEGFCLLLKKLSEFDRSKLLIGLESTGIYSENLICFLYESGFRLAVINPIQTATLRKTAIRKTKTDKVDTMLIIKSLMVNSYRLYSQRDADSLKLRTLCRFRQNLKKSKARLKIQLAGYVNLVFPEFGKFFKSGIHIAASYALLKKHSSPKEIAALRTSTLCTLLSKASHGRFGKDTAEALKSLALSSVGVKNPYISIQIAQTIAQIELLEQQIKDLNSAIEEAMESINSVLMTVPGIGAVNAACILGEIGDIKRFSKPCKLLAYAGLDPTVRQSGQFTAKSTRMSKRGSALLRFALINSAWQLTLNDTTFKAYYDLKRSQGLNHYGALGHVAHKLTRVIFKLLTSDTPFNPAKLVA

SEQ ID NO: 68456 - protein, 340 aa, unidentified
MNQVVTVGLDIAKSVFQVHGVDAEGVVVIRQKLTRARLLKFFGKLDPCLVGVEACGTSHHWARELIGLGHDVRLMPPSYVKPYVKRQKNDMADAEAICEAVTRPTMRFVPVKSRDQQSVMVLHRTRLILTRQRTQISNAIRGHMAEFGLAAAVGRQGLERLIEVIADAADERVPPEARVCLRMLVVQLGLVNEQILETDRLIRTNARSTEIGRRLMEIPGVGPLLASALVATVADPKAFQSGRNLAAWIGLVPRQNSSGGKERLGGITKQGDRYLRQMLVVGALAVVRYAQRNGTRRPWLVQLLARRTPKVAAVALANKNARMIWAIMNSGERYREPLAA

SEQ ID NO: 68457 - protein, 351 aa, unidentified
MPRASTVHAVIAIGIDMGKNTLHMVGLDSCGAIVLREKVSRGRIASRLVNLPPCLIGIEAGMATHYVARELAALGHDVKQVPATYAKPFRQGHKNDFRDAHAVAEAVQRPTTRFVPAKTDEQLDLQALHRVRSRLVSERTAVINQIRGFLLERGIIVRQGLRFLRQLLPDILPKRADVLSPRMVRIVAELAGDWRRLDERIETVTDEIEALAKSDDSCRRVMTVPGIGPIISSAMVAAIGNGVAFARGRDFSAWLGLVPKQMSTGDRTILGRISKRGNGYLRMLFMQAARVILLRPANWPKHGFGAWLARAAQRLHPNVLAAALANKLARIAWTVLAQERSYETRVTKTAA

SEQ ID NO: 68458 - protein, 403 aa, unidentified
MNSVGIDISKGRSTVAVMRPFGEVVISPFEVRHTDSELSELARQLKSLDGETRVVMEATGNYHTPVAKLLHDAGLYVSVVNAKLVHGYGNNELRRVKTDRKDAVKLANYGLDRWLTLPRYVPEENTRLLLKNCYRQYRQYSKVQTVLKNNLISLLDTVFPNVNRLFSSPAREDGSEKWVDFVAEFWHCRCVSEKSEKAFANKYQRWCRKYGYNFNEAKAHTIHAEASGHIGVMPMSETTKLLVEQAVAQLRATSTALAALKHEMQALTSMLPEYPVVMDMFGVGPTLGPQLIAEIGDVRRFYSKKALVAYAGLDAPPNDSGDVTGRHKSMSKIGASSLRRTLFLVMSVYLQTAPLDEPVYQFMDRKRAEGKPYRVYMMASANKFLRIYYATVKAYLESLEHTA

SEQ ID NO: 68459 - protein, 365 aa, unidentified
MNKCHLNTELSSHEGTRCQFNGGTGAIELGIDVHQDFYVVVMQEGGANPKPPQRFWKQAFLHWVAKLARSGSEVHAVYEACGFGFTLQRQLSALSIRCYVVCPQKLDEQNRRVKTDGLDAKALVLKLDRFVEGNRSALALVRVPTQEEEQKRAIHRQREQLVKVRKQLEAQGRSLMVNHGFEPVKSWWKQRTFAALQLPAWMKELLLANTQPLLLALQEKIGALTVQLQSAADPKQPRGLGLMTSVIIDREIGDWNRFNNRRQIASYTGLCPGEYSSGNTRLQSCVTKHGNPRLRAALVELAWRLVRFQPNYKPIFKWRRLLAKGAFATGAARKKAIVAVARQLAVDLWRVRTGRCKAQALGLFI

SEQ ID NO: 68460 - protein, 309 aa, unidentified
MSSWVGIDVSKNTLAVWVRPSGVNFIVCNSSEGHQALLLNLADIQVERVLLEATGGYERAVMGCLVQAGHSVVRINPRRARAFAQAMGKLVKTDPVDACVLAHLAQVIEPSACQPVSLARDELQELVRRREQVVKLRDDERRRLTLARSGVVQESLQTNISQLNEQIARLNSAIEAAAHRTDNQLVKQLSAIAGIGPVTVASLLAYLPELGQLNRRQIAALAGLAPYNNDSGQHSGKRCIKGGRASIRRVLYMATWSVIRCHSSFGTRYASLRARGKCAKVALVACMRVLLIRLNAMVRDHSSWRAEAV

SEQ ID NO: 68461 - protein, 345 aa, unidentified
MYNMLTGVDLAKKEIQVCVAKSNKIVRNMPMTPTAFSNWLATQKPMTVVFEACATSNYWYQCAREYGHDARLISAKLVSNIRQNQKTDKNDAEAVLQASQLSNVNFISGKSKEQQELQSLVRMHQLSVKHKVAYGNQLCSLLLEFNIKLSPTDAGLNSAIQSILEDAENGFSAIFREALHTAWHQYLKSIELVKHYEKSVARASRASEACKNLMKIEGVGPTNAVNLYLALGCCELGVFKKARDAAACIGLTPIQHSSGGKVRLGSIGKNIRNSSLRANLVAGAMSAVNQAVKRDSRTKKDEWIKGLVERRGKRCAAVALANKTVRTAFSLRRNGTDYKAELLSA

SEQ ID NO: 68462 - protein, 396 aa, unidentified
MKNVYASVKAVGVDVHYKFSTVTMRNGEGKVVRRERLEHGDRAALRGKLSRWSKEAPIVMEASFGWAWLADVMLELGLDPQLANCYKLEQMRKARGLAKTNKKDADLLALLPSEREEWWRVWMSPPEVRDRREWMRYRSSLVRIQTATKNRLSALLHRHGILHEFSDLFGVQGRQFLAELQRQGGTKEASLPGGARRALGGLLELLGQVRGQLARVAQELRGQLERSEVARGLDGIPGIGLILAHTLLAEIGRIERFRNHRALASYSLLGPIARDTGEEEGGTPVGRHLGHRGNRTLQWAFIEAAHGAVRRGGKWRRCFDSVTEGGTRDRNRGYIKVARELVKVVYVVWSKRVDYTDNPPPRARRAPQSPRKRMKKFLSSTRSGTGQPCRPMAVVR

SEQ ID NO: 68463 - protein, 340 aa, unidentified
MSTINIIGIDIGKSTFHLVGHDSSGREVFRKKLSRTKLILFLANTERTTVAMESCGGSHWLARKCQEFGHKALLIPPQYVKPYVKTNKNDFIDADAIAEAATRPSMRFVSIKTESSQVISVIQRLRSSYLKDRTACMSRIGSILLEFDMSFPKSHAKMKAIFQWIAEHGEPIPPMLLLELRDHHDYYLKLNQLILTQDKKLKDIVDHDERAQLLKTIPGVGNLTASRCLSDISNAADFKNGRHLAAWIGLVPRQFSTGGKPRLLGISKRGNKGLRELFIHGARAVLVRPEKAIAIFGNWILELLSRKPYNVVVVALANKLARITWSVLSTKQAFEVRVQT

SEQ ID NO: 68464 - protein, 422 aa, unidentified
MLEETHDNDQIIQRVAALDVGKAELTCCIRVPGPGKSGKRLQEVTTYQTMTRWLLVMADRLAELGVTRVVMEATSDYWRGVFYLLEAHGFQTWLVNARDVKHLPGRPKTDTLDAVWLCKLAERQLLRPSFVPPQPIRQLRDVTRYRADLVAARTAEKQRVEKLLEDAQIKLSVVASDIFGVSGRAMLAALIAGERDPKVLAQLARTRLRAKLGPLVEAFTGFFTDQHAFLLAKMLARVDALDADLAELDAKLAELIAPLAGAVERLDEIPGVGQTAARLLIAEIGADMTRFPTAGHLVSWAKFAPGVKESAGKRKGSGSTGHGNPYLARVLGEAAVAASKTDTFLGERYRRIARRRGAKRAIVAVGRSILVIVWHLLADPTARFQDLGAGFYDTRINAERAKRNHIRQLEALGYKVTLQPAA

SEQ ID NO: 68465 - protein, 332 aa, unidentified
MSAVVCGLDVHKETSYATVLDRDGQVLVQRKMTNEDIPAFLEMTRPDKLAMEASTYVIPLYRKLTEQGYDVTVSHPRKTRLIAEARIKSDRVDSRALAELLRLDSLPTSYIPPKDIAVIREKVRRRAFMVRQVTKLKVKIRDVLAAEGVKPPEGFGLFTAKGTEWLRSLGLEPVDCYLRLIEPLKEEVKLVSRDLKKQAGKDAEVQLLMTIPGVGYYVALLVKSEIGDVRRFSSGDHLASYAGLVPSTRSSGGVERHGGITREGSRWLRWAMVEAAMVHIRYDTPVTRFYHGVAERRGKRAALVAAGRKLMEVCYSVLVHGRPYWNPLDAQA

SEQ ID NO: 68466 - protein, 458 aa, unidentified
MQTCPPGTVAGFASVSGSSAHELVERRDEVPTRPAVRQGPGCQGAPLVPHNTSTSASEVFAGIDWGGSFHQVCLINAHGDVIVQQRVQHDLAGLAELDRLLLVHRNAASRLRVAIERADGLLVEHLHKVEVEVFCVSPKISARARERYRLAATKSDAFDAFVLADTLRHEHRHWRALSPASPALAELRAISRDRDRVVIAQQATENRLRAVLEAYHPAPLHLFSSLDRDITLDFVTDYPTPEQAARVGEARMQQFCRRHGYSGRTDPTVLVERLRPHLLSAAEGTEAGKAFSATMFTEELRLLNAHLRAYDKRLVELLDQHPDTPIFTSFPGIGPVVAAALISEMGEDRGRFPAPEALLAEAGLSPVTRASGRTRQVRFRYAANRRMRHMIDWWAFVAAREDAWSRRIYDDARARRQGKYRALRGLGSRWTRILWRCWTDHTTYDPAIHHKQQEPAQA

SEQ ID NO: 68467 - protein, 367 aa, unidentified
MGDHSAFVGLDVHKDTIAVAVAEAGRSGEVRFLGEIRNDTAAVVRLTRKIARAYPHTLYAYEAGGCGYGLHRQLAGLGHECVVAAPSKIPRMVNDRVKNDRRDAVSLARLLRADELSPVWVPDEGHEAMRDLVRARHAAAEDLRKVRQRIQSFLLRHERHYQGSPWKKMHAVWLGRQQFEHPAQQIAFQGYLSSAAHALARRDELEAQIRELLPNWSLRPVVDALQSLRGIALITAVTLVAEIGDIRRFRKPGELMAYLGLIPGERSSGPTIRRGSITKAGNSFARRMLVESAWSYRRPARIGVEMGARMPQVADPVREIAWKAQVRLCGRFRRLAARGKKSQVVVTAIARELVGFIWAVSQAATAG

SEQ ID NO: 68468 - protein, 389 aa, unidentified
MKIFVGIDIAKLNHFAAAISSDGEILIEPFKFTNDADGFQLLVSKLESFDKNSIIIGLESTAHYGDNLVRYLVAEFYQGCVLNPIKTCQMRKNNVRKTKTDKVDTFVIAKTLMMQDDLRFITFFDLDMMDLKALGRFRQKTIKQRTRLKIQLTTYVDQVFPEIQYFFKSGLHQHAVYALLKEAPSPKEIASMHMTHLANLLKVNSHGHFTKEQAKELRVLAQKSVGANDSAISIQITQTIQQIELLDSQLEKIEAEMTDIMRFNDSVIMTIPGIGYINGGMILGEIGDIHRFSNPNKLLAFAGLDPSVYQSGNFQAKTTRMSKRGSRVLRYALVNAAWNVVRNNATFEAYYNAKRAEGRSHYNALGHCAGKLVRVIWKMPTDEVDFNLE

SEQ ID NO: 68469 - protein, 357 aa, unidentified
MAEGSWVGLDVHARTTLAGVLGAASGELSLQRVQPRSEETIAWLLSLAQPVRVAYEAGPTGYGLARACARAGIACTVAAPSKIPRAPGDRVKTDRRDAERLARLLRLGELVAVRVPDPVGEAARDLVRAREDARGDLMRARHRLSKLLLRHGLVYEGSAWTRAHDTWLRRQRFAGRVLALAFDESYGAVAQAKGRRDALDQAIVELAGEPPFCEVVGRLCCLRGVSTLSALALSVELGEWERFRAESLGPFLGLVPSEDSSGERRRQGAITKTGNTHARRLLVEAAWHQRRPLRTSAALERRRQGQPAPVRARADESARRLHQRWHALEGRGKRRTIVAVAVARELAGHCWALATMK

SEQ ID NO: 68470 - protein, 370 aa, unidentified
MFVGVDTHKKTHVLVALDSEGRTHGSRTVDNTPEGWAAALQWVRGQQQQQVRWGVENSGSLGKGFAQFLLAQGEADVREVVPHRTAQYRRRGRSQDKTDVADGLAMARLLRAEGEGQPLVQADDASTELRLLSDHRDNLVVDRTRLTNQLHAQMLQLDPCYVERSGPLTRAAGVRYCQDLQLPEGDGVVQTRLLVVRQLAARIAHLDAAIKEVTAVIQRRVAATETRLTELPGVGAVVAARLLGELGCIPRVRSAAALAALAGVAPLAVASGGRHGHRVNPGGNRKLNRALHIVAEGKTGRAAMRCLKRRLADVLYRLLQPGRFARPVPAAAAAACAAHRVRAVGVLPRAPGDARGQGVSGTNRFSAWRA

SEQ ID NO: 68471 - protein, 341 aa, unidentified
MEEYIGLDVSMKETAVSIRRAGERIWRGKCASDPSVIAALIRKRAPAVKRVVFETGPLSVWFYHSLRTEGLPAICVDARHAKAALDMAANKTDANDADGLAQLAEVGFFREVRVKGFNSMLTRTLVAARTRLVRITTELSNQIRGVMKTFGLLVPAGKGSTFEKNVRNLLADQDGLASIVLPMLEAWRGIRIRAAELGRQLVRDARESQACRILMSIPGIGAITATSFATAIEEPDNFRKSRSVGAWIGLTTRRYQSGEVDYDGHISRRGDRHLRGLLYEAAAVILTRSSTDSALRTWGRQLRERIGFKRAAVAVARKLAVIMHTMLKTGELFNPNAGAAA

SEQ ID NO: 68472 - protein, 337 aa, unidentified
MYYTGIDLHRKTSFLTTVDSKGQIVKKANLENDEARILEYFLSLDDDTQVVIESTATWYWLYDLLTAHSIPVVVSNPVKTKAIASARIKNDKLDSHMLAQLLRADLLATVHVSSPQTRQLKELLRHRHKLVRDCVRMKNRIHNIMAKNNLRVPVSDLFGKKGLQFLSQAQLPHYQRHQVDTYLKLYHQLKEHTDDLTKQIRQTAASDPRAQLLMTIPGVGAITAMFIAAEIEDISRFKSYRHLSSYAGLVPRLDASADKQRMGRITKQGSPYLRTALVEAAQATTRTKSRLNIYFRKRIVRSGYQKAIVATAHKIIQYAYYILRDQKPYRDGIDALA

SEQ ID NO: 68473 - protein, 356 aa, unidentified
MKKTRTVKRATATIGLDLGDRFGHYCVLDGDGEIVCEKRVRMTRQAVTEVFTEYRGARIAIETGTHALWISELLCSLGLEVIVANAREVSAISGSDRKKDRHDAFKLAMYARADVRILRPVKLRASEVQADLVLIRARAALVESRTQLVNTARGLVKGFGYRLPDCTTTAFSNKALPQLPAVLQDQLIPLLAVIDTVNLEIQSYDRAIELMARQRYPETGFLQQVNGVGPLTALTFVLTVGDPERFASSRDVGCYVGLRPRHSQSGEYDPELGITKAGDTYLRKLLVQCSHHVLGQWGQDSALKRWGLKLVQKGGKNAKKRAVVAVARKLSVLLHKLWSTKAIYQPFFGMSEPVTA

SEQ ID NO: 68474 - protein, 370 aa, unidentified
MSSVARPAGPVHVGMDTSKNTIMAAVLWPGEESPVTERILSEEPSVRRLLDRLAGKAGGREWLRCCYEAGPGGYDLYRLLDSMGIACDVVAPSLIPKGSGDRVKTDKRDSRRLARLHRAGELTAVRVPSRDEEAVRDLARARTALLEDRKTAQKRLTAILMRHGRTWRGPTYWTRAHRDWIAAQKFAEPALASAVSCYRAALQTRETELAAIEAELLPWVSREPLAGPAARLMCYRGIAELTALTLAAEVVDWRRFPAARAFMGFTGLCPAEASSGDTARRGHITKAGPQTVRTALVESALAYRHPAAIGAVLRRRQRDASPDTLARSWKAQRRLHDRYVHLVSQGKTPPEAVTAVARELAGFTWAEMTS

SEQ ID NO: 68475 - protein, 377 aa, unidentified
MKRIKFVGLDVHAETITVAVAEQEGEVRALGVIPNRVESIRKLVKKLGPVGQLRFCYEAGPTGYAVYWQLTALGAKCEVIAPTLVPVKTGDRVKTDRRDSLKLARNYRAGELTSVWVPDAAHEALRDLVRAREVAKKDQLRARHRLIKYLLRHGRRPPTGVKPWTLNYLSWVKHEVHFEPMAQEATLLDYLNEVEHAELRIARLNLAIEEAVKLTPPKMRAVIEALQALRGVAQVTAVTIVAEVGEVSRFTGARQLMGYGGIVASEHSSGESTWRGGITKTGNAHLRRVVVEAAWAYRHRPSVGETLRKRQAVVSEEIREIAWKAQHRLHTRYQKLMARGKEKEKVVTAIGRELLGFIWAIGVKAEAAQEKTERRAA

SEQ ID NO: 68476 - protein, 457 aa, unidentified
MNPKRSKPKNDRTMPMIHPNAAAIDIGATMHRAAVRADRTPEPIRSFGTFTTDLHRLVDWFTECGVETVVMESTSVYWIPIFELLDARGFAVFVVNARDAKHVPGRKTDVSDAQWLQRLHSYGLLRASFRPKGQIAELRAYVRQRERLLEYAASHIQHMQKALTEMNLQLHHVVADVTGATGLRIIRAILAGERDSKVLACLRDYRCHSSAEAIEKALTGNYRAEHLFALELALALYNIYQDKASACDARIEAVLKELSISRGRDACPLPSPRRRLHGKANGPDFDVRAALFKLLGKDLTQIDGLGSYLSLRLIAECGDDLSAWPSAKHFTSWLCLAPSNKISGGKVLSSRTRRSGSRASALLRLAAVTVGRTDTALGAFYRRLSARIGKAKAITATARKIAVLFYSAVRHGMEYVDPGSSYYETRYRTRVVENLHRRAKAFGFVLLPLESKAGAVS

SEQ ID NO: 68477 - protein, 343 aa, unidentified
MNGFQYIGLDIHKRTINYCVKAADGKIVEEGRKVASKDKLKSWAEARRQPWVGAMEATLFTHWVYDVLRPYAAELKVANPLLLKAITAAKKKNDRVDARTLADLLRCDLLPECYTMPADLRDLRRVLRYRNFLVRHATSLQNRISGLLMESGESYNTRRLHGERYFQQLLEHIEAPSSVLEMLRLSRGALTVFSSMEKRLRRGLLQHPTLRERVERLRSIHGVGEVTALTWALEIGPPERFPCVARACSYCGLTAAQRASADKEYRGPISKQRNKHLQTILIEAAKLAPRYNPQLAAVHARELKRGDANRATLAVARKLVAYLLAVDRSQQPFQIREPEATVA

SEQ ID NO: 68478 - protein, 381 aa, unidentified
MREYIALDAHKHYSLAEREEVSTGRASQERIAHCRGAIATYLADAESGTPVAVEALGSWYWIVEEIELAGCRPLLVHPRKAKLMMGMINKTDKLDVRGLNRLQRNGTLPTVWVPPRGLRDLRELTRGRMVLSAMRTRLKNRITSALAKYGLAVTGASDAFGVKGRRQMAEFLEALPEETAWTTRSLLRMLSAVQGEIAAYEQRLAERLETTEAMRLQRTLPGFGPILSAVVVLEMGDVERFADAEHLASYAGTTPRVTSSGGKTRYGPLRPDVNRYLKWAFVEAANVIVCHRHRNRQRHVSRLYDRLKAKKGHAKAVGAVARHLAEATYWVQTRGSAYRDPALPRVKGRAKREHGMSPIEARRVNAAALPNTSMPEVRAKR

SEQ ID NO: 68479 - protein, 391 aa, unidentified
MIYVGIDIAKDKHDCIIKNSVGEVVFRTFTIKNNLDGFNDLYQKIESVMEDVSKVKVGLEATGHYSYNLLGYLIDKGLPTFVINPLHTNLYRKSLSLRQTKTDKVDASTIASMLMSDVNLKSYSDTSYHNEELKSLTRYRFDKVKERAKLKTSISRLICILFPELEKLVPTLHMNSVYSLLYEFPGAKQVASAHLTRLSNLLVETSKGHYDKDVAISFREAARTSIGSNMPAKSLELKHTIKLIRELDSEIDEIEGEIKAIMDTINSPILSIPGISYRMGAMIIAEIGDFDRFDSADKILAYAGLSPSTYQSGQLDNCHPRMEKRGSRYLRYALFNATIYVCHWDSTFNAYLAKKRSEGKHYYVAVSHATKKLVRLIYQIEKNNQQYNKAF

SEQ ID NO: 68480 - protein, 359 aa, unidentified
MKQSTRNEVFATIGMDLGDRHTNFCVLEADGTIRKESRVRTTKEALAAEVGVTRCRVVMEAGQHSPWVSRLMAEKGHEVVVVNPRRVRLVAESLKKSDRSDAAMLARLAQTAPDLLMEVQHRSKEVQGDLNILRGRDALVRARTLVVNTARALAKGTGEALPRCSAAAFSKKAKEAVKQEQKALLAPLLRSISTLTQEIKVMDKQVESLAEKHQAIEHLQGVPGVGSLVSAAYVLTIGDPHRFKKSREVGAYLGLVTKQRNSGQSAPQLRITKAGDSYLRRMLVTAAHYILGPKGPDSALRRWGLSIGERGGKAGKKRAVVAVARKLATILHRMWVTGEVWQPQGVASPRRPRQRRRPA

SEQ ID NO: 68481 - protein, 426 aa, unidentified
MFAEADDDEQIIQRVAALDIGKAELVCCVRLPAPPGHKRRVQEVTTHTTMVGALTELANRLVELGVERVVMEATSDYWRAPFYLFAAHGLQPWLVNAKDVHHLPGRPKTDRLDAVWLCKVAERQMLRPSFVPEARIRRLRDLTRYRVDLVGARTSEKNRVEKLLEDACIKLSVVASDIFGVSGREMLDAIIAGDRDPKRLAEMARARLRAKIPDLEEAFAGLQLGTFDDHHRFLLTRMLARIDQADRDIAALDAQIEQHLAPFADAAARIDEIPGIGARNAAAILAEIGTDMAQFPTAAHLASWARFTPGIKSSAGKTKGNGSTGHGNRYLARAISEAAIDCRHTKTFLGARYRRLVRRRGKKRAMIAVGRSILTIIWHLLNDPDTTFHDLGADYYDTQASTTAKQRNHIKGLEALGYKVILQPAA

SEQ ID NO: 68482 - protein, 359 aa, unidentified
MKNSVAAAVHAALNAERPVILDNPPAALAEEPRPRQEPTTEAVPLPAECWVGIDVAKAHLDGATWPEIERLRVARDDAGLVALTAWLRARAPRLIVLEATGGLEVPVVTALVEAGLPVAVINPRQARDFAKATGRLAKTDALDAAVLAHFGHAIGPEPRPWKDAEAQALTAVIQRRRQVVEMLAAEKNRLASAHPHVKPDLEATIAWLEQRLKDHDRDLQQRLRASPVWRERDDLLRGVPGIGPVTAATLLAALPELGTLDRRQISALVGVCPFNRDSGRSRGRRMIFGGRAGVRAVLYMATVTASRCNPVIKAFYQRLRQAGKPAKVALTACMRKLLTILNAMLKAKTPWQPPAECRS

SEQ ID NO: 68483 - protein, 326 aa, unidentified
MDKIYDICCGIDVHKKLIVACLNHKRKKELREFGATTRELMELAEWLQKNECEIVAMESTGSYWKPLYNIMESYGLHTIVVNPAHMKAVPGRKTDVKDAEWIAELLQHGLLQPSYIPSKDQRELRELVQYRKSLVGERTRELNRLQKMLEGANIKLSGTVTNINGKSARKILEYILSGNEIDEKKYDEMYEEKLIAHNLKASKEQILDDLKGFMSPLQRRMLKELLQHLDELNVHIENLNDEIDNFMKPEEKQASQVIQDVTGIGNTSAQTIIAVIGTDMERFPRDRHISSWAGLCPGDNVSAKKRKSGKIRKGNALLKSTLDHTL

SEQ ID NO: 68484 - protein, 343 aa, unidentified
MKQNPSVLGIDLAKRIFHLVGMDDAGHVVLRKRLTRDALMPYIAQLPPAVIGMEACGGAHYWARRFRTHGHTVKLMAPQFVKPDVKSNKNDPADAEAICEAVTRPTMRFVPIKEVDQQELQSLHRARERVVKARTALVNEIRGLLAEYGIVLPQSVPQFRHTFLATLEAERTKLTPLSTELFGQLYDEFGALEKRLAYYTAKIEAIGAAHPVCQRLMTIPGIGPLTATALVAAVSNASAFKNGRQCAAWIGLVPRQHSTGGKPRLLGISKRGDVYLRTLFIHGARATLRWLRLKTDRRSTWLRGLMDRRGKNKAAVALANKNARIAWVLLTTDQVYIAEQAAA

SEQ ID NO: 68485 - protein, 357 aa, unidentified
MRIIGCDLHTRQETIAMVDTETGEVVEKTLQHEGEKVREFYSALPRPVQVGIEATGSMLWFLNLMEELGIDSQVGHPAKIRAAEPRKQKHDRRDADLLLKLLMENRFPSIWMPSKELRDLRALLWHRHQWVRTRTRVQNALQAMALTNGLRRGKSLWSQEGQHAIASLPLGPHAAHRRTALQALYRELDADINALDKRVLEQALERPEARRLMTHPGVGPVTALATDVFLGDPVRFENAKALASYVGMIPSEYSSAGRQRLGGLSKQGNPLLRFLWCEAAIHAVRRDPLLQRFYRRKLVQKGMGKARVAVARKLGIRLYIMLRDQIDYEEFCRRGQMRQKNGAARAGIPEVGYGPSL

SEQ ID NO: 68486 - protein, 409 aa, unidentified
MRIIGLDIHRAFAEAVAWDEGKLKRLGRVDMRRHLLEAFAKKLSKEDVVVVEATGNAASVAAVITPYVKKVVIANPKQVRIIAHAKIKTDTIDATVLAQLYASGFLPEVWIPDELTQALRRQVTRRNQIVRQRSRLKNIIQSILHSHLIPACPHADLCGASGRAWLFHQILPEDERLAVERHLREFDRLAEDLKVIERDLARSALGDEGVKRLMTIPGVDMIVALAIVAAIGDVGRFEQSQKLVSYLGLNPSVRQSGPGPAYHGRITKQGRGHARGMLVEAAWAAARAPGPLRAFFLRVRARRGQHVAAVATARKLAVIIWHLLRKGESYAWARPALHAKKLRDLELKAGYKAERGQKGAAYVYNIKSHRDQERRWVEQAETAYARFVAGWNPRGPKRARTGAANEGRQ

SEQ ID NO: 68487 - protein, 324 aa, unidentified
MIDGILGIDVSKNTLDASVSSCRKVRARCFANSPDGWRHLLDWLIIQKIRRVHACLESTGRYSLGIACALYAAGHVVSIVNPAQIRDFARTKLGRNKTDGVDASHIREYCELFKPQPWAPPSEAHRRLGELQTIRAGIIAGLTEWKNRKNSGMVDAVAQSLADVTISHFNNQLEAVDEAIAQTIDNDSGLRGKRDLLLSISGVGEILAGVVLAELPGPDVLRSSAAVVAYAGLNPRQHQSGTSIDRVTRISKIGNAVLRAALYMPAMSAMRFNPAIVALVTRLKSRGRLNPKQIVVAAMRKLLVLCFGVLKAGKPFDPTIAMGC

SEQ ID NO: 68488 - protein, 364 aa, unidentified
MDVHTTNFTFCCYTADSDRGFAVAQTEPDYRQVIKYMERVQKQRGEECKFVCGYEAGCLGYSLYHQLTRCGVDCVILAPSTMHQEKGKRIKTDRRDAENIARCLAFSLYSPVYVPTTEDDAVKEYIRMRDDIKADLKRVKQQIIAFTTRHGFAFDGKSYWTQKHLKWLETLVFEHPLYKETLQEYLILYYMLDEKVAVYDTRIEEMSHLEHYEENVQKLCCFRGVAAHTALSLLVEVGDFHRFRSAKHFAAYLGLVPGEHSSSDKQIRTSITKAGNTHLRRLLVEAAQSYNRGAIGKKSTALKARQGGNPAEVIAYADKANERMQRKYYRIAFKSRHNIAKTAIARELACFVWGMMTGNISNAA

SEQ ID NO: 68489 - protein, 359 aa, unidentified
MKEYISFDSHKHYTLAEREDVETGRTRQCRIAHARGAIREYLRRCEPGTPVALEATANWYWIVEEIEEARLRPLLVHPRKAKLMMGLINKTDSLDLHGLNRLQRNGTLPTVWIPPAQLRDLRELTRVRMVLARHRTRMKNRIQATLSKYGLVVEGFSDPHGKRARAEMNRQIAQLPPQARYVTEILCAQLDFVEGQIHEQEKRLRALVPITPEIQLLMSLPGIGVILGAVCALEIGAVSRFPSAEHLAAYAGTTPRVHSSGDKTRYGGLRPDVNRYLRWAFIEAGHSTALNSERRSERHVSRLYRRLRARRGHYKAVGAVARHLAEASYYVLSKKEPYRDPALHTEGGQALAPGRTREV

SEQ ID NO: 68490 - protein, 450 aa, unidentified
MSSKPSKVVQLPVLEPDAAGIDIGAREVFVAVPADRDTRPVRSFETFTADLEALADWLQQCRIRTVAMESTGVFWIPLFQILEKRSIQVLLVNAQHVKNVPGRKTDVEDCQWLQHLHSVGLLRGSFRPNDEICAIRSLWRHRDNLIQLATVHLQHMQKALDQMNLQIHHVISDLSGTTGLSIVDAILAGERDPHRLAKLRDWRIKASEETIVKSLVGDYREEHLFVLRQSLEGYREYQKMIQDLDVEVNRRMAGLPSKVDPAKKPLGKERNPRNKPRRTEPPELRSELYRAFGVDLTQVPGINPLTAQVLLTEIGPSLARFPTAAAFCSWLRLCPEPRISGGQVLSSKTRPTKNRAALALRLAAQALHRSQTYLGDYLRRMKARLGAPSAITAVAHKLARIVYHLITNQQEYSNTVFEEQERRTQDRKRRRLHVQAKELGFRLVPVESVP

SEQ ID NO: 68491 - protein, 461 aa, unidentified
MQQPIEVQVDEHEQIVERVTAIDVAKASGMVCLRVPHESIPGRRVTKVWPVAATTAALVELGDHLRCERVQRVVLESTSDYWRPFYYLLEAAGLTVWLVNAAQVKNVPGRPKTDKIDAVWLAKLAERSMVSPSLVPAEPMRQVRDLARARFDLVEDRTRVKQRVEKLLEDALIKISSVLTDIHGVSGRAMIEALIAGQRSPKALAELAKGRARTRRAALTEALEGRFTDHHARLARMLLDQLDDLSARIDQVTDLLDAAITAQPTASATAGATAGATAGATATTGADEPAQQPTACGYTSAVTRLCAIPGGGPDSMRAVIGEIGLDMSVFGTPARLCSWAKVAPRTVQSGRKTGRARTGKGNPYLKAALAQIATGAAKTDTFLGERYRRLIKRMPKAKALVALQRSILVIIYHLLADPTAEFTDLGADFYQRRIDRARRTTHLLRQLQALGYQVQLTEDAA

SEQ ID NO: 68492 - protein, 529 aa, unidentified
MASRISARRFSRTRSRSGSKPRNRESLQKPSGVIGHRVKQVGGDKFAIVCVDPAKQRSEWMMADYFGNLLIEPQTLEHQAAHFKSAIARVREAQEQHGIQDTIVVVERTGNYYLAPKRAFASAGLETRVIHPFATKQYRVTTDAGNKTDETDLYAQHRAAVAGLGLCEIDLEPPYRELQLRARHRRNLVEKASALACQIRDHLHLSMPGFTALFDHLLVHKSAMSIARRCGSPSAVLELGRDGLSQHLHECKVRHQPRTIDKVLAWASQAADDVIQDGPLHHAIWTDLEELYLHFQRRILVVERHLARDLVQTPYVRLLAIPGVNVASAAELAGEMGPITRYANTNAITGRCGLYPSRHQSDQTDQSGALVRRANRRMRCALMRIADNLVCHCAYYRGLADADGARGVDPRASRVKTAKRFSRLAFACVAGDKPLNHPCFQKPDSILVKLRVFHQVHDTPVDRVLADLQTAVGQLSRPTRTREAEVVAEVLHKEAARRRGPTAIGALMPAVLARLQINPPGDNPDTDRS

SEQ ID NO: 68493 - protein, 353 aa, unidentified
MKLDKYMGMDVHQATSVVAVLDANGKVVLETIVATEAAAIIRLMQSLSGRLHVTFEETTQATWLYDVIRAYVLQVVVCDPRRNKLLGEGSKGDKPDARKLAELLRAGLLRSVYHGHEATRKLKELVRAYETLSIDTMRTMFRIKAIYRGRGIRTPGSGGYQLRQREQWVQRLTEPGVRQRVEWWYEELDHLRSLRKRAKQAMLTESRKHRAFTLLRTIPQLGPIRCALIVATLDTPHRFRTKHQLWAYSGLAVVTHTSSEYEIKAGRVVRSRKPIATRGLNRNGNRRLKDVFVAAAAGGTQAEPYRTYLRSLEHKGMRAEMARLTLARKIAAIALSIWKKGETFDPKKLNWTT

SEQ ID NO: 68494 - protein, 359 aa, unidentified
MKKVSTAATKQSRNISQQRLTIGLDLGDRNSCYCVLDEAGRIQLEQRVRTTAKALQEVFGAMRRSRVALEIGTHSPWISRLLSKLGHEVIVANARKVRLIGENRKKDDRLDAQTLARLARIDPQLLCPVKHRSAQAQADLMMIRARASLVRVRTGLVNAARGLAKSYGERLLGGNVRNMNPEKAEGLSPELQRALEPLLSAIEEVSERICEYNDRIEALAQTSYPQVELLKQIKGVGTLIALTFLLTLEDPHRFRKSRDVGCYLGLQPGRRQSGKSDPQMHITKEGDPYLRTLWVQGAQHILGPFGIDCDLRRWGLKLAERGGRNGKKRAIVATARKLAVLLHHLWEQGSWQCYCITCG

SEQ ID NO: 68495 - protein, 319 aa, unidentified
MKQVKHITVAAHVAGIDVGKRWLDVWSLTSGEHQRFERTSCGLWLLVSWLRDQDIVRVGLEATGGYERIVCEALHDADFEIVVHQPAQVRYFAKSQGIRAKSDKMDARLIAEATASRHNATLYRPSDSPTLTGLMTLYQHIATLLAEAKTFAEHVELEVVEAIHQSVMADLESRKAEVLRSVLAVIRKNASRQARFDLLKSLPGIGPVVAAGLLAYMPELGSLAHGQPAALLGVAPFDSDSGEHRGKRFIVGGRRRPRDLMYLSALAAKRMDTPFRLFYDRLITAGKPAKLAIVAVMRKLIETANLVLKRQTPWVRQIG

SEQ ID NO: 68496 - protein, 350 aa, unidentified
MVVVGADVHKRTHTFVAVDEVGRKLGEKVVAATGSGHAEAVMWVRERFGTEAVWAIEDCRHLSARLERDLLTAGQQVVRVPPKLMAQTRASARTRGKSDPIDALAVARAFLREPDLPVASHDEVSRELKLLVDRREVLVAQRTATINRLLWRVHELDPERAPKARSLDLAKHRRILGDWLDTVAGLVAELARDELADITRLTEVIDALGKRIGARVRQVAPTLLALPGCGELTAAKLLGEAAGVTRFKSEAAFARHAGVAPIPVWSGNTAGRVRMTRSGNRQLNAALHRIAVTQIRLDGLGRAYYRKRLHAGASKPEALRSLKRRLARVVFGHLHTDHQNRHQRCQPAAA

SEQ ID NO: 68497 - protein, 311 aa, unidentified
MNNTIGIDISKDTLDAHRLADGQHKQFLNGKTGHAQLVKWIGKQSDPLIIFEATGAYHRQLERVLGTHIIPFVKVNPKQARRFAQACGKLAKTDRVDCEMLAKMGAALQLVPKPFTTENLYDLKELLSARRALIKDRTAAKARKATVINALIKQQLEKRLRQIKNDIAKIDALMLDVAREDQYMSERLDILFSIPGIGVITALMILVDMPEIGALNNKQVASLAGLAPMSQSSGKWIGKARIQGGRPNLRNAIFMPALVAIRHNADLKTKYDRLVTAGKEKKVAITAVMRKLLVLANALLRDNRKWAEKAA

SEQ ID NO: 68498 - protein, 398 aa, unidentified
MDQDRFDVFVGLDVGKEHHHATALNTAGKRVHDKALPQDESALREVFDKLAGYGSVLVIVDQPATIGALPVTVARALGIEVAYLPGLAMRRIADLHPGNAKTDARDAYIIAEAGRSMPHALRRVGGDDDLIADLAVIVGFDDDLAGEVTRVSNRIRGLLTQIHPALERAIGGDIGHPAVLALLTKFGGPTGLAAAGKRRLTTTAKPLAPRMHERLVQAIVKALTEQSVTVPGTRAAELVLPQLAAQLQGLLAQRAEAAKQVEEALDAHPLSQLLMSMPGVGIRTTARLLLDIGDGSAFATAGHLAAYAGLAPVTRRSGSSIRGEHPSRGGNKHLKRALFLSAFAALHDPDSRAYYDRKRAAGKKHNAALICLARRRVDVLHAMLRNGTYYQAKPAAAA

SEQ ID NO: 68499 - protein, 346 aa, unidentified
MKILALDLGKYKTVGCDYESESGAHQFKRGFTTPAGLARMVQEVKPDRVVIEVCSIAGWVCDLLWAMGIEVQVANTSDDAWRWRKVKQKDDRRDALKAARLSAVNQLREVYIPQIEVRQWRALITYRQQLVRRRTKIKNHLRDLLLREGQILARGSKCWNKLGLELLTSMARPLSEVGLAELWRGELHEELQQLQLTQARIVTVEEKLNAIGAADGRVQLLRTVPGVGPRLAEAIVALLDKPQRFRKASHVSGYIGMVPKALDSGETERRGRITRQGSRLVRSLLVEVAWAGLRHNAWVRQTYQRLSGGKKARKKIAIVAVGRKLLVRCWAMLRDHRAWDWQPQIT

SEQ ID NO: 68500 - protein, 352 aa, unidentified
MTKSRLWAGLDVGAKTTSVCVINCSGEVVHEGVCPSSSKEVRHELTVFRKDRYAAVSLEAGTGTHLARALRTFGYPVILYETRQLAKFLRVRRNKTDAGDAKGVAEASRIGASVVSKVHVKDLRCQSLQSKLAIRRHLIGQRVATVNLIAHQIELFGGQLHLNGKTNELRRAVEMEMKNVFKGEPRTLIDEMRYLVDHCERLRAHEQSFNRDLRALAFESEACRRFMEIPGVGPITALAFYAAVGEPNRFVRTSRVGSYFGLTPRIHQSGLTSRSGRISRMGNTSVRSLLVQAAISFLQYCKVECDLRSWALSIEARRGKGKARVALARKLAIVMLAIWKAGSHYEHNHQPA

SEQ ID NO: 68501 - protein, 339 aa, unidentified
MGLHCAIDLHGDNGYYGIMDEDGKRVYEKRLPNKLPVILKALEPFKRDLCDGVVVESTYNWYWLVDGLSENGYSPRLANPAAVDQYDGLKNADDKTDAFFLAELSRLKILPEGYIYPKEERPVRDLLRRRLLLVRQRTAHILSFQNLIARERGEKISSNNIQKLHAEEVNQFFEDDRLVLMGRTNIDSIRFLTKQIRDIESAVLKEVKLSPEYKKLLTVPGIGKILAFTIMLETGDINRFKKVGNYSSYCRCVQSSRTSNNKKKGENNKKNGNRYLSWAYVEAANFIRRYCPEAKKWHQRKAARSQQVLATKALGSKICKACYFIIKDQVDFDIQKIFG

SEQ ID NO: 68502 - protein, 344 aa, unidentified
MKYAPIQVLPDVPAGGVFAGIDWATADHVACAVDMAGRILDRFSAAHDKAGIEMLITRLRENGATEVAIERGGGVLVEALLAAGLTVVVVSSHQVKNLRARYRSGGGKDDRFDAFVLADTLRTDRARLRPLVPDAPATLALRAAVRARRDLVAHRVAACNQLRAHLAAAFPAAAGLFYDLASPISLRFLASFGSQDAAAQLDEQAITAWLKTIPERGKTAPASVLCARLRAAPDGVTGEDGAAHAVITAALTVTVGMLAAQVKVLETGIGAQLAAHPDGHIFTSLPRAGTLRAARLLAEIGDCRSRYPGPQSLAALAGVVPVTRESGTHTSHAFRWAVESPRVS

SEQ ID NO: 68503 - protein, 377 aa, unidentified
MSNVRFIGLDVHAETIAVAAAEPAGEVRSLGVIPNRIESIRKLVKKLGPVKQLRVCYEAGPTGYVVYWQLTALGVKCEVVAPTLVPVKAGDRVKTDRRDALKLARSYRAGDLTPVWVPDAAHEALRDLVRAREAAKKDQLRARHRLGKFLLRHGRRPPTAMRAWTHAHLAWVKSAVRFDHAAQEATLLDYIHEVDHVAARIGRLEAAIDAAVQMAPARMRAVIEAVQALRGIALVTAVTIAAEVGELSRFARPRQLMGYSGAVASERSSGERTRRGGITKAGNAHLRRVIVEAAWAYRHRPAVGAALRKRQATVSAEVKEIAWKAQHRLHARYRALTARGKCKQQLITAIGRELLGFIWAIGVHVESHTANAKPVAA

SEQ ID NO: 68504 - protein, 315 aa, unidentified
MDARYIGIDVAKDSFEVASDPADLKWSLPNDPPGRRQLLKALQNQTVALIVMEATGGYERSLAVDLLQAGYAVVVANPRQVRDFARGMGERAKTDPIDAAVLARFGRIVQPKPRPRPSGQTDDLGELVTRRRQVSDLLTQESNRVPLARHPKVQKSLQKIVRALEHQIADLDKLIRDHIESDDGLRRKDEIVQSVKGVGPGTSAMLLGQLPELGTLNREKIAALVGVAPWDDKSGKSAAKSHIGGGRTPVRNMLYMAALSAIRSNPVIREFNQRLESYGKVFKVRITACMRKLLVILNSIVKKDCLWVPPAPKKA

SEQ ID NO: 68505 - protein, 362 aa, unidentified
MGNDSRTVIGEVVGLDLGDRRSHLCMLDRESGAVLEEGTVLTTREGLERRFSTARPLRIALEAGTHSPWVSQLLEGLGHEVIVANPRRLRLIFSNRKKNDRVDARYLAQVARLDPDLLAPIRHRGEDARAALTLLRSRDVLVQARTKLINHVRGTVKSMGGRLPSCSAGAFRTTRMAGELPEVLKPALLPVLEVIDDLSARIREYDRRIARLAEETPAAKHLMEIRGVGPLTALAFVLTVEDPDRFPTSRSVGAYLGLTPGSDQSGQSNPQQRITKEGDAFLRRLLIHSAHYILGPFGEDCDLRRHGVKIASRGGKNAKKRAVVAVARKLAVVMHRLWLTGEAYDPLYNATRSTSADVPAEA

SEQ ID NO: 68506 - protein, 387 aa, unidentified
MQSVTSATAVATTALANHITLFASLELSKSKWVVTINSPGSEKFSKHVVEGGDGARLLDLLSRSRAKAEERYGVRVKAIVIQEAGLDGFWIHRLLLANGIESRVVDAASIAVDRRHRRAKTDAIDGETLLRTLMAWARGERRVCSMVCAPSPEDEDRRRLTRERGTLLRERIQHTNRVRGLLSGQGIRDYNPLRRDRFERLEALRTGNGRELPTMLKAEIRRELDRIALVTTQLAEIERTRDALIRMDAEERDNPAALLLKLKGLGPEFASLLWLESLFRSFGNRRQVAAYGGLAPSPWQSGGVKRDQGISKSGNRRLRKTMIELAWFWLRHQPDSALSRWFQARVGAARGRIRRIAIVALARKLLVALWRYATQGVVPEGAVFKPA

SEQ ID NO: 68507 - protein, 333 aa, unidentified
MNRIWAGIDSGKTHHHCLVLDERGERLLSRRVANDEPDLLKLVDAVLALGDQVTWAVDMAGGEPALLLALLVNHGQEVLYIPGRVANRASDGYRGEGKTDARDALVIADQARLRRDLQSLRPSDEAIIELRLLTNRRADLVRDRTRAVNRLRSTLTGMFRALERALVLTNDGPLVLLVGYQTPAALRRLGVARLTRWLHTRGVRGPDGLAKKAVEAAERQHTAVPGEAVIAQLVRTLGQGVQALNEKVAEIDRLIEARFRAHELAEVLAGMPGIGPLLGAEFLAVIGSDLADFASPDALAAFAGPARAARGNGRSSPPTAQGSDAGRRWTGSP

SEQ ID NO: 68508 - protein, 553 aa, unidentified
MPTLPSLPKSRPNAKTAKPTTKAARPVKPTTKAAKPVQPGQDAAPDKPNRKLTHSEKTQARQRHDRQAHAKRKQRAAARAEEARQVEAAAQAKEQADAQAKMATMPVVNRQAAGADIGSRSHWVCIDADGDEAVCVREFPAHTDGLEAILAWLLENNVTTLAMESTGVYWIPLFELLQSKGIEVILVDPRYTKQVKGRPKTDRLDCKWIQRLHSLGLLAPAFRPCEKICVLRSYLRQRATLIRQGSQHIQHMQKALEQMNLKLTEVISDITGTTGLAILRAILKGVRDPAKLAKLRDPRCKNSAEAIAQALNGSYRDEHLFALGQALDGWVFSQKQLRQIDEVIEKYLATLNKEKDLPQLPPRSKPYRRSGNDPHFDVRAAVFYVSGVDLTAIEGISDMTALTLISEIGTDMSHWATVKHFCSWLGLSPQHNKTGGKVKNSRTRPGSNRAAQALRLAANSLHGNKSGLGAFFRGMKSRMGAPKAVTAAAHKLARLVYWMLEHGMQYVKQSQEQYQQQQKERMIRNLKKRARQLGLTVSEVGGQVQAETETTQK

SEQ ID NO: 68509 - protein, 374 aa, unidentified
MGNLSEAFVAFDTSKLRNSVAVADAGRVGEVRFFGEIDTTPAATEKFVRKLAAKYSRLTFCYEAGPTGYGLYRQIKALGHECLVAAPSLIPKKPGDRVKTNRRDALNLAKLLRAGELTAVWVPDERHEAMRDLVRARAAAVDDLKSKRQQILSLLLRLGRYYPGKKTWTRAHMIWLVSQKLAHREQRIAFEEMLLAVRQAQERVIRLDQAIAAAVPDWSLSKVVTALMALRGLDLIAATIFLAEIGDLSRFASARELMAYLGLVPSEASTGDKVNRAGITKAGNHRARRILVECSWSYRHPPRVGKKKLDKIAAAPRDVQDIAWKAQARLSARYRALTRRGKRPTVVVTAIARELAGFIWAVGRAVDTPATPTM

SEQ ID NO: 68510 - protein, 349 aa, unidentified
MSQQCSTAIARMGIDIGKSVFHVVGLDANGKPVFRNRFTRERLLEFLARASPTIIGMEACPGSNWLARKAIGQGHQVRIVPAQFVKPFVKSNKTDIVDAEAIAEAISRPTMRFTQPKTEAQLDLQALHRVRQRLVSSKTAIVNQARAFLLEYGLTIGAGPAYFVRDMPGILADDGNGLTPAMRDLLQEQWQEYRSIEARLLQLRHQIEAIAGADDVTTRLISIPGIAHLTATAITAFAGTGTQFKSGRHFAAWLGLVPGEFSTGGKQHLLGITKRGNPYLRKLLIHGARACVLHLDRTKDHLGLWISEMEAKGIHRNKVIVALANKLARIAWTILTRRGTFYLRQPQAQ

SEQ ID NO: 68511 - protein, 400 aa, unidentified
MHCTDHPAHLNTNIREENSSLFVALELSKSVWLVAVSAPGSEKTSKYRVAAADVAALLALLARLKAQAERYVGGPVQIASIHEAGLDGFWVHRMLEANGVESHVVDAASIAVDRRSRRVKTDRIDVEKLLRTLMGWARGERRICSMVRPPSPADEDERRLTRERGTLVTERTRHVNRIKGLLATQGVFEFKPLHKNRRQRLEELQQWNGQPLPPRLRTELVRELDRLELVMSQLAALEAERDRALQARRTAASNATKTPSSGTACTGEVGSQLLRLRGIGPEFASVLSLEAFYRNFNNRREVAAYSGLAPSPWKSGGIDVEQGISKAGNARLRTTMIQLAWLWVRHQPGSALSRWFHKRVGDKRGKIKRIAIVAVARKLLVALWRYVTQGMVPEGAELKA

SEQ ID NO: 68512 - protein, 337 aa, unidentified
MTHDSFSPADVYVGIDVAKDKLDLARSDQNDVLQFANDPTGIAAIVAMMKKAKPVLIVIESTGGLERPLVGALLDEDLPAALVHPGRVRNMARALNINAKSDKIDARVLYLFGQKAQPRISRKASENRQELSDLVTCRRQLVTTRVQQSNRLGSSYSAAARKSIHAVIGTLDRQIEKLDRQIRRLIDADDDFRDLEKILLSVPGVGPTLTATLLADLPELGQLDRQPVCAIVGVAPFVKESGNYQGQRNIRGGRTHVRNVLYMNAITAIRCNPVIQAFAHRLQQKNKRSKVVIVAAMRKLLSLINVMACYGTNSTSSKNFQRPLDFKHSRFAVKLTF

SEQ ID NO: 68513 - protein, 338 aa, unidentified
MNIVFLGIDLAKNIFQLCGLNQAGKPVYTKRTGRKELLQTLANIPACLIGIEASTGAFYWQREFEKLGHKVKVISPQYVKPFVRGQKNDGNDAQAIAVALMQPTMQFVPPKSPEQQDIQALHRARQRIVNHRTATVCQIRGLLLDRGIPIGSTVSRARRAIPLILEDAENGLSSRMRRTIAELYDLFNDLERRIHFFDKEIETVFRQSEACQRIARVKGIGPKTATAVVAAIGKGTEFKNGRHFAAWLGLVPRQHSSGDRQVLMNMTKKGDKHLRTLFIHGARAVVRVATNNNDGHMNQWVNQLKEQRGFNKTTVAVANKNARIIWSMLRNETEYQVV

SEQ ID NO: 68514 - protein, 528 aa, unidentified
MLSFKAAGRGDRQDFGASCPSVSMVPGASDHNTGDTRRRDPVWETASIPVAPAPAVPLDIPFPSLVEAAMTPHKDHFPHPGPRPRRRRTLSVTNADAAGIDVGADEHWVAVPADRGAEPVRRFGTCTADLEAIAAWLQACGVTTVALESTGVYWIPLYELLAARGLQVLLVDARQLARAPGRPKTDPHDCQWIQRLHSYGLLAAAFRPADQVVVLRAYLRQRDMLVTYAGQHIQHMQKALEQMNVKLTEVVSDLTGVTGMAIVKAILRGERDPAQLARLRDPRCRESAATIARALLGTWRAEHLLALRQAVELYEFYHQQISACDQAIEAHLRTFADRSAGQPLPHRPRRRKREANEPRFDARARLYGVCGVDLTAIEGIDETTALVLLSEIGTDMSRWPSLKHFASGLGLCPQHKISGGKILSRRVRRGSSRAKRALRLAARSLHHSQSALGAFFRRIKARHGTALAITAAAHQLARLVYSLLKHGTAYVAQEMAAYEAKYRERKLQGITRQARALGFVLVPAAAAG

SEQ ID NO: 68515 - protein, 360 aa, unidentified
MHATTVAVDLAKSVFQIAVADDQWRIVETQRLTRTQFERWFANRSVSLVIMEACGSAHHWARWLNGLGIAVRLLPAQYVRAYVRRNKTDATDAAALLEAARASDIRPVRVKSVEQQALQGLHRIRSLWMGTRTSRINALRGFCREFGITIPQGARTGVETIGRVLADPRSAVPDLIRHTAGMLLEEIRLLEARIAQVERELASVARQSPACTLLLSVPGIGLLTATALVAATSGDVTHFQDARHFSSWFGLTPREYSSGSSRYLGRISKKGDRYLRMLLTHGARSVLRAAKVAEGAGKEICGIRRWALDVLGRSNHNKATCALANKLARICYATLRDHAPFDETARLTKKQNRQSFLMPA

SEQ ID NO: 68516 - protein, 354 aa, unidentified
MKRTTKYVALDVHQATTVASVRGENGRVIARTILPTEEPAVLEFFGGMRGAIHVAFEEGTQAQWLHDLLVRRVARVVVCNRRGEREQGNKGDQVDADELSERLRCGSLRAVYHGSAHRATLKELTRLYLNLVEDSTRVMLRLKALFRARGIKTPGQGVYHPRHRAEWLAQLAERGARLRAEALYAELDVLRELRSPAKTAMLAEARRDPAWAVLRSIPFLGPVRVALLLAIMQTPWRFRTKRNLWGYAGLAVVTKTTAEYAWEAGRPVRRRRAPLTRGLNRNHHPVLKDVFKGAASAAAARPGPFQDFYHARLAGGLSAELARVTLARKIAAIALRLWKKGERFDPTTLTQPAR

SEQ ID NO: 68517 - protein, 369 aa, unidentified
METKETDPINFLYVGVDVHKDQHTAVATNCFGHALMKKDIRNSKEEFAELVRKIRILAEAKSLKPVFGLEDTSAYGQRLALHLCREDFLVKVVSPVLVVRERKKLTHPEKSDSQDALGVAKALISEIGTLPDFSISKTSEIAKGLKDLVVDREFLVKEQTRIKNQLHRLLHKSYNSGYREKFKNPFSVKALEYWSKHPVPADLSGNVLLKSQIKRKIRRIRDIKKEVIEIEEEMRILADQIDQKLETLNGCGLVSASSVLAEIKDINRFDSPNALAQYGGFCPKEKSSGKRIRHIKTKSGNRKLNKAVHRIALSQLGRQGNIYSKNYFQKKVAEGKNKSQAICCLKRKLISIIFMMLKHKTAYDYAARC

SEQ ID NO: 68518 - protein, 361 aa, unidentified
MKGISMPDQQRAVIGGIDCHTDFHAAVALDPLGRVLGTEAFPATSAGYRLTHRWLASFGPVAAVGVESTGSYGAALTRALVEQGCRVIEINQPHAHLRARRGKNDAIDAEAAARKVLSGEATAAAKDTSGIVESIRQLSVARSSAVKARSAALCQLGDLLVTAPATLREQLDTRRSLEGKAAVCARLRPDTDRLADPAQAAKAALRSLGHRIAQLGAEADELGRRLDRLVATAAPTTTSRLGCGTHHTAALLVAAGQNIDRLGSEASFAHLCGTAPIPASSGRTSRHRLNYAGNRAANRALHMIVIVRLRYRERTRSYLERRLSEGKTKKTPSAATDASSPERSTAPSCVASDFATIKTRT

SEQ ID NO: 68519 - protein, 430 aa, unidentified
MEEVDEQELHVERLAVLDLGKAVLEACVRVPHDSKPGRRMQEVRTYPTTTAALLQMADWFRCWGVTRVVMESTGDYWKGVYYLLEAEGFECWLVNARDVKNVPGRAKSDKLDVAWLAKVGERGMCRPSLVQPKPIRELRNLTRYRRSLIRDRTREMQRVEKLLEDAQIKLSSVVSKLFGVSGRAMLDALAAGQTDPKALARLAKGRLCPKVPQLQEALRGFFTDHHASILAMMLANIDRLSAQVATLDTMIEQAVVPFTHQAQQLAEITGAGPIAAQELIAEVGVDMDRFPSDAHLVSWAKFCPQTHESAGKKKNKGRAKGNPWLAATLGNIAASAARTGEGFLGARHRRIARRRGPQKAIVATGNAVLVIVYHLLSDPTARFRDLGADYFTTRIDKNRRARNLAAALQAVTGQKITIRDGQAIIEPQAA

SEQ ID NO: 68520 - protein, 381 aa, unidentified
MAATRNHECSAFDPVLYLAFELSNVHWKLGFATGPGRRPRVRTINAGDLAALQEEVRRAKKRFELSEDIRVVSCYEAGRDGFWLHRFLLAQGIENLVVDSSSIQVNRRARQAKTDGMDVEKLLSQLVRYRSGERDVWSVVRVPSVEAEANRNLHRELETLKKDRTRHINRIKSFLVGQGIRMKVKGAFLEEIERVRKWDGLALPDSLRARLQREYERLQMVQEQIKGLERERVEAIRHSQEESVETVRNLLRLKGIGQNASWLFGMEFFSWRKFNNRKEVGALAGLVPMPHQSGASYREQGISKAGNRHIRAMVIEIAWGWLRFQPESELTKWYEKKFGQGSKRIRKIGIVALARKLMIALWRYLETGAIPEGAVLKTRLI

SEQ ID NO: 68521 - protein, 380 aa, unidentified
MRCCNGACAVHDQPKHLAIAHGKLSLFPYQSQSEEYGMKLFIGLDVSLAKTAVCVINEYGKIAKEAQVPSDPQAIVDFANTLEGAVAIIGLEAGPLSQWLHRGLADAGLDVVLMETRQVKGALKAMPIKTDRRDAEGIARLLHMGWFRPVHCKSVSAQEVRALLAARKAIQQGMIALELSLRGLLRNFGLKVGAISRGQFDARIRELVDGNAMLQAAAGPMLRARASLRQELAGLERQVRLLAKDDAVCRLLMTMPGIGAVVALTFRSAVDDPARFSSSKKVGPWVGLTPSRNQSGERDVIGGITRAGDANLRRALCQAATVMIHRGRSTWLRSWAAQVAKRRGAKRAMVALARRIGTILHRMWRDGTEFSIVPLIAKSA

SEQ ID NO: 68522 - protein, 348 aa, unidentified
MAVTMLETRPVTGGVDTHLDIHVAAALDANGGLLGVESFATTPEGFTTLYRWLASFGPVARVGVEGTGAYGAGLARHLRRAGIEVIEVDRPNRLLRRVAGKSDTVDAVEAARAVLSGRARGVAKTADGNVEAMRALLIAKRSGREARITCLNQLRHLGFCAPDELRERFRGVPRTQLADVAAALRPRLDSDPVTYATKLAMRALAHRVLSAVEDTDHIDTVLAHLVTATAPGLLELYGVGIDTAAILLVAAGDNADRLHSEAAWAHLCGVAPLPATSGKVTQRHRLNRGGNRQANHALWRIVFTRMSSESRTRAYVTRRLDEGLSKPEIMRVLKRYVARETYRHLRPT

SEQ ID NO: 68523 - protein, 339 aa, unidentified
MAQVTTLGVDIAKNGVCIHGVDAHGHVIVKKRLARQKVLPFVAQLPSCLIGMEASGGAHYWAREFTKLGHTVKLLSPQFVKPYVQSQKNDPNDAAGICEAVARPRMRGVPVKSVAQQDIQALHRIRERQIKARTALINQIRGLLMEYGIVIPQRASQVRHKLPFVLEDAENGLTITAREWLQALAEELQVLDQRLAATDHRIEQVFEADEACQRLAQLGGIGPLTATALVAAVGDATGFKNGRQFAAWLGLVPRQHSTGGKTTLLGITKGGNRYLRMLLIHGARAVLRVVDRQTDAWSRWLQGVQVRRGTNCASVAQANKTARVAWALLAKGDRYRRAA

SEQ ID NO: 68524 - protein, 412 aa, unidentified
MPFALPDALFFTGIDWAAETHAVCVLDAAGKIAAEFVIEHSADGIARLIRRLARYGEAGEMPVAIERPDGRLVDLLLEAGHPVVPVKPNAIKTWRDGEVLSGAKSDAGDAAVIAEYLRLRAHKLKAAAPYSDKTKALRTVVRARGDLVEMRVAATNQLAALLDAHWPGAKAIFADVESPISLEFLTCYPTPAAAAHLGEKRMAAFCAKHSYSGRRTAAELLTRLRSAPAGATGEALTEAIRDTVLAAVAVLAALNASVKNLDRSTAAHLGEHPDSAIFTSLPRSGQVNAAQVLAEWGDARPAYEHPDSVAALAGVTPVTSQSGKHRAVHFRWACNKRFRVAITTFADNSRHASPWAAKIYNDARASGKDHPHAVRVLARAWIRVIWRCWLDGVPYDPAAHGAAAALAKQIAA

SEQ ID NO: 68525 - protein, 376 aa, unidentified
MVSSTVAWLERGESISTRIRLARCGLHRERKGNVMDVMIGIDPHKGSHTAVVVDSDEVVIDEIRVKATANQLVELQEWAAEYQDRCWAVESARGMGYLLAQQLVGAGERVIDVPAMMASRVRLLGSGKSQKNDPNDARSVAIAALRHPSLTVVSGEDHTRVLGLLAKRHRDVARLKNKAACRLHALLAELTPGGLATEMTVTKANLVLDTIDVSDEVTRQRVVIATELVDDIGRLDAQMRASKKRIRAAVVASGTSLTNIRGVGPIGAAIILGAVGDVARFPTPGHFASYNATAPIEASSGERKRHRLNPRGNRKLNHALHIAAVTQLRYPNKGRDYYDKKLAEGKTSKEAIRALKRRISNVVYRHLVADTKQSIS

SEQ ID NO: 68526 - protein, 344 aa, unidentified
MTTQQLIKTDLEVKPIQFAGIDVGAEELILLIRRNGKPLEPQKFTNTPTDRARLVKKLVKLPGLIVCLEATGVYHFDLAIALHDAGVLLMVINPKASHNFAKVLMKNSKTDVVDANTLAEYAARMDFVAWTRPSNEKLALRSFARRIHALTGQKAAAKNHLHALAATQETPKAVLEDAKLAIAQLEKRIDCLTAEALVLIDSSPELKRVLTLLTGIKGIAESSAIALMGELLLLPPGLSHREWVKFAGLDPKAFDSGKSVHKKARLSKAGNRHIRSALYMPALSAKTHDPHVSAYFQHLVDNGKKPLQAVCAVMRKLLHAIHGMLKHNEPFDNARFYAIPAAAG

SEQ ID NO: 68527 - protein, 349 aa, unidentified
MRFYSQQHKFYCGIDLHTRVMYVCITDGAGKILVHKNLRANPDSFARVIEPYREDLVVAVECVFVWYWLADVCAQLGVKFVLGHALYMKAIHGGKVKNDRIDSQKIAQLLRSGMLPEAYAYPESMRSTRDLLRRRMYLVRRQAELQGHIQNTRHQYNLPAYEKRLDRAANREGIADHFDDAMVAASIQIDSNLLDSLHQQILLIEQLIGERAHEQDPVAVKLLRTIPGIGKILALTVLYEIGDITRFSQVGNFISYSRLVKCAHESAGKKVVGRNNKIGNAHLKWAFSEAACLFLRESDQAKAWHQKLISKYGKGKALSIIAQRLGRTAYTMLKRRTVFDREAFFASLN

SEQ ID NO: 68528 - protein, 345 aa, unidentified
MLHVGLDLSRHRLDVRILDEEGASVAELQMAPEGGELRRLASRYLVEGPVRAVIESMNGARFVHDTLELAGWDVEIADAVKVRGLAPLACKTDRIDAFVLAELSRRDLVPAIWLPDPGVRGHRERARFRLHLVTHRVQLKNRIHASLIAFGHACPTADLFGVGGRQRLAELAFPEPWASDIAACLALIDHLNDQIAGIERDLRREGATHPYVPLLMTVPGISWVLAYTIAAEIGDIARFDSPKKLCGYSGLCPRVYQSGSQDRRGKLAKNGPKHLRWALVEAAVHAARHPAYIDHYQRTKVRLGRQRGAKIARVEIARKLAEAIWHMLTKGEPFAPVGPASRLAA

SEQ ID NO: 68529 - protein, 362 aa, unidentified
MFVERTSVGLDVHARSVVASALDTVTGEVVEARLVPDNEIVTEWVRRLPGPWAVAYEAGPTGYGLARHLAAVGIRCEVAAPSKLQRPSGDRVKTDLRDARHLGKLLRLDEIVAVRVPSVEQEQARDLVRAREDARQDLMRARQRLSKLLLRHGHVYSGGNAWTLKHDVWLRSVRFTDPVGSITFDSDYDAVLTVTARRDRLDTAIETMAVDSLYTPVVARLGCLRGVSTLTAFALAVEIGDWERFTGRSIGAYVGLVPTESSSGEHTARGSITKAGNGHARRLLVEAAWHHRKPYRPGVTLRRRWDAAPAAARARGDAGNRRLQRRWAAFDARSKKPTIACVAIARELAGWTWSLATLDPDT

SEQ ID NO: 68530 - protein, 347 aa, unidentified
MAHIGVDLHQNSFTVCRLAADGSETFETWQLCAADLDRFCLSLDADDEIAVEATGNSAWFRDQVISCVGRVVTVNPRQFQVIRKSVKKTDRNDSRALAFFLSKDMLPETRPKTQAQSELASITHTRDLLVKQRTRLLNKIHALHNRHGIKLKKESLSSKRRLMALDIGRFSTLERIELTVVRDQALSLSGSIAELDREIERAAGAMDGYDSLVSIKGIGPRSAAVFLAGIGDVNDFESADKLAAYLGIVPRVNRSNETDNPGRITKRGNKLVRTTLVQCTLIAIRYSGYLNAYYRRVKERRGAGKAIIATARKLLSIIYETLKNRWIFEDFTTFTRQRGPVPAGQPS

SEQ ID NO: 68531 - protein, 445 aa, unidentified
MSAWLFGVPWLLIEICARSLLYGCVGGVFHGPVSIPGNRGTENAHVAAQDMAWVGIDVGKTHHWVCVVDADGKVLLSVKIGNDEAEIVALLAQVASLATRLIWAVDIIGAPSALLLALLARAGQQVRYASGRVVAAMSAAYAGEGKTDSKDAYVIAETARLRRDLAAIDADTDLVRNLAVLTGHRVDLIADRVRMINRLRDLMTGVFPSLERAFDYSSHKGALVLLTGYASPDRIRRVGQTRLVSWLRNRNVRGSADVAARAVSAAKAQSVVLAGQELTASIIAELASGILALDERLKALDARIEQTFAEHPQATIIQSMPGFGPFLGASLLVGAGDLRAFPSAGHLAAAAGLVPVPNDSGRRTGNLHRPLRYSRPLRHVFYLSAQTSMMRAGPNRDYYLKKRARGATHSQAVIALARRRIDVLWALLRENRTWTATPPPLAQAA

SEQ ID NO: 68532 - protein, 343 aa, unidentified
MELYVGMDVSLKETSICVVDGSGEIVSEGTVISEPAAIAEFIEARAGCALRIGLETGPTTTWLWHELRALGLPVICIDARHAKAALSMQINKSDRNDAVGLARIMQCGWYKEVQVKSVSCHELRAVLNSRAQLVKIKRDLENQIRGLLKNLGLIIGKAGGTVFTRRVEELLGRHGLLWEAVRPLLEVREKVRREIAGLYRRLLGLARNDIDSRRSMTVPGIGPITALAFHSAVDDPTRFRRSRSVGAYFGLTPRRFASGEVDWSGRISKCGDAMVRSYLFEAAGVLLTRVAHWCKLKAWGLRLWRRIGFKKAKIAVARKLAVILHRMWRDGADFIWSSKEAAA

SEQ ID NO: 68533 - protein, 317 aa, unidentified
MAKRVEKITLGIDVAKNTCVIHVWESSETLELPNQPQAIKAYLKTLQGLVRIALEPTSHYHRAWVDMAFARGFKVYLVNPRQLVHYREAVHQRNKTDPEDAWLLARFLAHEANQLRPCQPQNTQAQSLWALLKRRAKVVEARKQLQLSFREIQLSAQALFTQFKCLLERIDQRIQRTIQALGWGDDYQRCASIPGIGPLNAATLVAAYHRGVFASSDSFVAFIGLDVRVRESGSYKGKRKLTKRGDAEIRRLLYCATQAASCYPPFRAYHQKQIDKGLPKIAAKVILARKLARIAFSLMQNQTQFVKKQEILLASVP

SEQ ID NO: 68534 - protein, 354 aa, unidentified
MNTTQNSTKSKIVKVIGVNLAKDHCDVIGYDENGKICLRLDGCSYAKLREILANLPQAVVLMEACKGSMFHARSIADLGHEVRLVKGTDVKALRNVNHKNDLRDAAYIAKLYFVPGTTYVYIKSQQQQSLQFLQNEYKSLQELRIQVGNQIHAGLEEFGCPVRKSSKFIKTRMVAHLEKHAELIPEDVMASFKRRREIWLNLLQQEEEAKRRLEQVAATDANAKRIMTVPCVGPQTAVGLLVHVGVDFGRFKNSRQFAASLGLVPKQNSTGGNNTLNHITKCGPKSLRSNLVQCAQLVLMYAEKWKGNFGDWVRKMRDSGKKHGVIVCAIAAKLARIIYRLMKDKVDYTPILSC

SEQ ID NO: 68535 - protein, 405 aa, unidentified
MKQPATRHYAGVDWASRTHAVCVVDQHGAIRARFDIPNTGKRFTGLCKRLAKLKVAGVAIERPDGPLVEAMLDAGLKVVVITPRQVKALRSRYAASGAKSDPADAYLLADVLRTDGHRLAPLTPDSDPTKILRALSRTRKDLQEARVALCNQLTAQLERCFPGAIGLFADLHSPVAVAFLRRYPTSHAAAGLTQAKLAAFLRRLHYPGRTPVAILLGRIQTAPVSGIGPAEAAGRAVCVLALLDAIQVTARQERELEAEIIERLEVHADAQVFTSLPKAGHGVRAAALLGELGDVRARFPDNDCLAALAGAAPVTITSGKRRVVKFRWACDKKLRAALIDFADDSRHASPWAAKVYADALARTGRHPHAVRILARAWIRVIWRIWQDGMAYDPAKHRGAVRLLAA

SEQ ID NO: 68536 - protein, 436 aa, unidentified
MESTRRRMFFLRASSAARRRGARMEVLYVCCCGLDVHKKSVTACVLWAEAKGKVRKEKRRFSTFTQDLLKLADWLRECGVTHVAMESTGVYWKPVWNILDGQFEQVLLVNAQHIKAVPGRKTDQKDSEWIAELLQHGLLRSSFVPPQATRELRDLTRYRVSLAQECNRIANRIQKVLEDANIKLASVATDALGASGRTMLDAIVGGQEDAEQLAEMSKGLLRNKRPELKLALQGRVTEHHRFLLKEMLDDLRHVEAKMIVLESEIAKRLLPFQDEVERLCTIPGVDKVTAWGLLSEIGLNMDQFPSAGHLASWAGMCPGNFESAGKRLSGRMRKGSAFLRRHLSQAGWAVSTKRDSYLSALFRRLAARRGKKRATMAVGHAILVIAYSLLKRKQNYRELGADYFDKKQGDTLKRSLVRRLERLGHVVTLQPAPQMA

SEQ ID NO: 68537 - protein, 412 aa, unidentified
MKIVHEICCGIDVHAKMLVACLILADGKKEIHSFSTMTADLLRLRDWLVAAGCTHVAIESTGVYWKPVFNILEDALTVILINPDHARALRGRKTDVKDAEWLGDLLRHGLLRASFIPPLEIRELRELTRYRQSLVHEQSAVANRIQKVIESANIKLGQVASDALGASGRAILWELTRGETDPVKLASLAKGKLKEKRSELERSLQGRLTPNQRFVLRESLLHWEELERAEGRVTKEIDQYLKDRPKLSQARDNLDSIPGLATRAAENIVAEIGVEMEGNFPSDAHLASWAGMCPGNKATGGKRLSGRTRKGNTYLRSALVQAAWGATMKKNCYLSSQYTRLAKRLGRKKALVAVGHSLLIIIYHVLQSGQSYTELGGDYFDRNHVEHQRDYFIRRLQMLGLKVTIEESSAAA

SEQ ID NO: 68538 - protein, 309 aa, unidentified
MKEELVYLGVDIAKSHLDAAIGAQKHRFCNDTVGHRQLVRWIEQTEAAVQVICESSGGYERRLVQALARARIKVSLVQANRVRQFARAAGILAKTDRIDAEVLCEFGKVMQPQTVTAATLEQEHLRELESQRRHLTHLLVMEQNRGARVSDASVVRLNRSLINQIKKQIEKLDLLIKEHIEQSPRLSAKAEKLTSIKGVGLRTAALLLAQMPELGQLNRREVAALVGVAPFNRDSGKMRGKRAIYGGRRFVRHGLYMAALVAARHNPILRNFYLRLRAAGKPAKLALTATMRKLLIVLNSALKRDLTYA

SEQ ID NO: 68539 - protein, 348 aa, unidentified
MAEQRSYTGEHIYVGVDVHKNTYTVTCVCQRQIVKTATVPAEPARFAESLSRWFPGAILSSAYEAGFSGFVLHRALTTAGITNLVVNPASVAVAANDRVKTDRRDSKRLAIDLADGRLRSIAVPTEAEELARLLPRTRAQIVAHRATIARQIKAKLHQFGLIPPASRRLMSRRYLREITTWPLPPELCARLTLLADQWRFATRQLLELRRLLRAQAQAQEELEKVSRSAPGIGEVVARTLATELGDMTRFTNERGLFSSTGLTPSEYSSGASIRRGHISRQGASRLRHVLVETAWRALPRDPALQEIFDRIAATRGKQRAIVAIARRLIGRIRACFRHGTLYAVGTAG

SEQ ID NO: 68540 - protein, 481 aa, unidentified
MSKPTQHSKKPGEKKTAAGQGKRSRKKKGMCLEDRPILEPNAAGIDIGAREIFVAVPPDRDADPVRVFSTFTEDLEEMAKWLVSCGVTTAAMESTGVYWIPAYDVLEQHGVKPCLVDAHGMKNVPGRRTDWHECQWIQFLHSVGLLRAAFRPDGEVCTVRSLMRHRSDLVQMTNQHIQHIHKALTQMNVQIHHVIDDITGVTGLAIVDAIVDGQRNPLELAKLRDPRIKASEETIVKSLQGTWRPEHLFTLKQSRQMYRHYQDQIAACDEEIEKLLVAFQPRVDPAEKPLPPDRKKRKRGRQKKNAKTKQGFDLRTESYKIFGVDLTQIPGLMAMVLTLFSEVGRDMSRWKTAGQFVSWLALCPDNDITGGRVAWRGMRRVHNRAGELFRMAAYSLHHDKSPLGDYLRRMKSKLGPTGATTATAHKIAIIFYTMVKKQVEYDATLWAERDTQREKRFEAKLKRQAQQLGYKLVPIEEKPAA

SEQ ID NO: 68541 - protein, 392 aa, unidentified
MVCVGIDVAKDKHDCFILSSEGVVLADAFTIANNREGFEMLLQRIRTCTRPTDNIKVGLEATGHYSYNILGFLLDNGLTTFVLNPLHTNLYRKSLSLRKTKTDRIDARTIASMLMSDVDLKSYTDTAYHNEELKSLTRYRFEKVQERAKLKVSVSRLVNILFPELETLVSSLHTVAVYTILREFPGAKQIAAAHLTHFKTVLSDASKGRYDREKAVAIREAAKTSIGSIMPAKSLELQHTIRLIRELDEEIEEIELAIKAIIDEMAPPILTIPGISYRMGAMILAEIGDFSRFDSPDKLLAYAGLSPSTYESGKLKAAGAYAHMEKRGSRYLRYALFNAAKYVCIWEPSFAAYLAKKRAEGKHYNVAISHVAKKLVRLIFALQTSGKVFQPA

SEQ ID NO: 68542 - protein, 320 aa, unidentified
MMAQNSLVVVGIDVAKDKVDACIRSLSQRQTFPNTTQGRRKLTTWLRKHKVDKAVMEASGGYERNWAKALREAGLLVRIVDPKRVRNFARSAGRLAKNDAIDAEMIAWFAETFGEATCQVYDAEREKLVQIVYARQALIDVQTDLQNRGEHSVPDVVQRMQTRLLKKIAAELATLEAAMVAMVKASPRLAELAEIIESVPGLAEITSAGLIAAMPELGQVNNKAVASLLGVAPYDDDSGKRRGERHIKGGRRKVRNLFYMACLGAATLHNPMLKAFYRHLLAKGKEKKVALVACMRKLIVILNIMIARREKWDPSRYALG

SEQ ID NO: 68543 - protein, 450 aa, unidentified
MSKKRYKVAPLPVIEAHAAGIDVGATEIFVAVPADRDPEPVRSFQTFTVELEKLADWLQHCQIRTVAMESTGVFWIPLYQILEKRNIQVLLVNARHVKNVPGRKTDVEDCQWLQHLHAVGLLRGSFRPDDEICALRSLWRHRDNLIQLATIHLQHMQKSLDQMNLQIHHVISDLSGTTGLAIVDAILAGERDPRRLAQLRDWRIKASEETIIKSLVGDYREEHLYVLGQSLECYRKYQKMIQELDIEVKQRMGRLPAKVDPQQKPLGKERNPRKTPRRTEPVELRHELYRTFGVDLTQVPGINPLTTQVLLTEVGPNLDRFPTAAAFSSWLRLCPEPRISGGQVLSSKTRPTKNRAALALRLAAQALHRSQTFLGDYFRRMKARLGPPSAITAVAHKLARIVYHLITTQQEYDVTVFQEQERRTADRKRSRLYAQAKELGFQLMPVESVP

SEQ ID NO: 68544 - protein, 339 aa, unidentified
MYPFYLGIDLHLKRTYMVLMDAKGEVIDKQRITNDDISKYLQEKVPQETYAVLEATRNWPFMYDILNEHVDKVDLVHAKGVRAIANAAVKTDQIDASTLAHLARMNYIPKAYAAPQEIRDLRQLLRHREWMVNQRSKAKNRIHTVLATYNLVSPFTDLFGAAGREYLHEVMKKDIRPTACQVIEDHLALIDHLTERIQIIEKSISLNEKQGHIVNLLRSIPGVGKLISLIILAEVGDISRFRSPKALCSWAGLTPKVHSSDAVVQHGHITKEGSRFLRSAMVQAATTACRVSPKWYRVHEHMALRCGRRAARVAVARRLLTVIYYMWKKDQPYQENYGQ

SEQ ID NO: 68545 - protein, 413 aa, unidentified
MEVVVACCAGLDVHQASVVACVNSTGRGGRSHKEVRTFGTMRADLIALRDWLKQAGVTLVAMESTGVYWKPVFEMLEDDHDVIVANARHIKNVPGRKTDVKDCEWISDLARHGLISRGFVPPRDIRDLRELNRYRRKLAQVQTGERNRLIKVLETAGIKLAGVASDVLGVSGRAMIRALIEGEDTSEVIARLARGRLRKKQPELARALDAPLKPHQRFMLHTQLVRIEQAEADLERIDAELSELAAPYARYIELLMTIPGINWINAVTIIAEIGIDMSVFLSAAHLASWAGLCPGNNESAGKKRSGNVRKGNVILKTTLVNAAIAGSGNRGHKGTFLAEKFRRLAARRGKMKAAVAIAHKILVSIWHMLSDGTSYQDLGAGFLDRLDRTRNASHLVRRLINMGFGVQLTEQAA

SEQ ID NO: 68546 - protein, 340 aa, unidentified
MSEISIIGLDIAKHVFQVHGADASGRAVLRKKVSRAKLLPFFASQPRCRVVLEACGGAHHWARELARLGHEVQLIAPAYVRPFVKRQKNDAADAEAICEAAQRPSMRFVPIKSEAQQAAAMVFRGRDLLVRQRTQISNALRSHMAEYGWVAPKGLAHLDKLATLLADPTAVPEGVRSVCTVLLESLALLDRQIAALDKEIVRRSREDEIARRLMTIPGIGPITATAITALAPPPGTFAKGRDFAAWVGLTPRQHSTGGKQKLGAISKMGERTLRRLLIIGSSAVVLQASKRGAPRGSWLEQMLARKPRMLVTVALANKTARIVWALLMKNEDYRAPVVAA

SEQ ID NO: 68547 - protein, 404 aa, unidentified
MWYVGLDWADTHHDVEVLDEAGKRVGVRRFAHSHAGLNELQAFLLGIAASPEDLACIVETNHGLLITFLLEAGIPVYPVNPKTANQLRKAAGAKTDQIDAHLLAKLGRLDLAELRRLEPDSALVQELKTLTRDQDALIQTQTRLVNQLTACLKEYYPAALHLFAKGKPRSTLLFLQTYPTPQAAQAASLEEITATLRLGKHTNPTKAAPKIFEELHRPQLVASEVMVRAKSRLLLSLVKQLLVVIQEIESLDKAIRPLFLRHDDHEIWSSLPRAGKHLAPRRLPEWGEDRTRYADATSVQTLAGTAPVPFESGKYAKAHKRFACLKPLRNALQQFAWQSTRKEAWALAYYQRKRAEGKTHSMALRALANVWVRIIYRMWVNKTSYQTATFEAAKRAHAPRPHAA

SEQ ID NO: 68548 - protein, 326 aa, unidentified
MLQGWATKEDMMTHPPVFVGIDVSKAQLDLALRPEGRFAAPNTEAGIAQVLTHLQALSPTLIVMEATGGLELPLTGALAAGGMPVVVVNPRQVRDFAKATGKLAKTDALDAQVLVHFAEVIRPELRPLPDEQTQMLAALLTRRRQLVEMLTAEKNRLASARLPIRKNLRAHITWLERALHQADADLAEAIRDSPVWREKDEWLRSVPGVGPVLTTTLLANLPELGTLTSKQIAALVGVAPLNRDSGTLRGRRTVWGGRAQVRMALYMGAIVAARFNPVIRNFYQRLCAAGKAKKVALVACMRKLLVILNAMLKHRAPWQPHEAQHA

SEQ ID NO: 68549 - protein, 344 aa, unidentified
MIWIGLDVHKGYSRMGMFDPASGAIQDLGTVRNEPSMLEETLSELASPKTVVLEAGRSSHYMAGVLEAMAEQVWIVDPGEVRRLQRTIAKTDRRDAAALAWWAGKGVLTPQWRPDAALLDLRELTRGKTVLTRLSTQVRTMMRMLLARHGWECPHRDLLGERGQVWLDEVELEGHAGRMLAALREILVVIQAKADAFECLVERESSTHPVAQRLRTIPGIGPFLSLALAAEIGDINRFPSPPHLRGYSGLVPAVHQSGQKDTRGPLTKVGNAWLRYAAVLATQRMAQMRHPDPKLKHVFLSVAFRHGRNPGKIAAARRLLDLIYHLLKAEEDYQPPIPRMARVN

SEQ ID NO: 68550 - protein, 313 aa, unidentified
MYYIAVDVSKKELSVYDGKKDMTFLNTEGLSSLKKYLRKHYRDFNQLIFLLEATGSYSDYLIEMCAQYRIKALIINPKASHHFAKSLGIRNKTDKIDARMIYQYQKLINTQMITVPRINKEAKTLSAYLVSYQLAMKQRIALDNHLEHVRDKDLFALLQKDLKRAYRLEEQILKRITAYILKHPRLKADYQRLLTIPGIGKKSAPALLYLFITYQGTNRNQITALCGLDPIQRQSGTSVSGKPKISKHGSRLIRKVLYMPMLSAIQVNPRIQAFYQRLLQNHKVKKTAVIAAMRKMILIAHAIYRDKTEYVPI

SEQ ID NO: 68551 - protein, 461 aa, unidentified
MNYYFLGIDASKGYSDFVMLNAKKQPVIENFQLDDTFDGHARLYELLARFNQDHPEAAIYAAVESTGGYENNWFQALLKFQASLPIKTAHLNPLGVSHNHKADLKRNVTDKISAQNVAEYMIAHPEKVSYQHQDSLASLRKQWGFIKMLTKQSGQMLNQLESLVYNANPEILIYCKDGIPQWVLKLLTRYPTALRLSKARVESVARIPYVSAARAQQLVATAKKSVASADDQVTEQLIGATVKQILDLNNTIKAQTKILTDKCTVPEIELLKTFNGISDYSAIGLMLEIQCVQRFMSSKKIASFFGIHPAYKKSGDGTWKYRMSKKGRSEPRRILFMVAMSAIKSNPLIRSIFQQAVQRGMVKKAAVGLCMHKILRIIYGMLKHNKAFDPEIDRKNRQKKPLRQRQVRQDKDRRYQGFDSTAPISRRQQMKRKERKQLSQNVSNVECGINQASVPVTELAN

SEQ ID NO: 68552 - protein, 344 aa, unidentified
MNQIIRIGMDTSKHIFQLHGVDATEQVVLRRKLRRNQVLEFFAKLPPTVIGIEACGAAHYWARELRRLGHEVKLMAPQHVKAYVKRNKNDGRDAEGLCEAMSRPTMQFVPVKTEEQQAALMLAGVRQQLITRRTQLGNAIRGYAAEFGLTAAKGLDKIEPLLAQIAQDQTLPEMARELLALQGRDYARLQIELKAIEAKLMAWHRANPDSRRLAQIPGVGPIGATALVMKAPDPRLFPSGRHFAAWIGLTPKDHSTAGKTRLGKITRAGDEMLRSVLVAGATAVIKQAKHGRGSPWLLALLKRKSPKLAAVALANKIARIAWKLMVTGESYDGARMLGVSAFAA

SEQ ID NO: 68553 - protein, 327 aa, unidentified
MQGWAGEVEDMVETSPVYVGIDVAQEHLDGAVAPAGEEWRSPHDEEGIAQMVARLRALRPALVVLEATGGVEVMLVAALAAADLPVVVVNPRRVRDFARAMGNLAKTDRLDAQVLALFAERVRPPVRPLPDAESQALRALVTRRRQVVEMLVAEKNHRRTALPPVRRRIERHITLLEQELREMDDELSRALRASPLWREQEDLLRSVPGIGPILAATLLADLPELGTLTRHQLAVLVGVAPLNRDSGKWRGKRTTWGGRAAVRAALYMAALVATRCNPVVQAFYQRVLAAGKPKKVALTTCMRKLLTILNAMVKHGTPWNPDYALTH

SEQ ID NO: 68554 - protein, 349 aa, unidentified
MKRICRIGLDIAKNKFHIHAVDQHDKDLLSKQLPRKDVLSFFATIPVCVIGLEACGGAHYWARELAKFGHETRLLAPRAVKPYVLNNKTDAADARAICEAASRPSLRTVQVKSVEQQDIGAWHKIRERKVKERTALANQIRGLLHEYGIIIPQGISYVRKQLPVIVEDLNNILSSCARDYFSELYSEFVELDLLIAKYEARILAMAKNHEDCKRLLKIPGVGPLTATAIVAHVGNASHFKNGRDFSAYLGLTPKEHSSGGKQRLLGITKRGNIYLRKLLIQGSRVVLHWSRIKAHPEMGWRKKWLLSIADRRGPFVAAVAQANKTARIIWAVLAHGVEYQPTLDNISNQ

SEQ ID NO: 68555 - protein, 366 aa, unidentified
MKKISTVQVFGNEIFKEQKLTIGVDLGDRWSFYCVLDEAGKIILEQKVSTTPEAIKQTFGKIPRSLVALETGTHSPWVSRLLTELGHEVIVAHAQKVQLITKSNRKDDRHDARTLARLARIDPELLGPVQHRSAKAQIHLTVIRARAELVSARTALVNAARGLVKSYGERLPKCGTQQVSRELAAALSTELRDVLEPLLKEIESLNERIQEYDERMEKIAKEVYPEVSLLQQVKGVGTQIALTYVLTIEDPYRFLKSREVGCFLGLKPGRRDSGESKPQKGISKAGDRYLRTMMVQGAHYILGPFGEDSDLRRWGLKLAERGGKNAKKRAVVAVARKLAVLLHRLWVSGEVYEPLRNSQKAMRAVA

SEQ ID NO: 68556 - protein, 394 aa, unidentified
MGSDSATTRTGLPDAWKLELMHVAVGQPTQEVKETPMNNVGLDAHKTRCVACVKTPEGRILEQFAFQNNPHGHEELITHLKAYPEVQVAIESTGNLWIPIYNRLEDEHIHTILTNPKKTRMIAEAKIKTDRLDARILADLLRANLLSPSYVPPREIRMQRSIIRERARLTQLRTIIKNRIHTILDKHSIKTPYTDISGKHSLEWLFKLELPAGDRILLDVNLEQLNSLNHSIDRLTETIAISAIENPEVKLLMGFTGIDYYSAMLLINEIGPVARFASPKKLVSYAGLAPSTHQSGNHTTHGHITKEGNIHIRWILVEAAQHASRHDPRLSQFYLRVMKRRGHNRAVVAVARKMLVTIYHVLNHHSQYRGLRPELYTNKIRRLERITSSSLQTA

SEQ ID NO: 68557 - protein, 362 aa, unidentified
MRIIGCDLHARQQTLAMLDTTTGEVVEVTLKHEGDNVREFYSSLPRPVRVGIEATGSMQWFLNLMEELGIECVVGHPAQIRAAEPRKQKHDRRDADLILKLLAENRFPAIWLPSKELLDLRALLRHRHQWVRLRTRIQNALQSIALANGLRRGTALWSHDGQSRIASLPLAPHTAYRRSELQALYEKFEAEIEKLNQRVEEQACKRLGARLLMTHPGVGPITALATEVFLGDPARFADSKALASYVGMIPREYSSGGRQRLGGLSKQGNPLLRFLWGEAGAHAARKDPELQRFYRRKLVQKGLGKASVAVARKLGIRLWIMLRDQIEYNEFCRRGQKQQKSSDACAGMPETRNGAKSHRPVD

SEQ ID NO: 68558 - protein, 348 aa, unidentified
MSHLNQYVGLDVSLKETSISVVDEADKTIWRGRTASTPDDIAEKLLARAPHAVRIGLECGQLSNWLYHGLKSRGLPVICIDARHAHATLSLKVNKTDTNDAQGLAQLMRVGWYRETTVKGIDCRYVRSLLVVRQRLVSQITALKNCVRGVIKGFGRVMPKALKRHFVPRIREAIADDGMLAALIDPALRALEATMEELAVFDRAVMKQARSDDTVRLLMTAPGVGPVVALAYVTGVEDPARFSSSAAVGAYFGMTPRRYQSGEVDLARRISKYGDGMVRGLLYEAAKVLLSRTCRPSALKTWGTSLAKKIGSKKATMAVARKLAVILHRMWITGQPFQWQSTPLPKAA

SEQ ID NO: 68559 - protein, 318 aa, unidentified
MEQELAYVGVDVSKDRLDMAVHSHHEIRRFANTATGISNIVRHLIGLGPVLVVMEATGGLEISLAAALGEAGISAAVVNPRQVRQYARSTGRLAKTDAIDAAILADFAAAVHPDPRPLANNETMELRDILVRRSQINEMITAEKNRLGRARGLLREDIRAHIAWLEKSLADMDSSLKLFIEESPIWREKDDLLKSVPGIGPVLASTLMAELPELGSLNRKQIAALVGVAPFNRDSGKMRGKRSCWGGRGHVRAALYMATLVATRYNPVIAAFYQRLCAAGKAKKVAITACMRKLLTIVNAMVKHNTSWNYHPNQAAIS

SEQ ID NO: 68560 - protein, 344 aa, unidentified
MQIAILGIDLGKNSCSVVGLDNSGHVVVRRRMHRTSVIKFAGGLVPCVVAMEACCGAHHLGRLLRTQGHEVRLMSPEYVRPYVKAQKNDERDAEAIAEAATRPTMRFVELKAEEQLDMQTLHRVRDRLVGERTALLNQLRAVLLERGIAIPQGRRKLEQHLDAMLGGPESADVAPRMRRLLRDMRTEWQALDRRIEAFDEEFAVKVRTDPVACRLATIPGIGVLNATALVAAIGNGENFARGRDLAAWLGLVPRQATTGGKPRLLGISKRGNKYLRKLLIHGARAAMPSLARTGTALGAWLRGLLARAHPNIVVVALANKLARIVWAVLRHGREFERTDVVASA

SEQ ID NO: 68561 - protein, 411 aa, unidentified
MDVVHARCAGLDVHKATVVAGVRMPSPRCGERCGETMTFATTTRGLRELREWLIAHGVTHVALESTGVYWRPVYAVLEGVVEMILVNARHVKMVPGRKTDVRDCEWLAQLLECGLLRGSFVPPAGVRDLRDLTRLRKTLIRERSQHVNRVAKTLELAQLKLGCVVTDIMGKTGRAILQALSTGIDDPVRLADCAQGNLRKKRAALREALVGGLTPHYAFLLQQHLSLIDALDVHIATLDARIAEAMAPFAEAATLVQSMPGIAARAAQAIIAETGIDMSQFPTAAHFASWARLCPGNNESAGKRRPTTTGKGATWLRATLQEAAWAAVRSRKSYYRALYHRLRARRGPKKAIVAVQHAMVVALWHMLKHRVSHRDLGADYFDRQNTERIRRHHVRRLERLGYDVVLVEKAA

SEQ ID NO: 68562 - protein, 351 aa, unidentified
MTTMTSTPLLVTGGVDTHRDVHVAAALDGVGGLLGTQSFPTTNAGYRGLLGWLQGFGVIGSVGVEGTGSYGAALARHLADNGVQVIEVGRSNRQVRRRHGKTDVVDAIAAARAVQSGDAAAVPKTHDGPVEALRALKVVQRSASKARTQALNQLHALVLTAPEDLRARLRGLNRRQLLATCAAFRVRTDDDSLPAISRLAMRELAQRVLLLDAQAKTVLDRMRRITTATAPDLVAKKGIGPHTAATLLITAGDNPDRLHHEKSFAALVGSSPIPANSGQTQNRFRLNRGGDRQANAALWRIAIVRLATDDDTRDYVARRQAEGKTKSEAIRCLKRYIAREVFNALPTTALV

SEQ ID NO: 68563 - protein, 322 aa, unidentified
MSAPILGIDIAKQRVAVALLVEGKVRNRSFKNAPDGFESLALWLRKWGIDQVHACMEATGNYGEALAIYLHGAGHTVSIVNPARIKGFAQSELIRTKTDKVDAGIIARFCLAMKPVSWTPPSPEIRSLRALVRWVDSLTGMLTQEKNRLGSAHESVIPLIKGHINYLDKEIEEVREQIADLIDRDPDLSQKKDLLTSIPGIGTATIPVILAELDNLERFKHVRELVAFIGLAPKERLSGSSIKGKPRLCKTGNARLRKALYMPALVSIQCNPLMIVFYNRLKEKGKNGKVIVCAIMRKLVHLIFGILKSGKKYDPNYKPALA

SEQ ID NO: 68564 - protein, 363 aa, unidentified
MDVHKEKIVAVGLPEEGNHPVMREEFGGNDLSRLFKRLRQLAKSHRVEACYEAGPCGYGLARALLQAGMECRVAAPSLVPRRPGDRIKTDGRDARELALAFRANTLSFVRIPSREEEEVRGLIRCREDIAKEVRRIKHVIAHWLLIHEQRPPKGVKGWTQAHWRWMRGLELSSLNRTVLDHYLDVLHLLVERLKQIEQQVVALAETAPYRERVTRLRAFKGFSPLAAMRVIAEVMDFRRFPRAAAFMKFTGLVPSEYSSSDRIRRGRITKAGNSHLRCVLVEAVQRGTRNAHPGRDLLKRMACVSGPLREVALRCLTRLHHKFWKLTRRGVAGGKVKVALARELAGFVWAMMTLPETQEATAA

SEQ ID NO: 68565 - protein, 403 aa, unidentified
MALNSIKFIQRRFLMIYVGIDVAKDKHDCFITNSDGEVLFKSFTISNNREGFKTLFQRIGSVSDDLTKVKVGLEATGHYSYNLLGFLLDKGLTTFIINPLHTNLYRKSLSLRKTKTDKVDSCTIATMMMSDMNLKSYSDTSYHNEELKSLTRYRFDKVKERAKLKSSVSRLVCILFPELERLVPTLHMASVYALLCEFPSADAVANAHLTRLSNLLFDSSKGRYGKDTAVMFRDAARSSIGSHMPAKSLELKHTIKLIRELTIEIEAAIKRIMDEEIQSPILTIPGISYRMGAMIIAEIGDFSRFDSADKILAYAGMSPSTYQSGQLDNCYSHMEKRGSRYLRYALYNATKYVCHWDKSFGAYLEKKRSEGKHYNVAISHAAKKLVRLIFAMEKSGKAYLPTA

SEQ ID NO: 68566 - protein, 355 aa, unidentified
MNDAKYIGMDVHQATISVAVRDSRGNLVMEAILETKADTILEFIHGLRGSLSVTFEEGTWAAWLHDLLQPHVTRVVACDPRKNALLKVGNHNDRMDARKLSELLYLNKLSPVYHGEQGIRTLKELARSYITITRDLTRVMSRLKAIYRSWGIPCAGQQVYAPRYRAEWLAKISEAGVRRRAELYYQQFDALAALRQGTRRELLAEARKHPAMRLLRQIPAIGPIRAALLIALIQTPNRFRTKRQLWAYCGLALRTYTSGEYRFVAGQLKRSKKVLAVRGLNINHNHDLKNIFKGAATRAAATAGPLQDYYQACVARGVKPHLARLTLARKIAAITLLVWKKGVRFDAEHLKQQAA

SEQ ID NO: 68567 - protein, 346 aa, unidentified
MDHFAGLDVSVKETSVCIVDDTGKIIREVKVTSEPEALLAALKGPAYCFKRVGLEAGPLSQWLFSALAEAGLPVICVETRRMQAVLKAQINKTDRNDARGIAQMMRVGLYRPVHVKTLRSQKLRMLLTHRKLLQSKAIAIENDLRATLRNFGLKVGMAGKVKFEMRIKELVENQPDLRALVEPLLIVRRVLREQTVILHRRLLAIVRDDDVCQLLMTIPGVGPVVALTYRATVDVPARFRKSKAVGAVFGLTCSKYQSGEIDRTGRISRCGDEIMRTMLYEAAQSMLLRSTKWSWLKAWAMQIARRRGMKKAIVALARRLAVIMHRIWVDGTEFRWTREQAAGTAA

SEQ ID NO: 68568 - protein, 311 aa, unidentified
MEHSRFVGIDVSKDHLDVHVRPTGDSFRVRYDDAGLVTLVEHLRPLVPAVLVLEATGGYEVTVVATLARAALPVAVVNPRQIRAFARATGQLAKTDTLDARILALFAEAVRPAARPVPNEQADALGELIARRRQLVDMLGAEHNRRRLLRDRRLQRHLDAHIAWLEEALRRLDQDLTTLIRSTPVWRETDDLLRSVPGIGPVTAGTLIADLPELGRLDRRRIAALAGLAPIARDSGAFRGRRMIMGGRPHIRRVLYMATLTAIKHNPAIRAFHRRLVTAGRPGKVALTAAMRKLLTILNAMLRDRRPWHSA

SEQ ID NO: 68569 - protein, 435 aa, unidentified
MEEVTDEPLYRDRVCGIDIGKAGLVATIRVPSERDPARRMAETRSFGTTRKQVLALADWLRCWQVPAVVMEATSDYWKGPFYRLEAEGFDCVLADAKQVKNLPGRPKRDPADSRWLAACFERGAITACFVATPEFRIVRLHTRYRRDLTEERTREKQRAEKLLESAAIKISSVVTDLHGVTGRDIMDHLIAGERSPKVLAQLARRRARRKISQLEEALEGAEFFTARHAGLLAKMLQRIDRLAADIDDLTQVIEQLLAPYEEQLQQAESMPGWARRAAQDAIAETGADMSRFRTGAHLVSWAGRAPLDHQSGKRKGRSTAKKGNRYLGAVTGETAVAAGRTQTREGARHRRLARRRGAAKACVATGNTQLKVYHKLLSNPGMRYTDLGPDYYERQRDVRRQIAHHVGKLGSLGFEVTLCRIPEPDSDGPDPTQAG

SEQ ID NO: 68570 - protein, 365 aa, unidentified
MFHSGIDLHKDNAYIATVDDQGKIVRQERVPCQAAAVLSYFNSLPGSHRATVECTAGWYWLDDLLTAHGIPLVLAHAKYLKAISYAKVKTDKVDACTLARLLWMDAVPTAHKISRDLRDLRDIMRARLRLVQRRTLCLMNIHSIGQKLNCWSELSIDHRRTPDELSGAHTLWVKALYRQIDLLEAQIRELEQFLQPILLPNDDIQRLLWVPGLGKITVFSIYLEIDGIDRFESDKRFVSYCRLVPGARNSNRTVRHRSGSKDGNKYLKIAFSDAAVHAIQYYPEYRKLYSKIRRRSNEAIARTVVAKELARIVFHILRDKSGYRGLKGQPMSRIKSATWPRIDRGPVAAPGKPEHLTDAVKASSI

SEQ ID NO: 68571 - protein, 316 aa, unidentified
MADRELMVGVDVSKRSLDVALGSGGEVSQVGNDAQGIAALVERLRPLKPALIVLEASGGYQNAAVAELVIAKLPVAVVNPRQVRDFARSLGRLEKTDRLDARVLALFAERVRPEVRELPAEQELELKALVTRRRQLVEMLVAEENRLKQAPKALHHELRSHIDYLRKDLHRLNDDLEQKLRGTPLWREHEDLLKSVPGVGPVTCFTLIADLPELGRLTRREIAKLVGVAPLSCDSGTMRGRRAVWGGRAQVRAVLYMATTTALKHNPAIRAFYERLRAVGKPHRVAITAAMRKLLVTLNAIIKTRTSWRSPCPLGA

SEQ ID NO: 68572 - protein, 375 aa, unidentified
MISVGIDVSKGKSTVCILKPYGEIVSKPFNITHTQKDLSELSSMLFRLNDEVKIVMEATGIYHLPVLTYLQEKGFFVSVINPYLMKSYRNESLRKAKTDKIDSRIIANYGIDHWFKMKEFQISGVIYEELKLLGQQYRHYMKLHLLSLAELTHLLDLTMPGIKNLLASWNETNRKDKRSDFVERFWHYDVITSMSEQEFTEKYILWAKEKKYVPSQEKAKVIYTLAQESIPTLPSETSSVKMLVTEAVRVLKEVDATLGLILSRMQEIAKTLPEYSVVREMGGVGNTLAPKLIAEIGDVRRFRNGKALVAFAGIDPPPYESGQFVGCNRKISKRGSASLRKVGYETMRSLKMRSRPEDPVYRYVVKKESEGKRVV

SEQ ID NO: 68573 - protein, 409 aa, unidentified
MTYRIAGIDVHKRMLAVVIADVAVEGEYQFERRKVGTSPSEMCRLADWLVAEQVEEVVMESTAQYWRPVWATLEQRWRPKRLQEGAGARSGQLHLAQAQSNRGAAGRKKDFPDAERLVKRLAAQELRLSFVPDVEQRLWRTIMRRKHQLTRNRVQFQNRLECLLEEAHIKLSSLVSDLLGKSARRMLQAVAEGAASPEAIAALADRRLRATAQQLSDALGACRDIHPVYRQLLKMALEELKLIEEQIDKLDQEMARLLSAQQEVVQRLAEVPGLGADSAQQIIAEVGPAAAAFPSAKHLASWVGVCPGEEESAGVNYSHRSPKGNRQMKGLLNQAANAAARTKGSIFEFVYRRLVVRLGHAQAIGAIAHRLCRLIWIILHRAIRYEEHGPAVSRSKSERRATLTDLPPG

SEQ ID NO: 68574 - protein, 357 aa, unidentified
MEGLDEERRDALVFLGVDTHSEAHVAVALDGAGGRLGELVVPNDRAGYARLWDWAMSLGILVAAGVEGTGSYGAGLSRFLRARGTSVQEVNRTSCQHRRRHGKHDAGDAEAAARQVLSGTAAGEPKGADGAAESLRALRVARRSAVKAKTQAANQLHALLSTAPDELREGLRGLPTKHLAAKASRFRCGAGPVDPARATKLAMRSVARRHQALSGEIAELDAHIEALVEEAAPELVALEGVGPDTAAALLIAAGDNPERLKSEASFAHLCGTAPVPASSGKVVRHRLNPGGNRDANRALHVVALNRLRRDPRTQEYLARRTADGKSKKEALRCLKRYIARETYRAVLLDAGARRPPG

SEQ ID NO: 68575 - protein, 348 aa, unidentified
MPRSAKTVTEHGAPSVVPSNPNSRPGRKASPHLQGRVKMEERFVGIDVAKDRLDVHVRPNGQAFAVARDGEGLAQLVEQLRALSPRLVVLEATGGFETVVAAAVAGAGVPLAVVNPRQIRSFAKALGRLAKTDALDAEVIATFGEAIRPEPRPLPSAQAQALGEMVARRRQLIEMIVAEGNRRRQLTQRHLLKGIDRHLQALQKELTELEQDIDDEIRGSPVWREKEDLLTSVPGVADKTARTLIADLPELGTLTRRKIAALAGYAPMNRDSGTMRGKRHIAGGRSSVRCALYMATLTAIRCNPVIRPFYLRLRAAGKPAKLALTAAARKLLTILNAMLRDKTAWQNP

SEQ ID NO: 68576 - protein, 313 aa, unidentified
MLYVGIDVAKNKHDVTALNVPGKTVLKPLTFSNNKAGFELLDLSLRQLNQDCLIALEDTGHYAFNLLNFLHEQGYEVYTYTPLLIKEFAKSLSLRKTKTDKKDAHGIALKLLSDPNREQFQHDNRQVELKILARHIHRLKKKQSDWKVQYTRCLDIIFPELDKIVGKHSEYTYQLLTRYPNPQKRIEAGFDKLIEIKRLTASKIQDILSVAPRSIGTTSPAREFEIIKHYKRLIDKVEKCVNDLMAEFNSVITTVTGIDNRLGAVILAEIRNIHAFDNPAQLQAFAGLDSSIYQSGQIDLAGRMVKRGSPHLR

SEQ ID NO: 68577 - protein, 334 aa, unidentified
MQVVTTVGLDIAKSVFQVHGVDAAGQVVIRRQLKRRYVLAFFEKLPACLVGIEACASSHHWSRELKTLGHTVRLMPPAYVKPYVKRQKNDTADAEAICEAVTRANMRFVATKTPVQQSCLTLHRTRHLFIRQQTAVINVIRAHLAEFGIVAPVGRKGIETLLDVVANPTDKRVPVIARACLAALGAQLRRLKEQILEFDRMIMAWHRSNEASKRLDAIPGVGPVLATALVASIADPKAFRSGRNFSAWIGLVPKQHSSGGKDRLGNISKQGDRYLRSLFMAGALAVIRYAKIHGTTHRPWLTALLARRPTKVAAIALANKMARMVSSPNVRYWP

SEQ ID NO: 68578 - protein, 376 aa, unidentified
MRNVRFIGLDVHAETIAVAAAEPAGEVRSLGVIPNRIESIRTLVKKLGPVQQLRVCYEAGPTGYVVYWQLTALGVKCEVVAPTLVPVKAGDRVKTDRRDALKLARSYRAGDLTPVWVPDAAHEALRDLVRAREAAKKDQLRARHRLGKFLLRQGRRPPTAMKAWTQAHLAWVNTVHFDHAAHEATLLDYLHEVDHVAARIARLESAIEVAVQTAPARMRAVIDALQALRGIASVTAVTIAVAVGELSRFARPRQLMGYSGAVASEDSSGQRTRRGGSTKAGNAHLRRVIVEAAWAYRYRPAIGPALRKRQATLSAEVKGIAWKAPPRLHGRYRALTARGKCKQPVVTAVGRELLGFIWAIGVHVESHTTHEHPIAA

SEQ ID NO: 68579 - protein, 320 aa, unidentified
MASRESLFIGIDVSKQTLDVAFGADPHAPRETIPSTDEGVQLLVTRLQRLQPTLIVLEATGGLERMVFAQLLQAGVPTARVQPRRVRALAHAEGRQAKTDRLDARLLARFAERVRPPHHQATDEQRASLRDLLVRREQVIQMRTAEINRLTAAAPNLRPGIQKHIDWLDQEIRALEQERDNEAERTDEVRRKRELRESVPGIGAITALNLLLRLPELGTINRKEAAAVVGVAPYANQSGAQHKPRHISGGRRDVRSVLYMATLAATRRRLVRRAFYQRLCQAGKPRKVAIVAAMRKLLTILGAILRQQKPWDPAVHTSAP

SEQ ID NO: 68580 - protein, 449 aa, unidentified
MAQGSGLTRGDRNRNRKIGVLRAVVARDRAVLAVDLGEDKQVAVLVDHEGRVLARKIVRAKAHQLAGLLAWGAERAGGGGFAGLVVACEPTGHRWKALMGLADAAGHGFCCVQSLAVARAREGDDYTRDKTDHRDAYLIARLVIRLDCYLPERADEAWARLRHLGARRFALVADVTSGMQQAGDLLGCAWPAPLAAAARPLESVTWLAGMAVITDRCCGQPGRLRKRGYDKFLAAVRRELPRWGGKYVRHSIVKGLWEALADTGGVAAQRPGALERLHLLLGDWRALRARLADTEARMTAQLDDLGLTELVASIDGVSALSGAVMLAETGDLNRFTSGRAVVKHAGLNPSEHTSATIAGQTRISRRGRPGLRAAAWRAVWGALRHNKVLAARHARWTGRDGNRLADGQARTACAATLLRWLWAVITTRTMWDARIAAGQIPAVTAAAAA

SEQ ID NO: 68581 - protein, 357 aa, unidentified
MIPSITVLHWTTALGRSSISNLDPLYKGLLGQLDKLHKYFPDSIFKICYEASYVGFTLQRDKGYHCDVVAPTSIPSPRGKLIKTDCIDAAQLAQFYANSLMTFVAVPRLEQEQDRDLLRSRKKLLDQQTELRNHIQALLRRNGKHYKVQTNNKTHWTKLHHFWLKRTVESASGSFRVNLELLVRQLTNLNNIHTEYGQQIEALAKTPRYEQPVHALTCYKGIKNLFALTLITEIGDVKRFPHPRQLASWIRMDIREYSSGGKHNRFGITKQGNPYLRTAFVEANQRGYRTARISNDLKARRKNTAPEFIDIANRCLKRLNTKGNRLLIAGKHPNKVKVACAREIVGFVWESLNKVAA

SEQ ID NO: 68582 - protein, 465 aa, unidentified
MTTGKKLWRKQKERKEWARRLQSEDPGLDVVHPHAAGIDVGNSAHYVAVRPDRDPEPVRRFECFTADLHRMADWLQSCGVKTVVMQSTGVYWIPLYEILEERGFKVHLVNARHTKNLPGRKSDVQESQWLLKLHTYGLLNNSFQPVSEIRVLRTYWRQRGEHVRGAATCIQRMQKALTQMNVQLANVISDISGLTGQAILRAIVAGERDPRKLAALSHPRIHASPEEIAKSLEGNWRPELLFVLQQEVDMYDTFQKRIAECDQQLQKQLAALTGVTPPAQEPTQKPKAKPAAAKNAPRFDLSSELQRVTGVDLTRIDGIDVMTAQTLLSEVGLDMSRWKTESHFASWLGLCPDNRISGDKVLARGTRRVVNRAATALRQAANTLIRSRSYLGAQYRRLRTKLGAPKAITAMAHRLARLVYRMLKHGQAYVDKGTEYYEERFRQQQIQLLRKRAAKLGLQVAEIQA

SEQ ID NO: 68583 - protein, 274 aa, unidentified
MKKQVIVGIDVSKSWLDAHLVIEDNEFKEGLRIDNSVRGFKKLLKWVADHTQLDATAWLVCMEHTGTYSYKLNLFLQERGISQSMVNPLAIKRSMGIIRGKNDKADARLIALYAKRFAETLELYELPSEALQKLKAQLVQRERMVNMKRQLILANDSLKDLPERLIHQITKQNDQLKKQISRSIIELDKAINETIRSESSLQSKAQKMESIPGVGIQIAAHVLVSTQGMTRFKSSRKFACYCGVAPFEYSSGSSYKAKTKVHYLANKKLKSLFH

SEQ ID NO: 68584 - protein, 355 aa, unidentified
MTSTKYIGMDVHKESISIAVMNAAGKIVMECVIETKASMILQFIDGLRGDVHVTFEEGTWAAWLYDLLKPHVTKLVVCDPRRNALLQEGNQNDRVDARKLAELLHNNQLRPVYHADHGLRTLKELVRSYLTFTRDLTRVMTRVKAIYRSWAIPCTGKQVYGPNHRAEWLAKINEPGVHRRAEFYYQQLDALRCLRQQVRRDLLAESKKHPAWKRLCGIPSIGPIRAAVLLGILQTPHRFRTKRQLWTYSGVGIETSSSADHQVVKGQLERKKKQVEIRGLNSNYNHDLKNLLKGAAIVAATKPGPFAEFYAELLTKGMRPEMARLTLARKIATIVLIVWKRGVSFDAQHLKPQTA

SEQ ID NO: 68585 - protein, 394 aa, unidentified
MKLIGIDIGKNKHFFCVMDQQTGEIISQPVSFSNDKEGFDFLVQKIKSYPKDSILIGMEDTGHYHFALLKYLLDLQYTVALINPKTTDFNRKMQGGITKNDKLDTINICDVLDTPERKKQYRITKVNSFDLYEQKQLTRHHHNLKEEENVYKNRLQKCIDIVFPEFNKLFNSKYGTVYMNILKMFGSAENIANTDIRTIRKCFEIEGRGNRISLTPERLKECARSSIGISSSADVIQIKHLTAQIELIEDQLTEIDKKIEEFSIQNNSPILSIPGISHFSGTSILAELGDISNYSKPSQIIKFAGVAPLHYESSQFNAQHTAITKKGSKYLRKTLYQIILPVIRHNPVFNKYYQLKISQGKGHRCAQGHCVRKLLRIIYHLLKTNQQFDPQLLR

SEQ ID NO: 68586 - protein, 346 aa, unidentified
MIIVGCDFHPGWQQVAVFDSATGEIREQKVENSNGEAERLYRSLPSPARVGFEACGNTQWFEDLLDGLGHEVWIGDAAEIRASYVRKQKTDRRDAAHILKLLIENRFPGLWRPSHAERDLRQLLIHRHRLVGIRTRVKNGLQHLMLNRGVQLKQKLWSEAGQKVLRELPLEGWAAQRRQDLLNLLSGLNPQIAQLDQAVERAAHQHPRARLLMTQPGVGPITALAYVITMGDVTRFQRGKQVASYLGLIPSEHSSSKRRRLGSISKQGNPFLRMLLVESVQTVCRLDEGFRKQYKHRCHRMKKGVAKVAAARKLAVRLFWMLRTNTAYPEIARIESSPRDGVVGGS

SEQ ID NO: 68587 - protein, 462 aa, unidentified
MKNSYWEKENPLLKFMCAIKTHKTEDRGDSAMNNRMNQRLEEITINTLIVGVDIAKTIHWARFTDYRGVEVGKAFKFKNNRDGFEAIVARIEQIRNSKLLRNVFTEVIVGMEPTGHYWKAFAHYMMKLGYRVVGVNPYHTKKAKEFDDNSPTASDKKDAITIARLVKNGSYFAPYLPTDIYADLRILANSRENTMRRNNAVKNQITAIMDEYFPEITEVFKNPLTGKASRQVLKSCPFPLLIMELGESGVLEEIKKAVKKTVGIKTVQKLIEAAKTSVGVGYGIATSKIRLWQLVEELEMVEKQLAEIEIAMEKLLYETGYAERMLSIKGVGIVTAARFLGEVGNPLRFDDARQIANYAGYNLIEDSSGNNKSGTVISKRGRNRLRSLLYQMAFTMVSRNPEMKALHQHLTTRSENPLKKKQSLVVVSKKIITVIYSLLKKQATYDPARVLGAVRREMMKAA

SEQ ID NO: 68588 - protein, 348 aa, unidentified
MTTSHYIGFDVHKKTISFCVKTAAGEIVEEGRIPAERGALRSWAAVRPQPWRGAMEATLFSGWIYDTLKPYGEQLEMAHPAKMKAISAGKKKSDTIDARTIADLVRCNLLPACYVASPRIRELRRLLRYRSLVVSEAVRMKNKMAGLLMETGALYVKEKLHRKKYFARLLEELEEVPESVIDLLRLSRGALEMFECTQKRLVRELLADPELTERVERLMTIPAVGEITALTWALEVGDPQRFRSSSDAMSYCGLTAALKSSAGKQQRGPISKQRNRWLQTTLIEAAKLAPRWNLQLAALHARELERGNRNRATLAVARKLVAYLLAVDKSRQAFQVRAPSEESTPKAS

SEQ ID NO: 68589 - protein, 372 aa, unidentified
MREYTTDQIWVGLDVHQSSGTAAVLHGDSRKADVVTLPGDVNAVRKFFRHLSEEGAPRSCYEASGAGFVLKRMLDRDGFHCEVIAPSLIPRKPGDRRKTDRLDAVRLAELYRGGYLTPVRVPDEDQEAVRQLVRTRLSVQRHITRVKHRVVRVLASQGHRFTGTKSNWTQQHRAWLERMRRELAGPQRVVLSAHLDHLEYLESEQRSLDAEIERYSQMEPWRESVEALLCFRGIKTLTAMTLVTELGDIRRFRSPRGLMAYTGLVPTERSSGDVERRGPISKSGNAHLRRVLVEAAWHYRHRSRTDQRRVRRRQGQPSEVVAVAVKAQHRLNKRFWRLQERKHVNKTVTAVARELCGFVWAVLQVVARNQEA

SEQ ID NO: 68590 - protein, 410 aa, unidentified
MDTLIERCAGLDVHKDTVVACVRVPARGGGREQSIQTFGTTTAQLLALRDWLVAHGVTRVGMESTGVYWKPVYYVLEDALECWLLNARHLRNVPGRKTDVADAAWICQLVEHGLVRPSFVPPKPIRELRNLTRYRKAQIEERTREAQRLDKVLQDAGIKLSSVASDVLGVSGRAMLRALIAGTRDPETLAELARGTLRRKIPALRQALHGRFGPHHALLVGTILAKLEFLDEALGHLSAEIEQVIAPFAAEAALLRTIPGVDRRTAEAVVAEIGVDMSRFGAAGRLASWAGWCPGNNESAGRHGPGKTRKGSKWLHTYLTEAAKAAARTKGTYLGAQYARLRGRRGPARATVAVGHSILVAAYHILDRHEPYRELGPDYFRRRHSREHQTRRLVRQIEALGYHVRLEEVA

SEQ ID NO: 68591 - protein, 342 aa, unidentified
MEEVSIIGLDLAKNVFQLHGARPDGSVAFRRTVSRSKLLSFFAAIPRCLVAMEACASAHHWARQIGALGHEVRLIAPIYVKPFVKRNKNDAADAEAIAEAASRPTMRFVAVKTVEKQAAGVAFKTRDLLVRQRTQTINAVRGHMAEYGVVAPNGPVHVARLVDAMHDPESGLPASILGVCRLLLDHITTLTGQIGVLEKELRERARADETARRLMTIPGIGVICATAMEALAPPPESFRKGRDFAAWLGLTPKQNSSGGKTRLGGTSKMGQRDLRRLLVSGAIAQVRWAMRKGAPEGSWLARMMGKKPRLVVAVALANRTARIAWALMAQGGVYQASRLAGA

SEQ ID NO: 68592 - protein, 404 aa, unidentified
MKGPIVSIDVSKGKSNYQAFKNLNVKYTGSRSIKHTKEGFDEIVNLVREMEKKLETEVCVVYEATGVYHRVLKKVLEDNNIKQFIINPLLSAKTRKNDSLRCPKTDKLDPKSIAKTYYSHSLHNSHKQETIYHELRELSRYYEDILVHIRKDKVSFRAQLDVVFPGYDTLFDDLYSPVSLTVIEKYPHPEMLQKKKINTVSKVIQSKTCHRQAASDTMADKAIEYSKTIYSGCDKDDIEVLILQRFIKKLKEDMAEAERTIGEMIKLAQELPDFSIIKSIPGIGDNLAARIIAELGDMTRFKKKNELVAFAGLDPRISESGKNDGDHMHITKKGNKRLRCLLYLAVTCSIRLKRDDNSIKDFYIKKKQQSNPMCSKAAKTACASKLVRIIYSMCKTGELYQYNK

SEQ ID NO: 68593 - protein, 336 aa, unidentified
MGSYVGIDLHRRRSVIVVLNDDGDRVSWARIDNTPANLAVEIVAAGGADAEVAMEACWGWYWAADVIFECGARLHLAHPSGIAAYANRRVKNDIRDATLLADLLRMGRLLEVWVAPPEVRELREAVPYRAKLSRLRAGLKQQVHQTLGKEGVIPEFDTLWRGGVAQWLDGLRLGDVYVDRIESLRDLIERYDREIGDCDARIHRRLKGHPGYEAVQALRGVGPVLAAVFVAEIGDVTRFEHSNRLCSWAGLTPRHRESDTHLHRGHITRQGSRLLRWAAIEAVSGAVRDPRIASVKARIGARRGRNVGRVAAARHLLTLVYYGLRDGEIRCLADVA

SEQ ID NO: 68594 - protein, 391 aa, unidentified
MQIAHQPEASSAIRSDLGAIFVSLELSRSTWLITSLSPGGGEKMSKHSLPAGDIGALLARFSEIRQKAIARTGKSFEIIVIQEAGLDGFWVHRVLQKEGIESHVVDPASIATSRRRRRAKTDRIDGEALLRALLAYKRGEPRVCAMVKAPPPEDEDRRRLCRERKVLIAERVQHVNRIKGLLFCQGVSGYEPLRRNRRQQLDALKTGDGRVLPDYLKAQISRELDRLELLLAQIKAVEAERDALFAAAKAAAPTPTPAPVTMLLEIKGIGPEFAAILWMEAFFRSFANRRQVAAYAGLAPTPWQSGSVDREQGVSKAGNPRLRTMLIQLAWLWLRHQPQSALALWFKERVTRNGGRFKKTTIVALARKLLVALWKYVTAGVVIEGAVMKCA

SEQ ID NO: 68595 - protein, 316 aa, unidentified
MTDALYVGIDVAKDSFDVASDPAGLKLSLPQDPTGRQKLLDILQNHPVALIVLEATGGYERELVAHLLHAGFKVVVANPRQVRDFARGIGQLAKTDRIDAEVLARFAQVVQPQPRRQPSGQTEVLAELVTRRRQLSDLLTQESNRLPKARHATVRKSLAKSIRTLEQQIIDLDKLIRQNIESDDGLRRKDQIVQSVKGVGPGTSAMLLSHLPELGTLNRQQIAALVGVAPWDIQSGNWAGKSRIWGGRKEVRTLLYMAALAAIRCNPAIRAFYQRLESKGKLFKVAITACMRKLLVILNTLVRNDNLWSPQPTKNT

SEQ ID NO: 68596 - protein, 341 aa, unidentified
MTLVMGMDQHRAQISAEWIDTITGEISRARIAPADRAGVRKFLTQFKGVGLEVALEATTGWRYVVEELERIGADAHLAEVVQTAGLKGRGKRPKTDWADARHLRELLLIGRLPESWIAPAHLLDLRARVRCRHTLLHQRTEWQQRMQAVLYHHGAPQSRGLLKLANRERVAALKLPAAAREQLTIALQLIDAIDLQLAPFDLSLRAYARKQPGCRTLKDQIYGIGELTSVTILAELGDTRRFQNSRDAVRYGGLDITIRESDQRRAPGHLSRQGPPALRWALYEAAQAARRPSSPDRAYYEQLAARIGGNRACIAISRKLLKRSYHLLRALGDQALEPVTT

SEQ ID NO: 68597 - protein, 403 aa, unidentified
MERYAGLDLASEEHRLSLVDEGGRRLEEGRVSHDEAGIEALCTRLVAAGIERVALERPDGIVVERLLEAEMTVVAVHPNQLAAARERYRSAGGKSDGFDAYVRAELARTDMHRLRALVPDTDETKALRALTRTREDLVGARVALANQLRAQPEGFWPGAALVFSDVDSPIALAFLERYPSPADARGLGEKRLAGFLARQAYCGRRSASELLVRLRQAPEGRAGELELEARRANVVALVCALKPLVEQIRLLTSQIAAAVRAHRDGHIFLSLFRDPKSVVTAARLVAEIGDCRARYPSSEALAADAGMSPVALESGKRKVACFRYACDKRLRDAVSTLADATRHHHPWAKDVYQRAIERGLDHPHAIRVLGRAWLRLIWRMWQDSVPYDHTRHGGLQRLLADRG

SEQ ID NO: 68598 - protein, 340 aa, unidentified
MFTNFVGIDVSKSKFDLALIKGQDKEHVIQGVFDNTHKGIKSMSKFLEKEHHVQLSETIFCMEFTGVYCRPLTSFFVEQDCHVWIEMPVNIIRSLGLQRGKNDRVDAYRIALYAYKNRDDIKLWKPQRDIILQLRDLLALRERLITSQKALTNPIEELIAMGAKSAASRVRKNCQKTLSSIEKEIQQIDQELDDTIKGDPQLKELFQLATSVPGVGKLTALFMICFTNEFSMYTNPKQLACYCGVAPFEHSSGTSVRGRTRVSHMANKVLKRMLHMGAMSVIVRDPEMRTYYQRKVAQGKNKMLVINAVRNKIIHRLCAVIKRGYGYQSEIIFKERLVLS

SEQ ID NO: 68599 - protein, 358 aa, unidentified
MPAAVTYTYDNGDTQMPAVMIGIDPHKQTHQAVALDDREGELARLEVRATKTQVDRLVRWAAPFEDRTWAIESAGGLGYLLAQQLVDAGEHVIDVPPALASRVRLLGSGKSNKNDPNDARSVAIAAMRAPGLASVERADHRVVLRILAKRNGDLGRERNRVANRLHALLCELVPAGITKELRASAAQAVLDGVCPTSPAAAARHAMALELLADVRRLDAQLKESKRRIADAVTASKTSLTEVFGVGPVIAAMCIGFTGDVRRFATSDRFAAYTGTAPIEVSSGAHQVFRLSRRGNRRLNHAIHMAAVTQLRHAHSPGRAFYDRKVAEGKSKKMALRALKRRISDVIYRQLLIDADRLG

SEQ ID NO: 68600 - protein, 396 aa, unidentified
MKYLKQIVGIDVARNELVVTLGRMREDLSIELCARKTFANDKNGFWSLVCWAKKLTDSSVSVRFVMEATGAYHELLAYYLVERGDEVSIILPSKISNYVRTLETKTVTDKTSADAIARFGLERQLDRWRRPSLVYATLRQLTRERNQLLDEQTVAKNQLHAELAGALVNKQSVKRLEERLALCERQSKEIVAELSAVVKADKKVGEQVVLLCSIPGIGFLTAVTLLGETNGFDLIRNKRQLTSYAGLDVREKQSGTSVKGQSRISKRGNKHIRKALYFPALAAIRCDERYKSLYHRILSRTGKRMKGAVAVQRKILEMAYTVFSTGVRYDKYYLAKQEAQAKAAVGQTTEVELSTAISHQVAAEPSVVPDQLQSKGMARKEKNILQLVKKAELVEQ

SEQ ID NO: 68601 - protein, 385 aa, unidentified
MQKLNDLSRSLTALEPDGTLIAVIEMSLSSWLVAGIVPGIERQPLKKLAVDESALLKLLHRWREEAEKAGRRIERIAVAFEAGRDGFWLARWLKARGIEAYVIHASSVAVSREHRRAKTDRLDTELLKRSFLGWLRGERDHCKMVAIPTMKDEDAKRPNREHDSLIGERSRIVNRMKAALVRLGIRGFNPKLKRASTRLDGLRTPEGEPIPPNALAELRRDMERRRLVNNQIRQIEEERLKRIEQAPCDGPHVMVRLLARVMGVGIETADMLVHEVLSRNMRDRRAVARYAGLTGSPDESGRKRREKGLARSGNTRVRRGMIQLAWRFLLHQKNSALTKWFRSRTENARGTRKPMIVALARKLLIALWRLVREGVVPDGVVLRPA

SEQ ID NO: 68602 - protein, 340 aa, unidentified
MKKTMKFYLGMDVSKAWVDIAVLCVSNGAKQPVETGHFDNTAAGMKVMGQWLKKLKVSFDANSLLVIENTGVYHRLVWEYCSSQGLPIHIGNATHIKWSFGIARGKNDKIDSQRLCSYAFKNADELKATPALNPVFLTLKDMMTARSRLLAQKNSMKVYLGELRRTNSKEVQLIMEQAHQAALEGIKASLKIVEKQIHQMIQEDAAILSNYKLLMSVPGIGHLTAVYIICCTNNFICKITGKQLASYAGVAPFGNSSGSSIKGRDKVHKMANKKLKKLFHMGAISAITHYPEFKDYYERKVKEGKHAQSVINAIRSKIAIRAVAVINNQASYVDNYKKAA

SEQ ID NO: 68603 - protein, 411 aa, unidentified
MEVVYEYCCGLDIHKKTVVACVVVPGPGKQPHKEIRTFNTMTADLLELADWLTLQHVTHVALESTGVYWKPAWNVLEASFTMLLVNARHIKQVPGRKTDVKDCEWIADLLRHGLLRPSFVPDRPHRELRELTRYRTTLVRERSAEHSRIQKTLEGAGIKLGDVASNVLGRSGRQMLDAMVNGATDAALLADLAKGSLRGKRAQLERALTGQVGAHQRFLLGQQLAHLDGLDQVIEQLSQEITRRLEPFLDKAERLDAITGVGRRTAEVLLAEVGTDVKRFPTAAHLASWAAMCPGNNESAGKRKSGKTGKGNQWLRSALIEAAHAVAHTKDTYLYSQFHHVAARRGKKRALMAVGHSILTIVWHLLEHDCEYVDLGSRYLEERDRQQIQRRLVRRLEDFGYKVKLEPTAAA

SEQ ID NO: 68604 - protein, 426 aa, unidentified
MYVAIPPDRDSEPVRVFKTFTADLECLVDWLIARGITTVAMESTGVYWIPLYQMLEDRGVRACLVNARHMKNVPGRRTDWHECQWLQYLHAAGLLRAAFRPEQDVCGVRTLLRHRNELVRMAVQHVQHMQKALTQMNVHIHHVISDITGLTGLAIVDAILSGERDVAKLAELRHRSIQADEETIRKSLEGDWREEHLFTLNQSRQMYITYRNNIEACDEKIAKLLGGFEAQVDIKLQPLPAHPGPSRKRRTKRTGDFRFEVRTEAYKLFGLDVTRIPGLNELAIPIFSEVGRDLAVRFPTAGHFASWLGLCPDNDKSGGQVLWTGVRRINNRAAQMFRMAASSLHHNRSPLGDFLRRMKAKLGPAAGITATAHKIAIIFYTLVTKQIEYDDSIWATRDEHRQKRFEQKLKRQARQLGYELVPVQPV

SEQ ID NO: 68605 - protein, 322 aa, unidentified
MTETFLGIDVSQATLELAGRRDGAEFADVPATVANSDAGLTTLVPALLALRPTLIVLEATGGYERLAVATLTLAGLPVVVVNPRQVRAFGKAIGQLAKTDRLDAALLALFAERIRPELRQRPDFDTTELTDLVQRRRQVIDMITMERNRCALATTRVRRRLEAHITWLEREVEDVERRLRETIEASPMWRTRDELLQSTPGIGPRISQALIALLPELGALNRQRIAALAGVAPFNDDSGGRGKERHISGGRAAVRTALFMGALVGTRRNPVLKAFYHRLLAKGKAKKVALVACMRKLLTILNAMVRTNTPWSTLMTATVAHP

SEQ ID NO: 68606 - protein, 453 aa, unidentified
MAKKAKKLQTSKGIELKIVNPNAAGIDIADSEMQVCVPADRDGDNNRRFGSFTRDLNEISGWLKACGIETVAMEATGVYWIPLFFKLQKDGFDVQLCNAREVKNISEKKTDESDAEWLLVLHSYGMLKPSFQPENAARQIRNLARHRGGLLKSASKEVQHMQKAMEQMNIKLTNVISDITGVSGLRIITAILKGERDAQTLSALADSRCKRSREEIALSLEGTWDADHLFELKQSYELYQIYQGMVEECDKEIENLLQGFVSRIDEDNVGLLRTKKRINKKNAVAFDVESYANAIWGVNAMAITGMSSGSLLQLIGELGADFTDKFDSPAKFCKWCNLVPNNKISGGKLISSRLPKRKNPVGQIFRLCANTVAKSNSPMGFYFRRIKSRAGHMSAIVATAHKMAEIFFIMVRDRVAYDEGRVGLDEETLLKRKIERTQRQLEALNAKLYATAS

SEQ ID NO: 68607 - protein, 368 aa, unidentified
MNQRTYVGLDVHARSVKGCAIDRETGEILRQSLAASDAGVAEWVSGLPGPVLVVYEAGPTGFGLARLLAAAGIECLVAAPSKLQRPSGDRVKTDARDAEHLARLALLGQISPVRVPGRADEAARDLVRAREDVRADLMRARHRVSKLLLRHGLVYSGGHAWTDAHHTWLHRQHFDDPALQAAYEAGLETAELTLDRRNRLDAKITSLAATDRYAPVVHSLMCLRGISVLTAFGLAVEIGDWTRFTGSTIGAYLGLVPSEHSSGASRSQGAITKTGNTHARRLLVEAAWHHRRPYTNASRDMRSRWDAADEASRVRGHQGNHRLHHKWEQFEARHKRRVIANVAVARELAGWCWSLAAPVQQEQPWTNE

SEQ ID NO: 68608 - protein, 402 aa, unidentified
MFYCGIDIAKYKHEATVIDQAGAAVQESISFANSKEGCEKLLALFQRLDISKEGLLIGMEATGHYWLSVYGYLLEQGFEVKVINPIQSEAFRKMYIRQTKNDRKDSFIIAQIMRFGQFSATNLSEEVIVAMRQLSRYRLALVDTCGDCKRRVIALLDQVFPEYDSLFSDTFGVTSKEVLSQYPTPEDMLTVSIRKPTTLLEKASHGRFGKEKAEQLKAAAASSFGVNFTKDAFAFQIRQLIEQLEFREGQVAELEEQISSLLKQTGSYITTIPGIGDTLGAIILSEIGDIHRFDAPNKLVAFAGLDVRVTQSGEFTGTRQKISKRGSPYLRRAIWLAASRAAFCDPILSEYYQGMRARVKHHLTAVGAVSRKLCNTIYTILKEDRPWQPIPPKGKKVSNYTE

SEQ ID NO: 68609 - protein, 348 aa, unidentified
MRFYTQQHQFYCGIDLHARTMYLCILNQDGEILVHRNMPAGPEPFLKAVAPYREDLVVCVECIFTWYWLADLCAREGIPFVLGHALYMKAIHGGKAKNDKIDSQKIAVLLRGGMLPQAYVYPAAMRATRDLLRRRMHLMRKRAELLAHVQNTNSQYNLPGIGKNIAYKANRDGIAERFPDPAVQKSIEVDLALIGHYDHLLNDVELSIVHTAKQHDPQTLSRLQSVPGIGKILSLVLLYEIHTIDRFPRVQDFVSYCRLVKCAKESAGKRYGTSGAKIGNAYLKWAFSEAAVLFLRTNPAGQKYLARLEKKHGQGKALTVLAQKRARAVYYMLRRKTAFDMSMFLQSS

SEQ ID NO: 68610 - protein, 381 aa, unidentified
MQSIKTWVGVDVSAKTLATKRRRKNEDKDEAKEFSNDGAGHRELFKWIGKGARVCMEATGVYHLQLALMLVAAGVEVMVINPRVAKDFGRALMNRSKTDRVDASTLLEYVWRMKFVAWRAPSATVLELRELGRRLSELVHTGAEEKNRFHAKNVAAISRTVISDVEAHVAQIEKRVKQIEKAAAVVIRGDADLNEQFAILTKIPGIARRSAILLLTELAVLDPTMTVKQIVGHAGLDPREYESGSSVQKPPRISKLGNARLRAILYMPALTAIRHDRGARLFYAQLMARGKKKMQAIVAVMRKLLHGIWIVLQRRMTFDSSILFAASLAKAESSDSAVAANQPEPSQDHPKGRSEAEELRQQLDPGSAQATRSRRKRSKAA

SEQ ID NO: 68611 - protein, 409 aa, unidentified
MEITCGIDWAEAHHDVALVDHDGQRLASQRIDTGITGFGSLTALLADHVEDLSTVAIAIETEKGLLVAALRAAGFTVYAINPRAVARYRERYGQAGGKSDPGDAVVLADILRTDKHLHRALPAVSELVATVKVLARQHQEAMWARQAAVNRLRSLLVEFYPQALAAFPNLTHKAALEILGAAPTPALGRKLTRSRIVSLLRRSGRGNRPGLAERIMAELRAPALRQPERVEAAFGQAVAALVDTVTAMQAGIASLETAMNTEFAEHGDAKILGPAPGLGPILAARVLGEIGDDRARFEAAANLRAFAGTAPITRASGKSKTVRTRHIRNRRLADACHWWAFAAISASPGARAHYDRRRTIGDATTPPFATSPTSSSADSGGVSRTTNHGTTTQPGHHRHRALNKSPLDI

SEQ ID NO: 68612 - protein, 409 aa, unidentified
MRPILRSCCGIDVHKSMIKACVAKGPLNKPPKIEIRTYSTMTSDLLKLSEWLKENKVEAVAMESTGVYWKPIFNILEADFPVSIANPKYLKKVPGKKTDVSDSEWIATLLRCGLIPKSFIPPKPIRELRDLNRTRRKMVEHMASEKNRLQKVLEDANIKLTSVVSKVDGISSMNMIQALLTQDEISREDIAAMVHGKLKNKIDQLVQALHGRLTDHHRYLLRLHLKQIAFLADQIKELDDVIQKKMKAFKKESDLIKTVPGIGDTTSAAIIAEIGIDMSQFPDEAHLSSWAGICPGNNESAGVKKSGKIRKGNKFLKATLCEAAWSASKKKGSAYSAYYNNLAKRRGKKRALVALAHRMLMDIYRTMKTGEPYVDEGAEAVFERNSSGRQKSAIRFLEKAGYAVTKASA

SEQ ID NO: 68613 - protein, 419 aa, unidentified
MSFKIFKFNCCGLDVHKTWIYACIGITDSNNRTEYKQARFSSFTKGLNELCDWLAKYNCKDVCMESTGKYWIPVFNILEQHSFWVTLSHPKYTKPMKGNKTDRKDAKWICDLYMCGMVKPSFIPPADIRELRDLVRYRFKLTCMITGEKNRAQNCLTVSNLKLDDVFSDVFGKSSRSITEHILQHPGEKFDIAPFVDSRCKTPITEIQAAVDGAISKEQVVKLRQCLDHIDELNKHISEVEQEILRLSDKYEAALNLIRTVPGFNKNPLTAIQVLSEIGGDMSVFPTAKHLVSWAGCCPRNDQSNQKIKSTRISRAGSYFKPVLVQVANALIKSKKHSEFTSRYKRIKARRGHKKAIIAICRMILTAIWHILSDLKPYTPEGFLESRPVKEEKVLSTSQALNLLKQRGYIIKDEPLSVS

SEQ ID NO: 68614 - protein, 339 aa, unidentified
MYYSGIDQHKRDSFITTYDSNGTVVKQARVRNSPLLIQSYFAQLPGPHKAVVESTGSWYWLADLLQKLGVELTLAHATRLKAISAAKVKTDKVDSDILAQLLRANLIPEAHKISADRRGPRDLMRTRLRLISKAASCKNSIGRMLEKFNLDDIAGLDQLYQLQARAFEEQIALLDQQVHTVECTLHPLLIPNEDVQRLLWIPGIGKVNAFTIYTKIDNIERFPSAKQFFSYCRLVPGADNSAGKNRHRSGSKAGNVYLKLAFSHAGTRAIQYYPEIKAFYKAKLRRKPQRIARTLISLEIARIVYQVLNNKEDSNGMFKNQQLSRTKQSQWPRLASPAV

SEQ ID NO: 68615 - protein, 418 aa, unidentified
MNEDGDTRVLRRYVALDIHKRYCVIAGVDWEGRVLLQPVRVEHADLEGWLKKNLRCTDYVVIESTTNAWHVYDLLVPLVERVVVANPIKVKQIANARVKTDIRDTLILARLLAANLVPDVWVPPAHVRELRQLLSQRRQLVETHTQIVNRMHSVAHRHHLKHERGKRFNEKNTVWQKDKRLSRIEQFQLELEMENRAYIEKQISRIGKEVAKMSHQKPWAESMTYLMQLPGFGVITAMTVLAAIGEVQRFESAKHLASYSGLTGGLDQSGTKLVHKGITKEGRKELRWAMVEAAQRAVKSDPVWKTRFQEMQKRMHRNQAIVAIARRLLELVWYVLTRRQPYRHFSQERIAYKYLTWAWQMDEEAREGLTRQQFTRYYLMRLGIGHDLTRIALDPKHPRKIASEAELLELRPELQHIE

SEQ ID NO: 68616 - protein, 352 aa, unidentified
METAYDGRQIVGMDLHRRRSVLVRMTEDGRRLGMARITSSPQELQAQIARAGTSPKVVLEATFGWYWAADTLTAAGAEVHLAHPLGVKAFTYRRVKNDERDAADLADLLRMGRLPEAWIAPAGVRELRELTRYRHKLVHLRTSCKDQVHGVLAKLGVPVTCTGIFGTAGSAWLDGLGLPQPYGGKVTSLRHLTGELTGEITTLSAVIADLLAQHRGYQVIQQLPGIGPVLAAVIIAEIGDVTRFKTAAQLCSWAGLTPRHRESDTKVTRGHVTKQGSRLLRWAVIEAVQRIPRDSVIGSVKDAIIARRGKEANNIAKVAAARRLLTLVFYGLRDGQIRCLSQAPAGPPGPVA

SEQ ID NO: 68617 - protein, 315 aa, unidentified
MDQTATPACFVGIDVGKANVDVELRPLGETLCVPRTGAGLEQLAARLRAVLPTLIVLEATGGFERVVLATLAGAGLPVVMVNPRQIRDFARATGRLAKTDRLDAQIIARFAEAVRPEVRPLPDAAAQDFADLAARRRQLVEMISAEGMRVDQAVHKKVRRRLAAHLLWLNKELSALDTDLDEAVRGSPLWVERAALLTSVPCVGPTLTRTLIADLPELGSLDRRQIAALVGIAPVAHDSGKHHGARHIRGGRTTVRAALYMAAWVGCRYNPVIKAFYERLKAAGKPHKVALVACMHKLLTILNAMVRTNTAWKTA

SEQ ID NO: 68618 - protein, 351 aa, unidentified
MNVAHYIGFDVHKKHINFCIKTADGSIVREGRLLAQRGPLREWAAELPFWQGAMEATLFSGWIYDTLKPYAAQLEMAHPAMLKAIVAGKKKNDRIDARKIADLLRCSLLPTCYVASPEIRELRRLLRYRNLVVRQSVRMQNKIAGLLMETGAPFQKEKLQGKRYFTDLLKNLEEVPESVKDLLRLSRGAMEMFEITQKRLVQKLLANPQLAQRVERLASIPGVGDITALTWALEIGDPRRFSSSATVMSYCGLTSALRSSADKQQRGPISKQRNPWLQTALIEAAKLAPRWNPPLAALHARELERGHRNRATLAVARKLAAYLLAVDKSGRFFQVPALPPSQTRVALDKTG

SEQ ID NO: 68619 - protein, 331 aa, unidentified
MEEVRRFVGVDVAKARLDVFVQPSRESFSVANDERGIGELLRRLEPADFVIIEATGGLEVPVASALATAGIAVAVVNPRQVRDFARATGQLAKTDALDAQVLARFGEAVKPQVRALRDAQAQALEALVNRRRQLVEMLTAEKNRRANSPKVIHKSIDEHIRWLEKRLSGLDDELAGLVRETPIWRERDELLRSVPGVGKVLSTTLLAHLPELGALNRKQIAALAGLAPFNRDSGSLRGSRCIWGGRAQVRRVLYMAVVAAVRSNPVIKNFYAQLRARGKYPKSALTACMRKLLVILNAMLRSKMSWQTPALAASTATFSPPLGAVPEHGCC

SEQ ID NO: 68620 - protein, 371 aa, unidentified
MKQSTTLFVGLDVHKNSIDVAIAEGGRDGEVRHYGTIGSDLAALDKVLRRLQARGAVLQVVYEAGPCGYGIHRHLTAQGIACLVVAPSLIPKRKGDRVKTDRRDALSLARLHRAGELRAVYVPRAEDEAMRDLVRGRGDAKMAEKKAKQRLGAFLLRHGRLYSGGKPWTRAHRRWLGDQGFAHPAQQIAFQEYVDTVAHCQERVERLTEQIRQLVPHWRLAPVVAAFQAMRGVSLLVAVTLAAEVGDLGRFDSPRQLMAYLGLVPSEHSSGATVRRGSITKAGNGHARRVLTEGGWSYRYPARVSRALQARQAGLPERVRQIAWQAQVRLCGRFRRLRARGKPQQVVVTAIAREMAAFLWAIAREVPPAVH

SEQ ID NO: 68621 - protein, 317 aa, unidentified
MDVAFKSFVGIDIAKRTLDVHVLPERTSLKQQNDSKGRGQLREKLPPPGECLIVVEATGGYERALVAELIDAGYQVAVVNPRQVRDFAKACGILAKTDRIDAAVLARFGQAVVPRTQAKIPEKQFELQDLVVRRRQLVELRTAEMNRKENVASKFVRKSLQESVDALNKQIRRFEKRIAALVQSDDDWKQKFEIVQSAPGIGPGTSATLIAEVPELGQLSRRKISALVGLAPFNRDSGEFRGRRAIRGGRSSVRCSLYMATLSARRSNPVIRAFSDRLKALGKKPKVIIIACMRKLLVILNTMVKNKTHWNPAISTT

SEQ ID NO: 68622 - protein, 316 aa, unidentified
MTPSGMFVGIDVSKAQFDVAVRPAGEHWTSAHTEAGITMLVARLVSLRPTLVVLEATGGLEISLTGACAAAGLPVVVINPRQVRDFAKATGHLAKTDTLDAQVLAQFAEAVRPTPRPLPDAQTQELAARLTRRRQLVEMLVAEKTRRGQAPGPIQKQIQVHLTWLERRLRDLDEELATAIRSSPLWREKDELLQSIPGVGPVVATTVLASLPELGILGRQQIAALVGVAPLNRDSGTIRGKRTIWGGRAHVRATLYMAAIVASRCNPMIRAFYHRLCAAGKAKKVALTACMRKLLTILNAILRTRRPWQDRWAPEA

SEQ ID NO: 68623 - protein, 361 aa, unidentified
MKRKVYVGMDVHKETIQIASLTSNTKDLVKEQQIKHEEVQIKKFIQKLKLEKSEIHCCYEAGVTGYPLYRYLKTLGVNCTIVAPGKIPRQSSDKIKTDKRDAIKLARLLRSGELESIHVPSEEDEAVRDYLRSRDSLRLDLGRNRQRLMKFLLRKGIKYSTTKYWTTSHYKWLNNLHFENEILQTTFNDYYSRVRVQEENLKAMDKKIQEIAESEPYQEKVGISRCFRGLTAMFLLSEVNDFKRFKTAGSFMSFLGLVPGEYSSGSKRKQTGITKTGSPRLRRILTEAAWQHRFSGTGSKVVVARRVGQSALVVSLAEKASLRLHKKFKNLQLRGKSPQVMITAVSRELSGFLWAAMNLVV

SEQ ID NO: 68624 - protein, 350 aa, unidentified
MMIIGCDLHTRYQQIAMVDTDTGELVERRLEHESGEARGFYAGLKGAVRVGIEATGHTAWFEALLAELGYELWMGDAAKIRAAVVRKQKTDARDAAHLLDMLCTNRFPTIWRPSLQERDLRQLLWHRQKLVWMWGAVKNQMHALAMGEGVCRKKKLFTAKGRTELEGLRLGPWASYRRQELLRMFDELQNSVKKLDQAVELAAQSEPLAARLMTHPGVGPITSLAFVLIIGPVERFDRSKQVVSYLGLNPQEHSSGGRQRLGSISKQGNPMMRSLLVEAGHTAARLDPQLQRVYQRLKFRRGAAVAKVAIARKLAVRLYWMLRSTADYAQLVRMRGSSWATLVEDSPSLG

SEQ ID NO: 68625 - protein, 350 aa, unidentified
MTITYYIGFDVHKKWIFYCVKTQDGTVVSEGKISAERSALEDWAKQRSQAWIGGLEATLFSGWIYDALKPYAVELKVAHPAMLKAIAASKKKNDRLDARVITDLLRCNLFPECYMAPGWIRELRRMLRYRNLVVSQAVRLKNRIAGLLMEEGVRYDSRRLHGKRYFAQLLDSLETPASVMQLLRLSRSSLEMLQAVERRLLHELERNRQLRARVELLRTIPGVGLILALTWALEIAEVKRFGSIGRAISYCGLTSAQRESACKPYRTPISKQRNAHLQTVLIEAAKLAPRWNPQLGALHERELARGNRNRATLAVARKLVAYLIAVDRSGQPFQERAAGAESAAVALAGV

SEQ ID NO: 68626 - protein, 353 aa, unidentified
MKCDKYMGMDVHQATTVVDVLDADGKPVLETIVATEAAAIIRLLQSLSGLLHVTFEETTQAAWLYDVIRHFVAEVVVCDPRRNKLLGEGSKADKPDARKLAELLRAGMLRSVYHGHEATRKLKELVRAYETLSVDTERTMVRIKAIYRGRGIRTPGRGVYQLKQREQWLEQLSEPGVRQRASFLYEELEQLRPLRRRAKQAMLAESRNHRAVTLLRSIPQLGPIRSAMIVATVDTPHRFRTKRQFWSYSGLAVVTHMSSEYEIKAGRVVRRRKPVATRGLNRNCNRRLKELFIGASAGGGQTEPYRTYLEGLKQNGMRAEMARLTLARKIATLALTVWKKGESFDPKKLNWTT

SEQ ID NO: 68627 - protein, 445 aa, unidentified
MSEPMPLAKSEPEWAAFAAIDWADQKHFWRLVPAGSSQQEQGELENTPEAVEAWAAALQQRFGGRPIAVCLEQARGALVYMLSKYAHLVLFPVHPTMAARYRETFCTSGAKDDPGDTASLLDLLMRHRERLRPLQPDTVETRLMQFLVEERRRTVNEKTRQSNRLTDCLKLYFPQVLRWFDGVDTALVGDLLERWPSLEELRRAHPGTLRKFFHEHNCRSEERNQERIDAIYQAVPASHDAAVLEAGALTARGLVALLRTLRDHIDKLDRRIAELVATHPEGALFASLPGAGSVLVPRLIVAFGTRRERYESAYEMQCYSGIAPVKEASGKTSWVHFRRACPKFLRQTFHEFALHSIGQSEWAKAYYQHLREDKNKSHQAAVRSLAYKWIRIIFRCWKDGKPYDEEVYLNSLRRRGSQLGAALAPATGLGWQTVAGFQKLSENKA

SEQ ID NO: 68628 - protein, 357 aa, unidentified
MEMLLTHSKQKGTSMTEIMTIGLDLAKTVFQIHGADSEGRPVLRKRLRRGQVLGFFGSVPACLVGLEACASAHYWARELQALGHEVRLIPPQYVKPFVKTNKNDAADAEAICEALLRPTMRFAAVKSADQQSVLMLHRARELLVRQRTMLINALRGHCGEFGIIAAQGAHKVVALIEAIEDPDDCRLPPLAREALMSLVVQLRAAEERIAELEKRLMAWHRSSEASQRLAGIPGVGVITATALVATVGDARQFRTARQFAAWLGLVPRQQSSGGKDRLGRISKRGDGYLRRLLVHGARIVLFWSRRKKETRSDWLEALLARRPTNVVMVAMANKTARVVWAMLTRNEAFQPNRKATV

SEQ ID NO: 68629 - protein, 326 aa, unidentified
MTLSRLTDNIFIGIDVGGAGLDVAWHRGDSAHYANRPDAIATLVERLRAGPEVTRIVVEPTGGYEKPLVKALRQAKLPVEIIHTTRFSAYRTLVGIKAKSDTSDARLLASYAAAPDEVRGRKTGHVELPEDAIRDELSALASRRDQLKHMIHAETCRLGTVQMAELRRMITIHLEALRAEDKQAHRMMLELVRQRIDLRRDQRLLKTIKGIGVKSALSLLASVPELGRVDNKAAAALIGVAPFVRQSGTMKAPARIHGGRAAVRSILYMAAVTASRHNPVLRPFYERLIAKGKPPKVALIAVLRRLVVFANAVLRSGQPWKGVITA

SEQ ID NO: 68630 - protein, 354 aa, unidentified
MAHATAAQPITVGVDTHLDSHVAHANDQLGRRVGTRSVPTTPTGYQDLLAWARGLGQPIAWGVEGTGSYGAALARFLAANGQVVVEVNRPDRQARRRRGKSDPTDAEAAARAVQAGRATVAPKAGTGQVEMIRSLRVARQTAIRARTQTINALKALVVTAPAELREQLRDLPTATLVAAAAALVPGPITSPLAAAMLALGTLAHRHQALNREIKALTAELDRLTATAAPKLVALFGIGQDNAGALLVAAGDNPQRLRSEACFAMLCGSSPIQASSGKTVRHRLNRGGDRQANAALYRIVLVRLRYHQPTKDYLTRRLAEGKPKNEIIRCLKRYIAREVFATLQPLRQEFLTPPT

SEQ ID NO: 68631 - protein, 334 aa, unidentified
MKELKSSVGIDISKDSFEVCIKQLKDERSVIKATHSFQNEFSGFENLLNWTLRKVSNPIFVMETTGVYHEDLTHFLYANGQKVAVVLANKMKHFAKSLNMKTKTDKADAQMIAQYGLERQLEWWQPMMPQMKDLRDLCRERLSLKKDLVRCKCQVHGLKHAHSTLDVVLQLKEQQIDFLESNIQIIENEIIRLTKEDKEFSQRVKNIETIKGVRLLTIVTVLCETNGFAQFNNIRQVVSYAGLDIAERQSGLFKGKTRISKKGNARIRECLYMPALSATSYNEQIRALYQRVIERNPTIKRKGVIAGMRKLLILIFVLWKKNEAYNAEYQWDAR

SEQ ID NO: 68632 - protein, 339 aa, unidentified
MKEVTTIGLDLAKNVFQVHGVDHAGAVVVRRALRRSQVLAWFAKLPPCLVGMEACATAHYWGRALRKLGHQVRLIPPAYAKAYVRRNKNDAADAAAICEAVSRPAMRFVAIKTEQQQAMAGIHRVRDLLIKQRTMLGNQLRGLLAEFGVVAAQGRRGLNELLAILSDPEEQRIPSPLREGLTAVMETWRGIERKLEAIDRQMVAAGRADATYRHLVTAPGYGPILSSAMAALVIDPGAFKRGCDFAASLGLVPRQDGTGGKVRLGPISKRGNGYLRRLLVNGATALIKCQRARQDPWVAKLLASKPRKVVAVALANKLARIGWALMTRQEDFRSRPAAA

SEQ ID NO: 68633 - protein, 405 aa, unidentified
MAAPEQVDVWIGLDVGKEEHFAEVLDDHGERIFVRSVVNDEAALASLLDRAAEHGIPGLVIDQPGSIAQLALAVARTREVPVAYVPGLVMRRAADLYPGEAKTDKRDAFVIADTGRTRRKQVHWLDAGSDELLERLRVLNGFDIDLAADQTRLSNRLRDSLTSVSPALERALGARLHQAGVRDLLTKYPTLSALKTAGRGHITRVIKARSPRLASKLTDAVRTALEAQSVTVPAEATIGRVIAELAVELDRVFARRDALAGEIEEVFLAHPFGELLSSMPGIGPRTGSRILAEIGDGSRFANGDKLASYAGLAPVTRQSGKTLNGESQSRRGNHRLKNAMFLAAFASLRSPDSKAFYDRKRAEGKRHNAAVICLARRRCNVILAMLTAQTPYRAKHQEAELAEAA

SEQ ID NO: 68634 - protein, 396 aa, unidentified
MISVGIDVSKGKSTVCIMKPCGEILESPFDIGHTADELDSLISLIKSFDEETRVVMEDTGHYHLPVATYLSSHNIFVCCVNALRMKKFCSQSIRRAKTDKIDSIKIASFGITYWNELVKAYPSNVIYDELKFLARQYYQVTGMLVKSKVNFSNLLDQVMPKINDVLSNQGENHKLTEFVSRYIHFQNILDMGEMKFTSDYCKWAKKKGYRLNERKAAEILALAQNGIPTLPNSQSVKIAVSEAVKLIHSIEESRNTILAQMQDLCNTLPEYSVVKEMDCIGDTLAPRIIAEIGDVRRFKNKHSLIAYAGIDAPPYQSGAFHASKRHISKRGNSYLRKTGYEIMQSLIKHKPADNAVYDFIQKKRSEGKCGKEAMIAGLNKFLRVYYGKVMEFYSEH

SEQ ID NO: 68635 - protein, 349 aa, unidentified
MSEYAGQQFVGIDLHRRRSVVVRTTESGEVLESIQILNDVDRLGSVIARAGEAPEVVLEATYGWYWAVDALEEAGANVHLAHSLGVKAFEYRRVKNDIRDATDLADLLRMGRLPEAWIAPPATRELRELVRHRAKLVGLRSHCKVEIHAVLAKCGIQVLMSDLFGINGQDLLDRVAMPRPYTARVQSLRRLIDDLDEEIDLFARLVRGKLVAHPGYTAVQQLPGVGPVLASVFVAEVGEVGRFTTAAQLACWAGLTPKHHESDTHVHRGRITKQGSRLIRWAAVESVKALSPRTPVGAYKARVAASRGKNIGTVAAARKQVEFVFYALRDHHVRALHRPARPPAAAMPA

SEQ ID NO: 68636 - protein, 442 aa, unidentified
MRGVPEEIPDAQSEQILARVCAVDVAKGSGMVCVRLPGEGGRRISRVWPVPATTNAVGDLAADLVTAEVEKVTVESTSDYWRIWFYLLEAAGLDVQLVNARDVKNVPGRPKTDKLDAVWLAKLTEKGLLRPSFVPPVPIRMLRDYTRMRVDLVRDRTRYWSRLEKLLEDALIKVTSVASTVRTVSTRDMVEALIAGERDPQVLADLARGPLRSKRAALVEALTGRFDAHHGELARILLNQIDHLDAEIATLTERIAVLLDQIDPAGPPLPPGGAGTVAVLDARRRLAEIPGINTESAQLIIAEIGLDMTRFPTAAHLVSWAKLCPRTLQSGTSITAGKTGKGNPYLKGALGMAAAAAARGHGTFLSERYRRVVKRRGKGKALVAVARSILVIIWYLLADPSARFQDLGADFYDRRVNTTRKINNLVRQLEALGHTVTLHPAT

SEQ ID NO: 68637 - protein, 375 aa, unidentified
MPKYSTAFGMDVHLRSTTVCALDADTGEAVTRRFPGNPWGEIAGWMGGFPGPSLAAYESGYPGFAPQRELAGLGVECVVAAVSKIPRSAADSASKNDRNDAARMAKAILAHDISPVWVPSPEVEGIRDLAGAYDGATARLATAKQRLLAFLAKRGFAYGGTTPAGNPRKYWTYDFLRWLDKVRPEDDGGVRTLAALRSEVEAAAEARADLLSEYRAAVDASPIAAEAAALQSIKGCAFALAAAFSAEVGDFTRFRSGRQVTAYFGLAPSQRSSGDSVRLGGISGAGNALVRKLAVEGSWCYAAARHQPKLMPRDTGVPLEIRMHGRKGSERLLRRREEMLARGMPQAKANAATAAELVRWLWALGTMCREGAEWT

SEQ ID NO: 68638 - protein, 408 aa, unidentified
MEVVYRCCCGIDVHKKIIVACLDQGGEQSLREFGTTTSEIKSLATWLTESGCEMIAMESTGVFWKPLYNLFELMDLDAMVVNAAHMKALPGRKTDVKDAEWIADLLRHGLLKASYIPSREQRELREITRYRKSLTEERCRETNRLQKILEGANIKLDSVVKDINGKSARKLLEKIIEDDVPTSEEEVSKMVHGRMRSKLGQLITAIEGITTPLQRKLLAQVIDHIDDLNRRIADLDRLVQDYMDEYAAAIAALCDIPGIARRSAEVILAEIGLDMSRFPSAAHLCSWAGVCPGNCQSAGRRKHGKTTKGNKPLKTILTQCAKSARSVKGSYFSAQYQRIAARRGKNRATLAVAHSMLIAIYHMLKNSVPFRDLGSDYYDSFNRDRKIHSYLKRLKALGWEPDALPGSA

SEQ ID NO: 68639 - protein, 450 aa, unidentified
MISKAYRATRVNDVDWDRLARGNEGLDITLGIDVGKHDLWPVCRWASGRFERPWRVNNPEEIPTLIALIQRMSPGRELVVALESSGTYGDALRQALADALVAVQRVSNKASHDYAEVFDGVPSQHDGKDAAVVAELAALGKAQPWAYQPASSWEQELNYWVEWMVSHRQILTTWQGRLEALVARHWPEATGVLKLSSGTLLRVLKHYGDPKALAADAQAAQRLARWGRAFLSPEKIERLLASARASVGVRVGEWERRQIGDYAEQALASRREVARAERRLRHLAVGHPVLQAQGKVVGVPTACVLWTSTGDPRKYHAAAAYRKAMGLNLVERSSGTYQGRLRISKRGSARARHWLYFAVLRLVQRCGVRPWYEAKKARDADDARRVLVAVMRKLALALYQVGVHNEEFQPRRLFGRIGRGCSSPEPPQSGTRSRRQAQEGAAPGTRATVS

SEQ ID NO: 68640 - protein, 311 aa, unidentified
MSKVFKNFVGVDISKTWFDAALIGSADPSKILHQQFSQTPDGYKKLQQWLHDHDVSLHDDTLICMEYTGIYNTGLVTYLVVQQAQLWVEMPLRIKRAGGLERGSDDRSAACKIAWYALRYHDGAKLWKPADSSIEKIKHLITQRERIITSLKHLTVPAEELKQCGCLQDAKVMEKLQQPVIKALQKTKQGIEALITKTIKLDEALYNKVQLMQSVNGIGTVTATALLVYTKGFTAFSNAKQLACYCGVVPFNKTSGSSVKYKPSVSPFANMKLKKLLHLCAMSAIQNDKEMKAYFERKTGEGKNKMSVINA

SEQ ID NO: 68641 - protein, 405 aa, unidentified
MKPVVALDVSKGKSTIVIYDQKRCIFEGEINHCQADFESLRKRMILLEQQKGQRPEIVFEATGVYSMALEKFLQDRGYIYCRLNPLEAKLQTAAMRRNKTDKSDAHELAKTHFKINRKPIFQQDTYYNQMRALSRYYDEVDEELIQLRGKMHAILQLSFPELERMITPSSALFLNIVQLYPQPSFLLVHSKTVIRNSLKKNTKKNLSLKLADKKAQELLLVAKNSYPAIDASDVRCEQVRDYASRIADLRDKKEEIIAKMVALSLDRKEYHILRSFPGIGDATACRIIGELGDIRRFKNAKQLNAYVGIDIMRYQSGNTQYRDRINKRGNKKLRKILYFMIFSMISLRKKGQNHIVDYYDKLKKQPQRKPHKVAVIACINKFLKVAFHLISHNIPYDYEIASTHS

SEQ ID NO: 68642 - protein, 364 aa, unidentified
MKIIGCDFHPSFQQIAMVDTESGETTERRLLHADGEAQQFYESLSGPVLVGIETSGNTLWFERLLEKLGHQLLIGDATAIRAAAPRHQRCDPRDARNVLQLLLEKRFPTIWVPTLAERDLRQLLKHRHTLVQMRTRAKNQLQHIAMNQGMQKKRQLWSKAGLEQLKSLALEPWTKRRRDDLLKILEQMDSHIAELSKAVAAEAQHWPQAVLLMSHPGVGPIVALATVLTLGDVSRFARGKHVASYLGLIPREDSSGEHRRLGSITKQGNSFMRFLLVQAGMSAARGDAELGRVYKRLAQRKHHGVAKVAVARRLVLRLYWMLRTNRRYPEVVRMQGSSSHPVAEVEADRLSEHPASRCCTHPGL

SEQ ID NO: 68643 - protein, 405 aa, unidentified
MKQPATLHYAGIDWATRTHAVCVVDQTGAVRARFQVPNTGKSFAGLCKRLAKLGVAGVAIERPDGPLVEAMVDQGLRVVVVTPRQVKALRSRYAGSGAKSDPADAYLLADVLRTDGHRLAPLTPDSEPTKVLRALSRTRKDLQEARVALCNQLTAQLERCFPGAIGLFADLHSPVAVAFLRRYPTSHAAAGLTQAKLAALLRRIHYPGRTPVATLLGRIQTAPLSGIGPAEAAGRAVCVLALLDAIQVTARQERELEAEIIERLEVHADAKVFTSLPKAGHGVRAAALLGELGDVRARFPDNDCLAALGGAAPVTITSGKRRVVKFRWACDKKLRNAIIDFADDSRHASPWAAKVYADALARTGRHPHAVRILARAWIRVIWRIWQDGVAYDPAKHRGAVRLLAA

SEQ ID NO: 68644 - protein, 367 aa, unidentified
MKKVNTAAAKQSKNLSQQKLTIGLDLGDRNSWYCVVDEAGQIQLEQRVRTTAKALQEVFGTMPRSRIALEIGTHSPWISRLLSELGHEVIVANARKVRLIGESRKKDDRLDAQTLARLARIDPELLYPVKHRSAQAQADLTVIRARAGLVRARTALVNTARGLAKSYGERLRGCNVRNMNPEKAESSSPELQAALEPLLNAIESLSERIVEYNERIENLAQQSYPQVALLKQIKGVGTLIALTYMLTLEDPHRFQKSRDVGCYLGLQPGRRNSGRSEPQLHISKEGDPYLRTLLVQGAQHILGPFGIDCDLRRWGLRLAERGGKSGKKRAIVATARKLAVLLHHLWVSGEVYEPLHNSSRTIVAAAA

SEQ ID NO: 68645 - protein, 386 aa, unidentified
MTKVNDLTKSLIPFEQDVCIVAVVELSQSSWLVASIVPGIERQPRKKQGPDPDSLLQLLHRWRDEAIRKGCEIRRIAVAYEAGRDGFWLARWLRDHGIDVHVLHSTSITVSREHRRAKTDRLDTALLMRAFLGWLRGEPGHCRMVAVPTLTEEDAKRSSREHETLAGECTRMINRLKAALTRLGIRGFNPKLRKAQGGLEGLLTPEGKPIPPNMLREMNNELARLAFVRAQMKATEKARLERIKEAPKAGSNPMVLMLSKVVGIGIETADMLVHEVLARDLRDRRAVARYAGLTGSPDESGARRREKGLSKAGNARVRRGMIEFAWRFLQHQKESALAVWFRSRVEAPGVRKKTMIVALARKLLIALWRLVHTGEIPRGVVLRETI

SEQ ID NO: 68646 - protein, 466 aa, unidentified
MENNYILYVGMDSSKGKADAAILKVSDRRSVKPKFLRKKLSFKFVKSEVTSFLETVRSYSDDNCTSICFALEVTGIYSTNVYNFIKDNLNDNESIKFLNTDFVNQWRNAHNIAKSDPLDAQTISTIIGTDSDVQYVNDNVFENKNGYQDLKALVHRHYQIKKIYFQEINRLIAQCDCLFPELQYVFEPKSAAFIAVLSSYPTTHDIINASRLEVFNVVYEATKHRCSMDKIDKLFDLCHDTLVPDNISSYGRSIILDLVENIKNIKGQLKMIERYIRDVASLNPAYKLLLTITGCGPLTAATVIAETGDIKRFKNADCFVSYSGTSPRNKRSGTSVETMGKISKKGSRYLRHAIYMIAEFARRHNPVLKHQFERIKNGNKKRHKLANIAIANKIARYIYSIMKNESGFVILHEHIMRLPEETQNTFFNSISLDFPENTRKQIYQYSDIDGEVHKFVYTKLEETMII

SEQ ID NO: 68647 - protein, 339 aa, unidentified
MNEVTLIGIDLGKHSFHLHAQDATGRMVFRKKLSRQQLLRTLANVPCCRVVMEACAGSHWLARQLAGMGHEPRLISPQLVRPFVVGNKNDFGDAQAICEAACRPSMRFVSPRNEAQQTVSAMHRLRERLVRERTATVNQIHGFLLEFGISLPRGAALMSRLPTVLDHETLPPRLVGLVVRLRAQVHYLEEQLRQVVQDLKASLREDDKSRRLLEIPGIGPITASALAVELGDARQFANARQFAASIGLVPRQYSTGGKPTLLGISKRGDRNLRRLLVQCARAVMQHTASRTDALSLWVKTLSTRRHSNVVACALANKLARIAWAVLARGTHYQARALTT

SEQ ID NO: 68648 - protein, 289 aa, unidentified
MEHYAGIDVSLEFSSVCVVAAQGKIVRETKVASEPEALVAFFASLGFAMKRIGLEAGPLSQWLHAGLKRAGFDPVLLETRHVKAALSAMMVKTDRKDARGLAQLIRMGWFRPVHAKSMGSQEVRALLVARKQLLGRLIDVELSIRGILRGFGLKVGVVTRKGFEGRIRELVTGHITLERIAGAMLSARATLKVEYEKLHKIVLTIVREDAVCRRLMTVPSVGPVVAITYKSAMDDPNRIAKSKAAGALFGLTPKKYQSGEKDVTGGITRAGDEMVRTGFMKPPMFCWRA

SEQ ID NO: 68649 - protein, 410 aa, unidentified
MDILYPCCCGLDIHKRNVTACLIDSDRKGRSRKEVRTFGTMTDELLALADWLAAAGCTHVAMESTGVYWKPIYNLLEANFTLLLVNAQHIKAVPGRKTDARDCEWIADLLQHGLLRGSFIPTREHRELRELVRYRTALVRERADEVNRLQKTLEGANIKLASVATDIMGKSGRAMLAGLVDGTSDPATLAALAKGRLREKRAELARALDGKIAPHQRFLLVEQLGHIDTLEEAIDRVSAEIAARMEPVADQLAALDTIPGVSQRVAEILIAEIGSDMAQFPSAHHLASWAGMCPGNNESAGKRKSGKTRKGNPWLRSILVEAARAAAHTKGTYLSAQYHRLAKRRGSKRAAVAVGHTILVIAYHLLRDGTIYTDLGGDYFDRRDRQAVERRLVRRLEGLGYKVSLAPVAA

SEQ ID NO: 68650 - protein, 343 aa, unidentified
MYHYAGIDVSLKDSAICIVDGAGKIVREAKVESEPTALITWFGSLGLTLERIGLEAGPLSQWLYAALHKAGFAVELLETRHVHDAFKAMSVKSDRNDARGIAQLMRLGWFRPVHCKSLEAQEARAVLTARKLLQSKLRDIENSLRGVLRGFGLKVGKTTERSFADRIRELVANHAGLTSIAHALLEAHAVLLREFKRLDKQVQQLARSHPRARLLMTTPAVGPIVALTYVFAIDDPKRFSSSKATGAHFGLTPKKYQSGQTDYSGRITKIGDASVREALYQSAHVMLTKPVKNCTALKSWAMRIARRAGMSKAKVALARKLAVILHRMLADDKPFNPARQAAA

SEQ ID NO: 68651 - protein, 380 aa, unidentified
MSYLGRSGLLGSTCVGGPGVVERTSVGLDVHARSVVGSALDTVTGEVVEARLVPDNEIVTEWVRRLPGPWAVAYEAGPTGYGLARHLAAVGIRCEVAAPSKLQRPSGDRVKTDMRDARHLGKLLRLDEIVAVRVPSVEQEQARDLVRAREDARQDLMRARQRLSKLLLRHGHVYSGGNAWTLKHDAWLRSVRFTDPVGSITFDSDYDAVLTVTARRDRLDTAIETMAVDSLYTPVVVPLGCLRGVSTLTAFALAVEIGDWKRFTGRSISAYVGLVPTESSSGEHTARGSITKAGNGHARRLLVEAAWHHRKPYRPGVTLRRRWDAAPAEARARGDAGNRRLQRRWAAFDARSKKPTIACVAIARELAGWTWSLATLDPDT

SEQ ID NO: 68652 - protein, 316 aa, unidentified
MAMRVSKSIVGVDVAKAELVIYLADPDLLTSITNEKPAIKRWLKTLPGPTAIAVEATNIYHVDLVELAYESGHDVYIIDGFQLSNYRKGVGGRSKTDASDARLLGRFLKNEGEDLRPWTPPPAVYGKLQSLLRRRASLIQAKTSLTQSWANDTSLKAVFATFVKSTDRLDLLVQKKLKEILREAGLLEEVARCQAIEGIGFLTATALVMAYNRGDFTSGDSYIAFLGMDLRVSDSGQKNGRRYLTKRGCSEVRRLLHNAAMSACRSNAWKEFYNHHLNCGKATTQVLVMLSRKLARIAFALMKNQSEYQPKGAVIA

SEQ ID NO: 68653 - protein, 402 aa, unidentified
MNAVGIDVSKGKSTVTIRKPGDVVLMSPCDIPHTQSAINDLIKQIKSLEGETKVCMEHTGRYYEPVATWLSDAGIFVSAVNPILIRDFGDDSLRTPKTDKADSKKIARYTLDRWAKLKQYGIMDKTRNQLKTMNRQFGFYMAQKTAMKNNLIALIDQAYPGANDFFDSPARNDGSQKWVDFIHTYWHVDCVRSKSLNAFTEHYQNWCKRKNYNFSAEKAAKIYQISSDLIAVFPKNDITKMLIWQAVALLNTASKTVESLRSKMNELASTLPEYPVVMDMNGVGATLGPQLIAEIGDVSRFTHREALTAFAGVDPGKNDSGKHIQNSVRTSKKGSPYLRKALFQIMDSLIKRSPVDDPVYAFMDKKRSEGKSYYVYMTAGANKFLRIYYGRVREYLSNLSNN

SEQ ID NO: 68654 - protein, 396 aa, unidentified
MESAVYVGVDIGKSSHFAVAVDAAGKPIYQTGVANDEAALRKLVDWAKERQATAVVDQPGGAAALLLKLCWQSDVRIGYLHGLAMARARDFYAGESKTDPKDAFVLADVARAHPARVVWLEPSGEALAHLELLCGYDADLRADANRVTNRLRALLATHWPALERAFGERLDSRGVLAVIQQYPSGPAIKAAGVEQLTAAFKAQRVRRPEALAKQVHAAALAQTVTITGSPTAARLISELAVQLAAVLTRRDELEKEIEQGFFALPEAAILRSLPGIGPRLGARIAVEIGSISRFRTPGNLAAYAGLGPTPWKSGTSINANMPSRFGNHRLKNALFLAAFASLRHTPSRTYYDRKRAQGKRHNQAVLCLARRRVDVLHAMLSQGVPYRTPAPLATAA

SEQ ID NO: 68655 - protein, 412 aa, unidentified
MKDLLEISCGLDIHKEKIVACILTGPLGKPTHSEIREFTTLIPDMLALRDWIISENCHHIAMESTGIYWIPIYEILEDAFSGDITLLVVKARHMKNVPGKKTDIRDSEWISTLLRAGLLNASFIPEKRIREFRDLNRYRKSIIRDITSQKNRVEKFLQSSGFRLSSFISDIFGASGRNIILHLMEHGQIDKISLDSYLKTKTRKRIDEILMSVNGTLSEHQKSFLKILMCHYDSMKEHLIEIETHLQEDMLPFALQIEQLNTIYGISTTASCAIIAEIGTDMKPFKTAEHICSWAGLCPGNNESAGKRKSTSITKGNPYIKSMLCEIAWVIAGKRNTYLSAWYWRIKQKKGARKAIVALARKLLVIIYTMLKQGTNFDENCFEVRRKNCEQKQLSRYIRELEKHGYTVEAQV

SEQ ID NO: 68656 - protein, 391 aa, unidentified
MNQAGKRLARARLPEGVDGIGRLHALIGEHLDVGAAADAVVIGIETDRGPWVAALVAAGYSVYAVNPLQAARYRDRHTVSGAKSDPADAHVLADMVRTDSHQLRLVAADSPQAEAVKVVARAHKTLIWERTRTTQRLRHSLREYFPAALEAFDDLTAPDALELLAKAPEPVAAARLSRNQIRAALTRARRRDIDTKATRVQAALRADHLRRDQVIDAAYAATTRASIQILITLQEQIAELAAQVEAHFGRHPDAEIVLSQPGIGVILGARVLAEFGDARGRYASAKARKNYAGTSPITRASGKKKIVAARFVHNDRLIDSLAQQAFCALTASPGARAYYDRHRARGMEHRAALRQLANRLVGILHGCLKTRTPYNEATAWSPGAADQATAA

SEQ ID NO: 68657 - protein, 450 aa, unidentified
MESNYAGVDWASEKHDVVVQDAAGEELYAGTFAHDEKGLRALCRTLVRLNVCLVAIERPDGVLVERLLDAGRRVLALHPNQVAAARARFRVSGGKSDGFDAFVLCELARTDHHRFRVLEPDSDQTKALRALCRGREDLVQTRVALSNQLRAELERFWPGAVKIFRSIDSPIALAFMEKYPSPIEAKALGEQRLAAFLHREHYSGRKTPRELVRKLRSAPEGRAGELEIAMRRQLVLTLIALLRPLVAQIKQLERQIAQALAEHPDGELFRALFRDPKSVITAAELISEIGDCRGRYPTGEALAGDAGQAAIAIESGKRKVASYRWACNKRLRDAVCTLADSTRHWHPWAADHYARAIARGHDHPRAIRGLGRAWCRVLWRCWQDRTPYDPAHHRALQQHVSVTIPGTPGPRPDTAATKRMLGTAVTHRAAQRAEREALDDKPTSAIPLRG

SEQ ID NO: 68658 - protein, 341 aa, unidentified
MNVKTIGIDLAKNVFQIHGVDEHGKRLFNKQLRRAQMASFFANIPPCLIGMEACASAHFWANKLISMGHNVKLMAPQFVKPYVKTNKHDAADAEAICEAVTRPNMRFVPVKTAEQQAVLALHRSRQSFIKQRTAQANQIRGLLAEFGIVVPRGIQQLQRRLPELVEDADNPLPVLFRTQLSLLQHHMAYLFDVIATLDKQIEQCYRQNALCQRIGKIPGIGPVTASALIATIGKANNFENGRQLAAWLGLAPRQHSSGGKQVLLGISKRGDTYLRTLLIHGARAVLQSAKHKQDAVSSWANQLMARRNNNIASVALANKNARTVWALLAKEREYCAPIISA

SEQ ID NO: 68659 - protein, 339 aa, unidentified
MKLYAGIDLPANNNYLVVIDERDQAVFRRKQANVGTEVLRNLAGFQGQLVGIVVESTYNWYWLVDELMPAGYRVHLANPAGIRQYEGIKQTNDWSDAHWLAHLLRLGILREGYIYPRERRAVRDLLRKRRQLVQQRSAQLISIQTLVNRNTGDQITSSHLKQLSCPEVEGWYEEPERVMAVQASLRVQQALEQEIKRIEKQVKGRVKLEAGYQRLLRVWGIGEILALTIMLETGELSRFASVGDYSSYCRCVQSQRLSNGRKKGENNAKCGNRYLAGAYVEAAHFAARFYDRAQAFVARKTAQVNRALALKALANKLCRASYYVMRDGVEFEPTQLFGS

SEQ ID NO: 68660 - protein, 412 aa, unidentified
MKDLLEISCGLDVHKEKIVACILTGPLGKPTRSEIREFSTLIPDMIALRHWIVSKNCHHVAMESTGIYWMPIYEILEDAFSGDITLLVVNARHMKNVPGKKTDMRDSEWISTLLRAGLLNGSFIPEKRIREFRDLNRYRKSVIRDITSQKNRIEKFLQSSGFRLSSFISDIFGASGRNIILHLIEHGQIDKTALDSCLKTKTRNRIDEILMSVNGTLSEHQKAFLKILMTHYDSLKKHLAEIETSLEEDMAPFTLQVEQLNSIYGISTTASCAIIAEIGIDMKPFKTAEHICSWAGLCPGNNESAGKRKSTSVTKGNPYIKSMLCEIAWVIAGKRNTYLSAWYWRIKQKKGAKKAIVALARKLLVIIYTMLKQGTLFDESCFETRRKHCEQKQLSRYIRESEKHGYHVEAQS

SEQ ID NO: 68661 - protein, 352 aa, unidentified
MATTAQIAIAVIGIDIGKNSFHIVGLDHRGAIVLRQKWSRGQVEARFANMSPCLIGMEACVGAHHLSRKLKALGHDARLMPARYVRPYSKGQKNDFRDAEAIAEAVQRPTMKFVVTKTADQLDLQALHRVRERLVSQRTGIINQIRAFLLERGIAVRQGQRFLRVELPRILATPPDVLSPRMVRVIEGLASDWHRLDERIEGFSSEIEELAKRDAGCERLMSIPGIGPIISSAMVAAIGTGDSFSKGRDFAAWLGLVPRQISTGDRTILGKISKRGNRYLRVLFVQAAWVVLVKVKPTRWQGHGLRPWIEAAKKRLHHNVLAIALANKLARIAWSVLAHGRAFETNKLQAAA

SEQ ID NO: 68662 - protein, 412 aa, unidentified
MVELLVARCAGLDVAKDEVVACVRVPDGGGGRAQEVRTFLTFTSGLEALAGWLAAEGVTQVVMEATGQYWKPVWYVLEEAGFELLLVNARHVKILPGRKTDVCDAAWLAELLEHGLLRGSFVPPAPIRELRDLTRYRKRLIQAHASEGQRVQKTLEDAGIKLDSVAADVLGVSGRAMLTALVAGERDPGVLAELAKGRLRAKLPQLRQALRGRFGDHHALLVRLALAHLEHLEGAIATLDTEVDRVLAPFARARDQLATITGVGKRAAETIIAEIGVDMTVFPTAGHLASWAGRCPGNNRTGGKRRSGKPTKGNRWLGEVLIECAWAAARSRDTYLSAQYWRLARRIGKKKAAVAVGHSILVIAWHLLTDNCTYQDLGGDYFVRRDTDRQRQRAVAQLQALGYRVVLEPVTV

SEQ ID NO: 68663 - protein, 375 aa, unidentified
MGEITRSAIARVGVDLAKNVIQVHAVDATGRRVTARSIKRDQFLAWCAQLPAGCPVAMEACSSAHHWARRLRAMGLDARLIAANFVTPYRMEGKGGKNDATDAAAICEAASRPSMRFVPIKSCEQQGVMSLHRVREGLKEERTACVNRIRGVLAEFGLVFGKSPKVLRAVLTDVLEDASNELSTTARLVLQRAFDHWRELDAHLKWCDQQVGQHVRATPAAQRAAKIIGIGELGASALVAGVGEFKQFKNGEQFGAWLGIVPRQNSSGGKTSLGRITKRGDDYLRTLLIQGAKTAVMSAAKRDDPISRWLVQLTARVGWQKACVAMANKNARILWAVMTRDAGFDPKHVSVKPDAKRPVNERAAPAPVQATPCMA

SEQ ID NO: 68664 - protein, 327 aa, unidentified
MIEHYIGIDLHQAFFQACAVDTAGTRMWEERFPRTDAGIAALITRCDRRSAVAVEASPPTWHFADAVGDRVGELRIVDPMKTKLKAGYAAKTDRLDARRLADALRRDSVVGIYYPPVAIRELRELCRYRHAVVQVRTALINRLRAVLLRQGIVDGRRLARTPNDAWLDGLIVPPRAAASIAGLRRLLTAVRAEAAQADREVLAAATADPIAPRLQAIPGLGPVLSLMVRAEIGALERFPTPGHLASYAGLVPRVDASARRIRYGRITRRGSPWLRWALIEAAIHGTRRHDRIGRWGRGLAVRKGALKARVALARTLCEDIFRHWPIG

SEQ ID NO: 68665 - protein, 419 aa, unidentified
MSFKILKNNCCGLDVHKTWIFACIGITDSNKRTVYKQARFSSFTKGLQELCHWLAKYDCTDVCMESTGKYWIPVFNILEKNNIWVTLSHPKYTKPQKGNKTDRKDAKWICDLYMCGMVKPSFIPPADIRELRDLVRYRFKLTCMITGEKNRAHNCLTVSNLKLDDVFSDIFGRSSRSITEQILQHPGETFDVAPFVHGRCKTPIEEIQAAVDGAVSKEQAVKLRQCLNHIDELEMHKSEIEREIFRLSDKYEDILTLIRTVPGFDKNPMTAIQVLSEIGGDMSVFPTAKNLVSWAGCCPHNDQSNHKIKSTRISRAGSYFKPVLVQVANALIKSKKHPEFSTCYRRIKARRGHKKAIIAICRMILTAIWHILTDLKPYTAQGFLEPRPVSKEKVLTASQALNLLKQRGYVIKDEPIFIS

SEQ ID NO: 68666 - protein, 350 aa, unidentified
MKKICIGIDVSKETLDVTVIHIESYELMEKLGYSKFENRPSGFRSMTAWVRKVIKSHGQMDEALFCMETTGSYDLPLCHWLHKNGLNVWRESALQIHCSKGFQRGKSDKEDSEVIAQYAARHQNRYTAFVPDAEAIADLKELICYRDSLVERRKECKVRLANKKETLVNKNSKAWKCIERLSKAEIKRLDKVIGECDEEIRNLMKEDEQMEKNYQHLTSIVGIGLINGAALIAYTGNFKKITTPNKMSCYCGCFTFYEDSGTSVHRKSPYRNACCKMLKGYLRMAAKSAMLANTELRKYSERLREKGKPYAVILNNVVNKLLHIMFSLVKHDYDYEYNHEIVRRMERGIA

SEQ ID NO: 68667 - protein, 347 aa, unidentified
MMYVGVDVGKSKCRASMMSSEGRIVKELNFSNDKAGISHLASMLSMDDRVVMESTGPYWLDLYNHLDDLHIPVVLANPLKTKAIASARIKSDKVDARILAHLLRTDLIPECYVPPKEMREIRSLVRHRLSIVKLRTMVKNKVHALVDRNGLKHEFSDLFGKSGLQWLKVLELSGLDRLMLDNYLMHLENLNLQIEKVDLEITSRASVDGDVRLLLSLKGVNVYSALLIKSEIGTIERFADYKKLVSWAGLAPSLHQSGDVEYHGHITKQGSTMLRWIMVEAARVASVFDPRLRAFYERVKARRGDQKAVVAVANKMLKIIWFMLTRKEQYESVDGKRYAKKLNSLND

SEQ ID NO: 68668 - protein, 366 aa, unidentified
MKKTITVQTFKNEIFKEQKLTIGLDLGDRWSFYCVLDEAGQVILEQKLPTTPEAMKQTFGKIPRSLIALETGTHSPWVSRLLSELGHEVIVAHAQKVQLITKSNRKDDRHDARTLARLARVDPELLGPVRHRSVQAQLHLTVIRARAELVSARTALVNAARGLVKSYGQRLPKCGTYQVNRELAAALSTELRDVLEPLLKEIESLNERVKEYDERMEKIAKEVYPEVSLLKQVKGVGTQIALTYVLTIEDPYRFPKSRQVGCFLGLRPGRRNSGESEPQKGISKEGDRYLRTMMVQGAHYILGPFGEDSDLRRWGRKLAERGGKNAKKRAVVAVARKLAVLLHRLWVGGEVYEPLRNSQKAMREVT

SEQ ID NO: 68669 - protein, 433 aa, unidentified
MTTDSAAVRATKGKIMKPWIEITHYAGFDWARDHHDVVIVDRQGQIVADFRIEHTLEGWQQFRDKVKDYPALAVALETTQGAAVDQLLQLDCSVYPVNPLSAKSYRERKVPSGNKTDHLDAWSLAEALRLDGQHWKALQPLDPLTQQLQLLCRDEISLIEQRSALVNQLQQALVEYYPAALQAFEDWTQPFCWDFIVQFPTPEKLAAGGRRRWEKFLHTQKLWRPETASTRMAIFQNAHRFCGSAAVTSAKSLLALSLAKLLKALQLQLDLYRQQIEALFKQHPDHDLFGSLPGAAKTLAPRLLGEIGGNPNRFEDTQTLQCIAGTAPVSFQSGQIHRVHIRRSCNKVLRHTVHLWTQCCLRVCPWAEVYYRQKRAEGKSHACALRCVGQRLLKILWKMLQTRKPYDADLHARNQMQHGSWVLALMKPEAKAG

SEQ ID NO: 68670 - protein, 429 aa, unidentified
MSYRIAGMDVHKKMLAVVVSDVEIESEYQFERRMFGSSPEQLRSLAAWLLEQEAEEVVMESTAQYWKPVWGALERYWKPLREKREGARRRSGTLHLAQAQSNRGPRGRKKDFPDAERLVKRLVARELTLSFVPDAEQRLWRTVTRRKYQLTRNRVRLQNQLESFLEEAHIKLSSLVSDLLGLSARRMLKALADGETNPAALAALADQRLRATPAQLCDALGACAELSPVYRRLLKMALEELRLIDEQIGQLDQEMANLLSQHQDAVKRLAEVPGLGVDSAQQIIAEVGPTSATFPSEKCLSSWVGACPGDDESAGVNYSHRSPKGNRHMRRLLNQAANAAARTKGSIFEIVYRRSVPRLGHNQAIGTIAHRQCRLIWLILHQGVRYEERGPAVTKRSKQLRTSRMLRQLRSLGYRIEPPNPQPSQAQVQ

SEQ ID NO: 68671 - protein, 409 aa, unidentified
MDVVITRCAGLDVHQATVVATVRVPDDQGGRRVVTDTFGTMTADLLALRDWLHAYGVTHVALESTGVYWKPVYYMLEDAFTLLLINMQELKRVPGRKTDVKDSEWLAQLLECGLLRPSFVPPPPIRELRDLTRYRVQQVRDRSQEVNRLCKVLEDAGLKLTTVISDVMGKSGRAMLQALVDGTTDPAVLAELARGKLRKKLPELRRALQGRFRPHHAFLIEQIFAKIDFLDEALQRLTTEIDQRLVPFEPMLTALDTIPGVDRIGAISIVAETGGDMTRFLTAGHLCSWGAMCPGQNESAGKRRSGKTRKGNRYLRGTLIQAGLGAMRKNGSALQARYRRVARHRGHKKAVVAVGHQILEIAFYIMRDGVTYEELGADYFNRRHAEKAVRRHVRQLEALGFHVTIEKAA

SEQ ID NO: 68672 - protein, 392 aa, unidentified
METNSLEVKLKVCAGLDVHAKTVVACVLTGTLDSLRAKKEIRTFGTRTFELRLLGEWLTEKNVEKVLMESTGQYWCPIWNVLEEFDLPLALANPQRIKGIPGRKTDQKDSEWIARLGRMGLIASSYIPSREIQELRSLTRTRKSYINERTQHRNRIQNVLQHANIKLADFISDIFNGSGRNCLEVLLTGEKATQERISQVISKKCKHSSADIAESMNGALSKNQRILLESHLRSLERIDEEIHVLNEAIEEITSKYAEIMDALQTIPGVKKRAAEIILAEVGPNVEQFSSAKQLASWAGLCPGSYESGGARKSAHITSGNKYLKTILYQCGGVAGRSNNAIFSEFYDRISRRGSKKKAIIACGHKILRIVYKILSEQPNRVNKKSSPDVASI

SEQ ID NO: 68673 - protein, 346 aa, unidentified
MHATTIAVDLAKSVFEVAVSQRAGQVSERHRLTRAQFRRFLGEREPARMLMEACGTAHYWGREARARGHEVVLLPPHTVRPYVLRNKTDGADTKGLLEAQRNEEIRPVPLKSVDQQVLTALHRMRSSWMATRTARLNTLRGLLRELGHFIPVGARQVVPQVHALMDDNDSGLPEALRPVLCEATREVAELERRIRAVEAQLEQLAREDARIERLRTIPGVGLLTATALVAFLGDVARFPSGRHLASYLGLTPRERSSGLQRHLGRISKRGDPYLRMLLIHGARSVLCHAKRSKHRPDRLRTWALERQQARGHNKAAVALANKLARIAWAVWRSERGYTAMRLVPNE

SEQ ID NO: 68674 - protein, 485 aa, unidentified
MKNKSIFTRQNQTLINLFRDAKHPDKVLCVPIDYAKQTHMALFCDGSERQLKKPFPVKNNPEGIAFLLDAVEKIRRKHHIKRGHVFFGGEDCGTFSDNFIYALRKAGFVVIGVNAADAAKQRENLQASTDKLDLLGIAKMLLGKRGSIAGGQIGKERALRSLTRHRDSQVRMRTATGNRIHKIVDQLFPGFLDEKRSAIPPFSEASLYLMEDRFSPVQIAKRQDKALLRQLKVHGLQHAETALGKLKAYSRQVLGHPPELVGMLQTSLAGEINLYRCLGSNIDLIGRETAQQLAQTPGAMLTTIRGTGITLAAGVAAETGPPDTQPSTRRLTSYAGIVPRVKQTGGPEKGAKTGTVSRRCNHLLKNHVVQCGNHLGQHGPADLKEDHRRRGANGQHADFGMARRYLRMAMRLMRNGESYVPPELRTGATLEELRTYYLDLWPRLLDKWVKAGAVHTAFDPANPLGQWRERIEAIYEIELPLPKKK

SEQ ID NO: 68675 - protein, 318 aa, unidentified
MNTNTLQNINVGVDTGKSQLDIYIRPLDIYFTVPNTDKGISDAIKTIKKHKPQRVVIEATGRLEMPFILACDKAKLPYVVANPLRIKRFAEAIGQRAKNDRLDAALIAHYAERVQPELTKLKSENMRLMSDLVTRRNQLLTMQTMKRNRLQILPKNISSTITPILTALKNQLEKVEAKIAKLIESSPEYQAKSTILQSMPGVGKVLAASLISNVPELGFITNKQASSLIGVAPITRESGRFKGKRMIKGGRPQVRTVMYMAMMSAIQCNPVFKATYERLLAAGKPKKVAIVACMRKMVVILNSMIRDGVMWDKGSAKN

SEQ ID NO: 68676 - protein, 343 aa, unidentified
MQAITTIGFDIAKSVFQVHGVDAVGQVIVRRQLKRRQVIAFFQKLPPCLVGIEACASSHYWSRELQALGHRVRLMPPAYVKPYVKRQKNDMADAEAICEAVTRASMRFVPTKTPEQQSGLVLHRTRHLFIRQQTSVINAIRAHLAEFGVIAPVGRKGVEELLRVVADPNDKRVPEVVRACVAALGSQLLSLKKQILDFDRMIMAWHRSNQTSKRLNCIPGVGPLLATALVASVADPKTFRSGRNFSAWIGLVPKQHSSGGRDRLGSISKQGDRYLRSLFVAGALAVIRYAKIHGTKHRPWLTALLARRPTKLAAIALANKLARMAWAMMATGARYNYPASLRV

SEQ ID NO: 68677 - protein, 339 aa, unidentified
MWYSGIDQHKQYCVITTYGPDGPRVKQARVASTPLALQGYFADFPGPHRAVVESTGAWYWLADTLAALGVELVLAHATRLKAIAAAKVKTDQVDSDILALLLRADLIPVAHRIAPAQRGPRDLMRTRLRLVEKCVSAQNSIDRLLEKFNVQTVAELDPLYHLQAACHEAQIQLLTEQITTLERALHPSLIPNDDVQRLLWIPGLGKVNAFTIYTEIDGITRFPSAGQFFSYSRLVPGADNSGGRTRHRSGSKAGNRYLKLAFSHAGIRAVQYNPEIRAFFKAKARQKPIRIARTLVALELARIVYHVLSTQEDFNGQFKGRVLSHRKHAKWPRRASPPA

SEQ ID NO: 68678 - protein, 406 aa, unidentified
MFYLGIDVARDTHRLVILDDNGERLSGGISFQNNTADFEKVLSKLKELSISPNNSIFGLEATGNSWENLYCFFTDKGFRVIVLNPHQTNKFREALRKKAKTDDIDAFVIAGLLRSNEFASSYVPEDKIQTLRELTKLRYEFIKDHKNYQRQVLALLTIIFPEYKQTALKNPFAIASIAIFKVFPTAKHLSIAKPKHIEKIVRSIKGNNFNVKEIENLISIAKTSVYSGRCQESRAITLNILLTQVESFDKSIQQLEEQVNLILSPTSNDDINSFPGSNLLTIPGVGPRTLAAILSCVGESGQAFSDGVKLIGHIGFFPQIYESGETKRANKLSNKGPAYLRHALYMASVACVKHNLQLRNLYHTKISQGKKPKQALICVAKKLAHMCLSMLHSGQDYNPARVFCYA

SEQ ID NO: 68679 - protein, 311 aa, unidentified
MTSVIVGIDVSKTNLDVAVAGNGTVREWGNDEQGRQVLSGWLSEQGVELVVLEASGGIEAALVSELVEQRIPVAVVNPTRVRAFARAEGQLAKTDRIDAQVIARFGATMKPRANAIRDQAQLALSQQVTRRRQMVHMVTAEKNRAQTTLGTMKEQIERHIAWLQSEIEHLEHEINQAIMADPVWQETSERLQSTPGVGAITAATLVAELPELGRLNRQKIAALVGLAPFNHDSGKRRGQRRIFGGRASVRNVLYMAALSAIRCNPVIRSFYQRLVAKGKVKKVAITACMRKLLVILNTMTKTRQAWRPPTP

SEQ ID NO: 68680 - protein, 357 aa, unidentified
MGKSIRNLAAVTRVGLDLAKRVFQVHAVDAKGENIVARKLTRSQLIPFFATLPPCVVAMEACSSAHHWGRALIELGHEVRLLPPAHVKPYVRRNKSDQVDAAAICEAAGRPGQRFVPVRSIDNQAELMRHRARELLAGQRTAALNALRGHLAEIGVVAPQGAQHAYDLKRMAADGFDDNGEIVVPDCVRVALRPLVGQIDALDEAIGAIDREIAASVKADETARRLMTIPGVGPVTASAIVATIQDAGVFASGREFAAFLGLTPRQNSTGGKTRLGRITKMGDRYLRKLLVVGACATLRHRKGHNDALRLWASGMLERKTVKYKFKLTAVALANKVARIVFVLMTRGGQYDDRPAAA

SEQ ID NO: 68681 - protein, 300 aa, unidentified
MKYSGIDLHSNNCVVTVTDDSDKVVAEKRVANDLEKIIGFLKPWQGELAGVVVESTYNWYWLVDGLQEAGFDVKLANTGAIRKYDGLKHTGDEADARHLAHLLRLGILPTGTILPPAHRALRDLARKRLQLVRSRTSHILAIENILARQKGARINSSQIKRLTLEDVTAMGLPADVCLAIQSNLAVIMALNAQVELLERRLQESIGDRPEYALLTSVPGIGRILASIILLETGPIDRFAEVGNYASYARCVDSQRISNGKKKGGRQHPERQQVPRLDKLARACFHILKEKQPFDKGRCFA

SEQ ID NO: 68682 - protein, 374 aa, unidentified
MRDDSEAFVAIDTSKLRNAIAVAEGGRGGEVRFLGEIDNTPAATAKLVRKLAARYGRVAFCYEAGPTGYGMYRQIAGLGHECVVVAPSLIPKKAGDHVKTNRRDALALARQFRAGELTAVWVPDPRHEAMRDLTRARGAAVEDLRSKRQQVSALLLRLGLHYPGKEAWTKTYMVWLTSQKLEHAEQRIAFEEMLLAVRQAQERITRLETAMQAAVPDWSLAEVVRALMAMRGIDMVSATTFLAEIGDLSRFRTPRELMGYLGLVPSEHSTGDTVIRGPITKAGNRRARRTLVECSWSYRHPPRVGRTKQDKVAAAPPAVREIAWKAQTRLYARYRALARRGKLKTVIITAIARELAGFIWAVHRAIAPASAVAR

SEQ ID NO: 68683 - protein, 323 aa, unidentified
MKAIIGIDISKRNFTVALMLGSRVRKNEFDNDEYGFKKLRDWLTENGVTKARICMEATGSYGERLADFLYYNGYEVSVLNPMCIRSYAKSRLSRHKTDGIDAILIAEYASKNYELVLYKPRSSAIHELKALHRCLQSLKGQYVQAINHLENKFVLPQSVITIWQDIANDILAKINIAEATMNELISSDSLIDQDVKNLGSIPGIGTATAIAIIAETPEITSFQDARQLAAFIGITPSHKTSGSSVRFKSRISKIGSKYLRKALYFPAIVAKRCNPILKDFSEKLKAKGKHNMVILIAVVRKLVHIIYGILKHKTSFKPSIENS

SEQ ID NO: 68684 - protein, 475 aa, unidentified
MNLKGKKTKNQVVTANIFEQQELLKKAEVIREKLTASTWHELETNGKFDKNAKLSFISDDMLILGCDVGSETHYLRAIDPRGRELSKSAYSFRNNCEGFQSAKEWAVELAAKNEKKQIVLGLEPTGHYWFCLATWMIANGISVVQVNPYAVKQTKEVEDNSQLKDDTKDPKLIANLVKDGNFGMPYLPEKVYAELRRLSMFREQLNEDRIRAINRMHREMKIYFPEYKEALGRVEGAFSLKLLKQTPFPEEIQTLGEEGIRQIWHDAKLRGRGYSRVREIVGYAKTSVGMKDGAEASAMAVKWFVKEIRELDEKLAEIEKLMREKYQEIPYAKNILEISGIGENTLSGILAEMGDISRFDDVKEIQKLSGLGLVACSSGKHKGETKISHRGRKRLRYWLFQAAKSAVAHAEEFKELHVYYTTRADNPLKKMQSLIVIACKLLRIIYGILKNGTVYDPKKMLRDIRRPEKKEVIAA

SEQ ID NO: 68685 - protein, 372 aa, unidentified
MFTLTELGPKEAEVKIIGCDLHARQQTLAILDTTTGEVVKATLKHEGNSVREFYSNLPRPVRVGIEATGSMQWFVNLMEELRIECLVGHPAEIRAAEPRKQKHDRRDADLLLSLLVEDRFPAIWLPTKELLDLRALLRHRHQWVCLRVKIQNALQAIALANGLRRGPSLWTQAGQHAIASLPLAPHAAYRRSELQAMYAKFEVEIENLNQRVEQQACERPGARLLMTHPGVGPITALATEVFLGDPDRFADSKELASYVGMIPREHSSAGRQRLGGLSKQGNPLLRFLWSEAAIHAVRRDAELKQFYRRKLIQKGLGKARAAVARKLGIRMWIMLRDQIEYTEFCRRGQMQQKSGDACAGMPAARYGAKVTG

SEQ ID NO: 68686 - protein, 374 aa, unidentified
MVKDFHNEFVKTIPSPPMTDIPIRIKKYTYFIGVDVSAYELDYAVMRGKDFLFHRERKNEPADIMDFIKELKLLPGFTVSRAVFCMEENGIYNLHLINTLKKIKGNVVNDNPLHIKRSFGIARGKDDKIDAKRLAQYVYVNRETLNIYNPKRPLLQQIADLFSLRHRLLGVQLALQTPLTSQATFIKKGIHEQTVRLCAKSIESIREDIADIDLAIDQIIAADENFSRLNKIMVSVPGVGRITSIQILISTNEFKNINNPRKFACYAGIAPFKKESGGVKSRARVSPIANRKVKALLHLCAMTSLRAEKDLKIYYDRKVAEGKPKMAVLNAVRNKLVLRIFTCVNQNRLYEKTYVSNSRSKKSIVTDQLVEEMV

SEQ ID NO: 68687 - protein, 321 aa, unidentified
MRTHTQKASAKELFEHLNKHYPNGSYHAAYETGFSGFSTYYALTELGIKCTVVHAADVPTTQKEKVSKSDPVDSKKLAKALMRGELGSVYIHSKDSLDDRALVRHRATIVKLSGGIKSRIKHLLYNNGVEYPEEYFRSNRHWTRSFITWLQNDVRLLSDTRVSLDLLIAEVLHYRERLLDVNRRLRSLARSDRYAEKYGILMSVPGIGSTIAMSLLTEIDDIGRFSNQRQFASFLGLVPMMSSSGDKEYVGEKTFRGNKFLGPKIVEASWIAIRHDAELSAKFGALCTRGMKSQEAIIRIARKLSNIIFSVLKSNRRYECR

SEQ ID NO: 68688 - protein, 391 aa, unidentified
MYIVGIDIAKRKHEAAVIDGDGAVIIKPFSFTNNCSGYNRLLAMLAKAKLPLDEVSFAMEATGHYWLALFTRLQKEGFRVQVINPVQTNSIRNFYIRQAKTDPRDALLIAEVIRFGHFSESTLHPENIYELRELCRGRHAIVSMQADVKRKVVALLDQVFPEYETAFTNMFGDTSMAILQTCPTPKELSEMPFEELCHLIEVSSHKRFRMAKAQELQALARNSFGFAMAGDVFSTMIRLYAKHLDFLKQQVREMDRKIAEIMETLDTPITTITGIGLTLGAYILSEIGDISRFSSAAKLAAYAGIDPTMRQSGEYNGVRNRMSKRGSPYLRHAIWLAASSAVLHDPALKLYFQKKRDEGKPYMASVGHACRKMVSIIYAVMRDNKAYCLCA

SEQ ID NO: 68689 - protein, 351 aa, unidentified
MVIIGCDYHPGFQQIVALNSESGEVRDLRLAHKEEARHFYASLQGREVLVGIEACGYTQWFEQMLEEMGHRYQVGDAAAIRASYVRRQKTDRRDAGHILRLLVEGRFPALWVPSAAERDARQLIVHRHKQVQMRTRVKNQLHALALNQGLRLRWQLWSEKGLEQLRALPLLPYAAARRTDLLERLKEMDADIDRLDRMVRKEAEARPAAVRLMSHPGVGPVTALAFVLTIGDVSRFNKSRQVASYLGLIPSERSSGGKQRLGHISKQGNPLLRFLLVEAGHTAVRGDAELRRCYQRLQHRHSTGVAKVAVARKLALRLYWMLRNQIDYAQLHGPYAGKPVSFCGRNTRPTA

SEQ ID NO: 68690 - protein, 430 aa, unidentified
MNPPCEQTAQDWLAHRAFGGLDWASQKHNVIVVDARGKIVEEFEIAQSALGWKKFRERLAPYGAIPFAIETSQGSAVEQLLEAGMEVYPINSKSAKSYRERKAPSGVKDDRLDAWSFADACRIDGQGWRALRPEDPLVKELRLLCRDEVGLIQQRTSFICQLRHALGEYYSIALEAFEDWGSMSAWMFIQRFPTPQLLQEAGKRQWEKFLHARHLWRTESGPRRMELFAQATELCGTVPMANAKSQLALSLISMLFALEKQLGIYRQRIEELFSRHPDHDLFGSLPGAGPKLAPRLLSEIGDDRGRFEDGPQALQCLAGSAPVTRRTGKCKVRANPDHWPCHQRWACDRYLRHAMHLFAEQTLGQCVWAQIYYQHHRQKGSSHADALRRLAQRWLKIIYRMWIDRKPYDAMLHHHNQLKHGSWVLELNPS

SEQ ID NO: 68691 - protein, 412 aa, unidentified
MDILYAICCGLDVHKDTVTACLRRRAADGGVTKTLRTFGTMTAELLTLLDWLVEAGCTHVAMESTGSYWRPVFNLLEGSVAQVLVVNAHHVKGLPGRKKDTLDAEWLAELLQHGLLRGSFIPPAPLRELREATRYRKQLIRTRADEANRIQKLLEGANVKLGSVATDILGVSGRAMLAALVRGETDAAALAGLAKGRLRKKQPQLVAALTGRITPDQRALLGHQLTHVEFLDQAIATLDTHIARLMAPYQEAAERLRTVTGIEQRTAEAVIAELGVDMGVFPTAHHCASWAALCPGHHESAGRRRSGKTRKGNKWLRTALLEAAWAASRTQTYLGAQYRRLAARRGKKRAAVAVAHSILVRAYHILKDGTTYRELGHDFLDKLQGEKLQRRLIARLEALGLKVTVEPLPQAA

SEQ ID NO: 68692 - protein, 418 aa, unidentified
MNEDGNTRVSRRYVALDIHKHYCVVAGVDREGRVLLQPVRVEHADLEGWLKKNLRASDHVVIESTTNAWYVYDLLTPLVERVVVANRIQVKQIARARVKTDVRDTFILARLLAANLVPEVWVPPIHVRQLRQLLSQRRQLVETHTQIVNRMHSVAHRHHLTHARGKRFNEKTTAWQKDKRLSKVEQFQLELEMENRVYIEKQIGRIGKEVAKMSHQKPWADSMTYLMQLPGFGVITGMTVLAAIGEIQRFESARHLASYSGLTPGLEQSGTKYREKGVTKEGRKELRWAMVEAAQRAVKSDPVWKTRFLEMQKRMHRNQAIVAIARRLLELVWYVLTRRQPYRHFSQERIAYKYLTWAWQMDEAARDGLTRQQFTRYYLMRLGIGHDLTRIALNPKYPRKLASEAELLALRPELDHIE

SEQ ID NO: 68693 - protein, 401 aa, unidentified
MPFFAGLDWGGTAHAVCVIDATGAVLARIEVQHDAAGLADLLARLKRIAPPAELPVAIERPSGLIVDALIEAGHPVVPIHPNIVKACRPRYRAAGGKSDPADAFMLADILRTDGHRFRPLMPAADDIKALRALVRGRDDLVAQRVALANTLRSNLESFWPGAAAIFADIDSPIALAFLRRYPTPESAARLGPKRLAGFLASHAYCGRRSPAELLARLRAAPTGRAGEAEAEARGELVRALAATLETLVAEIVRLSSRIAHQIAQLPDGQIVMSFPRSGRICAAAILAELGDVRERFPTADQLAAEAGVAPVTNASGKSRGVTFRWACNHRLRQAVTTFADNSRHASASAANIYRQARERGCRHQHATRILARAWCRVLWKAWQDRTAYDPARHADAAKLPA

SEQ ID NO: 68694 - protein, 405 aa, unidentified
MRYYLGVDWADQTHAVWVVDESGTKIAARAVSHTAEGLGEWGRELDEWRAQGLDLWAAIERPDGRVVDLLLDHGVVVYPVNPKALDRARDRFRQSGAKSDPFDARVLADFLRTDQAHLRALQPSSEAAQELKLLTEDCQRHIRQQTRLVNQLTATLKAYYPRALEVAEVTSALAREFLPAYPTPEALTALTERQWQRWARAHRLPEARAGELWAVLRQPQLPVPAHVVRAKARLMQALMEQLRPVVAAVAQYRKTIDDFFASMPAAQWARTLPIGKHGITAPTLWARLGDAPGRWESFRHLQAHAGTVPVTKRSGKQQRVVQFRFACDKALRYVVDQVAYLSLLSSAWARPYYDQQRARGHSHRQALRALGAKWLKIIFIMWQRQVPYDEQYHLATMTRQQLGRR

SEQ ID NO: 68695 - protein, 350 aa, unidentified
MTTIARRITGGVDTHLDVHVAAALDERGALLGVESFSTTPSGYRALLGWLKTFGTLELVGVEGTGSYGAGLTRHLLSHKVSVVEVDRPNRQRRRRKGKSDPEDAVAAARAAQGGDATGLAKTRDGNVEAMRVLRVARSSARSSRTQAINQMRSLVSTAPDELRAELRDLSIYKVLQLASAFRHTGKTDVAAVTKLTLRTLARRALSLEDEVKEIDRVLKTLVAETAPELNAVDGVGTDVASALLVAAGDNPERLKNEATFAKLCGVSPLDASSGKQHRHRLNRGGDRQANSALWHIVFTRMVNDPRTKHYIERRMKEGRTKKEAIRCLKRYVAREVFAQLPRSALALDNP

SEQ ID NO: 68696 - protein, 346 aa, unidentified
MRQIARIGLDIAKRWFQIHAVDGNDREVLNRKLARDKLLGFLASLPPCDVALEACSSSHHWGREIGKLGHRVRLISPNYVKPYVKRGKSDAHDARAICEAASRPDMRFVPVKTEDQQAALMQHTSRQLLIAQRTAVANSLRGQLAEFGVIEKKGIENVGELVRMLDDKDAALVNVPPVAIMVMKVLADQLQAVDEHLAMIDAQIEAWRQDSAAAQALKTIPGIGALISAALAAHVADPSVFRSGRDFAAWMGLVPRQNSSGGKDRLGRITKQGNPYLRRLLVLGATASLRWLQKRTDPLADWTRNLLLRRPARLVTVALANKMARIAWAIMMTGELFRSEARTATA

SEQ ID NO: 68697 - protein, 371 aa, unidentified
MRFYQGQHRFYCGIDLHARSMHVCVVDHAGDIVFDRKLATRPEALLRALEPFRDGLVIGVECMFAWYWVADLCVAHDIAFVLGHALYLKAIHGGKAKNDRIDATKLARLLRGGNFPTAYAYPKGMRETRDLLRRRTYLVHKRAELFTHLQILNAQYNLTPFPKKLCYAANRADMKIAERFGDASVQKNAAANLAVIDRLDEVIGDLEQYLIRTAKIDSVQTYQRLQSIPGVGKLLALILLYEMHDAQRFDSAGQFLSYARLVRCAHESAGKKLGTGCKQIGNGHLRWAFAEAACLFLQRSERAKHWKQKQAAQRGSGKALAILAARLARAVYHMLRKGEAFDEERFWAGGTRRTTTGSSSLFRKEAQHAGA

SEQ ID NO: 68698 - protein, 457 aa, unidentified
MEEQISLEVVNKNAAGIDIGSRSHWVAVGQSDDLIQEFGVYNENLYELADWLTQHNIATVAMESTGNYWQNLHAVLISKGFDVTLCNGKFTKNIKGKKTDVKDCQWIQKLHSLGLLSGSFLPDEDTEILRTFTRHRHNLIKQAASATKKMQKYLRLMNIRLDVVVKDVVGLTGLKIIRAIALGETDPKKLASLRHYNCKKSEEEIAKALHSNGRKDFFYALKDELDTYEFIQKKIRECDDQIAAKLDDIIGKDPEKQEHHIDKKPYKRINKNTPKDIDLNLKSYQMFKGTDLIAIEGMSYNTVLTIMSEVGYDGIKKFKTAKHFTSWLRLAPNNKVSGGKVLSSKIGKGSSRLKIALRNAANAIGNLKDSTPLRDFFHRINFRKGRVSAITATARKLAVIIWNMVTKGIPYQNPEGYLYLDQKRKLGLVKRIQKQIDKFGLTDDDLTININNCKTAT

SEQ ID NO: 68699 - protein, 416 aa, unidentified
MNAAGIDVSSRKSTVAVLRPFGEVVKLPFDVRHSAEDLTALAEQLKSIEGETRVVMEHTGRYYESVAKVLHEAGLYVSAVNPLLIKEYGNNSLRKVKTDKADAMKIAKYALDNWAELRDYTPMDTIRYDLKTLNRQFQLASKQKTVTANNLIALQEQSFPGIRKLFDSPVRSDGTQKWVDFTHDFWHVDCVRSGSQNAFTERYRKWCKRNRYQFSMEKAAEIYALAKSAVVLVQKNSVTKTLVQEAANQLTAISRSVETYRSEMNKLASQLPEYPVVMEMYGVGESLGPQLMAEIGDVRRFERKQSLVAFAGIDPAPSESGDYCSRSNRTTKRGSPYLRKTLFNIMTIHLQRAPADEPVFQFLDKKRAEGKPYYVYMTAAGNKFLRRYYGKVMAYFATLEGLPPVDMDSTGLHHTE

SEQ ID NO: 68700 - protein, 442 aa, unidentified
MSKNLSEPELNTEPYLSVGLDVGADFTFMSIALPNGTFVGKPFKITHANPESRELAVKKIKEAQEQFSLKSRCFLESTGIYHIPLMRFLSDKGFVCETINPIITKNSTNIGIRKVHNDKFDSKKIATIGLMSSVKTSITPSDEVVNLRNLVRDYFYFKDLQSAIIMKLTAELKVSFPQYKGIFSKITTKTSLKLLEKYPLAKNILEADKDNIVELIRSTARFGEKYAKTKYDALIAAAQDATIFGRSIDSNATRIQLYVRQINFYQTQIAELLIALHKTVDNLNEPLIRERINLLQTLQGVGFLSAVVLIAEMGSFELFSSPKKLFAYFGLDPAVKQSGKFTGDKVHMSKRGSKLARRVLHMIAINNLKVSGKEKIPVNHVIHDYYVAKCSSKKKNVAVGAVMHKVCNIIFAMLRDNRPFEIITPVEHCKHFLDTKSTKNVA

SEQ ID NO: 68701 - protein, 342 aa, unidentified
MNYVGIDWAYGRAAYCAMGEGGEIKAEGLISADEDGLAKLVLKLGTEAKAALEMMSGAVWVRDQLQATGWEVQVAHARKVRDVAPLACKTDKVDARVLAELRRRDLVPELWLPSPSDRAHRERLRRRAHLVKTRTSARNRIFGLLTQFGLRLSYARLCKPDAIELLARRGVPAVWRASITELLELAEEMDRRIDPIDRELAPLARADERARLLATIPGVGPLLSLTFAAEIGEVSRFSSPRKLIGYAGLAPRVSQSGERSATGALSKAGSRTLRWAAVEAANQAWRPSNPWHEHYLRISARHGKNPAKSAVARKLLIAAWHVLSRREPFKPAPASSRCFLTA

SEQ ID NO: 68702 - protein, 355 aa, unidentified
MLAELVDAVVGIDTHRDTHQVEIALSNGAPIACTTISNDTSGYAELLAWIVDHAPGPRLALSIEGTRSYGVGLARAATAAGLTVLECEQPNRKARRGKGKSDPIDAHLAVLAALRLDADRLPIPRTDGDREALRILLGARGELTAASTAQTNRLRALLLGGDDTDRTLARGTLTESRLAGLARRRPPREASREQAVRHAEIRRLALALREAARALKANRVQLQTIVNDVVPGLTERRGIGPVSAAQAIVSFSHPGRCRNDAAFAALAGASPLPASSGRTVRHRLNRGGDRALNRALHTIAVTRMRSCPTTQAYVARRTAQGKNLKEIRRCLKRYIARQLYRTLTPAMTPAVEVSG

SEQ ID NO: 68703 - protein, 347 aa, unidentified
MLADQLDYVIGVDPHRDSHAVGVVEVRTGAVVFEATVAADPGGYERALEVAEKHAPGCRAFAIEGTGSFGAGLTRFLAGRGEQVFEVSRLRRERRSGGKTDALDAVRAARSVLTGKQPALPRASGEREALRALIAAREGAVSARTAAFCQLRDLLITTPEPLRSELRPLSRARLLTALTTARPDRRTDPELRGTLLALKAIARRIQQLTTEERQLAGEIEQLVQGLAPQLTDQPGIGPLLAAQLLLSWSHPGRVRNEAAFARLAGAAPIPASSGQTIRYRLDRSGDRKLNRTLHQIIVTRRRWHQPTIDYIDRRVQEGKSKREATRCLKRYLARNLYRLLEHPPTAT

SEQ ID NO: 68704 - protein, 428 aa, unidentified
MSKKKSCSDSGPPPSGDSIQINILDEKGIEIVHTKSYGVGIDCHRDFIQVSVIVKGDENKTIEYRHEFNTTLPVLENARDWAISIIRLKSSASVDVSTDTLHYVIESTSCYHLPVIMVWKGIPSIINPSIAGATKRKTDVLDARMLAIHDLNGIWRESYIPSSDVQQLRLLLAQKQQYSKMATRINNRITNSLLKFGYTISRDGSITKDSINRAILENEISDSPSPDMAYRPPDGIPEDVKGIFKEELELYDDYVQKASEYEKKAVSKAKSMQWETRDGTLPGTEMVRILTTAPYVGEYTAVIWLAFIITPNRFPNSKAVAAYCALDPSLKISAGKVSSTKKRGGNKDLDRSRCQALFLNRWGIQSVRAGFYFYARDPGPGMDGLLWTGGGSRRCMGGIQKKEGVCKAARRDYPEGQTEEDGRCHGIP

SEQ ID NO: 68705 - protein, 377 aa, unidentified
MKRIKFVGLDVHAETITVAVAEQEGEVRALGVIPNRVESIRKLVKKLGPVGQLRFCYEAGPTGYAVYWQLTALGAKCEVIAPTLVPVKTGDRVKTDRRDSLKLARNYRAGELTSVWVPDAAHEALRDLVRAREAAKKDQLRARHRLIKYLLRHGRRPPTGVKPWTLNYLSWVKHEVHFEPMAQEATLLDYLNEVEHAELRIARLNLAIEEAVKLTPPKMRAVIEALQALRGVAQVTAVTIVAEVGEVSRFTGARQLMGYGGIVASEHSSGESTWRGGITKTGNAHLRRVVVEAAWAYRHRPSVGETLRKRQAVVSEEIREIAWKAQHRLHTRYQKLMARGKEKEKVVTAIGRELLGFIWAIGVKAEAAQEKTERRAA

SEQ ID NO: 68706 - protein, 352 aa, unidentified
MNNIKYIGMDVHKATTVVAVLNHLGRVIAEAIIETKGLSILAFLKGLHGTLHVTFEEGTQAAWLYDLIRPHVALVLVCNPKKIAVQDNKADKRDARRLAELLRTGGLQAVYHGEHSTKPLKEFAQSYGAIVSDSTRVKNRIKALFRGRGIDCSGTAVYDKDQHEQWLNQMSTPALRLRVSRLFRELDFLTELREEAQKDIVTETQKHPAAKILQSMPGIGPLRAGVIIGFAITPYRFRTRKQFWTYCGLAVMSRITGEYVMVEGRVRRSQKLPLVRGLNHNYNRSLKEVFKGAAATAAMGPWKSHFDAMVANGTKPSLALLTLARKLASTTLALWRKGERYDEHKMSKSHAA

SEQ ID NO: 68707 - protein, 400 aa, unidentified
MNAVGIDVSKGKSTVTVLQPFGVVIAEPFEVLHTACELKKLVTFIKSLSGETKVVMEYTGAYYEPIANALYEAGIFVSVVNPIIINDYSTNRVRKVKTDKVDSLRIAAFTLDRWLELRKYEPADTVRKTLKIMNRQCLNLNKILVMQKNNLIALLDSSFPGANTLFTSPCRETDGHEKWVDFVLKFPHVDTVAKLSLSAFKAKYQSWCKKEEYRYSEHKAEKIHEYARTLVCTIPSTESIKMVISEAAKALNSTLEALGKLHSEMDALSTQLPEYEAVMDMYGVGKTLGSQLIAEIGDIRKLHSSKALVAMAGIDPPPHQSGTVDTRSRSISKRGSPALRKTLFQVIGVYLQRQPENEPVYQFLEKKRTEGKPYKVYMIAAAHKFLRIYYARIKEVMLAQ

SEQ ID NO: 68708 - protein, 339 aa, unidentified
MKKKYFIGIDVSKHTLDVAFIIHSSSYFSKPVWKQFENTLAGLKQMKQWLTEMNVPLNEQTIVVIENTGIYHRLLWQFFSHLQIDLCIENAAQVKWSLGIARGKNDKVDSRRLSLYAVRNADRLKPTPALHSAVMPLKDLLTVRNKLIVQTRSIETALKELKHISTSSADTAALKKLLQPALKGLQQSLQQTEQKIKDVLKQDDVVYKTYKLLNTIPGIGHITAVYLICCSNMFTMCTSGKQLACYCGVVPFDYQSGISIKGKHHVHKMANKELKRLLHMCALTSIKNHKEFTDYYERKKQEGKHAMSILNAIKNKLVLRAFAVVKSENPYVDNYTKAA

SEQ ID NO: 68709 - protein, 415 aa, unidentified
MKTTNQYQTKRAQPRKPGKARGPAQRDTKEVMAELVARLSQKLDTQSGRFCTDDEVNRTLAPNRDRLTVGVDLGDKRSNFCILGLDGETLVEGELQTSQLDFSELFGALAPARVVIEVGTHSAWARDAVALCGHEVLVANPRQMEGPKKRKRKNDRIDAHKLARVGRMDPQSLFPIHHRSVEVRRDLLGLRARSALVAVRTELINATRGLVKSMGARLPKCSTQAFPKKVERELPAEVREILLPLVEIVKCVNASIQSYDERIEELATDKYPQTKLLRQVKGVGPVTSLAYVLTLEDPKRFSRSRDVGPYIGLVPKQEDSGDRQPQLRISKMGDVMLRSLLVGSAQYILGPFGPDTELRRYGLRLSERGGRNAKKRAVVAVARKLAVLLHRLWVSGAVYEPLRQGLLPTAGRNAA

SEQ ID NO: 68710 - protein, 359 aa, unidentified
METVRVTGSVTPFRGASVMNQPHYFVGIDIASESFMAAIGTAPWQLVVPATEFSNTPAGWSALLAWLQRQSCTPATSIVCLEATGVYGEGLTHFLVAQGYPVAVEPPLKVKRAFKPHGHKTDAVDCQHIAEYACRYLDQLSLWRPRPAVLEHLKVLLTTREQLVEQRTAHRNALTALRRKPLHTALAERLHPHLIQDLTQHIAEVEREIRQLIDQQPPLRHLIHLLMSIPGVGLLLATHILILTECATRSLNHKHMAAHLGICPYEHRSGKSVYRRPASRHYGPAQPRKLLHLAARSVATHKPAFRHYYQRKLAEGKPKPVALNNIANKLLKIICAVLRSRTPYSPNYRSVPPAGLQAA

SEQ ID NO: 68711 - protein, 357 aa, unidentified
MDYGVYCGVDFHARQQTICCLTTEDGVIATYELKHDNKKVVQDFYAQLPGPVLVGLEAGGYSLWFEQLLEELGHQIWLGDASEIRRCARRRQKNDRRDAALILDLLVRGEFPRIHRQTALSREILRMLRYRHRLVKIRTISKNCLQALAIQSGLSLKSQLFSQAGLQQLTSLAMSPVMQSQRVQWLQLLATLDQRINACETWLSDQARADQRVRRLRTHPGLGLLTSLAVVHTLDPVSRFPNQRKVAAYGGFDPCEDSSAERKRYLGISKAGSKLLRFLLVEAGQAAVKEDGELKRFYRRLQQRRNKPKAKVAVARKLLIRSYILLRDEIDYAEFQRRAVAARLARENARLPCLSSD

SEQ ID NO: 68712 - protein, 313 aa, unidentified
MSDRYVGIDVAKDHLDFADSAGREGKVRNDPEGIEELLKELSEPRPALVVLEASGGYESSVAAALAAAGYATAVVNPRQVRSFARATGQSAKTDAIDARLLALFGERIRPEPRLLADAGHEQLKALVARRRQLIEMLTAETNRLAQVASGPVHKGIRRHVRWLEAQIQRIDDDLDRFVRQSPIWRAKDDLLQGVPGIGPVTSRTMLAELPELGRLTHKQIAALVGVAPFNRDSGQLRGRRVVWGGRASIRSSLYMATLVATRRNPAIRAFYLRLRSHGKPTKLVLTACMRKMLVILNAIAASNRPWELRPCSA

SEQ ID NO: 68713 - protein, 361 aa, unidentified
MNIITIVGLDVHKETIVAAVLPAGADAVTRRVTIQNTPKALEKLVLQSTATGPAEFVYEAGPCGYDAHRHITKLGHACTVIAPALTPVRPGDRVKTDARDAEKLARLHRAGELTAIRVPTCEEEAARDLVRIREDAVEDLQRARHRLVKFLLRQGRIFREAGAWTQKHELWLRGQKFEWPNLQQTFVGYLRAYDEVQGRLKVLNAQVEDLAQQPQYKELVRALMCLKGIGTLSAVTLIVEAQDFRRFRKARQFMSYVGVVSSERSSGNRIRRGSITRAGNAQIRRVLVEWSSRHAGTSAAVVKRREGCPDEIVKIAKTAQDRLHRKFWRMTGRGKNHGVAVVAVARELAAFAWSIARTVQG

SEQ ID NO: 68714 - protein, 361 aa, unidentified
MNSRLTFTPKGGRPMRKVAYLSMDVHARNSVMGDMDGNGNFRGNRFFITCENNIINALKTIKAKKKYLVMEAGPLSYWAAQVANDHVTEVIITDPRENALIYNSSKKRDKVDTQKLCRLLRLGEFKAVYRPENDQRAIFKAAVQHYLDLRDQLIALKQKIKAMYRQWGVIDVFTDSAYSAAGRDKFLKQVNHRPIYLQLQRLYALSDVTAAIKQEAQKSLQSLGRNYPEIKEFEEIPGMGSIGAHTFDAYIQTPHRFAKRSRLWKYCRLGVSDRSSDGKPLGYKRLDKSGIGELKALSYRAFISAMKGDNEVKRFYLNSLQRTHDRKHARLNTQRKILSVMLSIWKKGIPYRAELFLDPSI

SEQ ID NO: 68715 - protein, 341 aa, unidentified
MKLIRVGVDLAKSVFQVHGVDRSERTTWRRRLRREDWIDVLRERLEPGGEVGMEACGGAHHWARELQKLGYRVKLIAPQFVKPYVKSNKHDAADAEAICEAMGRPGMRFVPVKTVEQQDIQAIHRVRASLVEQRSAKANQIRGLVAEYGLVAPRELLHLRRALRRWLEDEGNGLTMRFRRLLRGLQDELISLDERIAELDREIEEIAKSEPAAKRLMQLRGVGPIIATAMLATVGDARQFRNGRQMSASIGLTPKQHSSGGKERMLGISKRGDAYLRSLLIHGARAVIRTARAKDDPLSRWVIRIADRRHPNVAAVALANKTTRIAWAMLSRETNYQPAIQ

SEQ ID NO: 68716 - protein, 382 aa, unidentified
MDTSKNWSRIIGLDLSKATFKGCILYGEGFIQRKNFSGEMKRDESGYVLINNMIQAGDIVLMEAGSSSFNLARYLQKNSKASDVVVLNPAHLRIIWDSQKKNDKADAMKIACIARDMRPEAWPRVTVPSEKEQSERSVIMHWIFLRKQETMLCNRFFALFNSLGYPEIDKSRLKKDSDFRIQTINDLLSFNELAFTDAIMLEEQIATVQRQLSFMEDRLRSICLDHPQQALAWLSIPGIGLVNAATLIAYIGDGSRFSKPDQLMNYAGMVPKQNQSGTVDIKGKITKRGCSAIRRSIVQGAQVLIQLPPTCDISKFAYRKKKECPFNGKVAVAVANRMLRTGLALLHHNDLYRPMIEDGFDRLERKLAGNKLQALVPYLTSN

SEQ ID NO: 68717 - protein, 318 aa, unidentified
MNTAPKQSINIGVDTGKAQLDIYVRPTAHFFSVPNTDKGIKDALKIIKPYQPERIIIEATGRLEMSFVLACIEANLPIVRANPVHIKRFAGAIGRRAKNDRLDAELIAHYGEVIKPEITIIKAENIRLMSDLVIRRNQLLSMQTMEKNRLQILPKTLHSTIKPILTAMKNQITNIEQKLVKLIETCPEYQTKNALLQSVPGIGSIAAASIISNVPELGYITNKQAASLIGVAPVTKESGRYKGKRVIQGGRTQVRTVLYMAMMSAMQCNPVFKATYTRLVAAGKPKKVAIIACVRKMVVILNSMLRDGVMWDKNLAKI

SEQ ID NO: 68718 - protein, 334 aa, unidentified
MEQITTAGIDLAKRVFALHGVDGAGRVGMRKTVRREQLMQTVAALPPCLIGMEACSGAHEWARRFQELGHTVRLMAPVFVAPYRKSGKNDGNDAEAICEAVSRPNMRFVPVKSAEQQAILALHRVRQGWIEERTATINRLRAVLTEFGVVLPNRAQYVRRGAMVAAEGLPALARRALEDLRSHLGTLDERIAAYDRELQTQARQSEAAQRLMQIRGIGPITAVAIVATVGNARDFRSGRQFAAWLGLTPRQRSSGGKQRLGHISRRGDAYLRCLLVQGARSVLLTATRHSDRLSRWVLSVQARRGYHKALVATAAKNARIAWALLSKNQTLRAA

SEQ ID NO: 68719 - protein, 279 aa, unidentified
MSEVSLIGLDISKHVFHAHGVDGRGRAMFSKRIRRGKLLAFFTTQPSCTVALEACGGAHYWARQLAQLGHEVRLIPPAYVKPFVRRQKNDAIDAEAICEAAQRPSMRFVAVKSQEQQAAGLVFRTRDLLVRQRTQLINAIRGHLTEYGWVAPKGPSHVAMLAELIEEEEMANSLPGAARAMFRVMLDLLTGLSSKIAALDKEIARRAREDEVSRRLMTVPGIGPISATAIAALAPPPQTFAKGRDFAAWLGELPTPKWSGLKYGLLGQLEDHYGEATQT

SEQ ID NO: 68720 - protein, 419 aa, unidentified
MSFKILKFNCCGFDVHKTWIYACIGITDSNNRTEYKQARFSSFTKGLNELCDWLAKYNCKDVCMESTGKYWIPVFNILEQHNLWVTLSHPKYTKPMKGNKTDRKDAKWICDLYMCGMVKPSFIPPADIRELRDLVRYRYKLTCMITGEKNRAQNCLTVSNLKLDDVFSDVFGKSSRSITEQILQHPGEKFDVALFVHGRCKTPIEEIQAAVDGAISIEQAVKLRQCLDHIDELNRHISEVEQEILRLSDKYEATLNLIRTVPGFDKNPMTAVQVLSEIGGDMSVFPTAKHLVSWAGCCPRNDQSNQKIKSTRISRAGSYFKPVLVQVANALIKSKKHLEFTNRYKRIKARRGHKKAIIAVCRMILTAIWHILSDLKPYTAESFLESRPVKEKKVLSTSQALNLLKQRGYIIKDEPLVVS

SEQ ID NO: 68721 - protein, 416 aa, unidentified
MKKHNNSAMKREPRSKRTKSRGPAQRDTKEVLAELVETLRKKLDPKVEAGSTGEEDRRGKFRPNLDRLTVGEDLGDQWSHYCILGLEGETLAEGQLRTTQEDMAEFFQALNAARVVFEVGTHSPWVQEVICGCGHEVLVANPGLMEGSKRRKRKNDRIDANKLARLGRVDPQSLHPMQHRSRERQDLVVLRARDALVAARTELINATRGLGKSMGSRLPKCSSPSFAQKVEETVPVELHDALLPLVRMAAALSDCIQGYDEKIEKLGREKYEHTALLRQVKGVGPITSLAYVLTLENPDRFVKSRDVGPYLGLVPKQEDSGESQPQLGISKAGDTMMRRLLVGSAHYILGPFGPDTDLRRYGLRLCERGGKNAKKRAAVAVARKLAVLLHCLWVSGEVYEPLRQGMSATMTPAAAA

SEQ ID NO: 68722 - protein, 405 aa, unidentified
MNAVGIDISKGKSMVSAMRPLGELVIKPYEVIHTADELEKLACSLKKLDGETRVIMECTGRYHEAVASALYGAGVFVSTVNPVLIHGYGNNSVRRAKNDRKDSLKISKYGLDNWADLREYTPMDAVRQNLKTFSRQHNLYIKTKTALKNNLIALLDQTFPGANTLFDSPARPDGHQKWVDFVMDFWHCECVCGLSEKAFVERYRKWAKKNGYNFALGKATEVYASSTGHFVTMPKDEHTKLLITGAATQLTAVSYMVETFRAEMLRLASSLPEYPVVMAMYGVGDTLGPQLMAEIGDVRRFERKQSLVAFAGVDPEPNQSGKSDPKSRPASKRGSPALRKSLYLVMSALLRKAPAGDPVYEFISKKRAEGKPYYVYMTAGATKFLRIYYGRVKEYLTSLDDNTDA

SEQ ID NO: 68723 - protein, 318 aa, unidentified
MGPQRSSLARIYKEHVVYCGIDVAKGQLDGALLGKRWQVPNTKAGIRRLIKMLRQRNTCPQVICEASGGYEQDLVELLHQAAVPLTLVQPQRVHQFAWASGILAKTDKIDAQVLVRFGQALAPAPNAAPGAQTLLLRELDRQRAHLSGLLVAEQNRRAQLRDPSLRQLSAQLIKQIQGHIVRIDARIQAIIAADQELKAKAKMLTSFSGVGLRTATMLLAQMPELGQLNRREAAALAGLAPFNRDRGTWRGQRRVCGGRSLVRRGLYMAALTAARRNHILAPFYQRLRAAGKPPKVALTAVMRKLLIALNSALSPTPA

SEQ ID NO: 68724 - protein, 421 aa, unidentified
MTTNSQPQFNTSPIALHMSLELSATTWNLGFADQLGRPPRVRSIVAGDFEKLQTEISSAKRIFGLDDDTPVVSCYEAGRDGFWIHRCLISAGIQSHIVDPASIEVNRKKRRAKTDRIDAQKIVLALLRFKAGDKFACRMIRIPEADAEDARHLNREMRTVKTERAAHSNRIKSLLVTQGITEVTIDRNFPLRLSAMKTAQGQPLGDNLRQRLGREFERMALATEQIRDLQMQQAKMIRMAAEEIQRTEDSPKQASRQAVIAEHLCQLCGIGPVTSWTLSTEVFSWRDIANRRQLASLVGLVPTPHDSGNEQREQGISKSGRGELRVLMIEIAWLWLQYQPKSELSKWYDLRFNDGTSRNRKIGIVALARKLLVALGKYVKSGEIPAGAQLKNSHKFAYKASLYTKQSKEQSKEQSVASTAA

SEQ ID NO: 68725 - protein, 409 aa, unidentified
MKLYVGIDVSSKDMKVCLMDQEGETLQRFTVENNLHGASYLRDQIVSCYDQGSFQAVHIGLEATSVYSWHPAMFLHEDRALQARNTKVYTINPKLIRKFKEAYVDLDKNDHVDAWLIADRLRFGRLPLTVVLQEQYVALQRLTRMRYHLVHNLTREKQVFLQHLFYKCSAFTTEVESSVFGNALLELLLEKYTLEEIGSMELDALAQFLREKGKNRFADPECLAKSIQKAARSSYRLSKCVEDSIDLLLGTSIESIRSITAQIKQLDKAIQKLLDGIPNTLQTIPGIGPVFCAGILAEIGDIERFKDQASLAKYAGLSWQKHQSGSFQAEETNMIRTGNRYLRYYLIEAANSVKRNDAEYRAYYQKKYHEVPKHQHKRALVLTARKLVRLVDALLRSNQIYTPGRKVDR

SEQ ID NO: 68726 - protein, 425 aa, unidentified
MKLVYPICCGVDVHKTFLVATIITTTNSIFPKYRQKRFSTYYSGLLDFKQWLLDNNCKDVCMESTGKYWVPVWNVLEAASINVVIANPKWVSAVKGNKDDKKDSKWIGDLFRMGLVPPSYIPIKNIRILREFTRYRSKLVSMRSSEKNRFQNAFTVCNLTLDAVVRDMFGVSATAIENYLLDTDAVDPNYCVHLLRGSLKKKASDVVEAVKGFNMTAEQKERVRIIQGHFDDIDKRIAQIDNVIARLVADYEGQIALLCTIPGIDRRLAITIISEIGTDMSEFGSSKRLCRWAGLTPGNNESAGKKKSVRISRAGVYLKPALVEAAHAAVRATQKSSYFRTKYERIMKRRGKKRAIIAIARMMLTAIFAMLQSGEVFNPCDLHKFDMPEALRRKQTLSSAKDAVKLLVSLGLVPQGSISLEPLAG

SEQ ID NO: 68727 - protein, 342 aa, unidentified
MNPVSTVGLDLAKYIFQLHGADGAGAVVFRKKLRRGQLLAFLATLPPCTVAMEACASAHYWGREIAKLGHTVKLIAPAYVKPFVKRQKNDMADAEAICEAAQRPTMRFVAVKSEQAQAAAVVFRTRDLLVRQRTQAINALRGHLAEFGVIAAKGPVHASTLIAALEDPASDLPQAARGILAILVEELRSLDERVAGLDREIARHAKENAVARRLMTIPGIGAVTAAALTALAPPAQTFRRGRDFAAWLGLTPVQRSSGGKERLGRTSKMGERSLRRLLIIGASAVARWAARKGVPAGSWLGRMLARKPPLLVRVALANKMARIVWALLAHGGVYRAPVVAAA

SEQ ID NO: 68728 - protein, 349 aa, unidentified
MEHYVGIDVSLELSSVCLVDAKGKIVKEAKVASDPDALVSFLRELGVSIERIGLEAGPLSQWLHAGLTKAGFETVLLETRHVKAALSAMTVKTDRKDARGIAQLIRMGWFRPVHCKSPGSQEIRALLVARKLLPGKLLDVEFSIRGILRGFGLKMGLVTRKGFEARVRELSAGHVMLEQVCAAMLAARAGLQTEYTKLHKALLTIVRNDHVCRRLMTAPGVGPVVAITFKTAVDDPTRIAKSKAVGALFGLTPKKYQSGETDVTGGITRVGDAMVRTALYEAANILLSRVTRFSALKRWGMDVLKRRGTKRAKVALARKIGVVLHRMWIDGTNFRWTKAERATEGAAAA

SEQ ID NO: 68729 - protein, 333 aa, unidentified
MYAAIDIHKRAFQAAVLDPDSGQVAEERFSADNESLARWAESWRGRVAAVAIEATTGWRWVWRELVAAGFEVRLVEPLQARALLGRRRSAKTDRLDARWLARLLAKEMLPESWIPPAEIQQLRDRTRLRKALAEDRRRWGQRLHAFLLHEGWPCSKSNLLRPPGLRWAAALRLPEHARLQVDSLLSVMAALEAQLETVDAELRRFARQDERCQALQTIYGIGPILACHLLAEIGEAGRFQRADQITRLAGLDPVVDESGETRRRGKLAKAGSPHLRWALVEAAVHAHRPTAPDLALYRATRQRRDTTVARLTVARKIGKRAFHTLRELELAKA

SEQ ID NO: 68730 - protein, 395 aa, unidentified
MSAEGKAIRSNDYRKDTTVKAPSTRPATVLGLDVGKSSHWACLIDRDGEVLASAPVRNREAELDTLFASAPAGTLVVVDQFRNIGSLAVRRARAAGLGVAYLPGLAASRAAGLFAGEAKTDERDAAVIARTALGVPDSLSGVPGRGEALEAARALSSQRDHVVACATRDKNRLRAVLLESCPALEAAVDLSDRRWLELLAGFGGAWGIARSGAEGPQAAAAGEAAAASTAPPPALVEAENRQVRFLAARISEALDEAGALEAETAALLEGDETYACLLTVPGIGPRTAAQLAVSVDIGRFPDHDHLASYCGIAPRVRSSGTSVRSVRASRRGDARLKSLLIFSCNSLVRSSGRYGEYYRACRARGMGHGRALKAVARKRLRAIYAVMRDRVPYRE

SEQ ID NO: 68731 - protein, 382 aa, unidentified
MDVVHRCCAGLDVHKATVVACARRVGPDGAVEASVRTFGTMTADLLELADWLTGQGVTHVAMESTGVYWQPVYAVLEGLFVPLVVNAHRIKHVPGRKTDVKDAEWLAQLLQYGLLTASLVPPRPVRELRDLTRQRAQLVADRARVVNRVQKVLESANVKLACVATDVLGASGRAMIAALIAGQTDPAALAELARGRLRGKRAELRLALRGQVTDHHRFQLAALLDQEAHLEGQIARYEARIAAVVAPFAQAAARLRQVPGVGPRAAEVLVAELGTDMAKFPSAGHLASWAGVCPGNDRSAGKRRSGKTTKGSRWLRSTLVQVAWAAARTKGTVFQAAYRRWSRRLGAKKALVAVGHKVLTVIYAMLKDRTDYRERGAPGLAA

SEQ ID NO: 68732 - protein, 338 aa, unidentified
MLQHGIDLHKRTIVIATLDQKGSLVRRSKIPATRPDLLRYLDSLEGPHRAVVEATGSWYWVADLFRARGVELKLAHARQLKAVAAAKVKTDPVDALTLAQLLRGDLIPEAHMISPELRGYRDLLRTRLRLVQKRTSAKNSISRTLEKYNAKTSGELPPFAYLQISLFEEQIQLLNRQVKELEQLLQQHLIPDDDVQRLLWIPGIGRLLAFTIYLEVDDIHRFPSVKHFWSYCRLVPGAADSGGKQRHKASRDGNRYLKLAFSHAAIRAVQYFPEVRQWFQRWKRRKPIRVARTLVAKELAQAVYVVLTEGVDFNQQFKGTPLTKRKQASWPRRASPSV

SEQ ID NO: 68733 - protein, 418 aa, unidentified
MKKHNNSQKKSEPTSKRAKTRGPVRRDTKEVLAELVGKLKEKLDPKKLAARSAGEEHKRGELRPNLDRLTVGVDLGDQWSHYCILGLEGETLAEGQLRTTQEDIAEFFQALNGARVVFEVGTHSPWVQEVIGSCGHEVLVANPRLMEGAKRRKRKNDRIDANKLARLGRVDPQSLHPMQHRSREVRQDLLLLRARDALVAARTELINTTRGLVKSMGTRLPKCSSEGFAQKVEEAVPGEIREALLPLVRMAAALSDSIQGYDEKIEKLGREKYGHTALLRQVKGVGPITALAYVLTLENPDRFVKSRDVGPYLGLVPKQEDSGESQPQLGISKAGDTMMRRLLVGSAHYILGPFGPDTDLRRYGLRLCERGGKNAKKRAAVAVARKLAVLLHCLWASGEVYEPLRQGTSATIAPAVAA

SEQ ID NO: 68734 - protein, 374 aa, unidentified
MKNNFMSTLFVGIDVSSKTNVCCGLDFSGSKLLDLKAPNNQPGANSILESIIDCLNSNQLCCVVIALESTSFYSTHIANFLSSNETLLAYKPLVYCLNPKSIANYRKSFVDMDKTDPLDAYIIADFARVGRITCEPWRGSQFLALQRLSRHRHHLIECITREKAYMVSNIYLKFSELSVLDKEKRPFVNLYGVTSAAVLTEFLSLDDIAYASIDDLVSFVSEKGKNRFSNSLETAKLLQKAARDSYRLDKVLYEPLNTSIASSFNVIKAFSDEIKTIDKAIGKTIKGLNTTEFQSLTSIPGIGPVFAGGILGEIGSIASFGSNDALAKYAGLTWRVNQSGNYSADDTKMTKTGNKYLRYYLIEAANSVKNNIPE

SEQ ID NO: 68735 - protein, 342 aa, unidentified
MQVTTIGLDIAKNVFQVHGIDAAEKVVVRKQLRRRQVLEFFKALPACLVGMEACATAHYWARELTKLGHRVRLMPAKDVKAYVRRNKNDAADAAAICEAARRPTVRFVQIKSIEQQGRLMLHRARDLLMRQRTQVINAMRAHLAELGIVAAQGRDGIKELLKIIASEADARLPVDAHTSLVVLAAELQAMQTLIGSIEKRIMVQHRLSEASKRLKSIPGIGLIGATAIAATVPDPKVFGSGRDFAAWIGLVPREDSTGGKQKLGPISKRGDRYLRRILVVGACAVLRYARHKPEKYPWLTKLLERKPFKVVAVALANKMARIAWALLAKGDTYRVPALAAAT

SEQ ID NO: 68736 - protein, 347 aa, unidentified
MFAGVDSHKDTLALAVIDDGGRPVLTRQIANEASGFTELATLALEHQVTRLGIEGSTNFGWAAAMHLAEAGVTVVEVPPLMTSRERMSRPGQGKTDPVDAVAIARITAREDNLPAVRPMEGLPADLRVLMDYREQLITERTATANRVHTDLGWLRPGYQHQLPKLTNPAHLHTAVALLADDTSVRAAITRSRLQRMIAITTELADLRTQIADLVGQSKTSLTDIYGAGVFVAARILAEVVDVRRYPSRHAFAAANGSAPIPASSGRTVRHRLNRGGNRQLNRALYTIAITEIRADTEGRAYYERKRAEGKTSREALRCLKRRLSDVVYRTLRADAAASRPVPLAAAA

SEQ ID NO: 68737 - protein, 343 aa, unidentified
MKLSRVGVDLAKNVYQLHGVDRSGKTVWKRRLKRHQWFQVLLDTAGPECEIGMEACAGAHHWGRQLQSRGYTVKLIPPQFVKPYVKSNKSDAKDAEAICEAMGRPNMRFVTVKRVEQQDIQATHRVRAELMTQRTAKANQIRGLVAEYGLVAPKHLSSLRAAIPCWLEDAENGLTGDFRALLQGVWTDLLLLDDRVGEMDQKIKQLADNNEDCVRLQQLRGVGPMTSTAMVGTVGDARQYPKSRQMAAAIGITPKQHSSGDRDRLLGISKRGDVYLRTLMIHGARAVVARAKHKDDRLSRWVTNIANKKHPNVAAVALANKTARMAWAMLRHGTDYDPDFAIR

SEQ ID NO: 68738 - protein, 436 aa, unidentified
MEEVTDEPLYRDRVCGIDIGKAGMAATIRVPSDENPARRASETREFATTKRGVLALADWLRAWQVPAVVMEATSEYWKPVFYRLEAEGFECVLADARQVKNLPGRPERDPSDSRWLAACFERGAVRSCFVPDPEFRIIRLHTRYRRDLTDERTREKNRTDKLLESAAIKLSSVVTDLHGVTGRDIMEHLIAGERNPKVLAQLARARARRKITELEHALDGAEFFTPEHAALLTTMLERIDRLTGDITRLSGVIEQLLAPYEEQLQQAESMPGWGRRSAEDAVAETGVDMSKFPTGGHLSSWAGRTPLDSQSGKRTGRARHKKGNKYLAAVTGETAVAAGKTATRDGARYRKLARSRGKGKAQVALGNTQLKVYHKLLSSPGMRYQDLGPDYYERQAAIRRKIAYHVREIEALGLDVTLTRPAPEPGPDEPANTPAA

SEQ ID NO: 68739 - protein, 331 aa, unidentified
MREEIEKAKSRFRLDNDVRIVSCYEAGRDGFWLHRYLLSEEIENVVVDSSSIEVNRRKRRAKTDRIDARKLLRMLMRYHGGERKLWSVVRVPSVEAEDGRQLSRELESLNKERTRHRSRIRGLLILEGLEVKNPSGKKFLEELDSLCTWDGKQLPGDFKARIVREYERLRMVEEQMGILRKEREIRVGSAETLSMRKVAQLRTLYGIGVTSSWDFVTEMFGWREFRNRREVGAFAGLTPTPYDSGGSQREQGISKAGRGRIRALSIQIAWGWLRFQPQSKLSQWYQERFAGGGSRMRRVGIVAVARKLLIDLWRYLEYGVVAEGARLRPVK

SEQ ID NO: 68740 - protein, 340 aa, unidentified
MNATTYGLDIAKRVFQMYWVDAQTGEIANRKFGRDDLIAFLAQRPAGRVALEACGSAHWWARKIRALGHEVVLLHAQFIRPFVQTNKTDAADARAIWTAVQQPGMRTVAAKTEDQQVMLSLHRMRSLLVKFRTMQINQLRGLLYEFGVTFRAGRVAGLDEIRKRMAELEDTLPRSILLNLLEQLRRINLFEEDIDQLEKRIGAWQKQEAACRAISEVPGIGRLTATALVATIGDAKTFRSGREFAAFLGLVPRQNGTGGKIRLGSISRRGDPYLRTLLIHGARSVLCHAKVPTGWQKAIQERRPANVATVAMANKMARIAWAILAHGTPYEAHHVSNRPA

SEQ ID NO: 68741 - protein, 350 aa, unidentified
MKHSKTVVGVDTAKRVFQLHWIEQETGEIVSLQLKREKFLEHFANRASCLIGMEACGGSQHWARKLAAMGHQIKLVPAKAVRPFVGGNKSDAHDARAIWTAVQQPNVKAVAVKTEEQQAILALHRMRQQLVKFRTAQINGLRGLLTEYGEVMPQGKAGVKQGIAEALQRLSDRLPAMVIDTLREQWARIGQLDEQIGEIERRLKLWLRDDVASQRIAEIPGVGLLTATAAVATMGDAKAFKSGREFAAWLGLVPRQTGTGGRLRLLGISKRGDTYLRTLLIHGARSVLTHAKDPAPWITELRQRRPLNVAVVALANKMARTIWALLAHERTYQKGFVPQGDFLRGVSQPV

SEQ ID NO: 68742 - protein, 343 aa, unidentified
MLTLKSFTMGQLLVRQCFGIDIAKGDFTASLCRHYSAGDVLFSDTVTFENSRKGFNQFLRWCQKVSEPSVPATYLMEATGIYFEPLAYHLHRIHKHVSVLLPNKVKHYAKSLNIKTKTDAVDARVIARFGTERQHPEWQPPKEIYKKLRELTRLCGDLKKERTVFSNRTRSTEAGESPNSFVLKANNRVIKELDNLIEKCEKEIAALVEGDIELRERFEKLMTIKGIGLTTLAVVIAETQGFALISNRKQLASYAGYDVVQRESGSSVKGKTRISKKGNSRIRAAMHFPALVSCRFNQNMKDDYLRIIEHKTSKMVGATAVQRKLLLLIYTLWKNNDTFKEEM

SEQ ID NO: 68743 - protein, 340 aa, unidentified
MKKVFIGIDFSKLKFDAAIYIVDTKSIVSEEVFENELSGYTEFIKWVRLNACCQKSCLLFCGEHTGYYSANLSAFLHESGYDMWLVSGLEMKLTQGIKRSKTDRVDACKIAEYAYRYQDKSTLFQPVSKALEEIRELLSYRERLVETRKVLSISAKEMKRVKDNASCDFIYQDSLAYIKTLSESIHNCEKQIEMLLNQDTSLKINYKLVSSVVGIGLVNAALILVSTANFTLISNPRKFGCYCGVVPFEHTSGSSVRGKTRVSKLANKHLKTKLTLAAQNSIRFDPELKEYYQRKLNEGKNHWLILNNVKNKLIHRIFAVVRDGKMYEKQYIHPLKLHAA

SEQ ID NO: 68744 - protein, 347 aa, unidentified
MDHIGMDVHKKESQLCILTEAGELVERRVRSEPERFAAVLGDQPRARILIEASTESEWVARCLEALGHEVIVADPNFAPMYATRTRKVKTDRRDARALAEACLLGAYRPAHRLSDPQRHVRGRLLVRDALVRTRTRYISLIRALLRQHGYRVPSGSAEAFLRRVRTLALPGRLLSQIAPLLAVMPHVNRQLSYSDQVIEEITAHDERVRRLRTVPSVGAVTAAAFVATIDDVQRFRHAHQVQAYLGLVPRELSSGETQRRGHITKAGPPRMRWLLIQAAVSILRRRPPQAEALRTWALHIAARRGKAIAVVALARRLAGILYALLRDGSVFTPHRAPHPGAVATVPA

SEQ ID NO: 68745 - protein, 341 aa, unidentified
MSVIAPVFSFDLNGYTGSGLALQDKAEKNLMQITIGIDISKETLDAYRFPDNHHIQVANGRAGHKTLVRWIGKQNGSLVVFEATGAYHRNLEAALAANGTAFAKVNPRQARRFAEATGRLAKTDRVDAIMLAKMGAILGLKAHEPKTEALHILRELITARRALMKDKVAAKTRLQTTRQTLLKNQINARLKQIKIQIQQVDAAITEKVAQDEVLSNKLDILTSIPGIAETTAFSMLIEMPELGTLEGKQAASLAGLAPMSRQSGKWQGKERIKGGRAFLRRAIYMPALVATRYNPGLKAKYDQLIRAGKSGKVALTAIMRKLVVMANALLRDGRTWSELRP

SEQ ID NO: 68746 - protein, 346 aa, unidentified
MEQYVGLDVSLKLTAICVVDRTGKIEREGAVVSDPETIAAFVKSHAPHVARVGLETGATSTWLWTELNKMGLPVICIDARHAKAALKLQINKSDRNDAVGIARIMQCGWYKEVRVKDLDSHAIKALLVSRALLVKIKRDIENQIRGLLKNLGLVIGRAKMNVFSMRAAELAEARPELAAAVEPLLKAREAVGRQIADLDRKVMRLARNDAQVRRFMTAPGVGPITALCFLATIDDPTRFKRSRSVGAYVGLTTRRYASGEIDWTGRISKCGDKMLRSYLYEAANVLLTRVAKWSALKAWGIRLAKRSGLRKAKVAVARKLAVILHRMWIEGTEFNWSSKAAANQPA

SEQ ID NO: 68747 - protein, 338 aa, unidentified
MKLYGAIDLHSNNNVTVLIDEQDQVVYQKRLPNDLSLIAQQLSGYQDALQGIVVESTYNWYWLVDGLMDQGHRVHLANTAAIQQYEGLKYTDDHTDARWLAHILRLGVLPEGYIYPKEERAVRDLLRKRGQMVRQRTTNLLSIQNLITRNTGSSIRSNRIKTLDAEQVDDLLPNPDLALAVKANLAMIKCAAEQIEILERTVTDRIKLREEFSFLKTVPGIGQILALTIMLETGQVQRFPTVGDYASYCRCVGSQKLSNGKKKGSGNTKNGNKYLAWAFVEAANFAIRYNARIKSFYQRKKAKSHGVVAIKAVAHKLCRACYYIVKDQVPFDIAKAFA

SEQ ID NO: 68748 - protein, 344 aa, unidentified
MKYFAGLDVSLDETAICVVDEDGIVVTEGKAASEPDDLVRWLVATGLTITRVGLEAGPLSPWLHTELRAAGLPAICIETRRMKGATAAMAVKTDRNDARAIAHAMRVGWFTVVHVKTAESQELRLLLNNRRTLLEKRVAIDNEIRGTLKAFGLKLGAVTVAAFEVRVLELLAKRSRLLAMVRPMLAARAALRQQCDVLHRMVLKAVRASAVCRRLLSVPGVGPIVALTYATGVDVPARFIHSRDIGPHFGLTPRKYASGEIDRNGSITKGVDGAVREVLVQAALSLLTRVQRWSALKAWGMAVAKRRGLRRAIVAVARKLAIILHRMWADSTMFNWNRETVALA

SEQ ID NO: 68749 - protein, 352 aa, unidentified
MSDYYVGLDVHKASICIAVLNAEGKLAMESVIETNAATILDFIKGLRGEVEVTFEEGTHAAWLYDVFKTTKARVVVCNPRRNRLLSDGNKSDKVDARKLAQLLRAGLLSPVYHGEHGVRDLKELVRSYEYLVEDSTRVMNRIKALYRSRAIACAGADVYKPQQRQAWLEKLPEAGVRARAARLYSELDHLAGLRREARQAMLVESRCHAASKILRQVPTLGTVRIAQLMAAVATPHRFRSKRQFWSYCGLAVRTRSSADHHFVGGNVRRTGKAATRGLTQDYNRTLKHVFKSAALTASRYEPFKSCYAELLGRGLRPELARVTVARKIAAITLAVWKKGEKFDAGKLIKHAA

SEQ ID NO: 68750 - protein, 356 aa, unidentified
MMEIKGTDFRNQDFHIGIDVHRKNWLITIRNNQMELRTFSMNPSPEELHQHMEHNYPGGRYISAYEAGFCGFWIHRKLQELGFKSIVIHAADIPSTNKERSTKTDKIDSRKIARELENKSLNSIYIPNEFHQQLRSLCRLRHRAVQSQTRVKNRIKSHLYFNGTDIPSHEEMPHWSGHFINWLKSQEFSYPSAKDYLLFCIEELTQHRHRIAEIIRALRRHIKEQGQSEQIDLLCSVSEVGPIIATSFYTEVMDINRFRTFDHLASYVGLVPSVHSSGDKSTEQGLTKRRNSYLRYLIVEAAWVAIRKDPALLLAFNQLTRRMKKQDAIIRIAKKLLRRIRHVWKNQTPYVTAVVK

SEQ ID NO: 68751 - protein, 428 aa, unidentified
MRFIGLDVHRDFCEIAISEGGKARSAGRVQSSLEELRVLGQSLLPDDKVILESTGNALEIARVLEPFVSEVVIANPMHVRAISHAKVKNDQFDARTLAELLAADLVPRVWIGDERTRVLRRLTSRRTQLVRQRTRPKNEITAVLVRNLKGRPPMSDLFGKRGRGWLAELELPNDERDTVEACLRQIDFLTTEIAHVDRQLAEQALQSDEIKRLMTIPGIDVTTAATLIAAIGDIHRFPSAKKLVGYLGIDPRVRQSGQSPARQGRISKQGSSSCRHVLGEAAWSAVKTPGPLRAFYQRVRARRGAQVAIVATSRKLACLCWQLLTTEQDYAFKRQTIVDRKLRALELRAGAPTKHGTQHTKGTPTLKQRNLQERQLTQQAELAYQRLIQDWQATATRRNGAGAAPGRASQRPSSGTAARQETAPQPAL

SEQ ID NO: 68752 - protein, 403 aa, unidentified
MFHLGIDVSKKSCHYFLINPEGKKVKSFSLDKTHDAFQNLLKRLEDLSIPKEDLLIGLEASGGFWENLYSHLKDNGFRVVLLNPYHTKKFREALAKKAKTDDIDALVIAQLLRTGEYVQSQVAEELIQSLRELTKLRYELMIERKNFQRQVFSLLSIIFPELEKTALKNPFSVASMAILQNFPTAKDLAQAKPKQIEKIVRSIQGNNFNIEEIGKLIQTAQTSIYSGRAKEARATSLRILLRHIETLSSSIQELEAQIKEILSPQQPQDSFPGENLLTIPGVGDKTLAAVLSYLGVDGSSFSTSTKAVGYVGYFPKIYQSGQTYRDNIICKRGPKLLRWALYMAAVASLKHNPEMRTLYHRKISQGKTEKQALICVGKKLLQVMLAMLRSGESYNPAKVFVSC

SEQ ID NO: 68753 - protein, 464 aa, unidentified
MSRKSSKSKNKTRHLLETEVHPDAAGIDIGAEELVVAIDPVRDDEPVRTFQTFTADLHRLKDWLLSCQITTVAMESTGNYWIAAYQILEDAGIEVFLVNARHVKAVPGRKTDVCDAQWLQKLHAAGLLRSSFRPQREIIPLRYLMRHRCGLVRESSRQIQRMQKVLTEMNLKLHHVFSDLDGTSAQRIIRAILEGGRDSDALWQLRDPRCRATKQTFLAAIEGDWREEYLFVLQQCQDHWTHMRTMIAKCDEKIQLLIEQIDSSDEQGKHQEEQRPTTTSRTRKVAKNDLGFDIHSESLRFYGVDLTSIDGVSTGTLGVLMSEIGTRDQLLEAFPSASRFCSWLTLCPDNRISGGKILGSKTRQSANRVAACLRMAAQALTRAKSALGEYCRRMKARLGKAEGTTAVAHKLARIIYAMLKSLTPYNETNCFQVTGKHRERKLSNLKNAAKKLGFELTPLPDATP

SEQ ID NO: 68754 - protein, 400 aa, unidentified
MRVVFGIDVSKVSSEVAILVNCEKVHNYTMSNDAIGFARLLGDLRTVHKPEIIFEATGVYSRRLQTFLDDNGYAYTRLNPLEAKKQLDSLRVRKTDQIDAEKLAQSQFVLNRKPTYVQEEVYQNLRDLSRFYQNLTEDIVRAKNRLHKVLQVTFPELENILSTPSGEQYWNLVIAFPCKDCVLELSNDELSKSIRLSTSKRISDKRVAYLAEKLIALANQSYCAVKKTSPILEEVRYYAKELLRLYEQRQAVLDEMVELAQPLPEYDILLSIPGIAETTATSIIGELGDIRRFQSANQINAFIGIDLRHYESGNFLAKEHITKRGNPYARKILFKCIHNIASASHTNPCHIADFYEKRKRQSQTTSTKPHTIASIHRLIRTMYYLIMHNKLYDYASTQNR

SEQ ID NO: 68755 - protein, 320 aa, unidentified
MNTQALSIGVDVSLAELVIAHFGDTTPLIKIPNNAVQIKRWLKALPPACTIGMEATGAYHRLLADLAFAAGHTVFVLNPRDVALYLKSLRTRGKTDVLDARGIARYTHNETDKCHAYVPLTAQQQTITTLIQRRHQVVKSRTSLRMSFADTTLCTKACSKLMCAFDALLADIDNQLKALIAADEALNARCKHLRSIQGVGPLISAALAMRMSRVHYANSDALVAAIGLDPRPRESGQYTGTRHLSKRGNPEERRLLYLAAVSACRNPTWKAIQTTLLGKGLPSTAVYCIIARKICALHLLSGIQGCRTTRTSSENACSPT

SEQ ID NO: 68756 - protein, 424 aa, unidentified
MRNRAYSATHVNQVNVQELIKGRDGQAVWIGTDVGKYELKMVVHWGERQFERPWNVPNPFGIPQVMDLLKELKAGRSLVLAMEPSGTYGDALRQAAADAGLVVQRIHPKAAHDYAEVFDGAPSQHDGKDAAVLAELARVGKGAAWAYATGDRTRQQLEYWVDRMDVHRRLLSVWSGRLEGALARHWPEVGQVLKVNSPTLLKVLIEHGTPGALGADPQAEAKLRRWSRWLLSDATIAKVIESARGTVGVRMGELDIRRLRDNAQEAQSARREISLCKRRLAQAAAGQVSIAAMGQVVGLATACVLWVYLGEARDYHCGEAYVKAMGLNLVERSSGTYRGRLKISKRGYGMVRYWMWLAAMRWVKDGGVRRWYEAKKKRDGGYGGRALVGVMRRLGMALWPVGCGEVFEAWRMFPGLSRGQKKGR

SEQ ID NO: 68757 - protein, 456 aa, unidentified
MSGNRTKSKPAGLPIIHEFAAGIDIGSRFHVVAVSPDLSDESVRTFQAFTGDLRRMADWLISIGIKTVAMESTGVYWVAAYEILESRGIDVILANAREVRAVPGRKSDVNDAQWLQRLHACGLLRASFRPSRDIAALRAYLRSRERHLDYAAAHIQHMQKALTFMNLQLHHVISDITGATGMKIIRAIVAGVRDPEILAAMRDIRCKSSVETVRAALVGNYQPEHVFALKQALALYDFYQECVAECDVQIEQVVAALNANRQKPEAPLPKARHRTSQPNDVNFDVRSAMYQLAGTDLTQIHGIGPFLALRLVAECGTDLSRWRTSKHFTSWLTLSPGCRISGGKVLSAYTRKTSNRITAALRLAAVTVGRTNTALGAFYRRLAARIGNAKAVTATARKIAVLFYNAMRFGMDYKDPGADHYEQQYRERVLKQLHRRAAQFGLILRPQNSVVAECVS

SEQ ID NO: 68758 - protein, 421 aa, unidentified
MKNSAARKMKQVPEGYLIVGIDPHKKRHAAVAITQDFTVRDRFKFDNTREGLESVINRARLKMTNVGCRGVMFAIETGGHYWRNIAYFLDEKGIPFRFINQYTLKRRREGKDLNRRKNDYRDSEVAAQLLCTGEFTETRIPQGVYAELRTAHNTYRRLVKERTRVTNLIKGLLDGLFPEFVQVCKDPCGLTAATVLSTCATPSVIAAMSEEEFVAFIKATNRPQLKRNKLRAIHNVAKTSIGIEAGAKSLAFEVSFLIDKIELIKQQIAIIEQMLIRLVDEAEEGKYLLSIRGLNYISVGGLLAELGCFKAYRSAKQMIKMAGSNPTESESGGKKKSRTPMSKQGRPVLRYCAWTAVVPMLRFNEDFRAWAKRLRERPVHANPLGGREILGAALNKLLRLAFALVENRTYYRLPVAMPVMR

SEQ ID NO: 68759 - protein, 402 aa, unidentified
MTESNVEISEHKTSANLVSPEHPSIERCYRAYIGMDVHKETITWAVAYTGRSAPEYRGEIANKPKTIDKLVTRLSKEFDGEVLLWCYEAGPCGYVLHRQLVGLGQDCQVVAPSRIPKQPGERIKTDRHDAIKLAQLLRSGVLTGVWVPDAEQEAMRDLTRARNDMKNQERKAKQQLNAFLLRNGCSWPANKKRWGSIHLNWLAGLRFEQPYQHVVLQEYINAVSEACRRVAEINRLMEEALPQWSMAPVVDSLRALRGIDTLAAMILLAELGDISRFESPRQLMSFLGLVPSEHSSGPSRRHGAITRTGKGHARRVLVEASWCYRFPARQTAHLRRKARDASDEAQAIAWKAQKRLCGRYRLLCQSGKNTKLVCVAVARELVGFIWDIARQEMPRVAPQTAR

SEQ ID NO: 68760 - protein, 360 aa, unidentified
MEMIGLDLHKRETQLCICTEDGTIVEQRIATSRERFTAVLGARPRARILLEASTESEWVARHLESLGHEVIVGDPNFAPMYATRTRRTKTDRRDARALLGANQVGAYRPAYRVSDARRHVRAELAVRETLVRTRARYITLAKTLVRRDGLRVPTSSPAVAVRHIHALPVLADALSLSPFLGEELAPLTAILAPLSAEIAAADRRLEAHAATDPDVARLMTMPAIGPVTATALVATIDDIQRFRSAHQFEAYLGLVPSEQSSGERQHRGRITKTGNARMRWLLIEAGWRVLHAKTPATAALRTWALGIAARRGKRVAVVALARRIAGILFAMWRDGVSYDARKLRGWSAHATTVVRSTSGC

SEQ ID NO: 68761 - protein, 441 aa, unidentified
MEKVISFEQVNEAAAGIDIGSEKIFVSPDGLLVENFGTYTSEYYRCINYLQEQGIKRVAMEATGIYWISLYNLLESAGIKVSLVNPKETKQKKGKKTDVRDCRWIQKLFSAGLLKESFIPEGKLLEIRYLVRERLDIIEMGSTYVNKMQRCLELMNIKLTQVISQVHGTSGMRMLKAIIKGERNPDVLLLLCDERIKKQKGVEVIKALEGNYNDTWLFMLEQNISLWERHQEQITQIDKRIEVLLEDLTTGKSVEEGVVGKIKPVRHHRPQINNLHETLVKFFGVNVTSISGVNAYTCLRLIGETGADMSRFETKKHFTSWCGLSAGHHQSGKRSKWVKQAPCNKAGQIFKEAAQSLENSKYIAIGSFIRRLKARRGASVAYKAGARKIAEAYYNILTKGTAYVEQGLQQYEQQIKQREIATLKKLAKKHQVQIIEKQEAA

SEQ ID NO: 68762 - protein, 355 aa, unidentified
MNDAKYIGMDVHQATISVAVRDSRGNLVMEAIVETKAETILQFIRGLRGSLSVTFEEGTWAAWLHDLLRPHVTRVLVCDPRKNALLKVGNKNDRIDARKLSELLYLNKLSSVYHGEPGIRTLKELARSYIAMTRDLTRVMSRLKAIYRSWGIPCAGQQVYAPRYRAEWLAKISEAGVRRRAGLYYQQFDTLAALRQQARRELLAEARKHPAMKLLRQIPTIGLIRAALLIALMQTPNRFRTKRQLWAYCGLALRTYTSGEYRFVGGQLKRSKKVLAVRGLNINHNHDLKNIFKGAATRAASTVGPFQDFYQACVARGVKPHLARLTLARKIAATTLLVWKKGVRFDAEHLKQQAA

SEQ ID NO: 68763 - protein, 451 aa, unidentified
MVKKKISLEVVNPNAAGIDIGSKSHWVAVGQNAQDVKEFGVYSEDQQALCKWLERHKVTTIAMESTGTYWQNLFSALVVYGFDVILVNGRQTKNIKGKKTDIKDCQWIQKLHTLGLLSSSFLPNSTTAIIRTYSRHRHNILKQASSCILKIQKYLRLMNMRLDVVVKDIAGLTGTKIITAFINGEKSGVELAKYRHYNCRKSEKEIAKALQYNKREDYFFALTQEWETYLHLQKQLEQVDVQIKKHLEEVIDKDDNKKQHIATKKPYKRKNKNTIRGVDMNQMAYQYFEGIDLMAIEGVNDATIMAIISEIGLEGIKKFESAKQFTSWLRLAPNNKISGGKVLSHHLPKGSSRLKVALRQSANVIGNLKEGYLNDFFKRINYKKGRATAISATARKLAVIIWNMLYKGVDYNPPTQYLFLDQKRKLKLVRRIRRNINKFDIKPEDVGFITA

SEQ ID NO: 68764 - protein, 411 aa, unidentified
MVKENFIYVGIDLHKETHTAVMIDCYNQKLGEITFPNRPADFPKLVTKVKKCNTDAKEVVYGLENAYGYGRPLAVWLIDKGYFVKDVNTAISHRQAKHRGAMYRKSDSDDAGAIALATLNMLDKLPDACPNDAYWSLGQLVHRRDNIMKQRTRLVNQLHEQLCIAYTSYKQFFNDISRPTALYFWEHYPSRKYLKGKSVEDLRAELVPVSHNKCSTKTCEKILDAVASDKVKNNAYQDARDMVTLSIVSDLQHYDIQLAEVDKMLEQMYKMLGCTLTTIPGVNVITAVKILAEIGDIKRFSNANKLAQFAGIAPLHLSSSGKGKDLATKQGNRRLQATIYFLAIQMVQISSKGTPRNPVVRAYYEKRKAEGKTSQQALICISRRLISVIYGMLKNGTEYRMPVVENAGEKL

SEQ ID NO: 68765 - protein, 412 aa, unidentified
MDVIHSRCAGLDISKKDAKVCVRINGAGRRKTSETVTTFGATTRQIIALRDHLAAQQVTCVVLEATGDYWKPFYYLLEDLPGVEVMLVNARHVKNLPGRKTDVADATWLAQLGAHGLVRGSFVPPEPIRQLRDLTRTRTAVTRERTREIQRLEKLLEDAGIKLSSVAADLNGASSRAMLDALLAGETDPATMADLAQKQLRRKIPQLTEALYGRFTSHHAFLTRMHLDLIDQHTAAIEALTERIEVVMEPFRDFRDLICTIPGIGGFTADVVVAETGVDMTRFPTAQHLASWAGTTPGNNESAGKVKSRRTRPGNPYLQGALGTAAMSISHTRDTYLAAKYRRIAARRGPLRANVAMQRALLVAIWNIATTNTAYHDPGGDYFTRLNPQKARSNAVHQLEAMGYHVTLEQAS

SEQ ID NO: 68766 - protein, 408 aa, unidentified
MDKLFVGIDVGSRDNAVYIMLPDGSKHSSFAVQNNLGGAQTVSKRVVSALADKNLADVAIGIEATSVYGNNLMYFLREDGALARFERKLYVLNPKQVKKFKDVHPDLPKNDPVDAFVIADNLRFGRITTPVWMDDYRYSALQKLTRARFYAVQNLTREKQRFMNYIFTKCSGLAQEKVFSDHFGATALAVYDTFETPDDIVNMDIEELTAFISEAGKNRSPFPEEIAKAVQAAARGSYRLPKTITDSVNQVLSISISSMRAMQAQIKALEKEIERQFANIPNTLISIPGFGPVLSAGIIAEVGDVNRFEKGQSGLAKYAGLMWKENKSGMFEGQNTRLIKSGNRFLKYYLCEAAMSLVRCDTEYKRFYDLKYKEVNKYQHKRALVLTARKLVRLVFRLLKDNRLYIPA

SEQ ID NO: 68767 - protein, 360 aa, unidentified
MDVQKDSMAVAYGAQEHHAAVVSRGNIGTRPCDLDHLIRKRQSKSQPLIFVYEAGPCGYWLYRYLTQKGQVCWVVAPSLIPKKPGDRVKTNRRDAIKLARLMRSGDLTPVYVPTVDDEAIRDLCRGREDAIRDLKTAKFRLKAFLLRQDIRYTGRATWGPAHLRWLSEVVCPTPAQQIVFQEYIRAVTEHTERLKRLEQELTDQVQTWRLAPVVDALQALRGVQFTVAVTTVAELGDLTRFDNPRQLMNYLGLTPSEYSTGEQRRQGGITKTGNSHARRALVEGAWAYRYPAKVSRHLQLRLEKVSKPIQDISWKAQIRLCKRYRQLSARGKHANQVVVAIARELSAFMWAIAQEVSLTP

SEQ ID NO: 68768 - protein, 365 aa, unidentified
MTSTKYIGMDVHTESISMADVHTESISMAVRNSVGKVVMESVIETKASMILQFIEGLRGDLHVTFEEGTAAAWLYDLLKPHVARLVVCNPRRNALLKVGNKSDRIDARKLSELLRGNQLHPVYHGEHGLRALKELVRSYLTISKDLARVMTRVKALYRSWGIPCSGTQIYSRLHRVTWLSKISEPGVRLRAAFYFQQLDALRTLRQEVRQELLAESHKHSAWKRLCGIPSIGPIRAAVALGVLQTPHRFRTKRQLWSISGFAIETRSSADHRHVNGQLQKVKKRVSIRGLNQNHNHDLKNLFKGAAVIASTKPGPFQEFYTALLAKGMRPEMARLTLARKIATIVWIVWKRGVSFDAQYLKPQTV

SEQ ID NO: 68769 - protein, 344 aa, unidentified
MIWVGLDVHQRFSRMGCFDPATGEIHDLGAVSNEATALEEALEELPSPKTVVLEAGRSSHYMAGLLESMAEEVWIVDPGEVRRLQHTISKTDRRDAAALAWWAAKGVITPQWRPDAELLDLRELTRGKTALTRMSTRVRTMIRMLLARHGHECPHRDLMSERGQLWLEEVELGGHAGQMLAGLREILVVVQAKVDDFERMVAQTSAKHPMARRLRTIPGIGPFLSLALAVEIGDINRFPGPAQLRGYSGLVPAVYQSGDKNARGPLTKAGNKWLRYAAVLAAQRIGQMKEPDPRLKRIFLSVAFRHGRNPGKIALARRLLDLIYHLLKKGQDYRAPKPRAAATA

SEQ ID NO: 68770 - protein, 350 aa, unidentified
MSMVCGLDLHRGQITYDAEIEETGEIWRGRIWSPDRARFRHWLDVDVAKRANGAPVAMAMEGCTGWRYVVEEINAVGFEAHLAEPAETQAARGRKKRAKTDRSDACLQRQLLQRGELSESWIPPEGVLEWRKRTRLCKTLVDERRMWVQRIHAELFQHGVALPEGEIRSEEVRTWLASDEVRLTEAARQRIGVGYRVMDAIEEEVMVLRRQVQRFASRQPACRALAKAHYGVGPLTAVITWAELGDCRRFSRSMQVVRHCGLDVTVHESDRSRPGGHLSREGPPTLRWALFEAGKCAARLTSPDYDYYRAVKKRRDGKLATLAVARKIARRCYHTLRAMDSELVYSIPEV

SEQ ID NO: 68771 - protein, 402 aa, unidentified
MNAVGIDVSKGKSMVAIMRPFGEIVSAPFEIKHTASDIHSLVELISSVEGESRIVMEHTGRYYEVLAHQLSEANLFVSAINPKLIKDFDNDSLRKVKSDKADAVKIARYALDKWQNLKQYNVMDELRNQLKTMNRQFGFYMKHKTAMKNNLIGILDQTYPGVNTYFDSPARSDGSQKWVDFASTYWHVDCVRKMSLNAFIDHYQNWCKRKKYNFSQSKAEEIYGKAKELVPVLPKDAITKLIIKQAVDQLNSAATTVESLRTLMNETASKLPEYPVVMAMKGVGTSLGPQLMAEIGDVSRFTHKSAITAFAGVDPGVNESGSYEQKSVPTSKRGSSDLRKTLFQVMDVLIKTHPQDDPVYQFLDKKRAQGKPYYVYMTAGANKFLRIYYGRVKEYLSSLPES

SEQ ID NO: 68772 - protein, 432 aa, unidentified
MDVVFPRCAGLDVHKKRITACRIVPDPTGQKAEGITELQPFGTMTRDLLALADWLTEASITHVAMESTGEYWKPVYNLLEDTFTVFLVNAAHVKNVPGRKTDKADARWLAKLMRFGLLQASFIPPKGQRDLRDLTRYRTKLVQERVREVNRVQGVLERANIKLASVIADIMGVSGRAMLEALIAGRADPATMAALAKRRMRSKIPVLEHALTGIVHDHHRQLLAMQLAHIDFLDEQIEALNAAIETSLQALSTAEPSREAQPLPLTFIRAVELLDTIPGIDQRGAEVIVAEIGIDMSRFETAPRLAAWAGVAPGNDESAGKQRSGKTRKGNRPLRAILTQLAHAAVRTKDTYLSALYQRLAVRRGKKRAIIAVAHSIMWSVFHMLSRNEVYREMGANYFDERRRQFTVDRLTRRIERLGYRVHLEPVAASAA

SEQ ID NO: 68773 - protein, 371 aa, unidentified
MTNHSEAFVAFDTSKLRNSVAIAEAGRSGDVRFFGEIDNTPTATEKLVRKFVAKYGRLTFCYEAGPTGYGLYRQIKRLGHDCMVVAPSLIPKKPGNRVKTNRRDALNLAKLSRAGELTAVWVPDERHEAMRDLVRARGAAVDDLKSKRQQILSQLLRLGRHFPGKKTWTRAHMIWLASQKLAHREQRIAFEEMLLAERQAQERVVRLDQAIVAAVPDWSLAKLVTALMALRGLDLIAATIFLAEIGDLTRFANARQLMAYLGLVPSEDSTGEEVKRGGITKAGNHRARRVLVECSWSYRHPPRVGKKKLDKVAAAPREVQEIAWKAQARLTTRYRALARRGKRPTVVVTAIARELAGFIWAVGRAVDLRAM

SEQ ID NO: 68774 - protein, 425 aa, unidentified
MLAVGIGWAEEFHLVALGRPGEGVIDLRRVEHSPKAVDALVERIAQLEPDPAAVRVVLETRHGLLVERLLDAGYVVVPINPDLIARRRGPARKKDDAEDARIACLLALDRFERLRPLIPHGELAGELRSIARDDERAARDERRLLNRLRQDLVATFPAALQIAGADLGAPAFLRLLERWPTAEALASASRSELVEHARACHHGWPDRFADTITAALTAEQFQPRSYLVRAKADTIRLAATQLLAIGSQRRTWERRMGELLLGAPRRGRARQPREGERGQSFPGGKVYLSFPGLGDRLAARVAGEIGDHPEQFESPNALQCYAGKAPVTRRSGKSEFVVSCRLAYNRHLGDAVHQWAFCSLRTSPWARQFYDQKRAAGKSHNAALRTLSNRWLEILWHCLQHGLLYDEATHTANRDHTHKHLPRAA

SEQ ID NO: 68775 - protein, 342 aa, unidentified
MGKLYFIGLDLHKKIIAYCIKTRGGVIVAKGTVPASRPSLLKWIESLPQPWVAAMEATLFTGWVYDFLKPHAKDLIVAHPEMLKAITAAKKKNDRADAEKICDLLRVDLLPQCYMAPEQMRELRRVLRYRNHVVHMATNVKNKISGLLMEVGAEYSKKRLHGRTYFKNLLETVEDVPASVKELLKLSRAGLEMFAAVQKKLLVAIRENELIRDRVRRLMTIPGVGEVTALTWVLEIGDPQRFSARQAISYCGLCSAQRESAGKEIRGPISRKRNKHLQSVLIEAAKLAPNWNPRLAEVHDRELTKGNRNRATLAVARKLVTYMLAVDKTGVDFALAHEADAA

SEQ ID NO: 68776 - protein, 360 aa, unidentified
MKKVSKQMGNMEVSDKPEMTLGLDMGDRYSHYCLLNQQGDVVEEGRMQSTEGAIRRHLEGEPSMRIALECGTHSPWVSRLLKALGHQVIVANARKIPAITGSESKNDRNDAEKLARFAAYDPKLLSPLQHRSPGRQLDLNLIHARATLVRARTMIVNALRGLVKSAGGRLPSCSTESLPARAADAIPPALAAVATPLIQQIGLLNAQIAGMDKQVEKLAVKYPEIGLLRSAPGVGPIVAAAYVLTLDRPDAASNRSAGAFLGLRPGQSQSGDSDPQRRISKTGDSCLRSLLVQSAQYVLGRFGPDSELRRWGLKLATSGGKRGKKRAIVAVARKLAVILHSMWRSGQRFQPFPQSAAVAA

SEQ ID NO: 68777 - protein, 340 aa, unidentified
MKNMHFVGLDVHKKIIAFCVKQMDGKIISQGTIKANRNALRLWVHSLPKPWVVALEATLFTGWVYDLLQNYALEVKVAHPQMLEAITVAKKKNDLCDAEKIADLLRCNLLPECYMQPKEIRELRRVLRYRSLIVREIVRMKNKISGLLMEAGIEYDSKKLHGQKYFHQLLDQIEISDELSQILKMSRECLEFLKSIEKRIVDGLKIHPEIKQRMERLTTIPGVGQITALTWIIEIGDPHRFSSIKKAVSYCGLCSDQKESGGKQYRGPISKKRNKRLQTILIEAAKLAPLWNPQLREVYEREKQKGNKNRATLAVARKLVAYLLAVDKNKRPFKMKEFCK

SEQ ID NO: 68778 - protein, 347 aa, unidentified
MRFYTNQHKFYCGIDLHTRSMYVCILDSAGEVLVHRNLPATPAHFLSVLRPYRDDVVVAVECIFTWYWLADVCAAERIPFVLGHALYMKAIHGGKAKNDKIDAHKIAVLLRGGMIPMAYVYPAAMRATRDLLRRRTHLVRKRGELLAHIQNTNSQYNLPAFEKKIAYKGNREGLAERFVDPSVRLSVATDLTLIGHYDQLVRELELHILRHAKAHDVQAYMRLRTVPGIGEILALIILYEAHDIGRFPTVGDFVSYCRLVKCARESAGKRYGFSGKKIGNAHLKWAFSEAAVLFLRQHAEGQHFFRRLERKYGKPKALTVLAHKIARAVYFMLARQEAFDMHRFAQT

SEQ ID NO: 68779 - protein, 415 aa, unidentified
MALKIVYKICCGIDVHKTFVVACIASTNDKGVTSYESHRFSTYTSGLKTLLQWLLDRNCKDVCMESTGKYWIPVYNILESDCSIVLAHPKYVKAIRGKKTDKKDAKWIADLFKHDLVAGSFMPPADIRQLRDLMRYRFKLTCFKSSEKNRLQNCLTVSNIQLGNVVSDTFGKSAQAILDKLLENPADTSFDLEPLVYKSLKKKLPELRDAIDGYITPEQAGKLKVIKAHYENLESRKAELEELILALAAPYQQELAILQTAPGIRSDFTAIGIISEIGTNMEAFPSAKHVCSWAGLTPTNNESAGKKKSVRVSKAGCYIKPLLVQCANAVVASKKHPEIRNRYLRLKKRRGHKKAIIAIARMLLTALYHMLKNGENYNAELYQKSDLLPVDREITVEQALMIARNQGYKIKSATA

SEQ ID NO: 68780 - protein, 411 aa, unidentified
MDVVYARCAGLDVHKATVVACVRSPGLRAETRHAETQTFATTLRGLAALAAWLTAHAVTHVAMESTGVYWRPVFAVLEGTVQVQLVNARHVKMLPGRKTDVRDGEWLAQLLECGLLRGSFIPPAAVRDLRDLTRLRKTLIRERGHHVNRIAKTLELANIKLGSVVTDIMGKTGRAILQALSIGRDDPEYLAACAQGRLRKKQAALREAVEGRLTPHYAFLLQQHLALIDTLDAHIATLDTRIEAARVPFAETAALMQTMPGVATRAAEASLAETGVDMSPFPTAAHFASWARLCPGNHESAGKRRSTRTGKGATWLRATLQEAAWAAVHTKKSYYRALYYRLKARGGPKKAIVAVQHAMLVALWHMLKRRVSHQDLGADYFAQRNTERTLRHHVRRLEQLGYHVLLAKEAA

SEQ ID NO: 68781 - protein, 429 aa, unidentified
MSEAEFVKQEPQFAAFLAIDWADKKHVWCLQGAGSEKRESGELEHSPEAVEAWVGQLCQRFAHRPIAVALEQSRGALVFMLSKYEALHLFPVASTMAASMRQALYPSGAKDDPRDADLLLDLLLKHRDKLRRLVPDTEATRRVQNLVEERRKLVDEKTEQTNRLTSNLKIYFPQILDWFEQLDTELVCALLLRWPTLEELQKVPPAQLRRFFRKHHCRDQELIERRIVAIRQAIPAIRDRAVIEAKSTVVKVIVRLIRSLLEGIADLEEKIEEAAAGHPDFFIFDSLPGAGAVLAPRLLAAFGSQRERYGSAGEVQVYSGIAPVMEKSGKKKWVHCRIACPKFLRQSFHEWAGHSIAHSVWARSYYQQLRSRGKEHHPAVRALAFKWIRIVFRCWKDGVAYDENKYLATLARRGSPLAAVNVSIVRKTV

SEQ ID NO: 68782 - protein, 356 aa, unidentified
MSRISQLEPIRVTVGVDRHRDVHVAVALDQLGRRLDQIELATTRAGYERLLAWAERLGVVEAFGVEGTGCYGAALARHLRAREMLVVEVMRPNRQTRRRKGKSDPTDAEAAARAVLSAEAAGSPKAGDDLVEMIRVLRVARGTAIKARTQAINALRSLLVTAPPELREQLRALSTSRLVGKAAQLRPGALGSPLAASKLALRHLARRCQTLEVEIRSLDGQLARLTTTASPQLIEAFGVGADTAGALLVAAGDNPDRLRSEAAFSMLCGSSPIKACSGKTNRHRLNRGGNRQANAALHRIVLVRLRYQQATKDYVERRTSEGKSKREIIRCLKRYLAREVYAALTQNNEGKLARAA

SEQ ID NO: 68783 - protein, 404 aa, unidentified
MIFVGIDWAEAHHDVCVLDQEGRVLAKGRVPDGVQGVGRLHAMVAEHAEDPGEVVVGIELDRGLLVGALVGAGYRVYAINPFAASRYRDRHATSGAKSDPGDAKVLADLVRTDRQNHREVAGDTDLAEAIKVLARAHQSLVWTRQRQVNQLRSTLREFYPGALAALKGDLSSHEACSVLGMAPTPQWGRRLTRSRIRRSLAASGRTRNLDRRTDQIYEALHAPQLQASPVLAEAYGQVVGSIVVVIDGLTHQIGQLEEQLEERFEGHPDAEILRSLPGLGLILGARVLAEFGDDPTRYADARARRCYSGSAPITRASGTRLVVLARVARNRRLADACYLWAFSAMNASPGARRYYDARRARGATHHQALRALSNRLVGILHGCLRNRRAYREDVAWSHSLQAVA

SEQ ID NO: 68784 - protein, 356 aa, unidentified
MNAITIGLDIAKSVFQVHGEDGKGKVVLQKRLGRARVAAFFARLEPCLVGIEACGSSHYWARTLRALGHEVRLIPAGYVKPFVRRNKTDARDAAAICRALGQPDMRFVAIKSVEQQGWRGLERSRELLVKQHTQLMNCTRSQLAELGIVAAQGRRGFAELSALLGGGEGRIPEVMAAGLRLLVRQIAALEEAIAALEKRIVTAAGEDAAMRRLVSIPGVGALTAHAIVAAVGAGKQFGSARDFAAWCGLTPREHSSAKKRRQGGISRQGDNRLRKLFALGASTVMRGVRTHDERATEWQRGILARRPVKVAVLAQAAKTARIAWAILQSGETYRRPVAAAQRPSATGLVAVAAAGR

SEQ ID NO: 68785 - protein, 410 aa, unidentified
MKVLHRRCAGLDVHKAEVVACARVFAGRKVVHEVRRFGTTTRELMALAAWLKSLKVTHVAMEATGVYWKPVWHILEADFTLILANAQHVRNVPGRKSDVNDATWIADLLAHGLIASSFVPPQPIRELRDLTRTRRQAVGEAVRHQHRIEKILQDANIKLSSVLSDPMGVSGRRMLAAMAAGETDAGKIAELGSPRLECGRGALIEALSGRVSEHHRYLIGWHLRLLDEIEAKIAELDQRIEAQIAPFRSAIERLTGIPGIKQVAASAIIAEIGADMSIFPTAGHLLSWARIVPRLDESAGKKRSRRVKKGGAWLKPVLVQCARAAARKRDSYYGAQYRRLKARIGDQKAIIAVAASILTAIYHMLRDGTEHADLGAAYLSRREGDSKAIAHQLARRIRALGYQVDLREAA

SEQ ID NO: 68786 - protein, 387 aa, unidentified
MSQTVAALIPAAVDYERTLILAIEVSNKSWVLAAQVPGLPHTKAKRTIDPEAEALLAAVSGYRARAAAAGRSIERVIAVYEAGWSGFWLARWLIRHGVEVYVIQPSSVPVDRRMRRAKSDGIDSELLLRTLLAWLRGEPRVCSMVPVPDEADEDARRCVRERTELISERVGLINRIGAVLATLGVNDYNPLLRNRGRRLAELRTALGEALPANAHAKIKRLLARLELVLRQIAELERERDAVVETEASDKASEMIQQLTALRGIGVQSATVLVREAFVRRFANGKALGSYAGLASSPYSSGGIDREQGIGKAGNRRVRTVMVELAWLWTRYQPGAAQVCWFRERVGSTGRRVRKIMVVALARKLLIALWRFVTDGVVPEGAVLKPAV

SEQ ID NO: 68787 - protein, 370 aa, unidentified
MIQHSTQTIWVGMDVHQASITAAILHGDSVEPQVVRLPGDLNAARRLFRRLAEKGVPRACYEASGAGYVLQRTLSDDGFHCEVIAPSLIPSRPGDHRKTDRLDAVHLAQQFRSGHLTAVSVPDVDQEAVRHLVRARLFNRIQITRSKNRITGILRVAGYHFTETETGWTKAHRAWMAKLRRELTGPMQTVLASELQLLEYLEASLSSLEAAITEVSVQSPWREPVEALCCFRGVKTLTAMTIVSEIGDIKRFSSPRQLMSYVGLVPSERSSGERSRRGPITKAGNRHLRRVLIESSQPCRRRAASTLRLQRRRAGQNPTLVGIALKAQHRLERRYAHLARTKHTNKAITAVAREFCGFVWAMLWEVQGRH

SEQ ID NO: 68788 - protein, 346 aa, unidentified
MKKIFIGIDFSKEKFDATLIKAEGVEERAERQHEVFDNKVSGFRRLLRWVKSATDEQDTDLWLFCGENTGGYSRALCNYLYGSGYDMWLENALSIRRSSALQRSKSDKADAGIIAEYAMRNYDQMRLYKPQDKNLERLREVFLYRHNLVKLKAGMTVRKGEKKLTQDKSDISRFMAMSSKHLISEFNKKIAECDMRIERIISEDENLRRNFDIITSVPGVGTQNAVCLMVYTDNFCRFDFDSRKIACYYGVAPFGRQSGTSVNTPPHVSPFANKLIKALLTQAALASVHFCPQMAIYHHRLVEAGKKKPVALNNVKNKLLHVITAMVRKGEKYNPDHDYYAALNAA

SEQ ID NO: 68789 - protein, 402 aa, unidentified
MNAVGIDVSKGKSMVAIMRPFGEIVSTPFEIKHTTSDIHSLVELINSVEGESRIVMEHTGRYYEVLAHQLSEANLFVSTINPKLIKDFDNDSLRKVKSDKADAVKIARYALDKWQNLKQYSVMDELRNQLKTMNRQFGFYMKHKTAMKNNLISILDQTYPGVNTYFDSPARSDGSQKWVDFASTYWHVDCVRKMSLNSFIDHYQNWCKRKKYNFSQSKAEEIYGKAKELVPVLSKDAITKLIIKQAVDQLNSASTTVESLRTLMNETASKLPEYPVVMAMKGVGTSLGPQLMAEIGDVSRFTHKGAITAFAGVDPGVNESGTYEQKSVPTSKRGSADLRKTLFQVMDVLIKMMPQDDPVYQFLDKKRSQGKPYYVYMTAGANKFIRIYYGRVKEYLASLPES

SEQ ID NO: 68790 - protein, 351 aa, unidentified
MKKYEKEMDLSENIYVGIDVHKKHYLVSIRTFDLELFTGSIPSDPEKLIDLIDKYNNGKVKAVYEAGYSGYYLYDKLKEAGIDCIVTPPNMVPFQPNNRVKTDRLDAKKLAIYLSKNLLKKVWVPDKELRYHREILRRRKQIVGDRRRVQTRIRSFIDLYNIKFISNSYKWSAKFREDLGKIKLEDDFLQYNFDLLLKEYDMLDQLLKECTQTIKELSETERYKNNIKILRSITGVGLLTSMEILLELGDVSRFKNSKQIASYVGLTPSQYSSGEHIRMGHIAKSGKSNLRSLLVEASWMLIRKDNIMQEKYEKLKYRVGVKRAIVAIARKLLIIARIMLLNKVNYNYRYN

SEQ ID NO: 68791 - protein, 408 aa, unidentified
MNPLFVDIDVSSKNNVVCLMKPDGTKFSTFSVQNNLGGARILSERIVSALDKLRLSEVTIGMEATSIYGDSLVYALREDGSLGRYQRHIHVLNPKQVRKFKDAYPDLPKNDYVDAFVIADHLRFGRISSEVYMDDYRYRSLQTLTRARFDAVQNLTREKQRFANYLFLKCSGIAQDKDIPNTSATTLALMEHFETVDELANCDLETLTAFVSAAGRGRFADPEATAKAVQAAARGSYRLPKTVNDSINQAMSVSIASMRALEGQIKVLEKAIEQQFEIIPNTLTSIPGIGKVYSAGIIAEIGDIHRFESQASVAKYAGLVWTQHQSGDFEAQNTRMIKSGNRYLRYYLLEAANSVRRCDPEFKRYYDLKFHEVNKFQHKRALAFTARKLVRVVFRLLKDNRLYIVPES

SEQ ID NO: 68792 - protein, 406 aa, unidentified
MIYVGIDWAEAHHDICVVDDAGAVLMRKRIADGLAGVAALHAGLAGHASDPGEVVVGIETDRGLLVGWLVQAGYHVFAINPMAASRYRDRHVVSRAKSDPRDAKVLANLVRTDRQNHREVAGDSELAEAVRVLARAHQNLIWSRQRQVNALRNTLREFYPGALRAFSPSQLASVEACSVLAMAPTPTWAREKLTMPRLRRSLAASGRKRNLERRAGQILEALQAEELSAAPLVEQAYGDVVGSLVMVIDGLTHQIAKLETELAERFEGHPDAEIITSLPGLSSVLGARVLAEFGDDPTRYADGRARRRYAGTAPITRASGTRLVVLARVARNRRLFDACYLWAFSSLTSSSGARRYYDAHRARGKTHHQALRALANRWVGIFHGCLIHHELYREDVAWVVHVDAAA

SEQ ID NO: 68793 - protein, 345 aa, unidentified
MQPMYYIGLDVHKKKISYCVKDGSGKVHSEGAVPATRLDLDLWMKRLPQPWTAAMEATLFTGWIYDHLKPHAAVLKVAHPLMLRAIAAAKKKNDRIDANKICDCLRCDFLPECYMAPTALRECRRTLRYRNLLVRQMVQMKNKISVLLMEAGVIYNKEKLHKVGYFRELLASNPDINDGLRSLLRLCRETVVRLGKTESALVRTLQRDPLLVERVERLMTIPAVGPITALTWALEVGEVQRFSSIKKAISYCGLCGDEKSSANTIQRTPISKQRNKHLQTTLIEAAKMAPRHSPDLAALYELERQKGHANRATLTVARKLVAYLMAVDRSQRNFLVVQNETRAVA

SEQ ID NO: 68794 - protein, 332 aa, unidentified
MKKFTSFCGIDVSKDTLDYCIYHANNDKAIYKQITNDAESIKKVFSSSKFDNILFILEATGNYSSKLIYGLKQLKRPCQVVNPLRSKAFMVAMGYNNKNDKQAAYCLSKMGQQSNHNNLYEMPSKEIEMRKQQLSVLQSLIKQRLMLENQIHAIKQLAIIDQTAIECLEKALEIIKEQIAIIEKKMYQPSKDKDFKAKKKLAQSVVGIGAKTAIALLIATNGLNNFDNANQLASFLGLTPYSHYSGSSVRKKGKITKHGSSQVRALLYMATTSAIRYNKTCKDLFERLRKKGKPYKVAIVAVMRKLAVQVFACVKKQTMFDRDYHIDKKQLS

SEQ ID NO: 68795 - protein, 402 aa, unidentified
MNCVGIDVSKGKSMIAVMRPFGEVVVSPFEVRHTASELSELARLLKSLDGETRVVMESTGNYHAPVAWLLHDAGLYVSVVNAMLVHDYGNNSLRRAKTDKKDAVKLANYGLDRWLTLPRYVPEEDTRLMLKTCYRQYQQYSKVQTMLKNNLISLLDTAFPDANRLFTSPPRADGSEKWVDFVAAFWHCECVCGLSEKAFTAKYQKWCKKHGYNFSEDKALDIYASACGHFGVMPKTDTAKLLVEQAISQLRATSAALAALKQEMQSLAASLPEYPVVMEMFGVGPALGPQLIAEIGDVRRFHSKKSLVAFAGIDAPPYQSGQMDIRSRSISKRGSASLRRTLFLVMGVLLQCAPMDEPVYQFMNKKRSEGKPYRVYMMASANKFLRIYYASVKAYLDSLEHN

SEQ ID NO: 68796 - protein, 352 aa, unidentified
MEIHVIGIDLGKTVFHLVGVNQSGEVVVRKKFSRAQLLRFTSNLRVHLIGMEACGWAHFLGRALRAQGHEVRLMPAQYVKPYVKTNKNDFIDAEAIAEAVERPRMRFVPIKSVEQLDMQSLHRVRERWIKGRTAIVNQIRSLLLERGVTVRKGRKYLVEALPGILEDPDTDLSGPLRVLLSQLQWEMRHLENQIEEVDSVVVRASGQNEACQRLEAIPGIGPLTATAIVSAIGNGAEFKKGRGFAAWLGLVPSQYSTGGKQKLLGISKRGNCYLRKLLIHGARAVLQTKDKQSSGLSTWLTQLTSRTHSNVAAVALANKMARMAWAVLAKGEAYRPPLLAAEVVGTEGLACN

SEQ ID NO: 68797 - protein, 358 aa, unidentified
MNTYYIGADVHSNSTELTIEKRNKIIARYTVPTTIPAISNIPDSLQGKKCLAMEEGPMAGWLYRNLNKKLDSFISSDPRRNKLIASDGDKDDKIDSAKLASLLRGGFLRPIHHSDDDSRAELKHWVSLYHDRVRDALRSINKIRARCRMHGVTISRSALREPASRFNWLMKTNHRPLANQLKMLWIGYDATVKQVRFARRQLCVLSKKYDIIKQWSLLPGIGLIRATTLFAYLDTPWRFKKKNKLWKYCGVGLQRTTSGTDKKGKPKPARLKLPWAVNRTLKNAVLGAAQTAINQKDNAFKDYYERMVQNGMITSNARHALARKMLTVIWAMWKTNSPFDENLVSDKSNSSTVPASSR

SEQ ID NO: 68798 - protein, 385 aa, unidentified
MYFVGIDISKFKHDCAIVDEFGDVITPSWSFQNDREGFSLLKELLDALDGEKKIGLEATGHYGQNLKLFLENNDFSFMEFNPLLINRFVHSKSLRKTKTDSIDALMIAQYLMTVEYKPYPPSFYTFEKLKSLTRFRDSLIRQRSRQLVELTNILDKVFPEFKPFFKGRFSATALYILSHYASPEKISNMNSKSYEPLRRLSRGRFSMVDFVELKTLARNTVGSTSDYLLQEMEITIDIYNQLQSKVEEIELQIHDCVLALAPPILTIPGIGAASAAVILSEFGDLSKFNNPSKLLSFAGMEPGYFQSGTSESTGKMVKHGSSHLRYAMMNCAQTVINNEPTFAAYYAKKRAEGKPYRVYMMASANKFLRIYYASVKAYLESLEHD

SEQ ID NO: 68799 - protein, 430 aa, unidentified
MGLIVPSTVHPAREDQPLPYEWFVGIDWGSQRHQVCVLDRDRRQVGERVVDHDGASLARLADWLWTLSGGQPQRVAVAIEVPRGAIVEGLVERGFHVFAINPKQLDRFRDRHSVAGAKDDRRDAFVLADSIRTDQPSFRRLQLDDPQLLRLRELSRAEETLLEDFRRSANRLQDQLHRYYPQMLKLCSAADESWLWELLDLAPTPAHAALLSEEQVQRVLKAHRIRRVKAQEVLTCLQAPALPVAPGAAEAAQAHCAFLLPCLRVLAEQLQACSQQVSVLLRALAQEPGEGEGPSDVAIVLSLPGVGRKITAWLFAEAAQPLAERDYQVLRTHGGVAPVTKQSGKRRLVVMRHGCNPRVRHALYHMARVAMQHDAHFSSVYAALRAKGQRHGQALRNLGDRLLRILMAMLRDRTCYDANRIRREPVVQMG

SEQ ID NO: 68800 - protein, 338 aa, unidentified
MELKRIAIDTSKHVFTVHGVDEHEHPVLRRDLRRQQVEGFFAALPPSEVVLEACGGSHHWGRRLSALGHQVKLIAPQYVKPFVKRGKNDRIDAAAISEAAARPTMRFVPVKSAERQAQASVLSLRELLVKQRTQLINALRGQAAEFGIVAAKGAGNAAALAARIAGDGALPIAVKEVLALLGQQIARLDAAIAALDGKLAAQHRASAMSRLLCDIPGIGRITALSALLTVDPGQFKSGRHLAAWIGLTPKERSTGGKRRLGAISKQGNERLRQLLVLGAMAVIKVAKPGHRYATRWLLKLLERRPRRVAAVALANKMARILWAMMTSGEAYRPSPVAA

SEQ ID NO: 68801 - protein, 336 aa, unidentified
MKEQQIKHEEVQIKKFINRLKTEWNEIHCCYEAGVTGYPLYRYLKSLGVNCILVAPGKIPRQSTDKIKTDKRDAIKLARLMRSGGLESIHVPSEEDEAVRDYLRSRDSLRLDLGRNRQRLMKFLLRKDIKYSTTKYWTVSHYKWLNNLHFNNEILQETFNDYYSRVRVQEENLKAMDKKIQEIAESEPYREKVGILRCFRGVDYLTAMFLLCEVNDFKRFKTAGSFMSFLGLVPGEYSSGSKRKQTGITKTGSPRLRRILTEAAWQHRFPGTGSKIVTARRSGQPALVVALAEKASLRLHKKFRNLQLRGKTPQVMITAVSRELSGFLWAAMNLVA

SEQ ID NO: 68802 - protein, 353 aa, unidentified
MSKVKQLSFEGETIFIGVDVHKTNWKINSRMGNMELASFSQDPNPEILSKYFKKNYPGAKIKVVYEAGFCGFGIQRSLTDLGIKCIVVNAADVPSSDKERKRKDDKRDARKLSRELADGSLRAIYVPDMEMEQVRTLIRQRYRLVQDQTRCKNRIKHLLMFSGIALATEQRWSQKYVKELEKLECKTVALRTALNLAVQEYKQIRTIIKEATLSIRKIAEQQPFEAVQKYLQSIDGIGLINGMAIQTEIQDISRFRTLDSLCDYAGFVPDISSSDERMVIKGITKRCNEFLREAIIESSWILIRKDPAMLMKYNQYRKRMNKNKAIVRIGKHLLARIRYVWNNQKEYERGVVG

SEQ ID NO: 68803 - protein, 375 aa, unidentified
MVHHSEAFVALDTAKLRNAVAIADAGRNGEIRYLGEIDNTETATRKLVVQLAGKYARLTFCYEAGPTGYGLYRLIKSLGHDCMVVAPSLIPSKPGDRVKTNRRDAVNLAKLLRAGELIAVWVPDERHEAMRDLVRARDAAAKDYRIKRQNVSSFLLRCGLHFPGKKTWGRAHMNWLTSIKLEHREQRIAFEEMLLAVRQVRERIERLEQAMRDAVPDWSLASVVEALQALRGVDMVGAIVFLAELGDLSRFENPRQLMAYLGLTPSESSTGESVKRGGITKAGNTRARRLLIEAAWSYRFPPRVSKDMQTRVGAAPRTAREIAWKAQTRLCGRFRTLTRKGKRSTIVVTAIARELSAFIWAINREVVGSHATASQ

SEQ ID NO: 68804 - protein, 350 aa, unidentified
MLAGCETNQEGNTMKHYVGIDLHCNNNYLVVIDEEDRIVFEERLANELEAVDRALQGIEGSIEGIAVESTFNWYWLVDGLMERGYRMHLVNTAAVQQYEGLKHRDDAFDAFWLAHLLRLGILPTGHIYPKQGRAVRDLLRKRRQLVRHRTAHLLSVQNLFARNRGWRLGGAEIRRQGWALTQELENEDLQWALCSSLRMIQQLEQETGGIERRVLKRLGSEPGFGLLQTVSGVGPILALTIWLETGDIRRFARVGQYASYCRCVRSQRRSNQKSKGSGNRKNGNQYLKWAYSEAAHFAYRFDLKARRFYQRKKARTNPLSAWNALAHKLCRASYFVMRDQVAFSSARLFG

SEQ ID NO: 68805 - protein, 297 aa, unidentified
MQQESAVFVGLDASKMKISVALAEEGRQGEVRFLGDIDHTPEAVRRLVTKLVGRYGRLLFCYEAGPTGYGLQRQISALGHDCAVIAPSLIPKRPGERVKTNRRDAITLARLHRAGELTRIWVPDPGHEAVRELVRAREAAMADLRTKRQHLQSFLLRHGRIYRGSRPWTQVHARWLSNLSFEHPAQSLVLREYRQAIDDAETRLERLTQQVAEVVCSWSMAPVVEAYQALRGVAFLTAVTFVAEIGDVRRFETPRQLMAYLGLVPSERSTGEQVWRGSITKAGNPRARRVLVEGAWT

SEQ ID NO: 68806 - protein, 395 aa, unidentified
MFIVGIDIAKRSHEAIIIAEDGQVVRKAFSFRNNCTGYNLLLEQVRRLTLVKSQIVFAMESTAHYWLALYARLLKDGYAVMVLNPIQSHSLRELYIRKAKTDARDSLIIADLVRFGRCKASNVPQDKILALRELCRSRAYLVDMAADLKRKLIALLDRIFPEYESLFESVFSKASIAVLSKYSTPQKVKNANLRKLTDILMESSNGHFGEWKAHQLKEAACSSFGIDDSGGVYSMLLGMFLEQILSLTAQADSLEKQISVFFQEFNNPLTSIPGVGTVLAATILSEIGDITRFSSADKLLAYAGLDPSVKQSGEFKSNQNRMSKRGSPYLRRAIWLASTVAVHRNPMFQTYYEKKISEGLHYMNVIGHVSRKMTAVIFAVLRDGQPYQPVLQTAD

SEQ ID NO: 68807 - protein, 332 aa, unidentified
MNCLSSSEKMKRGAVLGLDVAKASVQAELRLPWSNGKVRFAFANEPSGFTKLEQVLAQHHCAKVHAGLEATGPYSQQLALWLYEQDHRVSLLNPRRVKDYARSAGARNKSDVIDAGLSADFVIAHRARCKEWQPPKAEVAQLQGLVRRREEVCVMLLAEKNRLKASSGQVRCSLQRLITALNEEKTCLDKLIAHQIRSHPELARNEQLLCTIKGIGSLTAAILLAEMVGPDQVRRARQAAAHAGLSPRREQSGTTVRRNKGIGKQGNRHLRKALYMPALVAIKYNEPLQHFARRLSAAGKPKMAVVCAVMRKLIHIAFGVLKHQQPFNPSLV

SEQ ID NO: 68808 - protein, 400 aa, unidentified
MHSIVADVNRWSAPMQKLNDLSRSLTALEPDGTLIAVIEMSLSSWLVAGIVPGVERQPLKKLAVDESALLKLLHRWREEAEKAGRRIERIAVAFEAGRDGFWLARWLKARDIEAYVIHASSVAVSREHRRAKTDRLDTELLKRSFLGWLRGERDHCKMVEIPTMKDEDAKRPNREHDSLIGERSRIVNRMKAALVRLGIRGFNPKLKRATTRLDGLRTPEGEPIPPNALAELRRDMERRRLVNNQIRQIERERLERIEQAPCDGPHVMVRLLARVMGIGIETADMLVHEVLSRNMRDRRAVARYAGLTGSPDESGRKRREKGLARSGNVRVRRGMIQLAWRFLLHQKNSALTKWFRSRTENARGTRKPMIVALARKLLIALWRLVREGIVPDGVVLRAAQ

SEQ ID NO: 68809 - protein, 339 aa, unidentified
MNNVSTIGLDLAKKVFQVHGVDQAGEVLVRRTLRRSQVLAYFGKLAPCLVGMEACATAHYWARELSKLGHTVRLIPPAYAKAYVRRNKNDPADAAAICEAVARPAMRFVTIKTAEQQAAAGVHKVRELLMKQRTMLMNSLRGLMAEFGIVVAEGPRHIGELVAILADPDDRRIPAPLQGGLVRIAEALRHLERQIEAIDKQILDWGRSNETSRHLITIPGFGPILSTAMAAIVVNPATFRSGRDFSASLGLVPRQDGTGGKVKLGPISKRGNGYLRRLLVSGAMSVLSGKRAKQNPWLVKLLATKARKVAAVALANKMARIAWAMMMRQEDFRTMPAAA

SEQ ID NO: 68810 - protein, 374 aa, unidentified
MNQPTLQQENTTNLEPKLFLAIELSEKSWTLAFGDGSARVRGVTVPVGDIARLNAEVAKARVKFGIAEQAPVLSCYEAGRDGFWVHRALEANGIKNMVVDASSIEVDRRLRRAKTDRLDAQKLLQQLVRHNRGERMRPVVVPTLEAEDARRDGREMERLKKERTGHVARIKSLLALHGARDVKLSQLEKAVDWHGEPLPATLMSELLRERRRLELVQTQIKELVARRENQLEQKEPTGVVKKVAQLALLRGVGETSSWLFIEEFFGWRQFNNRRQVASAAGLTCSPYDSGNTERQQGISKAGNRRIRVMAIQIAWCWLRFQRESALAQWFLKRFGTGQRSRRIGIVALARRLLIALWRYLEQGLVPEGACLKTA

SEQ ID NO: 68811 - protein, 425 aa, unidentified
MDEQYRIYVGIDWATETHQACVLDSTGRILTERSFAHTGEALTAFAQWLHGVAGGYPGQVAIAIEIPRGAVVETLVEHGFQLYAINPKQLDRFRDRYSVAGAKDDRRDAFVLGDSLRIERARFRLVRLDDPQVIQLRELSRADEDLGREANRLTNRLREQLNRFYVQVLKLCPSVDEPWVWALLELAPSPTVGSRLQRKTIERLLRQYRIRRLSAQDVLATLRAPTLHVAPGVVEAATEHIGLLLPRLRLVHTQRQRCGARLDVLLDKLAAVDGDEEQQREHRDVEILRSLPGVGRVVAATVLAEASEPLAERDYHALRTHAGIAPVTKQSGKRRTVVMRYACNGRLRYALYHWARVAVTCDPASKNYYTALRQRGHSYARALRSVADRLLRILIAMLKSDSLFNSTQPRRALDPAATPEASCAA

SEQ ID NO: 68812 - protein, 355 aa, unidentified
MSQTPNTAVAVIGIDIGKNSFHVVGHDARGAIVLRQKWSRGQVEARLANIPPCLIGMEACVGAHHLSRKLASLGHDARLMPAKYVRPYSKGQKNDFNDAEAIAEAVQRPTMKFVAIKTAEQLDLQALHRVRERLVSQRTGIINQIRAFMLERGIAVRQGIGFLRTELPTILATRTDALSPRMLRVIEELAGDWRRLDQRIDGLSGEIEALARQDQACSRLMTVPGIGPIISSAMVAAIGTGDVFSKGRDFGAWLGLVPKQISTGDRTILGKISRRGNRYLRVLFVQAAWVVLVRIKNWERYGLKSWIEAAKRRLHHNVLAIALANKLARIAWAVLAKGRAFELTRTDDAGVVQPA

SEQ ID NO: 68813 - protein, 400 aa, unidentified
MDKTEQFRWFLGIDVSKETFDACCINTKGGRLFSLSTSMNRKGFEELIKQLSCLSVSQDSVLVGMESTACYHVNLYSFLFSLGYTVIVINPLLISNFVKLQLRKSKTDKKDASVIAQFLLLNRNSLSQALVSSDFSELRDLSRQRESLVDQMSSIKSDIKRLLTMTFPELERMAGVFTKSMLRLLCHYPSAALVRQAKRSQIAKLLIPGSYGKQSAASVDRIIKAAQGSVGTTSPAKEIILKQKASLLMQLEQHLQELTDILKQLCQAKIQEDMGILISMKGIGEKSAMNFLIEMGGDIKQFESHQKLIAMAGLDPALYQSGKTDRKGKITKRGNRHLRRVIWLMTTKVIQFNARFKQYYLKRIKDGLPYKMAVLATAHKLIRVMFAMLTNKTLFNPMMN

SEQ ID NO: 68814 - protein, 350 aa, unidentified
MNHKCKIIIGIDTHKATHVAVALDTQGTRLAALSIPTNPKGYLELERWSQSLGEVHAFGIEGTGSYGAGLSRSLLAQGHNVVEVTRPNRQLRYTQGKTDTLDAEGAARSVLSGQATARPKTQTGISEMIRHLKVARDTAVKSRSQAMVTLKTLIINAPADLRDVLDKIRGKVALIRHIAAFRPGEINNTMASAKAAMRALARRWLWLHEEIITHDKELERLVTERAPDLMTSHGIATLTVAEMLIVVGDDPTRVRSEAAFAKLCGVCPIPASSGKTHRFRLNRGGNRQANAALYRVAIVRMRSHEPTLAYVRKRTKDGKSKSEIIRCLKRYIVREIYSQLCVPKSAQIAA

SEQ ID NO: 68815 - protein, 418 aa, unidentified
MQIELAQFTAIIGIDWADKKHDICIQVTETGQRKTYQIQHKADKIDAWARSLHRQYGGPIAVALELSKGPLVSALQKYDFFVIFPIDPTTLANHRKTFTLSGAKDDPTDAEYALDLLLKHTEHFKALNPQSVEMRTLMILVEQRRRLMNDRVRMTNRLRNALKQYYPQALEWFDRIDTQLFCDFIKRWPSLAQARRARKTTLEKFFREHNMNRKALLERRMTAIKSAMALTTDEAVIVPYRLQVRTLVAQLEVALESIRIYDEEIAGLAPQHPDYDLFNSLPGAGPTLAPRLLVAFGEQRERFASAAELQKYGGIAPVTERSGQKSWIHWRWQCPTFLRQTFVEWAAQTINKSYWAGLYYYQQRAKGSSHQAAVRALAFKWIRILYRCWVTRTPYDEAKYLKALQERGSPLLKMAQAA

SEQ ID NO: 68816 - protein, 317 aa, unidentified
MDTILCIGVDVSSRTFETSLGAEAGKTAQFPNNEAGFAAFAAWCGDALANALVVCEATGGYEAAFIGFLVARDVRVHRATPYLVKSYIRSLGLKAKTDRIDARALARYGAERGADLAPYRAAPESQRELAAALTRREELVAMRVAETNRSRQPLYADPTLARSVAAVLATLNSEIAGLEAHAAEIVAADPRLKARFDALTSIPGVGRQTALVLQARMPELGRIDRRAAASLAGCAPHPRDSGITRGRRTVWGGRASLKRALFMAAMAARNHDPIMRAFFERLVHNGKPKMVAIVAVMRKIVVIANARVRTIDGHATG

SEQ ID NO: 68817 - protein, 324 aa, unidentified
MVSSYVGIDVSKATLEIAWAGKAATKQFRNTPGGRNALLSALQAACALAEVQVVLEPTSTYHHHLVQALATAGVAYTLSNPARTAAYARMQGSRAKTDKADAKLLAAYGASQQPKASPSPDEAQERLKALRRHKEWLDEQAQAARNRLEAAQHSPWTPPTVIKSLKRTVRDMEREAKETQEAVEQLVAQEERWQQEIELLDSIPGIGPQTAVLLISEMPSVQSCTSPKQWVAFCGVNPAPRESGKRKTSQLSRAGVSQVRAGLYFPTLSSMRFNPVIQPFNQRLEAAGKLGKVRVMAAMNKLLHLCFAILKRGTPFVLSLPSSS

SEQ ID NO: 68818 - protein, 320 aa, unidentified
MRNAVGLDISKLTFDASAIVGNAEYSAKFDNDSKGLDQFSDRLKSLGCQNLHICMEATGSYYEEVADYFAQYYSVYVVNPLKISKYAESRFKRTKTDKQDAKLIAQYCRSAKESELVKRQKPTDEQYRLSRMTAAYAQIKSECAAMKNRHHAAKDEEAAKAYAQIIKAMNEQLEVLKEKIKEQTEKPNCKEGVKRLETIPAIGRMTAAVLFHHLTSSKFETSNKFAAFAGLSPQQKESGTSVRGKGKLTKFGNRKLRAVLFMPAMVAYRIRAFPGFIKRLEEKKKPKKVIIAALMRKLAVIAYHVHKKGGDYDPSRYKSA

SEQ ID NO: 68819 - protein, 388 aa, unidentified
MNIVHPRTVDQTAIHTQLGAIFVSLELSRSTWLVTSLAPGSGEKMSKHSVPAGDISGLLERFSSLTEKARARTGETFPIIVIQESGLDGFWIHRVLVSQEIESWVVDPASIATSRRRRRAKTDKIDGEALVRALLAYKRGEPRVCAMVRVPTPEEEDRRRLGRERKILVGERTEHVNRIKGLLFSQGVGGYEPIRKDRRTSLEELRTGDGRPLPPHFKAQICRELDRLELVLQQIKAIEAERDALVMPSQDGKQVPSQVAMLMALRGIGPEFANVLYSEGLFRHFDNRRQVAAYGGLAPTPWQSGSIDREQGVSKAGNARLRFTMIELAWLWTRHQPDSALSNWFLDRVKLNGRRKPTIVALARKLLVALWKYVTAGVAIEGAVMKSA

SEQ ID NO: 68820 - protein, 445 aa, unidentified
MHYKRLLTWIDGSSSYLSVGLDVGADFTWMSIALPNGAFIGKPFKIVHSDPRSRDLAVTKIKEAQETYSLKSRCFLESTGIYHIPLLCFLRDKGFDCSVINPIITKNSTNINIRKLHNDIFDSKKAALVGLNVSLKASIIPEDSVVDLRNLVRDYYYFKDLQSAVALKLTAELKMSFPAYAKVFSKVTTQSSLKLLSSYPLAGDMLEASKDDIVETIRSTARFGEAYALRKYDAVIAAAQDASVFGRALPSNAVRIRLYIDTYQEYQKHLDALLKALHETVERLQDTLIYDQICLLQSLRGIGFLSAVVLIAEMGDFKLFPSPKKLYAYFGLDPAVKQSGKLNGDKVHMSKRGSSLARRVLHMVALNNVKVDKGSGTPVNPVIYDYYTRKCSGKKKPVAMGAVMHKICNIIFAMLRDNKPFEIITPEEHCQRFAAEYPDKIRKAA

SEQ ID NO: 68821 - protein, 404 aa, unidentified
MPAICGIDWADEWHDVRVADTETGELLVEERFAHDEAGIGRLVQTLVEHEVERATIERPNGLLVGRLLAAGVTVLAIHPNQVKAARDRFRAAGGKSDRFDAFVICELCRTDAHRFPALCPQGDETLALQALCRCRENLVETRVQLANQLRAQLDACWPGARRIFADVDSQIALAFIERYPSPDDARSLGPKRLEGFLARNSYCGRRPVAELLERLRSVPAAVTGEAETEARRQAVLALVACLRPLVERIAELTSEIRGAVRSHPDGEIFLAFFRDPKSALTAAGLLAEIGDNRARYPTNAALAADGGQAPVAVESGKQRAAAFRWACDKRLRTHLCVLADSTRHWHPWAADVYARARARGQDHPHAIRTLGRAWCRVLWRCWQDGVPYDPVRHGNLNRLIAERG

SEQ ID NO: 68822 - protein, 308 aa, unidentified
MTLHQNCVGVDICKDWLDIVATRNGQHRRIANSPAAIKQLIAECADAFVVFEATSGCDSALRKALAAAGIPFARVNPRRAREFARAAGFLAKTDKVDACALAEMGCRLDLQASVETTPERRELAELIARRDQIVGDIVREKNRLEQVAALAVRRDIQSHVRLLERRRDKIDAGIAALIARHRELKTADARLREIPGVGPVVAATLLAELPELGQRDRRAIAALAGLAPLASDSGRHRGRRRIWGGRRKVRRALYIAAMHASRRVPSWSEMRARMSAAGKATKTILIAIARKLLVAINAMFRDNVAFAP

SEQ ID NO: 68823 - protein, 368 aa, unidentified
MHFIQNFHLGDKAKGDFHFHFKLIGMKKILKQVTGIDVSQDELVVCLGQLNEDLSVEFYGSRSFANSLTGFKSLIEWVEKKGSIGGFVMEATGVYHESLAYFLADNDYKISIVLPNKISNYFRTLEVKTINDYTAAEAIARFGLERNLDNWQPPKGIYKQLRQLTRERDQIIEMRTMAKNHLHADKSEAQPHKASLIRAKQRIEFLNKQEKQIIAELYQLIDQDPEMQELIVLLCSIKGVGFLTSATVLAETNGFDLIRNKKQLVSYAGLDVREKQSGTSIKGKPRISKKGNKYLRKAMHFPALTAIRRDERYKAIYARLISKHGIKMKAAVAVQRKLLELIYVIFKTKAPYDKDYLQKNREQQIVTP

SEQ ID NO: 68824 - protein, 360 aa, unidentified
MKIQRTSVGLDVHARSVVGCGLDGETGEVFQRRLSPDHREILEWINGLPAPVAVTYEAGPTGFGLARYLLESGIECLVAAPSKLVRPSGDRVKTDARDAAHLARLLHLGEITPVCIPSVEREAARDLVRAREDCRADLMRARHRVSALLLRHDIVYSGGPAWTGTHEAWLRRQRFDTAALQFTFDTAVETMLATVDRRHRLDTAIAEMALDSEFSPVVRRLGCLRGVSTLTAFGLAVEIGDWSRLTGRAIGAYLGLVPTEYSSGSSRVQGSVTRTGNAHARRLLIEAAWHHRRPYRPGVELRRRWQTASPAARRRGQQANQRLHARWRGFDARAKRPAVANTAIARELAGWCWSLAILEE

SEQ ID NO: 68825 - protein, 313 aa, unidentified
MSIPLRCVGIDVSKRFLDIFDEATGASERIANATQAITQLVARWRCDALVVFEATGVYDLELREALRQAGVRFARINPARARDFARASGQLAKTDPIDARMLAAFARAMTPATEQVATPARNALARLAKRRDQLVSMRAQEKNRRSEAEDRAMAERIGRLIAVLDDEIAEIEAEISALIKAEQEIAEDAQLMRSLPGIGPVACMQLLAQMPELGRVGPKQVAALAGLAPFNVDSGTYRGKRKIGGGRKRIRDALYMAALNAVRRADPFKAFYERLRKAGKPAKLALIAVARKLLTVLNAMMRDRKPYMIAPST

SEQ ID NO: 68826 - protein, 345 aa, unidentified
MEQAYDGRQVVGMDLHRRRSVLVRMSMDGRKLETVRIENSPAALRAVLARCGERPLVVLEATNGWYWAADVLAEAGAEVRLAHPLGVKAFSCRRVKNDERDAADLADLARMGRLPEAWIAPPQVRALREVTRYRHKLVGQRTSCKDQVHAVLAKCGVAVTHSDIFGRGGGLWLDQLVLPAPYAAKVASLRALIAVLDGQVAALGGEAAAMLAGDRGYQALRELPGIGPVLAAVIAAEIGDVTRFRKPGQLCSWAGLTPRHHESDLKVIRGHVSKQGSRMLRWALCEAIQHQPAGTRPQQVKEAITARRGTEARNIAKTAAARVLLTQVFYALRDGRVRRAPDPAA

SEQ ID NO: 68827 - protein, 335 aa, unidentified
MKKFDYYIGIDVSKKTLDVTILQKCVNTTKTEHYKIENSEKSIAQFVKNKLGKYDLKQLLFCFEDTGIYSMPLAYYLNDNELVYWQVPSVEIKRSKGIARGKDDKIDSKDIAFYAFSHLHKFRQGKVSAKSIQQLKLLFTEREKALKALAIFEKTSENKDFISKEVFNAVASINKSAVNQLKKTLQSIEQTMLEIIKSEEKLNGQYKLVTSIPGIGMQTAIYLLIATKGFDAFENWRQLACYAGVAPFPYQSGTSIRGRNKVHPLADKKLKSLLNMCAICAVRHDKELKAYYERKVKEGKSKMLVINNVRAKLLARVFAVINRGTPFVNTCKFAA

SEQ ID NO: 68828 - protein, 347 aa, unidentified
MPVMIGVDPHKASHTTAALDEHGHLLGQQRITATLEGYQALRAWAERWPQRCWAVEGAHGIGRALAQRLVSDGEQVLDVPAKLAARVRVLSVGHGRKSDPDDAVSVAVAARNAVGLRQVGVEDQAVVLHLLTKRRQDLVAARTQTINRLHRLLMDLVPGGARRNLTANRAAALLAALTPAGRPALTRWQLATELVTDVRQLEERIAAVEARIKTAVAQANTSLLELFGVGPVLAATFLGGVGDIRRFPTKHHFAAHTGTAPLEASSGQVIRHRLSRAGDRKLNHALYMMAMVQVRRPTAGQAYYRRKLAEGKSPKEALRCLKRRLSDAVYRCLRADQHRQPSPVGLA

SEQ ID NO: 68829 - protein, 400 aa, unidentified
MLSIGIDVSKGKSTVCGMKPGGEIVYAPFEVQHTREGMSELVSLLRGSGEEVRAVLESTGSYHCPVVAALLENGIFVSVVNSLRMKRFCSQSIRKVKTDRIDAMQIALYGLAYWQELQPTKLPEDTYRELQLLARQYYQMTSLLIKAKVDFNAICDQVLPGMQELMNDHAGRHKLSDFVLRYRHTTHILEMGETRFRKDYCKWAEKKGYRNCERMAVLIFATAQNGIPVLPNAPSTQIVITEAIRVLHTVEASRDAILTQMQALAKTLPEYSLVREMPCIGDTLAPRLIAEIGDVRRFHSKRALIAYAGIDAPPYQSGKFCANNRHISKRGNRYLRKTGYEVMQSYVMHKPANDPIFTFIEKKRGEGKSGKLAMVAGLNKFLRVYYGKVTELYRSLPAIE

SEQ ID NO: 68830 - protein, 287 aa, unidentified
MTEHSREPIVTLGIDLAKRSFHLFGVDAHGREVLSKKLSRARLSEFMANLPPCTVAMEACGSAHHWARLFRTFGHTVRLIAPQFVKPFVKSNKNDAADAEAICEAAQRPNMRFVSVKSVEQQDIQAMHRMRSLVVERRTAQVNQIRGLLLEYGMEIPKGRAAVSRRLPEILEDAENGLSARLRAELSELAEELRHLDERVRHYDAQLQAIAQSDPRARDLMTIPGLGAQGATALLAAVGEDAHVFSNGRGLAAWLGLVPRQHSTGGRPRLLGISKRGDVYLRPGDRG

SEQ ID NO: 68831 - protein, 421 aa, unidentified
MPNIEIGVDFMVKENFIYVGIDLHKETHTAVMIDCYNQKLGEITFPNRPADFPKLVTKVKKCNTDAKEVVYGLENAYGYGRPLAVWLIDKGYFVKDVNTAISHRQAKHRGAMYRKSDSDDAEAIALATLNMLDKLPDACPNDAYWSLGQLVHRRDNIMKQRTRLVNQLHEQLCIAYPSYKQFFNDISRPTALYFWEHYPSRKYLKGKSVEDLRAELVPVSHNKCSTRTCEKILDAIAGDKVKNNAYQDARDMVTLSIVSDLQHYDKQLAEVDKMLEQIYKMLGCTLTTIPGVNVITAVKILAEIGDIKRLSNANKLAQFAGIAPLHLSSSGKGKDLATKQGNRRLQATIYFLAIQMVQISSKGTPRNPVVRAYYEKRKAEGKTSQQALICISRRLISIIYGMLKSGTEYRMPVVENAGENR

SEQ ID NO: 68832 - protein, 342 aa, unidentified
MFYIGDDVSDKSSYMYVTDRRGKKIEGQEIPTDKDGYRQYFKKWVGKQVKVAVEAGGHSRWIHDILKKMGISIYIVNPNKVKLIAKNKKKTDKVDAKFLAKLLRIDELPERVYVAEGESRELRDLLGSRHQLVTSTTCIMNHLRGMLRQEGIKLKKKAFKDESTFSRLLMNKSVPKHLHPIITSYEKTITELRKQREALDDVIAEYGNKDIELLKSVPGIGEVASKTTYAAISTIKRFKRAKQLTSYCGLVPSVFSSGERTAYGHITREGRSEMRHVAVQSVRAILRSTNSESKPLRKWYDRIARRRGSKTAVVALARKLIEIIFYVLRDRRPYDAQLLHVH

SEQ ID NO: 68833 - protein, 355 aa, unidentified
MNDAKYIGLDVHQATISAAVLDSAGKLVMEAILETKAETILQFLRGLRGSLHVTLEEGTWAAWLHDLLQPHVTRVLVCDPRKNALLKAGNKSDRIDAHKLAELLYMNKLNPVYHGEQGIRTLKELARSYLTITRDLTRVMSRLKAIYRSWAIPCAGQQVYAPRFRAEWLAKISEAGVRRRAELYYQQLDALRCLRQEVRRDLLAESKKHQAWKRLCGIPSIGPIRAAELLGILQTPHRFRTKRQLWTYGGVGIQTSSSADHHVVKGQLERKKKQVEIRGLNRNYNHDLKNLFKGAAIVAATKPGPFAEFYAELLAKGMRPEMARLTLARKIATIVLIVWKRGVCFDAQHLKPQTA

SEQ ID NO: 68834 - protein, 366 aa, unidentified
MTSMTDQTLEVTGGVDTHGETHHAAVVDRIGRHLADREFPATGTGYRQLLSWLSSFGTVRAVGVEGTGAYGAELARTLRRTGLKVVEVDRPDRRTRRMKGKSDPIDAYAAAEAVASGRATGTPKSRDGIVEAVRTLRVVRRSAVKSRTQAINQARQLLVTAPETPRAQLRGLTADALAKACARLRPGTDLADPAQAAKAALRRLGRRILALTEETDELEAELKPLTTRAAPELLALKGVGADVAGQLLATAGDNPDRLTSEAAFAHLRGAAPIPASSGRRDRHRLNRGGDRAANRALHTIVLSRMRWDERTRAYVERRTGEGLTKKDIMRCLKRHGAREVYRILIKSLHTPHTGRDATQSDLAEAA

SEQ ID NO: 68835 - protein, 347 aa, unidentified
MRKIAYLSMDVHARKSVLGEMDGNGKFLGNRPFITRETAIIKALKAIKAKTKYLVIEAGPMSNWVAQVANDYVSQVIICDPRENALIYKSSKKNDKVDTKKLCRLLRLGEFKAVYRPENDQRAVFKAAVQHYLDLRDQLTALKHKIKAIYRQWGVIDVFTDAVYSENGRDTFLNQIPHPPICLQLKRLYTLLDTTAAMKQTAQKSMQALGRCYTEIKEFIKIPGMGPIGAHIFDAYIQTPYRFAKRSRLWKYCRLAVTDCTSDGKPLGYKRLDKSGINELKALSYRAFLSAIKGDNEVKRFYLNSLQRTHDRKHARLNTQRKILSVMLSIWKKGQPYRAELFLDPSS

SEQ ID NO: 68836 - protein, 400 aa, unidentified
MMTPDDIDVWVGLDVGKSAHHAHALDHDGNTLYDKPLKQDEKAIRTMLGKLSKHGRVLLVVDQPNTIGSLPLTVARNTGIAVAYLPGTAMRRTAQPLPGDAKTDRRDAHVIAWAALKLPETLRDAGPDDETLAALKLLAGHDEDLAHESTRHVNRLRSLLLQTHPAFERALKGERITRDATLALLERYGGPMGVKRAGIEDVKDWAKSNGLRAGRIIDDMFKAIGEQTVTVPGTLMAETIIPSIAHDIKTIRDRRREVGRQVEKLLEDHPLLTVPASMPGIGVRTASNILLGIGGDIANFKSSAHLAAYAGIAPATGQSGTSIKGERPSRRGNKRLRNALWQTAFVASTKHPPSVAYYKRKREQGKHHNAAVICLARRRCDVIYSMLKNGTLYQEPALVA

SEQ ID NO: 68837 - protein, 395 aa, unidentified
MVYLGIDIGKNNHNASLMDAAGKLLFKGFSFPNTTAGGEKLLEQLSFHSTDPSNVCIGLESTGHYWLALYSFLHEKGFVIHVINPIQTDGWRKGVEIRKRKTDTIDSALIADLIRYGSFVESSLADETLFSLRTLTRFRTYLVDSISDLKRKVICVLDQVFPEYENVFSDVFGSTSKQILLNYTTPAELERLSVDKLAEVLAHTSRNRIPAAKAHELSVLAANSFGVTFSLEAFTFQLRQLVQQMQFIEQQVKDTEAEIKLLLDEMDSPITTIPGIGPTTGAIILSEIGDINRFDSPAKLVAYAGIDASVSKSGQFESTHNVMSKRGSPYLRRAIYQAALVASIHDPVLNAFYLKKRAEGKHHKTCLGAVSRKLCYIIYAVLKAGKPYEVRLPQA

SEQ ID NO: 68838 - protein, 387 aa, unidentified
MLQPNDLSRSLVALAQDSTIIAVVELSQSSWLVGGVLPGIERQPRKKLEPSPERLLAVLHRWRDEAIRAGCNITRIALAFEAGRDGFWLARWLAARGVEAHVIHPSSVAVSREHRRAKTDRLDTELLKRGFLGWLRGERGHCSMVRVPTLAEEDAKRPNRERECLVKERTRLVNRMKGALARLGIRNFRPTLRNAAEHLAGLYTPEGSPLPPNVAAELERDIARLGLVIGQIKQLEAARRQRLEEQPESRPHAMVRLLVRVVGIGTETADMLVNEVLSRPLRDRRAVARYAGLTGAPDESGAKRREQGLAKAGNARVRRGMIPLAWRFLRFQQNSALARWYQARTADRRAGTRKTMIVALARKLLIALWRFVTTGETLEGVVLRPAA

SEQ ID NO: 68839 - protein, 366 aa, unidentified
MKKPSTTALRRIRKQQDGQLTIGLDLGDRSSFYCVLNNAGEVILEDRVATSPEAMKKTFEKMPSSRIALETGTHSPWVSRLLTELGHEAIVAHSRNVRLIGESRRKDDRLDAQALARLARIDPQLLSPIQHRSAQAQADLTVIRARYALVRTRTALVCAARGLTKSFGERIRGRNPKGFGLATSEALSPQLRVALAPLLSALETITARIREYDIQIEKLATESYPEVALLKQVKGVGTLIALTYVLTLEDPRRFQKSRDAGCYVGLQPGRRNSGQSEPQLHITREGDSYLRMVLVQGAQHILGPFGEDSDLRRWGLKLAERGGKRAKKRAIIAVARKLAVLLHHLWISCEEYEPLHNTRKRRLVAA

SEQ ID NO: 68840 - protein, 350 aa, unidentified
MMIIGCDLHTRYQQIAMVDTETGEFVQRRLEHESGEARGFYAGLKGAVRVGIEATGHTHWFEAMLSELGHELWMGDAAKIRAAVVRKQKTDARDAAHLLDMLCTERFPKIWRPGLAERDLRQLLWHRQKLVWMRGAVKNQMHALAMGEGVCRKKKLFSAKGRKELEGLTLGPWASYRRQELLRMFDELQGSVTKLDEAVEQAAQSQPLAVRLMTHPGVGPITSLAFVLIIGPIERFERSKQVVSYLGLNPREHSSGGRQRLGSISKQGNPMMRSLLVEAGHTAARLDPQLQRMYQRLKFRRGAAVAKVAIARKLAVRMYWMLRSTADYAQLVRMRGSSWPTLVEDNPSLG

SEQ ID NO: 68841 - protein, 407 aa, unidentified
MEVLHPRCAGLDVHKQTVVACVRIVGNAPPRQEVRTFATTTSGLLALADWLDSLGITVVAMEATGVYWKPVWHVLEGHFELVLANAGHVKNVPGRKTDVNDAMWLADLLAHGLIRASFVPPAAVQELRTLTRTRKQFVRERTAHVQRIDKLLEDANLKLSVVLSDVLGKSGRAVLQAIIDGHTDPERLASCVTTRVKASRAQLLEALHGHVSAHHRFMLKLHLGHIDALDQAIAAIEKEVGLGLDPFRQAAKLLSTMPGLSAVGSNVVIAEIGIDMSRFTTPGHLLSWACMCPRNDESAGKRRSTRLRRGGKWLKTTMVQAAWAAVKVKGSYLQAQFHRLRARRGTKKAIIAVAASMLTAAWHMLRNGSEWRELGAAHFDRADAHKTAVRLVHRLQQIGYAVQLTPA

SEQ ID NO: 68842 - protein, 453 aa, unidentified
MPRKRTKLNPSDPTLSVMQPDAAGIDVGATEMYVAVPEDRDPQPVRCFATFTPDLHALADWLAACRIRTVAMESTGVYWIPLFQILEARGFEVCLVNARHVQNVPGRRTDVSDCRWLQYLHAVGLLRASFRPPQDVCALRSLLRHRDNLIKQASVHILHMQKALDQMNLRLHHVIDDITGMTGLTILDAILAGQRDPQELAKLRHPGIKASEETILKSLMGDYRSEHLLVLRQSLAAYRYFQRLLQECDREIHNTLKALDSRIDVKRHPLPPERVGRRKPRRNEPQFNLRQHLYRIFGVDLTQIPGLQATTAHTLLAEIGPNLSKFRSASALASWLGLCPHNDISGGKILLARTRKVNNRAAAALRMAAQSLHGSQSFLGDYYRRMRSRLGAPKANVAAAHKLTRVIFQLLTTRQPYDESMFARQEMLFRKRTEAKLKKQAKSLGFQLVPIEA

SEQ ID NO: 68843 - protein, 415 aa, unidentified
MEVVFAHCAGLDVHKKTVVACVFVSNPQGEIQRLVKTFPTTLAGLEALAAWLSGLGVTHVAMESTGVYWKPVFNVLTPHFEAWIVNARDIKQVPGRKTDVKDAEWIAQLMRHGLLKRSFIPDVAQRDLRDLTRYRTRLIGERSSASNRLQKILEDANIKLSSVASNLQGVSARAMLAALIEGETDVTKLADLARRRLRSKIPELEAALAGRIREHHRFMWREILYHLDELNERLATLDAQIRQLTAPYESIIERLDAIPGIDRRTAEVILAEIGPNVTPFPTAQHLASWACLCPGNNISGNKRRSGKTRHGQNWLRTALVEAAWAASRTKDTYLSSQFHRLRARRGDKRAAVAVAHSILIVVYHLLAKPEAVFHELGGDYFLKRNAEQEERRAIRKLTALGFTVTLTPAAAPVPS

SEQ ID NO: 68844 - protein, 437 aa, unidentified
MRRKKTKASERVNLQNLPMLNPDAAGIDVGAKQHLVAVPADRDPRPVRTFQAFTPQLHELAAWLKRCGIRTVALESTGIYWLSLYEVLEQDGLEVRVVNARHVKHVPGRSKTDVLDCQWIQKLHSFGLLNGSFRPDPPIRKLRTYLRLRDNLVVNNTQAIHHLQKALFEMNVQLSNVISDVSGETGLRIIEAIIAGERNPEQLAALCSSRIKASRETVAKSLHGNWDSALLHCLKTALETYHFTHCQIQECDLCIQRQLAELDARAPLPDSAASLKEQLHRVCGVDLTKIPGIKEQAAQIIISEVGLDMTKWNTEKQFSAFLGLSPDNRISGGKVLSRSTRKVYNRAADTLRLSAQSLTHSKSALGAKYRRLKARLGAPKAIVAMAHHLARLVYRMLRYGQNYVEKGIEHYERKFRLQRIKWLKKEARALNLQLVAA

SEQ ID NO: 68845 - protein, 343 aa, unidentified
MTFVGCDLHTRQQQVAVLDTTTGEIREQQLLHEGTTVEDFYAALPRPVTVGIESTGYAIWFHALLQRLGHTVLVGDAAKIRAMVVRKTKTDRRDALHILDLLRHDRFPAIWIPDPATRELRALLMHRLRLVRIQTMLKNGVHALALNQGLARGSKLLRRAGLAQLQALPLPPYTAQRRDQSLDLLATLRTHLDHLDDAIAAAALTHPDAPRLLTHPGVGPVTALATVVVLGTVSRFPDSKHVVSYVGLAPALSASADKYRLGKITKQGSALLRFVLGQAAAHASRLDPELTRTYRTLAQRRGRAKAKVAVARKLLVRLFIMLRDHIDYDEFRRRGRAPVVAPG

SEQ ID NO: 68846 - protein, 319 aa, unidentified
MSAETIIGIDVSRDWLDGFCLPGKQRFRLQNSPDGYARLLETLQSMPDDLKVGFEATGGQEWALWRVLISMGINAVQLPPAQIKAFAFSMGKRAKTDQIDAELIARFMVVRPEAGRALPDEKLQLLRALTVRRAQMVDTRKRLSAQISARRKQGVSAELEDMDSSLKAFLESQISELEQRIEGVIAQVKELSAKAELLRSIPGIGPVSVAMLLAEMPELGRMTATEAAAMTGLAPMSHDSGAMRGKRVISGGRRSLRHVLFQAGLAASCHNPVLKAVAKRMKQRGKPHKLVIIAIARRLVTIANAVLKTGLPWRISPVV

SEQ ID NO: 68847 - protein, 355 aa, unidentified
MNSEKYIGLDVHQATISVAVLDSTGKLVMESILETKAATILEFFAGLRGTVSVTFEEGTWAAWLYDVLKPHVAKLVVCNPRKNALLKDGNKSDRIDAHKLAELLYLNKLSSVYHGETGVRMLRELARSYLTIVKDLTRVMCRLKAVYRSWAIPCAGRDVYYTRHRDEWLGKINEAGVRRRAERLYQQLDMLQYLRQQARRELLAESRKHAITVKLRQIPSLGPIRSALAVALIQTPHRFRTKRQLWAYSGLALETRTSAEYCYVKGGLRRSKKQISIRGLNKDHNHDLKGLFKGAATRASVLPGPFQDFYQRSLAKGIKPTMARLTLARKIAAITLTLWKKGENFDADKLKSQAA

SEQ ID NO: 68848 - protein, 375 aa, unidentified
MKEKVRFLGLDVHAETITVAVAEPDGSVRSLGTIANRAESIRKLVKKLGPVEDLRACYEAGPTGYVLYWQLSELGVQCAVIAPTLVPVKAGNLVKTDRRDAEKLARCHRAGDLTAVWVPEEGSEALRDLVRARESAKQDQLRARHRLGKFLLRTGRRPAQGVKAWTQDYMKWVRQLRFEQMAQEATRLDYLHEVEHMGERVLRLEQGIAEAVKVASPAMQEVVRDLQALRGIAHISAVTIAAELGNISRFQGARQLMGYSGAVPSENSSGERTRRGRITKTGNAHLRRIAVEAAWSYKFRPAVGPALRKRQEGLPEEVKQIAWKAQHRLHKRFSRLLVAGKDRRKIVTAVGRELLGFIWAIGIKAEMAASQQMAA

SEQ ID NO: 68849 - protein, 323 aa, unidentified
MQTNSTVAGWAGIDVSKEWVDVAVWRGERRIDVGRFARDKKGLGKMAKQLVQYAPEAVALEATGGYEVAVMAALTEACIAVVRLNPRRVRDFARAQGLLAKTDKIDAYVLALFGVRMRPAIRALPEPERVQLANWETRILLFVDTRTTERTRLQQVKHPELRKSLERTIAFLGKELARLDAQIDKCLQESQQLVEQAALLDTAPGVGPRTACVLTARVPELGAANRREIAALAGLAPIAQDSGKYQGKRRIQGGRAPVRAALYIAAWSATRVAGKLRDYYHHLIAQGKPRQLALIAVARKLLIALNEMMRKRQPWTENAVFSA

SEQ ID NO: 68850 - protein, 427 aa, unidentified
MNNTQNAKIAQVTNDTMVIGIDIGSQKHWARAFDNRGMELSKKAFGFNNTAAGFASFEVWYESQRRAAGLKRIMVGLEPTGHYWFNLNQFLSENGIKVVLVAPQHVKHSKELDDNTQRKDDLKDPRVIAKLVTEGRYFLPYRPTGVYADMRDGFNRRCGIVESMTQAKNRLHRWFCINFPEYLEAYGSVAAKTGLMVLKEAPLPKDIVALGVDGIVKIWRDAKMRGAGKKRAMTLVALAEQSIGEKTANEAARLELWQLLEDYEHYAHQYEVIEEMLERRVHEVPNADKLLQIPGIGYFTVIGFFAEVGSIERFDDPKQIQKLAGLSVVENSSGKRKGLPGISKRGRDRLRWVLFQAAMSAVKNNKEFREIHLYFTTRKDNPLKKMQSLMAVAGKIIRVFYGMARTGSDYDPARLMRDIRRPEKAAA

SEQ ID NO: 68851 - protein, 339 aa, unidentified
MTQTAMDVHLTRSVSAYRTPALAEPKLVRCYTKPEEFRKLFSGLPKPWIVCLESTRQSPAVVRWLRTIGVEELHLVNPEALHAFVKGKPKTDARDARAMLELLVMGKLPECYLAPPAVQDQRALSRERAFARKQSTAVRNAIRALLNQLGLEVGCRDLDGLGGQRQLAELQGQLGPLAQAVLPQLGRLLSGTEAALDAFDAQIRAEVERHPVARALTELPGVGPVLAFGLIAEIGEIERFAAPDHLISYAGLAPKANDSDDYHGPRHLPQRCSKRLRHLAIQAAQGAGRSGQPSKAGGTYQRLRERRTPNVAKLAAARVLLKEVFYRWPRAVQEVNRAA

SEQ ID NO: 68852 - protein, 332 aa, unidentified
MVQTSTVASTAFLGIDVAKEKLDVVLLVGQRNGYRVFPNSAPGFEQLSSWLLQEQVQQVHACLEATGSYSDAIALFLFEHGHTVSILNPSVLVNYRKSKNARSKTDKLDATLLSYYAQEMQPLPWRPLPQEVMTLRSLLAYRDDVQQMLLQARNRKYAGRLDPWVHQRVQTHIDQLVNDLKGVEERIWASLEEDENRKDIWTRLQTIRGIGRLSATRLIAHIGEIERFTHPGSLVSLAGIAVKQRESGSSVRGRAQMDRHGRQSLRQILYMCALVSLRWDKHMRQWAQRLKERGKPSKVVIVAVMRKLLHIVYGVWKNECDYKAEVAFPTAA

SEQ ID NO: 68853 - protein, 384 aa, unidentified
MQASTVDTPTAGHCGTIFVAIELSQKTWLVTLHSPDRDRISRHKLEGGDHAGLLGLIDKVRTRATEKLGSAPRVVSCYEAGYDGFWLHRLLEAARITNFVFDAASIAVEQRSRRSKTDRIDGELLLRTLMAYLRGEPRVVRIVRVPSVAQEDARRTSRERDRLVEEQTAHTNRIKALLRLVGMAVGNPRRRDWLGWLERQRDWRGQPVPSHLLAEVKREYARLMLLREQLAALEQAQAQAAQDITVPAAMVERRNQLQRLKALGPAFSATLVNEVFYKDFRNRREVASYNGLAPSPWKSGGIDREQGISKAGNHRARVKAIELAWLWLRHQPDSALSCWFRVRTANAGKRARRIAIVALARKLIVALWRYLTTGLIPEGATMKA

SEQ ID NO: 68854 - protein, 327 aa, unidentified
MALIGPIKKHDICEHPTSTNKYHYTVIKHTPEALHEWAMDIKQRYPEQKIAIVCELKKGPLIYALAKYDHLTLFTVNPCAVAKYRQAFTPSGAKDDPSDAFLQVEILKLHMDKLSVIEPESAAMRSLSQLVEYRRSLVQDSIDLSNKITAILKNYYPQALEWFKEKDTYIFCDFIQKWPSLTAVKKARKQTLLDFFESHNSHYCAVNNTRLDSIKNAMPLTLDEGVIVPNQMLVEVLITQFKVLLKGIEKLNKAIKSAYKAQQDKKIFDSLPGAGPQLAPRLLVALGSNRARYNDAAELQKYAGIAPVIERSGQKMWTHWRYSCPTF

SEQ ID NO: 68855 - protein, 408 aa, unidentified
MELTPLHKRVVALDVHQAKITACAIIEHDDGRTEIIKRDFGAFKRDRRALAQWALEMAPEVVVMESTGVYWKSPFAALEAVGIVAWVVNARHVKAVPGRKTDMADAQWLATLARAGLLRASFIPPVQLRQLRLVARQRQKLGGMLSAEKNRLHKVLTDAGIRINVLVTDIHGPSARAMVKALIAGKPVHEILDLKGRLRASREELFESLSTEQFSAVHAFVADEIMQHIEQIEQRIERMDQYLLDGLQAMQPQLNLLQTLPGIDRVGAAMLLVEIGADMSVFGSAERLASWVGICPGNNESAGKRKSGRIRKGNAWVRRLLCEFAQAAARTRCALKAKFESLAVRKGYKKSIIALAHKMLRTIYAMLSRGTHYQDRNVDYEALTVARNAPRWMKMLRKHGFIHTPAAA

SEQ ID NO: 68856 - protein, 363 aa, unidentified
MLESTPIVAFDQHAASVTAAVLLPGDRRPALPQLAPDLPALRRFVKKLQRHDGVIRCCYEAGPCGFELQRALTAARVVCDVIAPALIPRRAGDRIKTDRRAAAQLAILYRAGALTRIHIPTEQAEAVRDLLRWREDIRADLLRARHRLSKFLLRHGRRFTGTKKAWTRAHDAWLRAQTWPFPARTQTHAAYVRAVDEARARLQTVETDLQTCLTLEPLATRARRLRCFRGIDDLTALTIAAELSAPRRFPTARSVMAYVGLVPSEHSSGTKRARGGITKTGNAHLRRVLVESAWHYRHHPFVGDTRRRRQHGQPAAVCAQAWQAQHRLPRRYRQLTGRGKARQPVVTAVGRELTGVLWAALTR

SEQ ID NO: 68857 - protein, 322 aa, unidentified
MNVPGKTVLKPLTFSNNKAGFELLDLSLRQLNQDCLIALEDTGHYAFNLLNFLHEQGYKVYTYTPLLIKEFAKSLSLRKTKTDKKDAHGIALKLLSDPNREQFQHDNRQVELKILARHIHRLKRKQSDWKVQYTRCLDIIFPELDKIVGKHAECTYQLLTRYPNPQKRLEAGFDKLIEIKRLTASKIQDILSVAPRSIGTTSPAREFEIIKHYKRLIDKAETCVNDLMAEFNSVITTVTGIENRLGAVILAEIRNIHAFDNPAQLQAFAGLDSSIYQSGQIDLAGRMIKRGSPHLRWALIQAAKACPRFSPAFKAYLKTKLE

SEQ ID NO: 68858 - protein, 330 aa, unidentified
MKNYKEVVGIDVSKKTIDAYCYHAQLHKGFVNDLIGYKSLLKWVLKVTQERKVFYCFENTGYYSLKLALYLHSKDIVYVEESPLKIKRSSGIVKEKTDRLDASLIARYAWLYREELEPSTVKSMSHLELGRLLALRDQLVRNNAGLKGTLKELKVLLSSPSTDVGCLSLKRSIDYLTKQVKGIETRIKDILSEDASMRKNYELLTSLKGVGLVVACQLIYHTGNFTRFASWRAFSSYCGTAPFEHQSGTSIHRRKQCHYLGDRKMKSLLSMATVSAIQHDSELRLYYKRKLAEGKDKMIAVNNVRNKIISRAFAVVKRGTPYVVLQQYAA

SEQ ID NO: 68859 - protein, 307 aa, unidentified
MTAVGIDVGKAALDVAVAGQPDVARFANTRAGIGQLVRRLRRLPAPRIVMEATGGYEEPLLDACCDAGFWVARVNPRQARDFARATGELAKTDAIDARLLALMARLFADRLRPHVAAPAWQRELRDWLRRRGQVVTVLQMQKQQAAMAPATVRVLARRTIAALTRELAAIDRAMQALLKQHATPALRSSKGLGPVFQATALALLPELGHLDRRQITKLAGVAPMNRDSGQGQGKRRIRGGRAPVRVALYMATLSAVRWDPTMRAHYQQLRARGKLGKVALVACMRKLLGIVNARRRDELREEGLRVT

SEQ ID NO: 68860 - protein, 443 aa, unidentified
MTRKNQKRFEVIHPDCAAVDVGGSEHLAAVDPTKCDDPVKRFSTFTDDLHAMADWFESMGVKVVAMEATGVYWIPLFEILDRRGFEVYLVNSRATRQITGRKSDVLDCQWILQLMTHGLLRGAFRPSDDVCSLRSLVRQRGNKVRDQAKALNRMQKALVQMNIQLAQVISNIAGVTGMSILRAIVDGERDPEVLAMLRDKRVKADQATVARSLRGNWRAEHLHALSQELAAYDFLEKQIGECDQAIAFALERLPALQDDVVLPAKTLRNPHRSTEQQLTLHRALNKVMGVDLTAIPTIGIDTALVLASELGSDLSRFPTSQHFCSWLGLAPPTRISGGKPLPGKSLKVINRAAQALKQAASIARNDKSFIGASHRARLTRMDTCCAIKATAHQLARLIYAMLTKGQPYVEKGIEEFEEKSRDRQMRALERKARKLGMQLVKAA

SEQ ID NO: 68861 - protein, 425 aa, unidentified
MNYKQNEKINQVKESTLVVGIDIGSTTQYARAFDWRGIELGKVFTFSNSREGFEAFKAWMQRLQDKYRKSDVIVGIEPTGHYWFDLGAYLEDEGILLVMVNPYAVKQTKELDDNSQSKNDRKDPKVIAKLVTEGRYSAPYTPDGVYADLRIMVTNRKRLIREMTQIKNRFARWFAIYFPEYTDVFGDYEAQSSMLLLKKVCTPEAIVELGAEKINQIWRDAKLRAVGMKRATTLCETAKRSIGLKKGSSAARYEMKLLLEDYEYKKAQLDAVIEEIEKLCRKIPESEQMLAIKGIGVITVAGFLAEVGDVRRFESPRQIQKLAGLSLRENSSGKHKGQTTISKRGRSKLRAVLFNAAIPLIATNPEFKSLHEYYTTRANNPLKKKQSVIAISCKLIRVFYAILANGVTYDAQKMLSDIHRQPQAA

SEQ ID NO: 68862 - protein, 342 aa, unidentified
MSVYVGIDVHRKRSQLAVIDAKGEVLANRNVPNGAEPILKVIGGLPTGTPAAFEAAFGTTWLVELLEDYGFDPHLVHPSRCKAIASARLKNDKVDAAILAQLLRADLLPEAWIAPPPVRELRALLRHRVHLVRVRTLLRNRIHAIVADHGHDRPHGGYWTGPGRAWLASLPLPAVSRELVDDNLGLIDAIADRVDRLDGEIRQRARSDPRVKVLTQLPGVGPFTALVILAEVGDVSRFASARKLASWAGLTPTVRGSDRVAHYGHISKEGSVWLRWVLCEAAQTAKRHPQFAATFQRIAKRRGKKIATTAVARKLLTRAWHLLTDAESIASPQPTAPQIPAR

SEQ ID NO: 68863 - protein, 345 aa, unidentified
MESMYYIGLDVHKRKISYCVKDGSGRIHAEGSISATRLDLDHWMRSLPQPWSAAMEATMFTGWIYDHLKPHAASLKVAHPLMLRAIAAAKKKNDRIDASKICDCLRCDFLPESHMASTAIRERRRTLRYRNLLVRQMVQMKIKISALLMEAGVSYNKQRLHKAGYFRELLATNPDIDEGLCSLLRLCRETVVRLGKNESALVRSLERDSLLVERIERLMTIPAVGPITALTWALEVGDVQRFSSIKKAISYCGLCGAEKSSGNTVQRTPLSKQRNKHLQTTLIEAAKMAPRNSPELAMLYDKEKQKGNANRATLAVARKLVAYLMAVDRGQRNFQIAETSSSIAA

SEQ ID NO: 68864 - protein, 350 aa, unidentified
MEVQTIGIDLGKSVFHLVGLNRSGEVVMRKKFSRAQLLRFTANVQVGLIGMEACAGSHFLGKALRDQGHEVRLMPAQYVKPFVKTNKNDFIDAEAIAEAVSRPSMRFVPIKTDEQLDMQSLHRVRERWIMRRTAVVNQIRGLLLERGITVRTGRCHLDAALPGILEDGSTSLSGALRFLLAELKQELEQLAVHIEQAEALIQRAAQQSEACQRLDAIPGIGPLTATALIAAIGNGQAFRKGREFAAWVGLVPREHSTGGKQKLLGISKRGNCYLRKLFVQGARAVLQFSDKQCCGLRHWLAQLKSRTHYNVVGVALANKLARMAWAVLARGEVYRPPTQTDMTGLQMAAV

SEQ ID NO: 68865 - protein, 350 aa, unidentified
MIIIGCDYHPSFQQIAFVDTETGELQERRLQHREEAEKFYRDLAARGMAVRVGMEASGHARWFERLLAELQFELWIGDAAEISAKRVRKQKTDRQDAQLILRLVLKDDFPQIWVPSWENRDLRQLLWHRHRMVQARTRIMNQLQAVALNEGLRCRKKLWRDAGRGQLEAFQLAPWASQRRGDLLELLDRLNPTIGKLTQAIDLEVEKCPAARRLKTHPGVGSLTALAFVLIIGKADRFECGKQIASYLGLVPLEKSSGNQRRLGHITKQGNSLLRFLLVEAAQVTVRSLPEWRSKYVHLTMRRGRKIAKVAMARKLAVRLYWMLRKEWDYEQLRKFGSYAGKPGNRDGVK

SEQ ID NO: 68866 - protein, 412 aa, unidentified
MQVVYARCAGLDVHKKTVSACISVCEAEGAKQQQMRVFGTFTRDLLVLADWLKEHGVTHVAMEATGVYWRPVWAVLEGQFQQMLVNPQHIKAVPGRKTDAKDCEWIADLLQHGLLRGSFVPPTRLQDLRDLTRYRAELRQSQNRVANRIQKFLEQANLKLSSVASNALGVSGRRMLEAIIAGQDDPEQLAKLARGKLKSKIPELEQALEGRVRDHHRFLLAEFLDEGEALGERMARLEAEIDRQIRPFEPAITLWQTIPGVDRITACNLVAEVGVDMNQFPTAQQLASWAALCPGNHESAGKRKSGRTRDGNKWLRRSLCQAAWAVTRKKDCYLSAQFKRLAARRGVKRAVMAVAHTMLIIGYHMLITGQSYHELGGDYLERINKNQLQRYYVKRLQTLGLKVTVEPVADAA

SEQ ID NO: 68867 - protein, 338 aa, unidentified
MKTYAGIDLHSSNNYIGVIDAKDKRLYSKRHDNRLEDVLKVLGKFKANLQGVVVESTYNWYWLVDGLMDQGYTVHLANPNAIQAYDGLKHTDDKWDSFWLAHMLRLGILPVGYIYPKQQRSIRDLLRRRLMFVRQRTSQILSLQSMITRNRGLNFSGAQIKRFRDEFIDKLFSDPHLVFTAKRNMATIRFLDHIVSEIEVEVQSQVKLKKEFIPLLTTPGIGKILGLTIMLEIGDIGRFFKAGNYSSYCRCVESKKTSNGKKKGENNKKNGNRYLAWAYVEAANHAIRNCPKAQRFFQRKMAKSNRVLATKALANKLTKATYFIMRDQVAFDENKLFQ

SEQ ID NO: 68868 - protein, 336 aa, unidentified
MAQKHILGIDVSSKDLVIFDTASGSHATIDNTEAAIHKACLQNLWSKDSHLVGLESTGDYGLQTMKTFLELGFEIKLLNPILTQNAIKRTIRGAKTDATDSELIAELVSKGEGREISENSLNTEKKTLIRVERKLSAMQSDLKRITKALALKQAAGVDVVIAQGIVSELLEHFNASETQLWQTIADQDTALAKQEQIINSHVGCGMKLSAIISEEAGDIKRFASARQLIAYAGIDPKVSQSGEKDTRGRMTKRGNPNLRHALYLAAASASRFDPQLKDYFERKRTEGKHYTVAVCAVARKMCERIYSTVTHDRMYEKREPAVKEPSLSPENLLTGI

SEQ ID NO: 68869 - protein, 400 aa, unidentified
MMTPDDIDVWVGLDVGKSAHHAHALDHDGNTLYDKPLKQDEKAIRTMLGKLSKHGRVLLVVDQPNTIGSLPLTVARNMGIAVAYLPGTAMRRTARLLPGDAKTDRRDAHVIAWAALKLPETLRDAGPDDETLAALKLLAGHDEDLAHESTRHVNRLRSLLLQTHPAFERALKGERITRDATLALLERYGGPMGVKRAGIEDVKDWAKSNGLRAGRIIDDMFKAIGEQTVTVPGTLMAETIIPSIAHDIKTIRDRRREVGRQVEKLLEDHPLLTVLTSMPGIGVRTASNILLGIGGDIANFKSSAHLAAYAGISPVTGQSGTSIKGERPSRRGNKRLKNALWQTAFVASTKHPPSVAYYKRKREQGKHHNAAIICLARRRCDVIYSMLKNGTLYQEPAPVA

SEQ ID NO: 68870 - protein, 381 aa, unidentified
MPSMQLRRDDVIVGVDTHKDNHVAVAIDGLGGRLGDIVVPTTIAGFEELLAFCLAFVGSAGRLAGFGIEGTGSYGVGLARYLRRQGHQVHEIARPARAVERRLAGKNDTIDAEHAARQLLAGHGLSSPKTADGAVETIRLVKIAYDGAVQARTTAMITLKATLATGSEALRAELEKLTDHKLITACATLEGPAPLPPVRRGAPAVVVPNDPDAAMRHVLSSMAKRWLALHEEAKAHSATLKALTAAAAPQLVEAVGVGYDTAAQMLITAGDNANRIKSEAAFAKMCGACPIPAGSGKTNNRHRLYRGGNRQANAALYRVVIVRMRWHQPTIDYVARRTAEGLSKREIIRCLKRYLARELFRLLPASDTRANLVDGRVEIAA

SEQ ID NO: 68871 - protein, 491 aa, unidentified
MEKSTDRQASVTNRRPDRNDGYPETFEPRPMSGDEMHTQMMSFEDSTIRDAGFRAESEESKEKEEVKQDDEMMAWIGVDWADEKHEVWEYEVQSGQKRSYEIQQTAESLQDWVGQLRSRYRSGRVAVVLEQSRGGFIYALMSTDFIHLYRVNPKSLAKYREALYPSGAKSDPSDAELLGEMVRQNPERFRSWKPGDEQTRSLQLLVEGRRKLVDDMTGLTNQLGSVLKTYYPQALEWAGELSGEQACSFLEKWPTLQELRKTRAFRIREFYERHGRPSREVLDERVKQIQKSQPLTSDTAVMLSGVMMVKALVGRIRPLAAAIERYDQEIERIFRQHPDRAVFESFPGAGKALSPRLLAAFGADRDRFQTAVNMQELSGTAPVTERSGKSIWIHRRWACPKFMLQSFHEFADQARRFCTWSKLYYQHQRAKGKEHHAAVRALAYKWIRIMFRCWKDRQPYDDSRYTQSLIKRKSFLAERLTATSSEMLPST

SEQ ID NO: 68872 - protein, 371 aa, unidentified
MDSSCDLDGIDVPKSLLASKKEEPIMENDTLVAVDLAKSVFQIALSNHPGKVTRRERLPRDRFLEFFAQLPKSIVILEACGSAHYWARKIEELGHVVVLLPPHYVRPYVLRNKTDRTDTDAILEAYRNEQIRRVPIKSVTQQVLGTLHRLRSGWVGERTARINSLRGLLRELGFFIPVGRKEVLPHAWEIIQDADSGLPDALRPGLGALCQEIVGFSTRIEETEKQLKALACQIPAVSRLFSVPGIGILTATALYAFVGDISRFPSGRHLASYIGLTPREYSSGLRRRLGRISKRGDAYLRTLLIHGARATLWHAKRMKQPDRLRTWALRLEKTAGHNKAAVALANKLARIAWAVWKNDRDFEPVPETQAA

SEQ ID NO: 68873 - protein, 354 aa, unidentified
MNSQNCDYTGQDLYIGIDTHARQWKITVQTRNLILRTLSINPKPKDLMHFLQKHYPGAHYKSVYEAGFCGFWIHRQLLDYGIENIIVNAADVPVRHKEKDRKNDKIDSRKLARELSKDNLIAIYVPAEAEQQLRSLCRVRFKIVQNLTRVRNRIKSHLYFNGIDLPRRSETAHWSARFIAWLESVEFSHQPGKDCLDLYIEELKEHRARLLKITRLLRHYARQTHLSPLFEVLYSVPGIGFVTAVTFMAEIMDIARFRTFDHLASFVGLVPSMSSSDNNTTEKGLTKRRNRYLRHLIIESAWVAIRKDPVLLAKFENLCGYMKKQEAIVRIAKKLLSRIRYVWLNRQSYVIGVD

SEQ ID NO: 68874 - protein, 357 aa, unidentified
MKKVYRLQDYVVQGKEIFVGLEDSKRTWKLAVRSEKMIIHQVSMEAKYAVLIGYLRNKFPECMIHLIYEAGFKGFNLYDQLTEDGIDCVVIPPHVVTEPKVNRIKTDKRDARRLAKVLEDHDFQDSCYVPDKERREDRQVSRTLIALQKDIVRTRNRIRKFLQFHGIEVPFPDRWGRGEFRALKKLELSEPLRISLDIFLTQLEELWAHQVSLRAALRKLCKKERYHKAFTIARSLPGIGWFSAIRFVLELGEDLSRFTSGKKIASFVGLTCSEDSTGETEHKGRITGMGSGFIRSTLVENSWISISKDPVLLAKFTRVWHASGSKKKAIVAVARMLIVRYRACLMSGTPYVIGVAA

SEQ ID NO: 68875 - protein, 387 aa, unidentified
MAQVNDLSRSLTAFDPISTLVVVVEMSKASWLVSGAVPGVERQPLKKLEPDATALLRLIERWRNEAVRAGRPISRIALAYEAGRDGFWLARWLIARGIEAHVIHSASVAVSRERKRAKTDRLDAAMLMRVFLGWLRGERGHCGMVAIPTIEEEDARRPSRERESLVNERSRITNRMKSALARLGVRGFKPHLRKAPERLTGLRTAEGTGLPVNIIEEFRRDMARLALVRQQISSIEKTRAERLERAPDTGPHAMVRLLARVIGIGIETADMLVREILSRKLRDRRAVARYAGLTGSPDESGSKRREKGLAKAGNARVRRGVIQLAWRFLMFQKDSALARWYRMRTEGPSGARKTTMIVALARKLLIALWRLVTTGEVPDGVELRPAA

SEQ ID NO: 68876 - protein, 401 aa, unidentified
MKYVLVLDVAKGKSMFMLSSDAGEVLLEPTEYAHNKANLELIDSNINKLNIKDNLTVVMEATSIYHKAPERFFKENNYHVIVFNPLIGKEITNTIRKTKTDKQDCIKLTNLFWKGSIPDRNYTEDEIYTKLNELSRQYYHLDEGLTRHKNRYKELLHLCFPEFEQCFKDGKIYDLTALNFIKEFPHAYIIKDKRVDALAYNMAKTNERHLNYYKRKANKIKEYSQNSYPGVNENSKDVDNLKQLVEIIISITSQKDNIKNQMIELAKQTKNFNNIVSIFGIGDLSASLIIAELKDITRFNNVKQINASCGLDPTIVQSGKSINYHGPISKRGNKYARKILFNCSRNIITLSAKHDKENPIYVYYQKKKQEGKHYYACLTACSTKLIRIIYALCMNNSIQQN

SEQ ID NO: 68877 - protein, 474 aa, unidentified
MDKKLSKKQEEVVKLLQKQKIRDVKDLESYKLSECHPNSAGIDLGSRDLYVALNPAIAANLGISIVHRFETFTNDLLSCKNLLVACGIKTVAMESTSVYWTTICFVLEEAGIEVCLVNPKKFRMVPGRKTDIADCQWLQTLHLYGLLRGSFHPPQEIAMLRSYMRERDNIIKERSTFVQRMQKALIKMNLLLHNVIDDITGKTGMKIITSILDGERDPKILASLRDPHCKKSEEEIMEALTGYYKEDQLYLLKINYQSFCFFDKQLCDLDKQITKLLKRLPCKKEKKEKRPSNGKSKSKGKNDIRTTENIEDTLYHVLGADLSALPGIRANAILQIIAEVGTDMSKFPTAHHFASYLGFVPHNKITGGHVISSKTDRIKSSAAQAFRKLVPSISQTKTALGAFYRRLAPRIGKAQAIIATCRKLAILFYNTLAFGKAYLEQGELMYKQKQEDWERRKLTMLAKKYNFSITPNCT

SEQ ID NO: 68878 - protein, 412 aa, unidentified
MKDLLEISCGLDVHKDKIVACILSGPIGKTTVSEIREFTTLIPDMAALRDWIVSCNCHHVAMESTGIYWQPIYEILEDAYSGDIILLVVNARHMKNVPGKKTDMRDSEWIATLLRAGLLNGSFIPDKQIREFRYLNRYRKSIIRDITSQKNRVEKFLQSSGFRLSTFISDIFGASGRNIICHLIQHGCIDRESLDSCLKTKTRNHINEILVAVNGTLSQIQQDFLEMLMDHYDSLKSHLAEIETALEEAMAPFSLHIEQLTSIYGINTTASCAIIAEIGTDMSYFKTAEHICSWAGLCPGNNESAGKRKSTSITKGNPYIKSMLCEIAWVIAGKRNTYLSAWYWRIKQKKGAKKAIVALARKLLVIIYTMLKQGTLFDENCFETRRKNCEQKQVSHYIRELEKRGYHIEASA

SEQ ID NO: 68879 - protein, 412 aa, unidentified
MKDLLEISCGLDVHKEKIVACILTGPLGKPTRSEIREFTTLIPDMIALRDWIVSQNCHHVAMESTGIYWMPIYEILEDAFSGDITLLVVNARHMKNVPGKKTDMRDSEWISTLLRAGLLNGSFIPEKRIREFRDLNRYRKSVIHDITSQKNRIEKFLQSSGFRLSSFISDIFGASGRNIILHLMEHGQIDKAALDSCLKTKTRNRIDEILMSVNGTLSEHQKTFLKILMTHYDSLKEHLTEVETSLEEDMAPFTLQVEQLNSIYGISTTASCAIIAEIGIDMEPFKTAEHICSWAGLCPGNNESAGKRKSASVTKGNPYIKSMLCEIAWVIAGKRNTYLSAWYWRIKQKKGAKKAIVALARKLLVIIYTMLKQGTLFDESCFETRRKNCEQKQLSRYIRELEKHGYHVEAQS

SEQ ID NO: 68880 - protein, 347 aa, unidentified
MVVIGIDAHKRTHTAVIVDHLGRKVAFKTVGTTSSDHLALLRWATGKAADRVWAIEDCRHLSRRLERDLIAAGEQVVRVPPKLMANARDSARTYGKSDPIDALAVARAALREPDLPVARLDGVEREIRLLVDHREDLVAERTRIIARLRWHLHELDPGWNPPAKLDRASAFTRIDAHLAAFDGLVAELASRLVEHIRRLTTEIDELTDQITTTITSLAPTLLAIVGCGPLTAAKILGETAGVDRFRTKDAFARHNGTAPLPVWSSNRARHRLSRTGNRQLNAALHHIAMTQARCHPDARALLDRRKAGGDGGLEALRILKRRLSDIVYRAMITDQAITRSAHVTAAA

SEQ ID NO: 68881 - protein, 417 aa, unidentified
MEGITTMDVVYRCCAGLDVHKQTVECAVRRLTQSGTVQVEIRQFGTMTDDLLEMVTWLKAQGVTHVAMESTGVFWKPIYNILEGHCSVLLVNARHVKQVPGRKTDVRDCQWLAQLLQYGLLKGSFIAPRWQRDLRDLTRERTQLTDEQTRVANRIHKVLEDANIKLGSVATDILGVSGRDILERLMAGEEDVEALAERARGRLRGKIPELRRALRGRLSEHHRFQLRLNWDHLQRLQELIERLDQRIRELSQPYHPQIEQLDKVVGIDQTSAESIVAEVGVEMKVFPSDGHLSAWAGMCSGNNESAGKRRSGRTPKGNRWLRRTLTLAAQAAGHAKDSFLASRFRRLAARRGKKRACVAVAHSILKVVYHILKDGRPYRDLGGSYFDRLDPQRLTRYLVRRLERLGLKVTLEPATVA

SEQ ID NO: 68882 - protein, 315 aa, unidentified
MTKKDENIYVGIDVSKNELDIFVLPSNVSFSHKNSYQGIQAIKRKLTKFERPKVVLEATGGYEKKLTNMLNDAGFEICIVNPRQIRDFAKALGKLAKTDKIDAQVIALFAQKIQPEARKIKSKNESKLAELSTRRKQLIDMITMEKNRLDKASGRIKKSIKKIIKTLEKELAEVEEQQNEIIREDEFYSNTYNKLISVPGIGIQVATSIIAYMPELGTLSSKKIAALAGLAPFNRDSGTLHGLRTIWGGRANVRCSMYMATLVATRYNPKIKAFYQKLCNAGKAKKVALIACMRKLLICINAMVKNNQSWQECMA

SEQ ID NO: 68883 - protein, 413 aa, unidentified
MEVVYTHCAGLDVHKASVVACLLTPPAPDHPAKEIRTFGTTTPDLLALAAWLAAAGCTHVAMESTGIYWKPVYNLLEGLFSVQVANAHHIKAVPGRKTDVRDAEWIADLLRHGLLRPSFVPPAPQRALRELTRYRISLTRDRARQIQRRQKVLESANLKLSSVATDITGVSARAMLEELAAGVTDAPALAALARGRLQHKQAELAAALTGRVGDQHRFLISEHLAQLDYLEEAITRVTREIEERVRPFRSQLDKLDAVPGINQRTGQVVLAEVGADVGASFPDAAHLASWAGLCPGNRQSAGKQQSGRTRPGNGWLRQALMEAAQGAAHTKDSYLSAQYRRLARRIGRKRALVAVAHSIVVIIYHLLTEECEYEDLGADYFDQQDRAGLERRLVRRLEQLGHEVILKPKLQVA

SEQ ID NO: 68884 - protein, 449 aa, unidentified
MMEPREIEDEGHERVLERVAAIDVAKASGMVCVRVPHESRPGRRVSRVWEVPATTRAVIELGDHLVCQGIEKVTVESTSGYWRIWFYLLEAAGLDVQLVRAQDVKHLPGRPKTDTLDSVWQAKCTERGLLRPSFVPPAPIRELRDYTRLRTDLVHERTRHWSRLEKLLEDALIKVSAVASTMTTKSVRDMIEALIAGERSPRALADLARGRMKAKRAELIEALNGRFDAHHAELARILLDQIDALTAQTGILTGRADELIGAMTAACGVNADGTTGPGAGTGPGAAVVPALARLDEIPGISQAGAHVILAETGLDMSRFPTAGHLVSWAKLSPRTIQSGARNRSGKTGKGNPYLKGLLGEAAAAAARTDTFLGERYRRLVKRIGKLKALVAVARSILVIIWHLLSDPAARFCELGADYHATRINTQSKARGHIRQLEALGYTVTLTQAA

SEQ ID NO: 68885 - protein, 351 aa, unidentified
MKILGIDLGKYKSVACLLETGTNDTLYFTFASQAAEFEQLLQQTQPELVVFEACALTGWVYDLSVTQGFKVLVANPNQEAWNWKHVKRKTDRDDALKLAKLAAIEQIVPVHVPSLETRQYRQLVKYRKKLVSRTNQVQNSIRALFVQQGIPIPVGNRAWTVEGLAKLSAYRKPLADCDRASLWQGQLDLELTALDRLWEELHKVDQQLTQIGKTDERVQLLESIPGVGRKTAEVVVAYLDDPNRFQNARQVSAYAGLVPRQHQSGETNRMGKITRRGPRVLRAALVEAAWAMLRYNSWASALYKRICGGQKTRKKQAIIAVARKLLVRCWVLLRKQEPWDDAKALPQVTVA

SEQ ID NO: 68886 - protein, 298 aa, unidentified
MSGQEVYVGVDVSKERLDIAVRPSGEFFSEANDKRAVSRLVKRLTALDCTRLVVEATGGYETVMVAALCAAGLPVVVVNPRWVRDFAKGIGWLEKTDRIDAKLLALYAERAELKVQHLPDEATRQLRELCARRLDLLEMIDTERNRLEHTTSAVRREIASHIDYLRKRLKRIERDIDGAVRGSQLWRHQDQLMDSVPGVGPTLRACALAWLPELGQLNRGEAGKLVGVAPLPDDSGKTRGYRRIAGGRGPLRKVLFMATMGGDAAQSSSACLLRWPPRPGQATQGRPSGDHAQAAADS

SEQ ID NO: 68887 - protein, 350 aa, unidentified
MPGAEPAYEEGPIAMNGSTGRWVGIDVAKGKLDVALLDENDKVKSHVFANDAKGHAALIAWLNQRGCAPGQARVCMEATGCYSETIATALVDAGWHVSVVNPARVKGFAQSELLRNKTDRADAALLARFGQALQPEPWAAPPLEVRQLRAMVERLQSLKEMHQQEVNRLEGAMNQTGMRDSIESHLQWLQQSIRQLERQIDDHIDGHPGLREDARLITSIPGVGNTTAAKVMAYLGDVRRFKNAKALAAFIGVTPRLKLSGSSVRGRSMISRSGHAQLRRSLYMPALVALKHNPIIKAFGARMKATGLAPKAVVAASMHKLVHLIYGILKSSTPFNANFLAASLDIQDGI

SEQ ID NO: 68888 - protein, 358 aa, unidentified
MKIVGCDFHPSWQQVAVFDPETGELTELKLVNGDGAAERFYRELDSPALVGIEACGNSQWFIELLERLGHLVWVGDAAQIRASYVRRQKTDRRDAGHILKLLIEDRFPRLWVPSAEQRDLRQLLVHRHKLVEIRTRVKNGLQHLALNRGVQKKSALWSVRGRAYLEKLPLVGWTARRREDLLRLLAELDRHLVELDQAAQQAAEEHPQARLLMTQPGVGPITSLAFVLTIGDVSRFQHSNQVASYLGLIPREHSSGGKQRLGAISKQGNRFMRQLLVEAVQTVNRLDEGFRKEYAARCHHKPKGVAKVAAARKLAVRLYWMLKQNVGYPEIAHIESSSRVPLVGSGQTDGLIERSRIR

SEQ ID NO: 68889 - protein, 392 aa, unidentified
MIFVGIDVAKDKHNCFITNSDGEVLFHSFSITNNLSGFTELYQTILSVMNDVDKVKVGLEATGHYSYNLLGYLLDKGFPTYIINPLHTNLYRKSLSLRLTKTDKVDARTIASMLMSDVNLKSYSDTSYHNQELKSLTRYRFDKVKERSALKVSISRLICILFPELETLVPTLHMASVYTLLSEFPGASYVASAHLTKLTNLLSKASRGHYGKDTAVLFRETARSSIGSVMPAKSLELKHTIKLIQELTSEIDEIETVIKQIMDEEIQSPILTIPGMSYRMGAMIIAEIGDFHRFDSADKILAYAGMSPSTYQSGQLDNCHSHMEKRGSRYLRYALYNATKYVCHWDKSFGAYLEKKRSEGKHYNVALSHAAKKLVRTIFALERSGQPYKASV

SEQ ID NO: 68890 - protein, 448 aa, unidentified
MFTMHYKRLLTLIDSVSSYLSVGLDVGADFTWMSIALPNGSFIGKPFKIVHSDPRSRDLAVAKIKEAQETYSLKSRCFLESTGIYHIPLLCFLRDKGFDCSVINPIITKNSTNINIRKLHNDKFDSKKAALVGLNVSLKTSILPDDSVVDLRNLVRDYYYFKDLQSAVALKLTAELKVSFPAYAKVFSKVTTQSSLKLLSSYPLAEDMLAASKDDIVKIIRNTARFGEAYALRKYDAIIAAAQDTAVFGRALPSNAVRIRLYIDTYQEYQKHLDALLKALHETVNRLQDTLIYDQICLLQSLRGIGFLSAVVLIAEMGDFKLFSSPKKLYAYFGLDPAVKQSGKLNGDKVHMSKRGSSLARRVLHMVALNNVKVDKGSGTPVNPVVYDYYTRKCSGKKKTVAMGAVMHKICNIIFAMLRDNKPFEVITPEEHCRRFAAEHPNKIRKAA

SEQ ID NO: 68891 - protein, 410 aa, unidentified
MDVFLERCAGLDVHQASVVCCVLIGAPGRKPQKLLRSFGTTTRDLETLRAWLAEHGVTHVGMESTGVYWKPVYAVLEGHVDLTVGNAHHIKNVPGRKTDVKDAEWIAQLVRHGLVAKSFVPPPAIRDLREMVRHRRTLIETRTATRNRVLKLLEGANIKLSGVASDVFGVSGMAMLEALAAGTTDAAEMAALARGRMRRKHAALEAALEGRMREHQCFLLGMHLRNLKAIDQDLDAIDARIGTQLEPYQAQHRLLTQIPGVDWVTAASIIAEIGTDMDVFASARRLAAWAGVAPGNYESAGKPKGAGTRRGNVFLKSALFAAASAAVRTKGSYYRDKYNRLRARRGPVRAIMAVAHKLLIAAFHMLSTGEAFRDLGEGYLDQVARKRSTTKLVQRLSNLGYDVMLVPKAA

SEQ ID NO: 68892 - protein, 347 aa, unidentified
MAIVGGFDIHRRQVTFDYVDTVTGQVRRGRIAPACRETLRQWLERFAGVEDVTFAVEGCTGWRFVVEELQRARITVLLAEPAETAERRGPKRRAKTDKTDARHLRVLVAEGRVPCSWVPPEHVCELRALLQLYADLRQEHVAWAQRIHATLFHLGAPSLAGQLSDPQIRARLAAQGIAMGLSPAGAQAVQVAVRMLDRLEAELVPVHAQIVAFARRQPGCKALARELYGAGWLVAAVIWAFLGDTRRFSSSAQAVRHSGLDVTVYSSDGKRAPGHLSHQGPPLLRWALFEAGHQGSRQASPDHRYYADVAARIDNNRAAISVARKLIRRAHHILRRLGDQAYAPVTA

SEQ ID NO: 68893 - protein, 417 aa, unidentified
MAFTGLDWAKDHHDIVMVDASGRMVLDLRVDDTAEGWCCLRRVLSEKAGPDLSLVGVAIETRSGPVVERLLELGCTVYPLNPKAAGRYRDRKAPSGGKTDRLDAWSFADALRTDGRAWRCLRPEDPLVQELRLVCRDEARLIAQRTALVNQVQEALHEYYPAALRAFDDWTLPAAWAFVEQFPTPADLAEAGRRRWEKFLHTHKLYRRQTYEKRLAVFEEATAFCGGPAVTRAKSRLAVALARQLRTLEAQLKEYRTYIEALFGQHPDHDLFGSLPGLGRKLGPRMLGEVGDDRSRFETPQAMQCYGGSAPVSYESGQIRKVQFRRACNKHLRHALHLWANLSRVDCPWAEAYYQQKRSEGKSHACALRCLAQRWLKILWKMWQTRTPYDERIHLRNQIQHGSWVISLVSQTGLTPG

SEQ ID NO: 68894 - protein, 436 aa, unidentified
MDEVEDEPLFRERVAGIDIGKTTIMVTIRVPSDTRRGRRQQETREFRAVRKDLLALADWLRCWGVTRIGMEATGDYWKPVYFLLEREGFDCVLYHASQVKALPGRPKTDKLDSVWLAKITERGNLPGSFVPPEDIRRLRTHTRYRRHLVQTRTAEKNRCEKLLEDAHLKLSSVISDIHGVSGREMLTAIIAGQRDPKVLAQMARTRMRGKIAQLEEALDCSFFTGQHAFILQMMLANIDHLTAQITELNARIDELCQPYERQIAQLDAIPGFGIITAQDIIGEIGVDMTVFPTAGHLCSWARQAPQVSESAGKRKGKNATGRGNPYLGGTLGEAAANAGRTSTFLGTKYRRLVRHMPKKKAQGAISRSQLVIAYELLSDPDAEYQDLGTDYYEQRANIRREVRSHARAIERRGYRVILEPIDPGLDPDILPITKAS

SEQ ID NO: 68895 - protein, 341 aa, unidentified
MAVAGGLDLHRGQLTFDYVDTGTGESWRGRICPADRESLRGWLRRFHGVPDVEFAVEGCTGWRYVAEELQRAGITPHLAEPAETAGLRGRKRRAKTDWADARHLRDLLLDGRIPESWIPPGHVLEARALVRLYKDLLEERTSWQQRVHATLFHQGIPVVPKLGTADGQQRLEAAELSAAGRRAVQAGLRQIERLTQEMASLRRELARLSSRQPGCRALRKAHYGIGGLLSVAVWAELGDCRRFSSSDDAVRHTGLDITIYDSDGRRARGHIARQGPPVLRWALYEAALYASRPASPDYAYYCGVRDRIDGQRALLSVARKLARRCYHTLRDLGEDALAPAA

SEQ ID NO: 68896 - protein, 419 aa, unidentified
MDVLIERCAGIDIGKDEVVACVRTPAASGRGRQKRTRTFASFTGSLEAMADWFTAEGVTEIAMEATGSYWKPVWYVLEERAFELKLVNAQHVKILPGRKSDVLDAEWLAELLEHGLLRGSFVPPPAIRELRDLTRYRKRLIQAHTSECQRIQKTLEDAGIKLDSVASDVLGVSGRAMLAALVAGERDPDVLAELAKGRLRRKLPALRQALRGRFSEHHALLIGLCLDHTAHLEAAIARLDDRVDTLLANDTGEAGLPFARARDRLDTITGVGKRAAETIIAEIGADMTRFPTAAHLASWAGVAPGNNITGGKRGSGKTTHGDVWLLDILTQCAWAAARTRDTYLSAQFWRLARRIGKKKAAVAVAHSILVICWHLLTNDCDYDDLGGDYFTRRNTDRQRDRLIQQLHTLGYRVTLDKAA

SEQ ID NO: 68897 - protein, 312 aa, unidentified
MAQAVKAAGIDVSKAWLDVAIWPTREEVRVSRDATGFSTLICWLEEHDVTRVGLEASGGYERDPIDALQAAGFEVAMLNPLRVRRFAQAKGRLAKNDHVDARTVAQFTLIMLDRDPVPRRRDLDPLVELLTFRRQLNDWCTDCVNQREHLRDAPLRASVARRLASFRLELAKIDRKLAGLIAANDDWDALARRLRTVPGVGPIVAASLIALLPELGTLSRREIASLVGLAPFDDDSGEHRGERHIKGGRKSVRDALYMAALSARQHNPMIAAFAARLTRKKPKVILVACMRKLLVTLNAMLRDGTDWRLATA

SEQ ID NO: 68898 - protein, 419 aa, unidentified
MAFKILRRNCCGLDVHKTWIFACIGITDANGRTEYKQARFSSFSNGLRELAGWLTKHSCADVCMESTGKYWIPVFNILENTCWVTLAHPKYTKPQEGNKTDRKDAKWICDLYMCGMVKPSFIPPADIRQLRDLMRYQTKLTNMLTSEKNRALNCLTVSNLKLDDVFSNVFGKSSRSIVQHILEHPGEQFDVAPFLDRRCKHSVEDVQAAVDGAISREQAAKLRECLLHIDQLNGHRETIETEILRLAQPYSHQLELLRTVPGFSAAPLTAVALISEIGVDMSVFPSAKHLASWAGCCPRNDQSNNKVKSTRISRAGSYLKPLLVQIANAVIKSDKYPECKERYRRIKARRGHKKAIIAICRMLLTAIWNVLSKLEPYSAKGYLEDKLTEHSVVISKSQGLELLRKRGYIFKDEVSADSG

SEQ ID NO: 68899 - protein, 421 aa, unidentified
MSYTVAAIDIHKKVLMVVVATAANEVEDATGEALEWECRRFGTGNRERMHMVSWLQEWGVTEVVMESTAQYWKPVWLDLEPHFAKLNLAQAHSNRAPKGRKNDFRDAKRLARRLLAGELLLSFVPEPEQRMWRTLTRSKHQLVRDRVRLQNQVEALLEEARIKLSSVISDLLGASGRRILAAWANGQSDPEKLAELGDDHLQCSKEELADALRGSPQPIHVAVLDMFLHRLALLDKQITALDKLAAAQLKKHEAAVLRLARMPGFGVDSAQQMIAEVGESAEAFPTASQFCSWAGVCPGSEESAERNRSSRSPKGNRFVRRILNQAAHAAVKTKGCSLRLTFRRLLPKLGYKGAIWAIAHRLGRLVWKILHDGVDYVERGEASTPSATKRRAQKLAQALRKLGYTVTLTPIVPQQPPDAQV

SEQ ID NO: 68900 - protein, 343 aa, unidentified
MHVSTIGVDLAKNVFQVHGVDSEGKVVITRQLRRKQVIEFFSKIPACLVGMEACGTAHHWAREISKLGHTVRLMPPSYVKGYVKRSKNDAADAAAICEAVTRPSMRFVSIKSTDQQALLMLHRTRDLLIRQRTQLINALRAHLAEFGLVAETGREGLAQLAEIVTDESNRDALPPAMKQALQAIIDQLAALELQIGALDRAIHAHHRVNDMSCRLETVPGIGVIGATAIASTVTDPSNFKSGRDFAAWVGLVPRQHSTGGKERLGGISKQGDRYLRRLLVSGATAVVRNARQHPQKHPWIMRLLARKPAKLVAVAVANKMARIAWAIMAKGGYYRAPELAAAA

SEQ ID NO: 68901 - protein, 394 aa, unidentified
MCPTSARRVDNNSVDCSPLYVAFELGDRHWTLGFTVGVGQRPRRRVIRARALDALWPELAQAKQRFGLAPDAPVRSCYEAGLDGFWLHRALRAHGVANLVVDASSIEVNRRARRVKADALDVAKLAEMLVRYHAGEQRVWHVVRVPSVADEDRRHLERERATRVQEHTRLVNRIRGLLATQGLVLPVRGDGPAALARVRLWDGRPLPPGLHARLLREWERVERVAAEVRALEAARRALLTGSRAAPEAEAETAARAWAQQLLKLRAIGPTIAWAFSTELFAWRQFHNRREVGAVLGMVPTPYQSGTSHHEQGISRSGNARLRGLAVELAWMWLRYQPQSALSQWYTQRFAGGGPRLRRIGIVALARKLVIALWRYGQDGQLPAGALLKPAGVCA

SEQ ID NO: 68902 - protein, 578 aa, unidentified
MECEQRVLKHGVSLCVFLAVQISNVAIKFSLQFLDVFSFLWSAMRRSRTEERLGTQCAATFDGNILQPFGHAQYWFLHRSFAWNEANSEVRARSHARSERDLLSPVCTPCRKVGEVRHQWKRAIGSCDRNNGLVRVREKHIVGAVLRPISLLGHRQDASFAVVRTLRCMPGFYRHSITVVNRWDEKAGLRRDAVRSQVIDVLEAQEIRRPAMKKVSTVAVKESRNISQPKLTIGLDLGDRNSWYCMVDEAGQIRLEQRVRTNAKALQEVFGAMPRRRIALETGTHSPWISRLLHGLGHEVIVANARRVRLIGESRKKDDRLDAQTLARLARIDPKLLSPVKHRSAQAQADLTVIRARAGLVRSRTALVNTVRGLAKSYGERLRGCNVRNMNPEKAEGLSPELQAALQPLLVALESLSEQIAEYNEGIEKLAQESYPQVALLKQIKGVGTLIALTFLLTLEDPHRFRKSRDVGCYLGLQPGRRNSGQSEPQMHVSKEGDSYLRTLLVQGAQHILGPFGIDCDLRRWGLKLAERGGRSGKKRAIVATARKLAVLLHHLWVSGEVYGPLHNSQRRPLTIAA

SEQ ID NO: 68903 - protein, 414 aa, unidentified
MSEASSPMPAPAALAYVVGIDIGMESCMMCCLTMEKRQVIKPSQFSNDAAGFEWLFTHLEQMKSAPQQILVGLEATSRYGENLYHALVKRGYRVCLLHPGQIHAFAQQRGLRAKTDRLDATTIARALLSGEVRFGYVPSEEVATYREVVRLQQQLTEDIVRYKNEMHALVVVLFPEFYQVFADPSRPSALTVLRAYPSAQAMREADPKVLSQLLREECPGHYGRQTAQKLVRLAQGSVSSGLATQARSSSLRILCDQLSHTQSNLHLLQHEIERLLDQDPRAKGVLAISEMGPLTVAVLRAELGDLDRFARIDQVVASAGLDLQVKQSGKWKGQTKLSKRGSGRLRRILYLAALRSIRLPTSAFGIYYHRLVHRGMKKGMAVVAVMRKLLIVAAHLIQTQQDYDAGKVGRQALS

SEQ ID NO: 68904 - protein, 422 aa, unidentified
MLEATSDREEIIERVAALDIGKAEQVCCVRVPGAEGKSRRVQEVTTYPTMTRALLGMVDRLTELEVTRVVMEATSDYWKPPFYLLEAAGFETWLVNAKDVKHLPGRPKTDKLDPVWLCKLAERQMLRPSFVPPPPIRVLRDLARYRADLIGVRTAEKQRVEKLLEDAQIKLSVVATDIFGVSGRQMLAALIAGQRDPQILAQYARGRLRGKLAALEEAFTGRFNDHHGFLLSKMLARIDQVSADLDDLDAAIEGEVAPFAQAAARLDEIPGIGHDTACVILSEIGMDMSRFPTAAHLCSWARFAPGVKESAGRRKGNGTTGHGNSYLARVLGEAAVSAGRTDTFLGERYRRIARRRGKKKAIVAVGRSILVIIWHLLGDDQARFHDLGADFYDTRAGTEHAKRNHIRQLQALGYRVTLEPAA

SEQ ID NO: 68905 - protein, 334 aa, unidentified
MENIALIGIDLGKNSFHIHCQDRRGKAVYRKKFTRPKLIEFLATCPATTIAMETCGGSHFMARKLEELGHSPKLISPQFVRPFVKSNKNDFVDAEAICEAASRPSMRFVQPRTESQQAMRALHRVRESLVQDKVKTTNQMHAFLLEFGISVPRGAAVISRLSTILEDNSLPLYLSQLLLKLQQHYHYLVEQIKDLESQLKRKLDEDEVGQRLLSIPCVGTLTASTISTEIGDGKQYASSRDFAAATGLVPRQYSTGGRTTLLGISKRGNKKIRTLLVQCARVFIQKLEHQSGKLADWVRDLLCRKSNFVVTCALANKLARIAWALTARQQTYVA

SEQ ID NO: 68906 - protein, 376 aa, unidentified
MNYSTVYVGMDVHKETFSLCCYTNEKEEAEYPQKVKGHYSKVLNYIEAMRFHYGDDALFICGYEAGCLGFTLYHQLMSHGIKCIILAPTTMLQPKGKKKIKTDKRDAALIARCLAHRDYRPVHVPTEQDEQTKEYIRMRDDHKQALKKVKQQILAFCLRHNYRYDGTCNNWTQAHLKWLRALQMEDLYQETLKEYMLTYDQLVEKLERLDKRIEELASNETYKEKVSKLSCFIGVKAVTALAIVTEVGDFNRFASAQQFSSYLGLTPGENTSADDQNRLSITKAGNRHVRLLLVEAAQSLARGQVGFKSKALKTRQAGNLPEVIAYADKANERLRRRYYRMVLHNNKKPNVAKTAIARELACFMWGMLTGKIAALP

SEQ ID NO: 68907 - protein, 347 aa, unidentified
MQFYTKNHPYYCGIDLHARSLYVCIINHDGEICIHQEIKASPEHLMRILEPYIGNIIVGVECMHCWYWVADWCEDNAVDFILGHALYMKAIHGGKAKTDKIDSFKIAKLLRGGTFPVAYHYPKSMRATRDLLRRRMKIIRHGAMLKAHVSNTLSQYNLPAHGTNLRYSQAREALRETFDDKYVQANINLDLNLVEHYDKELRQIEKQVENHAIKHFYREYHLLKSIKGVGKILALTILYEIGDIQRFDSVQKFASYSRLVKCKAESAGKIYGTSGAKIGNAHLKWAFSEACVLYLRGNDDAQRYLAKLQRRMPKSKALSVLAHKLGRCVYFMLRNKTLFNEDQFMKR

SEQ ID NO: 68908 - protein, 361 aa, unidentified
MRIIGVDLHARQQTIAMLDTETGELVEKTLQHEAEKVREFYSALPGPVWVGIEATGSMQWFLKLMEDLGIDCQVGNPAKIRAAEPRQQKHDRRDAALLLKLQVENRFPSIWMPSTELRDLRALLKHRHQWVRMRTRVQNALQAIALSHGLRRGKSLWSQTGQHAITSLPLAPHTAHRRTELQALYRQLDEQIGKLEERITDQVWQHPGARRLMTHPGVGPITALATEVFLGDPARFTDGKTLASYVGMIPSEYSSGGQQRLGGLSKQGNPLLRFLWCEAAIHAVRRDPELKRFYRRKLQQKGLGKARVAAARKLGIRLWIMLRDQIDYQEFCRRGRMRQKSGGARAGMPDTAHGAKPSPTE

SEQ ID NO: 68909 - protein, 367 aa, unidentified
MKKISTTRGKAIRKMQPEKLTIGLDLGDRSSWYCVLDEKGELILEQKLSTTPKAMEEVFGGMPRSRIALETGTHSPWVSRRLSEVGHQVIVAHARNVRLIGESRRKDDRLDAKTLARLARIDPQLLCPVRHRSAKAQAHLTVIRARAGLVRARTALVNVARGVTKSYGERLRRCSPRNLNPEKAEDLSPELQTALEPLLQEIESLSVRISEYDQRIECIAREHYPETALLKQVKGVGTLVALTYILTLEDPHRFQKSRDAGCYAGLQPGRRNSGQSEPQLRISKEGDAYLRGLLVQSAHHILGRFGADSDLRRWGLKLAERGGKNGKKRAIVATARKLAVLLHRLWVSGEVYEPFYTSNRRRLVAAA

SEQ ID NO: 68910 - protein, 446 aa, unidentified
MSDRSGLSRGDRNRNARLARLRQLLPFDHAIVGIDLADDKQAAVVTDHDSRVIARRRVSARAWELGDLLDWAVAKAFAAGFASVTVACEPTGHRWRVLDQLAAGRGLALVCVQPLLVYRSREGEDLTRDKSDPKDAVLIARLAGELRCYEPERADAVWARLRHLGARRRQLTTDATAQVNQIRDLLECAWPAVLGASGSPFRSTTWCAALAVVLDRCAGDLSRVVRLGPARFEGAVRRELPRWGAVRPCLRIVRAACAALRDPAGVMVHRPGALERAHLALGDWRDTCARLAGAEARMVAVLDDLGLTALVTTIAGLTPVGAAAILAETGDPARFASPRSLVKHAGLCPRDNASGEHQGKTSISGRGRPGLRLAAWRAVWAAMPNNPVMAARFTHLTTRQDNRLARQQARTACAAALLRWIHVVVTRRVTWDPAIAAGGTSLQHAA

SEQ ID NO: 68911 - protein, 340 aa, unidentified
MTITTVGIDLAKNVFAVHCVDQHGKTVLVKPKVSRAALPELIASLPPCVIGMEACSGAHYWARLFRQYGHEPRLMAAKFVSPYRMAGKSGKNDAADAQAICEAVRRPHMRFVPVKDESQQAMQCLHRTRQGFIEEKTAAYNRLRGLISEFGVIASQSTDALRHMVSQQKSSLPLQVQQCVNDLLEHIDRIEDNITEYDRILSRMAKTDHRSQRLMELKGIGPTTACALVASIGNAHDFKNGRQLAAWLGLTPSQYSSGGKSKLGRITKAGDSYLRTLLVQGARSVLIGAEKKTDSFSRWVCSLVERRGYWRAVVAIAAKNARLCWASLHYGDDFRLYSAS

SEQ ID NO: 68912 - protein, 470 aa, unidentified
MTHNRRRSPGKPRVSPTVLDRINPNVAGIDCGAAEHFVAVPPDRDGTPVQAFQTFTGDLVRLAEWLTACRVQSVAMEATGVYWIPIYEILEARGFEVLLVNARHLKNVPGRKSDVSDCEWIRELHSVGLLRGSFRPPDALVALRAYLRHRQTLIESAGTYVQRMQKALIQMNLQLPVVISDITGVTGLRILRDIVAGQRDPAQLAQHRDHRCRASKAEVMAALSGHYRPEHLFVLQQNLELFDACQARLAACDLAIELHVRTLVADVVPPDAPLPAPRVTRKPRENEPRFEIRTPLHHLTGGIDLTQIDGITPYTALKLISEIGTDMTRWPSDKHFTSWLTLAPKNKISGGRLLSSRTQPSANRAAAILRMTVMSLGRTDTALGAFYRRLAARIGKPQAITAAARKLAILVYRALKGQLIYRDVGAAIYDIQQRTRLLRRLRRQAASLGFELVNRAPGELLPGNAAQSAP

SEQ ID NO: 68913 - protein, 347 aa, unidentified
MKRIAVDLAKSVYQVAESVRAGEVAQRKRLNREAFGRYVQEQAEAVEWVMEACGTAHYWGRVMQVRGHKVLLLHPRYVRPYRRRNKTDRNDCDAILEAARCRGIHPVPVKSLEQQQLQQLHNLRETWKRSRVQRINLLRGIFREMGIEVPASTAAFLRAACELLERPEVSALRGALQVMLGEINLYEQSMQECEAQLARWHAEDEVVRKLDEVSGIGLLTASALKTAVGNPERFANGRQLSAWLGMTPREHSSGERRHLGHISRQGNVYVRTLLIHGSRAALLAAQRCQARTPERMTALQRWATHTAARIGPNKAAVALANKLVRICWAVWCHQRRFSGNWQSMPPA

SEQ ID NO: 68914 - protein, 350 aa, unidentified
MIIIGCDYHPGFQQIAFVDTDTGEWNERKLGHREEAEQFYRQLKVRGKKVRVGMEASGHARWFERLLTEVQFELWIGDAAEIRTKRVRKQKTDRQDAELLLRLLIEDRFPRIWVADGENRDLRQLLWHRHRLVQMRTRIMNQLHVLALNEGVRRKKALWRPAGRAQLQSLVLARWASRRRQDLLELLDQLTPKIQELTRALEQEVEKRPVARRLMTHPGVGPLTALAFELVIGTPERFGCGKQIASYVGLVPSEESSGDRRRLGHISKQGNSLLRFLLVEAAQVTVRTDPDWRRRFLHLAMRRERRIAKVAMARKLAVRLYWMWRKEWDYEQMRKFGSHVGEPGNRQGAS

SEQ ID NO: 68915 - protein, 393 aa, unidentified
MHSVGIDIGKRQHVAAICRAGQRTADKPVLRFSGDRAGFIELERWLERHGPIDRVVMESSGHYWLPLAAALHRASVPVAIVNPVSAKAFGTRRLQRVKSDPADARTLAALGMADQPRIREPLAGAELREAARFAMHLVEDQSRIDNKICRLIELGFPELGQAYDDPTCTSALAVLRLAPTAQAVARKRVTTLADANRGAGHRAVGTTQAERISALAKDTIAPPELAAQIGFEMGLLIAQHDLLEQHIAQAEARVASLLDGALARRLQTIPGVGPAICATLIAEIGDIQRFADFDKLVAYVGVHPAEKSSGQKGGPETSWRMAKTGNAYVRAALYRMSVVGLQHNPTIKAHYARKRAQGKSKMNALGHCMKKSLAIVWGIWRGDHDFTPEPPIA

SEQ ID NO: 68916 - protein, 371 aa, unidentified
MADIDGVAGIDAHKHTFTVAVLDARGGRCGIESFPTAPDGLTDMLALLDSFGFAIGRIGVEGSAGLGRHVAAFLVAAGYDVREVQANRTAERRRRRRRHKTDREDAEAIARETLADAGLPPAGKRRRPDPCWEELVAVRNRRKSLINQRVRLLNEAEAVLTSLPLTIRAVLPPTSRVRPRLRALDRGAASSIQITAADRVNLAWLVEAAADIARLDARVTELDHKIPALLVRLGCTLTDEYGIAAVGAMELLVEVGDPTRFATEAQFARWCGTAPVAVSSGEGDQAPTHHRLDLAGNRQVNSTLHLMHVTQVRSYPPARDYIAKKRAEHKTKREARRAHKRQLANVVIRRMWADHTQRFETVADQATPAAA

SEQ ID NO: 68917 - protein, 450 aa, unidentified
MSPLALDVVTKTGKTPVLGRMLSKYVGRKTSSIENDITKARNHLRQRGKIMRVVFGIDVSKASSEVAILVNGEKIHGYTIPNDAIGFNRLLEDLGTVYQPEIVFEATGVYSRRLQAFFEDNSYAYIRLNPLESKKQLDSLRVRKTDKIDAEKLATSQFILNRKPSYVQEALYQELRDPSRFYQNLTEDIVCSKNRLHKVLQVTFPELENILSSPTGKQYWNLVMAFPCNSFVLELDDAALRAIIRQSTSKHISENRVTYLVDKLTKLANHSYCAVKKTSPMMEEVKYYAGELLRLSEYRQSVLEKMITLAQPLPEYEILLSIPGIAETTATSIIGELGDIRRFHSANQINAFIGIDLRHYESGDFLAKEHITKRGNPYARKILFKCIHNIASASHTNPCHIADFYEKRKRQSQVTSTKPHTIASIHRLIRTMYYLITHNKLYDYTSTQNR

SEQ ID NO: 68918 - protein, 400 aa, unidentified
MDEAQTAWAGIDVGKTHHWVCVLDAEGKKLLSMKVANDQTAITATIATVGALADHIAWAIDIIGAPSAMLLAILIQSGQSVRYASGRVVAAMSAAYSGEGKTDAKDAYVIAETARIRRDLTVIDPGTDLVRNLGLLIGHRADLIADRVRMINRLRDVMTSVFPSLEREFDYSSCKGALVLLTGYASPERLHRIGETRLAGWLQRRRVRNYATVAARAIGAARAQSITLPSQEIAAGIIAELATNTLALDQRLTELDAQIAATLNEHPQAEIIQSMPGFGPILGAALLVAAGDLAAFPSAGHLAAAAGLVPVPNDSGRRTGNLHKPRRYSRPLRHVFYLSAQTSMMRAGPNRDYYLKKRAHGRTHTQAVIALARRRIDVLWALLRDERTYTAMPPTLAQAA

SEQ ID NO: 68919 - protein, 343 aa, unidentified
MTNITTIGLDTAKSVFQVHGVDAHGEVVLRRKLKRRQVLAFFAKLPPGLVGIEACGASHYWSRELTKVGHTVRLIPPRYVKPYVKSQKNDATDAEAICEAVTRPNMRFVPTKTSEQQSILMLHRTRHLLVRQRTATINAIRSHLAEFGIVAGVGRNGVEALLKVIADEQDDRVPAVARDCLMALGAQLEMLKRQAHELDAKILATHRNNELSRRLEAIPGVGPCIATALIASIPDPRTFRSGRQMAAWIGLVPKQNSSGGKDRLGGITKAGDRYLRSLLMLGALSVIKRAQQLRYTRRPWLAQLMARRPVKVAAIALANKIIRMVWAMMVRGENYREPVALAA

SEQ ID NO: 68920 - protein, 330 aa, unidentified
MGFRYFLGVDVAKAKLDCLLLDAVEQRRRSKVVANTPEGFEQLVKWLTKQGVGCQQVHAVLEPTGVYHERALFALSQAGIAVSLVNPAQLRRFAQGLGIHTKTDACDSAVLARFGEMIKPAHWQPAPSKARALRALLARRDVVAQDLQRERNRCEALVIEDTPERVRQSLTDTITFLEQELQALQKSIDEHIDDDPDLKRIWDLLQSIPGVGQRVADHFTALLAGRDFKSAEQLAAYLGLVPIEWQSGTSIKGRPRMSKAGPASLRQLLYMPAVVATRHNPHVKALYQRLLAKGKAKMSALGAAMHKLAQLCFGVVHTGQPYRADWPGRA

SEQ ID NO: 68921 - protein, 465 aa, unidentified
MPRPRRRPSIKPRTSPAALERLHPSAAGIDCGSAEHYVAVPPDRDPMPVQCFATFTAGLHRLADWLAACRITHVAMEATGVYWIPVFEILEARGFDVILVNARHVKNVPGRKTDVTDCEWLRDLHILGLLRGSFRPADAIVALRGYLRHRATLVESTSMLVQRMQKALVQMNVQLTLVVTDITGLTGLRILRDIAAGIHDPRQLAHHRDPRCRASPDEIVAALHGHYRPEHVFALQQNLALFDTYQQQVAACDAVLETHLAHLAAQASKATTPLPSPRRRQKPQNNEPRFDLRGPLHQLTGTDLSQLDGIGPYTALRLLSEIGTDMSRWPTEKHFTSWLTLAPCNKISGGRLLRSRTPPSANRAAAMLRLAVMNLGRTDTALGAFYRRLSARIGKAKAITATARKLAVLVYRVLKGELVYADPGADAYEAQHRTRVLRRLRHRAENLGFALVALTTGEVLGPTVS

SEQ ID NO: 68922 - protein, 316 aa, unidentified
MPRKRILVKSIDTSISYQVIGIDLAKHLVSACLITGAGEIFGIDRLTYDDLLKSAERMSPTLFCMEPCPEVHYLAEKLQGYGHHTKVIDGAAVKEYIKTHFGGQKTDLNDAQAIAFLSLDTNLPEITPKNTSNSVLSSIQAVREQFRKEYIQSFVSLKGICQRWGLPISKGVMNKNKVEELVSESKKIPQEVKDWLLELLQSCRELQKRLNKISKYLKEYADNDEICQKIMSVPGIGPITATRLKATIGDIQRFEKPKSIVAYYGLVPKSKATGQNEKKRRHNSSRRSSCPFSSDRGCGSSFEFGSKRIPKIKASQ

SEQ ID NO: 68923 - protein, 464 aa, unidentified
MSMTLGIDVACRAAHQAALAIEGKVVWSGRKFFTRPQDLERLWADLDLADPAKLTVVVEPTRNAWIVVAAWFRRRGARVVMVPTTQSSDLRAYYFKHTKNDRLDSALLARLPLLHPEGLREFTGDGPADPLRRLVKQRSSIVKRRTAVYARLDALIELLGPAWYDVLGSSYGKCALELLVRYGDPDTLIRLGGARLTRFLVRYSRGFWREDHAARLIAAARESLTLWGPHGIDFAELAADIATEAEQAQVLTRQIADLDERIANLYTEADPEGFIGSAPGIGPVTGAIIAGRIGDPHRFTSLAAIRAYSGLVPKLNQSGTANPVQGITKAGDPLLREAIWAAADAARKVDPQLGAKYARLMATDRHHDSALCHIASVLLTRIATCWRTGEHYLLRDTDGRIITEAEGRQIVRDRYKVDPKTRDTAAHRRQAQRHKERTSREHKKSQSAPASRPVTTIIKDPEVA

SEQ ID NO: 68924 - protein, 407 aa, unidentified
MRVVYQSCAGLDVHKKTVVACVVTPQGSQIRTFSTMTKDLLAMADWLHELGCEAVAMESTGVYWKPIYNLLEATDLKLMVVNAQHIKAVPGRKTDVRDAEWIAELLQHGLLRASFIPDRPHRELRELVRYRRSLVQERTREVSRLEKSLQGANIKLSSVASDVLGRSGRDMLAAIIEGIEDPVELAALARGKLKEKTDQLQQALRGLIGPHQRFLLQEQVSHIEEIEARIARLDTEIEARLSPFEAILQRLETIPGVGRRIAQDILAEIGTDMSRFPTHRHLAAWAKVCPGNNRTAGKAKPEHVGRGNRWLRATLVEAAWAAARSKDTVLSAQHRRLASRIGAKRAAMAVAHSILVIAYHPRKDQTDYQELGASFYDKRSSKATARRLTQRLEELGFLVFLQEKEAA

SEQ ID NO: 68925 - protein, 353 aa, unidentified
MNNIKYVGMDVHKSITVIVVLNELGQFESRSKIKTKGENICDFFRGISGKVEVVFEEGTHSAWLYKLLKPLVASVTVCDPRHNKLIEDGNKSDDEDAETLAQLLRLGAVKAVYKGDDQRQQLKESCRAYDNLIGDSTKGQNRLKAIYRGRGISCSGHDLYRADQRSDWLAKLGEEAARFRAQSLLEQLESLSQLRKQAKQRLLAQAQTHADYRILIKLPGFGPVRVAQLMAVVGTPHRFRTKRQFWPYCGYAVVTRSSADYQFVEGKIVKQRKKVSTCGLNRNHNPQLKQVFKGAALTALRHEAIKAYYQRLIDHGTRPELARVSIARKLASIALTVWQRREEFDVKKAFAQD

SEQ ID NO: 68926 - protein, 422 aa, unidentified
MKQLLIEESFVAFIGIDWADAKHDLCLQTADCENRESSILEHTPEAISAWARGLRRRFGGKPVAICLELNKGPLVHALSQYDFMVLFPVNPLMVARFREAFATSGAKDDPSDAQLQLELLRKHRDRLKPLEPASPALRALAQLVEHRRRLVADKVRLNNRISSVLKNYFPQVLVWFKDRDTELFCDFLTRWPTLQAVQRARPATLERFFHTHHVRSAKLIQQRIAGIKAATALTRDEALIAPNALLMQALVAQLRVVMTAIETFDQDIASSARHHPDFALFEALPGAGPALAPRLLVAFGEDRERYTSAADLQKYAGIAPVLERSGNQYSVHWRWRCPKFLRQTFVEWSGKSIQHSFWARAYYEQQRARGKSHQAVVRALAFKWIRILYRCWQDRRPYDESVYLRALQRRGSPLLKHLADAS

SEQ ID NO: 68927 - protein, 318 aa, unidentified
MQNVAKTYVGVDVSKEHLDVYLYPQNKKLRVENSKSGLRKLNAKLNKLDVAKVMLEASGGYEHLAIVSLHERYPVYRANPKRIRSFRDAKGTKAKNDPIDARIIAEFAANDCSKNLPQVNIKDIHLKRLFHRKQALKTVTSSEKMRLEKEIDLEIRREIVSHIKNLEKRIKKYDEKINEIIKADKELSEKKTILESMPGIGNETAQGIIAALPEAGNTDSPQLSSLTGLAPQTNESGQFVGRARINNGRRLPRRLLYMAALTAVRFNPRLKEFYERLRKKGKPYKVAIVAVMRKMLTILNVMLNKNEMWKLKPEVNSF

SEQ ID NO: 68928 - protein, 410 aa, unidentified
MVIWLTHIQGRQNDRIQRLRIRPVFIGVDVGKDTHHAVAINRSGKRLFDKALPNDENKLRSLISDLKQHGQILLVVDQPATIGALPVAVARSEGVLVGYLPGLAMRRIADLHAGEAKTDARDAAIIAEAARTLPHALRTLKLADEQIAELSMLCGFDDDLAAQTTQASNRIRGLLTQIHPALERVLGPRLEHPAVLDLLQRYPSPEKLASLGEKKLAAQLCKLAPRLGKRLAADIAQALAEQTVVVPGTNAAAVVLPRLALQLITLRKQRDEVALEVEQRVLAHPLYPVLTSMPGVGVRTAARLLTEVACRAFASAAHLAAYAGLAPVTRRAGSSIRGEHPSRRGNKALKRALFLSAFAALRDPLSRAYYTRKMSQGKRHNQVLIAPARRRCDVLFAMMRDGTFYTPQGS

SEQ ID NO: 68929 - protein, 436 aa, unidentified
MRGCRCSMIMGFTKPIEHFNLQRKKVITMNTLYVGIDVSSKSNVVYLMLPNGDKHSNFSVANSHEGSTLLVKKIYSALTSHSLDTVLIGLEATSVYGDNLVYFLREDATLAPFNRKIHVLNPKQVKKFHDTYNDLPKNDYVDSFVIADCLRFGRINKEVYMGEYRYKALQNLTRARFFAVQNLVKEKQRFMNVLFKKYSTMTQEKVFSDDFSTTALAVYDEFESAEALANMDLHELTDFIIEKGKNRFPDPDAVAKAIQKAARSSYRLPKTVNDSVNQVLSISITSMKALESQIKEFDKAIKALMELLPNVLISIPGIGPVYSAGIMAEIGDINRFDNQASLAKYAGLAWKQHQSGGFEAEVTRLIPSGNRFLKYYLCEAAFSLVRCDKEYSDFYHLKYKEVNRCQHKRALALTARKFVRLVFRLLKDNRLYCPAK

SEQ ID NO: 68930 - protein, 410 aa, unidentified
MQVLYPCCWGLDVHKKFVVACLITTTAEGQVHKETRTFSTMTQDLLALLDWLHATGCTHIALESTGSYWRPVYNLLEGQFTLLVGNAQPMKTVPGRKTEVKDAEWIADLLRHGLIRGSFIPAPAQRELRDLTRYRTHVVEERARLTNRLQVVLEDAHVKLASVVTAIRGASARAILAALVAGETEPTVLAELARGRMRSKRELLAQAVVGRFTAHHAFLITEHLSQLDYLEEAMERVSAEIGRRLAAEQEALELLDTIPGVGQRAAEIILAEIGTELARFPSAKHLASWAGMCPGNKESGGKRLSGKTRKGNPWLRHVLIEVAHAASKSKDTYLAAQYRRLATRRGQQRALVALGHSSLVMVYHILSRRVPYRELGPLYFDARNRQRVQQRLVQRLERLGYSVNLQPVAA

SEQ ID NO: 68931 - protein, 453 aa, unidentified
MKKKTEKNSVVKMGTGLPVFNHHAAGIDIGDTMHCVAISDGLGGHEVKTTSAFTCDLHEIVDYLKINGITTAAMESTGVYWLALYLLLEEAGIEPYLVNASHVKNVTGRKKDDTDAIWIQKLHTCGLLQKSFQPDNEIRSLRDYTRQRKNLILLSSDAVRRIQKALELMNLKIHTVISDILGKTGMCMVKAILAGERNPAVLSLLCDPRIKASEEDIIKSLAGIWKEEYLFMLEQAVENYEFHQAQIKSCEAKIQTQLLKQVAMVNQGDITCLEENSKKKTKPKGKKNQFDFSVSPYLKAITGVDLCQIPGISDVTALEFVAEVGVDMSKWKSAKHFAAWLNLTPNTKITGGKIVSSKLMKKRNKAGQYLRQAASTLSTNKTPIGDYHRRMRGKLGGRGATLNTAHKLARIIYTMLLNKTEYNVMMVNENHENYKQDKIMKLEKQIERLKKAS

SEQ ID NO: 68932 - protein, 360 aa, unidentified
MLYLGIDQHRKQLTVSVRNESGDVVLRRQVSTQWERIRAFFEELRQLAQPAGGFVAIVEVCGFNDWLLKMLTAYGCRETVLIQVEKRSKKKTDRRDAYQLSGLLWVNRHRLLAGHRVEGVRRVQPPAEPEAKERQLTAVRQRMGRHRTRTINKIKHLLRKHNLEQEQPAKGLDTKRTRKWLSSLPLGPIDRLELDLLLAQWTLWDEQIAKLELEIEKRQAKNATAAVVATIPGCAAYGSLALASRIGSIERFPRPASLANYWGLTPGCRNSGEATDRLGSITKQGSAMARFVLGHMVLHVLRRDGRMKAWYGRIKRRRGSKIARVAVMRRLATVIWHMVKHHEPYMIGGPPRRQLAIRAA

SEQ ID NO: 68933 - protein, 341 aa, unidentified
MNHYAGIDVSLECSSICVVDANGKIVREGKVASEPEALIAWLRSAGLSLARIGLEAGPLSQWLYAGMQEAGLAVELLETRHVRDAFKAMPVKSDRNDARGIAQLMRLGWFRPVHCKSKTAQETRALLTARKLVQSKLRDIEASLRGTLRGFGLKVGATTPRRFAARIKELVAGHPTLEVVAEALLAAHAVLLREFNGFERRMRTMARHDAKAQLLMSTPGVGAIVGLTVASAIDDPARFKSSKQVGAHFGMTPKKYQSGETDYTGRISKNGDKGVRTALFEAAHVILTRPVKGSALKSWAMRLAKRAGMKKAKVALARKLAVIMHRMLVDGTTFDFAAAAA

SEQ ID NO: 68934 - protein, 405 aa, unidentified
MGRVFVGHDWAEDHHDVFVLDGAGRRVDGGRLVEGIEGVARFHAMVAGHVEDPGEVVVATETDRGLFVGSLIAAGYTVLAVNPMSVARYRERHSTSGAKSDPGDARVLADLARTDAHHHRPVAGDSELAEAIKVLARSHQSLIWTRQRQLNQLRSTLREFYPAALDAFDQLGHPDALAVLAVAPTPSLGRGLSRSKIAGALRRGGRQRRVDERAAQIQAALRSEQLAAPDPVADAMGSTVTALVAVATELSAQIDRLETELADRFEQHPDAKIIRSLPGLGMTLGARVLAEFGDDPNRYADTKSRKNYAGTSPITRASGKTHVVLARYARNRRLADACYLWAFAALSASPGARALYDQRRARGDTHSRALRALANRLVGILHGCLRHHTPYDEHTAWAHRTQLAA

SEQ ID NO: 68935 - protein, 390 aa, unidentified
MTCTDHPLPAPTAARSDDSTLFAALELSRKSWLVATNAPGEEKVSKRTIAAGDGRALLDLLAGLREKAERRIGKPVKVVVIQEAGLDGFWLHRLLEANGIESHVVDPASIAVDRRKRRCKTDALDVDALLRTLMAWARGERRVCSMVRPPSPQEEDHRRLSREREALVKERIQHTNRIKGLLAAQGITDFEPLRPGHRARLDGLTTGDGRPLPPRLKEEIRRQLARLDAVVTDLKAVEAGRDALLADDAVATAGGTPPAAAALSRLKGLGPEFVSILCLELLFRSFNNRREVAAYAGLTPSPFKSGGIDREQGIAKSGNPRLRKMMIQLAWMWIRYQPGSAISRWFAGFAGTKRGRIRRIGIVAVARKLLVALWRFATQGVVPDGAALKS

SEQ ID NO: 68936 - protein, 351 aa, unidentified
MFLPRPDSIVETIASLDAQGWPDGTCVFKERSMSRSVLGIDVAKSKLDVVLLLNDKALVKKFDNNMKGFKLLRGWLSSLKIEQVHACLEATGTYGEAIAEFLHEHGHRVSVVNPLRIKSFAKSDLKRNKTDRSDARTIAEFCLLKDPEDWHPLPPEIKQLQALTRRIESLERMLLAETNRLEAAQAATRPSIERMIDNLKQEIDNVQRLIKDHIDNNPDLRQQSDLLQTIPGIGEKTARLLLGEIEFRSFESARALAAHAGLTPRQFQSGTSLNWTRLSKLGSGRIRKAMYFPAITALKYNAVIKQFARRLSESGKSPMQIVCAAMRKLLHIAFGVIRHNRPFDPTPALHV

SEQ ID NO: 68937 - protein, 320 aa, unidentified
METLHSHCAGLDIHQKEIVFCTYIGSSNEELIKEIRTFSTMTKNLYEMLQWLEELNITHLAMESTGIYWKPVFNILEDYFEITLANAQRIKNVPGRKTDVADAEWIAKLLRYGLIEKSFVPPVDIRELRDLTRLRKKMIGNMTAEKNRIQKTLECSNIKLGSVISDIFGVSGRKLLTRLVEQGYVNPNEVEEHIHVRMMPKASQITESLFGTINPHQIFLIRQSWNHILFLESSIQQLEDKIDEILLPYQEQVELLLTIPGVKKHSVACIIAEIGVEMNQFPSAHHLASWAGLSPENHESAGKKKHPNNQRKPTHPINAL

SEQ ID NO: 68938 - protein, 330 aa, unidentified
MKKAELFVGIDVSNKTLDVCKLSSTREFLKITNSQKSIAKFIKDLERRHTPSTIFLCLENTGKYSWRLVEALATSEINTYVVNPLHLKRSLGLIRGKNDKVDAVRIAQFIKKNHEELVPYVPEREEITSIKILLAERRYKVKTRRQLKAKNKDLKQVPNRTMVKTLINENNQLIKQYDKQIKRIETEIRAVINADQSLKQMAKLLKSVPGLGDIIAWNIIVKTNEFKTIKDPRKLACYCGVAPFQNRSGTSIFGKTRVSLLADKKLKKILHLGAMRAVRMNNDFKVYYERKVKEGKNKMLVLNAVRNKMIHVAYALINKQEFYQNRLVLS

SEQ ID NO: 68939 - protein, 343 aa, unidentified
MWALGIDVGKDELVASLQQARAGEQPRVIASLPTVANTASGHAKLVRWLHKQLAGQDVAVAQVHVVMEATNVYWEVCAHHFHALGCTVSVVNPAQIKFFAKSTLRRGKTDAMDAEIIARFGLIMQPSSWQPPSPALVQIKQLVREREALIREHLRENNHLKALQQGQYATPLVVRLAKQRIRLLERHLVVIEAAIKEAFAGDAALQTQLKLLLSIPGFGFVTAVTVLAETNGFETLTDGHQVAAYAGLAPAPNQSGHSNRQGRISKVGNARLRRIAYLAALGASRSHSSFKTFYQGLRERGKPPKVALVALARKLLRVGLAVVKSGHPYQATYSRTPGATMTS

SEQ ID NO: 68940 - protein, 362 aa, unidentified
MTAPYLQAEERVEFFAGVDTHRDTHSIAIVNALGELLEAFTISADRDGYAEAIERSCKFNGLIWGLEGTGSYGRPFADLLVREGHTVFEVPGTITKRHRRRLRRRGKSDPQDAHAIAEAVLRERETLPQHVEMDEEEATRLLYERRDRYVRERTAKINRIRALSLRLQLDLPADLTSDKTLEAVEKSLRGTQTYGYADYEVVDELRDLLTDLHRIADRIADLETRMRPFVERLAPVLLELRGCSVISAAGLIGHVGSTHNYRNADAFASHAGTAPVPCSSGKYQSVRLSTGGNRQLNRCLHNIANSQMHAAGHAGKVYYDRKRSEGKTHREAMRCLKRRLATVVFRALKSAQSSRETTSHAA

SEQ ID NO: 68941 - protein, 398 aa, unidentified
MHIAVGVDVSKGKSTIAIVSTEGEVLHTPFDIEHTKQGIDSMLEKLKFYRKEDIKFLMEATGHYHIPLLNYLIELGYFASIVNPFIIKKYCDMDLRKVKTDKKDSLKLAQYASEQWFKLNKSKPNEETRAELQFLSRQYLSFMSNQKFIKVQLTNLTDKTFPGIKELVDADNRYLLFLSIYEKYPHPSFILELTQTRFVETIEKIAKKLGHRIGTKTGIKLYENASNIVPSCPMNNSIQLAITNCISLLKEVLKTIDTIITKMDELASTLPEFEIVSNLKGVGPRTRSRIIAEVGDINRFSNANKLIAFAGIDCPPYQSGQFIASNRKITKRGNKHLRKTGYEIMSNIVRSRPQSDNAVYEFIRKKEVEGKKRKTAKIAGLNKFLRIYYARVKELYND

SEQ ID NO: 68942 - protein, 472 aa, unidentified
MEERSVKSNRNRRPHRKKPATGPSLLERMNPNAAGIDCGSDTHHVAVPADRDPTPVRAFQTFTADLHRLADWLTACGMTTVAMESTGVYWIPLYEILEGRGFDVVLVNARHVKNVPGRKTDVVDCQWIQELHSVGLLRGSFRPTAAIAALRAYLRHRETLVQSAATHVQRMQKALVQMNLQLPIVISDITGVTGLRILRDIIGGQTDPHALAQHRDYRCQASAAEITAALTGHYRPEHVFVLQQNLELFDTYQHQLAACDAAIEAHVLTLAAQAPTPASPVPAARTRKTPRNNEPRFEIRRPLHQLTGVDLTQIDAIGPYSALRLLSEIGTDMSRWPTEKHFTSWLTLAPRNKISGGRLLSSQTQPSANRAAAILRMAAMNLGRSDTALGAFYRRLAYRVGKAKAITATARKLAILVYRTLKDGLVYQNPGAAAYDAQHRVRILHRLRQRAANLGFSLLNRATGELLEGAVS

SEQ ID NO: 68943 - protein, 349 aa, unidentified
MPVYVAVDFHAREQTISWCDTADGEIHRQKLHHQRDDVRKFYEQFQGEVIVAFEASGYSAWFEQLLAELGQTVWLGNPAEIRRKAPRKQKNDRRDADLILDLVMKGDFPRIHTFSDESRTVLRQLRYRHKLVKVRTIAKNSLHAIGINAGLPLRHRLLTDAGLQRLEALPLSPVLSQQREEWLGLIKLMNKQIGALEESLEQRAKGDPAIALLRTHPGIGLLTAMALRYTLDPISRFTGTRRLVAYAGLDCVEDQSSERRRMGSISKQGSRLLRFLLNEAGQTAARKDPQLKQFYQRLRRRRDKPKAKVAVARKLLVRSFIMLRDQIDYAEFVRRGVAARVARETHSPK

SEQ ID NO: 68944 - protein, 320 aa, unidentified
MTEEKSWAGIDVSGSELVVGIYPSREGKKFSYESAGIEGLLEFLGAVKPELIVVESTGGIEKRVAAELHNAGLPVCVVNPRQTHDFAKSLGVLAKTDGIDAVILARYAEAVKPPVRRMANEEEQVVKELIARRRQLIDMLIQEKNRLKRAEGRIKTDIAKHIKWLEKRIEDLDDELCDAVAASQLWTAQDGILRSVPGVGKVLSATLIADLPELGRLNRKEIAALAGVAPFNRDSGAFRGRRVIWGGRGGVRRALYMSVVAGIRVNPVLQAFYKKLRAGGKQPKVAITACMRKLLVILNTMVKNGQEWNAGTLKQCSIQA

SEQ ID NO: 68945 - protein, 409 aa, unidentified
MLKIVYPNCCGIDVHKTFVVAVIAITNNQGITEYHRKRFSTFTNGLTQLRDWLEYYSCFDVCMESTGKYWIPVFNILEEQTNVCLAHPKYVKAIRGKKTDKKDAQWIADLFKHDLVASSFIPTLKIRQLRDLFRYRMKLTQLQVGEKNRYQNCLTCSNLQIASVVSDVFGKSAQAIIKSILDNPQDKPNIEQLVHKRMKNKVQDLEIAMEGTLTPEQAEKIRVIKAHYDALAICKEDLEQMIRELGQDYQHQVKLIQTVPGFKEDLSALRIISEIGCDMTVFDSAAKLCSWAGLVPANNESAGKKFSTRISKGGKYLKPFLVQVANAVVKSDKHPELRNKYLKLKKRRGHRKAIIAICRRLLVSVYQVLRKQEDYNPVLQGLTEIRNPDKTMSVQDAVRFAQQHGFNVA

SEQ ID NO: 68946 - protein, 424 aa, unidentified
MKRTQNEKILQIKNETLVVGIDIGKETHYAKAIDWRGIELAKLLRFANTAQGYEAFDEWLENILQQKGKTEVMVGFEPTGHYWFTLGDHLRMKGHKMGIVNPFHVKRARELDDNSPTKSDRKDPKTIAMLVKDGRFREVYIPEDLYQELRESVYERERIQEQLIALSNQIIRWLDIRFPEFNEVFKDWQGKTAWATLRAFPTPAKVIEAGMNGIMAKWQGQLKKPSRKKAEKLLKAASESVGRTAGAEAAEVSLQNMLSQYEMILHQRCELETLMQELLLRVPNAAKILQIKGIGMLTATIIVSEIGDISRFRDPRQILKMAGLNLRENSSGKHKGKTTIAKRGRKRLREGLFNGMIPILAHNEEFRQLHQRNLTREKNPLNKMQSIIALCGKLIRVLYAILTKGCEYDATKMINDINRMAMAA

SEQ ID NO: 68947 - protein, 412 aa, unidentified
MNNPQDYLFVGVDTHKAQHTAVVINCFHQKIGYAQTPNNPADFDSFLNRLKTLIHNNENLVFGLEDTQGLGHSLAQWLIKKDYTVKEVNPVQTKRERKQSTSPDKSDKIDAEAIANVLLAEYDKLPTIKNDANFKAIRQLNNQRKSLVKEQTKVKNRLHNLIHQQYPEYKKFFSDPFGKTALAFWKKYPHPGELKHIGEKRLNNFLKKQVKSISNDKAAHILSLVDKDKDKNISTKTRETLIPMLIKQLKLIRQNLEEINQLLEKAVEDSQYKLTTMPGIDFRLAAIFISNIKNIDRFDLADQLARYAGIAPVEYSSGKSRNTTSKTYGCRDLNHAFYILALQQIGKYKNGKVKNPVAYNYYQKKLKEGKSKKTALTCLQRRLVDIIYAMMRDRSAYELPEIPNYEILNKAV

SEQ ID NO: 68948 - protein, 344 aa, unidentified
MTQFKRIAIDTSKAVFTIHCIDQYDRPVLRINLRRAQMISFFAKQPPTKIAMEACGGAHHWARELITLGHEVQLIPPQYVKPYVKRGKNDRNDAEAICEAAGRPGMHFVPVKSVTQQAQGMVLKVRETLVGQRTLLVNTLRGHATEFGVIAAKGLRQVGPLLAAIEQETGIPPEAKDMASLLGRQIEDLDARIKELNVKLAAAHKANEVSQRLATIPGVGPVTALTLAIEIDPEAFESGRHLAAWAGLTPKEHSTGGKQRMGGISRAGHERLRVLLVTGATSVIKAAMRPGSALMTDWLRALLQRKPRKVVAVALANKMARVAWALMTRGEVYRRPASAGAAAA

SEQ ID NO: 68949 - protein, 356 aa, unidentified
MGKDITTVGGLTIGLDLGDKHTVGCVLSASGEVLETFRVATTMVALGRTMAGFKSSRVVLEVGTHSPWVSRLVEQAGHEVIIANPRRVRLIAANDSKTDEVDAELLARLGRVDPGLLKPIVHRGEKAQHDRILLLARDGLVRSRTQLINQVRGFAKSLGHRMPSSSTEAFPRRVRERFSEDLFPGQSVMLEMIDRLTQEIRRMNQEAEKLCKERYPETGVLRQVKGVGALTALGFVLTLEDPSRFAKSRTVGAYLGLRPRLRQSGEQQPQLRITKAGDALLRRYLVGAAQYILGPFGPDTELRRFGLKLAERGGKTAKKRAVVAVARKLSVLLHRLWVTGEEYQEIGYGQSAQEAA

SEQ ID NO: 68950 - protein, 390 aa, unidentified
MLYIGVDISKYKHDCTVIDDAGVIIRNVFSFDNSRTGFDQFMEMYRSLDPLEIKKIGFEATGHYQDNFKVYLERSGIEFIELNALLVHKFKNSQTLRGVKTDKTDARLIATYLSSIEFKPYPKISYHTLALRSLCKRHFDLINERTKYLIRITNFLDRTFPEFKEFINGNIKSKTSMYILHNYGIPSKIMNINIQSYENLRKESHGHFSVAKFNKLKELAKNTIGFSYETDIFEIKSLLKVYDTLQDEISLVENEITTIMSKINSHIPTILGIGRVSAATIIAEIEDISRFDNPNKLLAFAGLDPRIYQSGTQEFKGKMNKKGSVDLRRVLMNCSESILMYNPAFYSYYRKKRDEGKSHRVAISHVARKLVRIIYKLETEHIDFDLSFVK

SEQ ID NO: 68951 - protein, 300 aa, unidentified
MLDTTTFVGLDVHARSIKAVSLDVMTGEVRAATFGYDAGAVAEWVRSVDPRARCVYESGVTGFDLQKRLSGLGVDCVVGAVSKMIKPSADRRRKNDRNDAEFLARMLSVGNVVEVWVPDDEREAARDLTRALEDARDDLSRSKQRLSKFLLRHGFVFDERTPTGRRKGNWTRAHWSWIESIRFAEGADEEVLAYYVDAVRRAAEEKARLERLVEGEARKPRWRRRVDSLRCLKGVDTASAADLVFEAGEFSRFRNARSFAAWVGLTPSEHSSGESDRRGAITKAGNKHLRKTLVEAAGTT

SEQ ID NO: 68952 - protein, 368 aa, unidentified
MSRTSKRVLPPYGGSLYYAGLDLHKRYFTLCVLTSAGEVALDHRRLPADLEPLQSILRDLGGPVTVTVEARLQWAWLHDRLTQAGFAVCVAHPQQGKLISHARCKTDPIDARKLAELTRGNLLPTIWVPPPEVRAWRQLVRARATLVRLRTRAKNRIHACLAAENCRVPTTDLFGWGGRAWLTAVALPPEVRREIQVQLALITALDEQLRSYDAEVKRQAARAPTARRLQSIPGVGPFGALLLLAEIGSVERFASSHELAAYAGLVPSTRSSGGKTAHGGVARAGSGWLKWILIEAVQTHKQVPGPVHFHYERLLRAKGKPKATVAAARKLCTYIYWMLRDQLSYPAWLAQQEMRRAGRPMHCMASSA

SEQ ID NO: 68953 - protein, 388 aa, unidentified
MQTVADRPEAPTAIRTDLGAIFVSLELSRSTWLITSLSPGGGEKMSKQVVRGGDVAGLLERFARLREKARARTGKVFPFVVIQEAGLDGFWIDRALQNEGIESHVVDPASIATSRRRRRAKTDGIDGEVLVRALLAYKRGEPRVCAMIKAPTPEEEDRRRLCRERKVLIVERVRHVNRVKGLLFSQGISGYEPLRRDRRRRLDTLQTGDGRLLPVHLKAQVCRELDRLELLLEQIKAVEAERDVLLAAQQVAAPAPAAMLLDIKGIGPEFAAILWSEGLFRHFDNRRQVASYAGLAPTPWQSGSVDREQGVSKTGNPRLRTTLIQLAWLWLRHQPQSALTLWFEERVRRNGGRLKKTTIVALARKLFVALWKYVTAGVVIEGAVMKRT

SEQ ID NO: 68954 - protein, 419 aa, unidentified
MSFKILKNNCCGLDIHKTWIYACIGITDSHGRTEYKQARFSSFTKGLQELCNWLAKYHCTDVCIESTGKFWIPVFNILEKNNIHVTLSHPKYTKPQKGNKTDRKDAKWICDLYMCGMVKPSFIPPADIRQLRDLVRYRFKLTCMITGEKNRAHNCLTVSNFKLDEVFSDIFGKSSRSITEQILQHPGETFDVAPFVDRRCKTPIEEIQAAVDGAISAEQAVKLRQCLDHIDELEKHKAEIEREIFRLSDKYEEALNLLRTVPGFDKNPMTAIQVISEIGADMSVFPTAKHLVSWAGCCPRNDQSNQQVKSTRISRAGSYFKPVLVQIANALIKSKRHPEFTTRYRRIKSRRGHKKAIIAVCHMLLTAIWHILTDLKPYTPEGFLEHRPVKQSKVLTTSQALNLLKQRGYIIKDDTVPAT

SEQ ID NO: 68955 - protein, 305 aa, unidentified
MISWVGIDISKTNLVVWVQPQNEGFDVLNTSQGFVELIEHLSCYEVGRVLLEATGGYERRVMAALQDANFNVLRINPRRARAFAVAMGKNAKTDPIDAAVLADFAEVLHASRDKVISPEREALRELVQLREHFVQQRDDNKRRLQQAQLPTAITAIKEHIRYLQTQIKQLEKAINQSMRDLDAEKAERLISVKGIGTVATASLLVYLPELGELGRREIAALAGIAPYNDDSGNHSGKRQIFGGRARVRRALYMSCWVVIRHQADFKARYEALRERGKSAKVALIACMRILLIRLNAMLRDGTEWR

SEQ ID NO: 68956 - protein, 351 aa, unidentified
MKKVIRQVLGIDVAQKELVVCLGRMYDDLHADLYASKIFPNTQKGFVALYQWVGKQTVAGLAVRYVMEATGVYHESFAYFLADHEAEISIVLPNKISNYARSLTTKTVTDKTASEAIAQFGLERNLEKWQKPMAIYKKLKQLTRERNQIVSERTMVKNQLHAEEAEAEPNKTSVIRIKKRIELLNKQEKEIIAELRKLVATDPQISKLIILLCSLPGVGFLTAAIVLAETKGFDLIRNRRQLTSFAGLDVIEKQSGTSIKGKARISKKGNRHLRKAMHLPALTAIRYDERFKAVYVRLVSKHGIKMKAAVAVQRKMLELMFTIFATNKKYDTDHFKNQEALQTEQEYQPAA

SEQ ID NO: 68957 - protein, 344 aa, unidentified
MSEVTTIGLDIAKHVFHAHGADERGGTVFSRRLTRGKLLDFFARHPRCVVALEACGGAHHWARELRAMGHEVRLIPPAYVKPFVKRHNNDAVDAEAICEAAQRPSMRFVAVKSEEQQAAALVFRTRDLAVKQRTQIANAIRGHLAEYGWVAPKGAAHLAMLADLLEDGEIGQTLPEAARPMFAMMIGMLANLDKQIAELDKEITRRARQDEVARRLMTIPGVGPITATAIAAIAPAAETFAKGRDFAAWLGLVPKQASTGGKQKLGAISRMGERTLRRLLIIGASAVVLQASKRGAPAGSWLEGMLARKPRMLVTVALANKMARTVWALLVKREDYRAPVAVAA

SEQ ID NO: 68958 - protein, 419 aa, unidentified
MRRLLERCAALDVHKASVTVCARILGRGGEIEEFMAEFSTMAADLLALRDWLKELAVTHVAMEATGVYWKPVYYALEDDFELLLVNAQHVKNVPGRKTDTMDAQWLSQLLECGLLRASFVPPKPIRELRDLTRYRKALIKERQQEANRLHKVLEDAGIKLACVATDVLGVSGRQMLEALIGGTRDPEVLAELARGRLRAKLPALKQALVGNFKPHHALIVSHILAHLDYLDETIAVLSEEVERRLAPVAYKAENLCTIHGVAERTSHVILAELGPDMSRFATDRHAASWACICPGNDESAGKRRSGKTRKGNPYLRAALIEAANGAIRTKNTYLRAQYEQVKRRQGHKKAIVAVAHSILIAAYHILKDDIPYQDLGGDHFARRADPERITKRLVAQLERLGHTVTLQTSTATEAAAAPA

SEQ ID NO: 68959 - protein, 326 aa, unidentified
MSKVIGIDISKQTFDVSFREENKLLHEVYANNLKGFKEFIESDYSKGDPIVVMEASGPYYVCFASYLYDNAIKVCVVNPLMVKRFGQMKFYRAKTDKKDASVIMEYGETEIKSLLLWKPETKGVQSLKQMRTTVELLHKQERQSKNQLSAFKSTGVLNHEVEKGLKSIIRSLEKTISKIEDQMLVVCNSCYKESLELITSVPCIGEKTAMMLIAITDDFSKFEHYKQLIAYIGFAPRVYQSGTSVRGKGHICKMGKSQTRKLLYMCSWTAKRYNKTCREMYERLKAKGKPERVIKVAIANKLLKQVFAVATSKQKYIENYQPNICF

SEQ ID NO: 68960 - protein, 402 aa, unidentified
MSDGVTFAGIDWASMLHVACVVGGDGQVVDRFEFTHDAEAITDMIRRMKRVKASGVAIERGDGPVVEALMDSGLAVYVVPPRQVKALRERYGSAGNKDDRFDAYLLADTLRSDGHRWRPLREDSDATKALRALCRSRKDLVEVRVGVVNQLRANLELAFPGGLGLFSKPDSAITLSFLRRFPTAAKAAWLSPKRMDGWLHSVGYNGGMATEVLYGRLVAAAPGLVGAEGDARGEITLCLVTAIENLNAQIAVVEGLIADLFATHPDQHIFSSLPRSGTVRAASLLAEIGDCRERFPTDGALAGLAGACPSTRQSGKYEHAVFRWSCNKKLRFAVMDFANGSRMADPWAADIYKRAIDRGCRHPHAIRILARAWLRIIWRCWQDGVAFDPNLHRARFTVAGLT

SEQ ID NO: 68961 - protein, 365 aa, unidentified
MFHSGIDLHKDNCFITTVDDSGKIVKQERLRNCPEIILAYFASLPPPHKAVVECTAGWYWLDDLLEAHGITLILAHAKYLKAISYAKVKTDKVDSQTLATLLHLGFIPQAHKIRRDLRDLRDLMRARLRLVQKRTSCCVSIHNLGRKLNCSNQLAIEKHSFPEYLPEAYRLHLRNLYEQIDLLDTQILDLEHFLQPVLIPNEDIQRLVWIPGMGKVTAFTVYLEADGIERFRSDKHFVSYCRLVPGARNSNTTIRHKSGCKDGNKYLRVAFTDMAVHAIQYFPEYRHLYQKILRRSNEPIARTVVAKELARIVYFMLKNKTDYRGLKGQPISHQKATQYPRLKRRPVATPGKPVHLTDALLASCA

SEQ ID NO: 68962 - protein, 382 aa, unidentified
MDIFRHCCAELDVHKKTVVACVRRLGPDGTVSSQVRTFGTMTAQLLELSDWLEAQGVRHVAMESTGVYWKPIFNLLEGNFAVILVNAQRLKNVPGRKTDIKDAEWIAQLLQYGLLSPSFIPPPEIRQLRDLTRQRTQLIRDRATVANRIQKVLEDANIKLGDVASDVLGASGRAMIRAIIAGEDDPDHLADLAKRRLRGKIPALKQALHGRVTEHHRFLLRGLWDQIVFLEDLIARFDARIDHAMAPFAAAEERLRGIPGVGQQAAEVIVAELGTDMTQFPTAGHLASWAGLCPGNDESAGKRRSGKTTKGSQWLRTTLVQAAWAASHTKETIFSACYHLWAKRLGKKRALVAVAHKMLVVVYCLLKNHTDYRERWAPPKVA

SEQ ID NO: 68963 - protein, 412 aa, unidentified
MTGGRVGITCGVDWAEDHHDVVVMDDLGRVLEGRRIEAGVDGYADLLALIADHDGSAADTPVALETDKNLLVLALRAAGFTVYPINPRAVARYRERHYQAGKKSDHGDASVLADILRTDRHRHRPLPATSDHALTIKALARQHQEAIWALHQTTSRLRSMLLEFYPQALKAFPKLNHKAALTILAAAPTPTAAQRLTGRRVVALLHRCGRRNDPDLVALILTELKAPALRQPPSVEEAMGLAAKTLIDVLTQMHAAVTSLNDALAEQFSQHALAPVLTSAPGLGTVLAARILAEVGDDPRRFQTPASLRAFAGTAPVTRASGRSSYVKARKVRNKRLGDACHWWAFSTLTKSPGARAHYDHRRTIGDTHNAALRNLANKLLGRLWWCIQNQLPWDESAAWPMASSSSQTTAA

SEQ ID NO: 68964 - protein, 408 aa, unidentified
MDAILESCAGLDVHQETVVACILTGSLDQKPKKVVKTFSTTTTELLALAKWLEEFNCSHVAMESTGVYWKPVWNILESCSFKQLLANSQRIKNVPGRKTDVKDAEWIAQLLRSGLIEGSFVPLHDIRDLRDLTRYRKKLVQEVTQEKNRIHKILQDANIKITTYVSDIFGVSGRCILETLIQGETLTASKLRNMVFGPIKSKISDLMEALNGNVRPHHRDMIRYSWNHLLYLEETIERVERQIDECLKPFRNEVELLDTIPGVNQRAASIMIAEFGTDMSVFPNDSHLSSWSGISPGNNESAGKKKGSKTKRGNKALKGVLCECAWAASVTRNTRLSATYWRLVKRLGKNKAIVAIAHLILRIAYQILQTKTPYQELGTQFIENQEKKKEQRLIKALESKGYQIVKAS

SEQ ID NO: 68965 - protein, 347 aa, unidentified
MSITMIGLDTAKSVFQVHGVNETGKVEIKRKLRRSELIEFFEKQESCTVVMEACGAAHHWARMLTGLGHTVKLIAAEAVKPFVKKGKKNDAADAAAICAAASRPDVKFVPAKNVEQQGILALHAARSLLVKQQTMLANAMRGLATEFGITVPKGIRKLDELMILVDADEIIPTQAKQAITGLHDYYKDLSEGIETFEAEIVAHARHDETARRLATIPGIGPITASLIAATVVDISLFKTARQFAAWLGLVPRQNSTGGKTRLGRITKTGNREIRKLLVLGATSMVYRADGWNSAVGGWLRNILERRPVRLVTVALANKMARMVWALMTRKEVYRPKGGVAAVAQAAA

SEQ ID NO: 68966 - protein, 355 aa, unidentified
MEDYDGRQVVGMDLHRRRSVLVRMTEDGRRLGTAKITNSPAALRKEIARAGKHPKVVLEATYGWYWAADVLAAAGAEVHLAHPLGVKAFTCRRVKNDERDGADLADLLRTGRLPEAWIAPAEVRELRELTRCRQKLVHLRTSCKDQVHGVLAKLGVEVTCTDIFGTAGAAWLDGLRLPQPYAGKVTSLRHLAGELSAEIAMLSEVIASLLAGDRGYQVIQQLPGIGPVLAAVITAEIGDITRFRNAGQLCSWAGLTPRHRESDAKVARGHVTKQGSRLLRWALIEAIQRIPRDSVIGGAKDAIIARRGKEAKNIAKVAAARKLLTLVFYGMRDGQIRCLSKSPGDLPVTPAGRAA

SEQ ID NO: 68967 - protein, 365 aa, unidentified
MPILHPDTIHLGLDVHKDSISAGILNPGHETPDVEKIFHDEESVRRLIGRFPDPRLVRACYEAGPTGYDLARLLVSMGVRCEVIAPSMIPKAPGDKVKTDTRDCRRLARLHRAGELVAIRIPTPTEEAVRDLCRTRGDMVEDLTRARNRLTKFLLRHSRVWRGGSNWTVKHEAWLAAQTFSEPALATTFGHYRAVVLARDAALDAVEADLVVWFDKAPFSEGVHRLGAYRGVTRMGALALQAEVCDWRRFGRAAAMMGFVGLVPSEYSSGGSTRRGHITKAGNAHLRAQLVESAWAYQHRPYVGPEIAKRHVGLEPEVVARAWAAQLRLCGRFRHLAARKNTKSVVAAAVARELAGFLWAEMTAA

SEQ ID NO: 68968 - protein, 345 aa, unidentified
MEIRTIGIDLGKTVFHLVGVNARGEIVVRKKCSRTQLLRFTSNLRECLVGMEACGGSHFLGRALREQGHDVRLMPAQYVKPYVKTNKNDYIDAEAIAEAVTRPTMRFVPIKTDDQLDLQSLHRVRERWVVRRTAVINQIRGLLLERGITIRKGRQHLEASLPRILEDADNKLSGALRVLLTQLQIEMQYLHRQIEESDQLIIRIASELEPCRRLIAIPGIGPVIATATIAAIGNGAAFKKGRGFAAWLGVVPGEHSTGGKQQLTGTSRRGNKYLRKLFVLGAHTVLLQRTKQSSGLSTWLASLTARKRKQVATVALANKMARMVWAVLFKGEAYRPPLLPQPVTA

SEQ ID NO: 68969 - protein, 349 aa, unidentified
MRKLMAGMDLHSNNVVAGIVDQDGKRIAHQKLDCDLGKIIAFLKPFKRDLVKIAVESTFNWYWLVDGLKAASYPVVLANPAKIDQYSGIKHADDKNDAFFLAELCRLEILPTGYIYDPELRPVRDLLRRRLSLVHQRTALMLSFESLFTRTTGEKMGLARLKKLDVPGAQKLYDHPANQLIAGVQMKHIEQLNQSIEQIEKAVIKVAKQLPYYAKLKTLPGVGIILGITITMEVGDIKRFRDAGHFASYCRAVDSKCLSNGKKKGENNQKCGNKYLAWAFVEGANFAKRYDEDCRKWYDRKAAKKGTVIATKALACKLAKAAWYLMAQGVDYDRNRIFPELAGAWSKRR

SEQ ID NO: 68970 - protein, 446 aa, unidentified
MKKSSRMSVIHPHAAGVDIGAEFHVVAVPPDADAAPVRTFQRFTGDLHRMSGWLKTCHITTIAMESTGVYWLPAFEIPEAAGFNVILVNARDAKNVPGRKTDVNDAQWLQKLHSFGLLRASFRPEHDISVLRSYLRQRERLTEYRAAHIQHMQKALMQMNVQLHHAVSDITGVTGLSIVRAIVSGERDPSVLIQYRDVRCKKTPEVLQQALTGNWQPEHLFAPEQSVAFSDSYQEKIRECDDQIETSLLQLSTGTEEPEGVLPSARHRTKQPNQLSFDVRPLLWKITGADLTQIHGFGPYLALKFVAECGTDMNRWPDASHFTSWLCLSPGNKISGGKVLSPKTRRSSSRIAAALRLAATTIGRSDTALGAFYRRLSSRIGKAKAVTATARKLAILFYNALKYGQKYVDPGADYYEERYRNRVLDGLKRRAKSLGYSLQQNPELCV

SEQ ID NO: 68971 - protein, 369 aa, unidentified
MVEGKEAFVGIDAAKLRNAVAIADAGRDGEVRFYGEVDASPDSMRRLAAKLAGRYQRLNFCYEAGPTGYGLHRLLTGLGHSCVVVAPSLVPRKPSDRIKTNRRDALTLARLLRAGELTPVWIPDTAHEAMRGLVRARAAAARDAGTKKRQVGAFLLRHSRLFPRKKSWGARYRCWLQEQGFEHPADQIVLQELIEDVRLAEERRARIERAIGEFLPTWGLAPVVEALQALRGVELVTAVTFAVEVGDIRRFENPRQLMGYLGLVPGERSTGETVRRGSITKMGNARLRHLLVESAWTYRHPPRVGKAKLARLERVSPRVREIAWKAQSRLTARYRALTARGKKTTVACTAIARELAAFMWAVAREARPA

SEQ ID NO: 68972 - protein, 320 aa, unidentified
MMAQNDLVVVGIDVAKDKVDACIRRFTLRQTFPNTAQGHRKLVAWLRQYQVGKAVMEASGGYEREWRNVLHNAGIEVRVVDPRRVRSFALSAGRLAKNDPIDAEMIAWFAETFSQAPGQIPDAAREELAALAKARKALVDVKIRLQAQDEHAAPEPARKAYARVLKSLAAEIDKLEAAISAKVKVTPEFAGRAEIIESVPGLAQATSAILIAGMPELGQVSDEVAAALIGVAPYDDDSGKRRGERYIKGGRRWVRNAIYMPCLGAATQYNPVLKAFYQRLLAKGKEPKVALVACMRKLIIILNTMLARRQKWNPGRPATA

SEQ ID NO: 68973 - protein, 409 aa, unidentified
MGRTLFIGIDIGADSNVIRILDDTGEDVCGLSVSNDLPGTERLVEKVVDAADALSADKVKIGMEATNLYWWHLSQALHDDPQLTILGTEIAVINPKIIDGFKSIYTDMAKTDALDARVIADCLRFGRVRPTPPPDMRYAPLQRLTRFRYHMVGNLTREKNRALNLIFLKFSSYNKDCPFSNLFGQASSAVVENLTPDQIAAMPVEELVDMMLQHGNKRLKDIPEMAKTIKRAARNSYRLNPKMQESVDITLAMSLETIRFFESQQKKIDQAIAKEIKAIPHTLETIPGIGPVYAAGIVAEIGDISRFDNHNALAKFAGLTWRKNQSSKFNAQDIPLTRSGNYYLRYYLVEAANSVRVWEPEYGEFYRRKFTEARHHNHKRALVLTARKLIRMVFTLLSEGKIYKQRRKN

SEQ ID NO: 68974 - protein, 315 aa, unidentified
MHSEATFVGIDVSKDQLDIAIRPGEARFRESNDDSGIQALIVRLLSFKPQLILLEATGGYEILAAASLRQAGLPAHIINPRQVRDFARSSGRLAKTDKIDAAIPAHFAEALKPDLRPWPDEQQQELAALMSRRRQLVEMLVMEKNRLAMTYSPRVRKSLQTNLQSLKEQLKELEQDLDDFIRQSPVWLKKAQLLQSVPGIGPLTCQSLLAWLPELGTLNRKKIAALVGLAPFNRDSGQMRGKRTIWGGRARLRPPLYMATLAACRVNPAIRAFYLRLVAAGKSKKLALTACMRKLLIILNAILKEQQPWCHQASV

SEQ ID NO: 68975 - protein, 343 aa, unidentified
MQAVTTIGLDIAKSVFQVHGIDTEGNILIRRQLKRRSVLAFFEKLPPCLIGVEACATSHHWSRQLKGLGHSVRLMPPAYVKPYVKRQKNDAADAEAICEAVTRTNMRFVETKTPEQQSCLMLHRTRQLFIRQQTSVINAIRAHLAEFGIVAPVGRKGVEHLLGVVTDGSDQRVPEVARVCVAALGAQLRGLKAQILEFDRRILAWHRSNETSRRLDAIPGVGLALATALVASVADAKAFRSGRNFSAWIGLVPKQRSSGGRDKLGSISKQGDRYLRSLFTAGALAVIRYAKIHGTKHRPWLTALLARRPTKVAAIALANKLARMAWAMMVKGERYKEPAALAA

SEQ ID NO: 68976 - protein, 378 aa, unidentified
MLQTPHHTESTGGGAVLYMALELSARRWQLAFGLGLATASRRRTIAAGDEAGLRAEIAAACERFGLPSTPAVRSCYEAGRDGFWVHRWLERIGVSNVVVDSSSIEVSRRRRRAKTDRLDAEALLRRLIRYWWGERDQWKVVHVPSVEAEDTRHAERSLAMLTAERTRYRNRLHGLLATQGVRIRLTPQFAAHVATVQTPAGQPLPPGVVTRVQVIWRLLQGIEAERRDARQGQALEARAAATAAAVRTQRLRQLRGIQVGTAAVLAKEVFARDVRNRRQVGALSGLVPVPYQSGEAAHDQGISRAGLKAVRRMLVEVAWGWVRWQPDSTLTRWYRTRFAAGGARLRRIGIVALARKLLIALWRYSEQGIVPAGAVLRG

SEQ ID NO: 68977 - protein, 355 aa, unidentified
MTSTQYIGMDVHKESISIAVRNAAGKIVMECVIETKASTILQFFDGLRGDVHVTLEEGTWAAWLYDLLKPHVTELVVCDPRRNALLQEGNQNDRVDARKLAELLHHNQLRSVYHGDHGLRTLKELVRSYLTITKDLSRVMTRVKAIYRSWAIPCTGKQVYASRHRAEWLGKISEPGVHRRAEFYYQQLDALRSLRQEVRRDLLAESKKHQAWKLLCQIPSIGPIRAAVLLGILQTPHRFRTKRQLWTYGGVGIETSSSADHRVVKGQLERKKKPVEIRGLNENCNHDLKNLLKGAAIVAATKPGPFAEFYAELVAKGMRPEMARLTLARKIATIVLIVWKRGVCFDAQHLKPQTA

SEQ ID NO: 68978 - protein, 425 aa, unidentified
MNYKQNEKINQVKESTLVVGIDIGSTTQYARAFDWRGIELGKVFTFSNSREGFESFKAWMRHLQDKYRKSDVIVGIEPTGHYWFDLGAYLEDEGILLVMVNPYAVKQTKELDDNSQSKNDRKDPKVIAKLVTEGRYSAPYTPDGVYADLRIMVANRKRLIREMTQIKNRFARWFAIYFPEYTDVFGDYEAQSSMLLLKKVCTPEAIVELGAEKINQIWRDAKLRAVGMKRATTLCETAKRSIGLKKGSSAARYEMKLLLEDYEYKKAQLDAVTEEIEKLCRKIPESEQMLAIKGIGVITVAGFLAEVGDVRRFESPRQIQKLAGLSLRENSSGKHKGQTTISKRGRSKLRAVLFNAAIPLIAKNPEFKSLHEYYTTRANNPLKKKQSVIAISCKLIRVFYAILANGVTYDPQKMLSDIHRQPQAA

SEQ ID NO: 68979 - protein, 427 aa, unidentified
MNEIESNSIDRFRQFKKEIRGSKEHLIVGLDIAKRKHHGFFGDANGRTLLKGLIVENSAGGFRHLLTQVRFYMDREGLSRVVFGLEPTSVYHKPLAEHLIEQGHLVVYATNEAIKKNRSLIDGRWDKNDTKDSANVADLVAQGKCHYYDLPELRLRDLRSLLLFRKRLKKQLHSCRVRIRNNLVAQYFPELDWFWNNAAVENLAIVRWFLDPGSIRQLSCEQFIVKVTTHNGGLRQQRRLQHIWEAAGQSIGCRPGLAMALEAELVVEMLQSVQAQLSRVERDIQKIAEGFEEYDYLKSIPGFGPYVSAVALAAIGNPHRFENRAQLIRLAGFDLSANRSGEKSKAAVPVISKKGKADLRYALYQAALVASSLTSHFRAYYSRLLDGRQREKGIRTKMLVKIAAKMLVIAWTLMKRKEPFNPAHIQA

SEQ ID NO: 68980 - protein, 346 aa, unidentified
MTIVGCDFHPSWQQVAVFDSETGEIRELRLENGNGEAERFYRELSSRALIGFEACGNTQWFEDLLDRLGHEVWMGDAAAIRASYVRKQKTDRRDAAHILKLLIENRFPRLWRPSAEERDQRQLLIHRHKLVGIRARAKNGLQHLMLNRGVQMKRKLWSEAGQKALRALPLEGWAAQRRQDLLKLLSVLDPQIRQLEEAIKSAAQQDPRARLLMTQPGVGAITALAYVLTMGDVNRFQRGKQVASYLGLIPSECSSSKRRRLGSISKQGNSFMRMLLVESAQTVNRLDEGFRKQYQHRCHRMAKGVAKVAAARRLAVRLFWMLRTNTGYPEIAHIEGSPREGVVGES

SEQ ID NO: 68981 - protein, 316 aa, unidentified
MNAVTGLVVGIDVAKDLLEVATSAGEHWQVGNDPQGQEALRDRLQAGQAELIVLEATGGFEVALVAVLAQAGLPAVVVNPRQVRQFARSLGRLAKTDAIDAEVLVQFGVHVAPEIRPLPDEQTRLLEALLARRRQLLGMIQAERNRLLLAVGPVRTDLKQHIAFLVRRLKDIDRDLEGRLRASPLWREREKLLRAVPGVGRQLLLTVCASLPELGRVPARQLAALVGVAPYNCDSGTLRGQRHCWGGRAHVRQVLYMATLAATRYNPVIGPHYARLVAAGKPRKVALVACMRRLLVILNAMARDSTPWNPQLAMAK

SEQ ID NO: 68982 - protein, 346 aa, unidentified
MLYAGLDLSRQRLDAHVVREDGTTVLATAVSPDADALRTLAHRVAGEGQDVRATVESMTGARFIHDQLELAGWDVLIADAQRVRGLAPLAAKTDKIDAHVLAELTRRALVPEIWLPTPGVRCERERARFRLHLVRHRSAIKNRIHATLMTFGHPCPLTDLFGVAGRELLDRLALPEPWHTNLAASLALIDDLTHRIDDLELELRHLGVDHPSIPLLLTVPGVGPILAYTIASEIGDVRRFASAKKLAGYTGLCPLVRQSGNRDIRGPLAKNGPKYLRWALIEAATHAARDAHYRERYERTKQRLGRQRGAKVARVDLARQLAEAIWHILTKNEPFAPAGPAIHLVA

SEQ ID NO: 68983 - protein, 400 aa, unidentified
MRTVFGIDVSKTSSEVAILVNGEKVHGYTMPNDSIGFNQLLGDLKTVPNPEIVFEATGVYSRRLQAFLEENGYAYTRLNPLEAKKQLDSLRVRKTDKMDAEKLAQSQFVLNRKPTYVQKEIYQQLRDLSRFYQNLTEDIVRAKNRLHKVLQVTFPELENLLSTPTGEQYWHLVMAFPCKVFVLSLTQSQLIDSIRQSTTKRISEKRVEYLTNKLTELAKQSYCAVKKTSPMLEEVRYYAQELLRLSERRQAVLDEMVILAKPLPEYDILLSIPGIAETTATSIIGELGDIRRFQSANQINAFIGIDLRHYESGNFLAKEHITKRGNPYARKILLKGIHNIAAASHTKPCHIADFYENRKRQSQMTSTKPHTIASIHRLIRTIYYLKTHNKRYDYILTQNR

SEQ ID NO: 68984 - protein, 372 aa, unidentified
MSQEKYIGMDVHAATISAAVKNAQGKLLMECVLETKAATILEFIQGLRGTLAVTFEEGTLAAWLHDLLKPHVSRLVVCDPRKNALMRDGNQNDRADARNLAELLRTHQVHGVYPGKHGIRALKELGRSYLTLTKDSTRVMNRIKSVYRSWAIPCAGTSVYSRRHRADWLAKLVEPGVRIRAEHLYQQLDSLQPLRQAARGELLRESRKHAPVKLLRQIPAIGPIRSALLVALLQTPHRFRSKRQLWAYSGFAVQTYDSGEYRIVRGKLQRNREQWRSEWQVICEVCDGLQAVEKAAELRPDVVLLDIGMPTLNGIEAAKRIRQGSPGSRIIFVATGAEAYLVKANAGSELLPAIDAALGNGHASAEWAHHGS

SEQ ID NO: 68985 - protein, 408 aa, unidentified
MEVLHARCAGLDVHKDTIVACVRLAAGDEVQQEVRSFATTTQGLLALADWLMASGVTHAAMEATGVYWKPVWHVLESACELVLANAAHVRNVPGRKTDVNDAVWIADLLAHGLLRASFVPPTPILELRDLTRTRKQLVREISQHTLRIQKVLEDANVKITGLISDLLGLSGRAILEALANGETDAERLVDLTQGRLKAKRAALLQALQGHVTEHHRFLIRLHLGQIDALQRAVGEIEARLGEVLVPFRWATRLLITMPGVSDVVAQVLVAEIGTEMGRFPTAGHLVSWAGLCPRMDQSAGKRRSTRVRHGAPWLKTVLVQAAWAGSRQRDSYLRAQFLRLKGRRGAKKAIMAVAASMLTAAYYMLRDGVEYRDLGADHFDRRDRTKVANRLIRRLEELGLKVQVEAAA

SEQ ID NO: 68986 - protein, 353 aa, unidentified
MGMLADRAEYVIGVDTHRDSHTVAVCTPTGAVVAETTVTADAGGYRRLLQFVRARTEGHRVWAIEGTGSFGAGLTGFLLEQGEWVVEVDRPARPARRDGAKSDRLDAARAAREALTRQHLAQPRRRGDREALRVLLASREGAILARTQAVGQLKALIINAPDQLRRQLRQLTTHGQLHRCARLRTNPTHSTEHRATIIALRSTARRALALTAEAAELESELHQLVRTLAPALLAEPGVGPITAAQLLSSWSHPGRFRSEAAFASLAGAAPIPASSGQSIRHRLNRGGDRQLNRALHTIALSRLGHHPETKRYAARRSAEGKTTREIRRCLKRHLARRLYRILETNPGNLGPRS

SEQ ID NO: 68987 - protein, 429 aa, unidentified
MNYNTQNAKITSITEKSLIVGIDVGSETHYARAFSWRNYEYSKKPFAFSNDEDGFASFKAWMDDIAEKHEMEKVIPGMEPTGHYWLNLGAYLQGQGMRPVHVNPHHVKKSKELDDNNPNKNDRKDPKTIAGLVNEGRFSYPYIPTGIYAEIRNLSNLRIQTQEEITRIKNRIARWFSIYFPEIKDVYRNPDAVSGLMVIKQAPLPCDIKGLGVDGVNKIWRDARLKGAGIKRAKTLVTAAEHSIGNTEAPRSARKEIRNLLNDYEIYKSRMDELMEEIEELLSEIPYIDKLMGISGIGIKTVSCFIAEVGDIERFDNPKQVQKLAGYGIVADSSGKHKGESRISHRGRKRLRYALYEAAVSVIGKNKEFKEIHHYYRTREKNPLKKMQSVIAVSCKLIRIFYTILTKGIDYDGQKMLRDIVRPGMQSAA

SEQ ID NO: 68988 - protein, 348 aa, unidentified
MSKSNQYVGLDVSLKETSICVIDDAGKIVWRGRVDSTPEAIATAVKQHAPHAVRIGLESGQLSSWLFHELKGAGLPVICVDARHAKAALSLKVNKTDANDALGLAQIMRVGWYREVTVKGLDCQAVRALLVARAQIVSQITTLKNCVRGILKTFGRVLPKGLRSQFPGRVRAAIDGHPVLGAIIEPTLRVLEAMRAQLLVYDRAVIQRARSDDTARQLMSAPGVGTVVALAYMTGVEDPARFKRSSSVAAYFGMTPRRYQSGEVDHAGRISKCGDGMVRGLLFEAAKVLLSRSARPSALKTWGEALGKRSGAKKATMAVARKLAVILHRMWTTGTTFQWNAEAASPAA

SEQ ID NO: 68989 - protein, 346 aa, unidentified
MTNVTIGMDLGDKNHEVCVLDQKGHLMERFAVGNTRKQLQKFFQPYAGALVAMENGTHSPWISRDLEALGCKVLVGNARKLRMIWARSQKTDVKDAEMLARIARFDRQLLYPIRHRSQQAQIDLEQIKARDLLVRLRTDLINHVRSTVKAIGERLPACSADCFHKRAQTSMPDSLRTVLMPLVEQIASLTQQIRGYNCKIEQLALTVYPETACLRQIQGVGLITSLAFVLTLESPDRFDKSRAVGPHLGLTPRQDQSGSCNKQLRISKEGDVYLRRLLVSCAQYILGRYGQDSDLRRYGERLIARGGRGAKRKAVVAVARKLAVLLHRLWSTGEVYQPLYNARKIA

SEQ ID NO: 68990 - protein, 344 aa, unidentified
MTYTGIDLHKSFSYFTTVDETGGIVKEQKITNEPNKILDYFRNFDGQPKAVVECTLGWYWLVDLLAANGVDITLANTRMMKAIAAAKVKTDRVDAAVMAQLLRMDFIPPAYQIPAGIREKRDLMRFRLTLVHKKVNSVNGVHRLLEKFNLDDPEQLEGGYYYQYLQLQDQIETFEQQIKELEESFYKEFLPTPDVQRLLHIPGIGEIDAYAIVLETGDVRRFPDAKNYLSYARLVPGSSNSGGKTRHNYKYSKAGNKYLKIAFTDAAVHALRYYPVIREFYKRKVRKKGKRLAQNLVAKELAKLVYFVLYHQTEYNNTFKAKPLQHIKRHRWPRPASPRLELAQ

SEQ ID NO: 68991 - protein, 400 aa, unidentified
MDVGKESVTVCVRTPGSRRGRHSETRTFKTMTGSLRVMRDWLVESGVTIAAMESTSTYWKPPFYCLEEVMEVWLLNAGHMKAVPGRKSDVRDAEWIAQLLEHGLLAPSFVPPPEIRRLRMLTRYRVQLMGDRAREIVRLELMLEDASIKLSSVASSLKTVSARAMLTAMINGESDPLRLADMAKGKMRRKIPDLAQALTGHFDANHAQLAHSMLRRLDLVEQALVELDQVIVAACRPWQHQIELLQTIPGVGPKVAETIVAETGADMTRFPSAAHLAAWAGVAPAMKESAGRQMPAGKRHGNKWLTAMLIEAAGSVGRMHGKNYLAVQHARLTKRRGMGRAQVAVAHSILVAAYWMLKRDEPYHDLGADWHSRRNDEAHTRRLIAQLEHLGHTVIIDPAA

SEQ ID NO: 68992 - protein, 444 aa, unidentified
MAMRKREDEVFPNAAGIDIGASSHWVAAPRHLAEAAGCEPVREVGAMTEDLNALATWLVSLGVDTVAVESTGVYWIPVFEVLEQHGLKVWLVDARQMKYVPGRKSDVQDCQWLQKLMSLGLLRAAWRPSAEVCVLRAVARQRETLQTSQASWVQRMQKALVQMNIQLTEVVTDVMGVTGQAIVRDIVAGVRDPRQLARHRQRRVKASEAEIAKALEGNWREEHLFVLKQSLAMYDDIARHLADCDARLDGLLDARSRTQVALGKLPRAGSKTRVEHDIRQRLANWAGVDLTRINGLGVTVVMKLLTEIGPDVSRFASVKHFCSWLGLCPGTKISGGKVLSSGTKRSANRARQALKMAAQSLWRSESALGAFYRRLSSRMDKPKANTAAAHKLARMVYFMLTRGEAFVDQGQQRYEEQQRQRSIVALKRRAAALGFQINPVETAA

SEQ ID NO: 68993 - protein, 400 aa, unidentified
MSVGYEPKKEAESSRRSYIKVIAIIRIYARKVNRPEETAMEKHSTQTRKVQVIHIGIDVHKSSWRVTEMRDGVALKTYSASPSAAELGARLRREYPGAEYRSVYEAGFCGFHVHRELEAQGIRNIVINAADVPTSGKERANKNDTLDSRKLARELSNGSLEPIYVPSPANLLLRGVVRCETQTVKDVTREINRMKGILAQRGEEPPRINGGALKLRLEQAVREGDEEMALALGRLITRRSERARAVQAERRTVEALGLWPLLHRLMTVPGVGFRTAVVVLSEIWDMSRFPTENHLVSFAGLAPRLTGSGEHERTGGIGHRKHRLLQGILIEAAWTAGRKDAELHDKYWNMAMRKTARKAVVAVARRLLLRIRAVWLHGADYVPKQASDKAGGTGNDGHGE

SEQ ID NO: 68994 - protein, 386 aa, unidentified
MHHATTLAVPERTCSREDRATLFVSLELSRSTWVTTALVSGSSKMSKHTLAGGDARKLLDLLARLKSRAEERIVAPVKVVAIQEVGLDGFWIHRLLEANGVESHVVDPASIAVPRRHRRAKTDAIDGETLLRTLMAWQRGEPRVCAMTVPPSPSEEDCRRVSRERATLLRERIQHTNRIRGLLFGQGITNYNPLHKNRRECLEELRTGDGRSLSTHVKAEIRREIDRLELVLRQISEVEAKRDEMLRPAEASSPAALLMRLKGIGAEFATVLYLEGLFRHFENRRQLAAYAGLAPSPWKSGSIDHEQGISKGGNPRLRTTMVELAWMWVRYQPDSALSGWFRQRVGSERGRTRRIAIVALARKLLIALSRYVTHGEIPAGAVMKPV

SEQ ID NO: 68995 - protein, 392 aa, unidentified
MRYVGIDVGSDSHVVAAVTAEGTVAVKPTGIAEDAAGYAKLFALLGQAPVALVTMEATGHYWRNLFAALAAHGYAVALLNPLRTRRFAGEDLERTKTDAIDALGIARFGAQKRPAVTRLPDVATDELRELVRHRDRLVADFGDRVRQLHRLVDLGFPEFTRHVKSLDSMLACTLLAEYPNAQAFAGATPRRLAKLVYDGVHKVGPELAAALIAAAKVSVGRHHGPAYRIQVRHTCQDLDLLRRRIRELDDDIGRQLDEHEVGTLLPSIDGIGSNTAARLIAELGDLGRFRNAAALAAYIGVVPGLKQSGKRRGQRAGLCPIGHARLRAALWMPLLGAVRRNPWLKAFYDRLISRGKLPKVALVAALRKLLGAVFAVVRDRKPFVPRLGPAAA

SEQ ID NO: 68996 - protein, 410 aa, unidentified
MEDGRQEGIRDAEGYTTLVGMDAHSAKVSLCVTRWRRGDDPIVIREFATDLKGLEATYARRIPAGALTVLEASTNAFAIARRLEAVGHEAKVLASDAAAGMSRPDRVNDRIDARNLAVAYTRGKARTVRVPSPEHARLREIWFGYRNAVKDTTRHSNRLWGFCSANGLDLPKRSPSLKVEGIRKAVNGKEWEGDGDFHAKMMLAEYAHARETRAAYERRIEEAVAANPCMARAMQVKGVRYIVAFALSAFIEDVRRFGSAKKLVAYVGLNPSVADSGTKEGRRSVSRYGRHDLKALMVEAAQSALSKGGLPMHAWARRKLAEGKNRNAVVCALARKMTCHVWHVLMGHPSPMAEPEAAFRDKLSRLAGKVGKAKIEELGHGSAAKYVESVLSTIRWQEACCAAAGGSPPL

SEQ ID NO: 68997 - protein, 337 aa, unidentified
MDKPTAADRFGGIDVSKGRVDVHVRPHGTAFACTTDPDGLADLVGRFKPLQPRLVAMEASGGYEGVVAAALAEAGLPVAIVNPRQVRKFAGAIGRLAKTDVIDAGVIAHFADAVRPDAKPMPDALSLRLRELLARRRQLVVMINAEKQRLSKAADKLAQRSFKTILRSLEAERERIDRAIDKLIEESPVFCAKQDLLKSVPGIGDVVARTLIVELPELGTVDRHQIAALAGVAPMNRDSGSFRGKRRIQGGRVEVRAPLWPVRLSGTGNRHKAIQKSHAEVGFLSGLRPPSKTVSGSEKSYRPRKLRWRQISGERWAMSSLWTSMPSCLTWRMASCM

SEQ ID NO: 68998 - protein, 402 aa, unidentified
MNAVGIDVSKGKSMVAIMRPFGEIVSAPFEIKHTASGINSLVELINSVEGESRIVMEHTGRYYEVLAHQLSEANLFVSAINPKLIKDFDNDSLRKVKSDKADAVKIARYALDKWQNLKQYNVMDELRNQLKTMNRQFGFYIKHKTAMKNNLIGILDQTYPGVNTYFDSPARSDGSQKWVDFASTYWHVDCVRKMSLNSFIDHYQNWCKRKKYNFSQSKAEEIYGKAKELVPVLSKDAITKLIIKQAVDQLNSASTTVESLRTLMNETASKLPEYPVVMAMKGVGTSLGPQLIAEIGDVSRFTHKSAITAFAGVDPGVNESGSYEQKSVPTSKRGSSDLRKTLFQVMDVLIKTHPQDDPVYQFLDKKRAQGKPYYVYMTAGANKFLRIYYGRVKEYLASLPES

SEQ ID NO: 68999 - protein, 345 aa, unidentified
MEHHVGIDVSLELSSLCVLDATGKVVREAKVASEPEALVAFLRGLGLPIARVGLEAGPLSQWLYDGLQAAGYDVVLLETRHVKAALSAMAVKTDRRDARGIAQLLRMGWFRPVHRKSVPSQEIRALLGARKQLQIKVMDLEQTLRGLLRGFGLKVGDVSRGKLPARIRGLAAGHAMLERIVEPLLAAREAMWREFAKLHREVLTIVKEDQVCRRLMTVPGVGAVVSLTYRAAVDDPDRFKKSKAVGAFFGLTPKRYQSGETDVTGGITRVGDASVRSALHDAANVLLSRVARFSALKRWAMEVAKRRGMRRAKVALARKLATVLHRIWADGTEFRWSKEPAGAAA

SEQ ID NO: 69000 - protein, 355 aa, unidentified
MDSTKYIGMDVHKESISIAVMNAAGKIAMECVIETKASLILEFMDGLRGNLHVTFEEGTWAAWLYDLLKPRVTKLVVCDPRKNKSMTEGNRSDKIDARGLAELLRLNHLTPVYHGEHGLRSLKELVRSYLTITKDLARVMTRVKAIYRSWAIPCSGKQVYAAGHRAEWLGKISELGVRRRAEFYYQQLDALRVLRQQVRRDLLAESKKHQAWKRLCQIPSIGPIRAAVLLGIVQTPHRFRSKRPLWKYSGLAIETHSSADHRWVDGQLRRSKKPLSVRGLNQNCNHDLKNLFKGAAIVAAIKPGPFQEFYAALLAKGMRPEMARLTLARKIATIALLIWKKGVCFDAQYLKPQAA

SEQ ID NO: 69001 - protein, 429 aa, unidentified
MNSCEQTAQDWLAHRAFGGLDWASEKHNVIVVDPRGKVVEDFEIAHSALGWKKFRERMAPYGAIPFAIETSQGAAVEQLLEAGMKVYPINSKSAKSYRERKAPSGVKDDWLDAWSFADACRIDGQDWRALRPEDPLVKELRLLCRDEVELIQQRTSFICQLRHALGEYYLTALEAFEDWGSVSAWMFVQRFPTPQILQAAGKRQWEKFLHARRLWRTESGPRRLELFAHATELCGTVPMANAKSQLALSLISMLFALEKQLGIYRRRIEELFSRHPDHDLFGSLPGAGPKLAPRLLSEIGDDRGRFEDGPQALQCLAGSAPVTRRTGKCKVRANPDHWPCHQRWACDKHLRHAMHLFSEHSLGQCVWAQIYYQHHRQKGSSHADALRRLAQRWLKIIYRMWMDRKPYDAMLHHHNQLKHGSWVFELKTA

SEQ ID NO: 69002 - protein, 422 aa, unidentified
MMKWLDAKRQIYDEELHAMNNVAGVDVSKGKSMVTVLRPFGEVVAKPFSVGHTGSELKELADYLKSLDGETRVVMEHTGRYYEPVARFLHEEGIFVSAVNPKRIKDYGNNTLRKVKTDKAEARKIARYGLDNWAELRQHTLMDTIRTQLKTLNRQQGLYTKTKTMMKNNLIALLDQTYPGVNDLFDSPVREDGSQKWVDFATAFWHVDCVRNMSFAAFTERYRKWCKRNGYNFSQSRAIKIHTEAQDLIAMLPKDALTKTMVRQAADALNAVSKSLERLKAEMRSLASQLPEYPVVMAMRGVGDSLGPQLMAEIGDVTRFAHRGSITAFAGVDPGSDQSGTHEAKSPRTSKSGPPELRKALFLVMDCLLKTMPADDPVYRFMDKKRSEGKPYLVYMTAGANKFLRIYYGRVKEYLASLENAD

SEQ ID NO: 69003 - protein, 372 aa, unidentified
MEERSKIHVGLDVHKDSISVAAAEPGRAPARLIGKLAHDLSKLLKVLIKVGPAEQLHIVYEAGPTGFGLQRTLAEKGYVCEVIAPSQIPRRPGDRVKTDGRDCIQLAECSRAGQLSAVWIPDPSDEAIRDLARAREDAVNSRVQARHQLKGFLLRHGVRYTGKTSWSIAYYRWLSTLNFGAGATQTAFTEYWKAVEAADERVERLTKALEGSITDWRFEPVVRALQALRGVAAITAISLTAEIGDLARFSHPRKLMGYLGLVPSERSSGERTSRGSITKTGNAHARRLLTEAAWNYRFKARIGREALARQEGLPAGIRNAAWKAQLRLTQRFAALQSRGVQLNKACVAVARELAGFVWAIGLQAQREKAPTT

SEQ ID NO: 69004 - protein, 343 aa, unidentified
MEITTVGLDIAKRVFQLHGVDAAGKAVLRWKLQRSEVLAFFKALPPCLVGLEACGTAHYWAREIRELGHEVRLMPPSYVAPYVKRGKTDAADAAAICEAVTRPTMRFVPIKTAEQQAVLMLHRTRDLLVRQRTMLVNALRGHMAELGIIAPQGIARVADLMAVLLGEDTTNVPALAREALRGLAAELEALDRRVKEIEVAIVRWHKDNEASRRLAAIPGVGPITASAIVATITHPFQFHSARHLAAWIGLVPRQHSSGGKQRQGGISKQGDRYLRRLLVLGATAVIRHSRSKSTAEAGWLKSLLERRPARLVSVAQATKRRGSYGLCSCVEKPIACQQQSQVA

SEQ ID NO: 69005 - protein, 409 aa, unidentified
MKLYVGIDVSSTDLYTCIMDQEGNTCAQFKADNHLLGATFLRDQILLWANKRQPSEILIGMEATSVYSWHPAMFFQQQEELRSWNVKVFTINPKLIRKFKEAYTDLDKTDGIDAWIIADRLRFGRLKVTAVMQEQFIALQRLTRMRYHLVHQLTREKQYFLQHLFYKCSSFTQEVDSSVFGHAILELLLESFSLDEISHMDVQQLADFLRQKGRNRFADPECIAKSIQKAARSSYRLSKCVEDSIDLLLGLSIQSIRSLQAQIKELDKAITRHLEGIPNTLQTIPGIGPVYAAGILAEIGQIERFDNQAALAKYAGLTWSKHQSGRFQAEETSLIRSGNRYLRYYLVEAANSVQRHDATFRAYYRKKYEEVPKHQHKRALVLTARKLVRVIDALLRNGQIYTPRKGEDR

SEQ ID NO: 69006 - protein, 325 aa, unidentified
MNTEKNYCGIDVSCDTLDICYQTTEGSKALLQVKNNRSGFAQILKVCNDNFHFVMEATGVYHLALVFYFYEKSVPFSVVNALQIKRYIQMHLERNKSDKKDAKRICEYGIDRNPPSYEMPDSAYFECRSLNNAIADMTKEITKLSNQIHSLRKAPYNTQSIIKSYTSIIQKLKKEQQKMEQELAQKLKEWQPELLEQVQSVKGIGKRAAAELIIYTKAFKGMKSYKQLISYAGLSPVEYSSGSSIKGRTKICKQGGKKLRHILYMGALNAKTTNRACRELFDRLVAAGKNKKAAVIAVCNKLLKQVFGCIKNATLYQDNYAEILS

SEQ ID NO: 69007 - protein, 412 aa, unidentified
MASETTKVIAGIDTHADTHHVAIINEYGKPLADREFLAVGSGYRKILEFITGYGTVSAVGVEGTGTYGAELTRTLRGEGLTVLEVNRPNRAARRLKGKSDPLDAYQAAQSVLDGRSQSIPKAKDGPVECLRILRAGRASALKARTAAINQIKGLLVSAPDKLRAKYRSLGTPAMITALQRTRPSGHTADPEYVTLLTLKALAARCQSLAAEIAAADAALQEIVDTYAPMLCDLPGVGTEVASQLLVTVGDNPERLATEAQFASLVGVAPVPASSGKTTRHRLSRGGDRNANHALYQVVLVRMASCPRTKDYVNKRTNEGKSKREIMRCLKRYAAREIYLQITNPQPAPNNTDLRPLRTKLGITITTAASQLGQWPSIISRLERGLVRNDTLATRYRQWLAEQTAEIPSRVTA

SEQ ID NO: 69008 - protein, 355 aa, unidentified
MNSVRYVGLDVHRDTISAAVLNESGRMVQQSILATRAAAILDFIGGMRGTLHVTFEEGTHSAWLYDLLVRRVARLVVCNPRKNALLKSGNKSDAIDARKLAELLRADMLSPVYHGEKSAQEVQHLARSYTMLTEDTTRVMGRLKAVFRSHAISCAGKKLYGRKHRDQYLSELGVGGLRRRAECLYEELEALQKLRRQAKRDMILECRKYPESKLLCSVPFLGPVRAAVLIGRVQTPHRFRTKRQFWAYCGLALEMRDSGEYRMVDGQVERRKKPAQIRGLNWNHNHELKNLFKAAATSASACDGVFREFYLGLLKKNMQPEMARLTLARKIAAIALKIWKKGEAFNAEHLKLQAA

SEQ ID NO: 69009 - protein, 417 aa, unidentified
MDVLYPRCAGLDVHKDTVVARLRCVSQPRADEVRSFSTTTSALLELNEWLGSHGVTHVAMEATGVYWKPVWHLLEEHFELVLANAQHIRNVPGRKTDVNDATWIADLLAHGLIRSSFVPPAPIQELRDLTRTRKQLVREISQHSLRIQKTLEDANVKLGSVLSNVLGSSGRAILQALIAGQTDPEQLADLAQGTARKKRTELVAALHGRIKLHHRRLLKVHLELIAALEQALREIDADVGKTLAPIHSSARLLTSLPGVSDLTAQVMVAEIGVDMARFPSAAHLISWAGLCPRNDESAGKRRSTRVRKGAPWLKTALVTAAWAAVRVKDSYLQAQFHRLRSRRGAKKAILAVAASMLTAAYHMLKNGLQYRDLGADHFTRRVAPRRSSDSCADSTIWAATCNSSLKLHEPEIMTASY

SEQ ID NO: 69010 - protein, 404 aa, unidentified
MKGPIVSIDVSKGKSDYQAFKDLNVKYTGSRSIKHNKEGFDEIVNLVREMEKKLETEVCVVYEATGVYHRVLKKVLEDNNIKQFIINPLLSAKTRKNDSLRSPKTDKLDPKSIAKTYYSHSLHNSHKQETIYHELRELSRYYEDILVHIRKDKVAFRAQLDIVFPGYDTLYDDLYGPVALAIIEKYPHPEMLQKKKINTVSKVIQNKTYHRQAVSDTMADKAIEYSKTIYSGCDKDDIEVLILQRFIKKLNEDMAEAERTIGEMIKLAQELPDFNIIKSIPGIGDNLAARIIAELGDMTRFKKKNELVAFAGLDPRISESGQNDGDHMHITKKGNKRLRCLLYLAVTCSIRLKRDDNSIKDFYIKKKQQSNPMCSKAAKTACASKLVRIIYSMCKTGELYQYNK

SEQ ID NO: 69011 - protein, 308 aa, unidentified
MANQVAKITLGIDVAKDHHVIYNWLTGKTIKLRNQSSDISTWLKSFHGPVRVAIESTSNYHLALVDEALALGCEVYLINPRQLLHYREAVNIRNKTDPLDAWLLARYLEHEVDQLRPFQPRDPRAQRLWRLILRRATVVKSHQQLQQSFAEVGVSIRGVLNQLKDLLTRIDRHILTLIRELGWWSDYQYCLSIPGIGAGNASALVAAYHRGAFSGSDAFISYLGLDVRIRESGTFKGTRKLTKRGEPELRRLLFCATHPARHYQRFAEYYQKQLDKGLSKIAARVILARKLARIAFTLMRNEETFIKE

SEQ ID NO: 69012 - protein, 430 aa, unidentified
MKSNTQNAKIKAITETTLVLGIDVGSETHYARAFDYRGIEYSKKPFKFSNDEAGFVTFKAWILDIKEKHGKDKVVPGMEPTGHYWFNLGKFLQDNEMKPVLVNPHHVKKSKELDDNNPTKNDRKDPKVIAGLVREGCYMIPYLPEGVYADLRTASNMRFQLQAELTRIQNRISRWFNIYFPEYKTVYGQPDAKSGMLILKVAPLPEDILTLGIDGVNQIWRDAKVRAVGKARAKTLIEAAEHSVGSKEGEISARMENRMLLEDYESRNTRLQEVVALIEELVKKIPMAEKLLEIKGVGIKTVSGFLAEVGDISRFNNPKELQKLAGLALVENSSGKHKGETTISRRGRKRLRYLLFEVAMSLVSKNPEFRELHSYYTTRKLNPLKKMQSLMAVAAKLLRVFFAMLTKGVDYDPKKLVGDIKRPAVYLQVA

SEQ ID NO: 69013 - protein, 341 aa, unidentified
MSTFYYVGLDIHKKSIAYCVKRIDGKLVQQGTVSAERKALQLWHSKLPGPWYGAMEATIFTGWVYDFLKPHAIELKVAHPAMLKAITAAKKKNDRADAEKIADLLRVNLLPECHMMPEELRELRRVLRYRNMVVRTAVKMKNKMSGLLMEVGAQYNKKRLHGKKYFSELLERVEDVPHSVKELLKLSRSSFELFNATQKKLIGALRENKIIKERVQRLTSIPGVGEITALTWVLEIGEASRFSSSRQAISYCGLCSAQHESAGNEQRGPISKQRNKHLQTILIEAAKLAPHWNEQLALLYEKELMRGHKNRATISVARKLVEFMLAVDRRDTSFEILKKAA

SEQ ID NO: 69014 - protein, 375 aa, unidentified
MVVYDEMVSPRYPNRRLCAMMESKQLTINVVREETEMNITTVGLDLAKNVFHVVCFDERNKEVKKRMMRRNQVRHFFTQLSPCRVGMEACATAHYWGRELRALGHDVKLVPPQYVKPLVQGNKNDYNDARAIAESLDRPKVSFVAIKTIEEHDMQAIHRMRSQCLRDRTALSNSTRGLLGEYGVSFSKGLAVLRRKIPELLEDADNELSLRFRNLLARRYEQLVEIDEHIAFYTKELELLSKQDDACQRLQTIPGFGPIVASAFRSTIGDGRAYVRGRHAAASLGLVPRQYSTGGKNVLLGISKRGDKYLRKLLVHGARTVVLHAANRDDPLSRWINRIRERRGYNKAAVAMANKMARMGWAVLMYNTSYEPTLA

SEQ ID NO: 69015 - protein, 349 aa, unidentified
MNATIVGVDLAKNIFELAVAGSDWRITQRQRLARPKFLSFFVHLAPCEVVMEACGSAHFWARRISALGHTVRLLPAHYVKAYVRRNKTDQADAGALIEAARCAEIREVPVKTVEAQQIQSLHRLRSQWMSTRQRCVNTLRGILREFGFAIPLGVNVAKAQIGVALSDTDTDIPAALRETLTEMFQQIAVLEQKILTVEHQLNALTRTDLRVQQLRQIPGIGALTSTALRAIVGDIHRFPSGRHFASWLGLTPNERSSAEKRRLGRISKQGDVYLRTLLVHGARSALLAAHRALRAGRPLDRLRQWALDCERQRGHNKATVALANRIARIVWATWKFERPFDGNWSAEAN

SEQ ID NO: 69016 - protein, 387 aa, unidentified
MGELVESVAPPLPNVGGTVGRSPLGPASPKSSKGRRAIRSFKSPNSWMSESSNVARKGQERASTFTGGERDAQMSEVNVGVDVSKLSLDVSVRPSNERRSFENNEDGIQSLVIFCGELKPLRVLMEATGGYEMALLTALVTAGLPGISVNPRQVRDFAKANNRLAKTDRIDADVLAHFAEAIKPALREVPNEQSRELLELVQRRRQLIDMRTAEKNRLEHATAKVRQSIAKHIAWLNKRIEDVDDETKRRIRQTPAWREKEEIMRTAKGIGETTALTLISTLPELGRLNRKKISSLVGVAPFNRDSGMMKGRRRIYGGRASVRSVLYMATLTAIRCNPVIKATYERLIAKAKPPKVAIVACMRKLLVGLNAMCRDGKEWAPHGSIAA

SEQ ID NO: 69017 - protein, 357 aa, unidentified
MQEKLYVGVDLHKTQFTICVINEEGDSFEAGTKFPMDKEGYIAFADKMKKLSRRHDGATVSIAIESTANARFFRDIMEAKGFEVTVVNTLRFKVVNLSTKKTDKNDAKTLAEFLARDILPKSHLCRPESESLRRVLKSRTLMVQDAVALKNQAHAVMLAYGYITQPAQFQSKSSRTKLLARLPAKVKEIIEIIFETLDLVESQTHVLERRLRRITIDNECVNLLMTIPGIGIVNACTIYAYTDDIDRFESYKNFSAYCGLVPWVQTSNESVYYGKITKRGPQELRTALVQCVVAMVRMPGKTADLGIMKQYHQLKDDKSSGKAIIATARKLSRIIYVMLKTMTPFDSPKLIKDDPKE

SEQ ID NO: 69018 - protein, 309 aa, unidentified
MMAQNDVVVVGIDVAKDKVDACIRSLGMRQTFPSTAQGHRKLVAWLRKHQVSKTVMEASGGYERAWAKVLREAGIEVRIVDPKRVRSFALSAGRLAKNDTIDAEMIGWFAETFSDAPGQTHDPAHEELQTLVKARLSLINFRMRLVGQSEHAAPGLVRKAHARILKSLACEIAALEAAICAKIKSMPDFAERAEIIKSVPGFAETSAANLVAGMPELGQVSDEIAAALIGVAPYDDDSGKRRGERHIKGGRRWVRNAIYMPCVGAATLNNPVLKAYYQRLIAKGKEPKVAIIACMRKLIVILNTMIARR

SEQ ID NO: 69019 - protein, 350 aa, unidentified
MAQFIGCDAHKKFSVFAAMNEKGEYEPTIRVSHDRETFRQFLQELPPKSEIALETSGCYYWRVDEMERAEHVPRLAHALTAKRRMEGGRHKSNERDARGLAMLLRNGTLPVVWIPPAELRDQREMLRWRMTLSNLRTRIKKRIHGVLQRYNIEIAVSDLFGDTGRARLLERRSELPTYSPLSVVDQRRTIDAIETQIGDCEQVLQEMLYPSVERDLLDSLPCVGKVLSAVLALELGDVRRFSGPDRWVSYAGLVAVARESADWKRKDRCPRDCNVYLKWAYVEAANLISIQRHKDRWKERPVVQLYERVKESTKMHGKATMAVARHLAEACYWMLTKHEIYREPRPQRLR

SEQ ID NO: 69020 - protein, 355 aa, unidentified
MTSDKYIGMDVHKEATSIAVMNSAGKLLMECIIETKAITILQFFAGLRGSLHVTFEEGTWAAWLYDLLKAHVSEIVVCNPRKNALLKDGSKSDRIDARKLADLLRGNYLKPVYHGEHGLRMLKELSRTYLAISKDLVRVMNRLKALYRGWGIACSGRSVYVPSHREAWLKKIAEPGVRLRAEYFYQQLDTLQRLRREARRNLLSESRKHSATKMLSQIPTIGPVRSALLVALIQTPHRFRTKRQLWAYSGLAVETHDSAQYRYLDGQLLRSRKPQQLRGLNENHNHDLKNIFKGAAQKATGATGPFREFYERLLTKGIKPSMARLTLARKIAAITLTVWKKGARFDPEQLKPQAA

SEQ ID NO: 69021 - protein, 372 aa, unidentified
MEKGIKVYVGLDVHKDTIAIAVAEAGRTAGRVIGTLAHDVNKLLKALGKLGRPEDVHVVYEAGPTGYGLQRTLAAKGYRCEVIAPSLIPKRAGERIKTDRRDCLHLAQCSRSGDLRAVWIPDPEDESIRDLARAREDAVHSRTQARHQLKGFLLRHGVRYAGKTSWSKTYYRWLGTLNFQRSGAQTAFTEYWQAVQAADKRVERLTQALPAAIENWRFQPVVAALQALRGLDLVSAIGLVAEIGDLCRFDHPRKLMGYLGLVPSEYSSGDRVARGSITKTGNAHARRLLTEAAWSYRFKARIGYHAQRRQENLPQEIRDIAWKAQLRLTTRFARLQARGVQVNKICVAVARELAGFIWAIGLAAAQPKPATN

SEQ ID NO: 69022 - protein, 366 aa, unidentified
MGWMAPSRHRSAKMVVVKDHQQREPSMGDITTIGLDLAKNVFQVHAVDEAGSVVMRKRLRRGQVLAFFAEIPSCLVGLEACATAHHWARELIALGHEPRLMPPTYVKAYVKRNKHDVADAEAICEAVRRPSMRFVPIKTVEQQSALMMHRARDLLIRQRTMLVNALRGHLAEFGLIEAQGLHKVARLIAIVMDEKDGRIPDIARQVLKAIVNQIEDTQTRIAGLERQVLAWHKNNPVSQRLATIPGIGPIIATAIAATVADPSIFCSGREFAAWLGLVPRQNSTGGKARLGGISKRGDSYLRRLLVNSAHTVLLCSKQAKIDPWLTSLLSRKPRLVVAVALANKTARVAWAIMSRQDTYRHAPLAA

SEQ ID NO: 69023 - protein, 343 aa, unidentified
MSEYAGQQFVGIDLHRRRSVIVRTTGSGEVLESVRILNDVESLDRVIERAGEDPEVVLEATYGWYWAVDALREAGARVHLAHPLGVKAFEYRRVKNDFRDAADLADLLRMGRLPEAWIAPPATRELRELVRHRATLVALRSHCKAEIHAVLAKCGVQVLMSDLFGIEGNKLLDRLRLPAAYAARIGSLRRLMDDLDFEIEVFTNAAQGRLDADPGYLAVQQIPGIGAILGAVFVAEVGDVTRFDHAPQLACWAGLTPKHHESDTHVRRGRITKQGSRLVRWAAVESVKRVGPHTRIGALRDRVAERRGGNIGAVAAARQQVEYVFYALRDGHVRALHTPRQVA

SEQ ID NO: 69024 - protein, 359 aa, unidentified
MQTQNKTKTPDFTGQNIYVGIDTHFKTWMVSIYSDEFELKTFGQEPDVDRLENYLHKHYPNANLKLAYESGFCGFWIQRSFAKKGINCSIVHAADVPGSNKELIRKTDKVDSRKIARGLKNNELNYIFIPDEQLESDRQLLRSRTRIVRDTTSVKNRIKAFLKFKGISIPDEYRSHKWSKKFIVWLQNIEHNNISSKTAFGSYVDELLFLMQKQMQLNKSIENLAKSENYLDNIHLLMTVPSIGLLSAMTILTELGDINRFQKQDHLYSYCGLTPDCHSSGDIERIGKVSRRGNIFIKTVLIECAWVAVRKDPALLLYYKQQLVKMDRNKAIIKVARKLLNRIRYVLKNKAAYQIGIVE

SEQ ID NO: 69025 - protein, 419 aa, unidentified
MSNSNISRRLAQVKSGTLHAGVDLALDSNVIIVLDENARQCDRFHFPQDIDGYQYMLERLRKVCHKQGASQVVVAMEPTNYFWKLLANWLEQNQVAYHMVNAYTVNKHREGDQIDRSKDDPRDAFVIGDLSRTGKYTETQLQRGDYAELREYATLYYQTVKNVHREKSILWGLIGQVFPELSRAFKSFSGATITALLKTCPAAVSIRALSEENFIAQVTTAFSGKRLCQSKLRQAYRLARTSIGLVDGIQANALAIQIHLNHLETLQKEIIQIITALKRCIQQVEAAKYLLSMKGLNSLSVALFLAEIGDPGRYRSASQLVKMAGIQPVPNSSGRKQRSSTPMSHQGRPGLRSTLYFACLRLIQVDRRFQEVYHYLQTRTKNPLTKMQALGVLMNKLLQVLWALMRQKIFYNPYFISAD

SEQ ID NO: 69026 - protein, 309 aa, unidentified
MEHFIGIDVAKDRLDVHVRPSGASFVVARDGEGLAALVDRLHALAPTLVVVEATGGYETVVASAVGAAHLPLAVVNPRQIRDFARATGKLAKTDKIDAAAIAHFAEAIRPPVRPIAEAEAQALGELVARRRQVIEMIVAERNRRRMATQRRVIRAIERHLALLQAELSELEHDIDGAIRNSPAWQADADLLASVPGIGKATLRTLIAELPELGRLTRRKIAALVGVAPINRDSGSRRGRRTIAGGRPAVRAGLYMAALVASRANPVIAPYYAKLRATGKTGKQALVACMRKLVVILNAILRDRKPWQPA

SEQ ID NO: 69027 - protein, 413 aa, unidentified
MGYRIAGIDVHKRMLAVVVADVAVDGEFHFERRTSGTSPDQLRALADWCVAQDVEEIVMESTAQYWRPVWETLERYWQPRRPAGAGVLHLAQAQSNQGARGRKRDFPDAERLVKRLVAQELTLSFVPDPEQRLWRTVTRRKYQLTSARVQLQNRLEALLEEAHIKLSSLVADLLGPSARRMLQAIADGSTDPTAVAALAHQRMRAKPEALRDALGACGDLHPVYRRLLQLALTELRGIEAQIEALDHELAGLLRPQQPAVERLAAVPGLGVDSAQQMIAEVGPTAGTFPSPKHLASWVGACPGAEESAGVSYSRRAPHGNRQMRRLLTTAANAAIKTKGSIFEYLYRRWVVRLGHRQAIAAVAHRLCRLIWKILHEGVVYEERGPAVTKERLRARTAKMIRELRILGYRVEPA

SEQ ID NO: 69028 - protein, 354 aa, unidentified
MRTTEQAVRKVISAKEVYVGIDVHKESWHVTVRSDGEERFNGRIPGRYQSLKMVLERYRDLRIKVAYEAGPFGFWLLDRLVLDGIEAIVVPPSLIPIESGNKVKTDKRDSRKLATLLEKNMLKRVYVLTREEREHRDLLRTRRQIVDHRNNVARQITSKLMFYGISSPFTSTTRWSVQYVEWLKTITFETTYLKEAFDLLIELYENLTRQIAKINRNVVALCRDKKYRQKIKLLCTAPGIGKLTAIELLVELQDITRFKNAEEIASYIGLTPAEYSTGERTRQGRITRCGNKRVRTYLVESTWVLITKDPYLRAKYLRLKNLRGGKRAVIAIARKFLIRLRRMLLDNVPYRMAA

SEQ ID NO: 69029 - protein, 290 aa, unidentified
MPETEVDTFAGIDVSARELSVALRRGKGEDKPAMAKFSNHPSGHKALIAHLLRSGRRVRVCLEASGNYSLDLALTLQAHRQVEISVINPRRARRFAESLGQRSKTDPVDARVLCEYAARMPWVAWQPPSSVALHLRAVARAIADLGVIHTQQNNRAHASAASQALPVLVVKEMQRHQKYLEQRMTRLRREALRLIAGDSELDRRFRLMLTTTGIAETSALQILGELAVLPNMLDARQWVAFSGLDPRLFKSGKSVEKRPRISRGGSRHLRRALYMPALVALRRDPYLRRF

SEQ ID NO: 69030 - protein, 313 aa, unidentified
MSQNNPAILHLGLDIAKASLEFDRVGKSQPLNNDPKGHTRLIKLLRAHPGAHIICEATGGYERPVVRALHAAGQPVTVVEASRVRHFAKAKGLRAKTDPIDAAVLSEYGRTFQPAPTLAPTPAQARLSELSRRRLQLIDTRIAETNRAAHYTDKLLLRQTRQLQQLLEKQIAACDAAIAELIAADPVLKVRAQRLDAIPGVGLVTAATVLAELPELGKLKDNAATALVGVAPFNRDSGEQTGNRHIAGGRKTVRCALYMAALSAVQFDPILKAFYLRLRTAGKKPKVALVAAMRKLVILMNRLLKNPQFQLAK

SEQ ID NO: 69031 - protein, 338 aa, unidentified
MPTDQTGQTYALFVGVDIAAQTAMVATQRPGAKASRSLTIEQTPEGYTSLLRQLQATGFVPCQVLVVMEATGSYWMSLATRLVHEGFAVSVINPAQAHHFAKALLKRAKTDAIDAQTLAQLAMILQPEPWTPPPQIYYALQQRLAQRDDLLNLRQQVRNQLHALVQHPEVIAEVRARMESLLATFASQLTEVESEITAALSQDSAWAAAATRLQSIKGVGWVTAAWTLVTTLNLTSCDTVDALTAYAGLAPMPRQSGSSVWHRPSIGHTGNGRLRTAFYMATLSAAQHNPVIKAFYTRLREVGKPEKVARCAAARKLLHIAWAVVKKDQPFDPHYALG

SEQ ID NO: 69032 - protein, 350 aa, unidentified
MHVTTIGFDLAKSVFQVHGVDAAGRAVVAKALRRGQVLAFFGKLRPCLIGMEACATAHHWAREVAKLGHTVRLIPPAYVRPYVRRGKNDAADAAAICEAVTRPSMRFVPVKTAEQQAALMTHRSRDLLMRQRTQLINALRGHLAELGLVSPKGREGVASLIGVVRAEMANALPQTVHAALSPLIDQLEVTEQQIATLDKAIHAQHRASQASQHLETIPGIGVIGATAIAATIADPAAFKSGRDLAAWIGLVPRQNSSGGKERLGGISKQGDRYLRKLLVIGAAAVLKRARQQPDRHPWLVALLSRRPAKVAIVALANKIARIAWSVLVRGATYRAPAFVGNAAKGLAMGT

SEQ ID NO: 69033 - protein, 321 aa, unidentified
MEAAPVYRGIDVSKAQWDVAERPSGKRAVMPHTEESMTTLVERLRPHHPACLVLEGTGGLDVLLASALAVVGIPVAVVTPRQVRDCATATGPLAKTDAIDAQTVARFAEAVRPVPGPLPDDATQAFSARLTRRRQLIEMLVAEQNRLQRAPRPIQRQIQVHLTWWKKQLAALDEDLTHPIRSTPIWREREDLLRSVPGIGPVVSRTLLAEWPELGTLTHKQIAALVGVAPSNRDSGTLRGRRMIWGGRAVVRGVLYMSAVVAARHNPVIKAVSTTARGWQGAERRARRLHAHAADDAQRHGQTSNPVASVSSGHLTIQDGC

SEQ ID NO: 69034 - protein, 354 aa, unidentified
MSQKLESAIAVIGIDIGKNSFHVVGHDDRGAIVLRQKWSRGQIEARFANMPPCLVGMEACVGAHHLSRKLNSLGHNARLMPAKYVRPYSKGQKNDFRDAEAIAEAVQRPTMKFVATKTADQLDLQALHRVRERLVSQRTGIINQIRAFLLERGVAVRQGQRFLRAELPRILAAPSDVLSPRMVRLIEDLAGDWRRLDQRVESLSGEIAAVARQDAGCERLMSVPGIGPIISSAMVAAIGTGDGFSKGRDFAAWLGLVPKQMSTGDRTILGKISKRGNRYLRVLFVQAAWVVLIKPKSWERHGLKPWIEAARKRLHRNVLAIALANKLARIAWSVLARDRAFEVSKLDEAAAQPT

SEQ ID NO: 69035 - protein, 342 aa, unidentified
MSKVTTVAVDLGKEVFQIGFADRHGREVRKQRRLTSRDEFRAFVAEVDPRCEVLMEVGWGAQGWARAFRARNIRVRLLPAQQVIAHRTGAKNDRNDVLAILRAGQDASIHAVPVKSAEDQAIQAEHRVRRGWVRRRTAISNQVRGLLADQGMVFAKGDAAFVNGAQGALEDASLPIPDRLRVLIQALLIEWHQLGARVHESDANLERLVRDHPIARMLQQELDGVGPIGAPALACKAVELDRFADARHFAASFGLVPEQHSSSDRIRLGRMSKRGDSYIRATLVSGAMAVFRYLPMRPDNPDTRRLQRWHARHGTKGAAIRLANRNLRIAFSLMRSKKGTST

SEQ ID NO: 69036 - protein, 369 aa, unidentified
MGDRITYVGLDVHKEGIVVAVAEGGLRGEVRDYGRIANTPAALDRLMRRLGGEGVKLRFCYEAGPCGYGIQRHLSAHGHECVVVAPSLIPKRAGDRVKTDRRDAAGLARLHRAGELTAVWVPDARHEAMRDLVRARLDAVHALRRARQQLSGFLLRQGCHYGRPAWTKLHRRWLAGLKFEQAVHHIVLEDYIAAVEAAEARRDRLTAQIEAMLPDWTLAPVVAALQTMRGMALVNAATLIAEVGDFSRFANPRQLMAYLGLVPSEHSSGASLRRGGLTKAGNSAARRLLIEAAWCYRFPARVSRELRLRQEEQPRPIREIAWKAQLRLCARYRKLARSGKPANVVTAAIARELAGFIWAIARRVPPAAS

SEQ ID NO: 69037 - protein, 342 aa, unidentified
MQVTTIGLDIAKNVFQVHGIDAAEKVVVRKQLRRRQVLEFFKALPPCLVGMEACATAHYWARELTKLGHQVRLMPAKDVKAYVKRNKNDAADAEAICEAVRRPTMRFVQIKSTEQQGRLMLHRARDLLMRQRTQVINAMRAHLAELGIVAAQGRDGIKELLKIIANEEDARLPVDAHASLVVLAAGLQAVQTMIGSIEKRIMVQHRSNEASQRLESIPGIGVIGATAIAATVPDPKVFGSGRDFAAWIGLVPREDSTGGKQKLGPISKRGDRYLRRILVVGACAVLRYARHKPEKYPWLTKLLARKPFKVVAVALANKMARIAWALLAKGDTYRVPALAAAA

SEQ ID NO: 69038 - protein, 394 aa, unidentified
MAFKIFRKNCCGLDVHKTWIYACMGITDTNGRTEYKQARFSSFTKGLQELADWLAKYDSNDVCMESTGKFWIPVFNILEKTCWVTLAYPKYTKPQKGNKTDHKDAKWICDLYMCDMVNPSFIPPPDIRQLRDLMRYRSKLTNIMTSEKNRALNCLTVSNLKLDDVFSDVFGKSSRSVIRYILEHPGETFQVAPFIDRRCKHPVEEIQAVIDGTISHQQAVKLRECLQHLDELEVHKTNVEKEILCLVQQYPYQLELLQTVPGFSGNIMTAIALISEIGADMSVFPSAKHLVSWAGCCPRNDQSSKKVKSTRISRAGVYLKPLLVQVAIQPFTANADKLSAAGAVEIRCQICDGRFLSMWAALFIFLGCPLPPCPKNLHVHNGRIVILASVAWIF

SEQ ID NO: 69039 - protein, 371 aa, unidentified
MQQQAERVVVGMDPHKRSATIEVMTADESVLGGGRYSTDEAGFAAMVRYVNELRLRREDRVWAVEGCSGIGHHIAVRLLAAGEQVIDVPPKMSARARVFATGQGRKTDATDAHSVALVGTRMAGLRPVVDDEQLAVLRVLVDRRRSLGEDHTRMTSQLHRLLLELIPGGAKKDLSAAQAKALLAKVRPRDAAGKARRRVAAELIGDLERIYSRKKAANKELKELVAATGSSLLDLPGIGPSGAARLLVDVGDITRFPDRGHFASWNGTAPIDASSGDVVRHRLSRAGNCQINRTLHTMAIVQLRNPGPGRDYYDRRKADGKSSMEAMRALKRRLSDIVFRVLVDDMLAVRPIDQIVTSAPDARTGEAISAA

SEQ ID NO: 69040 - protein, 343 aa, unidentified
MDQITTIGLDLAKAVFQVHGADATGRAVLRKKLRRSEVIRFFSDLPHCLVGMEACGSAHYWAREIGKLGHEVRLIPPTYVKPYVKRGKTDAADAEAIAEAVTRPTMRFVSLKTEEQQSVLMLHKSRDLLIRQRTMIRNQFRAFLSEMGIISATGNKGFAALVKEFYESEEKFPSECRSVLRTLCSQNDSLEKAIQEIEKGIMAWHRSNEVSQRLTTIPGVGPLTASAIVATVPDPSVFASGRHFAAWLGLTPKSHSSGGKNILRGISKQGNAAIRRTLVMGSTALVRQEKIRQKMNKATKGWLGSLLECKPVKVAAVAQANKNARIIWAMMVHKTSYEAPKAA

SEQ ID NO: 69041 - protein, 441 aa, unidentified
MAMRVRDEEIVFPNAAGIDVGASSHWVAVPRHATNEPVREFGAMTDDLNAMADWLLACGVDTVALESTGVYWIPVYEVLEQRGLKVWLVDARQMKYVPGRKSDVQDCQWLQKLMTLGFLRAAWRPDGEVCVVRAVARQRDVLLADQASWVQRMQKALVQMNIQLTEVLTDVMGMTGQAIIRAIVAGERDPKVLARHRNARVKASEEEITKALTGNWRDEHVFVLRQALAMYDDIAGHLGECDAKLQALLGELGQAEVDLGKAPRAGSKLRQEFDARQILANWAGVDLTRINGLGLAAVMKILSEIGPDLSRFETVKHFCSWLGLCPGTKISGGKLLSSKTKRSANRVRQALKMAAMSLSHSSSALGAFYRRLCSRMDKPRANTAVAHKLARMVYHMLTRGEAFVDRGQQHYEEQQRQRSVTALKRRAAALGFEIRPTPAPV

SEQ ID NO: 69042 - protein, 405 aa, unidentified
MDVLVERGCGLDVHKKSVTACVMGKGIKKEVRTYSTMTNDLLKLKEWLKEKKITHVAIESTGIYWKPLFNIIEDSFKVILVNARHIKNVPGRKTDIQDSEWICKLLRNGLLKGSFIPPKDIRELRDLTRYKRKLIQAISSEKLRVQKILEDANIKLSSVVSDTFGVSGSNIIDELIHGELSIEDMSELSKGRLRKKKDLLKEALVGNLQKHHKFMIKASLEHIEAIEKIKRDIDSKIQEKLDTYSEEYELLQAIPGIKEKGAATIIAEIGVDMSVFPDENHLSSWAGMSPGNNESAGKRKSGHTTHGNKSLKSILVECAWAATRKKGTYLQAKYYSLVSRRGKKRALVAVGHKLLIMCYHILKYKVEYKELGVNYLDNRKKDKVIGSYIKKLNNLGYDVLLQETA

SEQ ID NO: 69043 - protein, 402 aa, unidentified
MANSPTRFFGLDIHKEYFVAVGVNADREVVFGPQRVSNYQLDDWISRVLTLNDAVVLEMTTNTYLFYDTLLPQVHSVIAVHPPSVALVTNAQVKTDKKAALALAELHAAGMLTGVWIPPHKVRDLRALIARREKMVRLSTIAKNRLHSILHRNHVTLPEKPFSPEQRTWWEGLPLSETEQFLVRSDLDTLAFAQKQVAQAEECLQKESAQDERIPLLVQLPGVAMLTAISILAAIGDSARFPTAKNLVGYAGLGTRVHNSGMTHSSGRITKTGRRDLRRAMVNAANHAIEHHPHWKKEFERLEPHLGRSKAVVATARKLLVAVWHVLNKKAADRFADPRNVACSFFALAYRVGVRNLPEGQSALVFTREQLDRLGIGKDLQEIPWGSIHRKLPPSKLLIEKK

SEQ ID NO: 69044 - protein, 344 aa, unidentified
MKLYTALDVSLRSVAICVVDERGEVRHESKVEAEVDHIVARLRSVSSELKVVGFEAGTLTQYLTYGLQAAGFEVICLEARQVSAALAAMRNKTDRNDARGIAQILRTGWYSRVHVKSPQSHQMRLLLSSRRAVLSKCVDLENELRGLLKVFGVRLASKVPHGAFDAAVHPLIKNDPMLARALLPMLEARLVLYRTYLKLDNEIKAVVRTDPTCQRLMTVPGVGAVTALTFKAAVDDPHRFKSSRTVAAHFGLTPRRFQSGETDNPGRISKAGDPEVRSALYVAAHALVTRASAWSSLKAWGVRLAKTRGHRRAVIAVARKLAVIFHKMWINGTDFRCTGAEATA

SEQ ID NO: 69045 - protein, 355 aa, unidentified
MKNQAIQYLALDVHQATVVATVRDEHGAIRMRATVPTEAKAILGLVRGLGPRVHIAFEEGTQAQWLHDLLQPHAERVVVCNVRGRSETSNKSDRIDADELSEMLRVGSIKSVYHGASGILTLKELVRCYTNLVDDSTRVMLRIKALFRARAIPTPGTSVYRARERAKWLARIESRGGRMRAESLLRQLDTLLELRPKAKAAMIAEASRQPGWKVLRSMPFFGPVRVALLLAIMATPFRFRTKRQLWPYVGLAVVTRSSADQEFVNGKLRRRRRAPLTRGLNRNHNPVLKNVFKGAANAAAAKPGPLKDVYDACVGRGVRKELAKVTLARKIASIALRLWKKGELWDPDKLTMQTT

SEQ ID NO: 69046 - protein, 338 aa, unidentified
MEKYIGMDAHSSMCVFSVIDGKGVEVQQDKIATNGELLVEYIRSIEGPKKLVLEECELSSWLAETLRREVDELIVCNPTRNIQYKRAKTDKLDARNLALLLRGGFLAPVYHDGSRTEHLRMLMSSYQDVVDTGVSLKNRYKSLFRKAGLPARGDKIYGDDSLLEDLPRPDQRFVGHSFYRLLEALEQERKQYAAAIRKLSRTFPEIKLLKAIPGIGDIQAAKIVSQVISAGRFKDKHKFWSYCGLVKHRMESAGRLYGSRRGYGNRVLKCVFKMAAKSVLAGESELRTCYDELRGKGAGDKAARNAISRKIAAISLSILKSKRPYDARLVLGRAGQIA

SEQ ID NO: 69047 - protein, 338 aa, unidentified
MKTHVGVDLHQRFCYLTAVDASGKLCKQGQVVNEGAALRAWLRQLPCPRQVVVEASGFWPAFARAVAPEQERLVMVHPQRVKAIASAKLKNDRVDSETLAHLSRCDLLPEAWMADEATQQLRLRVRLRITLGRQRARAKNQLQAVLHQEGFKKPVTDVFGKRGRAWLAGLELSASGRLVVDTWLREVDHLDVELAGQTRELERLAKEDGRARFLQTVPGIGAYAAMVILAELGDVERFGSKRSLASYAGLTPVVRESAGKRKRGGITHQGSNTLRWMMLQVAQVAARCSPGARSYYAGLRARKPAQVAKIALARKLLTVVWALLHHGECFDEELFARG

SEQ ID NO: 69048 - protein, 343 aa, unidentified
MEHIAVDLGGRESQVCIRDEQGTIVEERRWPTARLGEYFQKHSSARVVVETSAEAFAVADEALKAGHEVRVVPATLVRCLGVGSRGVKTDKKDAQVLSEASCRINLPSVHIPSEQSRDWKALCGARECLVESRTKLINHTRGWLRTKVKQVRKGAAQTFPKRVREKLLSTSEGMPMYIERQLCCIEALNEQILLADKELGSIALENETCRRLMTVPGVGPVTSLRFVAAVDEISRFPSAHPLQSYLGLTPGEDSSSQRERKTSITKAGAPKLRWALVQAAWAAWRTCPEDPMVEWAKEIAQRRGRRIAIVALSRKIAGILHALWSDGTTYDSKRGASPKVKSI

SEQ ID NO: 69049 - protein, 402 aa, unidentified
MIFINCLGIDIGKSESVVAHYKDEVLVKEMVIQNNQNGYRYLKNYIKHLDSLFILFESTGIYSRGMKRFCEIHKIDYLEMNPLEAKFKTSSLRSWKTDKSDAHKLALLAFRMKDSKVQRHPEEIYFELRERARFHLEMEINQNRLKVELVETLHQTFPGLEKLFTNRYSKIALNIAKAFPHPDFVSTLTHDELVEKVLHSTDKGISVNKAHKYVQKLIEIQINSFPNVDKSSFLLQKVQYLCDKLLIGIEEMKEFDQEMIDLAKNTTEFENIISIPGIGELTAALLIGELGNIREFKTNKQLNAFVGIDIKRYQSGTSKSRDTINKRGNKKARRLLYLIIMNIIRGRNHYQSHIVDYYYKLREQPHGKTHKTAVIASINRLLKTIHYLIVNNKLYDYQKAPH

SEQ ID NO: 69050 - protein, 389 aa, unidentified
MKIYVGIDIAKLNHFAAAISSDGEIIIEPFKFTNDADGFQLLVSKLESFDKNSLIIGLESTAHYGDNLVRYLVTELYQVCVLNPIKTCQMRKNNVRKTKTDKVDTYVIAKTLMIQDNLRFVSFFDLDMMDLKALGRFRQKTIKQRTRLKIQLTTYVDQVFPEIQYFFKSGLHQHAVYALLKEAPSPKEIASMHMTHLANLLKVNSHGHFTKEQAKELRVLAQKSVGANDSAISIQITQTIQQIELLDSQLEKIEAEMTDIMKFNDSVIMTIPGIGYINGGMILGEIGDIHRFSNPNKLLAFAGLDPSVYQSGNFQAKTTRMSKRGSRVLRYALVNAAWNVVRNNATFKAYYDAKRAEGRSHYNALGHCAGKLVRVIWKMLTDEVEFNLE

SEQ ID NO: 69051 - protein, 400 aa, unidentified
MISVGIDVSKGKSTVCILKPYGEIVSKPFNITHTHKDLSELSSMLFRLNDEVKIVMEATGIYHLPVLTYLQEKGFFVSVINPYLMKSYRNESLRKAKTDKIDSRIIANYGIDHWFKMKEFQTSGEIYEELKLLGQQYQHYMKLHLLSLAELTHLLDLTMPGIKNLLASWNETNRKDKRSDFVERFWHYDVITSMSEHEFTEEYILWAKEKKYVPSQEKAKVIYTLAQESIPTLPSETSSVKMLVTEAVRVLKEVDATLGLILSRMQEIAKTLPEYSVVREMGGVGNTLAPKLIAEIGDVRRFRNGKALVAFAGIDPPPYESGQFVGCNRKISKRGSASLRKVGYETMRSLKMRSRPEDPVYRYVVKKESEGKSKKSAKIAGLNKFLRIYYARVTELYKNI

SEQ ID NO: 69052 - protein, 348 aa, unidentified
MEHICRIGMDTSKHFFQLHGVNAAEEPVMRKKLRRKDMVAFFEKLAPTVVAIEACGGSHHWARLLSSFGHQVKLIAPQLVKPYVKRGKNDAADAEALCEAMSRPTMRFVPVKTVEQQAAVMLVGVRDRLISNRTQLANSIRGYASEYGLTAAKGMAHLDPLIERIQADESLPVLARELFAAQAKEYQQLQAQIDEVDVKLKAWHHGDECGRRLAQIPGVGPIGAALLMMKTPAPEMFRSGRQFAAWIGLTPKDHSTGGKVRLGVITRAGDEALRSVLVVGATALLRFVANGKSKSALSPWLGQLLKRKPAKLVAVALANKLARIAWKLMVTGQSYVRKSTPTTVAGAA

SEQ ID NO: 69053 - protein, 315 aa, unidentified
MAMPVATAQPIVGVDVAKDELVIYHAQSDRLETIPNTKAEIKKWLKALSAPVDVAIEATNIYHQEFADLAYAQGCVIYMIGGYELSHYRKGVKVRAKTDALDARLLARYLNNEGHQLHPWSPPSPLYCRLISLFRRRAALVQARVSLKQSWSNEPLLKTAFENQIKAMQRLEILLEKTIQTQLDAAGLGSQLKRCMKVEGIGLLSGARLLTSFQRGDFRNADAFIAFLGLDLRISDSGKKKGRRCLSKRGDPEARRLMHNAAMSASRTAAWKGFYEGLRSRGLSTTEALVALARKLARVVFALLKNQSEYLPKGI

SEQ ID NO: 69054 - protein, 404 aa, unidentified
MHYLAIDLASKSHRVRITDESGTTVSTTFSIESSQEGFNELLSRIDKLSIAHSDILAGLEATNNFWENIYEFLAAKGIKTVLLNPYFVNKFREALRMKAKTDDIDTLVIANLLRTGEYGACLIPDETALTLRELVKLRFEFLKDQKNYKRQAFALLSLVFPEYRSTPIKNPFNIASMQILSQFPTAKDLALAKTKHIEKIVRSIQGNNFNIGEIQLLIDKAKNSSYSGKAKTARGSNLKMILAHVRNLENDINELDKQITDILSPQDPNDSFPGENLLSINGVGKKTLAAVLSAIGLDGSSFPNASAIIGHIGFYPKIYQSGETCRDNRISRRGPKYLRWALYMCAVASLKHNNEMRTLYHRKLSQGKSEKQALICVSKKLAQMMLAMLKSGQSYNPARVFAVA

SEQ ID NO: 69055 - protein, 350 aa, unidentified
MNIIGCDVHTRYQVVAWVDEETGEIRKRRLEHGKEEVRAFYAGWPRGACVGIEATLPALWFERLLEECGHELWVGDAAEIWARSVRRQVTDTRAAEHLLDLLLTKRFPRIWVPTAEERDVRQLLVHRMKLVRMRTLIKNQLHALAMSQGVCRKRKLWTVKGRAELEGLGLLPWARRRRKELLELLDRLQAGIEPLDQAVEEEAKARPEAVRLMTHPGVGPVTSLTYVLTLGPVARFPNSRKLVSYLGLNPSEHSSGGRQRLGHISKQGNTMLRWLLVEAAQTAVVGDPELRRAYQRLKFHRVSGVAKVAMARRLAVRLYWMLRARVDYAQRALTSGSPSSAVVDASPSKV

SEQ ID NO: 69056 - protein, 406 aa, unidentified
MSVEVALTEKVWAGIDVGKEHHHCVVINSEGQRLLSRRVFNNEPELASLLDEVIELAGGQVLWAIDLNHGAAALLIGLLVAREQPLAYLTGLAIHRASASYRSEGKTDARDAFVIADQARLRRDISLLRPGDEIAVDLRILTTRRVDVVFDRTRQINRLRAQLLEISPALERALTLTNKGPLVLLTAYQTPAAIRRAGVARLDAWLRKQGARNATALAQTAVEAARSQSVVLPGERLAAQMVARLAKGVIALDDEIAELDELIEARFRDHRHAEVIISLPGIGPRLGAEFLAATGGDMTAFTGADQLAGFAGLAPQPRDSGRIHGNLRRPKRYHRGLLRSMYLSAQISITTSPASRTFYQRKRAEGKSHKQAVLALARRRISVLWAMLRDHTTYHDLPPIPITTAA

SEQ ID NO: 69057 - protein, 343 aa, unidentified
MTQYVGLDVADEETSVCVVDQEGAVLVEAKVASEPAAIAAFIRAQAPQVVKVGFETGPLAAWHWHELKQLGLPVVCLDARHAKAALACQINKTDRNDAFGLAQLVRMGWYREVQVKSYGSHYVRAVLRVRSLLVRSRCDFENQVRGLLKIFGVRLGKTGRKGFAKRMAELLEKQPELEAVVAALLKVRETIVEQIATLDAGLQRVAKGSATIRRLMTVPGIGPITALAFASAIDNPFRFRKASSVGAYFGLTPRRYQSGEIDRPGRVSKAGDGMVRRCLFEAAVVLLRRVNGWSPLKAWAVRLSKRIGWRRAVVALARKLAVILHCIWVDGTEFWWTRGEVTA

SEQ ID NO: 69058 - protein, 340 aa, unidentified
MSEITTIGLDLAKHVFQVHGIDAQGTTVLRKRLRRGQVLAFFSRIPRCLVGLEACATAHYWARELGALGHEVRLMPAQYVKAYIKRNKHDAADAEAICEAVQRPTMRFVPVKTAEQQGSQLLHRGREQLVRQRTMLVNALRAHLAEFGMVAAQGLRNVGELIAIVRDDADRRLPALARQVLQVLANQIEQIEAAVGALERQLLAWHKTNAVSQRLASIPGIGPIIATAIATTVADPTVFRSGREFAAWLGLVPRQNSTGGKTRLGGITKRGNRYLRRLLINGASANLLRSRATKADPWVIRLRQRRPPLVVAVALANKTARIAWAVMLRQNEYQPRAVAA

SEQ ID NO: 69059 - protein, 367 aa, unidentified
MKKISTAAAKPSRNVSQPKLTIGLDLGDRNGWYCVLDEAGQIELEQRVRTTAKALQEVFGAMPRSRIALETGTHSPWISRLLSGLGHEVIVAHARQARLIGESRKKDDRLDAQTLARLARIDPKLLCPVKHRSAKAQADLTVIRARAGLVRARTALVNTARGLAKSYGERLRGCNVRNLNPEKAESLSPELQQTLEPLLAGIEELSGRICECNERIEALVQESYPQVALLKQIKGVGTLIALTFLLTLEDPHRFPKSRDVGCYLGLQPGRRNSGQSEPQMHISKEGDPYLRTLLVQGAQHILGPFGVDCDLRRWGLKLAERGGRNGKKRAIVATARKLAVLLHHLWVSGEVYEPLRNSRPAAMPAAA

SEQ ID NO: 69060 - protein, 459 aa, unidentified
MSRKKSTKNQNQWAELPTIHGHAAGLDIGATAIVACVPADRDAQPIRTFGVYTEDLEELAEWLVACGIETVAMESTGVYWIPVYEVLEGRKLDLFLVDARHLKNVPGHKSDVSDSQWIQTLHSYGLLHKAFVPEADVRALRAYWRQRTMLIEHRAAHIQHMQKALQQMNLHLTEVLTDITGVTGMQIIRAIVAGDHDPQHLAQMRDPRCQRTEQEIIKALTGHYRSEHLFSLRQALQLYDVYSQAIKECDAQMKEQYQSMAGLDDDSSGAPMPPLPPLPAAKRAAHCKNAPAFEAREEVYRLLGVDLVAVTGLQENLVQGILTEIGFDVTPWPTVKHFCSWLSLAPHNDVSGGKVLRSRTRKHRNRAGQSFRLAAQSLMRSANPYGIFYRRLAARIGKPQAIVATAHKIARAVYAMLKYRRPFELVASQEYERRLREQEIVRLRKKAARLGLQLLPLAT

SEQ ID NO: 69061 - protein, 349 aa, unidentified
MLADEVDFVVGVDTHRDQHVLSVVAAPTGAVVAQRSVAASGHGYAQALRFANEQAQGARVWAIEGAGHYGSGLARYLSGRRETVLEAGRGPRGERRLQGKDDGLDATRAARAALGNDELAVPRAGQRREALRLLLVARRGAVEVRRRALVQLRSVIVTAPNRLREELQALPERRLLERCRHFRRSSSLPVDELAAKLVLRTLARRIEAATAEATELEREILAHIRALAPQLLEEAGVGPIVAADVIVAWSHPGRVRSEAAFARLAGVAPVPASSGRTIRHRLSRGGDRQLNRALHTIVLQRRQHDATTQAYIARRVAEGKTRRDATRLLKRYLARHLYRLLQQTEPLMT

SEQ ID NO: 69062 - protein, 343 aa, unidentified
MKYYTGLDVAMKETFVCILDEKGNKVYETTASSTPAAILKSLEKSGFQSELIGLESGSLTRFLTKGLQNLGVPAICIDSRKMSAILSVTINKTDKNDARGIADAIRCNHYKEIYVKSDKDASVEILLKSRKTLVHLSGILKNTIRGFLKTYGVLLGDLQPKDFAKKVREKFQNIPQEAGDGIESLLKSFETNFSEIDLIDKKIKILTAENKQVKLLMTIPGVGPIIAANFVFSLGEADRFKKSKSVGAYFGMTPRQYSSGETVSMGQISKCGDADMRRLLTNAAMILMTLTKSWSPLKAWGIKISKKHGTKKAYMAVGRKLAVIMHRMLMTGEVFRYTTAVKA

SEQ ID NO: 69063 - protein, 414 aa, unidentified
MKSIKTEKIKTINEKTLVVALDIGKKVHYGYFRTPKNQDVKPFPFYNSGRSFNKFWKKLCRFKEKHMLGEVVIGFESTGPYAEPIANYLRRKPVKLVQVNPMHTKRIKELTGNSPNKTDKKDPRVIADVISLGHSLTVVVPEGAAAQLRRLTHARERAMERRTAMNNQLQDLVFVIFPELGDIIKPSTKTGMYLIKHYPDSESIVSIGFETLCNIVRKISRGKFGIDRVEKLYNAAKESVGITEGKESILLETSHLVSNIETENRYIESLEGQMIVYLDQIPYSHSILSIKGIGNITAAGLIGEVGDFRKFKTISEVMKLAGLDLFEVSSGKHKGKHRISKRGRALIRKLLFFAAINTVKSHGIMHAKYQKMLNNGTPKIKALIAISRKLFRIIFALARDNTRSYLKINLDIRF

SEQ ID NO: 69064 - protein, 428 aa, unidentified
MKYAPIQVLPDVPAGGVFAGIDWATADHVACVVDMAGRVLDRFSAAHDKAGIEMLITRLRENQATEVAIERGGGVLVEALLAAGLTVVVVSSHQVKNLRARYRSGGGKDDRFDAFVLADTLRTDRARLRPLVPDAPATLALRAAVRARRDLVAHRVAACNQLRAHLAVAFPAAAGLFYDLASPISLRFLASFGSQDAAAQLDEQAITAWLKTIPERGKTAPASVLCARLRAAPDGVTGEDGAALAVITAALTVTVGMLAAQVKTLETGIGAQLAAHPDGHIFTSLPRASTLRAARLLAEIGDCRSRYPGPQSLAALAGVTPVTRESGTHTSHAFRWAVNRPLRDAVCDFADGSRHASPWAASVYQAARARGKDHPHATRILARAWILVIWRCWQEGTAYDSAKHTALQRILDQQAAQAAAAGPPGDTP

SEQ ID NO: 69065 - protein, 341 aa, unidentified
MDYFAAIDVSLEESSVCVVDDTGKIVREAKVASEPEALAAWFAGSGLKFTRIGLEAGPLSQWLHAGLTAAGLTVILIETRHLKAALGAMKVKTDRNDARGMAQLIRMGWFRPVHVKAVPAQEVRALLSARDLLQRKLHDVELGIRGLLRGFGLKVGKVSKSKYEARIRELAAGHPMLEPVTAAMLQARASLRAEYAKLHRLLLRIVRADAVCRRFMTAPGIGAVVAVTYRNAVDDPTRFHKSRDLGPYFGLTPSKYQSGEVDRTGRITKVGDVMVRTALFEAANVILTRMTRFSTLKAWALRIAKQRGMKRAKVALARKLAVVLHRMWVDGTDFRWRKAAA

SEQ ID NO: 69066 - protein, 333 aa, unidentified
MLYAAIDIHKQAFQAAVLDPDSGQVVEERFSADRESLARWAEPWRGRVGMVAIEATTGWRWVWRELVARGFEVRLAEPLQARALLGRRRSAKTDRLDARWLARLLAKEMLPQSWIPPAEIQELRDRTRLRKALAEDRRRWGQRLHACLLHEGWPCSKSNLLRPPGLRWAASLKLSAHARLQVDSLVSVMAALEAQLDVVDTELRRFARNDARCQALQSIYGIGPILACHLLAEIGEVSRFRRADQIIRLAGLDPVVDESGESRRRGKLAKAGSPHLRWALVEAAVHAHRATHPDLALYRATRERRNTAVARLTIARKIGKRAFHALHELELAA

SEQ ID NO: 69067 - protein, 475 aa, unidentified
MNLKGKKTKNQVVTANIFEQQELLKKAEVIREKLTASTWHELETNGKFDKNAKLSFISDDMLILGCDVASETHYLRAIDTRGRELSKSAYSFRNNCEGFQSAKEWAVELAAKNEKKQIVLGLEPTGHYWFCLATWMIANGISVVQVNPYAVKQTKEVEDNSQLKDDTKDPKLIANLVKDGNFGMPYLPEKVYAELRRLSMFRDQLNEDRIRAINRMHREMKIYFPEYKEALGRVEGAFSLELLKQTPFPEEIQTLGEDGIRQIWHDAKLRGRGYSRAREIIGYAKTSVGMKDGAEASAMAVKWFVKEIRELDEKLAEIEKLMREKYQEIPYAKNILEISGIGENTLSGILAEMGDISRFDDVKEIQKLSGLGLVACSSGKHKGETKISHRGRKRLRYWLFQAAKSAVAHAEEFKELHVYYTTRTDNSLKKMQSLIVIACKLLRIIYGILKNGTVYDPKKMLRDIRRPEKKEVIAA

SEQ ID NO: 69068 - protein, 311 aa, unidentified
MNSETYVGVDVSKDSLDVKVLPTNETLQISNDNGGINELIKRLTQIDPTLIVFESTGGLEMLAVSNLIENQLPVVVINPRQVRDFAKATGRLAKTDAIDADTIARFARDIRPEVRPIKDEHTQLLSALNARRRQIVDMLVAEKNRLSRAPKPNRKSIQKHIQWLEKSLADINKDIDKTIKKSPTWRENDRILQSFKGVGPVVSATLLCDLPELGTLNRKKIANLVGVAPLNCDSGHFRGIRRIKGGRANVRRKLYMAAVASLRHNPLMKDFYDRLVEAGKPPKVALTACMRKILTILNAMMRERSYWNAIW

SEQ ID NO: 69069 - protein, 357 aa, unidentified
MEKLAEGDREAPVYLGVDTHSETHVGVALDGAGRRLGEQVFPNSESGYAEVLRWALGFGTPVVAGVEGTGSYGAGLSRYLRTKGVRVWEVNRTSRQHRRRYGKHDASDAEAAARAVIAGTASGEPKGADGAAESLRALRVARRSAVKARTQAANQLHALLSTAPEKLRESLRGLPTKHLAEKAAPFRRDADPVDPAAATKFALRSVARRYRALSEEISELQAHIERVAREAAPELTALDGVGPDTAAALLIAAGDNPERLKSEASFAHLCGAAPVPASSGKIVRHRLNRGGNRDANRALHVVALNRLKRDDRTQAYVAKRTTEGKSKKEAMRCLKRYIARETYRAIILDAAVRVPPG

SEQ ID NO: 69070 - protein, 340 aa, unidentified
MNITTIGIDLAKNTFSLHGVDAHGKVCWRKTVSRKKLLATLANLPPCLVGMEACSGAHYWAREIGKLGHAARIMAPKFVIPYRKGGKNDNNDAAAICEAVARPDMRFVPVKSPEQQAVLALHRIRQGLIQHRTALINQLRGLLSEFGLVMPKGRYQTHEHIPAILEDAENGLPDLARTLIHEVWQRYQTTREQVLDADRALSALVRECEQARRLMTIPGVGEQVATAIVASVDPRQFDNSRQLAAWMGLTPRQYTTGGVIRLGRITKRGDKYLRMCLIHGARAVIANLRDKQDRTSCWLRELITRRGYKRAIVALAARNARLIWTLMIKQETYRAIPVAA

SEQ ID NO: 69071 - protein, 415 aa, unidentified
MELLHERCAALDIGKKDLKACVRTPSVSRRKRLRSQEIRTFATTTNALLELRDWLVAEQVTLVVLEATGDYWRGAFYLLEDDLNVILVNAAHAKGLPGRKTDVCDASWLCQMGECGLLRASFVPPEPIRQLRDLTRYRTTLTAERSREAQRLEKELEDAGIKLSSVATDILGVSGRAMLAALIAGEDDAVALAELAKGRMRTKIPQLVAALTGNFSAHHAFLCRLHLERIDQLSATIEELSTRIEEQMRPFSHKLDQLQTIPGVARAVAEVIVAETGADMSRFPSPGHLASWAGVCPGHHESAGKRRSGKTRHGDRWLAGALGTAAMAAARTRDTTYLGARYRRLAPRLGKKKAIVAVEHSILIAAWHMLTDDVDYHDLGGDYFARLDPERAMRRIVRQANALGYTVRFDPIQAA

SEQ ID NO: 69072 - protein, 397 aa, unidentified
MYIIGIDIGKLSHTFCILNQLTGEEIVPPTNIENNKSGFDFLIDKVKCYKNEDMLFGIEDTGHYHFALLKALLSKNYTVALINPVATDLTRKMQGGISKNDNLDSLTICDVISSNSRKKPYRITKVDKFELFEQRELTRHHHNLKEELNVYTNRLQKCIDIVFPEFNSLFNSKYGIVYTNVLKSFGSAFNIANADIRTIRKCFNYKGKGLRISLTAEDLKDAAKNSIGIQSTSEVIQIKHLINQIELINEQLAEIDKKIEEFSIQTNSPILSIPRISHFSSTSILSEFGSFSNYSSHKKLIKFAGVAPYEHQSSQFKAEHTAITKKGSRYLRKTLYQIILPVINHNKVFKDYYNLKLSQGKSHRCAQGHCVRKLLRVIYHICTSTDDNIKFDANLLK

SEQ ID NO: 69073 - protein, 446 aa, unidentified
MSAVVGIDVGAYKHAAAVCRSGEREAERGVFRLSADRAGFDELDRWLERQGPVERVVLESSGHYYWPLASHLHRHGYGVAVVNPLQVKYFAKSRLQRSKSDPADARTLAAMGMSEEPRVKDPLLGAEAKEAARFWGGLVKEQAQVRQKLLRLVEIGFPELKECFEDPLCETALAVLREAPTARVASRKRVSTLADTTRPGDRRRLGENKARRLHELAERTVAPPELDAQMSFEVGMLIQQFDLLDKQIEIAEQRVAEVLDSELARRLQTIPGVGPALAASFIAEIGDIWRFDDFDQLASYAGVHPKELSSGTKGQNPETSWRMAKTGKAYLRSAALTVASCGDTLTEIRYTTLKDATTRLLQPPVFVSVSESVWEKGLPYTCKSVFCSYFSVFPDSVKVTLNACVRSFVTMYWVSATPSLWVLSVIVVPGAPSATTQTPRGMQNVS

SEQ ID NO: 69074 - protein, 288 aa, unidentified
MIIIGCDFHPSWQQICWLDQRTGETAEQKLVHATGEAEKFYQGLSSPALIGMEATGNCQWFVDMVTKAGHEVWIGDAAKIRAQEVRRQKHDRRDAALLLKLLEEKKFPKIWTPSSQQRDLRQLLIHRNKLVRLRAQVKNGLQHLAMNRGLQKQRRLWSAAGQQALRDLVLQPWASRRRGDLLGLLEVLDGQVGSLDMAVKEAAEKDSQAQLLMSQPGVGPVTSLAFVLTIGDVTRFARGKNVASYLGLIPGEYRSGGKQRLGPITKQGNRFMRMLLVEAAQVAVRCDP

SEQ ID NO: 69075 - protein, 308 aa, unidentified
MELFVGIDVAKETLEMHTRPDDIRRSFANDEGGRIDMARSLAEMKPVLVILEASGGYEVPVVEVLALRSLNVAVVNPRQVRDFAKAIGKLAKTDAVDAEVIARFSEVIRPEVRPLKDKDAQQLQALVARRRQLVEMLTEEKNRLFTATSWTRSDIEAHIEWLEECITKVGKDISSSIKKAPLWKEKENLLRTFKGIGPINACTLLARLPELGHLDRKKIAALVGLAPFNRDSGAYRGRRMIFGGRADVRAALYMAARSAVRFNPVIRTFHERLIHAGKAPKVAITACMHKILIILNAMVRTNTPWSAR

SEQ ID NO: 69076 - protein, 343 aa, unidentified
MQAVTTIGLDIAKSVFQIHGVDAAGNVIVRRQLKRRYVLPFFQKLAPCLIGIEACASSHHWSRELKALGHTVRLMPAAYVKPYVKRQKNDAADAEAICEAVTRANMRFVATKTLEQQSCLMLHRTRHLFIRQQTAVINAIRSHLAEFGIVAPIGRNGVEHLLNIVADCSDKRLPDVARACVAALGAQLRMLKARILEFDRLIMAWHRSNEASKRLDDIPGVGPALATALVASVADPKAFRSGRDFSAWIGLVPKQHSSGGKDKLGSISKQGDRYLRSLFTAGALAVIRYAKIHGTKHWPWLTALLARRPTKVAAIALANKIARMAWAMMARGDRYKEPVALAA

SEQ ID NO: 69077 - protein, 407 aa, unidentified
MSTSTDVFAGLDWAVHTHAVCIIDASGAVRDRFEIAHDRQGLAELMRRLARFGASVRIAIERPSGLIVDALVEAGHQIFPIHPNAVKASRPRYRSHGAKSDASDAYLLADLLRTDGHRWAALSPQSDSIRALRALVRARDDLVTTRVALGNQLHSTLEVFWPGAACIFADITSPIGLAFLRRYPSPASAARLSEAQLLHFCRAQHYSGRRSPAELLARLRAAAQALPGKLTNESMAHVVRSLVTVLNPLVAQISDLTRRIERFVESLPDGQIIMSFPRAGRVCAAQILAELGDVRERFSTFDQLAAEAGAVPVTYQSGKTRSVTFRWACNHRLRQAITCLADNSRHANEWARGIYLAARARGCDHPHAIRILARAWLRVIWRAWTDRKTYDPKLHLGALKLASDTGG

SEQ ID NO: 69078 - protein, 354 aa, unidentified
MKRDKYMGMDVHQATTVVTVLDADGKVILDSIVPTEAPAIVRLVQSFSGPLHVTLEETTQAAWLYQVIRSFVAEVIVCDPRHNKLLSEGSKADKADARKLADLLRTGMVRSVYHGHEETRKLKQLVRGYETLSSDMQRTMVRIKAIYRGHGIQTPGRGVYQAKQREQWLQLLSEQAGVRERVSWLYQQLDYLRPLRREAKQAMVAESRRHRAVSLLRTIPQLGAIRAALIVATVDNPHRFRTRQQFWSYGGLAVVTHMSAEYEMKAGGVVRRRKPLATRGLNRNCNRRLKEVFIGASTGGSQTEPYRSYLESLQQRGIRKEMARLTLARKIAAVALTIWKKGETFDPKKLNWTT

SEQ ID NO: 69079 - protein, 359 aa, unidentified
MEQKRFVGIDLGKRTYEMKIIGINGKVTGTNGQTNPSGRKLLYRKLLATDRVAIEVCSLGMVMAKEIQKEVGCEVVLLNPSQLVLIYRSLKKNDKEDALKLARLVQKYKNEELPKVELPTEHEENLRQILTEIRQLKNDRTKEINRLHAIFVECGITEIKKKDLATIDNRIKCIKMLKGIALAQAERILKKLELVETQIEEVEELLDKEIDGDKNIEKLTEIPGVGKQLASAYVAFIGDGSRFPNASTIGAATGLVPRLDMSSTVCRMGHITKCGNKNLRTLLILAAWSHVRSRDGGALKDKFLYMTRFQSKGKKIAIVAIARKLAELMYILLKNDTSYEKRPSPTISQLVDEAMKFSS

SEQ ID NO: 69080 - protein, 381 aa, unidentified
MGLRPCISVGTRAGKLTRSGAEGSPTCPGVIEPVVQRGAPSAVLSMNPNSRWGRRQPIPYLQGRVMDQTPQDQPLFVGIDVAKARLDIHVRPTGASFAVPRNGPGLDELVGRLQSLRPALIVLEATGGFETVVSATLSGASLPVLVVNPRQIRDFARACGRLAKTDGLDAKVIALFAERMRPELRPLADAPTQSLGELAARRRQIVDMITAEANRRQQAHHKKVQKRLDAHLIWLNKELSDVDAELDQAIRTSEVWCRNEDLLTSVPGVGKTVARTLLCELPELGQLDRRALAALAGVAPFNDDSGRHCGSRHIRGGRGVVRAKLYMAAWVARRYNPVIKAHYDQLIAQGKKRKVALVACMRKLLTILNALIRDQKPWQPA

SEQ ID NO: 69081 - protein, 427 aa, unidentified
MPYKIAGIDVHKRILAVVVSDVEVDGEYAFERRQFGSNPAQLRLLADWLLEQQVEEVVMESTAQYWQPVWAALERYWTPTCKKREGAGAMSGTQHLAQAQSNRARQGRKNDFADAERLVKRLVANELILSFVPDPEQRLWRTVTRTKYQLTRNRVQLQNRLEALLEECHIKLSSLVSDLLGVSARRMVQALADGETDPSALAALANHHLRATQEQLRDALGACQELNPVYRRLLKLALEELQLIEKQISQLDQEIADLLRPYQDQVQRLAEVPGLGVDSAQQIIAEVGPTAATFPSAGNLSSWVGACPGDDESAGVSHSHRSPKGNRQMRRLLNQAANAAVKYKGGIFEILYRRYVPRLGHKQTIGVIAHRLCRLIWKILYQGVRYEERGPDVRKKSQRYRATRMIRELQSIGYRVELANSQSAVPA

SEQ ID NO: 69082 - protein, 450 aa, unidentified
MNLYIGVDVGKEFNYASFLNEKGLEIDKRFKFKNNYLGFLKLKDNIDKLTYDYNFNYNDILIGFESTGHYWINVDWFLTEKLNIKTVMVRNDAVRHTRALNSQGKGKNDSLDSRTIAECLKNGYYFDVQGRKEDYIVLRRLTRERSELEKEIARYKNRFRAWIDVNNPIFLENFSNVFSAGALALLKVYPSPLDIIKDSYLEVREKLREVGYSRTNKTLKIYYEEVQTYKNIINGISYADRLEISEYIEALEMYIKKKENLDERIEVLMNFLEGKVYTSLSEIKGMPKAQVASLIAEIGNINNFKSARHLLSYAGLNLQGEGSGKNKGYSWISKTGNRKIRKELYVITFNLVIHNDYFRGLYCYYKSYKRPNEKSSKEMLIALMCKLLRVVYGMLKYNVEFNLNEMLKNYDFRNINKEKFIDEFLGNSEKKQRIITQEIEDIFLNNRKSN

SEQ ID NO: 69083 - protein, 400 aa, unidentified
MLLFFEVITMIFVGIDVAKDTHYAAVSDNSGAVLVKPFAFQNNAEGFCLLLKKLSEFDRSKLLIGLESTGIYSENLICFLYESGFRLAVINPIQTATLRKTAIRKTKTDKVDTMLIIKSLMVNSYRLYSQRDADSLKLRTLCRFRQNLKNSKARLKIQLAGYVNLVFPEFGKFFKSGIHIAASYALLKKYSSPKEIAALRTSTLCTLLSKASHGRFGKDTAEALKSLALSSVGVKNPYISIQIAQTIAQIELLEQQIKDLNSAIEEAMESINSVLMTVPGIGAVNAACILGEIGDIKRFSKPCKLLAYAGLDPTVRQSGQFTAKSTRMSKRGSALLRFALINSAWQLTLNDTTFKAYYDLKRSQGLNHYGALGHVAHKLTRVIFKLLTSDTPFNPAKLVA

SEQ ID NO: 69084 - protein, 427 aa, unidentified
MSYRIAGIDVHKKMLAVVVSDVEVDGEYQFERRMFASNPEQLRSLAAWLHERGVEEVVMESTAQYWKPVWGALEHHWKPLCQKRTGACPMSGSLHLAQSQSNRARPGRKTDFLDAERLVKRLVANELTLSFVPDPEQRLWRTLTRRKYQMRCNRVQLQNRLEALLEEAHLKLSSFVSDLLGVSARRMLRALADRESNPLALAALADHRLRATPEQLSDALGACQELNPVYRRLLGMTLEELQLIERQICQLEQEIADLLHPNQDQVQRLAEVPGLGVDSAQQIMAEVGPTAATFASAGKLASWVGACPGENESAGVSSSHRCPKGNRHMRRLLNQAANAAVRYKGSIYQLLYRRYVPRLGHGQTIGIIAHRLCRLIWKILHLGVRYQELGPTVNQRSKLSRAARMIRELRSLGYRVEPVNFPSLAPA

SEQ ID NO: 69085 - protein, 400 aa, unidentified
MRAVFGIDVSKTSSEVAILVNGEKVHGYTILNDTIGFNRLLGDLKTVHNREIIFEATGVYSRRLQAFLEEYSYAYTRLNPLEAKKQLDSLRVRKTDKIDAEKLAKSQLVHNRKPTYVQEEVYQHLRDLSRFYQNMTEDLVRTKNRLHKVLQVTFPELENLLSTPTGEQYWNLVMAFPCKEFVLSLSQSNLCEIIRQSTSKRISEKRIAYLTDKLIKLAKQSFCAVKKTSPMLEEVRYYAQELLRLSERRQVVLNDMVALAQPLPEYDILRSIPGIAEATATSIIGELGDIRRFQSTNQINAFIGIDLRHYESGNFLAKEHITKRGNPYARKILFKCIHNIASASHTNPCHIADFYEKRKRQSTIASTKPHTIASIHRLIRTMYYLITHNKLYDYSLTQNR

SEQ ID NO: 69086 - protein, 317 aa, unidentified
MTPTAIFVGIDIAKADFVVACRPDGTTWTATNDPKGIAATVDRLGALAPNLIVLEATGGYETPLVAALAAAGLPVVVANPRQVRDFAKATGQLAKTDRLDAHLLALFAERVHPTPRPLPDAALQQLEALMTRRRQLLDMLTAEGNRLEHAAAPIRREITRHIRWLERRVAAVDRDLDDTIQKSPVWQAKENLLRTVPGIGPVVSRTLLADLPELGRLNRKQIAALVGVAPLARDSGTLRGKRVVWGGRAPVRAVLYMGALVATRRNTVIRAFYLRLVAAGKPKKVALIACMRKLLTILNAMMRTNTQWQQISQPETA

SEQ ID NO: 69087 - protein, 355 aa, unidentified
MVGMVVVGVDAHKRTHTLVAVDQVGRKLTERTVATSSDGHLQAVTWAAQWPQPQVTFALEDCRHLTRRLEQDLLRAGHRVVRVPTRLMATARRSGRQPGKSDPIDALAVAQAALREPDLPAAHLDGPTRQVKLLCDYRADLVVERTTLCNRLRWHLHELDPELHVPSRGLRRYKVIDELAARLVGVDGTVAQIARELLARCRELTVRINQLEGDLRDLVRVLAPGLLAIPGCGVLAAATILGETAGASRFRSRHAFARFNGTAPIPVWSGNAVRVRLNRGGNRTVNWALHMIAVTQARGVGAGQAYIERLLGAGKTRTEALRLLRRRLSDVVFRVLLADEHRQATTEPAEAPIAA

SEQ ID NO: 69088 - protein, 414 aa, unidentified
MEVLYPRCAGLDVHKESVVACIRIASGGEVVTEVQTFNTTTASLVSLSEWLASNGCTHVAMEATGVYWKPVWHILSDSAFTLVLANAAHVKNVPGRKTDINDATWLADLLAHGLIRASFVPESETQDMRALLRTRKQLVREKASHIQRLQKTLEDANIKLDSVVADIVGKSGRAIIDALIAGDSDPAKLAALADTRIRSSQNKLREALSGRIRRHHRFMLNLHLQQINALDAAITEIDREADANLAPFRTGVELLTSIPGISTLSAQVILSEIGTDMSRFPTAGHLISWAGLCPGNDESAGKRRSTRLRKGAPWLKTTLVQCAWSASRKKASYTQAQFHRLRARRGAKKAVCAVAASILTAAYHMLKDGTQYRDLGPDHFNRRSKQQQTNRLLKRLADLGFAAELTPIPIAVSL

SEQ ID NO: 69089 - protein, 437 aa, unidentified
MRRKKSKASKRVNLQSLPVIHPDAAGIDVGAKEHVVAVPCDRDERPVRTFQAFTPELHELAAWLKRCGIRSVALESTGIYWISLYEVLEQHGFEIRVVNARHVKNVPGRTKTDVLDCQWIQKLHSFGLLNGSFRPDQQIRKLRTYMRLRDNLVVNSTQAVHHMQKALFEMNVQLSNVISDIVGETGLRIIEAIIAGERDPEQLAALCSTRIKASRQTVAKSLHGNWDEALLHCLKTALETYHFNQEQIQHCDGYIHRHLGQFESRAQLPSSPKDLQGQLHRVCGVDLTKIPAIKEQSAQIIISEVGLDMTKWNTEKQFSSFLGLCPNNSISGGKVLRRATRKVYNRAADTLRLCAQSLTHSKSALGAKYRRLRARLGAPKAIVAMAHHLARLVYRMLRYGDKYVEKGIEHYEQKFRLQRIKWLKKEADSLNLQLVAV

SEQ ID NO: 69090 - protein, 419 aa, unidentified
MSFKILKNNCCGLDVHKTWIYACIGITDSNGRTEYKQARFSSFTKGLQELCDWLVKYNCNDVCMESTGKYWIPVFNILEKNNLWVTLSHPKYTKPQKGNKTDRKDAKWICDLYMCGMVKPSFIPPADIRQLRDLVRYRFKLTCMITGEKNRAQNCLTVSNFKLDDVFSDVFGKSSRFITEQILQHPGETFDVAPFVDGRCKTPIEEIQAAVDGAISMEQAVKLRQCLNHIDELEKHQAEIEREIFRLSDKYESILNLIRTVPGFDKNPLTAIQVLSEIGGDMSVFPTAKNLVSWAGCCPRNDQSNHKIKSTRISRAGSYFKPVLVQVANALIKSKKHPEFTTRYRRIKARRGHKKAIIAICRMILTAIWHILTDLKPYTPEGFLESRPVNASKVLTTSQALNLLKQRGYVIKDDTVPVT

SEQ ID NO: 69091 - protein, 390 aa, unidentified
MEARTVNNLPPAAADDDAVRCSFAIEMSKKSWIVAVNAPLADKISRYRLQPCDWRGLLELMARIRRRVAKELNRRVEIVSCYEAGYDGFWLHRLLEAHGVRNYVIDSASVQVDRRARRNKTDGIDAGQMLRSLMAHLRGKPKVLSVVRVPSIAEEDDRRLHRERHRLINERIQHVNRIKGLCALHGIYHYEPMRPLRMRALEHLRTPDGRRLPPRVKAEIIRELQRLELVLKMLDAVEAERDAIASDKNTLAHRNAKKIQDLVKLKCLGPEFASVLVGEVFYRSFANRRQLGSYVGLTPSHFQSGPMCHDQGISKAGNAKARSTMIELAWLWSRHQLKSQLSVWFHRRVGGLKGRIRRITIVALARKLLIALWRYLETGVVPAGAALKKV

SEQ ID NO: 69092 - protein, 400 aa, unidentified
MMTPDDIDVWVGLDVGKSAHHACALDHDGNTLYDKPLKQDEKAIRTMLGKLSKHGRVLLVVDQPNTIGSLPLTVARNMGIAVAYLPGTAMRRTAQLLPGDAKTDRRDAHVIAWAALKLPETLRDAGPDDETLAALKLLAGHDEDLAHESTRHVNRLRSLLLQTHPAFERALKGERITRDATLALLERYGGPMGVKRAGIEDVKDWAKSNGLRAGRIIDDMFKAIGEQTVTVPGTLMAETIIPSIAHDIKTIRDRRREVGRQVEKLLEDHPLLTVLTSMPGIGVRTASNILLGIGGDIANFKSSAHLAAYAGISPVTGQSGTSIKGERPSRRGNKRLKNALWQTAFVASTKHPPSVAYYKRKREQGKHHNAAIICLARRRCDVIYSMLKNGTLYQEPALVA

SEQ ID NO: 69093 - protein, 265 aa, unidentified
MSVYVGIDVHRKRSQVAVVDQAGQVLANRNVPNGVQTVLGVIGDLPSGTPVAFEAAFGWGWLVELLEDYGFEPHLVHPTQCKAIASARLNNDKVDAHILAQLLRADLLPEAWIAPPAVRQLRARLRHRIQLVRLRTLLRNRIHAVLADHGQDRIGGCWSGPGRQWLAGLDLPAASREVIEDCLAMIDAIQVPIDRLDVEVHEHAKADPRVKVLTGLPGVGKLTALVILAEIGDIDRFGSARKLAAWAGLTPTVRASDRTVRHGHI

SEQ ID NO: 69094 - protein, 338 aa, unidentified
MTTIKVIGIDLGKSSFHLIGHDHTGREQLRKHLSRPKLIQFLSQTPKTTIAMESCGGSHWLARKCQSLGHEVKLIPPQYVKPYVKTNKNDYIDADAIAEACTRPSMRFVGVKTETSQVISVIQRVRSSYIKERTACMSRIGAILLEFGMSFPRGHAKMKVLFQWIADNNEPLPAMLMQELIEHHEYYLLLNERIAGQDKKLKQLVEQDVRAQLLKTIPGVGDLTAAQCLADISDVTHFKNGRQMAAWIGLVPHQYSTGGKSTLLGISKRGNKALRTLFIHGARAMLSRPEKALAVFGEWILELRARKPFNVAVVALANKLVRIAWSVLSTKHAFEIRV

SEQ ID NO: 69095 - protein, 416 aa, unidentified
MNAVGIDVSSRKSTVAVLRPLGEVVCLPFDVTHDIAGLASLAEKLKAIDGETRVVMEHTGRYYEAVAKALHEAGFFVCAVNPLLIKEYGANSLRRVKTDKADAIKIARYALDNWADLRDFTPMDAIRYDLKTLNRQFQLASKQRTASANNLIALLEQSFPGIRKCFDSPVRSDGTQKWVDFAHSFWHVDCVRKQPFAAFCERYRKWCKRHAYLFKLSNAEEVYALAKRAVVLTPKSKVVKVLVQEAANQLISISRSVEVYRAEMDRLAAMLPEYPVVMAMYGVGKSYGPQLMAEIGDVRRFERKQALVAFAGIDPMPNQSGDKNVRSNKSSKRGSPYLRKTLFNVIRTYLQCAPQDEPVFQFLNRKRAEGKPFYVYMLAAANKFLRRYYAKLRDYFASLDTLQPVDPIPTILKATL

SEQ ID NO: 69096 - protein, 387 aa, unidentified
MSKKIVAPAYVAAMARAEADPAAARFWVGLDIGFKSTAVCVVDVDGAVVHQVSMKSHATEIGRYLRRNFKSHVTLIGMETGGLSPHLAGKLREQGFQVAVLDALQVHRVLSVKRNKTDTNDARGIAEITRSGRDYLTEVYVKSNLCFEVRASLIMRDRLVKQRRETEAMIRGLVRVYGGRIEPGSDSPATFRERAIDQLCLIADTEGVDLRPRIIPLLDLCERFYIEAGRIERELDLLAASHPVCKRFMEIPGIGTITALSFYSAIEDPTRFRHVEDVAAYLGLTPRVYQSGESLTHGGISKMGNQLTRTHLVGAATVMLANTRSFSTLKDWGMKLSKRVGFNKAKVALARKLAIVMFSLWRDCTHFMAKAADVGPHRDLMRARASA

SEQ ID NO: 69097 - protein, 387 aa, unidentified
MIYVGIDIAKLNHYASAISSDGEVLLEPFKFSNDNDGFCTLVSKLNQFDKDKVIIGLESTAHYGYNLLAFLVPKGYKVCLINPIETSTMRKNNIRKTKTDKVDTLIICKTLLMQPHRFVTLYDIGILQLKNLGRFRLKIVKQRTRLKIQLTSYVDQVFPELQYFFKSGIHQKGCYALLKEAPSPEAIASMHLTHLTNVLKSSSHGHFKKETAVELRVLAQKSVGTSDNSLSIQITQSIEQIELLDRQLERIESEMEDIVRSLDSLIMTIPGIGFINGGMILGEIGDITRFSNPSKLLAFSGLDPSIYQSGNFEAKHTRMSKRGSRALRYALINAAHNVVKNNQTIAAYYAQKKSEGRPHYAALGHCAGKLVRIIFKMLTDNVTFNLE

SEQ ID NO: 69098 - protein, 406 aa, unidentified
MVNMGIDLHKTQFTVCARSRREERFYAYPTTDEGYKAFLKEAASWQKKGEQVRVAVESTGNTRYFKSRMEEAGIRVTVVNTLKLKVVNESVKKTDKHDAATIAEFLEKDMLPQSQLCSRQSEQLRRLLKIRTTLVRAQVVVKNQIHALLSSEGIEDVKSAALQSKKGRKRLLDALEQWQHGLVAQPLVETIERLEENIKSIEEQLRVLTAGDRMVELLMSIPGCGEICAWTIRAYTDDIKRFSSAKKYASYAGLAPWVQNSNETIRHGRITKRGPEELRTALVQVVMGLRRMKRRTLSWRLMQRYEAMKKSKGTGKSIIAAARKMAVIIWHMLTENVEFDITLMTAKKLMSTSVSMRAGVEVLDKNAWGEVKDQQPQLQTTNENGGQPLALPVKEKRKQQKELISS

SEQ ID NO: 69099 - protein, 339 aa, unidentified
MDHVAIDLGSRKSQICVRSAEGEIVEEKRLETWDLKQYLAGRPKSRVIVETCAEAFGVAEAARELGHETRIVPATLVRTLGVGARRTKTDQRDARALSEVSCRVDLPSVHIPKAQSRERKTFCGMRDSLVSARTKVINTVRGWLRGQGRRLGKGSSPTFAKRVRALCGAELPDYVERQLRVVEALTAEIGEADKVLESQAEQDDTCRRLMTVPGVGSVTALRYVAAIDDIGRFATAHQVESYLGLVPGENSSSDRQQRLSITKAGPSALRWVLVQAAWALKRTRRQPAAIPLQLWAHQVELRRGKRIAMVALARKLAGILYAIWRDGTEYDGRRGAKMI

SEQ ID NO: 69100 - protein, 366 aa, unidentified
MKKISTVQTFGNEIFKEQKLTIGVDLGDRWSFYCVLDEAGQVLLEQKVSTTPDAMKQTFSRIPQSLIALETGTHSPWVSRLLTELEHEVIVAHAQKVQLITKSNRKDDRHDARTLARLARIDPELLGPVRHRSVQAQIHLTVIRARAELVSARTALVNAARGLVKSYGERLPQCGTYQVSRELAAELSTELQDVLEPLLKEIESLNERIKEYDERMEKIAKEVYPEVSLLKQVKGVGTQIALTYVLTIEDPHRFLKSREVGCFLGLRPGRRNSGESEPQKGISKEGDRYLRTMMVQGAHYILGPFGEDSDLRRWGQKLAERGGKNAKKRAVVAVARKLAVLLHRLWVSGEVYEPLRNSQKAMRAVA

SEQ ID NO: 69101 - protein, 350 aa, unidentified
MANNSIIGMDLGDRSHIVVALEADGQETECSKVVNTRTSVKQFFQKYSGATVAIEAGTHSAWISRLLEELSCRVYVGNPYKLRMIWDSTDKSDERDARMLAMVCRLEPRLLWPVRHRNVNAHVDLETIKARDILVQSRTKLINHVRSVVKAVGERLPSYSAESFANRVPDLLPELLRPALRPLVDTIADLTVKIKDMNKQIDRLIEDRYPEAQRLQQIKGVGPVTALAFVLTLEDPGRFTKSRQVGPYLGLTPRRDQSGDTDKQLRITKAGNKYMRQLLVSCAHHIIGPFGPDSNLRRYGLTIAAHGGKNARKRAAVAVARKLAVVMHRLWVSGQDYVPLYALPKIQKAA

SEQ ID NO: 69102 - protein, 335 aa, unidentified
MDTETGEVFEEKRVRNDVESLEEFFSALPGPICGAMESGTNSWAIFRILEPHFEKLIVVDPATVWGRDVRRGAKTDRRDARKLALKMSRGELEPLYVPDPTTQDLRALTRARINASRHITKLVSETGSLLRSWGIILECSLLSKRGQQLLEESRSRLPEHSRTVLELWLRMLRDAQEVEAELQLRVEVEASGDEACKILMSIPGVGALTALVIRSEVGDIERFGSAAALVCYCGLSPSVSQSSEQIYYGRLNRACNRYLKYVLVLRAQGMSRAKAENPMRSTYWRVLCKGKNHAKIAVARQLVRVIYRMLKDRKRWDASEITERRARSAPATAHA

SEQ ID NO: 69103 - protein, 315 aa, unidentified
MEHLPAAPSFVGIDVSKDRLDVHILPTGQTLVVQRKEKGFEDLISELRKLAPALIALEATGGLEVTVAAALASANLPVAVVNPRQIRDFARAVGRLAKTDALDAQAIALFAERVRPEPRPLADADSQSLAELVARRRQVVEMIGMETNRLHQARNPRIQRMLRATLKTLTAQLAQLDRDIDDLIKRSSLWRDADDLLTSVPGVGDVTAHTLIADLPELGQLDRRRVAALVGVAPVNRDSGQLRGKRTIAGGRIGVRNTFYMATLSAIQWNPVISTHYHSLVNRGRPKKIALVACMRRLLGILNAIMRTKTPWQCA

SEQ ID NO: 69104 - protein, 355 aa, unidentified
MSQEKYIGMDVHQATISVAVMDARGKLIMECVLETKAATILEFIQGLRGTLAVSFEEGTSAAWLHDLLNPHVNRLVVCDPRKNALLKDGNKNDRVDAQKLAELLRTNQVKPVYHGKHGTRALKELGRSYLTITKDGTRVMNRIKSVYRSWAIPCAGTSVYTRRHRAEWLAKLVEPGVRIRAEHLYQQLDSLQPLRLEVRRQLLLESHKHAAVKLLRQVPAIGPIRAALLVALLQTPHRFRTKRQLWAYSGFAVQVHDSGEYRWVRGKLQRNRERITVRGLNDNHNKEVKSLFKAAAISASTRPGPLHDFYVARVESGMRPTMARLTLARKIAAITLTMWKKGVSFDPKQLHRQAA

SEQ ID NO: 69105 - protein, 382 aa, unidentified
MQPINTVNPTIYLAIELSASTWLIAARLPGSEKPHLHRIEGGDTAALFALISSLRARVARRLDAAIGVVCCFEAGRDGFWLHRLLTAHGIANYVLEPTSILINRRARRAKTDRLDAIGMLRVLAAYLRGDRQSCSMVRVPTPEDEDAKRIHRERENLVQEKLRIENRIEALLFTQGIRKRPSLRSCERDLAVLRTGDGREMPRHLRAELDRLRRRLVTILELIREVEAERDEVVTTNPEHQTSRKIVALCRIRGLGENFAGVLTREVFYRSFDNRRQIASYVGITPMPYQSGSMDRDQRISRAGNPRARTTMIQLAWLWLRYQPGSELAEWFRKRVGTLAGRTRRIAIVAMARKLLIALWRYVETGVLPAGAEIRPESVAAA

SEQ ID NO: 69106 - protein, 353 aa, unidentified
MMVVGVDPHKQTHTAVAADELGRKKAQCTVRARRDGHRELIAWARELAPAGRLWAVEDVRHVAGGLIRELLAAGEQVVFVPPKLMAGERRGGRERGKSDPIDALAIARLALREGAGLPAARLDEQVLEVRRLTDYRDDLVAERTRVVNRLRWMVHDLAPELAPAPRSLGSDRARTRLRAGLRALPASAGQRVALSQLARITALSAEITQLEKDLTALVTVLAPELLATPGVAGITAAKILGETGDIRRFRSPAAFARHNGTAPVPASSGTGHDGPHRLNRGGNRQLNAALHRIAVVQARCHPGAAALLERRGQDKHETRKASLRALKRHLSDVIYRALNADAWRLGQPTQHAA

SEQ ID NO: 69107 - protein, 369 aa, unidentified
MSKPITYVGLDVHKDTIAVALAEAGLRGEVREHGKIPNTPAALKALTVKLATARRELRFCYEAGPCGYGIQRQLTEAGHECAVVAPSLIPRKPGERIKTDRRDAINLAKLHRAGELTAVWVPDQAHEAIRDLVRARQAAVRTLRQARQQLSGFLLRHRCHYHRPAWTQLHRRWLASLKFDQAVHHIVLEDCIAAVEAAMARRDRLEAHIEAVLPEWSLAPVVEALQALRGVRLVAAATLVAELGDITRFTNPRQLMAYLGLVPSEHSSGRTRRQGGITKAGNGAARRMLIEAAWSYRFPARISREQLLRQERLAKPICDVAWKAQERLCRRYRKLARAGKLPTVITAAIARELAGFIWAIAKQVQPTAT

SEQ ID NO: 69108 - protein, 436 aa, unidentified
MARSHSQHKQPKPAPPGALPAMNTNAAGIDVGATAHFVAVPADRDAKSVREFGPFTNDLYRLAEWLRACGIETVAMESTGVDWIPLFQVLEERGFEVKLVDARQLKRVPGRKSDVLDCQWLQQLHTFGLLAGAFRPDDQICVLRSYLRQRAMLATYAGQHVQHLQKALVQMNLQLQVVLDDITGATGMRIIHAVLAGERDPERLAALRHGKCKHSEATIAEALRGDWREEHLFALEQAVELVEAYQAKIAACDARIQAHLQRFEDRGTGEPPPPGPKPRADRHDLSFEATAELYRLTGVDLTAIDGLQAHSVLKIVSEIGLDMTRWPTAKHFGAWLGLAPNNRVSGGKILSRRTTPSANRAAIAFHRLQARPHPLRHALHRRRVRRSRSGRLRARPHRPRRPLALPPRQRSRLRAGQTRPSSRSLPVRLTRDDICH

SEQ ID NO: 69109 - protein, 352 aa, unidentified
MPYHQGFELCTEIMKNTHANQIQFPHIVGIDISKMSIDVAVIETPSMKSNSAVFSNDSEGFQKMKKWIKQLGNDCNENILFCMEHTGIYTRNIVKYLLKRGCKVWLESSLHIKRSMGLVRGKSDKIDAERIAKFAFDHQRDAKLVKLSHPTLNRLKDLMKTRMRLQKGLQSQTVAINELVRVDPKAGREIERISRQAVEGLKKSLVKVEEKMEELVNIDKQLRALYQLVTSVKSVGKVLAIDLIVYTDGFTRMLDNRKLACYCGVAPFEYRSGTSVFSNPGTSSFANKQLKHHLHMCAMNAIKCHKELRDYYLRKTEDGKSKMSALNAVRNKLLHRVVAVVKRGTPYMEKLD

SEQ ID NO: 69110 - protein, 407 aa, unidentified
MEVLYPRCAGLDVHARQVTGCVRITSGSEVTYLHHTAATTTRGLLALADWLAAHGVTHVAMEATGVYWKPVWQLLEGQFTVVLANALHIRHVPGRKSDMTDAAWIADLLAHGLIRGSFVPPAAIQRLRDLTRTRKQLVRETARHTLRIQKTLEDANVKLTHVLTDILGKSGRAILKALIAGERDPARLAGLITGRVKATHEQLTEALHGRVTDHHRFLLQLHLTQIESLDAAIDELERHMGDALGPFQAAIALLTTMPGLSDTAARVLIAEVGDDMSRFPSPGHLVSWAGLCPRLDISAGKRRSTRIRQATPWLKATLIQAAWAASRKRDSYLRAQFLRLKTRRGPKKAIVAVAASMLTAVYFMLRDGVEYRDLGARYLTDRDKQQKTQRLLRQLRDLGVNVDIRAA

SEQ ID NO: 69111 - protein, 407 aa, unidentified
MLFIGDDWAEDHHDVEVQDEQGRVLRRARLSEGMAGITEFGELVGRLLSEDGQAADVLVCTETDRGPWVNALIAAGYRVFSVDPKQAHRHREILSSSGAKSDKGDAHGLADMVRTRRHQLREAGGDSEIAEAVKVVARAHQTMIWERTRHMLRLRAALREYFPAILAVCDTVDLSLTSRPLLVLLGKAPTPELAAKLTARQILPMLKGYRNKDAKAAQIQQILRGENLGQPPVVTRAYAASVRSSVAVLMVIVEEITHLETEVKAHFGQHPDADIILSQPGLGPILGARVLAEFGDAPGRYRSSKDRKNYAGTSPITRQSGKMRIVAARYIHNNRLVDALQGQASCAILHDPDVRGYYDQLRARGTKHNAALRQVANRLVGVLHGCLNARTRYDRNTAWAHRHTAAA

SEQ ID NO: 69112 - protein, 360 aa, unidentified
MHATTVAVDLAKSVFQLAAADDQWRIVETQRLTRTQFERWFVNRSVDLVIMEACGSAHHWARWFNGLGIEVRLLPAQYVRAYVRRNKTDATDATALLEAARASDIRPVRVKSVEQQALQGLHRIRSLWMGTRTSRINALRGFCREFGITIPQGARTGVEAIARVLADPRSAVPDLIRHTAGMLLEEIRLLEARITQVERELAAVARQSPACTLLLSVPGIGLLTATALVAATSGDVTHFQDARHFASWFGLTPREYSSGSSRYLGRISKKGDRYLRMLLTHGARSVLRAAKVADGAGREVCGIRRWALDVQGRSNHNKATCALANKLARICFATLRDHTPFDEAALLSRKAGRQSFALPA

SEQ ID NO: 69113 - protein, 345 aa, unidentified
MKITTVAIDLAKNLFQVHAVDERGNAVLRKQLRRLQVAVFFGNLPPCVIGMEACASAHHWGRALQRFGHTVRLMAPQFVKPYVKTNKNDVADAEAICEAVGRPNMRFVPIKSIEQQAILSVHRVRQGFVKARTAQANQIRGLLGEFGLVIPQGIINVAKRVPEILEDASNELPVPFRHLIDRLTEHLKELDRQVKEFEKEIIVWHRSSDLSRKLEKIPGIGPLAASALVASIADARSFKNGRQVSAWLGLVPRQCSSGGKATLLGMSKRGDAYLRTLLIHGARSAILAAQHKVDNTNGWLANLLNRRHPNIAAVALANKNVRTVWALLAHGREFKADYVPVRMAA

SEQ ID NO: 69114 - protein, 453 aa, unidentified
MPKNPTPVFDEIRRNVAGIDIAGHADHYVCGPRRDDGSHDIAHFGTTTSELRRMLGWLKDRGVVSVAMESTSVYWIPVADVLESEGIEVVLVDTREVRMVPGRKSDVKDCQWLQKLHSCGLLRGGFRPPESIAAVRTVLRERENLTAMRTQCIQQMQKSLDQMNVRIHHAVSDIDGKTGMAIVAAIVGGERDPVTLAKLRDKRCKQTEAQIADHLTGTWRDEHLFNLAQAYQTLLFIDERLAEYEEKAASMFKALAAASGNKPPPPPPDGAKPSQKELRDTAEKRALHQLAGFDITSVAGIGYDTAAAVLAEIGTDLSRFPSEKHFAAYIGLAPSLGKSAGKNVRQRRRCGNTSRAGRALRMAASTLYRSESELGAFFRSVARRTDRKTAVKATARRMAHMIYRAIRYGAAYIDRGAEAFEARMRERTLRTVRNLIKTHKINELELKTALAAV

SEQ ID NO: 69115 - protein, 400 aa, unidentified
MNPVVGIDVAKDESEVQAFLEKGKPYGKSFSIKHNREELDKFIRFLGEIRSITASKPVVILESTGHYHTPIIQCLEENEILYILLNPIISYQAKKSSLRKVKTDAFDAYQLCVLYYKEEFEPYKMRGIQLLNLRNLSRQQEIVTNMYVEAKLQFHTILDQVFPEYKKVFGDLFSKVSLLILKEYPTSEKVLDYNEEELVNSIREYCPSRSALWAREKARKLIDSANQNPFQKVMYQSHLFNLNMYIDILFHYQGHLSELESQMISLASEIEEYKIIQSIPGIGEKIAATIISEIGEIDRFNHPKKLVAYAGIDPSVYSSGKFTATTNRITKRGSSRLRRSLYLAVLCGIRSSRNKKLKEFYDKKRSDGKPSKVALVACINKLLQWIYALLKRKEVFLDLA

SEQ ID NO: 69116 - protein, 347 aa, unidentified
MDHIGIDLHKRESQICLLAEGGELIERRIRTEPQRFAEALGGRAPAQVLLESSTESEWVARCLEALGHHVVVADPNFAPMYATRTRKVKTDRRDARALAEACLLGAYRPAHRLSDAQRHVRARLTVRDALVRTRTRYISLIRALLRQHGWRVPSGSAEGFPRRVLALPLPGRLRSEVAPLLAVMRHLQPSLAYSDERIAAVTATDERVRRLQSMPNIGPVTAAAFVAAIDEASRFRRGHEVEAYLGLIPRELSSGETQRRGRITKAGSSRVRWLLIQAAVSMLRLRDPRTAALREWAGRIAARRGKGIAVVALARRLAGILFALLRDGTVYEPRRRPACPVTRAVPA

SEQ ID NO: 69117 - protein, 411 aa, unidentified
MDVLVERCCGLDVHQQTVVACLLTPRDGSKQKKIVRTFRTVTAELDQMREWMLENGVTHVAMESTGVYWMPVYEVLATGELEIVVGNAAHIRNVPGRKTDVKDAEWIAHLVRHGLIRPSLIPTPMMRRLREYTRLRRKLVDERTAIRNRILRLLETANIKLASFASDVFGVSGTLMLNAIIDGTKSPHEMAALAKGALRKKQRDLELALHGRVNEHHRFLLHLHRARIADIDATIVKLDERIDAELVLVQPSVARLVQIPGVDRVIAATLIAELGIDMSYFPTAKHAAAWAGVAPGSRRSAGKRTGKEPARAGNIYVRRALAQAAVCARLVKGSHFREKYLRVSRRRGAGRAIMATANSMVTTVYHLLKHGVDYNERGPHQPSEAEKKALARRLAKRIEQLGFQVELRAAA

SEQ ID NO: 69118 - protein, 346 aa, unidentified
MEHFAGMDVSVKETCVCIVDEAGKIVREVKVASEPDALLAVLKSPIYCFKRIGLEAGPLSQWLFSELTEIGLPVICVEARHMRAVLKAQINKTDRNDARGIAQMMRAGLYRPVHVKTLRSQKLRVLLTHRKLLQSKTIAIENDLRATLRNFGLKVGVVGTMKFEARIKELVQNVPDLAVLVEPLLVVRRALREQISLLHRRLLGIVRDDEVCRRLMTIPGVGPVVALTYRATVDVPARFRNSKAVGAVFGLTPSKYQSGELDRNGAISRCGDEMMRVMLYEAAQVLLVRSTKWSWLKAWAMQIARRRGLKKAIVALARRLAVVMHRIWVDGTEFRWTREQAAAAGA

SEQ ID NO: 69119 - protein, 339 aa, unidentified
MELFVGLDVSLNSIAICVLSSRGKVHKETTSACEPDDLIAFLRTLQGDAACIGLEAGPFSQWLYRHLVEARFETVLMKTRQVKGALKAMPIKADRRDAEGIARLLHMGWFRPVHCKSISAQEMRALLSARKTIVQAITNLELSIRGILRNFGLKFGRVSKGGFAERVIELAEDNLKLYAAAKPILDARRALRHDLASLEKLLGDLARTDRLCHLFMTMPGVGPIVALTVRAAIDDPNRFHSSKDVGPWAGLTPRREQSGERDIIGSISRAGDAGLRTVLYQAAMVMLHKGRPSWLTAWALNVAKRRGMVALARRIGVILHRMGRDETPFRFPRAEPISS

SEQ ID NO: 69120 - protein, 405 aa, unidentified
MNAVGIDVSKGKSTVTIRKPGDMVLMSPCDIPHTQSAINDLIKQIKSLEGETKVCMEHTGRYYEPVATWLSDAGIFVSAVNPILIRDFGDDSLRTPKTDKADSKKIARYTLDRWAKLKQYGIMDKTRNQLKTMNRQFGFYMAQKTAMKNNLIALIDQTYPGANDFFDSPARNDGSQKWVDFIHTYWHVDCVRSKSLNAFTEHYQNWCKRKNYNFSAEKAAKIYQISSDLIAVFPKNDITKMLIWQAVALLNTASKTVESLRSKMNELASTLPEYPVVMDMNGVGATLGPQLIAEIGDVSRFTHREALTAFAGVDPGKNDSGKHIQNSVRTSKKGSPYLRKALFQIMDSLIKRSPVDDPVYAFMDKKRSEGKPYYVYMTAGANKFLRIYYGRVREYLSNLSNNETI

SEQ ID NO: 69121 - protein, 415 aa, unidentified
MALKIVYKICCGIDVHKTFVVACIASTNDKGVTSYESHRFSTYTSGLKTLLQWLLDRNCKDVCMESTGKYWIPVYNILEKDCSIVLAHPKYVKAIRGKKTDKKDAKWIADLFKHDLVSGSFMPPADIRQLRDLMRYRFKLTCFKSSEKNRLQNCLTVSNIQLGNVVSDTFGKSAQAILDKILENPADTSFDLEPLVFKSLKKKLPELRDAIDGYITPEQAGKLKVIKSHYENLEARKAELEELILALATPYQQELAILQTAPGISSDFTAIGIISEIGTNMEAFPSAKHLCSWAGLTPTNNESAGKKKSVRVSKAGCYIKPLLVQCANAVVKSNKHPEIRNRYLRIKKRRGHKKAIIAIARMLLTALYYMLKNGENYNAELYRKSDLPPVDREITVEQALMIARNQGYKIKSATA

SEQ ID NO: 69122 - protein, 389 aa, unidentified
MPLKNDLSRSLAAFEQDRTLVVVLEISLSTWLVAGLVPGVVRQPAKKLGADEHELLKLIHRWRAEASRAGREIDRICVAFEAGRDGFWLARWLAAKGMEAYVIHSASVAVSREHRRAKTDRLDTELLKRAFLGWLRGEPGHCGMAAIPTVEEEDARRPSREREKLVGDRTRIINRMKAALVRFGIRGFKPALRKAAERLDGVRTAEGIPLPENTRAELRRDMARLRVVADQIKEIEDDRLRELEATSESEPGPPAMVRLIARIVGIGVETADMLVREVLSRDLRDRQAIARYAGLTGSPDESGSRRREKGLARAGNARVRRGMIQLAWRFLQFQPESRLAKWYRERTADRRGSTRKTMIVALARKLLIDLWRLVTIGQVPEGVLLRQGE

SEQ ID NO: 69123 - protein, 371 aa, unidentified
MTTSVIYVGMDVHKDSIVIAVAEEGRCPPQKLAMIANDWPKLRKLLQKLQKNGTELHVCYEAGPTGFGLCRRLREVGIDCVVVAPSLVPSKAGDRVKTDRRDAAKLAHFLRSGDLTEVHVPDEAVEAIRDLERARDAAKKAERTARHQLGKFLLRHDRRYVGSTWTKKHMDWVRVQKFAYPAQQIVLDDYVKTVEDLGERVARLTKHMEELVEGSVLAPLVKALQACRGISMVSAVTIAAEVGGDLKRFATPQRFMSFVGLVPSEDSTGQRRWQGSITRCGNNHLRRILVEAAWHYRHRATLSQELRRRNQGVAEGVRKIAWKAQTRLHKRMFHLLKAGKDSRTAVVALARELAGFIWAIGQEATLLEGVT

SEQ ID NO: 69124 - protein, 409 aa, unidentified
MVAYIGLDWGDERHSVHVQTAEGTIEHVELEQKPDVLHAWVAQLKARFMGGQVAIALEQRKGAVVNALMLYDFLVLYPINPKALARYREAFRTSGAKDDPADSQLLLDLVVRHRDHLRAWRPDTMEARKLQLLCEQRRKLVNHRVALTNRLTSLLKQYFPQALDWVGDLASRQGCDSLARWPNLDTLQAERPSAVRKFYQAHNCRMVSVIDARLAAIKIAQPLTIDPAIVEPLSLTVQTYATQVHGLIRALQAFDDRIAQVFADHADHDVFASFPGAGDVCAPRLAAAFGTDRTRWESAAELQSYSGIGPVTERSGKTLWVHHRLACPKFVKQTFHEFADQSIRYSRWARAYYDQQRSRGNDHHAALRALAYKWIRILFRCWKTRTPYDEGKYIDALRRRGSPLVRNFA

SEQ ID NO: 69125 - protein, 372 aa, unidentified
MRDNSEVYVGLDTSKLKISVAVAAAGRDGEVRFFGDIDSTPEAVERLVRKLAQRHQRLFFAYEAGPTGYGLQRQIAALGHDCAVVAPSLIPKRPGERVKTNRRDALALAKLHRAGELTPVWLPDPAHEAIRELVRAREAAMEDLRAKRQHLQSFLLRHGRVYGGRSAWSRAHTRWLCELQFAHPAQYLVMAEYRQAIADAEKRLERLSEQVAELVPSWSMAPVIAAYQAMRGIAFLTAVTFVAEIGDVRRFESPRQLMAYLGLVPSESSTGEQVRRGGITKAGNSRARRVLIEGAWTYRFPARKSRLLEERQAGLPKAVCDIAWKAQLRLCGRYRKLMAHGKQRGVVVTAIAREMAAFLWAIGREVEPPHAS

SEQ ID NO: 69126 - protein, 347 aa, unidentified
MNQIIRIGMDTSKHFFQLHGVDAAELPVLRRKLRRKEMLGFFAKQPPTVIGMEACGASHYWARELGQLGHTVKLIAPQHVKPYIKRNKNDGRDAEGLCEAMSRPTMQFVPVKTAEQQAALMLAGMRERLVAQRTQLSNALRGYAAEFGLIATKGLDKIEPLLADIAADEGLPVLARELFAMHGREYAQLQAELKAIEARLMAWHRANPDSRRLAQIPGIGPISATALVMKAPDPRAFPSGRHFAAWIGLTPKDHSTAGKTRLGKITRAGDERLRSVLVAGATAVIQQARRGRGRSSPPWLLALLARKPPKLAAVALANKNARIAWKLMTTGESYDGARMPGVSALAA

SEQ ID NO: 69127 - protein, 344 aa, unidentified
MTYFTGIDVSLRSVSICIVDDRGEVCHECKVPAQPETIAECLRRFSADVKSIGLEAGTLTQYLTYGLQAAGFEVICMEARQVKNTLAAMRNKTDRNDARGIAQILRTGWYSRVHIKSMHSHRVRALLASRKAILKKCVDLENELRGLLRVFGICLPPRVGHGGFDAEVRQTYASDQMLACALNPLLDARTVLYKTYLKLDNAIKALVKVDPVCKLLMSVPGVGPVTALSFKAGVDDPSRFKSSRTVAAHFGPTPRRFQSGESDNPGHISRAGDADVRSALYVAAHSLLTRNERWSSLKAWGIRLAKTRGHRRAVIAVARKLAVILHRMWTDGTVFRWGAQEVAA

SEQ ID NO: 69128 - protein, 341 aa, unidentified
MEKFIRTAIDLGKNYFQVHGLESEGGRSISRKIKRSKMHEVYSQIEPCRVGMEACGSAHYWARQLTAMGHEVVLIPPAYIKPYVKRGKNDVVDAAAICEAMSRPDMRYVPIKSADQQAVLMLHKTRELLVKQRTMAVNALRGHLAEFGIVAAKGIGRVDELLALAKADAELPHIAGAAVACMAQHLEGLDLSIETVDEEIARAHRQNPTSRLLDEIPGIGTLIASATAASVPDPGVFKSGRDFAAWLGLTPRQNSSGGKEKLGAITKQGNRYIRKMLVTGATSVLRVAGKRKGALADWINALRARKPERLVAVALANKLARICWAIMNTGEGFRTDTYVKA

SEQ ID NO: 69129 - protein, 323 aa, unidentified
MQGKIKPEPNEDQPVYVGIDVCKERLDVHIHPVNERFAVANDAGGWRRLKRKLTAHAVQRVVMEATSKYHRAAHRSLAAAGHAVAIINPLRARLFAEATGQLAKTDSVDAAMLARFGEQIAPCATEPAAESLEELRELVHARAAGVKDQTSLRNRLGAALSTVVKAELTQMIQSVAAMNRRIEEAIEILIADDIALARRSELLRSIPGIGPAVANTLIADMSEIGSMTPKQAAALAGLAPYPRESGAKAGQRRIRAGRGIVRRALFMAALVAARFNPCLKAFYTRLVDQGKAKKVALIAVARKLIILANTIVSENRHWQPKMS

SEQ ID NO: 69130 - protein, 346 aa, unidentified
MKKIFIGIDFSKEKFDVVIIMAENLEEKAPRVHEQFANDKAGYRKFFKWVKVNSHGVDMSLWLFCGENTGDYSKGLANFLYGKGCDMWLENAKCIKDSCGIRRLKSDRADAAMIAEYAMRNHDRMTLYEPLSGPLAQLRELFLFRQMNVRKRSGYIVRKGEKGRTLDSSPAKSFMARKCKHMIAELDKTIKECDKMIEALIASDRDLQETYEIVTSVPGIGAQNAVCMMVYTDNFKRFDCNPRKIACYYGIAPFGHDSGTSVHCDPHVHYMANKTIKGILTQAALCAINHCPPVAHYYARLIERGKKTMVALNNVKNKLVRIVTALVRTKQKFIPEYEFAKRYAMD

SEQ ID NO: 69131 - protein, 369 aa, unidentified
MGKYSEAFVAFDVAKKKHAVAIAEGGRAGEVRFLGDVVNSWLPIERTIKRLADRYERLHVCFEAGPTGYGLYRQIQALGHDCMVVAPALIPKRAGERIKTNRRDAVTLARLHRAGELTGVWAPDAAHEAVRDLVRAREAAADDLRRKRQQLLSFLLRHSRIYSGGGHWTLAHRRWLANQKFEHAAQQIVFQEGIDAIEDALQRLRRLEKQLTLIVPEWSMAPVVEAYQAMRGASFLVAVTFAAEIGDVRRFDTPRQLMSFLGLVPAESSTGDTIRRKGLTLAGNRRARRALVEAAWTYRYPARVSNTLRARLEGLPKLVRDIAWKAQVRLCARYRRLSARGKKLPIVVAAIAREMAAFLWAIGREVAPA

SEQ ID NO: 69132 - protein, 359 aa, unidentified
MKRINTASLITFINTCDDQNVWVGVDVHKKSWAVALYREDGELFTFSTTSNFAGFVKQLAPWKDRLQKVVYEAGPCGFVLARALMAAGIKVGVVAPSRVPRPVSHGAKTDRLDCIKLAEYAAKSQFRRYIAIPTESEEALRSIERHRFQLVDRLRQIKSRIKGLLLQFGINEPQGLSHWSNKSIEDLRSLELTDGLRETLQSHIRELQWVANEIKQIEKQMKESFHRAGLQKRLKSLQSIPGVGQIVALAFTAEVYRPERFQRAEEVTSYLGLAPIVIQSGLSKPRGFIRQVGQARLRSLLVEASWIWKQRDAKAAEFYRLILSRTGCASKAICALARKLAVIMWRIAIELRPFKFVSV

SEQ ID NO: 69133 - protein, 354 aa, unidentified
MQITTIGLDLAKHWFQVHGVDANGHVVVRRRLRRSGVIAYFRSLEPCLVGMEACATAHYWARELSALGHTVKLMPPAYVKAYIKRNKNDATDAEAICEAVARPSMRFVPVKGAEQQSVLMLHRARSLLVRQRTMLVNALRAHMAEFGIIAPQGRRHVEILRQTIAHQQERLPELARSILQTIADQLNDTMERVREIEVRLVRLHRQNPISQLLATVPGVGIMSASAIAATTSNPTLFRSGREFAAWLGMTPRQNSSGGKDRLGRTSKRGDKYIRSLLIAGAVAVLRHARNRPTRDGEWVRALLARKPTKVAAVALANKTARIVWAVMMRGDGYQAKAVLGQPAEWPSAHFSMRG

SEQ ID NO: 69134 - protein, 346 aa, unidentified
MENIALDVHKHYTWARVENKEGQELYASRLDHSRGCIKNFVQRWTPGSAVAVETVGNWYWVVDEIEAGGGKPQLVNARLAKLMMGNVNKSDKLDAKGMNRLQRTGTLPTIWIPSTAVRDARELPRTRMVFSRQRTQLKNRVHATLSKYGYVVDEVSDAFGKRGREIIKELSSKLPPHTKQALDHVLDQLDEVMENLKAIEADMIKAFAPCPQTTWLESLPGVGKILAVVAWTEIGSMERFNRAEQLASYSGLVAREHSSGGKFHYGAVRRDVNVYLKWAFVEAASSAIQNRHRCGYQHISQLYERIKPRRGHNRAKVAVARHLSEASFWMLKKGEPYREPRLSTQR

SEQ ID NO: 69135 - protein, 434 aa, unidentified
MSEFLNDFIVGIDVSSEFSVVAMLEPNGSLIRKPFRIDHNPAGFNKLLGILKKEEERLKQKPIYFVESTGIFHLPLFFFLKSNDLKGFVLNPLCVHSTKNFDLRKVKNDAKDAESIARLAKFQDVKYSLVPEPQILSLRMLLREYYAMSDMLTELKNRLCTDLYLLFPGYLDVFSNPFGKASLKILRDYQTPQAILSENPDTLAQMIAKTSRKGLIWGQKKVAKLVEMAQLCLSMPMEFSILSRKIQYHLDGIETFQANLKGLKDELAGMISNVDFPKNIRDSIILLEAMPGIGFLTAATILAEIGDFSRFHSPKALVAFFGIDPGVNQSGKFNGDRNKISKRGTRFGRRVLFTAALASIRTTCKGDPINPVLRDYYQNKCQNKKKKVALVAVMHKLLHYIFAVLRDQKPFEFRSPEDHQSWRNSTHSSLTLAA

SEQ ID NO: 69136 - protein, 364 aa, unidentified
MIRVYLGVDFHATKIVTHRIERRSDGTVRRTNGSFFPEDLLAFTRTLDQDTYVCVEASTGVFEFCDVIRSYVKDVIVIHPNEFRRMYLSGKKTDSVDAKKLADRLKVHIEDGDAQDDFPSVWIPPATIRELRELFSCLQLLKTQINMQKNKLRSILRLHLNVHARDVDVVTLNIDELELPCSTRLELHLIQGLLCSALLAKKQLEDRVRRVAIEYDEATVKLFVTLHGISIMGASALLADAGCIERFKSAKKFSRYLRSAPRVDSSNDTTRIGHIDKAGRKTTFGYLIEGLNNIYAGNPNYTRFYEKKCASKSKGKVRAAIVRKTLTTIYYMWRNREEYRFTHDSSTSRKIKEIERIKNSSQVA

SEQ ID NO: 69137 - protein, 322 aa, unidentified
MSQPGSLCVDIDVSKAILDIAASSAIEQFSVGNDSDGFDAIIAELRMYAIALVLMKATGGLETAIVCALQAEGFELAAVNPRQARDFDRAMGYLAKTDSIDARVLSQMAEVLNRHPERERFIRALPDTECQVLTAMVVRRRQLITMLVAERNRLHPAHPLNRKSINIIIKALEDELARLDADMNSHIHSHFKELAKRLSSIKGVGTMTAAALLAEVPEQGNLSRREISALVGMVPVNRDSGTMRGRRTIFGGRAGVRTALYMAALVATRFNPVIKVFYMRLLAAGKPKKVALVTCIRKLLTILNAMLRKNEEWNESYHHVAP

SEQ ID NO: 69138 - protein, 345 aa, unidentified
MKKIVKQVAGIDVSQDELVVQLGRMYDDWTPEMLASKTFPNTLKGFESFVSWVNKLAEAGVAVRYVMEATGVYHESLAYYLDENGYEVSIVLPNKISNYVRTLEKKTVTDQTASEAIALFGLERKLDQWSRPKGIFKKLRQLTRERSQLIELRTICKNQLHAEQAEAEPHKRSIARLKKRIELLDNQEQEIRAELEERIKTDAEVQRLVILLCSISGVGLLTAAAVLGETNCFDLIRNKRQLTSYAGLDVKEKQSGTSVKGKPRISKKGNKQLRKAMHLPALAAIRHDERYKAVFARLVSKHGIKMKAAVAVQRKLLEMIYIIYKTNKPYDKMYFKKLESSKAAP

SEQ ID NO: 69139 - protein, 324 aa, unidentified
MIDGILGIDVSKNTLDVSISSSTKVRTKSFANTSDGWHHLLDWLIAHKIRRVHACLESTGRYSLGIACALHEAGHVVSIINPAQIRDFVRTKLGRNKTDGVDASHIREYCELFKPQPWVPPSEAHRRLGELQTIRAGIIASLTAWKNRKNSGIVDAEAQALADATISHFTSQLGTVDQAIALAIENDSDLRSKRDLLLSISGVGDTLAGIVLAELPGPKVLHSSGEVVAYAGLNPRQHQSGTSVDRATRISKIGNAVLRAALYMPALSAMRYNPAIVALVARLKSRGRLKPKQIVVAAMRKLLVLCFGVLKTGKPFDPAIAMGC

SEQ ID NO: 69140 - protein, 340 aa, unidentified
MGEVITVGLDLAKSVFQAHGADASGSVLFRKKLRRDQVAPFFAKQPRCVVAMEACASAHHWAREIAALGHEARLIPPAYVKPFVKRQKNDMADAEAIAEASQRPTMRFVTPKSAEAQAAAVVFRTRDLLVRQRTQLINALRGHMAEFGHTVAKGPAHVARLVELVRDLASDLPDEARSVLIITVESLEALRAQITVLDRQIEARAKANGLARRLMSVPGVGPVLATAVIALAPSPSTFRRGRDFAAWVGLVPRQHSSGGKERLGRTTKMGERSLRRLLILGASSVVKAAARSGARDPWLARILARKPKLLVTVALANKMARIVWALMAHGGSYRAPIATA

SEQ ID NO: 69141 - protein, 348 aa, unidentified
MHTTAAYPKAILGIDVSKATLDCHLIPDETVTTISTGDRRASSRRRGSSIRAYRQTVANTEAGLRKLREWMKKHGVEQAHVCLEPTSTYHELAQEALADGHWVSVVNARAIRSFADAMELTDKTDRLDAMVLAEFCRARRPVATRPLTESERELRELTRRRSTLVQLAQQETNRLEHVRSKLARSSIERAIKLFAKEQARIETAIHAIIQADDELRQRMANYQSVLGVGVVVGATVLAEVPDLPNFDSAPQAAAYLGVVPRTRQSGSSLHRQGGITKRGNARVRAALYMAALVGMRRDPVLRAFAEQLRASDTKKKPKVIIVAVMRKLVHILYGIAKSGKPRYLPAGM

SEQ ID NO: 69142 - protein, 430 aa, unidentified
MSKYFYNPVVGIDVSADFSMVAILAPNGDIYKKPFKVKHDVDGFNHLLKEIKKVEKEFNMKTPTFMESTGVYHLSLFHFLSKNELEVFIINPLITNSNKNKDIRKVKNDKKDAINIAKLGKFDDIKAYSSFDISIFALKSLCRDYYKLVDTRSVYKKKLSADLRIIFPGYSAVFSDITGITSINILKSYQTPESILKASKDDIISLLGASFRKGMDWCKKTYNKLIKAAENAKTIGIHLPSFSIKISGVISIIDSLNEQINILLAQIKAMVKGDELPKNFKNNIKLLKSIPGVGFLTAVTLMAEIGDFNNFIKPKQLVAYFGLDPAVNESGKFKSDKEKMSKRGTRFGRRALYAVALASVRTKRDGQATNKVLLDYYQDNLKGKKKKVALVAIMHKLVNYLFAVLREQKPYEQRAPKIHQQMYLRNKQAA

SEQ ID NO: 69143 - protein, 352 aa, unidentified
MPCKKDIGVVRTIGIDTGKNTLHMIGLNEKGAIVLREKVSRNRIAARLVNIPPCLIGIEAGMATHYMSRDLLALGHEVKQVPPAYAKPFRQGHKNDFRDAHAVAEAVQRPSTRCVPIKTDNQLDLQALHRVRSRLVADRTAVINQVRGFLLEHGIAVRQGPRSLRQQLPQILATRTDVLSPRMQRIIGDIVDDWKYLNDRIGRVTDEIEALARTDVNCGQLMSVPGIGPIIASAMVAAIGNGAAFAKGRDFAAWLGLVPKQMSTGDRTILGRITKRGNRYLRMLFVQGARAILLRTKSWEKHSFGPWLTAAARRLHRNILTIALANKLARIALTVLIQGRSYETRIVSAPRN

SEQ ID NO: 69144 - protein, 459 aa, unidentified
MTQSRKMAKSKKSHQKTLDSLKQINPNAAGIDIGADSHWVSVSSTKEEQNVREFKCYTPDLYALADWLAQCEIETVVMESTGVYWIPVFQILETRGLEVLLVNSHHVKTVPGRKSDVLDCQWLQQLHSYGLLAASFRPQDEICILRSYIRHRDNLIRSAGTHVQRMQKALTQMNLQLHRVISDITGKTGLKIIQAILAGERNPEQLASLKDGRIRRTTEEIAAALMGDYRPEHLFVLRQELQLYETYQQQIVQCDEEIEAYLTNLNSQIEGEEITSGKKPPTKKKCCGNEPAFDFRSHLHPISGVDFTRIDGLGVLTVQTILSEVGLDSSRFRTVKHFTSWLGLCPGSRVSGGKVKSSQTRHVVNRAANAFRLAANALSRSHSANGAFFRRLRARLGSPKAITATAHKLARIFYCLWKGGGEYQDPGVDVYEQQYQQRILKNLQRKAQQLGFDLVPQHD

SEQ ID NO: 69145 - protein, 403 aa, unidentified
MTKNLGCGEVVAGIDTHADTHHVAVIDITGQELGDDQFPATARGYADLADFVTNFGNITRVGVEGTGSYGAGITRHLQALRVEVVEIIRPHRQLRRMHGKTDQLDAYAAARTALASGDHPIPKTGQGPVEAIRYLFTARRSAIKARSAAIVQLKSLLVTAPDGLREKFAGLTPVALIAKIIQARSTQDMVAKVALQTLKSLARRYRFLCHEVKELEKQLAALVTDTAPGLTAAFGVGVFSAAQLLITAGDNPHRLRSEASFAALCGVSPIPASSGKTNRHRLNRGGDRQANSALHAIALSRWKNDERTQAYITKKRAEGRGTKEILRCLKRAIAREIYKILTQPQATKPAMPDLKTQRETKNFTVSQAAQALKTWPARISDIEHNRRPLPHLTHRYQQWLQTA

SEQ ID NO: 69146 - protein, 456 aa, unidentified
MKSKSKDNKKGTNYVSMPVINTHAAGIDVGSRSHFAAVGQELSDVREFGVYDQDLRECAAWLKSYGITTVAMESTGSYWQNLYDVLMESGFEVFLVAGRQTKNMEGKTDVKDSRWIQFLHSVGLLTSSFLPDLETEELRTIYRHRDFLLKQAAKYINKMQKCLRLMNFRLDVVINDVTGKSGQAIIKAIIAGERDPQKLAALADWRVKKSTEEIAKALSYNGRTDYMYELSDSFDIYQSYVKKMEECDKKMEELMRTQIVKLKKPHTLPPPLEKPKRSGKNAPKIPTHELSWQWNQEVDLLSIGGVGHSTVLAINSEVGQSIDKFPTAKAFASWLRLSPDNRISGGKVLSSHVRKGSNRIASALRHAAESIGKQKDAPLFPFFQRIMYRKGRCAAIIATARKLAVIIWTMLTKKVQFIPYDTTKIENQIREKQVKKINKLLKVFEVKAHEINFAFA

SEQ ID NO: 69147 - protein, 340 aa, unidentified
MNRIVERCCGLDVHKSSVTACVRVAKKGVLHQETKEFAATTQGLFVLRDWLVSFEVQLVGMEATGVYWKPIYYMLEDDFELWLLNAEHLKHVPGRKTDAKDAEWICQLVEHGLVRPSFVPPKEIRELRNLTRYRKVQIEERTREVQRLEKVLQEAGIKLSSVATRVLGVSGRAMLEALIGGTTDPEVLAELARGRLRSKIPALKEALEGRFSLQHALMVGRILSHIDYLDETIEELSAEIERVIAPFSQKVELLDTIPGINRKAAEVLIAEIGVHMDQFPTHRHLASWAGMCPGNDESAGKRRSGKTRKGSPSGSEAPSSVRHTPLRRLKAAISRPSMSA

SEQ ID NO: 69148 - protein, 393 aa, unidentified
MQKLSYTCGIDIAKNSFTVAIKNGTFIVKDKTFSMDREGFDKFDSLMKDFKEDSLIGIESTGIYHNNLFDFLGNKGYSSVVVNPYMVHQFFKFTSNKPTKTDMKDARTICEFVELKKDELVKENQQNRDEKDRLKYLVREKEEITHRIAQTKTEIRRILYLLFPEIENKVGLFGEEMRALLFEFSSAHKIRSISKNDFIKKVNKLTVNKGRGTRVNLEKIYELACSSIAQDHPSYEELLKMKFKRLAFLFEEREHITRLIDASADKDFAKEIEILISIPGVGRESAIYLIAEIVDIKRFPHWKKLVGFCGLDPVIKQSGKFRTNCKISKRGNSHARRILWIMAGCAKRRSPYFRDYYLKKRAEGKSYREAVIATSTKLLRVIYALLNKERRFQ

SEQ ID NO: 69149 - protein, 367 aa, unidentified
MREVYVGIDVHKDENVFGSAFDGRAKGELIGKCSADMNRTLSFIRSYMKKNELTKEQLHICYEAGPTGFVLARRLISLGFDSQVIAPSKIPQRAGDKIKSDRLDACKLARLHRAGELVAVHIPDMEDEVIRDVCRGRTDAVNEAKRTKQQLKSFMLRNGYRYTGTANWSEAHMRYLRELVMPHRAQKMVMEEYLLRIDTATAQVVRIDDQMNLLLQTWSRRPFVEALMGFRGFQTTAAMVQTAEVGDFLRFGHPKHLMGFLGMVPRENSSGNKRSQGSITKCGNSHARWMLIESAGSYRYPPKISKALSKRQEGLSREVKALSWHAQNRLNNRWYKLMFRNIHPNKIKVAIARELSSYLWDLAHIIR

SEQ ID NO: 69150 - protein, 441 aa, unidentified
MPPHRASSEEAVTEYSPETLPAVPPGGVRCGIDRADDDHAVCVVDLAGKVVQRFIAGHTGEGLAALVRRLRRAGAGEVAIERPDGKVVDTLLEAGLTVVVISPGQLKNLRGRYGSAGNKDDRFDAFVLAGTLRTDRARLRPLLPDSPATVTLRQACRARKDLAGHRVAVCNQLRARLKIAFPGAVGLFRDLDSPISLAFLARFDCQDRADRLSPRRLAAWLKSQGYSGRKDPAERHARLAAAPRGATGDDGAAKAHITRALPAVLASLVAQVKALQAQIAGQLALHADAHIFTSLPKAGTVRAARLLAETGDCRARFPTPEALICLAGVAPSTRKPGKVTHVDFRWAAGKQLRDAVCDFAGDSRHASPWAAQLYTTPSPAAKTTPTPPGSSPAPGSTSSGTAGNTTPLTTQPGTKPSSASSPKKNRRRLDTGLLMRSPVRP

SEQ ID NO: 69151 - protein, 364 aa, unidentified
MDVHLRSTTVCALDAETGEAVTRRFRGNPWGEVAEWMSGFPGPSLAAYESGYLGFAPQRELSGLGIDCVVAAVSKIPRSVADSASKNDRNDAARMAKAILAHDISPVWVPSPEVEGIRDLAGAYDGATARLATAKQRLLAFLAKRGFVYGGTTPAGNPRKYWTYDFLRWLDKVRPEDDGGVRTLAALRNEVEAAAEARADLLSEYRAAVDASPIAAEVAALQSIKGCAFALAAAFSAEVGDFTRFRSGRQVTAYFGLAPSQRSSGDSVRPGGISGAGNALVRKLAVEGSWCYAAARHQPKLMPRDTGVPLEIRMHGRKGSERLLRRREGMLARGMPAAKANAATAAELVRWLWALGMMCREGAE

SEQ ID NO: 69152 - protein, 439 aa, unidentified
MKGYLGIDVSKGYADFILLSEELAELESCFQLDDSSKGHAALIDWITVSLKKHQLTELRCGLESTGGFEDNWFSLLLRLGDQLPVRVARLNPSVVKHGAKASLRHTKTDAISAENIASYLVRFDEQVRYQVADNKYRSYRSFYNHISLLNRQKTQLINELKQLLYTSFPELQRFCKSSIPGWVLELLKQYPSASALSKARPEKLCKIKAITAAKASQLIEKATLSVASRHQSTDSFLVKSMASGILQAQQQLALYKEHLEQTCQGPEVDLLATIKGVGRYSAAAIIIQIEDIRRFPSPKHLAGFFGLHPTVDQSGDKKVKSRMSKKGRPALRAALYMCANSAVLFDPHLKSIYARHRAKGNNHKAALVVIMHKLLRIIWGVLSHKKAYNSDIDLKNQQKVKEVVPDKNEIEEKRRLQDYDEQAPISRIETKKRKAYQSS

SEQ ID NO: 69153 - protein, 352 aa, unidentified
MDRYVGLDVHARTCTFAVMSPSGKRLKSMVVDTNGRALVEAVKGICGDVHLCLEEGTQSAWLHEMLSPYSTELVVTVPEKKRGPKDDLLDAWARADDIRTGRMQTRVYKAPKHLSGLRSAACAYRLATRDVVRTKNRLKAVLRSRGIRSDAGVYEPASRDKWLTQLPSGSRQLAEWLGQELDGLVPLRDEAQEWLVKEAKSHPIIRKLRTGPGMGPIRTAQLVAIVGTPHRFRTRRQFWSYSGLAVVTRSSSDWVQSKAGGWVRAQTYQTRGLTRQRHPELKAIFKGAATSVIQQLPEDPLHEHYQHMLDSGIKPNLAKLTVARRVAAIVLAMWKHQEVYDPHKHVVVTDKA

SEQ ID NO: 69154 - protein, 315 aa, unidentified
MTDPATFVGIDVSKDTLDVHVRPQGHAFAVPNGPQGLADLVARLAGARPALVALEATGGLGHACAAALAAAGHPVAVVNPRQARDFAKATGRLAKTDAIDAEGLALFAERVRPEPRPLPGEQAREFEALLQRRRQLLEMRAAERNRLGAAAAAPVRASLQAHIDWLSKQLEKVDKELGAAVEASPVWRAKDELLRGIPGIGPAVSRTLLAALPELGALTRQQIAALAGLAPVSRDSGRRKGQRSIGGGRAEVRSLLYMAALSAARYNPALRGFSERLRRAGKAAKVRLVAVARMLLTIANAVLRDKRPFDPAYGR

SEQ ID NO: 69155 - protein, 371 aa, unidentified
MNSIVYVGMDVHKEQYTLCCYSYDTDKVEYKQTIPSDYKLVLKYMEQVRSRYEGEVSFVCGYEAGCLGYSLYQQLKDHAVDCKILAPSTMAITNTHHVKTDKRDAANIARCLAFHTYSEVYVPNNDDNDVKEYIRMRDDQKLYLKKVKQQILAFVLRQGKRFEGGKTYWTIAHLKWLKTLELSDLQRETLKEYLLTYEYLTEKISRFDERIEELASVERYEEKVKHMSCLLGIKTHTAISMIVEVGDFERFEKAPKFASFLGLVPSEDSSDTRVNRYSITKAGNSHLRRLLVEAAQSYTRGNVGHKSVALKQRQKGNPPEVIAYADKANERLRRRFYKMTLNKGVNRNVAATAIARELACFIWGMMTEHVS

SEQ ID NO: 69156 - protein, 382 aa, unidentified
MTGTEPQAWGTGLMDDITFVGLDVHKATVCIAVAEGGRDGDVRQLGVFENRPEILSKVVSRLSKGGRRLSFCYEAGPCGYGLHRLLTGYGHECVVVAPSLIPMKAGDRVKTDRRDALMLAKLHRAGELTAIWIPDAAHEAMRDLVRARATAVRVLAKARQHLQGFLLRHERIYRGARAWTLAYRRWLSTVHFEHPAQQIVLQDYIHAVQEAETRRERLTQQIEELLPNWSMAPVVAALQAMRGVALIVAVTVVAEVGDFRRFANPRQLMAYLGLVPSEHSSGRSVRRGGITKAGNALARRVLIEGAWTYRMSARVSRKLHDRVEGLPAAVRDIAWKAQLRLCARYRRLAATGRPKVVVTTAIAREMVGFIWAIARLAQPALV

SEQ ID NO: 69157 - protein, 321 aa, unidentified
MTAILGIDVAKNKFDVALYRNSKYKTKSFDNKPPGFEALADWLKLHNVTVVHACMEATGLYGDALARFLFEAGYKVSVVNPARIKAFGESELLRTKTDKTDAKLIARFCESQKPVAWQPDPPEVEHLRMLGRRRDALIAMRTQEVNRLGGPDASVNESIQKVIAFLNEEIEQISKAIREHISKHDGLRKKQALLKTIPGVGDVTIEAILSEANGFDGFDTIEQVVAFMGLSPKEHTSGTSVKGKSALCKIGCARLRKALYMPALSAIQRNPYVKALYDRLKAKSKNGMIIACACMKKLVHIIYGVIKNGKPFNPAYNIKTA

SEQ ID NO: 69158 - protein, 315 aa, unidentified
MQTGLDIGIDVAGKAVVVACAAGSFAPRTLKNERCALRKWLGELPEGSRIGMEATGAYHQLGADLAHAAGHCVYVLNARDVKKYAEGVGRRGKTDRVDAEIIARFIAREYDRLHAYAPLGEAQRHLEQLLKRRGKLVAARVALELGWSGVAGIKVELTALLKAHAQLLRQVDKMIAQAIATVPEVKERVERVRTIPGFGEVGSITVAQALSHLPFTSADAFIAHTGLDPRPQDSGSRRGRRRLSKRGPGELRRVLHICAMSAASTKVWRPYYLAQRAKGLSGTAALVVLSRKMARTAFGICKRQVDFDPARLSTA

SEQ ID NO: 69159 - protein, 375 aa, unidentified
MRDHSEAFVAFDTSKSRNAVAIAEAGRAGEVRFFGEIENSAAATAKLVRKLAGKYARLTFCYEAGPTGYGLYRQIKSLGYECLVVAPSLIPRKPGDRVKTNRRDALGAVKLLRAGELTAVWVPDPRHEAMRDLTRARGAAVEDLRRKRQQVSAFLLRQGRHYSDGKKTWTKAHMNWLASQKLEHPEQRIAFEEMLLAVRQAQERIERLEQAIRAAVPDWSLAAMVTALMAMRGIDLVSATALLAEIGDLSRFQTAPELMAYLGLVPSEASTGDTVKHGPITKAGNRRARRMLVECAWSYQHPPRVGKEKQEKVAAAPRAVREIAWKAQCRLSARYRALIRRGKLKTVAVTAVARELAGFIWAIGREVTTADAAAR

SEQ ID NO: 69160 - protein, 331 aa, unidentified
MTYCIGIDVSKQSLELWDGTQEGEVPNEKSLKTLKKLLKKRYGTNWNKGGFIYEPTGPYSNYLRAFAAEHEVQVYEVNPKKSANFAKVLGNRSKTDAIDAKMLYSFHLLLKESEFSIPEMDEIAERLGAYLGSYEIIQKTRTMLANHVHALEEKSGVTRKLKDSLEKELGRLGTMEEQLEKEMEAYAEDHEETREDLNNLLSMNGIGVVSAMNLLYLFRKYPGANRNEITALAGLDPVRRQSGSSLNGGRKISRAGDPMLRKVLYLACMNSIQHNECIRTFYKHLVSDNHKKPKVALVACMRKLLLITQHLYVTKSPYRTLEHDANLCLSS

SEQ ID NO: 69161 - protein, 347 aa, unidentified
MTLYIGVDFHPHQQTVAWCDTQTGETSTCTLQHNLSEVLKFYQSVSPSIVGIEASSRAVWFEQLLSETNHQLLVGNPTLIRARARSRHKSDARDAQLILDLLVKDEFPAIWRRSAASSQIIDVLHLRRQLVGQRTQTYNRLQALAHSGGLPKGKMKTLGFQSLLKQVPMNESSQMQRDHLFSLLEQLTKQIRELQSWLRQKAASDNQVQLLLTQRGVGYLTALATVHTLGDVSRFQKVSKQAIAFAGLDSLEKSSAGKTRFGRISKAGSPLLRGLLGQSANIVIRYDARLKAFYKGLAKRKPKAIAKTATARKLLVKLAIMLRDNITAEEFDRRGESSWQCSILDKV

SEQ ID NO: 69162 - protein, 337 aa, unidentified
MKYCGIDLHGNNHWVVIIDEQDRVLYSRRHANDLPRLLAVLAAHRSELCGIVVESTFNWYWLVDGLQEAGYRVLLANSAAIKQYDGLKHRGDESDARQLAHLLRLGLLPEGHIMPKAARAVRDLARKRMQLVQQRTAQILSIESSLSRHSGWTLSSNRIKCLRQADLDEMLLGEMPMLGLKANIAVMQALQTQIDGLEKVLADYCRTEPGYRLLRTVTGIGEVLATVILLETGGIERFADAGNYASYCRCVGSAHLSNGKKKGQGNTKNGNRYLAWAFVEAANFAVRSCEAARRFYQRKKAARNNAVAIKAVAHKLARACYHMLKAQQPFCVERCFA

SEQ ID NO: 69163 - protein, 347 aa, unidentified
MSITMIGLDTAKAVFQVHAVDAAGQVVIRRKLRRNELIAFFEKQAACTVVMEACGAAHHWARVLTGLGHDVKLIAPEAVRPFMKKGKKNDAADAAAICEAASRPGVRFVPIKSLEQQGVLALHSARSLLVKQQTMLANAIRGLATEFGLTVALGMSKLGELMTLVDTDEAVPAKARQALTALFDQCRALDESTETFEAEIVAHARHDDTARRLATIPGIGPITASLIAATVADIGAFQSARHFAAWLSLVPRQYSTGGKTRLGRITKAGNREIRRLLVLGATSMVHRAPGWNSAVGAWTRGVLERRPVRLVTVALANKMARIAWAVMTRKEVYHAKGRVAAAADAMA

SEQ ID NO: 69164 - protein, 320 aa, unidentified
MLSFGGIDVSKDRLDVVVLPEEECSSVPNDAAGWAELVERLRGFSITAIGIEPSGGYERGAMRALLAAGMPVRQVNPFKLRQFARASGVLAKNDPLDARMIASFVTIMPTRPAQRQTPAAERLAEMLAIRRQLSAEKVAAENASRLLEDAMLQRLSRRRIVRLAADIDLLDKRMVEIVATDDALVHRYRLLTSMPGVGAVLACTLIALLPELGRMSRKQVAALVGVAPYAFESGTLKGRRCIWGGRAHVRQVLYMAAMSASNWNPVLKAFHDRLTAAGKLPKVVIVAVMRKMITMLNAMVRDDVVWADRLSGRHVLPTAR

SEQ ID NO: 69165 - protein, 384 aa, unidentified
MQTVADRPEAPTAIRTDLGAIFVSLELSRSTWLITSLSPDGGEKMSKRVVRGGDVAGLLERFAQLREKTRARTGKVFPLVVIQEAGLDGFWIDRALQNEGIESHVVDPASIATSRRRRRAKTDGIDGEALVRALLAYKRGEPRVCAMVKAPTPEEEDRRRLCRERKVLIAERVRHVNRVKGLLFSQGISGYEPLRRDRRERLDTLQTGDGRLLPDHLKAQVRRELDRLELLLEQIKAVEAERDVLLAAQQAPAAMLLDIKGIGPEFAAILWSEGLFRHFDNRRQVASYAGLAPTPWQSGSVDREQGVSKAGNPRLRTTLIQLAWLWLRHQPQSALALWFEERVRRNGGRLKKPTIVALARKLLVALWKYVTAGVVIEGAVMKAA

SEQ ID NO: 69166 - protein, 338 aa, unidentified
MGEQYVGIDLHRRRSVIVRMTGEGEVLETVRVDNDPVALSLELAKAGPDPEVVLEATYGWYWAADLLQACGAKVHLAHPLGVKMFGYQRVKTDARDSRNLAELLRMGRLPEAWLAPPQVRELRELERYRAKLVALRSGLKAQVHAVLAKEGVRVPMSDLFGVGGTRLLDQLQLGRAYGLRVTSLRSLITAYDQEIAMLGREIATALAGDVGYLAIQAIPGVGPVLAAVFVAEIGNVHRFAGAPQLCSWAGLTPRHRESDTTVRRGPITKQGPRLVRWAAVEAIQRLPKTSKQATDFYRIADRRGTGIGRVAAARKLLTLVFYGLRDGQVRCLAPREAM

SEQ ID NO: 69167 - protein, 377 aa, unidentified
MHSENIAAYVGLDVHKETLAVAIAAPERLGEVRYYGTINNEAQAVRRLFQKLQGLYGNILSCYEAGPCGFGLYHQLTAMNIKCQVIAPSRIPKSPTDRIKNDHRDAISLARLLRAGELTPVWIPDLTHEAMRDLIRARAAAKRDSRVARQRILSMLLRTDKHYAGKHWTGKHRTWLANQSFSQPSQQIAFQHYCQSLEQIEDRILQLDQEISRLLPEWSLCNLVCQLQALKGVGQLIAITLVAELGDFSRFSNPKQFMAFLGLVPGEYSSGNSIRPRGITKVGNSELRRLLYEAAWSYRTPAKVGAWLIYYRPDSVTQYSKDIAWKAQQRLCSRYRSLTAKGKKSQVAITAVARELTGFMWDIALAAQSSFSQQKQN

SEQ ID NO: 69168 - protein, 480 aa, unidentified
MNVKTNKTKKQANVENQAVNLLSKEELCKRIEGVEKELKSYTWRELETNGKFAKNDKLSFITDDMLIVGCDIGSETHYIRAIDIRGRELSRKAFEFSNTAEGFEAAKAWMLELAVQNRKSQIVLGLEPTGYYWFALAAWLITAGISVVQVNPYAVKQSKEIEDNSQLKDDRKDPKLIANLVKDGNYGMPYLPEEIYADMRRLSMFRDQLTEDRIRNINRLHRELKIYFPEYMDAFGKIDGSFALEVLKVSCIPSEITELGTEGLRNIWHEAKLRGRGYSRASEIVEYAEKSVGLKDGSSVGRKTVKWFAKEIMKLDEQLAWIENTLHKKCMEIPYAENILEIKGVGENILAGIVAEMGDISRFDDVKEIQKLSGMSLVACSSGKHKGQTKISHRGRKRLRYWLFQAAKSAVSHAEEFKELHVYYTTRADNPLKKMQSLIVIACKILRVIYTILKTGRDYDPQKMLKDIKRPKAALAAKAA

SEQ ID NO: 69169 - protein, 453 aa, unidentified
MQEKRNKEVERHRGQLQGLPVIRCLVAGIDLGSEQHWVCAPTSDGSGREIADFGATTPELIRMAEWLKQRQVESVAMESTGVYWIAPHEVLEAQGLEVLLVDTRQLARVPGRDKKTDPTDCEWIQRLHSCGLLRGSFRPQEQICMLRTLVRDKASLVAESADWLRRMQKSLDQMNVRVHRAVSDLEGATGMAILRAIAAGERDARKLAQLRDRRCRQSEEQIAEQLSGHWREDHLFSLQQALKMYDAIHERIAAYEKEILGRLHQMERPDQPGQTAPPLGNANKAQKIKKHGQEAKRQALYRMSGVDATQIDAIGVDTVEVVISEYGLDLSRFPTEKQFVSHATLAPHVPKSGGKPLKKRKHNSASTRVAAALRMAALSLRHSDTALGAYYRNIAKRIGGDVAVFATARKLATLIYRLLRWGQPYVDEGAQAYENRYRQLRLQNLTARVNALG

SEQ ID NO: 69170 - protein, 343 aa, unidentified
MQTITTIGLDIAKSVFQVHGVDAEGNVVIRRQVKRRYVLAFFQKLPPCLVGIEACASAHHWSRELQALGHTVRLMPPAYVKPYVKRHKNDAIDAEAICEAVTRPNMRFVATKTREQQSCLTLHRTRHLLIRQQTSVINAIRAHLAEFGIVAPVGRNGVEQLLGVVADASDKRLPELARASVAALGDQLRALKAQILQFDRLIMAWHRSSEASRRLDDIPGVGPALATALVATVADPQAFRSGRNFSAWIGLVPKQHSSGGKDRLGSISKRGDRYLRGLFVAGALAVIRYAKIHGTKHRPWLTALLSRRPTKIAAIALANKIARMAWAMMARGERYKEPVALAA

SEQ ID NO: 69171 - protein, 401 aa, unidentified
MTNSQDLKFNAIENTDAIVGVDIAKNVHWAGIILPNGKEIKKSFSFNNNKKGFKSLVETVKNVLIMYNFKNVIIGMEPTGHYWKSFARYLKKIDWIHVVTVNPKKVKDSKELDDNCQTKSDKKDCITIARLIKDARYFDPYLPEGVWAELRNLSNTRAELVRKQNAVKCRIVATMDEYFPEYGKVFKQVLGRTSEEILKRCPFPEDIKSMGKEELLKHIKETVKRGYSKKQVNAIYEIATESVGTTEGLTGAKIQLQMYVEEAELLKKQIERTEIYLEEQLKETGYYESIISIQGIGIVSAAMLVGEIGEIDRFDSYEQIRRYAGLNLVENSSGKHQGKTTISKRGRSLLRSILYRMAFTMVGKNEEIKQLYKYLTTRKERQLKKKQAMIAVMPCHFIFIY

SEQ ID NO: 69172 - protein, 461 aa, unidentified
MPKSDRKKKVQRGKQSQDWEALPPLNANAAGIDVGNAEHYVAVPAGRDAEPVQKFGSFTADLHRMAQWLKGCGIQTVVMQATGVYWIALYQILEDHGLEVNVVNAHHTKTLPGRKTDVLECQWLQKLHTFGLLNNSFQPAEDIWILRTYMRQREKLVAGASTCIQHIQKALTEMNLQLANVISDISGMTGMAILRAIVRGERNPQALARLKGERIHATREEIAQSLEGNWRSELLFVLEQSLALYDTYQQSIAQCNLRIEAHLKSMKSKTTAEQAPPKSGHERSHRKQILWLDLSSQLFRIAGVDLTQIDGIQVQTAQTVISEVGVDMSRWRTEKQFASWLGLCPDNRISGGKVLKRGTRHVVNRAATALRMAAWSLFRSQSALGANFRRLRRKLGAPKAITAMAHKLARLVYRMLKFAQGYVDKGMEHYEAKYRQDQIKWLAKSAAALNLQLTPLAEVVD

SEQ ID NO: 69173 - protein, 376 aa, unidentified
MGTPSAQTLDDVGVREIFQELEEVPLMTMVGGLDVHRAQITFDYVDDDGLVHWGQIRPATRKTLRGWLAEHCPDGDAEFALEGCTGWRYVSEELAGAGVGVHLGDPAEIAVLRGPKKRAKTDRADARLLRTLLLQGRFPESWIAPAHVLEIRTLGRRYCTLMDERRAWQQRIHAQLFHQGCPPVRALLSVTGRAALAGAELSAVGGQYVDTALGRIDELSTEIEPLRAQLVNFARHQTGCQALPRHYGIGWLCAAIIWAEIGDARRFSSSDQLVRFAGLDVTVYSSDGKRSPGHLSRQGSPGLRWAAFEAAKCAARRGSPDYGYYRKLAAKRDGHNGKNPTLAVERKILRRCHHTLRELGDAAVALPVAEPQEVAA

SEQ ID NO: 69174 - protein, 438 aa, unidentified
MSNKVIFNLDDLFISVGIDVGADFSWMSIALPNQQFVGKPYKILHNSMDSLAAAVSKIKEAEELYSLESRIFLESTGIYHYPLFCYLRDKGFNCYVINPIITKNSTNINIRKVHNDRFDSKKAALVGLKPDLKVSLMPSDLALNCRNLCREYYDLMDSRSAYVNKLQGELRMAFPQYLGIFSKITIHTSLTLLETYTSPSAFIKADKQEIIEIIKSTARFGLTYAQNKYNAIIQAANEANEFGYIIDSNIKRIRLYISFIRKYDEEINGILESMHELINANEDTDFVKQIHLIETFKGAGFLSAVSLMGEIGDFSAFSKPKQLFAYFGLDPAVKQSGKFEGTKIQMSKRGSAIARRVIHTLTLQSISVSRTGEAKNPVLRDYYLKKCGAKPKLVAMGAVSHKVCNMIFAILRDNKPFEIITPQEHIKQYNAAKCDIAA

SEQ ID NO: 69175 - protein, 318 aa, unidentified
MEQSRQPPIVGLDVSKAWLDGYLAPSGRRLRVGNDGQGVADLVQALGDHAGCLVVMEASGGYERTAHRELVARGVLAAIVNSKRVRDFARGMGLEAKTDRVDARLIARYGATMRPAATPVPDPARAELREILACRRRLVDEIAVRKQQLEHLHSPLVRARLERALAFLRQEVKELLTLLRERIAADQVLAADCALLTSMPGCGPILAATLLAELPELGALDRRKVAALAGLAPVARDSGLREHRRVIKGGRGQVRRALYMAAVASLKTDKSPLKARYARLTARGKPPKLALTALMRTMLVTLNAMLKAKSARQDPRQS

SEQ ID NO: 69176 - protein, 349 aa, unidentified
MPILADQVDVVIAVDAHTDSHTAALISPLGAVWGELTVPADGHALHRLTSWVERTVDAPRRHWVIDGTRSHGVGLLRQLRKAGERVAEAPRLKRGSRRGRGKSDALDAIAIGRAVLAAPTLAEPRADGIREALRLLLVTRRHYSDYRTATVNLLKSLILTTDEQVRDQLRRKTTTAQVRHLLTLTVPVDSPYHIRISVERMIDLARRIADLDKTLAQNKKELTALVKQSCAVLLEQVGVGPVTAAALLCAWSHHGRVRDEAAFASLAGVNPIPASSGRTVRHRLNRGGDRTLNAALHTIALVRRRVDPTTQNYVARRTTDGKSSREINRSLKRYLSRSLFRIMEATATL

SEQ ID NO: 69177 - protein, 440 aa, unidentified
MQILYSRCCGIDVHKDSVTACVLVYSGAPEPEVRKKEFATHKKALGNLRLWLHANQVTHVAMESTGVYWKPVWQALEGNFDLTLANPFQIKTMPGRKTDARDSQWIAELLAHGLIRRSFVPPRATRNLRDLTRYRVKLVEERNRIHNRIHKLLEDACLKLDTVVTDILGVSGRRIIQAILNGYEHPMELAERVKGTLRGKIPQLRLALNGRITDHHRFLLGELMDDLERVESKIQRLEAEIVQQVDMQLVERLCTIPGVDILTAWTLLAELGTDMGVFDSPKHAASWAGLCPGNHESGGKRLSNRTRKGNRWLRRALVQSAWGASRKKDCYLAAFFYRHSAKQGVRKAIVSLAHRILVIAFCLLRDATEYAEAGGEYFDKLNPVRTRNRLIRRLQRLGVEVTLTARPDLPPIPPANPPTHRKRGRPCKCAERLIHCIHTT

SEQ ID NO: 69178 - protein, 359 aa, unidentified
MLAKGDSAVRKEADAMTFVGCDLHTRTQQVAMLDTDTGEVSERQLAHEGTAVEEFYAALPGPVTIGIESTGYAIWFHALMQRLGHTLLVGDAAKIRAMVVRKTKTDRRDALHLLDLLSHDRFPDVWVPDPATRDLRTLLMHRMRLVRIRTMVKNGLHAVALNYRIARGPKLLRQAGLAQLQTLALPPHTAQRRDQSLELLTGLNTQIRALDEAITTAALAHPDAPRLITHPGVGALTALATIVVLGPVSRFSDSKHVVSYVGLAPAVNASADKHHLGHITKQGSALLRFTLGQAASHAARMDPDLKRTYFTLVHRRGRPKAKVAVARKLLVRLFIMLRDQIDYAEFRRRGPRTPTPTPA

SEQ ID NO: 69179 - protein, 339 aa, unidentified
MTQVIRIGLDLAKTVFEVHGVDGQETVVLRRSLRRRKVLAFFAQLPPCLVGMEACATGHYWARELTKLGHDARLIAPHYAKAYVRRHSNDAADAAAICEAVGRPSMRFVDVKTEAQQSAACLHKLREMLVKQQTMWINHLRGLMAEFGIVVAAGPQHVGELLAVLADPEDQRLPAAAREVLIQAAEALRDTQRRVEAIEKRIVAWGRDNETCRHLITAPGYGPILASAMAVFVVNPAAFTSGRHFAASLGLTPRLEGTGGKVWPGPISKRGNGYLRRLLVNGAMSVLCSRRAKEDPWLAQLLATKPRKVAAVALANKMARIGWALMMRQEDFRARPAAA

SEQ ID NO: 69180 - protein, 355 aa, unidentified
MNQEKYIGMDVHDATISAAVMNAEGKLLMECVLETKAATVLDFIRGLRGTLALTFEEGILAAWLHDLLKPHVSRLVVCDPRKNALLRDGNQNDRVDARNLAELLRTHQVHAVYHGKHGTRTLKEVGRSYLALTQDTTRVMNRIKSVYRSWAIACAGTSVYSRRHRAEWLAQLVEPGVRIRAEHLYQQLDSLEPVRQAARRELLRESGKHAAVKLLRQIPAIGPIRSALLVALLQTPHRFRTKRQLWAYSGLAVQTYDSGEFRFVRGKLHRNRERITVRGLNRNHNHDVKNLLKGAAISAIGHPGPLQDFYAALVEKGMRPSMARLTLARKIAAITLIMWKKGVSFDPKQLQPQAA

SEQ ID NO: 69181 - protein, 390 aa, unidentified
MIDCYNQKLGEITFPNRPAAFPKLVTKVKKCNTDGKEVVYGLENAYGYGRALAVWLIDKGYLVKDVNTAISHRQAKHRGAMYRKSDSDDAKAIALATLNMLDKLPDACPNDAYWSLGQLVHRRDNIMKQRTRLVNQLHEQLCIAYPSYKQFFNDISRPTALYFWEHYPSRKYLKGKSVEDLRAELVPVSHNKCSTKTREKILDAVASDKVKNIDYQDARDMVTLSIVSDLQHYDSQLAEVDKMLEQMYKMLGCTLTTIPGVNVITAVKILAEIGDIKRFSNANKLAQFAGIAPLHLSSSGKGKDVATKQGNRRLQAAIYFLAIQMVQLSSKGTPRNPVVRAYYEKRKAEGKTSQQALICISRRLISIIYGMLKNGTEYRMPVVENAGENR

SEQ ID NO: 69182 - protein, 345 aa, unidentified
MNVTTVGIDLAKSVFQVHGVDARGKAVLRRQLRREQVAAFFVNLPPCLIGMEACASAHYWGRTLERFGHTVRLMAPQFVKPYVKTNKNDAADAEAICEAVSRPSMRFVPIKSIEQQAVLSVHRVRQGFVKARTAQANQIRGLLGEFGLVIPQGIRHIAQRVPALLEDASNELPLEFRQLIDRLTCHLKELDQQVRELERQIVAWHRSSELSRKLEKIPGIGPLAATALVASIADARSFNNGRQVSAWLGLVPRQNSSGGKSTLLGISKRGDVYLRTLLIHGARSAILAAKRQGECKNVWLANLLNRRHANIAAVALANKNVRTVWALLAHGRDFKADYVPARAAA

SEQ ID NO: 69183 - protein, 397 aa, unidentified
MYIVGIDIAKRKHEAAVIDGEGAVIIKPFSFTNNCSGYNRLLAMLTKAKLPLDEVSFAMEATGHYWLALFTRLQKEGFRVQVINPVQTNSIRNFYIRQAKTDPRDALLIAEVIRFGHFSESSLHPENIYELRELCRGRHAIVSMQADVKRKVVALLDQVFPEYETAFTNLFSDTSMAILQTCPTPKELSEMPLEELCHLIEVSSHKRFRMAKAQELQELARNSFGFAMAGDVFSTMIRLYAKHLDFLKQQVREMDRKIAEIMETLDTPITTITGIGPTLGAYILSEIGDISRFSSAAKLAAYAGIDPTMRQSGEYNGVRNRMSKRGSPYLRHAIWLAASSAVLHDPALKLYFQKKRDEGKPYMASVGHACRKMVSIIYAVMRDNKAYTPCIPNEISA

SEQ ID NO: 69184 - protein, 327 aa, unidentified
MNNTFYIGIDIACKKFDVAIYKENKKALHNTFDNDKKGFESLLKWINKDTQNLHVVMEATGIYWEELAYFLYDKKAKVSVINPKCIKAYGIGQNLRNKTDKIDAMLIARFAAKEQPQAWQPPPKAQRALLLRLRQLEHLKQAEQKERTRIKMMSDSESISSAERLANFLREEIKAFEKQIDETIKTDTMLKQNAKLLSSIPELGKKSVAWLLAYLGDGSRFKNGKAAAAYAGLTPMHHQSGSSINGKPRISKIGQTDIRKILFMPAVAYSFGNYKDRIYKTFVDNLLAKGKDKKVIIVALMRKLVAIAQTVLKNQMPFDASLHQKTM

SEQ ID NO: 69185 - protein, 292 aa, unidentified
MKNVITYVGIDAHKKDLFIAMLIGTQETSVTWTVPNETQAVRRLVRKLERAAPGPVKCYYEAGPCGYTLQREMTTERVSCHVVAPALIPRKPGERVKTNRRDARKLGELARAGLLTEVRPPTPEEEAVRDLCRARDDAREDLQRCRHRLGKLLLRRGLHFPGRNWTRAHRQWIERIEWGHAPTGVVANDYLLAIDQLEARLTELDAALTAIAETAPYAEPVGWLRCFRGIDTLTAILLLAELHDFRRFHDPRALMAYVGLVPGEHSSGEKHRRGRITRTGNALVRRLLVETA

SEQ ID NO: 69186 - protein, 320 aa, unidentified
MQTPAVVLNIGVDVAKDEIVVACSESSFPVRQIANQRVALLAFLKNLPTGSRIGVESTGSYHELFAEAAHQLGFAVFLLNPKDTRHYAKAVGLRGKTDRVDAELIARMIAHEHTKLHSWIPPTPQQREMDRLIKRRATLVALREAAAMSLHELDGFAADLKALRTRFNQLIARLDLRVKALVEADPERKQNFARLCTISGVGPVIGTALVNTLERVPLKSADAFVAFTGLDPRADDSGRHRGKRRLSKRGPAELRRLLYMAAMSAINTKTWRPLYEHYRAKGLSSTATLVILARRIARTAWSIYTHKTEFDPGRLVKPLT

SEQ ID NO: 69187 - protein, 344 aa, unidentified
MDHFAGLDVSVKETSVCIVDDTGRIVREAKVASEPEALLQALGNPAYRFKRIGLEAGPLSQWLFSALAEAGLPVICVETRHMRAVLKAQINKTDRNDARGMAQMMRAGLYRPVHVKTLRSQKLRMLLTHRKLLLSKAIAIDNDLRGTLRNFGLKVGMVGTVKFEARINELVENLPDLAVLVEPMLVVRRVLREQIGILHCRLLAIVRDDDVCRRLMTVPGVGPVVALTYRATVDVPARFRNSKAVGAVFGLTPSKYQSGESNRTGAISKYGDEMMRAMLYGAAQVMLTRTNKWSWLKAWAMKIARHRGMKKAIVALARRLAVIMHRIWVDGTEFRWTREETVAA

SEQ ID NO: 69188 - protein, 318 aa, unidentified
MDKEFIGIDVSKNTLDIATYASGKKWQFSNDEAGISRFMETIGEITPALVVMESTGGYEAPVAYALYHSGIPVAVINPREVRDFAKATKKLAKTDRIDAQVLAHFAAVIQPEPRPLSDEQAQELEAMIARRRQVIEMLTAERNRLHTARKPVRAAIKAHIDYLEKELSQIDAELKGKIEESPIQREKYNMLQSVPGVGPNLAATLLIELPELGTLNRRQIAALVGVAPLNHDSGNKRGKRSPWGGRSQVRAALYMAALVAARHNPIISQFYTRLCAEGKAKKVALVACMRKLIIILNSMLKHHVIWHPSQPVLAVATA

SEQ ID NO: 69189 - protein, 267 aa, unidentified
MHTENESVFIGIDIAKDSLDIHVNPTEECWTSANTAKGIQDTVKRLEALTPACIVLEATGGLEMPLTASLAAADLPVAVVNPRQSRDFARVMGILAKTDSIDARVLALFAEKIQPPCRPLPSEEGLALKELVTRRNQLIDMRTMETNRQRRISSRHVVTSIDTVIETINEQLKEIDHEIKQRIKASPVWRMKDKLLQSVPGVGDGTSAILMATLPELGLLTRRQIASLAGLAPMNRDSGKWRGRRMITGGRVNVRKALYMPTLTAVR

SEQ ID NO: 69190 - protein, 337 aa, unidentified
MKSTETMFETFVGIDVSKLTLDVTILKPQFQKLSHRVFDNSDEGYLKLKNWLSVHHGVIFARTLFCLEHTGLYTRSIDRFLRERKAYVWMESSLHIKKSLGLTRGKNDKIDSQRIAEYAYRFSDKAAIRDHCTPTIQILRDLLTTRDRLNKSLKSILVSINELKRVDLKQSINLETFQLAAIRGLKASIKEVEEAMIETVENDKQLKIHCDLATSIPGVGKILAIKLMVYTQVFTRFESVRQLACYCGVAPFEHRSGTSINGKTGVSKFANMDLKSTLHLASLSAIQYNPDMKNYYQRKVNEGKSKMSVINAVRNKLLSRIIAVINRQTPYVILSQA

SEQ ID NO: 69191 - protein, 413 aa, unidentified
MKKHTYRAQKVNNMNWQQVNEQSAGEALVLAVDVAKVQQYALLTNQEHTQTWLMQWRHLEHTPYLIEQLKALEIPITVVMESTSTYGDSLRYQCRQAGFTIYQANAKKVHDAREIYDGVPSLHDAKAAWLIAKLHKDGATKPWCEPTEEERRMNALRLEYELHQDQLRRNQNRLEAYLSRHWPEVLTLMPLDSVTLEQLIKNYGSPQEVAVQSEQAALDMRGWGKSGLSAEKIANVIASAQNTMGEPCIEAEGQFLMALASELQHSRQQKQTTKQALEAIVENDEALREMGRTVGKVTTAVLISLHLDPRRFATPKSYQKALGVNLTEKSSGQINGRLRLSKRGSATARKFLYLAALRLLVNDPMVGKWYEAKKDDCAKLKTVIALMRKLPLALWHIARGERFDAGKLLKAAV

SEQ ID NO: 69192 - protein, 346 aa, unidentified
MRYKGMKNKSFIGIDISKNVIDASIFCEGTPIKDFPHDVFNNSRKGFGEMCTWLKKNHVVLSNCLFGMEFTGSYSMELEKFLNARNYQFCMLSTHVVKHYPMGPKDKSDKIDSAKIADFLYRYNGTECVKPYNMPDKTMQRLKALMNERKFLVEQRTCFMNRRQLCITKEDAQLYDGYIKKFSRDIENIELEEQKLLATDDSLLSTYKNLLTIPGIGFVNAINVIVITRNFTAFETARQYASYVGVAPHFRTSGTSVKWRPRPSARCDGQTKADLSMAATVVVQYDAELQSFYNRKLGGKQDSDTKRKALNAVKFKLVLRMFAIGKQNRKWEPLDSKSSNEKLAIS

SEQ ID NO: 69193 - protein, 453 aa, unidentified
MPKIIPTNPQNLTRMNPGAAALDIGSTMHMAAVNPESDDMPIRAFGTFTHDLHDLATWFRSCGVTSVAMESTGVYWIPAFEILEQHGFEVILVNARYAKNVPGRKTDVSDAAWLRQLHSYGLLRGSLRPQAQVATLRAYLRQRERLIEYSAAHIQHMQKALMEMNQQLHHVVSDITGVTGMKIIRAIVSGVRDPDLLASMRDARCHSSAQTIRASLIGNDRDEHVFALSQSLELYDFYQQKMLECDRRLESAIGAMSAEVEAPLLPLPNVRTKTKQVNAPSFDVRAALYGLVGTDLTQIHGLGSSLALKLIGECGTDLRAWPTAKHFTSWLCLAPGNKISGGKVLSSRTRRSSSRAAALLRLAATTLGRSDTALGAFYRRLAGRIGKQKAVTATARKIAVLFYNALRYGMVYRDPGAAAYDERHRGRVIANLQRRARSMGYDLSPMAAGDCVS

SEQ ID NO: 69194 - protein, 334 aa, unidentified
MLYAGIDIHKRVFQAVVLDPDSGELSESRFEPSRERLGDWAMQWQGKLAAVAIEATTGWRWVARELEAHGFEVHLVDPGRASALRGRRRQPKTDRLDARWLALLLARELLSECEAWLPPAEIQRLRDRTRLRKALAGERTGWAQRLHALLAHEGWPCSRGRLLTREGSRWVAALELDAHVRGQVDVIVAVMAALEEQLELVESELRRFARADPRCRALQTIFGVGPILACHLLAEIGDVRRFQRPRQLVRASGLDPAVIESAESKRRGRLAKQGSRHLRWALVEAANHSHRHTSPDHDLYTNTVRRCGRGRARLTVARKIARRSYHVLLAAEAA

SEQ ID NO: 69195 - protein, 474 aa, unidentified
MAGKAHADLQALPMLPHETLYVGVDIGKKTHVAGFISTTLLSRHQRFESCPALSFDTSREGFRALVDRITTYVPLTQVYVVMEVTGHYHRPLLQYLQEVEIPTYIMHVQKRQEGLLKSDKRDALSLGNLLFNQLEKGIQVGDPMQAVRRLAAPTEAASQLRGMVQHRHELTVESTQRRNKLTSICDEVFPEFTKILKNPNLPTALTLRKRFPTPAALATTSLLALQEVRGKKRSLTDAKLLELQRLAAQSIGTKDSARLRGLTFEQAQLITELELIQQHLEQLEAEISQIVEHSREGQILTSIPGIGPSQAAAIIASIGNIANFERASQLKSYFGWAPSVSQSGYSLDHVRLTPRGQRQMKHTMYLIVWHAIQLKDCEWSKIYERLVPLKCSFNERTRQYTGRAKVMGRIAGQIISVIFVLLQRDAETLSKLPFGTKPPEPVLYDPEIHRQHRAGHYRAFTQHKPSNVIELPPH

SEQ ID NO: 69196 - protein, 341 aa, unidentified
MNFIGLDIHKKTISYCVKDAAGEVLAEGTILSTRQSLDVWMRTLCEPWTVAMEATMFTGWIYDYLLPHAAAVKVAHPLMLRAIAAAKKKNDRIDACKIADCLRCNFLPECYMASTEIRERRRTLRYRKLLVRQNVQLRNKVSQMLMESGVVYNKQKLHKVGYFKELMTTNPDIGEGLRPLLTICRETIVRIGKTEGALVRSLARDPLLSDRVQRLMTIPAVGPITTLTWVLEVDDVARFGSVKQAISYCGLCGAERSSADMVKRMPISKQRNKHLQSVLVEAAKLGPRLSPDLALVYETEKQKGHANRATIAVARKLVAYLLAVDRSGREFVVAGERREAA

SEQ ID NO: 69197 - protein, 356 aa, unidentified
MKNSQLDFTGQTLYIGIDVHKKSWQVTILLNGMKVKVFSMNPNPKELNNYLTNHYPNANYHSVYEAGFSGFWANRQIQALGIKNIVVNPADVPTKSKERRKKTDKIDSSKLARELSVGNLDGVYIPSTKAEALRTLIRLRRQIVNDQTRQKNRIKSLLLFLGYSVPEDVETKHWSQRYIKALRNLDIEHEESKATLNELLNNLNFIRSQLVQILEQIKGFIAKDQQADKTVRLLKTIPGIGPILAVILYSEIIDIYRFKKLDELANYVGLSPAIYSSADKEINLGLTKQKNKYIRNYLIESAWIAIRKDPALQMAYGLLCKKMPSNKAIIRISKNLLNRIRTVWINQQEYVIATVA

SEQ ID NO: 69198 - protein, 344 aa, unidentified
MNYYAGIDVSLESSSVCIVDATGEIVKETRVESHPDALVKFFKAFGLPLTVIGLEAGPLSQWIYAGLTKAGFVTSLMETRHVNAALSATTVKTDRRDARGISQLLRMGWFRPVHAKSAGSQEMRALLVARKQLQHKLRDIELSLRGILRGFGLKVGKVTDKTFGARIRELVTGHPMLEQIAEAMLAARAALLEQFNTLHKAVLKIVRQDEVCRRFMTTPSVGAIVAITYKSALDDPGRIKKSRNAGPLFGLTPKRYQSGETDIIGGISRVGDEMVRTALYEAANVLLSRVTRFSALKRWGLEVAKRRGLKRAKVAVARKLAVILHRMWIDGSTFRWTKAQEAHA

SEQ ID NO: 69199 - protein, 337 aa, unidentified
MEITTIGIDIAKSVFQFHGVDAAGQTVLQKKLRRNAVLDTLAKLPPCLIGMEACATSHHWAREITALGHDVRLIPPAYVKPYVKRQKNDAADAEAICEAVTRPNMHFVAIKSVDQQAAMMLHRVRDLLVRQRTMLINALRAHMAELGIIAPQRPQNVLGLIQQLEEDSNGGITEVARSALLSLADQLTSLTQEIRALDRKILEWHRSSETSQRLATIPGVGVLTATAMAASVTDPSLFRSGRQFAAFLGLVPRQNSSGGKERLGRITKMGDGYLRKLLVVGATAILRRVADTQTRTANWIRSLLERKAPRLVSVAMANKTARIVWALLARGGTYRAA

SEQ ID NO: 69200 - protein, 365 aa, unidentified
MPEIIVSQKYKYVAGVDTHAKTHHLTLVNNMGALVGKREIKVISHHMEKAIDWVTEKTQGNVLFAVEGTSSYGETLTVALQNRNIDVCEVKPPRNRTRGQAGKTDEVDSLRAAQHVLSMPTDKLINPKNQGVIKVLRILLTARRGMTSQSVMDKNALYALFRTNSLTPDGRTPDLTPPTLRAIADWSAETDEKISIEKAVARMEAKRLAQHILFHQTMLKHNEKKLYKIIKAIAPCLLELPGFGAITSAQILYSYSHKGRCHSAYSFACLAGTTPLEASSGQYTRHRLSKFGDRALNAALSAIILTRMRCHAPTKEYTEKRTTGGKNKREIKRTLKNYLARSIFRHLEKLDLTVNICSNKIALVC

SEQ ID NO: 69201 - protein, 406 aa, unidentified
MKRIAGIDVHKKMLVVVIAAAESPDQVLQKHKFGAARAELERLRLWLKDAAVEEVVMESTAQYWRPVWNALEDHFSLHLAHAQSNRAPRGRKSDWADARRLVKRLAAGELFLSFVPEAEQRDWRMLTRARQALVRDHVHLQNQVEALLEQASIKLSSVVSDLFGASGWRILSALAQGQTDPEKLADLADVRLRCGREVLADALHGQFRPVHRHLLEQALQRLKTISQQIGQLNQLAAQRMQPHTQAIRRLIEVPGIGAEAAQEILAEVGPAAAAFPSSAQLASWIGVCPGTQESAGENHSGRCAKGNRYIRRVLCQVAHAAAHTKGSHFEAVFRKLLYKGYNKAVWAVAHKLCKVIWNILHNGVRYLEHGEAINPKAVQRAIQHHLKALRRLGYVLPASPATASQG

SEQ ID NO: 69202 - protein, 429 aa, unidentified
MRTESTPGARGPVFCGVDTHADSHWLCVLDWRGRRVLSRRFPADAAGYEALAGAIAAAGEPACVAMEGTSSYGAGLTRHLASLGMPVREALSPAGTQRRRPGQGKCDESDAERAARAAMSDSRLGTPKSQDGWVDGVRCMLAARSGAVKARTSAINTARSLLTTAPEGLRSRFRGMGGPRLMEELPSVRAEGALGAALGALADLWAAARDAALDMERAIEASLEENCPALLAMYGCGPVSAAKLAVAAGDNPGRLRSEASFAAICGACPIPASSGKTVRHRLNRGGDRQANSALHEIARQRVMRDPETAEYAERARARGKSDREVMRCLKRYVAREAYRALMRPHEVRRPEDASGLVAARRAARVSQVRAASILGTSEKYISMLERGQRELKPIRRAYEAWVEAGLPLDWDRQAFEAERKMDSKKHLAK

SEQ ID NO: 69203 - protein, 343 aa, unidentified
MKITTVGIDLAKNLVQVHGVDERGTPALRKQLKRSQVLSFFVNVTPCLIGMEACSGAHYWAWQLQKLGHTVKLMAPQFVKPYVKTNKNDLADAEAICEAVSRPTMRFVPMKNGEQQAVLALHRARQGFVRARTAQANQIRGLLAEYGMIIPQGLCQIGKRLPAILEDGENDLPGLFRGLLQRLGEHLKELDRQVGELDAQIQLWHREHEGSCRLAQIPGIGPITASALVASIGDAKSFANGRQLAAWLGLVPRQHSSGGKTVLLGISKRGDGYLRTLLVHGARSVLRVAESKPNYEASWLAGLLKRRHPNVAAVALANKNARIVWALLRRDRDYDAGYQASAA

SEQ ID NO: 69204 - protein, 338 aa, unidentified
MTIVMGLDQHRAQVTADWLDTETGEVSRARVVPADRLGVRRFLTRFAGQQLEVALEATTGWRFVVEELLAVGAEPHLAEPAEASALKGSKRRAKTDRGDARHLRELLMTGRLPESYIAPEHLLDLRARVRLRHALVDQRGEWQQRIHAVLYHHGHPQKAGLLTAANRTWLERLALPDAAREQVTVALAMIDALDAQSAGIAAQLRRYARRQAGCRALMGLYGVGELTAVAILAELGDTRRFSSSRQAVRYAGLDITVHQSDQRRAPGHLSRQGPPALRWALYEAAQAARRPGSPDRAYYDQAAERLGGNRACLALARKLLKRSFHVLRELGDQALQPA

SEQ ID NO: 69205 - protein, 335 aa, unidentified
MSQIIRIGMDTSKHFFQLHGVDASEKVVLRKRLSRKAMLEFFAKLPATVVVIEACGAAHYWARELSKLGHTVKLIAPQLVKPYVPRNKNDGRDAEGLCEAASRPQMRYVPVKTAEQQAALMLLGIRDQLVARRTQLGNMIRGHAAEFGLIAAKGLDKLVSFLAAIEQDERVPALARELFTMLARQHEQVQLELKTIEAKLLAWHRANALSRRLAQIPGIGPVIAAALVMKAPDPHALPKDHSTGGKTRLGKITRAGDERLRQLLVVGATSVVKQAKAKGRGAGWLIELLKRKTPKLAAVALANKMARIAWKLMTTEETYDSARLNAQADVRVAAV

SEQ ID NO: 69206 - protein, 449 aa, unidentified
MSIIGVGIDLGVTAQHEACILGPNKTKTFRFYTTVEEVGRLVALAEAMKTEHNDKIVFILEPTGRGWITVSRLLMEKGYGVYKANPKKVKDYRNYLNGRRKTDRLDAKVLAAMGRDHHEFDPVVLPSEDIAALQTLTRERVRLQEMAANEKKRVKSLCHYLIPGLTGALGSNLYKPQWRVFLRKFINPFEIAKAGRVGLHASLAAASCKPSDHEKIAAIYPLAQHACMSLRLGADDLEALELTLNSYFDMMEVFEKKVVELERLIAIQYAKAHKSRFLETIPGVGKTLAPIILACIGNLERFPNLKKLKAYSGLIPAVNQSGEHSVKGLKITKQGPNQLKRALYLAADNARHWDVEMAQIYFRAMMTKGQCHTQAVCAVATRLLGRIYAILKAGRPYINRDLSSKHVTRAQANRYIDQHLRVPEHVRSRKRTSKQAKMERLHPSTKEAV

SEQ ID NO: 69207 - protein, 342 aa, unidentified
MESAVTIGLDLGKSVFQLHGVDAGGAVVIQRQLTRGKLLGFFAKLPPCLVGMEACAAAHHWGRELQKLGHGVRLMPPRYVKPYVKRQKNDAADAEAICEAVTRPNMRFVEIKTCEQQGTLVLHRVRLMLTRQRVQLSNAIRGHMAEYGLVAPVGRNGLQRLIAIINDPDDVRVPAVARASLAPLVRQLGLVNDQVLENDRLVRASARSTELGHRLMEVPGVGPVLASAMVATVPDPTAFKSGRDLAAWIGLVPRQNSSGGREKLGGITKQGDHYLRQLLVAGALAVIRYAQRHGTRRPWLIHLLARRTPKIAAVALANKMARMIWAMMVTGERYREPRVAAA

SEQ ID NO: 69208 - protein, 289 aa, unidentified
MNINTIGLDIAKTIFHLVGLDKNGKQIQKKKLRRGQVLAYFANLPPCTIAIEGCGSAFYWQRELTKQGHRVKLLPAQYVKAHLRGNKNDYNDALAIAEASRVPELREVTPKTIEQQGIQALHRLRERTVNDRTSLSNQIRGLLSEFGIIFNQRISSVRKGLPAVLEDAENGLPHTFRDALGLKYNQFCQLDDLVKDFNKLINESSEAHKEIELLQSIPGFGDLVSSSYYSVIGDGKAFAKSRDASASVGVVPRQHSTGGKTVLQGISKRGDKYLRKMLINGARSVVSCA

SEQ ID NO: 69209 - protein, 348 aa, unidentified
MVIIGVDSHKRTHTAVAVDGNGRKLAEKTVATTADGHLELVRWSRRWRERSFAVEDCRHLTRRLEGDLLRGGERVLRVPPKLMASTRRSTREPGKSDPIDAQSVARAALRERDLPIARLDGPEREVRLLVDHRVSLIGDRTRLQSRLRWFLVELGIPEPQPRTLGQPTVLARLELDLGGRSEPSARISRDLLTRIRELTTAVNALGREIQALTDLLVPSLLALPGCGHLTAGKLLGETGGIARFRSRAAFATHNGTAPIPVWSGNAVRHRLNRGGNRQLNLAVHRIAVTQLQTAGPGRDYVAKRMVAGDTKVEAIRALKRRISDEVFRRMNADEAARAALMQPARAAA

SEQ ID NO: 69210 - protein, 337 aa, unidentified
MKVTLIGIDLAKSVFQVCGVNQAGKPVFNRQVRRNKLLQTLLNYPEASVAMEACSGSNYWGRELRKHGFKVFLIPPQHVKPFVKGNKNDRNDAFAITEAARRPRMQFVEPRTLEQTDLLVLHKVIDRKVQARTALTNQIRGLLNEYGIVVSPGKERLLKALPELLGDGDNGLTAAAREVLNALLDEWHAANQQIQAHEAKLKRTAKQLEPARRLMAVKGVAEKTATAMVGFAGEGKAFKSGRHFAANLGLVPSEHSSGGRQKLGGITRRGNNYLRRLLVQGAWSVIRYADRSTDRLSRWAANVMERRGKHKAVVAVANKLARILWAMLYHRTEYRPG

SEQ ID NO: 69211 - protein, 339 aa, unidentified
MRLYVGIDLHSNNSVLVILDEKDKVVYERRHANDLTIILEQLAPHRKNIQAIAVESTYNWYWLVDGLMDAGYEVKLVNTVAVKTYDGLKYSSDEHDARHLAHLLRLGILPTGYIYPKQERAVRDLLRKRAQLVRNHTVHILSIKNLVIRNNGKGIASDAIRKLDDAAIGRICGGDAMLAMAIQSSLVVLRCLNKQIRELERVILAQARLKPEFTNLLTVNGIGEMLGMTIMYEAGSMERFAGVGQFASYARCVASSRWSNGKKKGEGNRRNGNKYLCWAFIEAAHYAVRYNERIRSFYQRKQAKTNKIVAAKAVAHKLARACYHVIKEKTPFDEARAFA

SEQ ID NO: 69212 - protein, 387 aa, unidentified
MPSTMPTPVMALDYESTIITAVELSASSWLVGAQVPSVLRQCRQKLAPSAEALLEHLGRLRQRAERAGKRVSRVVVAYEAGRDGFWLARWLIAHGIEVYVIQPSSVPVDRRARRVKTDAVDVEMLLRTTLAWLRGEPRVCSMVPIPSEAEEDGRRPLRERQELIKERLAITNKIDGLMATLGIGGYRPLRRDRREQVATLPSGDPLPVHAQARLTRLLDRLELVLEQIKGLEKARDAVVAQDDVVSGGEADSMIRKLAGLKGIGPELATLLAWEAFVRPFRHRRALAGYAGLTGTPFASGGRQREQGIGKAGNRRLRAALVELAWLWLRYQPDSTLAAWFRERTRAAGSRTRKVMIVALARKLFVALWRFCRDGVIPQGAAFKTATA

SEQ ID NO: 69213 - protein, 370 aa, unidentified
MKKHSTRPQSPRGAAARSKGPITIGLDLGDKTSRYCVVGDNGEVMSEGSVATTRKAMAQKFSGMGRCRIALEVGTHSPWLSRLLSKLGFEVIVANARQVQLISASSRKNDRMDAHMLARLARVDPELLRPIRHRSEQAQADLMTIRIRAALVEARTSLVNAARGFTKAMGERLPACDTDSLGVEKLEALPAALQPRLQPLLEQIEALTAQIKKLEGHIEQIARIEYPETRLLTQVSGVGTLIALTFVLTVEDRERFQKSRDVGCYVGLRPKQSESGQSQPQLRITKEGDRYLRTLLVQGAHLILNRRGPDTDLKRWGLKLAQRGGKNAKKRAIVAVARKLAVLLHRLWVCGEVYEPLRNSRPMPASKHAA

SEQ ID NO: 69214 - protein, 361 aa, unidentified
MAKVRSWAGLDVHARSVLAVTLDAQSGELRSARLPGETVKVVEFLAKLPGPTRVAYEAGPTGYGLARTLHTAGIGCVVAAPGKIERPAQDRIKTDARDAERVLRLLMIDALHPVRVPTVEEEALRDLVRAREDLRGDLMRARQRLSKLLLRHGIVYEDTSSTWTGPHRAWLRAQDLGGGAQATLLDYLGGVDTLECRRGQLEATIAELVPASPYAQTVARLRCLRGVDTLSAVGLAAEIGDFGRFDRPGKLMSYIGLVPSESSSGETRRQGKITKTGSKHARRLLIEAAWHYRKTPARGVTLQRRQEGQPANVIAISWQAQRRLHHVWRRLADQRGKRRTIVAVAVARELAGFCWALAHTD

SEQ ID NO: 69215 - protein, 420 aa, unidentified
MSHRFRKPVNIMPTPTIDLAGPVAGIDTHTDTHTVAIVTETGKHLATDTFPTTSNGYQQVTEFLSAYSVVAAGIEGTNSYGAGLTRHLIGHGHVVFEVLRPTRALRRRDGKSDPVDALAAARQVLTGQALSIPKDTTGPVESLRMLQITRHQLVATAAKLLTLIKSLLVTAPVTVRQRYATMTTTTLVMTLSRCRPPADVTDPVNGTLTSLKSLATTYNMLRAQCDELDNKITDLVEVINPAMTQIFGCRAVTAAELLVSLGENPQRIRSQAALAHLWGVAPIPASSGRTNRHRLNRGGDRQANAALHRIVLVRMRHDERTRDYVQRRIKEGLSKKEIMRCLKRAIVREIYQVLCLGRPVRQSSGLRSDEFRALRSKKGLSQTQVAKKLGCAPARISDIETGKRRLSELKLTYEEFLKTA

SEQ ID NO: 69216 - protein, 350 aa, unidentified
MPIATIAIDLAKSVFEVAAADENGHIVERRRLTRGQLVRYFQNHRGVHVVMEACGTAHHWARQFAQHDMRVSLLPPHYVRAYVRRNKTDSADATALLEAARASDISPVRVKSIEQQALQGLHRLRSAWCATRIARINTLRGLCREFGIVAPVGAKRGLLALRRALAQEDAVVPAFLRATMERVLEELRVLDTNLLEVEAQLGAIARESSVCQRLLTIPGVGLIASTAFAGTVGDIGTFRSPRRFASWLGLTPREHSSGTIRRLGSISKRGDVYLRMLLVHGARAVLYSADAAERAGRPLDALRAWGIRVRARAGHNKAAVAIANKLARVIWATWRHQCDFEFRAPQLVAA

SEQ ID NO: 69217 - protein, 341 aa, unidentified
MEQATTIGLDIAKYVFQVHGADSAGHVLFRKRITRGKLLGFLAAQAPCVVAMEACAGAHYWAREIAKLGHHVRLIAPAYVKPFIRRQKNDAADAEAICEAAQRPSMRFVPVKTQEQQANGIVFRARDLLVRQRTQCVNALRGHLMEYGYVFPKGITHVETLAAVVEDLQSSLPDRVRVILQLLVDTFTALEAQITALDAEINQRSKSDPTARRLMTIPGVGPIASTAITALVPAAEGFPAGRDFAAWLGLTPLQKSTGGKQKLGAVSKRGERTIRRLLIIGASAVVQQASRRGAPKGSWLAQMLARKPKMLVTVALANKMARIIWALLVKGGTYRTPTAAA

SEQ ID NO: 69218 - protein, 200 aa, unidentified
MFYVGIDIAKKNHEASIIDFDGKILGKSISFSNSQAGCEKLISLLDKFEVDSSNVIIGMEATGHYWVSLYSYLSDLGFTVYVINPIQSSAFRKMYIRQTKNDSKDSFVIAQIMRFGEFSSTSLANEEQLEELEIKISTLLNQTNSVITTITGIGDVLGAIIIGEVGDISRFNSASQLVAYAGLDPSVNQSGDFAGTKTKI

SEQ ID NO: 69219 - protein, 370 aa, unidentified
MGNASTLHVGLDVHKESIAVAYATEDGAVAPVPFGTIGTRQCDIDALVRKLQSKSARLVFVYEAGPCGYWLYRYLTRKGLTCFVVAPSLIPRKPGDRVKTDTRDAVTLARLARSGDLTPVYVPAVPDEALRDLARAREDALHDLNAARFRLKALLLRNDVRYAGRANWGAEHLRWLARLVFPTPAQQTVFQEYVRTVTERTELLQRLEAELLEQAKTWRLSPVVEALQALRGVQFTVAITTIAELGDLTRFDTPRQLMSYLGLTPSEYSSGERRRLGGITKAGNRHARRVLIEAAKAYRHRAKVSEQIHARQEHLPTVIRDIAWRAQVRLCGRYRKLLARGKHPNTVAAAIARELAAFMWAIAKARPVPA

SEQ ID NO: 69220 - protein, 415 aa, unidentified
MIHPKMKYTYVGVDSHARTHTAVFIDCFFEKLGEIQFENLPDKFDSFLERAKKYQADGTVFMFGLEDCSNYGRTLMKFLKENGYHVKHVNAFLVSQERKNQNITQKTDSEDAKCAARVLLSKFGELPDAEIDDKYWVLRSLVVRRKNIVRQRSANKNYLHSLLMHSYPNYRDFFENIDCKTSLAFFIRYPSPRTLNGVTAEELAELFKTTSHHQLGMPKAKQILETLQDTAVPFQEIRDSVIQSAIRQLVFNIEEIERIECQISAFLTKFDCTLTTLTGIDTTTAAQLLSCIGDIKKFSTSAKLARYAGIAPITYASGAKEKQYANQRGNRELNSLFFWLAVRVSMASGPNRRVINSFFYDYYHRKMSEGKTKQQALKCVQRRLVNIIWHMLTYNEEHVNPPTYELDDTELPAQT

SEQ ID NO: 69221 - protein, 339 aa, unidentified
MQINVIGFDIAKHVFQVHAADNGGQAVAQIRLRRAQVLDYFRSLPPCLVGMEACATAHHWARELMALGHDVRLMPPGYVKAYVKRNKTDAADAEAIAEAVTRPTMRFVPVKSAESQAMLMLHRARELLVRQRTMLANAVRAHLAEFGIIAPQGIHRVEKLATQVHDPAVPPIARDALMLIVDELASIWRRVEALEARLVALHRTNEVSRRLASIPGVGPITAMAIANTITDVSAFRSGREFAAWLGLTPKTYSSGGKDRLGRITKRGDRYIRHLLYIGAGNVIRFAKARSATGEAWIRGLQERRPPKVVIVALANKMARIAWALMKRGESFRSPAAAAA

SEQ ID NO: 69222 - protein, 344 aa, unidentified
MDHFAGLDVSVKETSICIVDDTGKIVREVKVASEPEALLAVLKNPVYHFKRIGLEAGPLSQWLYGALAEAELPVVCVETRHMQAVLKAQINKTDRNDARGIAQMMRVGLYRPVHVKTLRSQKLRMLLTHRKLLQSKAIAIENDLRGTLRNFGLKVGMVGKVRFEARIKELVDNLPDLAVLVEPLLLVRRTLREQIIILHRRVLTIVRDDDVCRRLMTTPGVGPVVALTYRATVDVPARFRKSKAVGAVFGLTCSKYQSGEIDWNGRISRCGDEMMRVMLYEAAQAMLRSKKWSWLKAWAMQIARRRGMKKAIVALARRLAVIMHRIWVDGTEFRWTREQATAAA

SEQ ID NO: 69223 - protein, 402 aa, unidentified
MNAVGIDVSKSKSGVAIMRPFGEIVSTPFEIKHTASDIHSLIELINSVEGESRIVMEHTGRYYEVLAHQLLEANLFVSAINPKLIKDFDNDSLRKVKSDKADAVKIARYALDKWQNLKQYNVMDELRNQLKTMNRQFGFYMKHKTAMKNNLIGILDQTYPGVNTYFDSPARSDGSQKWVDFASTYWHVDCVRKMSLNAFIDHYQNWCKRKKYNFSQSKAEEIYGKAKELVPVLPKDAITKLIIKQAVDQLNSASTTVESLRTLMNETASKLPEYPVVMAMKGVGTSLGPQLMAEIGNVSRFTHKSAITAFAGVDPGVNESGTYEQKSVPTSKRGSADLRKTLFQVMDVLIKTHPQDDPVYQFLDKKRAQGKPYYVYMTAGANKFLRIYYGRVKEYLASLPES

SEQ ID NO: 69224 - protein, 348 aa, unidentified
MDIIGLDLHKRESQLAIKAEDGTIAERRIVTSRERFTAVLGGRPRARILLEASTESEWVARHLESFGHEVIVADPNYAPMYANRSRRTKTDKRDARTLLDACETNAYRPAHRLSEARRHVRAELAVRDALVRTRTRYIALAKALVRRDGLRVPTSASSWVPTRIAALDLSPALATELTPLFAVYAPLNEQIAAADRRLAVGAAADPIVARLATAPEIGPVTASAFVATIDDITRFGSAHQLEAYLGVVPSERSSGEKRQLGRITKAGNGRMRWLLVEAAWRILRSKSPETAALRAWALAIARRRGKRIAAVALARRLAGVLYAMWRDGVPYDAQRIRPLAVTVHERAG

SEQ ID NO: 69225 - protein, 309 aa, unidentified
MLGVDVAKDNLVASDPYGKVRTIANSKDAVGKLLSTLDPGATIAMEATGNYHKLLANAAFSQGFKVIVFNPRDVLHYAKSISPRAKTDQVDAKVIARYALARPEYRPYEPTPAVAQKLLNLSRARVSLVKKRTSLENELRECPELSEYLEPAIDGLCRSVAKLNKELSAVTAKVTEHALMVGIPGVGTLVGAYTLALLMSGEFTRSDSFVGFTGLDVRIRQSGKKTGKACISKRGDPEARRLLFLAARTAANRPGPFQELYLRYQTNGLSKTAATVAVARKIARTLWAIYTNKTPYRVDRVLNQNSERS

SEQ ID NO: 69226 - protein, 340 aa, unidentified
MDKMQVEACGIEVSAKELVVALSGKKGEAVLRRFANTPVGHRQLLQALTRGGRRVRACLEATGVYGLDVALLLSAHTGIELMVANPRAVRHFAQATMRRSKNDQLDAVMLREFALRMEFIAWTRPDENTLALWSIARRLEALTKQCAAEKNRQHAAAVSQAIPACVRASVARTLRWLQREIQKLRKTARQYIASDARLQRHYQLLRTIPGIADSSAIQILAELALLPTDRDVRQWVAYAGLDPREYSSGTSVKKRTRISKVGNRHLRCALFMPALVASHCEPHLRGFYEHLVAAGKKKKQALTAVARKMLHAIFGMFRSDRPYDGNRVYPLPLSESPLQA

SEQ ID NO: 69227 - protein, 366 aa, unidentified
MAPIYIGVDFHARQQTICYLKTETGELVITALEHQDKEQVRAFYQQFPSPVIVGLEASGYSPWFEALLEQLGCEVWLGHATEIRRRARWRQKNDRRDAELIWDLMVHHEFPCLHRPAGQSREVLRMLRYRQKLIKLRTMAKNSLQAIALQAGLAKGKQLFSRVGQEEFKSAAMSPVLQWQREHWGQLLQPLNAQLLETMVWFKAQSKDDLGIQRLRTHPGIGLLTALCLLHTLQPVTRFRNARKVAAYAGFDPVERSSAERQHFLGISKAGSRLLRYLLVEAVQTAVRYDEDLKRFYKRLAERRGRPKAKVAAARKLLIRTYIMMRDEIDYAEFRRRAVAARLARTGQGPINVPEVLIGQPASPGV

SEQ ID NO: 69228 - protein, 341 aa, unidentified
MRKTLFCGVDLHSNNAMYVIADGRDKQRLAKRLPNQLPLVLDALEPFRKQLRVVAVESTFNWYWLVDGLMEHGYPVVLANPSEMEQYHGIKEADDLTDAAFLARLARLNILPTGYIYPKEDRPVRDLLRRRMLLVQQRTAIVLSLQNLATRQSGQSLQWRDIRRLGETDRAELLGDHDCLTFVADQQIDLIEQLNEKIKRFEKKVLEHTQVKPAYERLQTMPGVGVILALTIMLETGDIGRFPTVGDYTSYCRCVRATHSSNGKKKADNNSRNGNAYLAWAFVEAVHHALRVCPKAKSFYDKKRAKRNGTLATKALAAKWSKAAYYILKRQEPFDLSRVFG

SEQ ID NO: 69229 - protein, 424 aa, unidentified
MSKKKSSVAGLGAIYGRVCGMDVHKNSVVGCVRILNTKDGTVQSTLRRFGTMTADLVQLRQWLAEQQVTHAAMESTGVYWQPVFNLLEGHLEVWVVNAQHIKKVPGRKTDMKDAEWIAQLLQCGLLRPSFIPDRQQRELRDLTRQQTKLVQQRSAVDNRVQKVLETANIKLGSVASEVLGVSGRKMVEALIGGEKDTRVLAELAQRRLRAKIPQLQRALEGEITEHHCFMLRQLLDQYDFLEQEIARVGERLGAVAPASFHAEVKKLDEIPGVGERGAQALLAETGTDMSRFPSHKHFASWAGRCPGNHESAGKRKSGKTPAANRHLDAVLTEMAQAAVRKNDSYFKSQYHRLAGRRGKKRAIGAVKHSLLVTIYFMLRDNKSYKDLGADYFDKLNPQHQIHYHVRKLNDLGQKVELSPMADAA

SEQ ID NO: 69230 - protein, 373 aa, unidentified
MAATRSSGVSRVVIGVDPHKRIDAVVVLDEAETVLARETIEHTSAGFRTLMALARRFPRRTWAVEGCNGVGKNLAQRLVAGGETVLDVSTRKSALVRVLATNSGRKTDDTDAYSIALVGLRTEDLPVVVRDERTEVLRLLSGRRRELVGLRTQAVCRLHRELVILIPGGASRRLTAAKARALLNGIRPADEVARLRKALARDQLADLVAIDKRVAAINAEIRAAVAASRSTLTHLVGIGPVNAAMVIGEVADVARFATRHHFAAYNGTAPAQWGSGGDTHDRVNLGGNRRLNHALHIAAITQARYPGPGRDFYLRKLAEAKTKKEAMRALKRRISDSVYRQLLADADDRSSWGRAREGRWGRLCHPARLTDPQ

SEQ ID NO: 69231 - protein, 451 aa, unidentified
MLGCVFIDLEWMPIRKEYQTMSYVNPFISVGIDVGADFSFMAIALPNQTFVGKPFKIVHNNLNSLERAVLAIREAEELHSMKVRIVMESTGIYHYPLFCYLIDKGFYVIVINPIITKNSTNVNIRKVANDKYSSKNLALIGLKPDLKTSVMPSDAVLDLRNLVREYYYLTDCRSAYVNKLTGQLRVTFPQYIGIFSKVTVKTSLALLEKYPSPADFLSARKSSIVNIIMKTARFGKAYAENKYQAIMEAAKSAGVFGHFVPSYSTQIRLYVSFIRKYDEEIAGVLALMNKLVDDYADETFVKQIRLIETIPGAGFLSAVTVICEIGDFSVFKSPKQLFAYFGIDPAVKQSGNFTGTKVKMSKRGSAVARRAIYTIALVGVGVTRKGVANNPVLRDYYLRKCQSKPKMVALGAVMHKVCNIIFSVLRDNKAFILLTPEQHIQYYAHNQPSVA

SEQ ID NO: 69232 - protein, 369 aa, unidentified
MDDIIFVGLDVHKATVCMATAEGSRGGEVRQLGVFENRAEILSKVVSRLSKGGRRLSFCYEAGPCGYGLHRLLTGYGHECVVVAPSLIPMKAGDRVKTDRRDALMLAKLHRAGELTAIWIPDAAHEAMRDLVRARATAVRVLVKARQHLQGFLLRHERIYRGARAWTLAYRRWLTTVRFEHPAQQILMQDYINAVQEAETRRDRLTQQIEELLPNWSMAPVVAALQSMRGVALVVAVTVVAEVGDFRRFANPRQLMAYLGLVPSEHSSGSSVRRGGITKAGNALARRVLIEGAWTYRMSARVSRKLHDRLEGLPAAVRDIAWKAQLRLCARYRRMAAIGKPKVVVTTAIAREMVGFIWAIARLAQPALV

SEQ ID NO: 69233 - protein, 352 aa, unidentified
MVVVVGIDVHKMTHCAVAVDEAGRPLGQPLTVRATDAGHRQLLRWVRRQFAQEVVEFAVEDCRHVSLRLERALLDAAATAVRVPPKLMAQTRTSARTRGKSDPIDALAIARAALREPNLPRAEHTHASRELKLLVDHREDLVRIRTGLQNRLRWRLHELDPEFDLPARGLDLIKHLDRTQDRLGALPPSTCRRLALEELADIRAFTCRIIAFEKEITELVRIQAPQLLALPGCGPLTAAKLVGETANPVRFRSEACFAMHSGVAPIPASSGKTDRHRLARGGNRQLNAALHRIAVTQIRLDGLGRVYYQRRRAQGNTTMEALRALKRRLARNVFNLLRPTDQLAAAPLPQAA

SEQ ID NO: 69234 - protein, 346 aa, unidentified
MGEYSEAFVAFDTSKVKHAVAIAEGGRGGEVRFVGDVASSPATVARLIGKLTGRYAKLHFCYEAGPTGYGLYRQIRELGHECTVVAPSLIPKKPGERVKTNRRDAVSLARLLRAGELTAVWVPDATHEAVRDLVRAREAAAQDLRRKRQQLLSFLLRHGRIFDGRKHWTMAHRRWLADQRFDHPAQQIVFQDGIDAIEDALARLRRLEEQLVAIVPSWSMAPVVEAYQATRGASFLVAVTFAAEIGDVRRFDNPRQLMGFLGLVPRERSTGETVRRAGLTLAGNHLVRLEGLPKAVSDIAWKAQVRLCGRYRRLSAGGKKLPVVIAAVAREMAAFLWAIGHQVAPA

SEQ ID NO: 69235 - protein, 411 aa, unidentified
MRVHHNVCCGIDVHKKSVTACLMWGPADKEPQFEIRRFGTMTRDLQRLAEWLKQTGCEAATMESTGSYWKPVWNVLEGQIPRLILANAQHVRALPGEKTDRKDGKRLAELTRHGQVRPSYVPPRAILELRDLTRYRSKLLSAGSSERNRIQKVLEDANIKLGSVLSDVFGASGQKMLQALVKQEGLDTAKVAQLAHWSLKPKMDAIQQALEGKLTDHHRFLIDVSMKHMRFIEEQLIRLDEEIQRRLQPYQQEYALLQTIPGIKETGATRILSEIGPDMSPFPDGDHLSSWGGVCPGNNESAGKKFQSKIRKGNVHLLSALTECAWAATKKKDCHFRNKYYRLKSRRGSQRAIVAISHAMLKCVYVVLSQRKPYEEPKPTSLTEAQKQRKASSLCRQLRALGYDVKIQKAA

SEQ ID NO: 69236 - protein, 411 aa, unidentified
MRVHHTVCCGIDVHKKNVTACLMWGPADQEPQFEIRRFGTMTSELQGLAEWLKQAHCEVAAMESTGAYWKPVWTVLEEELPLILANAKHVRALPGEKTDPKDGKRLASYLRHGLIRPSFVPPRDIRELRDLTRYRKKLLANGAAERNRIQKVLEDANIKLGSVLSDVFGVSGQRMLHALVEKPSVTVEEVTALAHWRLQPKIEELRKALEGRITAHHRFMIELSLDHMQYIEKQILRLDGEIGRHLGPYQKQVELLQTIPGIAENASASVIAELGPDVSPFDDDGKLASWSGICPGNNESGGKKFSTKTRKGNPHLVSTLVECAWASTRAKGSHFKAKYYRIRARRGPQRAIVAVGHTLLSTIFVVLKTGKPYQEPVRPILTENQRMRKAQRLSRELQSLGFEVTLKTKTA

SEQ ID NO: 69237 - protein, 416 aa, unidentified
MKKNTNSPMKKEPRTKRAKAQRPVQREAKEVLAELVEKLRGKLELKSTSASQAEASPRGELSPNLNRLTVGLDLGDQWSHFCILGFEGETLSEGQLQTRQAEVAEFFQALPPARVVMEVGTHSAWMQEIIAGEGHEVLVANPRLMEGSKRRKRKNDRIDAKKLARLGRVDPQSLHPIRHRSREVRQDLVVLRAREALVAARTELINATRGLVKSMGTRLPKCSSPSFEQKVKDAIPERVREALLPLVQLAGALSDCIRSYDQKIEELGSEKYGHTKLLRQVKGVGPITALAYVLTLENPEHFAKSRDVGPYLGLVPKQEDSGESQPQLGISKAGDTMVRKLLVGSAHYILGPFGPDSDLRSYGLRLCERGGKNAKKRAAVAVARKLAVLLHRLWVSGEVYEPLGYVASRAIVQQAA

SEQ ID NO: 69238 - protein, 355 aa, unidentified
MDREKYIAMDVHQASISVAVRDAAGKLIVESIIETKAATILAFIRGIQGSLWITFEEGTSAAWLYDLLKPHVTKVIVCDPRKNALLNAGNKNDRVDARKLSDLLRAGLLTPVYHGESGVRTLRELCRGYLTINKDVTRVMNRLKALYRSWAIPCAGDKVYSPRHRNTWLEKLSEAGVRRRAEQLYQQLDALVQIRREARRELLAESQKHSATPLLRQIPRLGPIRVALLIALIQTPHRFRTKRQLWAYCGLALQTRASGEYRFTGGEPQHSKRLPALRGLNVNHNHDLKNVFKSAATHVSTSTDPLGDFYRSLLAKGMKPTMARLTLARKMAAIVLSVWKKGARFDPGELKQQAA

SEQ ID NO: 69239 - protein, 415 aa, unidentified
MNRLIERCAMLDIHKSQITACVRVPDDAGGRRQQIREFQSTTSGLLLLADWLRSWAVTVVGMESTGVYWRAVFYLLEGEFECRLYNARHLRHVPGRKSDVQDAEWGCQLVEHGLVRTSFVPPRPLRELRDLVRYRKAKIQERTREVQRVEKTLQDAGIKLSSVASEVLGVSARRMLDALISGTHDPEVLADLAKGALRKKIPALREALQGRFTGHHALLIGQMLAQIDFLDETIATLSERVEELTRPFSREIELLDTIPGIDKRAAEMLLAEIGPDMTQFPTEHHLASWAGLCPGQRESGGKKHSAATRKGSKWLRGTLTESAKAVVRTKGTYLSARYHRIKSRRGHAKATIATSHKILTAAYHVLSRGVPYNELGEEFFYRRDTENTERYRRRLIKQLERLGHQVTLEPLPEAA

SEQ ID NO: 69240 - protein, 358 aa, unidentified
MSKRTRMSQLDKVFERADRGGAFVGLDVHKGTINVALWLDERIVAGWVMPAEVNTVPVMLAPYRDRITQVVYEAGPTGYGLARTLRRAGLAVEVVAPGRSPRPAVRENKADRLDAARLAEYAAKGLLVAVAVPSETEEADRQLLRLREQLVRKRRCVKQQIRSFLLQHGVAEPHALSRWSRAAVAALRGLGLGATLRLCLNVLLAQLDEIEAHVRRLERALAELAATARHAEAVAIARTHPGVGPVVAMSYLVEVHRGGRFHEPRQVASYLGLAPRVRQSGETRREGPIGRTGRAAVRALLVEAAWRWRQLDQGARRLFQRLRHNTGSAKKAIVALARRLAINLWAMLTRREPYRGAA

SEQ ID NO: 69241 - protein, 347 aa, unidentified
MEQFVGLDVSQKLTHVCVVDQKGSVVWRGTCLSTPEDIAATVRAKAPDAVRIGLETGPLSTWHWHALKAMGLPVICIDARHAKAALSMQINKTDRNDAQGLAQIMRTGWYREVGVKSLDTHKIRAVLGARAQLVGMQTDLKNQIRGLLKVFGTVLQRGCSQSFEQQVIAALPGNDLLDASVRSLLAALKTISEQVAQLDRLVIKQAKENAMCRHLMSIPGVGVLTALAFMTAIEDPARFGKSRSVGAFLGLTPKRYQSGETDWDGRISKCGDALVCAYLYEAANALLTNCKKWSALKAWGMQLAKRRGLSKAKVAVARRLAVIMHQMWTTGEAFRWSSEAKGKPTAA

SEQ ID NO: 69242 - protein, 422 aa, unidentified
MMEETEDREEIIERVAALDIGKAELVACVRVPSPTTPGRRAQEISTHSTMTRSLLALSDRLRALGVTRVVMEATSDYWKPVFYLLEAQELEPWLVNAKDVKHLPGRPKTDKLDAVWLCKVAERQMLRPSFVPPAPIRRLRDLTRYRLDLVNTRTAEKNRVEKLLEDAQIKLSAVVSDIFGVSGREMLAALIAGERDPKVLAQLARARMRAKISVLEEAFVGHFTDHHAFLLRTMLARIDETSADIAAVEAKVEELVAPFAQAVQRLDEVPGVGSTAAHVMIAEIGLDMSRFPTAAHLCSWARLAPGVKESAGKKKGRGSTGHGNPYLARVLGEAAVAAAKTDTFLGERFRRIARRRGKKKAIVAVGRSILVIVWHLLSDPETRFHDLGPDFYDNRTGPDRKKRNHVRQLEALGYKVTLEPAA

SEQ ID NO: 69243 - protein, 339 aa, unidentified
MIYVGIDVAKDKHDCFITNSDGEVLFKAFTITNNLDGFNDLYQKIETVMKDITKVKVGLEATGHYSYNLLGYLIDKGLPTYVINPLHTNLYRKSLSLRQTKTDKVDARTIASILMSDVNLKSYSDISYHNEELKSLTRYRFDKVKERAKLKSSVSRLICILFPELEKLVPTLHMASVYALLSEFPGAKQVANAHLTRLTNLLSEASKGRYSKDTAITFRDAARTSIGSNMPAKSLELKHTIKLIKELDSEIDEIENEIKIIMDEINSPILSIPGINYRMGAMIIAEIGDFSRFDSPDKILAYAGFSPSTYQSGHLYGAYAHMEKRGSRYLRYALYNATK

SEQ ID NO: 69244 - protein, 345 aa, unidentified
MELHTIGIDLGKTVFHLVGLNLRGEVVVRKKFSRKQLLHFTANLQVELIGMEACGGAHFLGRALTEQGHEVRLMPAQYVKPYVKTNKSDYIDAEAIAEAVGRPKMRFVPIKSDDQLDLQSLHRVRERWVMRRTAVINQIRGLLLERGITLRKGRCHVDEALPGILEDASAKLSGALRVLLAQLKLELDHLQMRIDEADAVIKKTAGENEACRRLVAIPGIGPITATAIIAAIGNGAAFKKGREFAAWLGIVPGEYTTGGKQKLLGISKRGNPYLRRLFVQGARAVLQQSAKQSSGLSAWLAQLTARTHRNVAAVALANKLARMAWAVLAKNEPYRPPMLAGAATA

SEQ ID NO: 69245 - protein, 409 aa, unidentified
MERVVERGCGLDVHKKSIAACVRIPDERGQRRQQVRTFGTVAAELLALRDWLEAHGVTHVAMESTGVYWKPIFYVLEEAFTCVLVNPVHMAQVPGRKTDVQDCVWIAQLLEHGLLRGSFVPPAPIRELRDLTRYRKTITQERSRAINRLHKTLEDADIKLASVATDVLGVSGRAMLEALVRGNTDPDVLADLARGALRKKLPALRQALSGRFHRHHAFLVSQILAHVDYVEEAIEAVSQQIDVVIAPFTSALERLSTIPGVKKRTAEVILAEIGPDMSTFPSAAHLASWAGLCPGNNESAGKHRSGRTRKGTPWLRTALTEAALGAIRHGRGALATRYRRIMRHRGHKKAVIAVAHAILVVVYHLLTRQTTYHELGDDYYDRRHAERSKRRALETLERQGYRVVLEPAA

SEQ ID NO: 69246 - protein, 316 aa, unidentified
MSALQVFVGIDVAKAQLDIALRPTGEGWTVTNDEPGIATLVTRLQEIAPQLIGLEATGGYQRAVVAALAAAALPIVVVNPRQVRDFAKATGQLAKTDGLDARAVAHFAEAVRPTPRPVPDAQTEELRALLARRRQLIAMRTTEHNRLEHAPHRLRADIEAHIAWLDQRVAALDNDLDTTLRASPVWRERETLYRSVPGIGPVCARTLMLDLPELGTLSRQRIAALVGVAPFHRDSGTLRGSRTTWGGRAHVRAVLYMSTLVAVRYNPVLKRFYERLRTAGKVAKVALTACMRKLLTILNAMATHQKPWHVQEVQSA

SEQ ID NO: 69247 - protein, 338 aa, unidentified
MRLYCGIDLHATNCWVVILDASFRLVREIKVPNELAAVLAVLQEHREALEGIAVESTFNWYWLVDGLQDAGYRVHLTNTWAVKKYDGLKYADDRHDARWLAHLLVLGILPEGYIYPKEERPLRDLLRRRAFLVRKKSLMVLSMHGAFECRTGERVKANDLKRWTAEEIEARLEDPTVSLGITCLLKPMQVLDEQIHTIEKVVVKRARLREEFGLLQTVWGIGKVLALTIMYEVGPIARFATVGDFASYCRCVKTDRLSNGKRKGSGNRRNGNSYLSWAFSEVAHYAARFYPEAQRYFQRKRAATNGIIGNRALAHKLARASFYVMRDQVPFDPDRLFA

SEQ ID NO: 69248 - protein, 393 aa, unidentified
MFNPLKVRLMRAVCGLDVHKDSVYLCILTGEGELIEKVFGVLTFQLQQMRDLLLAHNVDEVSMESTSVYWIPIWRVLAPHFHMRLVNPYFIRQLPGHKSDVADARWIAECTLKNLVSGSFVPPEDIQQLRQYDRRIFDLDEEIVRKLSKLDAVMQRCNFRLSNYVSNVDCKSYKDVVRKISEGVTDPESLIGEIHGRIIKHHGRETILASLAGVISQAEIDVLRQLREELALAEEHKRECLERMLEICQEKYPDELRRLQTIPGVKERTATSLIAEIGTDMSKFETANHLSAWSGLRPRNDESNKKFKSRRITHGNIYLRKNIIQCAWAASRTKGCFFSRFSYHQTQVRKKNKMKVIVAVARKLLVAAWHVIHDKTDYADFQKQDRQAPASNG

SEQ ID NO: 69249 - protein, 363 aa, unidentified
MTEHTCSNKSVLAPPSAEVPLVHWMGVDVSKATFDAALWVPGTEGKHAWKRLPEKHFARTEEGAQACYAWALTMIGQAPGAPRPTVRVVMEATGKYSLELSAWFIAHVPSTAPAIINPRLSKAYSASLSIINRTDKTDARTLARYGAERTPAPYAPSAPEWAQLRDLTRYRQALVEMRQAEANRAEEPSCSAVVRETQNRRIKQLDRDIAKLDKKIKSLVQHHPEMNRDLQNLETIAGVGAVTATTILGELGDLRRFVSARQMTAFAGLAPTCHDSGTSVRKKSHVSKSGSAHVRRILYLAALAATRGHNDFADTYRRLTEQGKMKMVALVAVMRKILVVMRAILLSGEQYQSHRGKRSIACG

SEQ ID NO: 69250 - protein, 457 aa, unidentified
MHKHRKQLQWETLPYVHPNAGGLDIGAREIWACVPADRDLEPVRRFGTFTPDLIALVDWFVRCGMDTVAMEATGVYWIPVFELLEARGLKAYLVNAQHLKRVPGRKSDYLDCPWIQKLHTLGLLAGSLRPDAEMCALRAYLRHRAQLLQHRAPHILHLQKALHQMNVQLTQVLTDVTGVTGLAILRAIVAGERDPVKLACFRNPACKSSEDEIAKALTGTWQPEHLFVLKQSLELYDFYTAQVAACDAAIEQHFSALKPRWEGIPPVDLPRVKRGSKSKNQPALNVRSHLYRLTGVDLVAVHGISASTAQITLRETGTEMSKWPSEKHFASWLGLAPHNDISGGRVLRSRTLKTSNRAGQAFRQAAQSVARSDCAFGAYYRRMKARLGPEQAIVATAHKMACTVYYLLKHRVQYQDIGAPAYAQKQRDTQLARLKRQAAKLGFTLTSHIPELPAVGG

SEQ ID NO: 69251 - protein, 383 aa, unidentified
MRQIEQMPSAWDAAVFVAMELSKSAWLLAAQGSPSGKASSHRLEGGDIAGLLGLLRRLQAREQQACGRPVQIILGYEAGYDGFWLQRRLAAEGISCWVMDPGSLQVDRRARRAKTDRLDAAMLLRALMAWWRGDRAACHMVQVPSVEREDARRTHRERQRLIAERVQHVNRIKGLLATQGIYDYRPLRRDRWERLEDLRTGDGRELPPRLRREIEREFRRLELVLEQIAATEAERDATVAAPAAEDADAAMVAQLARLGGIGPELATVLVREALYRPFANRKEVAAYAGLTPSPYASGDRHRDQGISKLGNPLLRKAMVELAWLWLRYQPDSALARWFTERVGAVRGRMRTITAVALARKLLVALWRYLTTGLLPEGARLKAA

SEQ ID NO: 69252 - protein, 347 aa, unidentified
MTRKATNQVTTIGIDIGKNNFHLIGLDGAGNIVLHRKLSRSQVIVRLANLPPCLIGMEACVGAHHLSRQLQALGHDARLMPAQYVKPYLRGQKNDFRDAEAIAEAIQRPRMRFVPTKSVEQLDLQAMHRVRSRLVRHRTSVINQIRALLLERGIAVRQGVRFLRAALPDILGRYSELLSPRMVQVIAELSGDLHHLNERLDEVTAEIEALAKADHACQRLMTVPGIGPIIASAMVSAVGDGAAFGKGRDFAAWLGLVPRQMSTGGRTILGRISKRGNCYLRTLFIRGARVILLRPENWPKHSFGPWLQAASRRLHRNVLAVALANKLARIAWSVLADKRGYEARRAA

SEQ ID NO: 69253 - protein, 351 aa, unidentified
MNIIGCDLHPRYQVVAWVDEETGEIRTRRLEHGKEEVQAFYVGWPRGARIGIEATFPALWFERLLGECGHELWVGDAAQSRAKAVRRQKTDTRDALHLLDLLLTNRFPRIWVPAVAERDLRQLLVHRMKLVRVRTLVKNQLHALAMSQGVCRKRKLWSVRGRAELQSLALLPWASRRRNELLAWLDQLEAAIAPLDRAVEQEAQARPEAVLLMTHPGVGPVVSLAFVLTLGPVERFPNSRKLVSYLGLNPSEHSSGGRQRLGAISKQGNTMLRWLLVEAAQTAAWRDPELRRAYQRLKFRRASGVAKVAIARRLAVRLYWMLRTRVDYAQLVRMSGSPSSAVVPEAAGSKV

SEQ ID NO: 69254 - protein, 321 aa, unidentified
MQSYHLGIDVAKAKLDCALRLPDGKQRNKVVNNNASGFKTLLEWLQKHGGSTAHVCMEATGVYWEEVAAYLAQRGLPVSVVNPAQIKAFGASHLVRTKTDRVDAQLIATFCFERSPALWQAPSASEQALRAMVLRLDALQNMRTQESNRLEVAREAVKAGIASHIAWLDKEIDKLARQIRQHMDNDPDLKDKQELLDSIPGLGERTIASLLAFYGNLQRFDNARQAVAFAGLDPRQHESGSSVRGKPRLSKVGHSFLRKALYMPAMVALHKTAWGAVFRQRLAAAGKPPMLIIGAMMRKLIHVAFGVLKSRQAFDPTLHGA

SEQ ID NO: 69255 - protein, 325 aa, unidentified
MTNETREPVYVGIDVSKDSLEVALADKAASVRFVNDEQGVKALLEHLAGHHVAVVLLEATGGLEKRCAHALYLAGMTVVVANPRQAHEFAKSMGYLAKTDGIDARILSHFARTLHGSERFDKLQLKMATPQQEQLQALVTRRSQLVQMRVAESNRLNLAHALSAKSIQAVIKLLDKQIKTLDEDIGNRLKQHFAQKLKLLEGFKGIGEGTKAVLMAALPELGRLNRREISKLVGVAPLNHDSGKMRGKRSVWGGRADVRSALYMAALSAVRFDPTIKAFYERLRAAGKPPKVALVACMRKILSILNAVIKSNTAWEQRCPQASTA

SEQ ID NO: 69256 - protein, 419 aa, unidentified
MTKLTPTPAGAVLVAIDMSKNRQEVLIERPEGGRRRRMTVIAAKKDYDDFAEELAAIVCPIVVGFEATGNYHRTLAHRLLTARFELRLISSVALARTREALHNGWDKNDSKDAQVILHMLRIGATQRYVDPLAAGINDLQELSKTHETISKAKMQTWHRILTHYLPLYFPEIARFAGNSRSDWFFALIERFPTPASITALDAETFSAAAWPLIGRKVSKARLINDIYETACASVALPVPEDSAAITMFRMVIAQGRSLIQQRDEIERLAHARLAEHVDYQLLRKIPGIGPINALTILAEAGDLRRFNHHRQFLKFCGLDLATCQSGAFRGRTKLSKYGNARLRRTFWMAAQVAARQRDNSFRDKLGRYVAGHADDADRRRKAMTALTAKMARVAHAVIRRGQSTGRSSNGRMPGGRPPL

SEQ ID NO: 69257 - protein, 323 aa, unidentified
MTKHITICAGIDTGKSKLDVAVEGSREQLQVENTSEGHAVLLAWLRRHRVKRVGIEASGGYEQPVVAELRRKRFVVVVFQPAQVRAYAKFHLQRAKNDKIDAALIAACTAAVRKIHPAPDPRLQPFAEQLTMIDQIGEDIARLKNRIESCRNTQIKGLWEEDLARLAKREKVELKALIASICKHPDLAKRLDLINSIDGIGLPTAVAILVRMPEIGQITREQAAALAGLAPYDDDSGEQVGTRHIEGGRKRLRHALYAAALAASFRWNKQLMTLYRRLIAAGKEHKRALVACARKMLVFANTIVARGTPWQDRPPENAALTAS

SEQ ID NO: 69258 - protein, 479 aa, unidentified
MKENLRRCCGIDVHKNSVTVCVLAPAGQRHIETKKRKFRTFTRDLKQLRAWLKNCQVTEIAMESTGQDWRPLWNLLEGEFTKLILVNPQHIKGLNGYKTDPKDAQWIADLLDSGKLRGSWVPPRSIRELRDLTRHRVNILEDLNRAKNRIEQLCQSGNIKVSSVATDLFGVSGRKMLKAIVENQHDAGWMADYARGQLRNKRRELELALQGTFTDEQRWLLEKELRQVEWLEGQVEGLEEEIERRVSGFEEAIQRLRTIPGIDRKTAWTIVAEVGVDLSAFADAKHLASWAGLCPGNRESGGKRMSGRTRKANRYVKRAMCQAAWAASHSKNTYLSAFYRRMAIKKGAPKAVMALAHHMIVVIYQVLSRKEEYVEMGGDYYDQRNKPRTIARLVARLGRLGYQVDLKLLENAMPADPTEKDNESEPPSQPDAVPEEGLGAKRKRGRPCKCRQRGIICKHQAAREVNPLIQQPPSEGKFS

SEQ ID NO: 69259 - protein, 320 aa, unidentified
MMAQNDLVVVGIDVAKDKVDACIRALALRQTFPNTAQGHRKLVGWLRKHKVNKAVMEASGGYERVWAKVLREAGIEVRIVDPKRVRSFALSAGRLAKNDAIDAEMIAWFAATFGEAPSQAHDAAHEELQTLVKARLGLIDFRMRLVSQSEHAAPGLVQKAHAHLMKSLASEIAKLEAAISAKIKSTPDFAERAEIIESVPGLAETSSANLVAGMPELGQVSDGIAAALIGVAPYDDDSGKRRGERHIKGGRRWVRNAIYMPCVGAATQNNPVLKAYYQRLLAKGKEPKVALVACMRKLIIILNTLIARRQKWDPSRYVVS

SEQ ID NO: 69260 - protein, 340 aa, unidentified
MPLYGGIDLHAKNSVVVLLNEQDQVIYQKRLPNHLPAILEPLSLHHGAIEGLVVESTYNWYWLVDGLMEAGYRVHLANPAAMQQYSGLKYSDDHSDARWLAHLLRLAVLPEGYIYPKAERAVRDLLRKRAHLVRQHTANVLSVQNIMARNTGARFSVKRIQELTKQELQSVLTEEPQVLAVTSSLAVLDCLKHQIKTLEQTVHKRLHHTPSYEQWLTVAGIGTILAQTIALETGDIRRFPSVGNYASYCRCVDSNKISNGKRKGTGNVKNGHPYLAWAYMEAAQFAIRFQPAAQRFYQRKLAKSRNNTVLARKAVAHKLSRACYYMMRDLVPFEATKAFG

SEQ ID NO: 69261 - protein, 394 aa, unidentified
MKLIGIDIGKNKHFFCVMDQQTGEIISQPVSFSNDKEGFDFLVQKIKSYPKDSILIGMEDTGHYHFALLKYLLNLQYTVALINPKTTDFNRKMQGGITKNDKLDTINICDVLDTPERKKQYRISKVNSFDLYEQKQLTRHHHNLKEEENVYKNRLQKCIDIVFPEFNKLFNSKYGIVYMNILKMFGSAENIANTDIRTIRKCFEIEGRGNRISLTPERLKECARSSIGISSSAEVIQIKHLTAQIELIEEQLTEIDKKIEEFSIQNNSPILSIPGISHFSGTSILAELGDISNYSKPSQIIKFAGVAPLHYESSQFNAQHTSITKKGSKYLRKTLYQIILPVIRHNPVFNKYYQLKISQGKGHRCAQGHCVRKLLRIIYHLLKTNQQFDPQLLR

SEQ ID NO: 69262 - protein, 355 aa, unidentified
MSLEKYIGMDVHAATISAAVKNAEGKLLMECVLETKAATILEFIQGLRGTLALTFEEGTLATWLHDLLKPHVSRLVVCDPRKNALMRDGNQNDRVDARNLAELLRTNQVHPVYHGKHGTRALKELGRSYLTLTKDSTRVMNRIKSVYRSWAIPCAGTSVYSRRHRAEWLAKLEEPGVRIRAEHLYEQLDCLQPVRQAARHELLRDSRKHEAVKLLRQIPAIGPIRSALLVALLQTPHRFRTKRQLWAYSGFAVQTYDSGEYRFVRGKLQRNRERITVRGLNHNHNHDLKNLLKGVAISAIERRGPLQDFYAALVDKGMRPSMARLTLARKIAAITLTMWKKGVSFDPKQLQRQAA

SEQ ID NO: 69263 - protein, 347 aa, unidentified
MRFYNRQHRHYCGIDLHVKTMYVCILDATGQVLLHRNVPSTPAAFLETIAPYRDDLVVAAECMFTWYWLADVCAADGITFVLGHALAMKAIHGGKAKNDKIDSHKIAVLLRGGMLPQAYVYPAAMRSTRDLLRRRLHLVRKRGQLLAHIQNTRAQYNLPAFERRLAYPANRDGVSEQFTDPSVRKSIDVDLALLERYDDLITDLELTIVREAKRHDGDAFHRLRSVPGIGKVLALTILYEIHDITRFDRVQEFASYARLVKCAHQSAGKTYGTGGAKMGNVHLKWAFSEAAVLFLRHAPGGKKLLAEIEKKHGKGKALSILAHKIGRAVFYMLSRRTVFSMDKFRAA

SEQ ID NO: 69264 - protein, 366 aa, unidentified
MALEWNFLGNHSHQEEMLLMKYFIGLDIHSKSSTFAVVDQEGQCILRKEVPTTEKSLESVIDQINGERHLVFEECHLSQWVYIALREKVDKLVVCNPVYLAKKQGAKTDFRDALHLAQELRTNHVSPVYHDNSHWIQLRTLVSGYLDITGEIIRFKNRLKAVFRSEAIATDENNFYKSCREKASQLSNDSSKFVANNLFSQIEYLESEKEKYKDRFHHNQKTYRPIRNLMTIPGISLIRANIIVAIVCTPERFKNKHQFWGYCMLVRHIQESGGRIYGNKRVHGRKELRDIFIGAAESAMRSDSTLRDHYDALRAKGESHKDAKVALARKVASLTLSLLKNNETYHDDWEDKLLTRTELRKKLIKQ

SEQ ID NO: 69265 - protein, 342 aa, unidentified
MRALADWLVEREVEEVVMESTAQYWRPVWEALEQYWRPVRRTRAGASPVSGTLHLAQAQSNRGAGGRKRDFPDAERLVKRLVAQELTLSFVPDAEQRLWRTVMRRKYQVTRNRVQLHNRLESLLEEAHIKLSSLVSDLLGTSARRMLQALADGEIDPVTLASLADTRLRATAAQLSDAFGACTTLHPVYRQLLKLTLDELRLIEAHLGQLDQQMADLLAEHHEAVRRLAEVPGLGVDSAQQIIAEVGATAATFPSPKHLASWMSACPGNEESAGVNYSHRCPKGNRQMRRVLNQAANAAVKAKGTIFAIVYRRLVPRLGRIRRSAIRAPNRRCGRGSRGVRR

SEQ ID NO: 69266 - protein, 274 aa, unidentified
MTSQPEPIHIGIDVSKARLDIALGEHGPVQRIDNTPLAIRAWLRTLPSGPLHIGCEATGTYHLALRDAVIKAGHPLYLIDGYRLSRYRDATRVRAKTDPIDARLIARYIASEGHRLHPYTLPPEATQRVQQLLRRRATLVRAAVTVRQSLSDLPGFKREVRTLLARFDRLAQQIQAQIVEKLKASDWIDDHRRCQGIEGVGPLSAAALCATFHRGAFTSADAFIAYLGLDVCVRQSGNQNARGTLSKKGDPEVRRLLHNAAMAASRSATWKPFY

SEQ ID NO: 69267 - protein, 337 aa, unidentified
MQYFAGLDVSMEETHVCVVTRNGTVVYEAKVRSTAASIAAALARAPACRRVLFETGRMAPMLYHGLSRLGLPVVCVESRQAYQALKSLATHKTDRNDARGLAHLARTGFFKPVYVKSLPAHAIRSLIIARKKLVGQRVTLENQIRGLAVVFGVRLPRALSPAFIRRALQASEGIPGLSAAMRGLVAARAAVLAAVVAIDGDIRKMARASGACRRLMSIPGVGQLTALAFTAAVDDPARFQRSRDIGAYLGLVPRRYQSGEVDYTGGISKCGDRRVRTLLYEAANVMLTRYKGPLKLKTWALAIAKRSTMRKARIALARRLAIIMHAMLRHGTEFKPA

SEQ ID NO: 69268 - protein, 412 aa, unidentified
MRRVIGIDIHRTFCEVVIWEDGRLRNFGRVDMTPTALEGLGGKLHPTDEVVIEATGNSMAVSRVLSPFVQRVVIANPLQVKAIAHAHVKTDRVDAGTLANLYAAGYLPEIWTPDAETERKRRLTARRYQVVRHRTRIKNEVHAILHAHLVPKCPHSDLFNRLGRAWLTRQALPDDEREAIGRHLRELDRLAEDLAVLDREIAEGALDDGAVKRLLTITGVNLTVATSILAAIGDIRRFDSPGKLVSYFGLNPRVRQSGLGAAHHGRISKVGRSHARAMLVEAAWAVAKAPGPLHAFFVRIRARRGHQVAAVAVARKLTVLCWHVLTKNQDYLWARPALVANKTRAMELQAGKPQKKGNQRGPAYAYNVKALRDQEQQLAHQAERNYARFVDRWRTHPPKDAARERLNPARNE

SEQ ID NO: 69269 - protein, 359 aa, unidentified
MQKYKLNFNGENVYVGIDVHLKQWHVCVRTAHVSKKPFSQPPSALALKQYLENNFPGGTYLSAYEAGFCGFSVHYELESAGIRNIVFNPADINDTQKERSRKTDAVDCIKICRNLMNDELKAIYVPSREELGLRGYLSARDTAVKKQRVAKQRIKSLLNRNGVKIPDELFPTSKTHWSRHFNGWLEQVAADLGSGEGYRLNDLLKDLHHAHSQVLAAGRRLNEVISAHHMDTNELLLSIPGIGRVTAARICLEVPHVSNFVNSDHLASYIGFVPDVHGSDDNVYVRGITYRRRVLLRSAFVESSWRAIGKDPAMGLAYSNYIKRGMKPNNAIIRIARKLVNRVFFVLRERKRYEIARVR

SEQ ID NO: 69270 - protein, 425 aa, unidentified
MLNPEGLAFVAVDTHREQHTASVLNCWGHPLATLETSTDPRLFPDFLARVKESTNGHQLVFGLEDTGGLGRGLAQYLLAEGYKVKEVNPILVSRQRRRAPHPNKSDPDDAIAIGKILITEFERLPDLLPDELYVALREAVNHRRALVKEQTRLKNRLHALLRELHPSYKAMFPGTFSKSALAFWERFPTSDTLHGYGVKRLAAFLRAHSRGKVSTRRARKVLELVNKARTPTTLDKTRAAVVRSIVRQLRALSQEQEEAETLLADLLPRLGMHLETMGGIDLVNASQLLSALGPLERFSSSDQIARFLGVAPQDSSSGSRRRKRRSKRGHRQANATLYRIALYQIGLRRDGKPKNPVARAYYLKKIAEGKSKGSALTCLMRRLCDILFAMMRDRSCYRTEKFTALEEPLHVTTWKEPAFENIPSY

SEQ ID NO: 69271 - protein, 405 aa, unidentified
MLFVGDDWAEDHHDVELMDVAGRRLAKARLPEGVAGMARLHAMIGEQLGEDTEVEVLVGIETDRGPWVAALIAAGYTVYGINPLQVARYRERHCVSGAKSDAADAHTLADMVRTDSHQLRPVAGDTPRAEAVKVVTRAHKTLIWERTRHTQRLRHALRDYFPAALEAFEDLDAADTLELLATAPDPASASRLTIAQISAALTRARRRNVAEKAARIQAVLRAEHLSQPEVVTQAYAATTRAAVAVLRTLDEQVKTLQGQVDAHFGQHPDAEIILSQPGLGPVLGARVLAEFGDDPDRYTDAKSRKNYAGTSPITRASGKKKVVAARYVHNDRLIDALMTQAFSALNASPGARACYDQLKARGTEHNAALRQLANRLVGILHGCLRTHTCYDEATAWSHRAETAAA

SEQ ID NO: 69272 - protein, 403 aa, unidentified
MEEGCTRFFGLDIHKEYFVAVGVNPQREVVFGPQRVSNYQLDDWVSRVLTPQDSVVVEMTTNTYLFYDTLLPHVHSVIAVHSPSVSLVTRVAVKTDKKAALALAQLLAAGMLTGVWIPPHEVRDLRALIARREKMVHLSSLAKNRLHSLLHRNHLVLPEKNPFSPEQSTWWESLPLSATEQFLMRSDLDTLAFAQKQVAQAEEQIKQESVRDERVPLLIQLPGVAMLTAITILAAIGDITRFPTAKKLVGYAGLGTRVHDSGMTHNSGRITKAGRTDLRRGMVNAANHAIEHHPHWKKEFERLESHLGRSKAVVAIARKLLVAVWHVLTEQVADRFADPQNVASSFLHHAYQVGTRNLPNGQSALAFTREQLDRLEIGKDLQQINWGSKPLHLPPSTLLIDKE

SEQ ID NO: 69273 - protein, 449 aa, unidentified
MSDSNVRYVGLDVHKRVVEACILAADGAIIRRDRLAMSRDYLTTYAREVLQPTDRVALEATTNTWAVVGVLRPHVAEVVVSNPMATKAIATAKVKTDKVDACVLAQLLRCDYLPRVWQPDAATQELRRLTAHRASLVGDRTRIKNRLHAVLAQRLIQPPCADLFSLEGRDWLATLSLDAEGRLLLDSGLRLLGHVEEEIEQFDKLLATKAYPSAPVKLLMTLPGVNVAVALALLAAWGDIARFAEPDEAASYLGLVPSTRQSADTCHHGPITKAGRSQARWMLIQAAHHVQKHPGPLGVFFRRLAKKKNYNVAVVAAARKLAVIGWHMLKRNEPYRYAQPQSTQTKLAALRIKATGKRRTSGPRKGVKCQAKLPGGSRTIKPLAQVYTEENLPALGAAKPGELRNGQAAETATFVESLEREHIVPRGHGPRAGKSQPQEFATGLQAASS

SEQ ID NO: 69274 - protein, 344 aa, unidentified
MNHYAGIDVSLECSSACVVNASGKIMREAKVASEPEALVTWFSSLGLALERIGLEAGPLSQWLYAEMKKAGLAVELLETRHVRDAFKAMPVKTDRKDARGIAQLVRLGWFRPVHCKSMEAQETRAMLTSRKLVQSKLQDVENHLRGILRGFGLKVGKVSDRSFAPRVRELVDGHPSLQIIAEALLAVQAVLQREFKAFEKRVLAMARADERARLLMSVPGVGATVSLTYVSGIDDPARFKASKAVGAHFGITPRRYQSGETDVTGRISKIGDASVRTALYQAAHVILTTAVKGGALKSWAARIAKRAGMQKAKVALARKLAVILHRMLVDGKPFDFAAAAAARQ

SEQ ID NO: 69275 - protein, 413 aa, unidentified
MEKVEQTASTVQFEQMVKRGCGLDVHEKNVVATIEGEGLVRETRTFGSYTSSLNDLRDWLQEQAISHVAMESTGVYWKPVFNILEEHFKVILVNARHLKNVPGRKTDKKDSQWICKLLLAGLLKASFIPEEKIRQLRDLNRYSTKLSQQLASEKNRIQKILEDANIKLSSVVSSTSGVVSTGIIEGLMAGRTDLEALIDEHYHGKLKVSKAELLQAITGRMTDHHRFMLTQIKHHMAYLESQISVLQQEVERLLEADQESINLLTTIPGINKVNAVKLLAETGTKLEETFGNAKRLAKWTGICPGNNESGGKKMSGRTTHGNKYLKCLLVEAAWAATRTKGTYLRAKYDSMAARKGRKKALLIIGHKILNAAYVVLTARLSYMAFSVEEFERRRNQKRIDYLQTELKGLGVSV

SEQ ID NO: 69276 - protein, 402 aa, unidentified
MNCVGIDVSKGKSMIAVMRPFGEVVVSPFEVRHTANELSELAGLLKSLDGETRVVMESTGNYHAPVAWLLHDAGLYVSVVNAMLVHDYGNNSLRRAKTDKKDAVKLANYGLDHWLTLPRYIPEENTRLLLKNCYRQYRQYSKVQTVLKNNLISLLDMTFPNANRLFVSPARADGSEKWVDFVAEFWHCECVSERPLKSFVNKYWRWCRKHGYNFSEEKAHAIYDEASGHIGVMPKSETTKLLVEQAVSQLSATSAALAALKQEMQSLSSQLPEYPVVMGMFGVGPILGPQLIAEIGDVRRFYSKKALVAYAGIDAPPNDSGDVIGRHKSMSKVGASSLRRTLFLIMSAYLQNSPPNEPVYQFMDRKRSEGKPYRVYMMASANKFLRIYYATVKAYLETLEQF

SEQ ID NO: 69277 - protein, 351 aa, unidentified
MSRKTEAGLACTIGIDTGKNTLHLVGLDAKGAVVLRDKLARGRIAARLANVPPCLIGIEAGMATHYVARELLVLGHDVRQVPPSYAKPFRQGHKNDFRDAHAIAEAVQRPSTRCVPVKTDAQLELQALHRVRSRLIGGRTAAINQIRSFLLERGITVRQGLRFLRQQLPQVLATRTDVLSPRTIRIIEDLSSDWRRLDERIEHVTEEIELLASDSEACRQLMTVPGIGPIIASAMVAAIGNGAAFAKGRDFAAWLGLVPKQMSTGDRTILGRITKRGNRYLRTLFMQGARVVLLRPTNWAKHSFGPWIAAAAKRLHHNVLATALANKLARIAWTVLAQGRSYERRAVPGIV

SEQ ID NO: 69278 - protein, 340 aa, unidentified
MAMFAGLDVGFKRTAVCVIDGAGVVVWRGVVDTHPEMIAAALQRCRRELAKVGLESGSLSPWLARELAALGLPVVCMDARRAADAVKARRVKTDKADALALAEMLRTGWYSAVHVKSEESHRLKALLGARDQLVRTKRALGNQVRGLLRPFGIRLPSRQGTKKFDAAAHEAVRHDPVLSASVTALLEALAAVESQIARLDDRLKELARRSEVCWRLMSVPGVGPIVALAFMAAIEDVGRFRRMRDIGVYLGLTPKRYQSGETDVVLGISRQGDAMARHYLYEAANVLLTTVRRASPLKSWGLKLLKRRGPKRARVAVARKLAALLGRIWKDGTHFDAVPA

SEQ ID NO: 69279 - protein, 373 aa, unidentified
MPKHSTAFGMDVHLRSTTVCALDADTGEAVTRRFPGNPWGEIAGWMDGFPGPSLAAYESGYLGFAPQRELAGLGVECVVAAVSKIPRSAADSASKNDRNDAARMAKAILAHDISPVWVPSPEVEGIRDLAGAYDGATARLATAKQRLLAFLARRGFVYGGTTPAGNPRKYWTYDFLRWLDKVRPEDDGGVRTLAALRNEVEAAAEARADLLSEYGAAVDASPIAAEVAALQSIKGCAFALAAAFSAEVGDFTRFRSGRQVTAYFGLAPSQRSSGDSVRLGGISGAGNALVRKLAVEGSWCYAAARHQPKLMPRDTGVPLEIRMHGRKGSERLLRRREEMLARGMPQAKANAATAAELVRWLWALGMMCREGAE

SEQ ID NO: 69280 - protein, 310 aa, unidentified
MEMTFVGIDVSKNVLDVHVSPQDIAFQVERDEAGLARLIARLKPLAPHLVAMEATGGFETVVAAAVAAEGLPVAVVNPAQVRHFAHAMGKRAKNDTIDAAMIAGFAEATKAQAKPLPDADSRALSELMARRRQLTEMLVAEKARSARATAKRLHQSLKRIIAALQDELQKLDADIDTTVRGSPLWRVREELMTSVPGVGPTTARTLLADLPELGSLSRKQIAALAGLAPWTRRSGQWKGRSMIGGGRSSVRRAIFMAALVASRYNPLLKAFRDKLVAAGKPKLVAIIALARKLLTILNAIVRDQKPWQTA

SEQ ID NO: 69281 - protein, 341 aa, unidentified
MMIIGCDFHPRFQQIAFVDTETGECGERRLNHPEEAEGFYRSLLGKQVRIGLEATGNFLWFRRLIQELGFAFLLGNPSAIHAANPRRQKTDKRDARHILQLLVEDRFPAIWQPPADNEQLRQLLLHRCRLVRLRARIKNLLDSIAKNQGLVVAKGWSGKRRSQIEALPLTGWYKQQREDLLYLLDELDQRIDPLDQSVQQAAEENPEACLLMTHPGVGPVVSLAYVLTIGDWKRFPASRNLSSYLGLIPAEESSADKRRLGHISKQGNSLLRWLLVQAAIKAQASDVSWHRQYLRLSLNKHHGVAKVAIAHKLAVRLYWMLRSGQNYTQVKERGSHAGQSV

SEQ ID NO: 69282 - protein, 387 aa, unidentified
MARKRILSTLDTSIAYEAVGLDLAKTDVALAAFDSDHKEPYFIDRIPYDKLYELLANMAPTLVATEPCSGAHQIAEQIQALGHEVMMISGRHVQAWVKDHCNGQKTDLNDAFAILNLAYDRWLTPIRGKTREECRLLALQASYRQLKGQRTKTMVHVKATLHAWGFPIRTGSFNQKALRELIDANREAFGGEMAETLHLMIDRVRDLDHDIATVLKLLTEATKRDPRASLLRSIPGFGVLTTSRWCAVMGDIARFDSPKQTMAFIGLVPNNRITGHHTETSSGREARGQGRMSKRGDKMLRSLCILGAASLCMLVRKDRLPDCPFVASIKARLASPRPWFKVLVYVAAKLVRIATALLKYGEKFSFEKAGISKAVLKQWELEQAKAA

SEQ ID NO: 69283 - protein, 329 aa, unidentified
MFSVIYVGMDVHQDSFSLCALAASSGEIIRETRCSAEVKNIVKFIKHLPENESNQVTLGYEAGIWGYSLHNRLVELGYDCVILAPSTMYSNAKHQMVKNDHQDAQMIAHNLASGTYKAVYVPDQEDDEVKEFIRLIKAMKKELKQTKQRIRAFVLRNGFRFERTPWTEVYLEWLSQLQLPRIKKMVLDEYLVHYHGLTDKIERLSRQLGDLSHQERYQEPIAKLRCFKGIDTVAAMTIHVKTSDFSRFPNARAYAAYLGLTPSEHSSGKNVCLGRITKQGNSTIRTTLVESAQGLVRGDPSKKSKKLKARQINQSGRVISYADRAVNRL

SEQ ID NO: 69284 - protein, 364 aa, unidentified
MSSCASRAFEPGAEPEPRVTIWSKLEQLPEPAGALKPPAELALQDRVQPNLTSDQIMSSSKVYFGIDVAKASFVLAAPGVSHQLPNTPAGYRRVLALTPTQAHFILESTGGYERDLALALHAAGRALSVINPRQARDFARAKGRRAKSDPIDALELADDGAKLTPRADLPPSPAQQRLWELSSRRAQLVAARTAELNRQDHLRLKPLQTQARALLRTLDRQIEQLDQWIAETLAADPLLHAKAQRLQQVQGVGPVVAATVLAHVPELGSLNRRQAAHLFGLAPFNRDSGQLHGPRQIAGGRAAPRAVLYMAAMAAILHNRHLKAFYHHLLQAGKLKLVALTAVMRKLACLLNHLLKNPHFTLAN

SEQ ID NO: 69285 - protein, 413 aa, unidentified
MKRIRDRVAGLDVHRDTVMAAAWVLDRVTGEVVEDQEEFSTMSSGIARLGRWLLDRGVTTVGMESTGNYWKPVYYGLEGMFEELWVCNAQHVKNVPGRKTDLSDAMWLADVMAHGMVRASFVPPEPIRELRDLTRYRRSQVDIRGRELQRLEKVLQDAGIKITSVASKVWSLSSRRMIEALIAGERDPAVLANKAVGKMRPKTARLTEALTGNWRDHHSLVAAEIIAHIDHLDASIDALSQAIGQRLGPFEDLIDKMCEVPGISRTTAEIVVAETGADMSRFPTPQQLCAWAGLAPASHESAGKRRPAGTRKGQHWLRRALVEAAKSLSRSNNSFLSARYKRIARRRGPNKATVAVAHSTLTILWHLMADPTKRYSDLGADYYQRRRDPEREARALVAKLERLGYTATIKPAA

SEQ ID NO: 69286 - protein, 370 aa, unidentified
MKPNFEPSKWFMQCVGIDIAKSTFTACLCMYEFDMGCSTAPVVFNNNKTGFNQFVKWSRKEALKGYPLRYLMEPTGVYYEALACHLYKLGLDVCVVLPNKARDFAKYEGILTKTDDMDAYTLGMMGCLDKRLKTWTPPSPIFKELRQMTRFVADINKVKTELNNHLESLAHSETAEKSIVKHYNKLIDKIDKQLASNEKAIREKVKQEPGLAERIDRIVTIKGIGYMTVITILAETSGFALITNRKQLTRYAGLDVPAHQSGPVDPKRHISKHGNVHIRTALYFPAIVSTQYNPQMKEFYARLCKKNPQSKMVGVTAIMRKLLLLIYSLWKSGEKYDQEREKPVCSRKKKEAEPIGVQPHGIDIGTVAEE

SEQ ID NO: 69287 - protein, 339 aa, unidentified
MKYTPVGVDIAKHLIQVHFIDEHTGEVIDKQLRRQDFLMFFCNREPCLIGMEACRGSQHWGRELTKLGHKVRLLQAHFVKAFVMGNKNDVMDTRAIWMAVQQPGKDIAVKTEEQQSVLVLHRSRRQLVKFRTMQINSLHGTLLEFGKTIHKGRAAMERELPEALERMKERLPPYLITVLENQYNRLNELDSLIEDIEKKLTSVARQNETCKRLLDIPGVGPLIATAAVATMREASAFKSGREFAAYVGLVPKQTGSGGKIRLLEISKRGNTYLRALFIHSARAAALLPKEPGPWITELKKRRPTSVAIVAMANKLARTVWAIAAHGSKYDKNHVSIRSY

SEQ ID NO: 69288 - protein, 441 aa, unidentified
MSDRLPIAESEPEWAAFAAIDWADQKHAWRLVPADSAVHEQGTLENTPEAVDLWAANLCVRFGGRPIAVCLEQSRGPLVYMLSKYAQLVLFPVHPSTAARYRQVFFPSGAKDDPRDAASLLDLLLHHRSQLRPWQPDTVETRHLQRLVEQRRLMVNEKTRQSNRLTACLKMYFPQILQWFDDVSAPVVGALLERWPSLQQLQRAHPGTLKKFFLQHNVRSQKRIEERIQSIYQAVPATADQAALQGEAAAAHGFLALLKTLGENIALLDQQIEQLVASHPDHALFASLPGAGPVMVPRLMVAFGTRRERYDTAFQMQCYSGIAPVKERSGNSEWIHFRRSCPKFLRQTFQEFAFLSTRSSVWAKAYYDRQRDQQQSHPAAIRALAYKWIRIIFRCWKEGQLYDEQIYLQSLQKRRSPLGPPITAPGWKPVAGFQKFSGNPS

SEQ ID NO: 69289 - protein, 505 aa, unidentified
MERLCKGRRPGRAELNSPWKISMKPKQQEKNKKAICRPTQNNWHAMNRKQRREWTRKLQSEDLSLEVVHPDAAGIDIGNESHYVAVPPTRDSQSVRRFGCTTSELKEMAVWLKQCAIRTIALQSTGVYWIAVYDILEESGFEVYLVNARETKNLPGRKSDVQESQWLMKLHTYGLLRNSFRPSQAIRTMRTYWRQRNDLVRAAGRHIQRMQKALTQMNIQLANVLSDVSGMTGQAIVKAILAGERDPYELAALRNWRVKASEEEIARSLEGNWQEDLLFVLQQEQDGYEFCQRQMAECDQRLQQYLQQLEDRSHGAGLPEEKRKERLRKKKKGNAPQFDLRAELFRMTGTDLTQIDGIDVTTTMTILSEAGWDMSKWKTEHHFVSWLRLCPDNRISGDKIIGKGRLPTNNRVTNALRMAASTLRLSNTYLGAQFRRLRTKLGAPVAIKAMAAKLARLVYRMLRYGMTFIDRGAQFYDAQHRKLQINYLKRKAANFGFQIIEVPAA

SEQ ID NO: 69290 - protein, 417 aa, unidentified
MNNIIMVPNTLILGIDIAKDNHYGQFIVNGEYIKKPFLIKNTKESFDCLFEIMKELTEKYGTVHTLVGMEPTGHYWKNIACYLKNRGISLCLVNPYHVNKTKELEDNSPTKNDKKDAKIIAKLIYQGQYLTCMFEKELYVNLRISSNNRQDLKKQLIKEKVRLIALLDEYFPELRDLFSNVLGKSSLGILKNCPFPKDILNIGIEKVTEILKKATKNRVGIKKASLVYEAAENSIGIPVGLDGARYRLNLIIRNLEKLQEEIDAVEILMNKYLFETGYSDYLLSIQGVGIVTAASFLAEIGDISKYDDYKQIQKIAGLNLKETSSGMKKGKTKISKRGRPNLRNILYQSSMIMVAKNEAFKEIYGHLTKRQKNKLTGKQAVVALSVRLIKVMYTLCTKKVMYSHAKVHGLDSYQQVA

SEQ ID NO: 69291 - protein, 342 aa, unidentified
MENVILVVGIDISKDDFHVCAKEKTADGNAKVKGSRSFKNNDKGFAELALWVLKREKSGGSVRYIMEATGSYYEDLAYYLYEAGNRVSVVLANKIKHFAKSLNVKTKTDKVDSAVIAEIGVEREMPEWRPMSSKYKELRDLCREMLSLKKEKSRAMCQLHAMNYSHDKTPSVVKIKKLQIDFYEETILEIEAEIERLVNADLELKRRIDKIQKVKGLKMNTIIVVLCETNGFQMFESIRQVVSYAGLDVVMKESGNFKGKTKISKKGNNRIRQCLFMPAMSAIQHNAKIKDLYCRIVERNPDIKRKGVVAGMRKLLILIFVLWKKNEEYDPNYVWQKNDIGK

SEQ ID NO: 69292 - protein, 420 aa, unidentified
MTISNSIPADAVLVAIDIAKVRNEVLIEAPGDKRRRRLQVLNNRAEHDRLIEVLRAYGRPVICAFEATGNYHRPLAWRLAEAGFEVRLVSSLALARTREALHNSWDKNDPKDAQVILHMLGIQATQRYHDPLRAGINDVQELSKTHEAIARAKTEIQHRILTHYLPLYFPEIDRFRGNSRSDWFFAFLDAFPTPASITMLTKEEFVKAAWDVVGRKVSKTQILMDIYETARTSIGLPLPLDAPAIRMFRMVVAEARSLIRQRNEIETQADELLRHSQDYQLLRQIPGIGPINALTIIAEAGDLRRFHHHRQFLKFCGLDLSTQQSGQYRGQTRLSKFGNARLRRTLWIAGQVAIRQRENGFRHKFERYIARDRDNPDLRRKAMTAITAKMARVVHAVVKGGSDYRPFVEGRVPGGRTSVS

SEQ ID NO: 69293 - protein, 352 aa, unidentified
MKITTIGIDLAKSVFAVSGADARGKVVMRWQLRRAQVLELMAKLEPCVVGMEACGGAHHWARAIGKLGHEVRLMSPALVRPYRTSPNKHDRNDADAICEAVRRPQMRYVEVKSVAQQELLALHRVRAQLMKQRIAQSNQLRALLHERGVVARLGAKGLRTALTDALAHPERNELNGAMGELLLELSGWLRESEQRIAAITRRIERAARDDERCARLMKVPGVGPLSSTALAAMVGNAREFKSGRALSAYLGLTPRQHSSGGKTVMLGISKHGDRYLRTLLIHGARSLLYRNHRGAHPRAAWATRLMARRGPNVAAVALANHNARVLWALLSRGSNYCPAPQRRFPSRPSNGG

SEQ ID NO: 69294 - protein, 461 aa, unidentified
MPKQNTKKSQRGQGVKDLESLPTLNQNAAGIDVGSAEHHVGVPAGRDAEPVQKFGSFTADLHRMARWLKACGVETVAMQATGVYWVALYQILEDYGFQVNVVNAHHTKTLPGRKTDVLECQWLQKLHTFGLLNNSFQPAERIWVLRTYMRQREKLVVGASTCIQHMQKALTEMNIQLANVISDISGMTGMAILRAIVSGERDPQALARMKNERIHASRQEIAQSLEGNWRPELLFVLEQSLALYDTYHQKIAECDHRIEAHLQSIESNGDTEPQPAPPLRIRRSHRKQTSWSDLHAQLHRIAGVDLTQIDGINVQTAQTVISEVGVDMTRWRSEKQFASWLGLCPDNRISGGKVLKRGTRRVINRAATALRMAAWSLFRSQSALGANFRRLRRKLGAPKAVTAMAHKLARLVYRMLKFGQAYVDKGMEHYEAKYRHQQIKWLAKTAAALNLQLIPSPEVVE

SEQ ID NO: 69295 - protein, 412 aa, unidentified
MYIVGIDIAKKTHMGGITDDKGKHIGKSFKIDNSVEGFESLLKKLAEINADISQFVFGMEATGHYWLNLYTWLCDRNFTVHVINPIQSDALRKLEIRQTKTDSIDSYLIADCIRLGKYCDTNLADDDMLALRDLTRQRFYLVDMTSDIKKKVIAMMDRIFPEYESLFSDMFGKTSRDLLKECTTPEEILALDTTHLAEILRKSSKGRFKQEKAEELQKTARNSFAVLLSSQTNSLLVKQMIEQIELLESQISEIEKIIEQLYSKFDCKLTKIPGMGITLAAVILSEIGDISRFPDPKQLTAFAGLDPVLKQSGMNKGLGYHMSKRGSPYLRRALWLAANSIKKWDPSFAYAYQKKIDSGKNKSQALGFISHKLLNVVFTVLKNNIDYVPVFPPDVDVSKLAEKALKNASSND

SEQ ID NO: 69296 - protein, 344 aa, unidentified
MVIIGIDPHKSSLTAVAIDGTGTALATRRFIVNAGTPAALAKWTSRWALRRFAIEGANGLGRGIAQALVAAGEDVVDVPSTLAMKVRLLSTGGGRKTDPDDAYAVALAALYHKGLHPVHREDQTTILRLLSERRDDLAHERARVLNRLHQLLRELTPGGVPLGLSADKAAAALRRIKPTTATEACRRDLTKELLADLRRVDANIKTNETQTRDALAATTTTLPEVHGIGIVLAAKLLGHIGDITRFPTADHFASYTGAAPLEASSGEHIRHRLNTGGNRQLNTVLHTIAVCQIRDPGPGKVYYQRKLTEGKTPTEARRALKRRLANVIYRRVLRDHKCPDIPAA

SEQ ID NO: 69297 - protein, 348 aa, unidentified
MDKLDHAGIEVSAYQFLVVRQPDSAAEGGARREFANTPEGVQSLADWLVRPGRRVRVVMEATGLYGLDLALRLEREPSLELMVANPRAVRHFAHALMKRSKNDPIDAGVLVEFARRMPFQRWPRPSPAALHLHALARRLEALTEMHAAEKNRLHAAQLSEAWPPEVRRDLQRSLRALERAVKRLTRQAVEVIAGDPGLNLRYQLLLSAHGIGPTSAVQILAHLAVLSPHLDVRQWVAQAGLDPRHYNSGSSVHRKTRISKAGNRHLRRALYMPALVASVREPHLRAFYLHLLERGKTKMQALVAVMRKLLHAIFGMFKHQQPFDGSKVYRLQQEASAPQPAFSTAEVA

SEQ ID NO: 69298 - protein, 422 aa, unidentified
MLEQTQDEQEIIARVAALDIGKAELVCCVRVPDPKGGSRRVQEVTTYSTMTRSLQVMADRLMDLGVTRIVMEATSDYWKPPFYLLEAHGFDVWLVNARDVKNLPGRPKTDRLDAVWLCKVAERQMLRPSFIPPVPIRRLRDVTRYRIALVSDRTREKNRVEKLLEDAQIKLSVVVSDMFGVSGREMLAALIGGESNPQVLAQMARTRMRTKIPQLQEAFVGHFTDHHRFLLAKMLARIDALDVDIADLDTKIEAQIAPFADAVARLDEIPGVGATAAAVIIAEVGVDMTRFPTPAHLSSWARFAPGVKESAGRKKGTGSTGHGDRYLARILGEAAVGASKTDTFLGERYRRIARRRGKKKAVVAVGRSILVIVWYLLSDPETRYHDLGSGYYDSRTNPERKKRNHIRELEALGYRVTLQPAA

SEQ ID NO: 69299 - protein, 360 aa, unidentified
MAKARTLVGLDVHATKIVAAVLDAETGELQHFRMTADVSKAAGFCAGLPGPVRVAYEAGPTGYGLARELAKRRIECVVAAPSKIPRGSGDRVKTDRRDAELLARLLLAGKLHPVRVPGDEEEALRDLVRAREAVRVDLMRCRHRLSKLLLRHGIRFDDGRAWTERHRQWLSTVTLDWPASQTTLQDAQGAIDALCHRRDSLEREILCLLPTAPWTVQAGRLRCLRGIDTLTAVGLCSEIGDFERFARAGQLMSYIGLVPSESTTGEQRRLGSITKTGSGHARRLLVEAAWHNRSRPTVGRALTDRQDGQPPEAIAVAWTAQRRLNRVWTRLEQRGKRRTIIAVAAARELAGFCWAITRIE

SEQ ID NO: 69300 - protein, 367 aa, unidentified
MEKSSKVFVGMDVHKESIDITLAEQGGEVRRLGQIGGDRGSLLKMVRRQQSKGRELMFVYEAGPCGFWIYRELAALGERCMVVSPALVPKRAGDHVKTDRRDSERLASLARAGELEAIHVPDIRDEAIRDLVRGRDDAVIAQRRVRQQLKALLLRNDIRYVGRTSWTGAHRRWLSELKLPEPAQRIVFEEYVDAIAVATARIERLTRAIETEVLTWRFAPVVAGLQAMRGIQFVHAVTLIAELGDLTRFGSARALMGYLGLVPREDSSGEHRRQGSITKAGNSYARRALIEAAWAYRHPARVTRIIATRQTGLPKVACDIAWRAQLRLSAKYRRLNARHVNHNKIVVALARELSGFVWAIGQSVRPQ

SEQ ID NO: 69301 - protein, 468 aa, unidentified
MSTRKDGETKKLIPGKKKRGLCQQDRPVLEPNAAGIDVGAREMYVAIPPDRDSEPVRVFETFTVDLEALVNWLIERDITTVAMESTGVYWIPLFQMLEDRGVRACLVNARHMKNVPGRRTDWHECQWLQYLHATGLLRAAFRPEQNVCAMRTLLRHRSELITMAAQHVQHMQKALTQMNVQLHHVISDITGLTGLAIVDAIVAGERDTTKLAELRHKSIHADEETIRKSLQGDWRREHIFTLEQSRQMYSDYRKHIASCDQEIVKLLGDFKPHVDIAVQPLKPHLGPSRKRRTKRTGDFRFEVRTEAYKLFGVDVTLIPGLNQLAIPLFSEVGRDLTTRFPTSGHFVSWLGLCPDNDKSGGQVLWTGVRSIHNRAAQMFRMGASSLHHNASPVGDFLRRMKAKLGPTAGITAAAHKIAIIFYTLVTKQMEYDDSVWAARDALRQKRFEEKLKRQARQLGYELVPVQPM

SEQ ID NO: 69302 - protein, 416 aa, unidentified
MTLKIVYPICCGIDVHKSFVVACIASTDKGVTTYKQRRFSTFTGNLRLLANWLEDSNCRDVCMESTGKYWIPVYNILESTCKVVLAHPKYVKAIRGKKTDARDAKWIADIFKHDLVSGSFIPPAEIRQLRDLMRYRVKLTSFATGEKNRAQNCLTVSNIKLDDVFSDIFGKSASAIIEHLLLNPQGNFDVTPFIHGRCKASPDEVQAAIDGLMCSEQIQKLSIIRSHFDAVELCKADLEAVIVSLAEQFQPQLELVMTVPGIRLFSAVAIISEIGVDMSVFPTAKHLCSWAGLVPQNNESAGKKKTTRINRAGAYIKPILVQCALAVCKSDKHPEIKTRYLALKKRRGHKKAIIAICRMLLTAIYAILKNSESYNPNLYRREEPVPISRSFTVDQAIAFVKRNGFLVVDSDGVIAS

SEQ ID NO: 69303 - protein, 433 aa, unidentified
MPTNHPYDLVIGLDRSDRKADLQLIDTRTGNAQKQTVPTSPEALHDWLARVRQDHPQARVAICLEQPAVNLILFLETYSWITLYPINPITLQKFREAFVTSRAKDDGKDAEYLAQLLLSHHDKLKAWQPDDSQTRQLQQLVSHRRAVVDERTGLTNRLKALLKQYFPQALDLCGEDLWRPLATAFLLKWPTLQSLKKARKESLKQFYYLQGSRSQKLVEQRLERIDKAVALSDEFALLQSYTLRVQLICKELQLLLKTIEQFDQQIAELFQQHPDREIFKALPGAGPVLAPRLLASMGSERERFPRPENLQCFSGVAPVTKQSGGKCHIHRRYLCPKFLKQSFHEYAKVSILHSRWAAAYYGQQREKGCGHHTAVRALAYKWQRIIWKCWQSHSIYKEEIYEAALKKNQSALIGLLDQIELGKSPFKTHEKKS

SEQ ID NO: 69304 - protein, 470 aa, unidentified
MAKRDKSSSKKVTSKKRATREPRSLPVIRPNVAGIDVGSKEHWVCGPPTEDDKPNVRVFRTTTAQLGELVDWLVEQGVESAVMESTSVYWIPLYELLESRGVEAVLVNARQLHNVPGRKTDYLDCQWLQTLHSCGLLRGSFRPSDAIVRLRALQRQLANFVQERTRCVQWMQKALDQMNVQVHRAVTDLTGETGMAIIRAIVAGERDPARLATCRDKRCRKSEQQIGEYLTGTWREEHLFNLQSALRLYDSLEELIASYDQRLLAELDAIQPPDRREQSAPSHPNPVKDRAIRARGEQILRTTLWRFAGLDLTRIDGISAGVARTILTEIGPNLEAFPSEKDFVSWLRLCPRTPISGGKPLKKRRNGLGANRVAAALRMAGLSLQRSKTALGAAFRRTARHKGAAVAVFATARTLAQLVYRMLRHGQDYVDIGQAAYELRFQTKRLAGLNQAAKSLGYALVPATPETAAA

SEQ ID NO: 69305 - protein, 280 aa, unidentified
MTVVFLGIDLAKNVFALHGVDAAGKPCLVRPQVRRDQLTELIAKLPPCTIAMEACSGAHHWARTFSAFGHTVKLIAPRFVIPFRMGGKRGKNDQADAAAICEAMQRPAMRFVPVKSVDAQSMLALHATRQGFVQARTATINRLRGLLSEFGIGPTIASALRASVGGGHDFDNGGQLASWLGLVPGQYSSGGKNRLGRITKAGDSYLRMLLILGARAVLAAAAGKKDRISRWAVSLAERRGYWKAVVAIAAKNARMAWAMLSKGEDFKPVEDALPADVAPA

SEQ ID NO: 69306 - protein, 392 aa, unidentified
MYIVGIDIGKNHHEASIVSPEGKQIGRSLRFATTHKGADSLMSFIFKNIGNSPCVFGMEATGHYWYPIYSFIKAKGYTIYVINPIQSDSLRKMYIRQTKNDSIDSFLIAEVIRFGQFGTTSMADENILAMRQLCRYRDSVISSRTEIKLRIGTIMEQIFPEYEKQFSSLWVSTSMGILEKYLTPENIENAPIDELFEIIKDKSHNKLTMKKAISIREAAADTFGIKIAQDAFSFQLKQLIDRMNFLDKQIEALDCQILEYYEKFDCYLHTIPGIGMIAAATILAEIGDINRFKSSSALVAFAGIDPTVRQSGEFSSTHNHMSKRGSPYLRHAIFLAATTCSFHNSPLNAYYKKKREQGKHHLTATGAVARKLTTVIYAVLRDGKPYEPKSFC

SEQ ID NO: 69307 - protein, 352 aa, unidentified
MSSQLTREVILGVDTHLDQHIGVVIDSVGKLLGHLSVTANSKGYKQLAKWARSFGDLQRAGIEGTGTYGAGLARYLAAEDVLVLEINRPDRSMRRFRGKSDPTDAESAARTVLSGTDCAVPKSQSGAAEAMRIISVARRSTVKSRTQTINQLRGLLISAPDEIRSRLWKSNAAECAKCCARLRSLGETNWSKTLATTLRLLAKRWLYLTEELKLLDKDLEQLTAKAATRVRKQFGVGPQTAAILLSVAGDNPERLRSESALASLCGVNPLEASSGKTVRHRLNRGGNRAANNALWTIAMVRMRSDPRTQVYVARRTAEGKSVKEIHRCLKRYIVRELYPLILADLEDAALTS

SEQ ID NO: 69308 - protein, 403 aa, unidentified
MNNVAGIDVSKGKSMVSVLRPFGEVVAKPFSIGHTGSELKELADYLKSLDGETRVVMEHTGRYYEPVARFLHEEGIFVSAVNPKLIKDYGNNTLRKVKTDRADARKIARYGLDNWVELRQHTPMDTLRMQLKTLNRQQGLYSKTKTMMKNNLIALLDQTYPGVNALFGSPVREDGSQKWVDFATTFWHVDCMRNMSLTTFTERYRKWCKRHGYNFSQSRAVEIHTDAHDLIAMLPKDALTKTMIRQAIDALNAVSKSLEQLKAEMRTLSTQLPEYPVVMAMRGVGDSLGPQLMAEIGDVTRFTHRGAITAFAGVDPGADQSGAHEAKSNRTSKSGPPELRRALFLVMDCLLKTQPEDDPVYRFMDKKRSEGKPYLVYMTAGANKFLRIYYGRVKEYLASLEEN

SEQ ID NO: 69309 - protein, 317 aa, unidentified
MPKDTTLTAGIDTGKDALDVAVHATEIRFKVDNTEAGWQRLAAELADAGVGRIGIEATGGYERGVTRHLRELGFTVLVLQPSQVRAFARLHLCRAKTDRIDVVLIAACTHLLEPQARQPDWRLEALADHLTFIEQVEADIARAKTRREHIGDARLRAIVNADIKTLKARRADELRRLLKAVRSHADLGKRLKLVLSVPGIGERTALALILRMPELGQISREQAAALAGLAPFTQQSGRWSGQAHIAGGRKRLRRSLYAASLAATFRWNPALKALYARLTQRGKAHTSALVACARKLLIYANTVLTRGTPWTEKPAQP

SEQ ID NO: 69310 - protein, 415 aa, unidentified
MQEEAYAIYVGVDWASEAHQVAIVDAACDLRIQERVPHTGADLTQLAEELGHRAGGEPGRVAVAIEVPRGPVVETLLERGLHVYALNPKPLDRFRDRYSMAGAKDDRRDARVLAEALRTDRPAFRRLQIDEPAVIRLRELARLDAELQQERTRLANRLREQLQRFYPQLLAFCPAADEPWLWTLLDLAPTPAAGRRVSPAQLGRVLRTHRIRRLTADALHAQLQTPALRVAPGTAEAASEYLALLLPRLRLVHAQHRACEQRLDRVLAELAEPAPGQPTEHRDVTILRSLPGVGRGVAATMLAEATPLLATRDSHGLRTQMGLAPVTRQSGKHVEVSMRYACNQRLRYAAYHWGRTSVQCDPHSRAHYAQLRQRGHAHARALRGVVDRLLRVLVVMLETRTPYDPARRRPLEQTA

SEQ ID NO: 69311 - protein, 310 aa, unidentified
MVFENYWGVDVSKNWLDIATGNRVMRINQTKEALEEFLVENAINEANTLVILESTGGYEQLAVDYFSEKGFTVHVAHPTKVKSFARAKGRLAKTDAIDAKLLGEYGRFIDISEIRNLPSKIARKLRSLGSRLEELKEMHHQESCRLGIVSESITKKSINSILNILKKEIALIENKALEVVKSSVELKEKYDLLRTMKGVGPTLSLTLICSLPELGVANKKEIAALVGVAPITNQSGQKAGKAMTRFGRHNVRRILYMGALVACRYNTKFKHFYHKLIEAGKPKKVAIVAVMRKMLVILNAMIMTKTAFST

SEQ ID NO: 69312 - protein, 314 aa, unidentified
MKAPIATHYVGVDVAKDTLAVRSLNAAKVVTVPNTAQALDAWLAGLPASAHLICEATGRHHRLLQQRCARRGLALTCVNPARARDFARSLGRLEKTDAIDAAVLLRYGQERRPAPTPAPSESLQRLGDLLMARQAVVAQITAFGLRNDLLSLRARRQLERVISALRSHRLSLEHELEAWLDGEGRPWRDKVHTLCLAPGVGVLSALSLIAHLPELGSLNRRQIAKLAGLAPLPWDSGNMKGLRIIQGGRAPARRVLYQCALVAARWHEPTRNHYLQLRARGKPASLAHVAIARKLLIFLNSLLRPASAADLPAS

SEQ ID NO: 69313 - protein, 482 aa, unidentified
MKPSQQKQFQKTSCRRAQVGWQGMNRKQRREMTRKIQAADLSLEVVHPDAAGIDIGNEAHYVAVPPTRDDEPVRRFGCTTAELRDMASWLKQCRIRTVAMQSTGVYWIAVYDILEAAGLEVYLVNARETKNLPGRKSDVQESQWLMKLHTYGLLRNSFRPPQEIRTMRTYWRQRNDWIRSAGRHIQRVQKALTQMNIQLANVLSEVSGVTGQAIIKAILAGERDPHELARFRDRRVKASADEIARSLEGNWQEDLLFLLQQEQESYEFCQKQMSECDERLQHFLQRREDRSAGASLPEEKRKERLKKKKTNKPRFDLRAELFRMTGTDLTQIDGIDVRTAATVISEAGWDMSKWRTEDHFVSWLRLCPDNRVSGDKIIGKGRLPTTNRLTVALRIAATTLRPSHTYLGAQFRRLKARLGAPIAIKAMAAKLARLVYRMLRHGMQFVDQGAEFYEARHRQREINSLKRKATNLGFQIMEAPAA

SEQ ID NO: 69314 - protein, 333 aa, unidentified
MRSISVRYIGGKESSSVDVLGIDISKADFHACLIQGKHLARNSFPNAPVGYRRLRTWLRNRGCDNVHVCMEATGAYWKGLATALYEAGTAVSVVNPSRTVHYARSQLRRTKTDRVDAEMIAQFCKTQRPDRWNPLAPEIEELRGLLSYRNHLIDERLRLRQMASQIHVSAEFQKLHAKQLQGLKQSVTAMEKQLLRFVKAHRDLNRRVEKLQQISGFGMVSALAIVAQLPVDRLRNPKAAAAYVGVTPRERQSGTSIRGKAHICKTGNGSLRRDLYMPAMVAMRHNTILKVFARRLKERGKPAKLIVVAVMRKLVVLAFTILKRDLKEALSPA

SEQ ID NO: 69315 - protein, 438 aa, unidentified
MNNPNPLDLPVVEPHAAGVDVGSEKFFASIGGREPRVFLTVTEQMHELCEYFKAGGVRSVAMEATGVYWINLFGALEEAGLKVVVVNGAHCRNFPGRKTDMKDCQWLAVLHAHGLLTSGFVPPADIRRLRDYMRLRSDLVSMASQHVQHMQKALDRLNVKIHVVISDILGVSGMRIIKAILEGERDPEKLVVLCDEQILKTKRARMVDALHGLWRKEHLFALRLALESYEAYQRQIQQCDEQIAQVLQEMSGGRPTPDLGKAKELRHNALEIPNLRMQMGQVFGKDLAQLPCLNESTVALLLAEIGTDMSRWKSWRHFGSWLALSPSSAQSGKRRRREKRHLTQAGRILCRAVQCMAVGKHTWLASFYRRIRAKRGAKVAIKATAYKVAKLIYLVLTQGWEYVEEGIKKYEQRVLDTQLKALKKLARSLKYDLVPKPA

SEQ ID NO: 69316 - protein, 345 aa, unidentified
MDQYYYVGMDIHKKIIAYCIKRADGTIEAEGTIEATRKALKQWAEKLPAPWIGAMEATIFTGWIYDFLKPYARELQVGNPLMMRAITAAKKKNDKLDARTIADLARCQLLPQCYMAPQEMRDLRRALRYRNLLVHQAVRMKNRTATLLMEIGAEDNKKKLHGAKYFAGLVDKLSDVPDGFKELLLMSRGGIELFENCQKKLLKGLVNNQALKDRVQRLMSIEGVGEVTALTWALEIGEPQRFSSIRKAISYCGLCSSQVESAGKAMRMPLSKQRNKHLQSVLIEAAKLAPVHNKELSLLYDQERQRGNNHNQATITVARKLVTYLLAVDKSEKAFVKKSSNKKAA

SEQ ID NO: 69317 - protein, 395 aa, unidentified
MFIVGIDIAKRSHEAIIIAEDGQVVRKAFSFRNNCTGYNLLLEQVRRLTLVKSQIVFAMESTAHYWLALYARLLKDGYTVMVLNPIQSHSLRELYIRKTKTDARDSLIIADLVRFGRCKASNVPQDKILALRELCRSRAYLVDMAADLKRKLIALLDRIFPEYESLFDSVFSKASIAVLRKYSTPQKVKNANLRKLTDILMESSNGHFGEWKAHQLKEAACSSFGIDDSSGVYSTLLGMFLEQILSLTAQADSLEKQISVFFQEFNNPLTSIPGVGTVLAATILSEIGDITRFSSADKLLAYAGLDPSVKQSGEFKSNQNRMSKRGSPYLRRAIWLASTVAVHRDPMFQTYYEKKISEGLHYMNVIGHVSRKMTAVIFAVLRDGQPYQPILQSAG

SEQ ID NO: 69318 - protein, 277 aa, unidentified
MKTKVSVLGVDIGKNICSLVGLDAAGTVVMRRRATRETLIGLAAKLPACVVAMEACCGAHHLGRVFAAHGHEVRLMSPEYVRPYVKAQKNDDRDAEGIAEAATRPTMRFVELKTQDQLDIQTLHRSRDRLVGERTALINQLRAILLERGIVVPKGKRHLEGYLAVLLDEGGGHTLSDRMHRLVDDARTQWRELDKRIAAFDAEFTAFAKESEDARRLATIPGVGALIASALLAAIGKAETFEHGRDLAAWLGLVPRQATTGGKPKLLGISKRGVSVI

SEQ ID NO: 69319 - protein, 365 aa, unidentified
MNYIFVGCDSHDKTLVTKIAVNREAGERKAFAASRWGRRKMIEFLKTKVEQVGGAQVAVAYEASGNGFILCDELRAAGFECHVLAPTKIERSVKQKRNKNDERDADRLLEILRGHYLAGNRMPSVWIPDPQTRDDRETPRTRQDLSQKATGIRTQVQMLLKRNGIEKPEGIGKGWTKSHRQWLKTLSERGDANRPGMRTALGSLLRQLEFYEEEIGRLDPVMQELANTPRWKPIVDALMTEKGVGLNAALKYATDMGDFSRFRRGRQVGAYYGLVPSSQESGETNDRKGHITREGSPSTRQILCQATWARVRHDPNEREVYRRLVARNPKKKKIALVAAMRRLSVRLWHVGVAAQLQMKAAEATQ

SEQ ID NO: 69320 - protein, 352 aa, unidentified
MYDIHYIGFDVHKKTVSYCAKTADGIIVDEGTLASERAALREWAKARPLPWRGAMEATLFSGWIYDTLKPFSEQLDMAHPAMMKAIAAGKKKHDQIDARKISDMVRCHWLPVCYVAAPEIRELRRLLRYRNLVVRQSVQLQNKIAGLLMETGSPYNKQKLHGKKYFADLVQHLEEVPESVKDLLKTSRGALEMFQTTQRRLVRQLLTHPRLVERVERLMSISAVGEITALTWALEVADPHRFSSAGKAMSYCGLTSALKSSAGKQQRTPLSKQRNAWLQSTLIEAAKLAPRWNPQLAALHARELERGNRNRATLAVARKLVAYLLAVDKSGKPFELRPGPTTEATTTAGKAA

SEQ ID NO: 69321 - protein, 330 aa, unidentified
MARYIGVDLHRNQFTVCVIAENGREYLSEYRLEHLARFVAKLRPTDEVAVEVTGNTRLFYDAVAPHVAKVVVVNPTQFRVIRDSVKKTDPHDARTLAFYLSKEMLPEVRMKDKLHAQLASLTQTRDTLVKQRTALKNKVNNILSAHGINLRKEALSGDSGLEEVLGMKFDAIVMTELRVIVGQIRACNTSIAELEASRPRESTEHQGHWQPGGDRNVVGDRRHQRLRPAGKLAAYFGIVPRVRNSNETERSGRITKRGAKLARTTLVQCSLIAMRYSPYLAKFYHKIQARRGTGKAIIALAKKFLGVIYNTLKNNWIFADFPNFVLAEAS

SEQ ID NO: 69322 - protein, 410 aa, unidentified
MRYYLGVDWADQTHAIWVVDEHGTKVAGRTVPHTAAGFSEWGRELDEWRAQGIELWAAIERPEGRVVDFLLDHGVVVYPVNPKALDRARDRFRPSAAKSDPFDARVLADFLRTDHGHLQALQPSSEVAQELKYLTEDYRRHVRQQTRLVNQLTATLKAYYPRALEVSELTTALARQFLLAYPTPAAVVALTEKQWQRWARAHRLSEARTQELWAVLQRPQLPVPDHVVRAKARLMLTLVEELTPVVAAVDQYREAIDAFFAGLPEGQWIRTLPIGKHGVTAPTLWALLGDTAGRWKSFQHLQGHAGAVPVTIRSGQQRVVRFRFACNKAMRDIIDQVAFLSLRKCEWARAYYDQQRARGHDHHPALRALGAKWLKIIFVMWDRHIPYDEQHHLATMARHQLRQGAQKKIA

SEQ ID NO: 69323 - protein, 376 aa, unidentified
MNKCHSNTELSSHEGTRSQFNGGTGAIKSAVGRMRPVCALGIDVHQDFYVVVEQVDVTNPKPPQRFPKRAFLRWAARLKENTGAEVHAVYEACGFGFSLQRQLSSLGVQCHVVCPQKLDEQNRRVKTDGLDAKALVLKLDRFVQGNRSSLALVRVPTEEEEQKRAIHRQREQLVKARKQLEAQGRSLMVNHGLEPVQSWWKPRAFAALPVPQWMKELLANSQPILVALQQKIASLTIQLQSSATPKQPRGLGLMTSVIIDREIGDWRRFSNRRQIGSYTGLCPGEYSSGNTRLQSCVTKHGNPRLRAALVELAWRLVRFQPNYKPIVKWRQILAKGALATGAARKKAIVAVARQLAVDLWRIKTGRLRAEELGLIN

SEQ ID NO: 69324 - protein, 332 aa, unidentified
MNTLYCGLDVHKESTYATIINVFGEVLTQKRMRNEEVIEFLEPYQVEKVAMEASTYIMPLHREMTGRGYDITVSHPLKTKYIAESRIKNDKVDSKALAELLRLNALPESYIPPMDIAELREKVRRRAFLVRQVSKLKVKIRDIMAYWGVKPPEGYGLFTRKGVEWLRGLGMEPVDCYLRLMEPFKQEILVMSKELRAMARDDSDVRLLMTIPGIGYYIALLIKAEVGDIHRFKSKDHLASHGGLVPSSKSSGGVQRHGRITRAGSTWLRWALVEAAMVHIRYDTPVTRLYHRVAERRGKKKALIAAGRELLTVCYSVLKYQRPYYNPLHTQA

SEQ ID NO: 69325 - protein, 373 aa, unidentified
MKKTTRWVGLDVHAETIAVAVADKDGTVSSVGTIPNRPDAVRRALKKLESGGKLHVCYEAGPCGYGLYWQLAEMGIECDVVAPTLIPVKTGDRVKTDRRDAEKLARLLRSGDLTAVWVPDAEQQALRDLVRARHAAKRDQLRHRNRLGKFLLQLDVRRPEKIVAWGAKHMVWLEGQQMKHASHQEVLVDYLSEVKRAKERIERLERSIDAGIERAPRHLQELIGALQTLRGVAKIGAATLVTEVGRFSRFESARQLMAYVGVVPSEHSSGGSTHRGSISKTGNARMRHVVGEAAWSYRHRPATGPALRKRQEGQGEDVKAIAWKAQHRLHKRFQKLSAHGKHHGRVVTAISRELLGFVWAIGRAIEAQRDAAA

SEQ ID NO: 69326 - protein, 349 aa, unidentified
MRFYTETHRHYCGIDLQAKTLYLGILDQEGQVLFHKNLRSRPEEFLAAVGPYREDLVVAVECMFTWYWLADLCRKEGIEFVLGHALYRKAIHGAKAKNDKVDALKIAALLRGGNLPQAYVYPPEMRATRDLLRRRLHLVRRRGSLLAHIQNTHHQYNLPEPSAKVAYKANREGVAEAFAEPDARKSLEVDFRLIEQYDEIIRDIELHLERRAKQHDPQAYHRLRSVPGIGKILALTILYEIHDIGSFERVQDFLSYARLVKCEHSSAGKRLGSGGAKIGNAHLKWAFSEAAALFLRNNPEGQKHLRRLAGRHGKAKALSILAAKLGRAVYLLLSRERAFDMGRFLAQGR

SEQ ID NO: 69327 - protein, 340 aa, unidentified
MNVTTYGLDVAKRVFQIYWVDADTGEIVNRRFGREDLIQYLSRRPPGRVALEACGSAHWWARKIKALGHDVVLLHAKFIRPFVQTNKTDAADARAIWTAVQQPGMRTVAAKTQEQQAMLSLHRIRSLLVKFRTMQVNQLRGLLYEFGASFRAGRVAGLSEIRARMAELEEALPGTMMCCLQDQLKRIDELQKEIDQLEKRIGAWQKQDAACSAISAVPGIGKLTATALVATMGDARSFKSGREFAAFLGLVPRQSGTGGRVRLGSISKRGDPYLRTLLIHGARSVLCHTKVPTAWQSSIQARRPANVAAVAVASKMARTAWAILARGQAYERDHISVRPA

SEQ ID NO: 69328 - protein, 457 aa, unidentified
MSKRRSKAKSKNIKVPKLPQHLQHMNLNAAGVDIGSERHLVAVPEGRDTVSVPEFGTFTVDLQALATWLKQCGLTTVAMESTGVYWIPLFEVLERQGFEVKLVDARHVKNVSGRKSDVLDCQWIQQLHTYGLLAGAFRPPDEVCVLRSYLRQRQMLIQTSSMHIQHMQKALQQMNLLLHNVVSDITGSTGMKIIKAILAGERDPQMLARNRDERCHNTTATIAKSLVGNYREEHLFALRQAVDLYETYQAKIADCNHAIIKQVEKQPDSSDDDPPTPEKQVPAHLRIRDGVDVRDLLFKKSGVDLFAIPGLAADTLLILASEVGFDMTPWKTEKHFAAWLGVCPGTRKSGGKVLHNKTKRNPNRATQAFRMAAASLYRSQTALGAFYRRIKSRSGGQQAVTATAHKIARIYYAMLSQGTSYLELGQKAYEQRYKERRIDHLKVQAKSLGFQLVPCAT

SEQ ID NO: 69329 - protein, 417 aa, unidentified
MEEGEKASTCRNIALDIHKYYSMVGGVDRDGKEVLELCRVEHADLEDWLSKHLLPTDRVVIESTTNAWHVYDLLEPLVAEVLVANPIKVKQIACARVKTDKKDTLILARLLAANLVPKVWVPPKHVRELRQFISHRRKLANMHTQVVNRMHSVAHRHHLNHPKGKGFQPKNTLWQQDQALSRMEKTQLELDMATREHLEKQSERMTRELARMSHVEPWASDMLYLMQVPGCGVVTGMTILAAIGNITRFETPKSLASYSGLTPGLEQSGVKLRGKGITKEGRRDLRWAMVEMAWRAVKSDPHWKKYFEGLKKRMHANQAIVAIARHLLTVVWSVLTNHQPYRHFSPERIAYKYLIWAWALQADERQGMTRPQFARYYLMRLGIGDELKRVALNPEFPYKLAPVEEVLELHPELRSPG

SEQ ID NO: 69330 - protein, 322 aa, unidentified
MTRIICGVDISSTSLAARIGRSGAQGSFANTSEGIAALAAFCHQHQVDLVAMEATGGYERQSFAQLWEQGLPVALLNPRAVRSFAQAMGLFEKTDAIDAGVIAWFAEARNSLPNQPAAASQLRLRSLVTRLRQLTAIRTAQRNQSRLITDPAILASFAELLNLLKRQMQELETAIAQLIAEDPLWHQLDPVLRAVKGVADRTIARLMAEMPEIGTLSHKSISKLAGLAPLANDSGKHNGKRRVRGGRSAVREILFVVAGVAARYEPDFIAFRARLAAAGKPPKVIRIALAHKLLVRLNAKARDVRRQLVATPQQLIPSLVLT

SEQ ID NO: 69331 - protein, 372 aa, unidentified
MGHHTEAFVGIDTSKSRNAVAIADSGRGGEVRYLGEFPATEAAIRKLVAKLAAKCCHLTFCYEAGPTGYGLYRLLKSLGHDCLVVAPSLVPKKAGDRVKTNRRDALSLAKLLRAGELTAVWVPDERHEAMRDLSRARLAVKKDLQGKRQQISSLMLRLGRIYPGKTTWGRAHMRWLMEQKFEHREQRIAFEELLEGIRQESERMERLEDAIREVVPDWSLAEVVAALQAMRGIDLIAAVGVLAEIGDLSRFQNPRELMGYLGLVPTEDSTGDKVKRGGITKAGNGRARRILVEAAWSYRYPPRVSRDKQPKVEAAPRRAREIAWKAQTRLCGRFRSLERKGKRRTVIVTAIARELSAFIWAINRELMPPRQA

SEQ ID NO: 69332 - protein, 295 aa, unidentified
MAKKSFANGPVGYRQLRSWLRNRRATRVHACMEATGAYWLGLASSQHEAGLEVSVVNPSRTVHFARSQLRRTKTDLVDAEIIAEFCKTQKPERWTPPSAEILELRGLLSYRAQLVDDRLRLSQMVDQIHVSKELARLHAKQLKALEASLTAVERELQRFAKAHPAIDRQIRKLTAVSGIGLLSALAIVAKLPVERLRDGKAAAAYVGLTPRERQSGTSIHGKARICKTGNGSLRRDLYMPAVVAMRHNVILREFAARLKDKGKPAKLIVVAVMRKLVVLAFTILKGELTEAVVSA

SEQ ID NO: 69333 - protein, 449 aa, unidentified
MSVQKLASEKDKNIYTRRSSTMNYNQNDKIAQITSHTLIVGVDIAKFKHVARAQDFRGIEFGSAFHFENTKDHFELFLDWIKNLLEKHGMDNVIIGMEPTGHYWLNLAHFLREEEIKFVIVNPMHVKKSKELDDNSPTKNDVKDAKVIAQLVKDGRYAEPNIPQGVYAELRVARKIRDLLSVDLQAVQGQIHNWLDRYFPEFLTVFKDWEGKSALQLLKLNLLPHELEKITEQEILVHLRKAVKRAVGLSKIQELKRVAKDSIGIREGSRMAKLELRTLLDKYELINEKFEELESDIDGLLERIPGVQQMLAITGIGKDTVAGFFSEVGNLSYYSHPRQIIKLAGLSLKENTSGKHKGQTKITKRGRKTLRALLFRVAMPLVAKNTAFKALHEYFTTRKNNPLKKMQSLIAICNKLIRILFVIGTKQCEFSEERMLKDIPHLAPLQNAA

SEQ ID NO: 69334 - protein, 383 aa, unidentified
MKAVCGLDVHKDSVYLCILSEFGELIEKVFGVLTYQLEEMRDLMLHHHVIEVSMESTSVYWIPIWRVLSPHFKLNLANPYFIKQLPGRKSDVKDAQWIAECTMKELIRGSFVPPETIQQLRQYDRRIFDLNEEIVRKLSKLDAVLQRCNIRLSNYVSNVDSKSYKAVVRAISQGITAPEELVKLIHGRIINHHGIDVITASLKGVVSLAEIDMISQLRDELDMAEAHKEKCQARMLEICEREFPEELRRLQTIPGIKERTATSLIAEIGTDMNKFETANHLASWSGLKPRNDESNKKIKSRSITHGNVYLRKTIIECAWAASRTKDCFFSRFSYHQTQVRKKNKMKVLVAVARKMLIAVWHVLHDNTIYIDFTTDRKTSRTKG

SEQ ID NO: 69335 - protein, 319 aa, unidentified
MAQKDRVVVGIDVAKDKVDACIRSLSLRQTFPSTPQGHRQLVAWLRKHKVDKAAMEASGGYERDWAKLLRQAGIEVRIVDPKRVRSFALSAGRLAKNDAIDAEMIAWFAETFSEAPGQTHDAAHEELVVLVKARKGLIDVKIRLQSQNEHAVPGPVQKAHARVLKSLAAEIAKLEAAISAMVKATPEFAERAEIIESVPGFAEATSATLIAGIPELGQVSDDIAAALIGVAPYDDDSGKRRGERHIKGGRRWVRNAIYMPCLGAATQNNPVLKAFYQRLIAKGKEPKVALIACMRKLIVILNTLIARRQKWDPSRYALN

SEQ ID NO: 69336 - protein, 358 aa, unidentified
MQKYNISFKGQKIFIGIDVHKKNWDVAVAPEVGFVKRHSQKASAKVLIDFLKKNYPDGDYLAVYETGFSGFSTYYALKEVGIDCIVIHAADVPTTQYEEVMKTDRIDSVKLVKSLKAGLLKGIYVRERENIDDRSVVRVRKAIQKDLCRYKSRVKHILHCNGVEMPECFDNTNTHWSNAFMNWLKDEVTLLSSTRNSLDLLIKQVETIRMNLLAATRMLRNLSQTERYKSNCKRLVTIPGIGVIVAMSILTEIYDVKRFRNEKEFAAYLGLIPTCHSSGEKVVHGEKTFRGNKQLGPMIVEAAWITINRDAGLGSQYLRYRERMKPQEAIIRIARKLSNIILAILKSEKEYIPYHMGS

SEQ ID NO: 69337 - protein, 319 aa, unidentified
MNDIILGVDISKATFDVALLFNNKVKTKKFNNNTKGFTELKQWLQHKGIDTAHICMEATGSYGLRLAEYLYDNNFKVSIVNPARIKGFAMSKLSRVKTDKADSKLIANFCQAMKPDLWQPTTKHIQELQQWVRRLDSLITNKTLESNRLEGAINDVAINITAHIEFLNKQIKEVEELICKHIKNHEDLNDKHKLLDSIPGIGEKTIAVILAFLTAIDFNSAKEIVAFIGLNPKPRQSGTSVRGAGRISKTGDANLRKSFYMPAIVSLRHNPIVKDFAERLIKAGKSKMVIVIASMRKLIHIIYGVLKNKTPFNANIMTI

SEQ ID NO: 69338 - protein, 391 aa, unidentified
MVCVGIDVAKDKHDCCILDSDGMVRADCFTIPNNMDGFKQLLQTIRNCTKKSDKIKVGLEATGHYSCNILGFLLDNDLPVYVMNPLHTNLYRKSLSLRKTKTDRVDARTIATMLLSDVDLKSYTDTAYHNEELKSLTRYRFDKVQERAKLKQSVSRLVTILFPELEQLVSSIHGTSIYALLSEYPGAKQISEAHLTRLANILVTTSRGHYRKDRATHIRDAARTSIGSVMPAKSLELKHTIKLIQELTSEINEIEDAIRKIMDELKPPILSIPGMGFYSAAMILAEVGDFSNFNSPDKVLAYAGCSPSTYQSGKLTNCYAHMEKRGSRYLRYALYTATKYVCYWNPVFTEYLTKKQAEGKHYNVALSHATKKLVRLIYALQKSGKAYLAIT

SEQ ID NO: 69339 - protein, 379 aa, unidentified
MGESTTIVAFDQHAATTVAAVLLPAQRTPALHPMTSALSELRQFVRRLGREGVVRCCYEAGPCGFELQRALQADGVLCDVIAPALIPRRPGDRVKTDRRDAGQLAVLYRAGALTAVHVPTEQEEAARDLLRCREDIRADLLRARHRLSKFLLRHGRRFTGTKKAWTRRHDAWLRAQTWPIPALDQTHRAYLRTVDEAVARLRAVEGDLQALLTLEPLRARVERLRCFRGIDDLTALTIAAELGDPRRFPSAPSTMAFVGLVPSEHSSGTKKARGAITKTGNAHLRRVLVEAAWHYRHHPFVGHGLRQRQRGASAAVTARAWTAQQRLHRKYRVLAGRGKPKQHIITAVARELTGFVWAALTQSSDRPTDERRTLDASMR

SEQ ID NO: 69340 - protein, 359 aa, unidentified
MLKYSMGLDISAKTIYACISIIDVAQKVTVKSSCKIDNTLAGFKQLDLWVNKHYKQKDVPLVVNMEATGVYYENCALYLFKEGYSVSVLLPNKAKKWLQAEGLKSKNDKIDAQGLSKMGAEKALELWQPAAEYYYELRAMTRQHQSLQEFKTAVNNQLHAEEHGMYKNKMVIKQLKQQIKFIEKQIADLEPTIEAHIAADEEVAAKVENICRIKGLGIQTVAVIIAETNGFILFKNAPQLVSYAGYDVIENQSGDHKGKTKISKKGNSRIRRILFMPAFNMVKYKQKPFVDLYKRTFEKHGLKMKSYVAIQKKLLVLIYALWKNNTAYDIDYKNKYTRELEQVLPLGLASIEARLADAV

SEQ ID NO: 69341 - protein, 402 aa, unidentified
MNAVGIDVSKGKSVVAVMRPFGEVVFAPFEISHTDKDLTDLAKKLKSLPGETRVVMEATGSYHVPVAWVLHSAGLYVSVVNAVLVHDYGNDSLRRVKTDKKDSLKLANYALDRWIHLPQFAPAEENRLLLKACYRQYQQCAKVHTALSNNLISLLDTVFPNVNCLLKSPARDDGSVKWVDFVDFFWHKDCVSKLSEKAFITKYQKWCKKQRYNFSEQKAAEIYAAAKSGVAAMPKADAAKCMVQQAVSALRACSKALAELSKQMLSLASSLPEYPVVMQMFGVGPILGPQLMAEIGDVRRFHSKKALVAYAGIDSPPNDSGQVIGNHKKMSKVGSSALRRTLFLVMSVYLQNAPQDEPVFQFMNRKRAEGKHYKVYMMASANKFLRIYYAAVNAYLDSLNQT

SEQ ID NO: 69342 - protein, 461 aa, unidentified
MFSGKGAIVQQFFLGGDVSKGYADFVILDGKKQRMKENFQLDDTATGHNCLYGQLSDFFKEHPDAELFAALESTGGYENNWYNALLKFQSSLNVKTARLNPEGVFNNSKADLKRVITDKISAQSVAEYLIAHPEKVIYQQQDYWASLRKQWSFIQILTKQKTQLLNQLEALVYSANPEILQYCKDGVPEWVLKLLVKYPTAAKLARARISSLAKIPYLRKDRAKELIQEAKNSVASVNDSVTGQLISATVGQILHIKKTIKVQTEIMALECTIPEVEILTSFNGIGEHSAIGLMLEIQSIERFPSAKKLASFFGIHPVFKSSGDGSSAFRMSKKGRKTPRSILFMVALVAINSNPLIRDLYQAKVSNGMEKMAAIGLCMHKILRIIYGMLKNNTAFDPAVDQKNRERVIHKTDKATKNKCRRHQGFDSKAPISGRQKKIREERVLSQSATVGAVSGIKTPV

SEQ ID NO: 69343 - protein, 308 aa, unidentified
MGADVAKAELVIHHDDRDEIIRLKNSKLEIRRWLKQQPLNTAIAVEATNVYHLDLVELAHSLGFEVYVIDGFQLSNYRKGVGGRVKTDPSDARLLSRFLRNEGEDLRPWTPPPAVYGKLQSLLRRRAALVTARTAMTQSWANETLLKAAFETFVKSIDRLDQLIQKKIKEVLREAGLQEQVARCQAVEGIGFLTAAALVMAFMRGEFKSSDSYIAFLGMDLRVSDSGQKNGRRRLTKRGCSEIRRLLHNAAMAASRSAAWKELYEQHRNAGKATTQALVILARKLARVAFALMKNQDEYVTKGGKLAC

SEQ ID NO: 69344 - protein, 411 aa, unidentified
MNAVGIDVSKRKSTVTIRQPGDKVILAPRDYQHTQSSINELIATIKSLGGETKVCMEHTGRYYEAVASWLSAAGIFVSAVNPWLIKDFGNDSIRAPKTDKADAKKIARFTLDRWANLRQYSRMDELRNQLKTMNRQFSFYMDQKTAMKNNLIALLDQTFPGANSFFDSPARPDGSQKWVDFVYTYWHVDCVRGKSPAAFTEHYKSWCKRKGYNFSASKAEEVYHAASDLIAVFPKDDNTKMLVRQAVSVLNVTSETVEALRVKMDQTASQMPEYDVVLSMDGVGPTLGPQLIVEIGDVTRFEHRGALTAFAGVDPRKKESGDYERRSNPTTKKGSPHLRKTLFQIMEGLIQRSPQDNPVYVFMDKKRAEGKPYYVYMTAGANKFLRIYYGKVNAFLSPKGDAEAEADESDS

SEQ ID NO: 69345 - protein, 346 aa, unidentified
MLYAGLDLSRKRLDFHLLDADGATVDVGASPPDADGLQHLSERVALHGEPVRAAIESMNGARFVHDRLELHGWQVEIADAQKVKGLAPLACKTDRIDAWVLAELARRDLVPAIWLPDPLVRAERERARWRLHLVRHRSSLKQRVHAVLLTHGKPCPVSDLFGVRGRQLLAQLGLPEPWQGTIEASLRLIDELDHEIGECERELRRLGADHRYVPLLCTVPGISWVLAYTIAAELGDIERFASPRKLAGYSGLCPRVYQSGERDLRGPLSKQGPRYLRWALVEAATHACTHPVYRDRYQQTKTRIGKQRGAKVAQIDLARRLSEAIWHMLSRGERFAPKGATDPLAA

SEQ ID NO: 69346 - protein, 405 aa, unidentified
MIFVGIDWSEEQHEVEVMAASGQRLRSLRIAHGVAGLAKLQETILEFASEPSEVVVGVEADHGLLVNALAGSGYQVYPINPLTAARYRDRHSLAGNKSDRRDAVMLANVVRTDRHLLRPLAGDSEAALEIRARARAHLRAIRLRSQLRNQLRSLLLEFYPAVLPLLAADDIRDALAVLAVAPTPMRGRGLSLSQLESTLRRHGRQRNVAARAQAIQAQLRAPHLDLQRPRLIAAHGDEVASLTRVLLQVRQELAQLEAQMAAAFRGHPDAQILRSCTGLADILGARVLGESGDDPTRYADATARRNYSGNPPVTRASGKKREVTRRVARNRRLADATFCWAESAVRHSPGAGELYSRLRRRGQAHNQAIRVIANKLVGQLHACLRDRTLYDEQRAWPTELSQRAA

SEQ ID NO: 69347 - protein, 449 aa, unidentified
MADQQNKQASSLQLGLIYPAAAGIDVGSMNMMVSYPNTDGLQTVKEYGAFTTDLHELADDLKKAAVTHVAMEATGVYWMSVYEVLEQYGFKVTLVNARHYKNVDGQKTDVKDCQWLQQLHAHGLLRSSHIATDQYRELRTYTHERSLLQKNKSDTLNRIHKVLTQMNIKLQHVISDIEGIIGMQIIERIAAGVNTPQLLLEGLPIEKLKANREMLEQSLNGIFKSYYVTVLQNHLTAYRFYKQQMLQYEVEIEKLLQKLLPPQHQASPVSVKKTKVRKNQYHFNLKEYLHKIVGVDLTAIDGMDENSVLSIIAVTGLNMNKWPTADHFTSWLNLSARPKKSGGKTIGHQKRFTNNTATQAFRMAAQTMWQQKGVLGHLYRRLAYTKGSKKAIKAVARRLAVIFYHMVQRQTAYDPKIIALDEAKLKERKIARLKKEAEKLGCTINLQVA

SEQ ID NO: 69348 - protein, 377 aa, unidentified
MQPTQRPNVNPDMEAGLELANKSWKLAVTDGRRPNPAILTLTTADLWERLVDLVRRLGDLKHRWGLPEDCQVVLIYEAGQDGFWIARALQAMGIRVLVVDPASIPMPRHAKRAKTDRLDALKLLSELRAWLRADRRELRVLSIPSEDAEHKRLLSRERGLLQKEIGQHRDRMVKLLRTQGCTVQVDSNFAERVMSGELRRADGQRIPEELWDRLLRECERLELARRQFAAVERTLLHELPEELQRTIAMLARLRGVGWVGAMRLVLELLWRDFANRRQLGSCVGLVPQPYDSGDSHTDQGISKQGNRRVRALLIEMAWAWLKYQRGSDLAQWFARRTQGANKRGKRIAIVAVARRLVIALWRYVREGLVPNGALLKI

SEQ ID NO: 69349 - protein, 413 aa, unidentified
MAVFCGIDWSDDHHDVAIVDHEGTTLAQLRIGHDVAGFTELLSVLAEHGDTVGELIPVAIETGRGLLVASLRAAGRPVFAINPLSVSRYRDRHSVARRKSDAGDALVLAHLLRTDMAAHRPLPADSDQVRTIAVLARAQQDAVWDKIIAHNRLRAVLHEYFPSFLNAFVDKRGGIMRPEARALLAAAPTPERAARLTRAQLVSILRKAGRIRLLAAQAEALQATLRHAELRQPEPVEAAMGQQALALLRQLDAACRNAEELATAAELAFAAHPDATIIASFPGIGELTGARVLAEIGDDRTRFADARGLKAYAGAAPVTRASGKSRTVATRRIKNQRLAAAGYSWAFSSLTTSPGARAHYDRRRSRGDAHIAAQRNLFNRLLGCLHHCLITGTIYDENIAFPPTTAPTEHAAA

SEQ ID NO: 69350 - protein, 342 aa, unidentified
MEITTIGLDLAKSIFQVHAVDAAGTVVVRKALRRSQVLPFFTKLPPCLIGIEACGTSHHWARTLAKLGHEVRLMPPAYVKPYVKRGKTDANDAEAICEAVTRPTMRFVPVKAPEQQAALALHRTRDLLVKQRTQLVNMIRGLLAEFGIEIVRGLHHAIELAARIAKGDAPEVPDLAVRVITGLAGQIGDVQVRLAALEKELLAWHRSNELSQRLGTIPGVGLISATALAASVTDPGRFRSGRQFAASLGLTPLQNSSGGKERMGRISRMGDRYLRRLLVIGMTSLVRRARAKPDSVDPRIAAMLARKPARVVTVAAANRTARVAWAIMARGGTYRAPIGMAA

SEQ ID NO: 69351 - protein, 318 aa, unidentified
MQTSIVFIGVDVGKFELQVAASDGEIVTGVLPNNRSSIVGWLKRLPATSVIAMEATGGYQELLARTAHERGFEVYVLNPTHVHHYAISLGNRGKTDRLDAAVIAQYIAQHQKKLHRYEPISPELQEVRALQALRSTVVRVGTSLRLSAQRHGCVSSHQKKALASLTAWSEQLEREMIAKIKAQSDWAKTYGLLTGICGIGPITGVALTSLFSRIEFASSDAAVAFCGLDPRPNESGRKVGRRRLSKQGDKAARTLLYNAASSAARTEQFKDYYAMLRARGLASTAALVIIARKLLRIAYGVWRTGQPFDSEKLRPAIA

SEQ ID NO: 69352 - protein, 333 aa, unidentified
MVEGTLGSHHKEGSKKMSKYSMICAGIDTGKRKLDVALDGRAERLQVDNNADGHKALSVWLRRHRTKRVGIEASGGYEQAVVAELRRDHFQVIVFQPAQVRAYAKFHLQRAKNDKIDAALIAACTAAAKKIHAPPDPRLAPFSQHLTMIEQITEDIARFKTRRESCRDPRIGRFWDEEVARLKRRLKIELEQLLAAIREHRDLAERLDLIASVDGVGERTALAILVRMPEIGTLSREQAAALAGLAPYDDDSGDQVGARRIDGGRERLRKSLYAAALAASFRWNAQLGAMYRRLLAAGKAHKLALVACARKLLIFVNTVVARGTPWTKNTAPV

SEQ ID NO: 69353 - protein, 351 aa, unidentified
MIIIGVDYHPSFQQIAFLDQETGECGERQLHHSDGEAEKFYRELQQRGVSVRVGMEATGYSRWFERLLAELGFEVWIGDAAEIKTMRVRKQKTDREDARLMRKLLLENRFPRIWVPSPENRDLRQLLWHRHRLVQMRTRIMNQLQAVAMNEGYRWKKKLFSAQGRALLEKLSLAPWASRRRKELLELLDQLDPKIAELTAAVEQEAKKRPEVLLLMTHPGVGPITGLVYVLVIGTPERFPCGKQIGSYTGLIPCEDSSAGRQRLGHISKQGNTLLRFLLVEAAQAAARCNPDWRRKYLHLMMRREKRIAKVAMARKLGVRLYWMWRNHWQYSQLVEFGSNAGKLVTGHGVK

SEQ ID NO: 69354 - protein, 356 aa, unidentified
MSIANDSGLIVGVDTHLDTHTAAICDARGRAGSQLQVAATADGYVQLLNWARREAAGRQVTWAIEGTRHYGLGLARYLASQGQQVAEIDATRHVGRRRAGKSDPIDAVRAARELLARPHAGQMRADGDREALRLLMIDRDNAVQSAKTARTTLASVLVTAPAALRDQLRHIPAERRTRACAQLTCPRRADRLTRVVHQTLMRLGQRAVALTEVADDLEAQIAAIVEDLAPGLVAAEYGLGALTAAQILLSWSHAGRIRDESAFAMLSGTAPVPVSSGRTDRHRLNRLGDRQLNRALHTMAVSRMRSHPPTRAYLERRRAEGKTDREIRRCIKRYPARHLYRTLSRGPNPIRRLDGT

SEQ ID NO: 69355 - protein, 343 aa, unidentified
MIVIGSDPHKRSYTFAAVVDATGELLSSEAVASTTAGHERLIGWARSLDEQRVWAIEDCRNVSGKLERFLLARGERVVRVPPKLMAGRRRASRERGKSDPIDALAVARAALQEGVDTLPTAVLEGPARDVKLLLDHREDVVAERTRAQNRLRWLLHDHWPELELPTGCLDRTIWLDRIASRLARSPQHTDVRVMRRQVRRLRELAREANQLERELAQLVRQQQPQLLELPGVGPLTAAKLIAEIAGIERFATSAKLARLAGVAPIPASSGNHIRMRLDRGGNRQLNAAIHRVAITQMRHHPPARDYIARRLTEGKTKREALRALKRHLVRSIHNTMNPTPALT

SEQ ID NO: 69356 - protein, 387 aa, unidentified
MTVRKVSNLPDAAHGETVRCLFAIELSKQSWVIGFTTPLSAKISRRILSGGDWKGLLELIEEVRARVSREIGRPVEVMSCYEAGYDGFWLHRQLEAHGVRNYVIDPASLQVDRRMRRAKTDRIDTERLLRSLMAYLRGEPKVWSVVQVPSVAAEDARRLHRERDRLISERVQHVNRIKGLCALQGIYDYHPLHPQAMARLEQLRTAQGIALPPRLKSEIKRELHRLTLVVEMIATLEAERDAIVENEASTHVNAEKIHALHKLKAIGPEFATVLVGEIFHRDFNNRRQLASYVGYAPSPFQSGNVAHDQGISKAGNRKGRTTGIELAWLWLRYQPDSDLSAWFRARVGAVKGRIRRIAIVALARKLLVALWRYLETGLVPRGAVFKA

SEQ ID NO: 69357 - protein, 414 aa, unidentified
MPYTISAIDVHKKVLMVVAADVGTPDAEFSFEQRRFGATTSELQAVVAWLVQRGVKEVVMESTAQYWKPVWLMLEPHFRLHLAQAQSNRAPGGRKSDFRDAQRLLRRLVSDELFLSYVPEPEQRIWRTLTRGKVQLVRERVRLQNQIEALLEEGRIKLSSLVSDLLGASGQRILCALADGERDARSLAALGDPRLRATAQELADALNGDLAPAHCAVLKLFLKRLELIDEQIGELNRLAAGQLRAHQDAVRRLAAVPGLGVDSAQQILAEIGPQAQAFPSSDRLCSWVGVCPGRNESAEHNRSGHCPKGNRYLRRILCQAALAATKKNGSYLQALFRRLLPRLGYLKAIWALAHRLCQIIWKILHDGAEFIEHGQLGTPEEQKRRARRHLAALRKLGYTVQISAPKPEDGMTFA

SEQ ID NO: 69358 - protein, 347 aa, unidentified
MVHVGLDLSRTRLDVCVLSANGDKLTVTTSPPDRDGLRVLARKIAGFGEPVSAAIESMNGARYIHDTLELLGWDVEIADAQKVKGLAPLACKTDRIDAWVLAELSRRELVPAIWLPDPAVRAERERARYRLHLVRHRTMFKNRIHATLMAFGKPCPVSDLFGSSGRRLLSRLELPEPWTANIADALEQIDRLDAEIDECTAELRNLGDGHPYAKLLTSIPGVGSVLGYTIASEIGDIHRFATPKKLCGYTGLCPRVYQSGSKDHRGPLAKTGPKYLRWALIEAAIHASKHPAYREHYERTAARLGRQRGKKVARVEVARKLAEAIWHMCTTNRPFTPARSHVDALVA

SEQ ID NO: 69359 - protein, 341 aa, unidentified
MKLFVGLDVSLTKTAVCVLTEHGEIIEEVEVASEPEPLISLLQGFEGTVEAVGLEAGPLSQWLHRAMKEIGLPAVLMETRQVKGALKAMPIKTDRRDAEGIARLLHLGWFRPVHCKSVSAQEVRAVLAARKAIQGNMIALEMSLRGLLRNFGLKVGAISRGRFEARIRELVAGNMMLEAATEPMLRVRAALRQELAGLEKLVRQMAYEDPVCLRLMTMPGVGAVVALTFRSAVDDPSRFRSSKNVGPWVGLTPSRSQSGERDVSGGITKAGDVNLRRALCQAATVMLNRGRGNALRTWASLVAKRRGRKRAMVALARRIAVVLHRMWVDGSTFRMEVAPTN

SEQ ID NO: 69360 - protein, 344 aa, unidentified
MFYAGIDAHMKSSTIWIVDRKGRKVSSSTVVTNPAGFAAGLGRWAHRGLKAAVEASGITPWICQLLKDLGVKVVVVNPNRVRLIAESRKKSDRVDAETLAELLRLGGLPEVHQPSIEARRLRTELSVRRQLVRQRTAMINQARGLLRGWGVILPARFLQGRGGWKDLEAKRLPEYLRPLLQTMKGVYEQLTQAIRQVEATLKQRESKDERVTRLETIPGVGRLSALTLVAAVDRIGRLARAKQLTAYNGIVPTVRSSGEREQQGSITRQGRSEVRAVWIQAAHSLVRSRQPAAGPLQKWFWKVARRRGLRTAIVALARKMLSLAFYLLRDGTQYEPLRLRQAAA

SEQ ID NO: 69361 - protein, 343 aa, unidentified
MDHFAGLDVSVKETSVCIVDDTGRIVREVKVESEPDALLAVLKNPTYHFKRIGLEAGPLSQWLFSAVAEAGLPVICVETRHMRAVLKAQINKTDRNDARGMAQMMRAGLYRPVHVKTLRSQKLRMLLTHRKLLQSKAIAIDNDLRGTLRNFGLKVGVVGTVKFEARIKELIENLPDLAILVEPLLIVRRVLREQIGILHRRLLAIVRDDDVCRRLMTVPGVGPVVALTYRATVDVPARFRNSKAVGAVFGLTPSKYQSGEINRTGAISRCGDEMMRVMLYEAAQVMLTRTIKWSWLKAWAMKIARHRGMKKAIVALARRLAVIMHRIWVDGTEFRWTRDVATA

SEQ ID NO: 69362 - protein, 347 aa, unidentified
MRFYTGQHRYYCGIDLHARTMYLCILDHTTGEVVLHRNLRSEPGAFLRAIEPYRDDLVVGVECIFCWYWLADLCAEEGISFVLGHALYMKAIHGGKAKNDKVDAYKIAVLLKGGAFPTAYVYPRGMRATRDLLRRRLLFVRRRGELFTHIRIVFHQLNLPAPTGALLEPRHRSGLLETVPEPGVRASVEADLDLAERLDHVIHSIERTIQRQAKVDDPETLRLLKTIPGVGRILGLTMLYEIHDIVRFPRVGDFLSYARLVKSQKASAGKVTGTSGAKIGNVHLKWAFSEAAVLFLQKNPPGQRLMSRLPSKHGKGKALSVLAARLGRASYFMLSRSTPFDMDRFLN

SEQ ID NO: 69363 - protein, 338 aa, unidentified
MKLYAGIDLHSSNCYIGIIDGQLEKVLGKRVKNYLPMIIDCLAPYKKDLQGVVVESTYNWYWLVDGLQEHGYTVHLANPAAIKQYEGIKYSDDKWDALWLAHLLKLGILPQGYIYPKETRPTRDLLRRRMLFVRHRTADILSFQSMIARNTGGRISVNNIKKLTEANLGKFFSDPDLLFMAQRYLSIIGLLSQQIKMIEKQAMNKIGLTQRFKWLCTINGVGKILAMVIMMEVGDIGRFKKVGNYCSYCRCVKSERISNGKKKGVGNKKNGNKYLSWAYVEAANFCIRYNPQAEKFYQRKKAKSNGIVAIKALSNKLARASYYMMRDQVPFDSQMLFA

SEQ ID NO: 69364 - protein, 350 aa, unidentified
MMFQPFVNLTHKIMHEDKIFIGADVSKLTIDFTLLLNDQVEHQCVENTVAALSSYLKAVKRRFKVKDASIYLGIENIGRYSWPALRAFSCGELKLHLLSPLHLSKSQGLVRGKSDLVDSQRIARFLKKNLDELSLYQKPREVIEELSLLLARRNKLQKLIKAESATIEEMGQVSKGRVRSFIIADSKKSVLALRKRLQMVELQIENLIAEDQDLKHKVKLLMSIPGVGKILSWYLLVKTNEFKNFDDPRKLACFAGVATFQHTSGTSVRGRTRVSSFADKTLKRILHLAALRVTQMKGELGEYYRRKVEEGKNKMAVINALRNKIIHRIMAVIREDRPYQIREKNTLLVS

SEQ ID NO: 69365 - protein, 334 aa, unidentified
MENIALIGIDLGKNSFHIHCQDRRGKAVYRKKFTRPKLIEFLATCPATTIAMEACGGSHFMARKLEELGHSPKLISPQFVRPFVKSNKNDFVDAEAICEAASRPSMRFVQPRTESQQAMRALHRVRESLVQDKVKTTNQMHAFLLEFGISVPRGAAVISRLSTLLEDSSLPLYLSQLLLKLQQHYHYLVEQIKDLESQLKRKLDEDEVGQRLLSIPCVGTLTASTISTEIGDGKQYASSRDFAAATGLVPRQYSTGGRTTLLGISKRGNKKIRTLLVQCARVFIQKLEHQSGKLADWIRELLCRKSNFVVTCALANKLARIAWALTARQQTYEA

SEQ ID NO: 69366 - protein, 355 aa, unidentified
MYGLKHQKEKRSMDHFAGLDVSVKETSVCIVDETGKIVREVKVASEPEALLSVLKNPAYRFKRIGLEAGPLSQWLFSALAEAELPVVCVETRHMQAVLKAQINKTDRNDARGIAQMMRVGLYRPVHVKTLRSQKLRMLLTHRKLLQSKAIAIENDLRGTLRNFGLKVGMVGTVKFEARIKELVENLPDLAVLVEPLLVVRRVLREQFVILHRRLLAIVQDDAVCRRLMTTPGVGPVVALTYRATVDVPARFRKSKAVGAVFGLTCSKYQSGEIDRSGRISRCGDEMMRVMLYEAAQSMLHSKKWSWLKAWAMQIARRRGKKKAIVALARRLAVIMHRIWVDGTEFRWTREQAVAA

SEQ ID NO: 69367 - protein, 322 aa, unidentified
MQQESSSQSVAGIDVSKSKLDCFIDVIDKSFSVDNDPGGIARLIEQLRAANVRLVLIEATGRYHRRCAAELLDGGIEVAVVNPQRAREFARSMGKLEKSDHIDARILADFARAGKDHRRLVKPSAQQTQIDDLVSRRRALVQMRVAEKNRLHDDLPKLARNQGNKLLRLIEQQIEDLDRAIARLIESDDDWQNKSDIISSVPGVGTSSAHQLIADLPELGKLNRQQIAKLVGVAPLNCDSGQHCGKRRIAGGRGPVRNTLYMAAFNAIHYCDRFRGYAARLKKAGKPFKVIMTACMRKLLITLNQMIKTNTAFNASPTASIA

SEQ ID NO: 69368 - protein, 321 aa, unidentified
MTAILGIDVAKNKFDVALFRNGKYKNKSFENRPPGFEALVVWLKQNDVTSVHACMEATGSYGDTLARFLFEAGHKVSVVNPARIKAYGKSELLRTKNDKTDAKLIARFCEAHKPLAWQPDPPEIEHLRMLGRRRDALIGMRTQEVNRLGGPDASVIESVQKVIAFLNEEIELITKAIREHINKHNGLRKKRDLLKSIPGVGDVTVEAILSEVNGFEGFDTVEQVVAYMGLSPKEHTSGTSVKGKAALCKIGNARLRKVLYMPTLSAIQHNPFVTALYDRLIAKSKNGMIVACACMKKLVHIIYGVIKNEKPFNPAYNIKTA

SEQ ID NO: 69369 - protein, 455 aa, unidentified
MLHEPRPDAAAADIGANEIWVAVGPDRCEQPVRRFGAFTEDLQAILRWLLECGIGTLAMESTGLYWVGLYQLLADAGIEVCLVNARHVKNVPGRKSDVRDCQWLQYLHSVGLLRASYRPKQAICAVRSIHRYRQNLLSQSSQHLQHMHGALDQMNMKLHHVIDDLSGQTGQAIIEAILQGQRDPLALAKHRHRCIKASEESIVKSLQGDWRAEHLFVLRLAWENWQQTQQQIQKCDQQLLDWARQLEASVVIAKPMRIVRLDPDPTAPSPVVVERKRPREKTSKNQPAGPWRQELERFFGVDLTAIPGISVLTGLTLMSELGNDLSSFKSPQQFSSWLCLCPDNDTSASRVLRRATRKNGNRLREALRTAASTLHHNKSVLGDKYRRLRAKLGAPKAITAMAHQLARIIWHLLTHRVPFDISIFAAQEKAHQKRRLKNLTLSARQMGYQLIPIAA

SEQ ID NO: 69370 - protein, 351 aa, unidentified
MVTVGLDLHKRYITACALDALGTVLAEHRRLEPSLDALCRWLEALGQPVLVAMEATLYWHWLERQLTARGFKVLVAHPYQVKLIWQARTKTDPIDARKLAELARVNLLPAIWIPDPATRALRQLLRGRVFLVRQRTVMRNRIHAYLTAENLRCPELDLYSQAGQAWLAAVELPTVVRAQVTLVLANHALLTSQIQVLDRHIKTTVRRDETARRLQTIPGIGPFGALLLQAEIGPISRFGSAQELAAYAGLVPSTRSSGDKTRHGSVGRGNPWLKWLLIEALQTLKLAPGPVGDHYRKLLRAKGKPKATVAAARKFCTYLYWMLKEEWSYTEWLRQHDRPEVRPVQPLGSAA

SEQ ID NO: 69371 - protein, 311 aa, unidentified
MKQSVVYIGIDVAKAHLDVAWAGTFRRLPNERSGHAVLVRWIKQSATPVQLICEASGGYEQGLLESLEKSEVKVTLVQAVRVRQYARAAGILAKTDQMDAKVLAAFGSAMQPPPTPPLCAEQKRLRQYEAQRRHLSRVLVAEQNRLAQLSCAELRNLSRGLISKIKKQIETIDTRIGDLIAQDQTLREKAQKLTAIRGVGVRTAALLLAQMPELGQLNRRQAAALAGLAPFNHDSGSIRGKRAIFGGRRALRSGLYMAALSAARFNPILSRFYRRLRTKGKPHKLALTAVAVMRKLLLALNQTLKPIPSLA

SEQ ID NO: 69372 - protein, 327 aa, unidentified
MEKIFIGIDVSKASLDICIKNGQDLSFEKIDNTVQAVKRFVKQFKQEQDGIVLAMENTGRYNVHLYEVLEHLSWAVYVVNPLHIKKSIGLVRGKDDKTDAQRIAFFIEKNYKELPLWTADSQALRQLKVLQTERNTRVKMKSNLKQQQSDYRLMKSIGMDKKIMKLNKLLIAALDKQIIELEVQIEALIKQDEELQEQAQRIRTIPGVGKVLSWMMISKTNGFKRFNNPRKMACYAGVVPFDYQSGTSIRYKPKVSVFADKELKKILHMAAMSAIQIDNDLRTYYLRKVEEGKNKMSVINAIRNKIIHRIFALINNKTVYQKNLVLP

SEQ ID NO: 69373 - protein, 393 aa, unidentified
MPQPNDLSRSLTALDQDSTLIAVVEMSQSSWLVGAIIPGVERRPAKKLEASEGMLLALLHRWRDEAAKAGCTIDRITVAFEAGRDGFWLARWLRQRGIEAHVIHATSIAVSREHRRAKTDRLDAALLQRAFLGWLRGERGHCTMVAIASLAEEDAKRPSREREALVGERTRIGNRMKSTLARLGIRGIRPGLRKAAERLEQLRTPEGAPLPPNTLAELRRDLARLRLINDQIGEIEAARLERLRQQPDEARHPMILLLARVVGIGIETADMLVQEVLSRKLRDRRAVARYGGLTGSPEESGARRREKGLARAGNARVRRGMLQLAWRFLMFQKDSALAQWYRARTADARGATRKTMIVALARKLLVALWKLVTTGELPNGVVLRPAIQAAVRR

SEQ ID NO: 69374 - protein, 348 aa, unidentified
MTKRLWAGLDVGVESTAVCILGEQGEIVHSATCRTDVASVHRELLCLRRRRLRRVGLEAGIGTTLARGLRNLGYQVELYETRQLSKFLRLRRNKTDAGDAKGIAEAGRLGAATVSRVYLKSLECQSLQSRLTIRRHFVRQRLAAVTLLGRQLEVFGGRLKRGNLMNLRRNVELEIRRIFGTSQEEIVSQLRCLVDYCEQLIDYQRTVDREFRKAAGEIEICRRLMEIPGVGPLCALTFYAVVGDPDRFKRSADIGPYLGLAPRIAQSGLRVRRGRISKMGNAAARKLLVSSSLAFMRWAPEDSELGSWVRAVEERRGRKRAMVALARKLSVLMLIMWKNGTSYEPRKG

SEQ ID NO: 69375 - protein, 341 aa, unidentified
MNHSKAVVGVDTAKRVFQLHWIEQETGEIVSLQLKREKFLEHFANRAPCLIGMEACGGSQHWARKLTRLGHQVKLMPAKAVRPFVGGNKSDAHDARAIWTAVQQPNVKAVAVKTEEQQAILALHRMRSQLVKFRTAQINGLRGLLTEYGEVMPQGKAGVKKGVAEALQRLSDRLPGMVIDTLREQWARIGQLDEQIGEIEKRLKAWFKEDAACQRIAEIPGVGLLTATAAVATMGEAKAFKSGREFAAWLGLVPRQTGTGGRIRLLGISKRGDSYLRTLLIHGARSVLTHAKEPAPWITELRQRRPLNVAVVALANKMARTIWALLAHGRTYQKGFVSQPV

SEQ ID NO: 69376 - protein, 379 aa, unidentified
MKKDTRWVGLDVHAETISAAVAEASGEVKSLGTVANRPEAIRSLMRRLGKPESLRACYEAGPTGFTLYWQLTSMGIRCDVVAPTLIPKKAGDRVKTDRRDAEKLARFHRSGELTAVWVPDAHHEAMRDLVRAREAAMTDRLRARHRLQKFLLRHGRRAPTGMAAWGSKHVGWLRSQHFEQGAQEAAFVDYMAEVDHARDRVERLETAIDVAVLELPAPMRAVIEGLQVLRGVAKVVAATIVSELGTLTRFQKARHLMGYSGLVPSEHSSGDRTKRGGITKTGNAHLRRVLMEAAWTYKSRPLVGKRLRKRQQGQNERLKEIAWDAQLRLNRTYRRMLAKGKPSQKVVTAVARELIGFVWAIGVQIERQFASNTGTSAAA

SEQ ID NO: 69377 - protein, 336 aa, unidentified
MKHWIGIDVSKATLDVALLDEQGTLTAEHKAENTDKGLKSLLRRWTKEYGLDIQECMVCLEPTSYYTNAALQVLVDLEVPTWLAHANDIKQSIGMTRGKSDRIDAIRIADYARRFHDKARLFTVDQLKMNKLKQLLSKRQHYVMRKTMHQRQIKDMNRLIDKDLRKPFTRFDKAQITTLTKVIKELEGMIQDTIYAEAELSKRFELLRSVEGVGLILGAHLLAITDGFKRFTEARQLACHAGCVPFENRSGTSVRGRTRVSHNANHNLKRLLHMSVVGLIRFPGEFQDYYKRKVAEGKHKMLVFNAMRNKLIHRVCAVIRKGEAYVIRTPLAHVIE

SEQ ID NO: 69378 - protein, 418 aa, unidentified
MSEEGNTRGSRRYVALDIHKHYCVVAGVDREGRGMLQPVRVEHADLEEWLKKNLLSTDQVVIESTTNAWHVYDLLSPLVERVVVANPIKVKQIACARVKTDIRDTLILARLLAANLVPAVWVPPLHVRQLRQLLSQRRQMVETHTQIVNRMHSAAHRHHLKHERGKRFNEKNTAWQKDKALSSLEQFQLELEMENLAYIQKQIERISKEVRKMCHQKPWAESMTYLMQLPGFGVITAMTVLAAIGDIQRFASAKHLASYSGLTPGLEQSGTKNRGKGMTKEGRRELRWALVEAAQMAVKSDPLWKQRFQEMQKRMHRNQAIVAVARRLLELVWYVLTRRQPYRHFTQERIAYKYLTWAWQMDDEARDGLTRQQFARYYLMRLGIGHDLTRVALNPKYPRRLASEAEVLALRPDLQKIE

SEQ ID NO: 69379 - protein, 389 aa, unidentified
MKIYVGIDIAKLNHFAAAISSDGEIIIEPFKFTNDADGFQLLVSKLESFDKNSLIIGLESTAHYGDNLVRYLVAEFYQVCVLNPIKTCQMRKNNIRKTKTDKVDTFVIAKTLMMQDDLRLVSFYDLDMMDLKALGRFRQKTIKQRTRLKIQLTTYVDQVFPEMQYFFKSGLHQHAVYAWLKEAPSPKEIASMHMTHLANLLKVNSHGHFTKEQAKELRVLAQKSVGANDSAISIQITQTIQQIELLDSQLEKIEAEMTDIMKFNDSVIMTIPGIGYINGGMILGEIGDIHRFSNPNKLLAFAGLDPSVYQSGNFQAKTTRMSKRGSRVLRYALVNAAWNVVRNNATFKAYYDAKRAEGRSHYNALGHCAGKLVRVIWKMLTDEVEFNLE

SEQ ID NO: 69380 - protein, 345 aa, unidentified
MKIVGCDLPTRYQQVAMLDAETGELVERRLEHESGEARAFYAALSSPVRVGIEATGHTRWFERMLAELGHELWIGDAAQIRASMVRKQKTDARDAAHVLDLLLNGRFPRIWRPTLEERDLRQLVWHRQKLVWMRNAVGNQLHALAMGEGVCRKKKLFTKKGRVELESLKLGPWASHRRQELLTMMDQLDASLQALDQAVAEQAEQNQAAVLLMTHPGVGPVTSLAFVLTIGPVGRFQRSKQVVSYLGLNPREHSSGGRQRLGAISKQGNPMMRSLLVEAGHTAARLDPELRQDYQRLKLRRSSGVAKVAMARKLAVRMYWMLRTPANYAQLVRMQGSPRGTLVGQ

SEQ ID NO: 69381 - protein, 307 aa, unidentified
MGAFVGIDVSKATLDVAVAGDIASVQFANNPAGHRKLARWLLEKMPSRVFLEATGGYEQAVLDFLHNAGLPMTRVNPRQARDFAKAIGQLAKTDRLDAHVLARMAAAMELVRYEPREAWRARLSGWNSRRNQLVQMLLSERQRLDRFEEASLRKCVQRHIAGLERELREVDREIASQMKAQPSIAPLASLRGAGPVLQATLACELPELGRLDGKAIAKLVGVAPLARDSGQWSGHRSTWGGRGQVRRALYMSALTAMRFEPCLRDFYRRLRLAGKPSKIAIVAVMRKMLVILNARMRDSLGSAQISY

SEQ ID NO: 69382 - protein, 340 aa, unidentified
MSLVLQSFLPYPDSCLGTSPHQQGWDTKMAELSFGGIDVSKDRLDVLLLPEGLCFSVCNDAPGWVELIVRLRPLAVSAIGLEPSGGYERGIIRALLAAGLSVRRINPNKLRQFARARGVLAKNDRLDARLIAEYVAIMPTRVVRRDDAVEHLAEIITMRRQLCDEHAAAMNQAAHLEDPMLQRLSKRRLVRLEADILLLDKRLAELITADPRLAHRYRLLISMPGVGPILAYTLLAMLPELGQIDRKQIAALVGLAPYDFDSGKLKGHRCIYGGRMPVRNVLYMAALSASRYNPALKTFSKRLAAASKKSKVIIVAVMRKMIITLNAMLRDNTEWRPSSL

SEQ ID NO: 69383 - protein, 346 aa, unidentified
MLHAGLDLSRKRLDFCLLDEAGDVVERGAAPPDADGLRSLAQRLARFGQPVCAVIESMNGARFVHDQLEQLGLEVEIADAVKAKGLAPLACKTDRIDAWVLAELSRRDLVPAIWLPDPAVRGERERARFRLHLVRHRSSLKHRVHAVLLAHGKPCPVTDLFGSKGRTLLERLALPEPWHGTVAASVRLIDELNHEIDDCEAELRRLGADHRYVPLLCTVPGIAWVLAYTIAAEIGDISRFATPTKLAGYSGLCPRVYQSGQSDRRGPLAKNGPKYLRWALIETTTHACKHPAYRDRYQQTKTRLGRQRGAKVAQVDLARRLSEAIWHMLTRNQPFAPAGATRPLAA

SEQ ID NO: 69384 - protein, 407 aa, unidentified
MIFVGDDWAEAHHDVHVMDRDGKRLASERFLEGLAGMSGFHGLVGGLVSDPAEVMVGIETDRGLWPQALIAAGYRVYVVNPLVMARYRKVHHLSGAKSDRADAATLANLVRVDHHQLRLAAGDTGLAEGIKVLARAHQNLIWERVRHTNRLRSALREYYPSALTALGDLDHPDAVAVLGRAPTPAQGRALTITQIKAALRRSGRKRNIDTRAGAIQEALRAGQLNVEDTVAAAFGATTKAAVGIIAELNRQINELGTELATHFEQHPDAGIYLSQPGLGVILGARALAEFGDDPNRYLNAKSRKNYAGTSPVTRASGTTRVVSARWIRNRRLGDATNKWAFSSLTASDGCRRYYNQKRAAGDTHNQALRALSNRLVGILHGCLKTGTLYNEHTAWAHRQPQPQTKAA

SEQ ID NO: 69385 - protein, 341 aa, unidentified
MKKTTTISIDLAKNVFQVAVFNKHGKLKSNQKMNAKKMALFVAQHPEANICMEACGSAHHWGRGFLKEGHEVYLVPAHIAAKYRSGNKNDPNDVLAIYEAAQRPDTYFVAVRTLEQQDLACQHKLRQGYVKQRTQLANRIRGFGLEYGVKIPKGIGQLRRHLPEALEEAENELTLIARSILRNLLDQLLLLDQLIKEATEALIHQTQQIAACRELVRMPGIGWLGAGALYARLGNGSAFRRGRDASASIGLVPGHSGTGGHNKIMGITKGGDRYLRALIIHGARSAVSNVRDKQDGLSCWIRKQLAVNHMNNTTVALANKLVRMAWAILSSGGQYREPVAQ

SEQ ID NO: 69386 - protein, 397 aa, unidentified
MYIVGIDIAKRKHEAAVIDGEGAVIIKPFSFTNNCSGYNRLLAMLAKAKLPLDEVSFAMEATGHYWLALFTRLQKEGFRVQVINPVQTNSIRSFYIRQAKTDPRDALLIAEVIRFGHFSESTLHPENIYELRELCRGRHAIVSMQADVKRKVVALLDQVFPEYETAFTNMFGDTSMAILQACPTPKELSEMPLEELCHLIEVSSRKRFRMVKAQELQELARNSFGFAMAGDVFSTMIRLYAKHLVFLKQQVQEMDRKIAEIMDTLDTPITTITGIGPTLGAYILSEIGDINRFSSSAKLAAYAGIDPTMRQSGEYNGVRNRMSKRGSPYLRHAIWLATSSAVLHDPALKLYFQKKRDEGKPYMASVGHACRKMVSIIYAVMRDNKAYTPYIPNEISA

SEQ ID NO: 69387 - protein, 412 aa, unidentified
MQRMTDVTATVHAGEPAWTVGIDLGRRASHEAVLRAHGRADRRLRFTHSRAGIDGFVGELAELDGRVLVVIEPTATRWQALAELLCGEGLEVRQVHAATVAKLRGALDVTGAKSDRVDARTLAGAAGYSHLVRPDEPAAACAHALCLERLRVRRERRRLRGAVKICLDTIWPEFLQTFRGGERGITARAVIAVTGGDPARASRLGAIELERRVRAAAPGRHIGHTKIKQLIEETSRPVGYRAARAAYAARLKRLMQRRALVEDQLQTLEEELLRLYPQLPGAERLNSLPGLRELDRALLLAAAGDVRRLRSARALGKLGGCAPIARDSGNSTPKRKISERCRYQLRDAAFQAVRRLIRACPAFKALYTNLRQRLTGTQVVIACANRMLRVIWRMVNNDIDYNPAKVAPALNR

SEQ ID NO: 69388 - protein, 342 aa, unidentified
MKDTMIGVDLAKSVFQLHATSLTGELKFRKKLSRQGFVRFMEEHSPAVVVMEACGGANFWSREMVRLGHDVRLIAPQYVQPFVKRQKNDAADAEAIVIAAQRPEMRFVEPKTEEQQARAVVFRTRERLIFQRTELINVVRSILYEHGLTFPTGFEQIGRIETALRDPAIELLSIVRAECLDLIQQIVEKTNRVNAKTQMAKDLARDAETARRLQTMPGLGPITALAIETFAPPMETFKCGRSFASWLGLVPRQHSSGGKARLGRISKAGQADIRRLLITGAMSRLNWLGRKRIQPGSWLAKMLDRKPRLLVAIALANKMARAIWAMLTKGEDYRDLAHAAVT

SEQ ID NO: 69389 - protein, 289 aa, unidentified
MHYLGIDVGKKSSAFYVTNDAGCVAKGVIPTSAKSASDLVKELNTLQEGVEVAIEAGNTTFELARAMEAAGATVFVIHPRDNAIIALSRKKTDGIDAKTLADQVRRKLLPNQMVHVPSVAIEDLRHLVGTREALVTKRVATTNQVLHILSRYSRFPAKRAFKTAIAWTRLAENLDDLRTADQVIVGGHARQALLLCHQIRELERAIEQRVSQSFADEAELLRSIPGCGPVVTSSIIAWCHPITRFGSARHFASYAGLTPSVRQSGARLVNGGTSRSGNRRLPQRGRGGE

SEQ ID NO: 69390 - protein, 347 aa, unidentified
MAIVGGFDIHRRQVTFDYLDTVTGQVRRGRISPACRETLRHWLQRFVGRQDVTFAVEGCTGWQFVVEELQRAGITALLAEPAETAHLRGPKRHAKTDKTDSRHLRMLVADGRVPLSWIPPRQVRELRALLQLYRDLAEEHTAWAQRIHATLFHQGVPSLAGRLSDPQARARLADGAGMGLSPAGAQAVAVALRRIDDLEAELGPVHAQITAFARRQAGCKALAGELFGVGPLVAAVVWAFLGDARRFSSSAQAVRHAGLDITVYSSDGKRTPGHLSHQGPPILRWALFEAGHQGSRAASPGHRYYAGVAGRIDANRAALPVARKLARRSHHILRRLGDQACTPVPGW

SEQ ID NO: 69391 - protein, 265 aa, unidentified
MSLPNQLCVGIDVSKATLDIAASSDFAQFTAGNNADGFDAIIAELRKHSVALVLMEATGGLETAVACALQAEGFSVAVVNPRQARDFARAMGYLAKTDRIDARVPAQMAGVINQHPERKRFIRELPDTERRALAAMMVRRRQLVTMWVAGRNRLHPDHPQSRENIDIIINALEDEIARVDENMNNHIRTYFKELAERLSSIKGVGPMTTAALLAEVPEPGHLSRREISALVGVAPTNRDSGTMRGRRTIFGPNSVIYGRACRDQI

SEQ ID NO: 69392 - protein, 481 aa, unidentified
MSKPTQHSKKPGEKKTAAGQGKRSRKRKGMCLEDRPILEPNAAGIDIGAREIFVAVPPDRDADPVRVFSTFTEDLEEMAKWLVSCGVTTAAMESTGVYWIPAYDVLEQHGVKPCLVDAHGMKNVPGRRTDWHECQWIQFLHSVGLLRAAFRPDGEVCTVRSLMRHRSDLVQMTNQHIQHIHKALTQMNVQIHHVIDDITGVTGLAIVDAIVDGQRNPLQLAKLRDPRIKASEETIVKSLQGTWRPEHLFTLKQSRQMYRHYQDQIAACDEEIEKLLVAFQPRVDPAEKPLPPDRKKRKRGRQKKNAKTKQGFDLRTESYKIFGVDLTQIPGLMAMVLTLFSEVGRDMSRWKTAGQFVSWLALCPDNDITGGRVAWRGMRRVHNRAGELFRMAAYSLHHDKSPLGDYLRRMKSKLGPTGATTATAHKIAIIFYTMVKKQVEYDATLWAERDTQREKRFEAKLKRQAQQLGYKLVPIEEKPAA

SEQ ID NO: 69393 - protein, 368 aa, unidentified
MIQDTIVVGLDVHKTSIAVAVADGGGGEVRSLGTIPHTPEAVRKLVVRLGPASRMVCAYEAGPCGYAVYRQLTRLGVRCIVVAPSLVPAKPGERVKTDRRDATKLARLLRSGELTPIWVPDEEHEALRDLTRAREAAQADLLRARHRVIKLLLRLSIVTPSGIRVWGTKHRAWLQTIALPHPSGQIVLREYLLALDQAQERVQRLEREVALLTSTGRHAALILALQAMRGIGLVTAATLVAELGDLRRFRTPRQLMAYAGLVPREYSSGARQYRGRITKTGNSHVRHTVVQAAWHYRHAPGVWRNLRRRQVGQTEGVKALAWKGQDRLHRRYRRLVGRGKPPQKAAIAVGRELLGFVWAIGQHVTRAG

SEQ ID NO: 69394 - protein, 441 aa, unidentified
MSNRRTLTRGDRRRNDKLARLRSIVRPDLAIVGIDLASAKQAAVVVDHDSMVLGRRMFLGDPWVIDEILDWAAPIAVDAGFTGVVVGCEPTGHRWKAILDRCRARGVEVVCVNPMLVHRGREEEDFTRDRSDFKDSTIIARRVSDRHCFVPYALEGHWCRLRHLGARRDDQLVAAGAARQQLRDLLECVWPAALATAADPLDSITWRAAMAVSCDPAEITAMGFDTFAASVTAELDRWGGQRRNLRILRAIWAAAAEPGGVERERPAAVERARDAIRDWRRALDELADVEARMIEVLDALELTDHVTTIDGLSAVGAAAILAEAGDPARFDCARTWVKHAGLCPRANESGTFAGQTKTSRRGRPGLRTAAWRAVWGALHHNPVYAARYTHLRTRTDNPLRDGQARAAIAAALLRQLFVVVTRRVAWDPAIAAGREVTPLAA

SEQ ID NO: 69395 - protein, 332 aa, unidentified
MNTNPQGGVANRDQRPNAGIDVSKAHLDVHWQNTSLRVANDAAGWNELVAKLLAAKIDLVVLEATGGYERGILCCLHEAQLAVARVNPRQARDFAKSMGVLAKTDAVDARVLRDFADVLARHDQRAKYIGAPKEASRHDLAELMTRRRQLVDMIVAEGNRLQLAGKSATRSIQSVLKTLNKQLQSIDQDIDQHMKKHFADQHKLLDSVKGVGPVTILTLTAALPELGSLDRRQISKLVGVAPLADDSGKRSGKRRTWGGRADVRAVLYMAALVAIRYNAAIKVFHRRLIAAGKPKKVAIVACMRKLLTIINAMVRDSAPWDADKHLQTPVEA

SEQ ID NO: 69396 - protein, 371 aa, unidentified
MGWTAPYGIECARMRLLQSQTREPSVNQIIRIGMDTSKHIFQLHGVDAAERPVLRRKLRRSEVLAFFAKLPPTVIGMEACGAAHYWARELRKLGHEVKLMAPQHVKAYVKRNKNDGRDAEGLCEAMSRPTMQFVPVKTEEQQAALMLAGVRQQLIARRTQLSNAIRGYAAEFGLTAAKGLDKIEPLLARIAQDETVPALARELLAIQGQDYAQLQIELKAIEVKLMAWHRANACSRRLAQIPGVGPIGATALVMKTPDPRAFPSGRHFAAWLGLTPKDHSTAGKTRLGKITRAGDEVLRSLLVAGATAVIQQVRNGRGRPSAWLLALLKRKPPKLAAVALANKIARIAWKLMTTGESYDGARMPGAQAFAA

SEQ ID NO: 69397 - protein, 366 aa, unidentified
MKKISTVRVNGNMIFKGHKLTIGVDLGDRWSCYCVLDEAGEILLEQKVATTPEAMKQIFEKIPRGLIAMETGTHSPWVSRLLKELGHAVLVAHAQKVQLITKSNRKDDRHDARTLARLARIDPQLLGPVRHRSAKAQIHLTVIRARAELVSARTGLVNAARGLAKSYGERLRKCGTQQVSRELAAELSVELREVLEPLLKEIESLNERIKEYDVRMEQIARESYPQVELLKQVKGVGTQIALTYVLTLEDPQRFPKSHEVGCFLGLRPGRRDSGESHPQMHISKEGDPYLRTMLVQGAHYILGPFGEDSDLRRWGLKLAARGGKSAKKRAVVAVARKLAVLLHRLWVSGEVYEPLRNSQKAMRAAA

SEQ ID NO: 69398 - protein, 377 aa, unidentified
MKRIKFVGLDVHAETISVAVAEQGGEIRSLGVIANREESIRKLVKKLGPVEELRFCYEAGPTGYALYWQLTGMGAKCEVVAPTLVPVKAGDRVKTDRRDALKLARNYRAGELTPVWVPDAAHEALRDLVRAREAAKKDELRARHRLSKFLLRHGRRPPTGVKAWTIKYLEWVTREVHFEQLAQEATLLDYLHEVEHGAARIARLDGVITEAAKSAPPQMRAVIEALQALRGIAQVSAVTVVAELGELSRFSKAKQLMGYGGIVPSEDSSGERLRRGNITKTGNAHLRRVVVEAAWAYRHRPAMGAKLRKRQEKVSEEVKQIAWKAQHRLHERYRKLLAKGKNKGVVMTAVGRELLGFIWAIGIQVETAQKESLQQAA

SEQ ID NO: 69399 - protein, 369 aa, unidentified
MEKDTIYVALDDSKRKLVVAILQAGATEPEAREIPKDPLHIQRLFRRLQREGPVQACYEAGVSGYDLYRQITACGVTCQVIAPALTPRRPGQRIKTDRRDARKLVRLFRAGELTPIHVPDEAEEAARDLVRCREAVRRDVVRWRHRLLKLLDRHGRLWVTEKNWTQRHWTWIRAQRFALPALQRAFEATVFALEQALARQAELDREIEALADTAPYRDPVGWLRCFRGIGTLSAMVLLAEIVDFQRFRRPRELMAYLGLVPSEYSSGETQRRGGLTKAGNTHARRVLVEAAWHYRHRPAVGRALASRSQAQPEEVVGQAWRAQQRLHRRYRHLVGHGKRPPVAVAAIARELVGFLWAAMTRRETRGQVA

SEQ ID NO: 69400 - protein, 355 aa, unidentified
MDSIKYIGLDVHQSTISVAVLDADGKLVMQSVIATHASTILDFLQGLRGTLHVTFEEGTHSAWLYDLLVRRVTKLVVCNPRKNALLKAGNKSDTIDARKLAELLRAGLLSPVYHGQNSTAAVKHLGRSYAALTEDTTRIMGRLKALYRSQAIACAGQKPYGSRHREEWLAQLTESGLQRRARRLYQQLDLLQELRREARHDLILECRKHSETKLLRTVPWLGPIRVALLIGRVQTPHRFRSKRQFWAYCGLALETRSSADYKMVNGQLERCKKPVFIRGLNLNHNHDLKNLFKSAATTASGSSGPFRPFYENLLGKGMKPELARLTLARKIAAITLHVWKKGEPFDAEYLKSQAA

SEQ ID NO: 69401 - protein, 352 aa, unidentified
MLTVGVDAHKRVNMAVAIDAAGREVARWRGPNSVEGWQQLAAWAAARDAEVRWGIEGAWNYGRGLAQRLVEAGATVYEVNARWTAAGRRRARTPGKSDGLDARAVALVVWREAGTLPPVAADDETGVLDLLVAERDGVVIETTRLRNQLHQLLLQLDPDYRMRIPSRTTQKGLRALVAYATGDARPLQAQRAAAVRRLALRLQLLVGQARELAAQIRALAATRYAPLATICGVDLLTAGALAGLLGPGRRFASDAQLAAYAGVAPLEASSAERVRHRLNRGGNRQLNALLYRIALTQARCSPAARAYLARRVSEGKTKREALRARKRFIVRAVWRRWQDCLATPAAPAALAA

SEQ ID NO: 69402 - protein, 346 aa, unidentified
MKIIGCDFHPSYQQIAVFDTTTGEVMETKLMHGDGEAERFYRELEAPALVGMESVGNSLWFEQLVERLGHPLWIGDAAQIRASYVRKQKTDKRDAGHILKLLLENRFPQIWVPSHQQRDQRQLLIHRHKLVGMRTRIKTELQHVALNQGMQKKRTLWSKGGMSDLKKLSLEGWTSRRRADLLSLLSMLEAQVSELDQAVEEAAKRDPQAQLLMTQPGVGPNTALAFVTTIGDVARFQRGKQVASYLGLIPSERSSGSKRRLGAISKQGNVFLRTLLVEAAQSAVRHDEDFKKEYRHHCHHKPKGAVKVAVARKLAVRLYWMLRTQTPYPQVVHNEGSPSHFVVSES

SEQ ID NO: 69403 - protein, 493 aa, unidentified
MADGLSSRLPRRARGRPFENGRSGNTAGRETGSRNNGDHRRPAALLDGESEALSRETVEFALIGDPTLPPTHPAADRERPHGTRSYGASGEAKAQSPLQNPSTECPMPQPNDLSRSVAALDQNSTLIAVIEMSQASWLVGAIVPGVERHPLKKLTPDADELLRLVQRWRAEATRAGRTVTRIAVAYEAGRDGFWLAGWLRGRGIEACVIHASSVAVAREHRRAKTDRLDVELLKRAFLGWLRGERDHCKMAAIPTLEAEDAGRPSREREALVGERTRLVNRMKSTLARLGIGNFKPHLRKAAERLAGLRTPERAALPANTLAELRRDIARLQLVKEQIAQIERTRLERLRQPPADAPHAMLVLLARVYGVGIETADMLVHEVLVRNLRDRRAVARYGGITGAPDESGARRREKGLARAGNARVRRGMLQLAWRFLRFQKESALVKWFEARTADGRMATRKTMILALARKLLIALWRLATTGEVPEGLVLRPAA

SEQ ID NO: 69404 - protein, 428 aa, unidentified
MSENSTTHPEPEFVAFVGIDWADQKHAWCSQRAGATQREHGEVEHTPEMVEVWVSQLAQRFGPGPIAVAVEQRKGALVYMLSKYECLHLFPVPSTMSASMRKSLYPSGSKDDPRDAELLLDLLLQHRNKLRRLMPDDEVTRRIQNLVEERRNLVDEKTTQLNRLTGYLKVYFPQMLEWFEKLDTKLVCDLLERWPSLEELQKVPPAELRKFFGQHRGRHQELTERRLEGIGQAMPAIRDRAVLEAKRAMVQVSAQLLRILLEGIANLDSKIEEAASAHPDFFIFESLPGAGSALAPRLLAAFGSQRDRYGSAEEVQTHSGIAPVMEKSGKKKWVHFRWACPKFLRQSFHEWAGHSISQSTWARAYYQQQRGRGKDHHAAVRALAFKWIRILFRCWQDRAAYDENKYLAALARRGSPLSSVLTVTAATL

SEQ ID NO: 69405 - protein, 370 aa, unidentified
MKKNILYVGLDVHKNSIDVAIAESGIEGEVRSYGKIDSSMEALNKLIRKIRFKETKLQFVYEAGPCGYEIYRHLISKGHACSVVAPSMVPRRSGDRIKTDRRDAINLVRLFRAGELTCIYIPTEEDEAIRDLTRCRDDMKRLQRKVRQRLLAFLLRHGFRYRGKKNWTQAHMNWLAGVKMPHPAQQIVLQEYIDAAGECTNRLQRITGQIQAMLCEWSRAPFVRAYQALRGVSLIVATTVVAEIGDMSRFKNPKELMAYLGLVPSEHSSGNSVHRGAITRTGNGHVRRVLIEAAWTYKTQARKTLPILKRQAGLSKSICDISWKAQTRLCARYRRLYAKGKSRQATITAIARELSGFIWAIDQEVQQAIA

SEQ ID NO: 69406 - protein, 409 aa, unidentified
MEGLIERCAGVDVHQATMVVTVRVPDGHGGRRIETHTFGAMTVDLLALRDWLQAFGVTHVAMESTGVYWKPLYYLLEEGVTVLLVNMQHLKQVPGRKSDVRDSEWLAQLLECGLLRGSVVPPAPIRDLRDLTRYRKKQIEDRTQEVNRLHRVLEEAGLKLATVMSDVMGRSGRLMLDALLGGTTDPTVVAELARGRLRAKIPALRLALQSQFRAHHAFLIGQILAKVDFLEEVIATLTEEVDRHVRPFEPVIERLMTIPGVQRRNAVTLFAETGGDMQRFATAGHLCSWGAMCPGQNESAGKRRSGKTRAGNRFLRGALIESGLATTRAKETALRARYLRVKRHRGHKKAVVAVGHQILEIAYYIMRDATTYQELGPNYFARCDRQRTVRRSVRQLEALGYRVTIEEAA

SEQ ID NO: 69407 - protein, 384 aa, unidentified
MSKTNPAAPGEQVNAKVKETLCLSFELSRKKWKLGFSDGKAAGARIVTIAAQDWGALNQEVERARVRFRLEKAVRVISCYEIGREGFWLHRALVSRGIENIAIDAASIEVNRRHRRAKTDRMDAEKLVQQLIRYVGGERGVWSVVRIPDEQAEDARQLHRDMGVLIRERTQHRNRIQSLLFAQGIDMKINARFGQQLEQLRVWDGRPLPEGLKQRLSREYHRLQAVESDLRQLRKQQEEKLKTERTPAMKKVTRLQQLRGIGTRSSWIFVMELFGWRQFKNRRELAAAIGITPTPYQSGESDREQGISRNGNRRVRALAIEIAWSWLRFQPGSELSRWWRKRFGSGGTRMRKIGIVAMARRLVIDLWRYLEHGTVPAGARLKTC

SEQ ID NO: 69408 - protein, 370 aa, unidentified
MGKSLLYVGLDVHKMSVDVAIAEAGPAGEVRFYGRIGGDLEALDKVIRKLQAQGAELRFAYEAGPCGYQVYRHLTARGLECLVAAPALIPRRPGDRLKNDRRDALALARLLRAGELTPIKVPDEDDEAMRDLTRAREDAICVERRARQRTVAFLLRHGRVYQGKTTWGRGHWAWLLQQVMDHPAQQIVLQEYLDAVREASARVLRLTAQIRDLFPQWRQAPFVAAYQALRGVSLIVAATVMAEVGDLDRFNNPKELMAYLGLVPSEHSSGASVRRGRITKTGNSHARRVLVEAAWAYRMQARVTRHLLKRQEGLPERVRQLAWKAQLRLCTRYRRLLARGKARQTIVIALARELAAFLWAISRAVAQATA

SEQ ID NO: 69409 - protein, 407 aa, unidentified
MDLLKTVFGIDVSSRKSNVCIMVNGQKVNDYAISNDMVGFNRLLGDLKQVTKPQIIFEATGVYSRRLQAFLDMHELRYVMMNPLEAKRKTKDDLHQNKTDKLDALYLAKLQSEHPQRLAYVQSKEYQELMANNRIYEQASHDLISNKNRLHKAVQLTFPEIEHLLANPRGKNYWSIALRFPHPDIVLETKEADIIDFLKGLSGIGKKRANDITQSLIRLAKVACPAVKKNSAHVRGLKMAINNILSAEEECQTALQEMAKLAPKRDLEILTSIPGIGENTALRIISELGDIRRFNNPSQLNAFVGVDPQVYESGNLTAHLSISKRGTAIGRKVLYLAINQIQSAKKAGNPCHIADYYEKRKRSSETASHKKAAIASIHKLLRTIFALIKNDQLYSYDVAKHNQRLLS

SEQ ID NO: 69410 - protein, 430 aa, unidentified
MTKPQLTPTQGILVAIDIGKTRNEVLIEIPGHARRRRLTVLNTRAEYDRLIDLLSGLGQPVTCAFEATGNYHRPLAWRLLQAGFTVRLISSLALARTREALHNGWDKNDPKDAQVTLHMLRIGATQHYHDPLAAGLNDIQEVSKTHEAISKAKTEVLHRILTHHVPLYFPEIDRFRHNSRSDWFFAFLDRFPTPGSITALSKEAFIAAAWGVVGRKVAKERLLGDIYETARASIGLPIPIEAPAVRLFRLVIAEARSLIQQRNTLEAMAVELLHESPDYKLLCRIPGVGPIIALTILAEAGDLRRFGHHRQFLKFCGLDLATHQSGAFRGQTKLSKYGNARLRRALWLAGQVAIRQKENSFRDKFERYIARDRHNADLRRKALTAITAKMARVVHAIIKSGADYRPFVERPVPGGRTSLSMSREGATATL

SEQ ID NO: 69411 - protein, 468 aa, unidentified
MPSHPTHKKRHLDDLTCVHPNAAGLDIGSAEIVVAVPADRDPQAVRVFQTFTPDLYALLAWLLACGIDTVAMESTGVFWIPIYELLEQHGITPYLVNARHVRTVPGRKSDWNDAQWLQKLHALGLLQASFRPDAEIRTLRTLVRYRAELIERRAPHINHMIQALKHMNIQLNLVLTDITGVTGLAMLRAIIAGERDPQRLAQFRQAGCKHSEAEIAKALTGSWDDAQLFVLAQAVDLFDYYTAKIAECDTKLEQQYQAMQSRHEKDAALPDLPPAKPDSKSKNALTFNARAQIARVIGVDLVAVMGISAITAQTIISEIGTDMERFPSVKHFCSWLGLAPHNDISGGKVLRSRTMKVRNRANQAFRQAAQSVAQSDSSFGAYYRAMRARLGPKQAIVATAHKIARTVYYLLKTGEPYREESAAEYDTKRQERELKHLARRAQKLGYTLTAVPATTPESHPEPGGEGSF

SEQ ID NO: 69412 - protein, 413 aa, unidentified
MGAGVVIGMDPHKRSATIEVMDGDETILGSGRYATDVAGYQAMLKFGKQFPERTWAIEGCNGIGKHIAERLLADGELVVDVPPKLSARTRVFATGQGRKTDATDAHSVALVGTRMSGLRPVVNDEQLAVLRLLVDRRRSLGDDHTRMISQLHRVLLELIPGGAKRYLSAAQAKVLLGKVRPRDAAGKTRRRVAAELIADLERIYERTKAADKELKELLNATGTTVTQLHGIGPSGAARLLVDVGDITRFPTRAHFASWTGTAPIDASSGDHVRHRLSRGGNRQINRTLHIMAVVQLRSPTEGRAYYDRKKAAGKTSMEAMRCLKRRLSDVVYRQLLADAIRPTRTGPGGHSGATLDSSAVDSNPDIDASKKSLPGPANHHATRAKSSRPDRSPARSRRPETAPARSRRQARSA

SEQ ID NO: 69413 - protein, 319 aa, unidentified
MQTKNAVVYAGVDVAKATLQLHLQGRQSEFCNTSKGLRQLRTQLQKVAGAHIVCEATGGYERALVRVLHQEQIPVSVTNPAQVRAAARAQGQRAKTDRIDAQMLTDYGQRYEPKATPPPSATQDQLVALTQWLKQLIHGQALAKTQAEHHEHPFVRRQHAKLMAHLRSQIGAVEKQIEALVQQDAALQQRVKCLDEIKGVGPRTAWMVLAHLPELGQLNRQQVGALAGLAPWTRESGTMKGMSRIGGGRPEVRLALYMAALSAVRSNPVLRPLYQRLRAKGKLPKVALTAAMRRLLIYMNHEIKDLAAKAQKTDNSEKT

SEQ ID NO: 69414 - protein, 405 aa, unidentified
MNAVGIDVSKGKSTVTIRRPGDIVLMPPCDIPHTQSAINGLINEIKALDGETKVCMEHTGRYYEPVATWLTNAGIFVSAVNPILIRDFGDDSLRTPKTDKADSKKIARYTLDRWTKLKQYGNMDKTRNQLKTMNRQFGFYMAQKTAMKNNLISILDQTYPGANDFFDSPARSDGSQKWVDFVHTYWHVECVRGKSLNAFTEHYQNWCRRKGYNFSAEKATKVYCLSSDLIAVFPKDDNTKMLVRQAVAMLNVSSETVESLRQEMNKLASTLPEYPVVMAMNGVGTSLGPQLIAEIGDVTRFTHREALTAFAGVDPGKKDSGQHIQKSVRTSKKGSPSLRKALFQIMDSLIKRSPADDPVYAFMDKKRKQGKPYYVYMTAGANKFLRIYYGRVKEYLSSLPEAEEL

SEQ ID NO: 69415 - protein, 341 aa, unidentified
MKVTYQTCCGVDVHKSFLVATIVKTTGGVEPSYQKKRFSTFNNSILEFKHWLLDNDCLDVCMESTGKYWVPVFNLLEDEINVVIANPKWVKAVKGNKDDTKGSKWIGDLFRLGLVKGSYIPCKKVRILREYTRYRYKLVSYRSSEKNRYQNALTVCNVALDSVVSDIFGKSSTSIIDYLLEQSGTSINHEEIASKLLRSLKSKEDAVIHSIEGYQMTDAQKYRMRLVRAHMDYITAEINDVDKMIENMISSNPDFENAVQFLCTIPGVKRDSAITIISEIGIDMSQFSSSKRLCCWAGLTPGSNESAGKKKSVRITRAGIYLKPALVQCAHAAVKSDKSEI

SEQ ID NO: 69416 - protein, 473 aa, unidentified
MIKSVGIDLGGIGEHKVRCLDENAQMCDGFGFDTSRVGLTKLEERIFSDGSNPVIVFEPTGLAWLLVAVYLKSRHPDSRLVRVQAQKVVALRKYLNRSSKSDKIDSLTLAKMPFIDPEKLEEIYLPPGKIYAIQRLARQRKRLESEIAGHKKRIGSIVDGHFPGIRSAFSDPWSAQARAFLRSRLNPLTVIRAGEKALCAFLTKARKHCRIEASVESHGIYLACREAAALYKASSSVGTIDDDFFSSLQDEVSRELRIMEMEEAESAAIANRIEGLYLEIHPSDNLRTIPGVGSITAPVFLATIGNPARFRSQSSFANYCGVVPGANQSSDSEAKGLRMTKAGPPIMRWALFQASQIARAHDPQLACVYYREMVHNGKNHMQAMGAVMSHMSARVLAVLREDKPYEIRDINGSIVSREEAKQIILAKYQVPEEIRRERRHRKTPGSPNLQKKLREMLVPRVHEAAAAPQPAVT

SEQ ID NO: 69417 - protein, 342 aa, unidentified
MQIASVGIDLGKTTCHLVALDNRSQVVIRKKFSRKQLLAYTANLQPSLIGLEACSGAHFLGATLRRQGHDARLIPAQFVKPFLKSNKNDFLDAEAIAEAVARQNMRFVPIKTDDQLDLQALHRVRDRLVQRRTAVINQIRGFLLERGITFGRGPAQLRNRMAEVLEDADNALTPRMRILLERLWVEWKQLESDIAVAAEEIEQICQDDAGCRRLCEIPGVGPLVATATIAAVGNGAAFRKGREFAAWLGLVPRQHSTGGKTRLLGISKRGNLYLRRMFIHGARAVVFRVRHDTGGFGQWVQQLSTRATPNKVIVAVANKLARIASAVLFRGEDYRHPALAPA

SEQ ID NO: 69418 - protein, 391 aa, unidentified
MIYVGIDVAKDKHDCFITNSDGEVLFKSFTIPNNREGFKTLFQKVQSVSDDLTKVKVGLEATGHYSYNLLGFLLDKGLPTYVINPLHTNLYRKSLSLRKTKTDKVDAHTIASMIMSDVNLKSYSDTSYHNEELKSLTRYRFDKIKERAKLKSSVSRLVCILFPELEKLVPQLHMASVYALLSEFPSAHAVASAHLTRLANLLSESSHGRYGKDTAVIFREAARNSIGSNMPAKSLELKHTIKLIRELTSEIDEIENEIKIIMDEIHSPILSIPGINYRMGAMILAEIGDFSRFDSPDKILAYAGMSPSTYQSGQLDNCYSHMEKRGSRYLRYALYNATKYVCHWDESFGAYLAKKRTEGKHYNVALSHAAKKLVRTIYAMEKSGRVYNKAA

SEQ ID NO: 69419 - protein, 348 aa, unidentified
MTLFAGLDVSVRETSVCVVDDAGKVLVERKVATEPDDLIELLRSISSEYGLIGLEAGPLSQWLVNGLAEAGLPVVCVETRHMKALLTAQQINKSDRNDARGIAQMMRVGLFKPVHVKTVASQERRMLLTSRKLLQRKLLDVEADLRGTLRNFGLKVGVVSVGGFEARIRELVEGFHRLAAIVEPMLAVRRVLREQFAVLHRMLLVLVRHDPVCRRLMTAPGVGPVVALTYRAAVDQPQRFLHSKAVGASAGLTPKRIQSGESDYDVGISKTGDVTLRTMLHEAAQSLLTHSGARWSWLKAWGLRVAQRRGMRRATVAVARRLAVILHRMWVDETDFRWSNKTPAAMAA

SEQ ID NO: 69420 - protein, 407 aa, unidentified
MSSIENSHQNPPPACQAQPAPEAWIGLDWGNTQHAFALQDRSGHTERGPLVHTSENLHQWPRQIGQRYGRRPVALAIEASRGAVIHALLNYAWLTMYPINPITSARYRVAFTPSGAKDDQPEADVLLELVRDHAATLRPLEVQDPQTVKLTELVQVRRDIVDRRTQALNQATSLLKTYYPQALELAGDLNTDMALDFLSRWPDLISLQAAKPATLKRCYYQHHVRSTELVAQRWEFIKKAVALTSEESRVSVAVQQMSHLVDQLRAFRKHIDIFDQEIQTAFRAHPEAGLYRDLPGAGKQLAPRLCAAFGTLRTTYPDPASLQKNAGVAPVRVKSGHQLWTHWRWQAPKFLRQPFVEGAGQTVVYCPWAAHYYQRMKKKGKKHAAILRPLAFKWIRILWKCWKDRKP

SEQ ID NO: 69421 - protein, 343 aa, unidentified
MQTVTRIGLDIAKSVFQVHGTDVAGQVVIRRQLKRRYVLAFFQKLPPCLVGMEACASSHHWSRELQVLGHTVRLMPPAYVKPYVKRQKNDAADAEAICEAVSRANMRFVPTKTPEQQSGLVLHRTRHLLIRQQTSVINAIRAHLAEFGIVAPVGRKGVEELLRVIADANDKRLPEVVRGCLAALGSQLLSLKKQILDFDRMIMAWHRSNQTSKRLNCIPGVGPLLATALVASVGDPKTFRSGRNFSAWIGLVPKQHSSGGRDRLGSISKQGDRYLRGLFVAGALAVIRYAKIHGTKHRPWLTALLARRPTKVAAIALANKLARMAWAMMATGARYNYPASLRP

SEQ ID NO: 69422 - protein, 357 aa, unidentified
MATQVIFKQGGFLMVTTIGIDPHKATHTAVAINGSEMVLGELTVPADRYQTEKLIDWAGELDGGGRVWAVEAAGGLGYLLSQQLIAHGEHVVDVPPVLASRVRLLGSGRSDKNDPNDARSVAIAALRQPGLAVVRPEDHTQVLRMLAKRHLELTGLRTQAVSRLHAVLMLLRPGGMGQRLSADKASRMLQGLRNLDVIGEQRRIMAKAHLGDIRRLDREIKANKTLIRTAVAATDTTVTGIYGVGPIVAAFLIGYTADIDRFASADHYAAYNGTAPVEVSSGGKKRHRLSMRGNRVLNHAIHMAAVTQIRHDTPGRVYYDKKQAEGKTRKEALRALKRRVSDVVYQRLVADQQQTTS

SEQ ID NO: 69423 - protein, 343 aa, unidentified
MGKFAALDVSQEETAICVVGQDGGLMAETKVPTCPDAIAGWLAERASGLERVGMETGPLAVWLWNALTERQIPIVCIDARHANGVLKMMPNKTDRHDARGLAQIVRTGWFKTAQIKSHDAYVNRAMLTAREALVGMRVRLENEIRGLLKTFGIMFGKRVGGFRRRAEEILEGELAVAPELVSVFEALMQARRDILARIATLDSRIRAVAKRHATVRLLMTAPGVGPITAMAVVAAFDDASRFRRSSSAGAYLGLTPRRYESGEISRNGRVSKRGDRFTRKCLFEAANAIYCRNLGGPRLRDWAKAIAERTGPRKAKVALARKLAVTLHAMWRTNTPFQEAAMT

SEQ ID NO: 69424 - protein, 312 aa, unidentified
MDATVIVGIDVSKDRLDVAVRPGGEAFFVRRDGDGIAALIERLMPLDPVAIAVEATGGFETVVAAGLAGAGLPVVVLNPAQVRAFANALGKRAKTDPIDAAVIAHFVEATKPAIRPLPDEDTQLLADLVSRRRQIVAMIGAERQRQKRAPARIAKSIVRLVKALEKELASLDHDIDDAVRGSPAWRDKEDLLASVPGIGKTIARTLIAELPELGSLDRRQVAALVGLAPWTRQSGQWRGKSFIGGGRAAVRAALFMGAMVAARHNPALKAFRDKLVAAGKPKLVAIIATARKLVTILNAVIRDQQPWREQKA

SEQ ID NO: 69425 - protein, 377 aa, unidentified
MGVFRKEWPASDGDPRQAAGDRIEPTLSSLWLPRSVIVVSAFIGPGWLPEQLGSLYKAGSKKMTQTSITTAGIDTSKAKLDIAVHDRTERWQVANALPGWRTLVTNLAQAGVTRVGIEATGGYERGVVEHLRAAGFTVLVLQPMQVKAFGRVHLRRAKNDVLDAVLIAACAAALDQPRIAPDPRLAELAQYLTFLEQLEEDIARFKTRLEHIEDPELRRLVNSDIKQLKARRVTQIRNIAKRLRAHDDLAKRFELVLSIPGIGERTALALLIRMPELGRISREEAAALAGLAPFDNESGKYKGQRHIAGGRGRLRRSLFAAALPAAFRWNKALIDFYARLIAKGKAHNAALIACARKLLIYANTVVQRGTPWTENAA

SEQ ID NO: 69426 - protein, 355 aa, unidentified
MEGTKYIGMDVHKDSISIAVLNSSGKLVMESIIETKAITILEFVHGLRGSLHLTFEEGTWAAWLYDLLKPHVAKLVVCDPRRNGYLKQGSKSDRIDALKLAELLYSNLLRPVYHGEHGVRPLKELARSYLTITKDQARVMTRVKAVYRSWAIPCAGKQVYGQRHRLEWLGKIQEPGVRRRAEFYYAELDALRSLRLVVRSELLLESKKHNVSTLLSQIPSIGPIRAALLIALLQTPDRFRTKRQLWAYSGLAIETHDSAENQYVNGQLQRSKKQSSIRGLNPNHNPDLKNLFKSASAVAAVKTGPFQKFYAALIRKGIKPEMARLTLARKIAAITLIVWKRGVSFDARYLNPQTA

SEQ ID NO: 69427 - protein, 454 aa, unidentified
MRKPQVVPDEDHEVVYERVAAVDVAKASGVVCMRTPDPARPGRFVNRIWDDVPATRARIAELGRELLRCQVQMVTLESTSDYWRVWYYVLESVGLAVQLVSASQAKNLKGRPKTDRLDAQWLARLTQWGMLRPSLVPPAAIRRVRDFTRARTDLVRERTRCLQRLEKLLEDAMVKITSVAKDGLKAKSVVAMVAALIAGERDPRTIADLAKGPLRGKRDALAEALDGMFDSHHGVIAQMLLDQVAFLDQRITAMEDQAIAALAQVEESWGVDATGETGPGCGTGPDSQVLAAAYRLAEIPGISVWLAIVIIAEITLDMTLFPTAAHLVSWIGLCRSANQSGARHGKGKQKKGNSYARAAAGQAALGAAGTDTFLGERYRRIARRRGKAIAQVAVARSIMIIVWHLLSDPQARYRDLGPDWHARRTNRDKKIRTHIQGLQALGVTVAITDDDHAA

SEQ ID NO: 69428 - protein, 360 aa, unidentified
MNTVTWVGMDVHARSTHAAAINLLTGEVQRIRFGAGVEGPVAWLGELPGPVHACYEAGPTGFGLYRAAVAAGVRMDVIAPGKTPRGPSDRVKTDRKDAELLARLLIAGQLNAVTVPPAGVEAARELTRLHDACRRDLMTARHRISKMLLRHGRVYPKPTTWKADHRRWLAAQRFDESISELVYLDLLARVDMLTARKLQLREEIINRADDERWWPTVSRLRAFRAIDTLTALSIHLELGADWARFDRPHRLGAWLGLTPSLNQSGESSSSGSITKTGSTLARRLLIEAAWHYGPRPYIGPALRARQAAQPEHILAISNKAQRRLHRVYHQLKARGKPHGVVTVAVARELSCFLWAAATAD

SEQ ID NO: 69429 - protein, 384 aa, unidentified
MTTEWYGRLPSSAAALVHMSASCCAAARVSVRAPFSQDGGSEMNAVHTVVGVDVAKNVFQAYWVVAETGEIRNMQIKRAKFLEHFAGRPRCLIGMEACGGAHHWARELSKHGHDVVLLPAKAVGAFVAGNKSDAIDARAIWTAAQQGGIKRVAVKSEAQQAVLALHRMRQQLVKVRTAQSNALRGLLMEYGEVFRQGRASLARGIAAALERIEQRLPRVVVESLMELWQRVGQIDGQVKQIERRLKSLLAEDRNAQRVLQIPGVGMLTATAVSATMGQASAFKSGREFAAWLGLVPAHTGTGGKTRMLGISKRGDSYVRTLLIHGARSVFSSTKHPGPWLQKISQRRPLNVAVVALANKMARTIWALLAHGRTYQPDYVSRAST

SEQ ID NO: 69430 - protein, 316 aa, unidentified
MEVFKTRVAGVDVHKDILAITVVTGEPDVVPQVFQFSCGTFTEDLLKAGLKLKEMNVVDVAMESTGVYWKPIYNVWAPMGINITLGQAAHMKNAPGRKTDMNDSRWIAELHRFGLIKPSYIPEDVFQRMRLLSRHRTNLVDDLARVKNRVQRILEDGNIKFGSIVSNVFGKSGLQVLDQIADGVTDAGTLASFVTTKIKRKEESRKALTNCLTTEHCFVIKRLMTQFYEIEAHMREVENQLHDKVAPYRHLVDKLKEIPGIDEILAIGVLAEATDKMEKFDDERKFAAWAGVAAGNNESAGKKKDQSDDRGILTSH

SEQ ID NO: 69431 - protein, 373 aa, unidentified
MPRYSTAFGMDVHLRSTTVCALDAETGEAVTRRFRGNPWGEVAEWMSGFPGPSLAAYESGYLGFAPQRELSGLGVDCVVAAVSKVPRSAADFSSKNDRNDAARMAKAILSHDISPVWVPSPEIEGLRDLAGAHDAATARLAAAKQRLLAFLARRGYAYGGTTPAGNPRRYWTYGFLRWLDKVRPADDGGIRALAALRSEVEAAAETRDDLLAEYRAAVAAGPLSAEVEALQSIKGCGFALAAAFASEVGDFSRFRSGRQVTSYFGLAPKQRSSADSVRLGGISGAGNALVRRLAVEGSWSYVQASHQPKLMPKGSGVPLEVRMHGRKGSERLLRRREEMLARGMPQAKANAATAAELVRWLWALGAMCREATE

SEQ ID NO: 69432 - protein, 424 aa, unidentified
MTREMADYAALVGIDWADRKHDLCLQAAGSEQRERLVLEHRPEAIDEWACALRVRFSGQPVAICLEQHKGPLMAALSKYDHLVLYPINPLLVATRRRGLKPSGAKSDIADAEIILDLLTDNSAKLRPWHPDNARTRQLQALVEARRTLVENRVRTTNALTANLKLYFPQALECFDDLASGLACDFLTQWPSLGQAQRAREATLTTFFHQHGVRGEDLITGRIAALRAAMALTTDSGILVPALLRTKTLVAVLRAQLDGISDYDTAITKAFDAHPDAALFASFPGAGPTFAPRLLAAFGADRERFASARAIQEYAGVAPVTEASGKSHWVHWRYACPRFVRQSIVEWAGMSIRYSFWARTYYQELRERGKAHNAAVRALAFKWLRIVFRCWQDRKPYDEAKYLLSLQKRQSPLLQAAAKPLGQPA

SEQ ID NO: 69433 - protein, 391 aa, unidentified
MVCVGIDVAKDKHDCCILDSEGTTLVDCFTIPNNMDGFKSLLQTIQDCSQKSDKIKVGLEATGHYSYNILGFLLDNDLPVYVMNPLHTNLYRKSLSLRKTKTDRVDAKTIATMLLSDVDLKSYTDTAYHNEELKSLARYRFDKVQERAKLKQSVSRLVTILFPELEQLVSSIHGTSIYALLSEYPGAKQISEAHLTRLANILVKTSRGHYRKDKATHIRDAARTSIGSVMPAKSLELKHTIKLIQELTSEINEIEDAIRKIMDELKPPILSIPGMGFHSAAMILAEVGDFSNFNSPDKVLAYAGCSPSTYQSGKLTNCYAHMEKRGSRYLRYALYTATKYVCYWNPVFTEYLTKKQAEGKHYNVALSHATKKLVRLIYALQKSGKAYLAVT

SEQ ID NO: 69434 - protein, 349 aa, unidentified
MDFIKYSLGLDVSKDDVQACLVSIDLMQNVKICASRKFKNTVAGLETMVKWIEKNHRQKSVPLTICLEVTGVYHELFLYGLESADYFVSLIVPTYARRFMQSLGMHSKNDKIDAEGLARLGAERQLTRWQPGSIFYSSLRNLTRARQNFSEDKNIATNRLHAHLKLQRQSELVIKQMKSVIEAFEVKIKELEKAIAKLVKSNSEVLEKVDRVCEIFGVGLITVATLIAETFGFEAFENTRQLISYSGFDVIENQSGYHRGKTRISKRGNARIRRALYMPSLQAKKKASFAAIYERTLSRHHIKMKSLVAVQRKMLVTIFALWKSGEVYDPNYQSNKEEEKSTPALAGVQ

SEQ ID NO: 69435 - protein, 369 aa, unidentified
MEKIVKYIGLDVHKNSIVISIAEDGRDKDVNFYGAINNDMNQLHKFLRKQVSQGAELRCVYEAGPCGYNIYRSLIDKGIDCVVVAPSLIPKKSGDKIKTDRRDSQNLARLHRSGDLTAVYVPKLEDEALRDLVRARDDCVNALKRAKQQLGAFLLRHNICYSGKSKWSKAYFNWLADISMPHPAQQITLQEYIDIIQDGKNRIERISQQMRQLSDQSQLSHLNKSLQSLRGVSDIVSTVVVSELGDLTRFDSPVKLMAYLGLVPSAYDSGDKKKKGKITKTGNGHVRRALIEASQAYRLPARKSRAIAKRNEGLPKEVCKIAWQAQVRLCERYKRLVFKGKNANLVKTAIARELAGFMWAIAHAVPKAV

SEQ ID NO: 69436 - protein, 341 aa, unidentified
METITTIGLDLAKSVFQVHAISEEGAIVVRRALRRSQVLGFFRDLAPCLVGMEACASAHYWAREIAALGHSVRIMPPAYVKAYVKRNKTDAADAAAICEAVTRPTVRFVPVKTVEQQAAGMVIKTRDLLMRQRNQTINALRAHLAEHGIVASAGRAGIARLVTQIREENSLPATSRLALSELAEQIEVLTMRIERLDREIITAVRQDSDAKRLTSIPGVGPLIAATVRAVVPDITLFRTGRNFAAWIGLTPQAHSSGGKERLGSISKRGNQLLRVLLIVGATSIVKLAKRGLKLPRWIEAMMQRRPIKVVAVALANKIARTIWALLTKGGTYQAPLVMIKA

SEQ ID NO: 69437 - protein, 447 aa, unidentified
MKTEPEEIPDADHELIIERVAAIDVAKASGKVCLRLPRPGRPGHRVSRVWDVEATTAAVCELADHLVAGQIERVTVESTSDYWRIWYYLLEAAGLSVQLVNARDVKNVPGRPKSDKLDSVWLAKLTEKGLLRPSFVPPAPIRQLRDYTRLRVDLTRERSRYWQRLEKLLEDALIKVSAVASTLDTLSVRDMLEALIAGERDPRRLADLARGRMKTKRAALIEALTGRFDDHHGELARMLLDQIDALSGQINTLTIRIDQLLATIANEVPGHDDGDSGAGGQPSADLTVVQRLTEIPGIGPTGTQVILAEIGLDMSRFPTAAHLVSWAKLCPRTIQSGAIQRCGKSGKGNPYLKGALGEAAAAAAKTNTFLGERYRRIVKRRGKLKALVAVARSILVIIWNLLSDNHARFRDLGPDYHATRINTERKLRNHIAQLAALGYHVTVEPAA

SEQ ID NO: 69438 - protein, 382 aa, unidentified
MEVLYPRCAGLDVHAKTVVACVRIASGATVTYEHRTVSTNTRGLLELADWLTARAVTHVAMEATGVYWKPVWHVLEGHATLVLANAMHIRNIPGRKSDKNDATWISDLLALGLIRSSFVPPAPIQALRDLTRTRKQVVRETTRHTQRIQKTLEDANVKLTEVISDILGMSGRAILTALVAGETDPERLADLTSGRLKATRVELVEALRGQVTDHHRFILKLHLTQIAALEAAVADIEARIQEALVPFRAAVSLLTTMPGVSETAAAVIVAEVGTDMSMFPSAGHLLSWAGLCPRLDESAGKRRSTRTRHGAPWLKTTLVQSAWAASRKKQSYFHAQFLRLKSRRGPKKAILAVAASMLTDVYLHAARRCGIPRPRRPVLRAT

SEQ ID NO: 69439 - protein, 391 aa, unidentified
MSMYFVGIDISKYKHDCCIISAANQKVVSKVIIKNNKAGFNELLTIIHSLANPADIRIGFESTAHYALNLELFLENSLLTFMEVNPVLISEYKKSKTLRRTKTDSVDCESIARWLMTVEYKPHSKGFYHAYSLKSLTRLRDKLIRQRSFYLVKITNVLDHTFPEFKPFFNERLSKTARYLLENYGSAEKMAHMNSASYDKLRCASRGKFSIQQFLHLKELAANTVGVNNSIFDIELNSLLTLYNSLCKEIKNLEAEITRLIEEVHPHYMSIPGIGPISAAVIYAEYGDISNFSNPSQMLAFAGIEPGINDSGTESHGGRMVKHGSSQLRYVLLNACLPLIRFDLTFATYYAKKRAEGKKHRVAITHVAKKLIRVIYALERQDVDFNAQKIR

SEQ ID NO: 69440 - protein, 325 aa, unidentified
MHYLGIDVAKAKLDCCLLLELPSGKRKTKSFSNNDSGFAELVHWLDRQRVSASDTHAVMEGTGVYHERTAITLHDAGMKISIINPAQVRDFAKGLAIRSKTDGLDSLVLARYGALVQPTIWIPPTPQARALQALLSRVEAVHQDLIREQNRQEKADATDTPELIRQSLADSIMFLQTQLKKLQQDIDDHINRHSELRDDVALLVTIPGVGIKTSQHLLSVMHLHQFPNAERLAAYLGVIPIQRQSGSSVLGRPKLSKTGPSHIRAVLYMAAVVATKHNPHVKALYERLIASGKSKMSALGAAMRKLVHLCFGVIKNRQPYSKNYS

SEQ ID NO: 69441 - protein, 427 aa, unidentified
MSEKKSLELRVSVDVGSRRHSVAIGLPDGQVLEEFEITHRPEGFQEFFSRIEKHQKAQGCGVAVAMEGYNGYARPLDSLVRQRGYRLYNINNLKLARFKEIFPGAAKKDRIDARKGLELFQLRDHLPLAKKVLQEVTGTPQENEILKRLTRRRRRLVNERVRVVNNLQADLQAVCPGLLEITTEASNQWFLNFLLSADTLPQLARLRKPTLLKIRAVGRKYASLIEQWQKRAHFSDEVEWVNEMIHEDAQRCLELEEKIKTLGTKIEQVAKDSKIAKILLSIPGFGPVCTSELAGEIGTVERFGKEGSFALYLGMSTLDNSSGNYHGTKQPKHVNTRAKAAMMTALDRHRKYVPESQRYYEKKRSEGKKHNQAIRALGRHFCRIIYKMLKHQREYEIRPQQGNTKTKVASRSCVKTKIRRPKISANN

SEQ ID NO: 69442 - protein, 386 aa, unidentified
MQIADRSEAPTAIRTDLGAIFVSLELSRSTWLITSLSPGSGEKMSKHSVRGGDIAGLLKRFTQLQEKTQARTGKRFEIIVIQEAGLDGFWIHRVLQSKGIDSHIVDPASIATSRRRRRAKTDRIDGEALVRALLAYKRGEPRVCAMVKVPTPEEEDRRRLCREPKVLIAEQIEHVNRLKGLLFSQGISGYEPLRRDRWRQLEELWTGDGRLLPKHLKAQVRRELNRLELLLEQIKAVEVERDALLAAEETSAPAPAAILLNIRGIGPEFAAVLWSEGLFRHFDNRRQVAAYAGLAPTPWQSGAVDREQGVSKSGNPRLRTTLIQLAWLWVRHQPRSALTLWFEARVKRNGGRLKKTTIVALARKLLVALWKYVTAGVLIEGAAMKV

SEQ ID NO: 69443 - protein, 407 aa, unidentified
MIFVGVDWAEDDHDVTVMDPDGRLLGRARVAEGIEGVGRLHALVGEHAEDPGEVVVGIETDRGLLVASLVAAGYQVYAVNPRSVDRYRDRHGVSGAKSDGRDSKVLADMVRTDRHNLRPVAGDSDLAEAVKVTARAHHNLIWTRQRQLNQLRSALREYYPGALAAFGTDLAHPDALATLAKAPTPELGRRLSTAQIAAALRKAGRRRNVDTRAATIRGALRAAQLAAPAPVADAYGDTAKALVGVIAALTAQIGELEAALADRFEQHPDAGILRSLPGLGIILGARVLAEFGDDPNRYAHAKARKNYAGSAPITKQSGKSKVVLARFVRNRHLADALIWWAFCSLSASPGARAFYDQHRANGDTHYQALRALSNRWVGILHGCLRHRTAYDEATVWGHRQQETAIAA

SEQ ID NO: 69444 - protein, 420 aa, unidentified
MLHQPPVISLEREISMDIIIERACGLDVHKDNITACILTSEGKEIQTFSTKTVFLLKLLDWIKESNCTHVAMESTSVYWKPIVNLLESEGIEFLVVNAQHMKALPGRKTDVKDAEWIAQLLRHGLLKASFIPNRNQRELRELVRYRRSIIEERARQLNRIQKVLEGANIKLGSVVSEIDGVSSTDMLRAIADGEDDPEKLANFARGTLKKKKEELKMALQGHIHPHQRLMLKTILKHIDFLTEQIKMLDQEVAQRTSSYQDDIERLDSIPGIAKRTAEQILAEIGTDVGKQFSSAPRLCSWASLVPGHNESAGKRKSSKSKKGNKYLKSGLTEAAHSIRGSKNYLGALYRRTAGRKGKKKAAIVVAHAMLRIAYYLLTRKEMYVDLGEDYFDKQKQVSIVRHSVRRLENLGYTVTITEAS

SEQ ID NO: 69445 - protein, 400 aa, unidentified
MHTAARAWAGIDAGKGHHHVVVVDHDGSRLLSRRVANHEPDLFELVTAVLALADTIVWAVDLADGPAALVIAVLLQRRQKLVYLPGIAVNRATSGYRGEGKTDAKDAAVIADQARMRNDLRELRVRDEAIVELQMLTAHRADLAADRVRAINRLKGRLTGIFPALERDLDFTYHGPLVLISGFQTPDVIRELGAEQLEDWLRQRKVRRADKLAATAIQAATTQRTSVTGQRLEATLIARLATTVLELNQQLAEIDERIATRFQAHPQHEIITSMVGIGDLLGAEFLAAAGDTLSAFQSADHLAGYAGLAPAPRDSGRRTGNLHRPRRYNRQLQRVFYTSAQISIQHSSASKAFYDRKRAEGKRHRQAVLALARRRVNVLWAMLRDHHTYTEPAENLPIAA

SEQ ID NO: 69446 - protein, 445 aa, unidentified
MMTPTLPVLDPLAAFVDVGSEQMYVSLAGGPPEVFGTVTLELHRLRDWLKERGVKSIALEATGVYWLPLYGVLEAAGFEVLMVNGKYTRNLPGRKTDMKDCQWGATLHAHGLLRAGFVPPADIRRLQDYLRLRADHIVSASASVQHQQKALERMNVKLHDVISSLVGASGRKVIEAILKGERAPEALLALCDVQIQQKKADRVKEALRGTWAEEHLFALRQGVENWQHYQKQIAACDREIEKVLRAISGPDQPGAPAVVTPAAKRPGVNAPQIEGLHGLLVKLCGGKDLTVLPAHTDYSLLQLLGEVGTDLSLWPTEKHFTAWLGVAPGSHQSGKRKGSVARKRNRAGRLFCVMARSLARSKHVALGGFYRRMAGRRGGLVANLALARKLAEWFWRVMVKGVSYVEQGLAQYEAQVLETKRRALQRLAKQLGQVVLPSLAELQRA

SEQ ID NO: 69447 - protein, 416 aa, unidentified
MKYARTVLPTEPANGLTCGIDWARDDHAVSVVDSRGKEVLRSTIDHSAMGLQTLLSILTRTGVEEVAIERPDGPVVDVLLDAGITVVVISPNQLKNLRSRYGSAGNKDDRFDAYVLADTLRTDRIRLRPLVPDGPATVALRTSCRARKELIGHRVSMANQLREHLNRAFPGAVGMFAELDSPISLAFLTRFDCQDRADWLTPKRLGTWLAKVGYTGGKSPAILHGRLTAAPRGVTGEHGTAHAHITHALVATLSALVEQIKALSEQIADQLATHADAHIFTSLPRSGKIRAAKLLAEVGDCRGRFPTPEALACLAGVAPSTRQSGTMRSVGFRWSCDKHLRDAVTDFAADSRRANPWAQDLYRRARARGHDHPHAVRILARAWLYVIWHCWQHGVGYDPAQHRALQALLHDEQPAA

SEQ ID NO: 69448 - protein, 367 aa, unidentified
MIVNEVAKNVEKIISIDTAKNSFQVLVVNQKTGKKKNTKVQRSKFVEYILKQGPCLIFMESCSASQHWARLFESFGFTVKLIAAQHVKAFLRNRRVKNDERDAEAIYTCGIQPDTKFVRIKTVEEQTVALLHTLRKAAVSQRVELSNRIRGILAEFGIVVARGRGSFNSEIEALFNECEKIHDVNLRVAISSLFEDYHRLKQREKELSEKIESLNKDNELVKIALTCPGVGSLTASAIVAEVGDASQFRNGREMAAWNGVVPSQHSTGGRSTLGGITKTGNRYLRTLLAQCACAVIQNASRHLEQGKDTHLDRFALRLKLNGKPVKKIMIAIANKIIRILWAMLTQRKTFENKANEISDTSAELQLA

SEQ ID NO: 69449 - protein, 433 aa, unidentified
MLYVGIDWAQAEHAVCLLDEQGQVLASRSIPDTSAGFTLLQALCATYTTDPGQVIVGIETDHGLLVRALVAAGYRLYAINPKAASRYRERHSVSGAKSDRADARLLADVVRTDRARHRLLAHDSAQVTALVHLTRMHKRLIWDQQRYANQLRDTLRDYYPAALDAVGRDLTSPVALAVLRRAPTPERGRKLSRRQLVGLLRRAGAERRLEERAQTLWEALHATQQEQPAVVADALGTATGSLVALLTSCAKQIATLEATLTEQFKAHPDAELIRSLPGLGAILGARVLAEFGDDPTGYADSRARKCAAGTAPITRASGKRQTVGRRRATNTWLLDGCMRWAFVSLQQSPGARAYYDELRARGKGHYPALRALANRWVGILHGCLRARRPYDEATAWPDVTLVAETTKLQTTPEKPSKKPGSDRSSIPTIPHSA

SEQ ID NO: 69450 - protein, 378 aa, unidentified
MPSDTTTYVGLDVHKRMIAVSLVVAGTGEVREWQETNDATVARRLARRLQREAGGPVSCCYEAGPTGYVLQRRLRSEGVMCTVVAPSLIPVRPGSRIKTDRRDARKLGELLGAGLLTAVHPPSEEQEALRDLCRCRVDVVEDLLRARHRMSKFLLRRHCVCKESGNNWGTRHMNWLRRLRFEDAASQVTFDSYLLSIDQLGERLLQLELQLAEFGAQEPYREPVGWLRCFRGIDTVTAVSLVAELHDFRRFGSARALMSYLGLVPGENSSGERERRGSITKAGNGHARRLLVEAAWHQRHRPAISQPLRKRRAGQPAWVLAIADRAQERLWRRWTRMTFRGKPTQKVVVAMAREMVGYLWAVLQGPPIADTPIIDTKP

SEQ ID NO: 69451 - protein, 349 aa, unidentified
MTIVGCDLHTRKQQVAVLHPDTGEVVEQELLHAGDAVEQFYRTLPRPVTVGIESTGYALWFHELMQRLGHTLLVGEAAKIRAMVVRKTKTDRRDALHLLDLLKHERFPLVWIPDPATRDLRALVTHRMRLVRMRTMVKNGLHAIAMNRRLTLGPSLWSQRGLAQLQGLALAPHTTQRRDESLPRLTWLTARIAALDDRVAAAAQADPGARLLLTHPGVGPLTALTTVLVLGPVSRFPDSKHVVSYTGLAPAVHASADTCRLGQITKQGSPLLRFVLGQAGLIAAHSEVDLKRHYRTLLRRRGRPKAIVAIARKLLVRLYIMLRDQIDYEEFRRRGRTPRGQEVPPPALA

SEQ ID NO: 69452 - protein, 341 aa, unidentified
MQRATLVGIDLGKHAFHLHGQDQHGNAVFRKKVSRKQLVEFFATLQACTVVMEACAGAHHMARTLASFGHHVRLISPQFVRPFVKSNKNDFVDAEAICEAASRPSMRFVSPKTESQQTLSALHRVRDSLVRDRVKAVNQVHGFLLEFGVSLPVGKTVMTRLPAALAEHALPPRLVAILERLHEHYKYLSDQIDELEKEMYRQLADDELGQRLLSIPCVGPITASVLAAEMGDGKQYGSSRDFAASIGLVPRQYSTGGKANLLGISKRGDKNIRRLLVQCARVYMQRLDRQVGRLADWVRSMLTRRHSNVVACALANKLARTAWALATHNATFDAGAIVMSA

SEQ ID NO: 69453 - protein, 468 aa, unidentified
MAKRKSSRQGQRREKTEKAVAVSAGPTQVKQDVAGIDVGSEHHYVAVPAGRDPEPVRRFGSFTADLYRMVKWLLDCGIKSVVMQATGVYWFGLYQVLEDHGLAVTVTNARYTKMLPGRKTDVAECQWLQQLESFGLLTQSFRPTEEFRVLRSYMRQRENLVADIGICIQRVQKVLTEMNLQICNVLSDINGKSGMAILRAIVKGERDPYRLADLCDSRIQAPRQQVAESLEGTWQNELLFILKQQLEIHDALAAQVSQCDRQIETHLQTIQQKVIPEVTPMPAARRPSKLPNRKHTSQYDLRKYLYQITGVDLTQIDGIGEQTALTVVSEVGVDMSRWKTEKNFASWLGLSPTNEKTGGKVIQRGTKKVVNRAATALRLAAQNLRTSQSFLGAKYRRFRGRMDAAKAITAMAHNPATLIYRMLKFGHNYTDKGMQFYEQRYRERQLQYLKKQAAKQGFQLTPAQGVVA

SEQ ID NO: 69454 - protein, 342 aa, unidentified
MDYYAGIDVSLEASSLCVVDASGKIVKEAKLSSEPEALIAWFKGLPFGLARIGLEAGPLSQWLYAGLKQAGFAVELLETRHVRDAFKAMPIKTDRNDARGIAQLMRLGWFRPVHCKSAPAQETRAVLTARKLVQGKLYDIEMSLRGILRGFGLKVGRTTKTGFASRIMELTEHHPALKAIAKALLAVHEVLLKELNGFEAQVRKLARSDSRVRLLMTAPGVGVIVGLTYVAAIDDPARFSSSKTVGAHFGMTPKKYQSGETDITGRISKTGDKGVRAVLYEAAHIILTMPIKGGALKSWAAKLAKRVGMQKAKVALARKLAVILHRMLANGASFDAAKAAAA

SEQ ID NO: 69455 - protein, 342 aa, unidentified
MGTIVTVGLDIAKSVFQVHGIDATGEVVVRRRLSRSRVLAFFEKLPRCLIGIEACNTSHHWARELIALGHDVRLMPAQYVKPYVKRGKNDAADAEAICEAVGRPTMRFVAVKTPEQQSVMMLHRVRLMLNRQRTQLSNAMRAHLSEFGVVAPVGRAGLERLLAVIADRDDHRLPVDARVCLEMLGAQLVVVKEQILENDRRLRASARQTDVGRRLMEIPGVGPLLASAFVASIADPTVFKCGRDVAAWVGLVPKQNSSGGKERLGGISRAGNRYLRQMLVVGAMAVIRRAERHGAKRPWLAQLLARRAKKVAAVALANKIARTVWALMTSGERYRDPVAMPA

SEQ ID NO: 69456 - protein, 346 aa, unidentified
MPIVGGLDIHRKQITFDYLDTATGEVGRGQIAPADRAHLRAWLARFAGRDDAAFALEGCTGWRYVAEELAAAGVTAHVAEPADTAFARGRKRHAKTDKTDCRHLRMLLAEGRLPECWIPPGHILEARALLELYHDLRAEHTAWVQRIHAVLFHHGAPALGAGTLRTAQGVAALRAAAAGWLSPAGQLQVATALEVLEALETRMHELRHQLTAAARQLTGAKVLAARLYGVGPVTGLAITCWLAGAGRFSSSRQAVRFAGLDVTVWSSDRKGPPGRLSRQGPPVLRWAVYEAGKTHARASAPDHRYYAQVKDRCNGKRAALSEARKILRQAHHILAELGDDALAPAG

SEQ ID NO: 69457 - protein, 448 aa, unidentified
MVGTKLKMDIINPNAAGIDIGSRSHFVAINQEHSDVREFGVYAQDTKELLTWLLDNDVKTVAMESTGSYWQNLYAELQDSTIEVILINGKFTKNIKGKKTDVLDCMWIQKLHTLGLLSGSFLPDLQTEYLRTLVRHRGNLIETASQASNRMSQNMRLMNLRLDVVVKDIVGLTGLSIINEICNGQTNGEQLAKLRHGNCKKSEEEIAKALQSNNRQDYLFVLKQELRKYQDAQQLIIECDDEIKRVLDEFIDQDNVKKALCIDKKVHKRINKNTPKNIDLNLIAYQYFDGIDLYAIEGFSHGTVLTLMSELGEKGILEFQNAQHFTSWLRLAPNNKISGGRILSSRTPKGSNRLKIALRQAANAIGNLKDTHLSNFFNRIAYRKGRAVAVSATARKLATILWNMLYKNQQYSPPTIYEYLDQKRKRKVLELQKQIANLDARMTKIQPA

SEQ ID NO: 69458 - protein, 442 aa, unidentified
MEVINPKAAGIDVGSRSHFVAIGQAAEQVKEFGVYNEDLHALTQWLLHNKIISVAMESTGTYWQTLFSTLQQAGLQVILCNGKFTKNIKGKKSDVQDCQWIQKLHTLGLLSGSFLPDTATEHLRTYCRHRTNLIDNSADTTRKMQKYLRLLNLRLDVVVNDITGLTGLSIIEAVCKGETNPQKLASLRNGNCRKSEEEIAKALQNNGRTDYLFALQQEYDIYKSLQQKIKQCDVAIEKLINQHINQDEHKKNLKAEDKPHKRVNKNAPKNMDINQIAYQYFNGVDLMAVEGLSHSTVITLMSEVGYEGIKKFDSGKRFASWLRLSPNNKISGGKVLSNKIPKGSNRLKIALRNAANAIGNLKDTHLSNFFKRISFRRGRAAAVSATARKLAIIIWNMIVKAMPYLPPSTYEFLDQKRKRKVLEMKRLIHKFDITSTDLGLQL

SEQ ID NO: 69459 - protein, 408 aa, unidentified
MQVTFGIDVSKSNSTVCELIGESKNELTITNDRPGFIQLLHELAAFSKHPQIIFEATGVYSRRLQAFLEDYGYEYVVLNPIKAKKEMNMGLRYNKTDKTDAYHLALIQRLYRHPVNQSESQTYKQLNALSRFYDQLTSDLVIAKNRLHQALQSTFPEIENLFSIARGKNYWQIVARYPHCDLVRKDDKKQIINWLMKLKGIAFNHAQRTTDKLIELAHLAYPVVSCSDIEVQQAQYYARRLLNLSNQRQRIITKMVKLAKTLPNHDLENLESIPGFAQTTAVRVLAELGDLRRFSNPNKINAFIGIDPGRYQSGEMDSNLSITKHGNAVARKLLYRAIGQIDNAAKTNPCHIADYYESKKLSSQTKGFKKIAIASIHKLIRTLYALIINDQPYDYNVATHNQKDFSRN

SEQ ID NO: 69460 - protein, 391 aa, unidentified
MFAGIDVAAERHVLARLDGDGAPMGRPIAFAEDASGYRTLLEALGPPPVLVVMEATGHYWKNLYATLTAAGHDVVLLNPLVARRFQEAQLERTKTDAVDATALARLGFEKRPAPTRLFDEAAEALRELVRHRDRLRQDFDDRVRQLHRLVDLGFPEFTRYVKGLDSMLATALIAECPTAAAFARAQPRRLAKLRYDGRHKVGDDLAEALVAAAKRSVGQHHGPVYEMQARHICQDLDLWRRRLKEIEGDIDRLLDAHEVGRLLTSVDGIGPQSAARIIAAVGDPARFRSPAAFAAYVGVVPGLRQSGKRTGTRAATSPFGNARLRRALWMTVLSAVRRNDWLRPFYERLRAAGKPPKLALVAAMRKLLHAVHSVARNRKPFAITGEQARAA

SEQ ID NO: 69461 - protein, 412 aa, unidentified
MTTTNQFAAHVGLDWADKKHDVCVQFKNGERVFHVIEHTAEALDVWLTELHQKVEGRIAIAVELKKDPMVYALQKYPFITIFPVHALSLARYRQAFSPSGAKDDPQDAELALELMLRYPQKIKAIEPDNADIRLLQQLVEQRRQLVEDKRRFVNRIINTLKQYYPQPLEWFSHRGSLLLCELIIRWPSLQQLKRARRDTIRNFLNAKGGRAMALTEQRVASIDNAIPLTTDPSVIEANALMATALATQIKVVSEIIKTYDERIETLFDTLPDAELFKSLPGMGPCMGPRMLAALGDNRDRFSSAEEIQNYAGIAPVTERSGQKSWVHWRWQCAKLVRQTFVEWAAKTINSSYWARLYYQGQREKGKSHQSAIRARAFKWIRIIYRCWKTRTCYDEAKYLLALEARHSPLLRP

SEQ ID NO: 69462 - protein, 354 aa, unidentified
MIHVGIDLHTRNMVNVAINDNAEMVRQAKMPACPNSLDTFFGEFQEPVQAVVECTSSWYWLSDWFRDHQIPLKLAHAKMVKAISYAKVKTDKVDAKTLAELLRVGLIPEAYQIRADQRELRELTRGRLRMIQRRGKLQSSLWNLGIKYNVRIGEDMGWRYPSQLLEWLRPQLPASARLQSELMIEELVGLQGHIHVLEKAIEQMGDFTRQLELIAPIPGMGMVNSWTILAEIGDIQRFPTDKQFVSYCRLVPGSKDSGGTRRHKSGCKDGNKYLRMAFGQAAVSGYTHYGPVKKFYNKIKRRSGKNVARAVVAKEMAKIVWHVLARNEPYKGFKGQPTRVAQQGYWPQPINPSA

SEQ ID NO: 69463 - protein, 480 aa, unidentified
MNVKARRTKKQVNVENQAIKLLSKEELSRKIEVVEKELRSYTWRELETNGKFAKNDKLSFITDDMLIVGCDIGSENHYIRAIDVRGRELSSGAFEFSNTSEGFANAKAWVLALAAKHDKKQIVLGLEPTGHYWFALAAWMISNGISVVQVNPYAVKQSKEIEDNSQVKDDRKDPKLIANLVKDGNYGMPYLPEKVYADMRRLSMFRDQLTEDRIRNINRLHRELKIYFPEYMDAFGKIDGAFTLEVLKVSAIPSDITALGAEGIKNIWHNVKLRGRGYSRANEIVSYAEKSVGLTDGTDAGREAVKWYAEQILKLDEQLAVIESTLHEKCREIPYAENILEIKGVGENILAGILAEMGDISRFDDVKEIQKLSGMGLVACSSGKHKGQTKISHRGRKRLRYWLFQAAKSAVSHADEFKQLHEYYTTRTNNPLKKMQSLVVIACKILRVIYTILKTGTTYDPQKLLKDIKHLAASQVPMAA

SEQ ID NO: 69464 - protein, 346 aa, unidentified
MMIIGCDFHTRYQEIAWLDSETGETGEQRLEHGGEQVRKFYAGLSGTVRVGIEATGYSQWFERMLQELGHEVWIGDAAEIRASVVRKQKTDQRDAAQVLELLRTDRFPRIWVPTPGERDLRQLVLHRVKLVQLRTRVQNQLQAMAMGQGVCRRKKLWSTRGRAELERLALDRWAHRRRAELLQLLDQLEQSIGELHGAVEQQARQHPDAVLLMTHPGVGPVTSLAFVLTLGPVSRFSRGKKVGSYLGFNPSEHSSGGRQRLGSISKQGNSTMRWLLVEAGQTAARLDPLLHRSYQRLKFRKGSAIAKVAIARKLAVRLYWMLRSRCDYAGLVRMSGSSSSAVVPES

SEQ ID NO: 69465 - protein, 343 aa, unidentified
MKIYALGIDLGKTVFHLVGLDASGQVVVRKRCSRTQLLAFTANLQVQLIGMEACSGAHFLGRALRAQGHEVRLMPAQYVKPYVKTNKSDYIDAEAIAEAVQRPRMRFVPIKTEEQLDLQALHRVRERWVMRRTAVVNQIRSLLLERGLTLPKGRRYLEEQLPRILEDAELNLSGSFRVLLSQLKLELEQLAGRIEQMDRVIQKMAKENEDCQRLTEIPGVGPVTATALIGAIGNGSAFGKGRALSAWMGIVPREHSSGGKQKLLGISKRGNKYLRRLFVQGARSVLQQRQKQTPGLRDWLAQLLARTHQNVVVVALANKLVRMAWAVLCKNERYRAPVLAVAT

SEQ ID NO: 69466 - protein, 348 aa, unidentified
MEHICRIGMDTSKHFSQLHGVNAAEEPVLRKKLRRKDMVAFFEKLAPTVVAIEACGGSHHWARLLSSFGHQVKLIAPQLVKPYVKRGKNDAADAEALCEAMSRPTMRFVPVKTAEQQAAVMLVGVRDRLIRNRTQLANSIRGYASEFGLTAAKGMAHLDPLIERIQADESLPDLARELFAAQAKEYQQMQAQIDEVDVKLKAWHHADECGRRLAQIPGVGPIGAALLMMKTPAPEMFRSGRQFAAWIGLTPKDHSTGGKVRLGVITRAGDEALRSVLVVGATALLRFVANGKSKSALSPWLGQLLKRKPAKLVAVALANKLARIAWKLMVTGQSYVRESTPTTVAGAA

SEQ ID NO: 69467 - protein, 443 aa, unidentified
MKEQSQEPEWAALAAIDWADQKHFWRWAALDSDRQKQGEMDNTPEAVDSWAMELHQRFGGRPIAVCLEQSRGSLVCLLAKYPHLVLFPVHPKTAAQYRETFCPSGAKSDPSDTASLLDLLQRHREKLRQLRPDTVPTRLLQMLVETRRLIVNEKTRQKNRLTACLKIFFPQILKWFDAVDSPLVAALLQRWGSLRELQGAHPGTLRKFFHQQNCRDEERIRERITGIQQAVPATEDIAIVEACSRRARTLVAVIETLRNQIVEYERRIAELVESHPEGSLFGSLPGAGPVLMPRLIVAFGTQRERFASAEEVQRLSGIAPVTEKSGKSNYVYMRRACPKFLRQTFHEFADHSMARSGWAKAYYDAQRAKGNDHHAAVRSLGYKWIRIIFRCWKDGRPYDEETYLGSLQRRHSPLFGALATTTGVGWKTVSGFQKFSGESFLTE

SEQ ID NO: 69468 - protein, 349 aa, unidentified
MNKKIVKQVAGIDVAQKELVVTLGRMYDNWEPELYGNKTFPNTQKGFMLLVVWIKKLMQQSIRVRFVMEATGVYHESLAYFLDEKNYEVSIVLPNKISNYSRTLEVKTVTDKTASEAITKFGLERKLDKWKRPKKAFKNLRQLTRERNQVTEMRTIAKNQLHAEQAEAEPNKSSVERIKKQIIFFNKQEKEIRSEIADLIKQDQEIKKAIDIMCSVPGAGILTAATILAETNGFELIRNKRQLTSYAGLDVKEKQSGTSIKGKSKISKKGNKYLRKTMHMPALTAIRHDERFKAVFARLVSKHGIKMKAVVAVQRKLLEMVYIVYKTNIAYDKNYLKQTEIEKKVAENT

SEQ ID NO: 69469 - protein, 403 aa, unidentified
MQDPTCRFGGVDWATDAHAVAVVDEAGTLVDEFDITHDAAGLDELCRRLHKHDVRRVAIERPDGPVVEALFEADLEVVVVSSRSVKALRERYGTAGNKSDRGDAYVLADCLRTDGHRWRSLEADSPATVTLRCFVRARKDLVETRVATANQLRAHLQVVFPGAVGLFRDIDSPISLRFLRRFPSETRAAWLSERRLGAWLVANHYCGRKGSVDLFDRLRRAAKGTVGDEADARGALTLAYVEVLGSLRAQIDELTTRIAEALDVHPDAEIFTSLPRAGMVRAATLLAEIGDCRARFPDAESLACLAGVAPSTRSSGKHRAVTFRWSADKKLRDALCDFAGDSCQSNAWAERRYRELRKTKSHPHAERILARSWAAIIWRCWQDHTPYAPDRHGGFQRLVESAA

SEQ ID NO: 69470 - protein, 356 aa, unidentified
MSHEVKYIGMDVHKEAIVIAVLDGSGKQVMETIVETKANSILEFLYGLRGELRVTLEEGTWAAWLYDLLQPKVQEVVVCNPRRNALLKEGSKSDKVDARKLADLLRTGMLRPVYHGENGLRTLRELARSYQTINKDLTRVMNRLKAAYRSWGIPCGGTQVYARRYREEWLGKLPQAGVRRRAELLYQQLDGLQALRREVRKEFVAESRKHKATKLLRKIPCIGPIRAGLLIALMQTPYRFRSKRQLWTYSGLGVETHDSAQYRFVRGQLQRSKKPQQLRGLNRNHNHAMKDIFKGAANRASCSTGPLHDFYAALLAKGMKPEMARLTLARKIAAITLTLWKKGERFDGEQLKTQAA

SEQ ID NO: 69471 - protein, 450 aa, unidentified
MDKDNKKEKLKKTIRGLPVIQQFAAGADIGDTQHEIAINDGNGGHVVRSFKSFTEDLERAVSWLKEEGITTLAMESTGVYYLNFYLLLEEAGIEPYLVNAHHVKNVTGRKKDDTDAIWIQRLHSCGLLQKCFQPDNDFRTLRTYVRQRKGLIKRSSDEVRRMQKALELMNIKVHTVISDILGKTGMQIIKAILAGQHDPVILSKLKDPRIKATEEEIIKSLQGIWKEEYIFLLNQSYNTYFFYQQQIRECETKIHEQLMKQVAQVNGGDVTEVSYSEKKGKLKKNQFYFTVSPLLKKITGVDLCKIPGISEVTALEFISETGIDTSCWKHSKRFSGWLNVAPNTKITGGKIISSKMMKKKNIAGQTLRVAASTLYRNKTPLGDYHRRMSFKYGGKGASLATAHKLSRIIFLMLDKKEEFSIAMLIDSQKKFKEMKIKQLERQLAKLKKVA

SEQ ID NO: 69472 - protein, 370 aa, unidentified
MSEPTTLYVGLDVHKDSIAVAHAEAHRADPPHFVGTIGTRQADVDKLVRRLHSKASTLVFAYEAGPCGYVLHRYLSGRGLDCWVVAPSLIPKRPGDKVKTDRRDAVELARLLRSGDLTRVYVPGVEDEALRDVSRARDATLVTLKAAKLRLKSFLLRLGLHYTGRADWNEAHRRYLAKVVCPTAAQQIVFQESVRAVDEQVERLRRVEQELLELAPTWRLYPYVEAVQALRGVQWIVATTVVAELGDLTRFDNPRQLGAFVGLIPSEYSSGESRRQGGITKAGNGRARRALIEAAWAYRYNPKISVQIQKRLESLPKPIQDIGWKAQLRLCKRFRRLRARGKHANIVVTAVARELLAFMWAIAREVPKTS

SEQ ID NO: 69473 - protein, 470 aa, unidentified
MGKGSGTTRGDRRRNARRERLRVMLPREGAVIGIDLAEDKQALAVVDHDVRVLARKTVRVKAFRLGEALDWAVGQARAKGFDRVAVACEPTGPRWLQVQRLCAERGLPLVCIQPLVSHIAREQQDYTTHKTDEADCVMIARLAIELHCYLPEELDEAWAQLRHLGRRRAQLITSATASAQRIRDFLSVAWPVVTETCAYPLESTTWLAALQVVTSRCGGQPGRLAEMGPEAFTALVRGAQRGWGGQKAWGTICRRIFAALTDTEGVVVSCRRGLLRRCADELGDLQRTRAQLRAVEADMVIVLAELGLARLADIPGLTAVGAAAILAETGDPRRYDSSSSLVKHAGLSPSENASGAFSGQAHISRRGRPGLRLAVWRAVWPMLQYNPVMAAKYAAMTGAAAADAAAAADAGSRQVSAAAARARRAKARVACAASLLRWIYSMIVHDTSWDAAIASGDACQHTPRRPAEAA

SEQ ID NO: 69474 - protein, 384 aa, unidentified
MNKHSMIFIGLDTHKEFHEVAYCEEQRGATPVHYGRIPSSKVSVKKLLRQFESKYPGATLHVVYEAGPCGYWIYRLITSLGHCCYVVAPSLIPKKPGERIKTDRRDALKLVRTLKSEDLTPIYVPEPEDEAVRDLSRAREAAMKDLKEAKYQLKALLLRNNIRYEGTANWSKKHLRWLTELILPHPAQQIVLQEQLQTIEERIRRLERLDNELTHHVHQWRYYPVVKAVQAMRGVRLLVAVGVVAELGDLHRFDHPRKLMAYLGLVPSEQSSGGKRHLGAITKAGNGRARRLLIEGAHSYRYPANVSTELQLRQEGLPKDIVDIAWKAQLRLCKRYQRMSKKGKHYNLIITAIAREMAAYIWAIAKEVVLTPVNPKLRLSRVPA

SEQ ID NO: 69475 - protein, 375 aa, unidentified
MAEATMPKNSMLLKPVRSVVEVTGGVDTHGDTHAVAALDQVGGLLGTVIVPATGAGYRQALDWLSGFGPVGRVGVEGTGSYGAGLTRVLLDAGVGVVEVNRPNRAVRRGRGKSDPIDAEQAARAVLAGTATAPPKSRDGVVESIRLIHGVRRGAVKAKTAAINEFHAVLVTAPDRLRAALAGRSWVEQLATAAGYRPGEVSDSGQAVKCVLRRLARRIEALQAEIDEADVELAGLTAQAAPTLLAERGVGAGSAAQLLITAGDNPERLGSEASFAALCGVSPIPASSGKTSRHRLSRGGDRQANRALHTIAMSRMRWDQRTRDFIAGIQARGKSKRDAIRILKRYLARRIYRILTTSRADSGVAPSTLTPSLPIG

SEQ ID NO: 69476 - protein, 413 aa, unidentified
MEIQKNKVCGADIHKKFIMATILSRDGNKIRGRFGMTLDEISRFKEWVIINNCEAVAIESTGVYWIPIYTVLEGSVEVILANAYKVKHTPGKKTDKRDSGWLAELCLNGMIEPSRIFPKDDRDIRALTRAREKLVNNSTQMKNRIHKELESACIKISSVLSDIFGVSGMKFINGLLEGKNIDEILKMITSKRILKKEQDLRQAVTNSLDPARILMIRTYLELIEKIESQIEILNKEIMSRMQKLKEDLEIAMSMTGMGFTSASTILAEIGNYRDFVTAEQLASWCGLTPKVSQSADKLVTGSITKQGSKHVRRMLVQVAHAISRSKNSKLKRFFLHILAKKGKKKAIVALARKVLCILHHLLVNREKYMDTEMSKTKKVKLNWASSPVQMTEKDMINVLVGAGYTVKKMKECV

SEQ ID NO: 69477 - protein, 402 aa, unidentified
MNAVGIDVSKGKSMVAIMRPFGEIVSAPFEIKHTASDINSLVELINSVEGESRIVLEHTERYYEVLAHQLSKANLFVSAINPKLIKDFDNDSLRKVKSDKADAVKIARYTIDKWQNLKQYSVMDELRNQLKTMNRQFGFYMKHKTAMKNNLIGILDQTYPGVNTYFDSPARSDSSQKWVDFASTYWHVDCVRKMSLNAFIDHYQNWCKRKKYNFSQSKAEEIYGKAKELVPVLPKDDITKLIIKQAVNQLNSASTTVESLRTLMNETASKLPEYSVVMAMKGVGTSLGSQLMAEIGDVSRFTHKGAITAFAGVDPGVNESGSYEQKSVPTSKRGSSDLRKTLFQVMDVLIKTHPQDDPVYQFIDKKRAQGKPYYVYMTAGANKFLRIYYGRVKEYLSSLPES

SEQ ID NO: 69478 - protein, 378 aa, unidentified
MNRIIKIGMDVHTTNYTLCIFEPSFEHDGTVHCITQVKPEIKKIIHVIETFKKKHENEELNIVCGYEAGCLGYSLYHELKEKGVECVILAPTTMKTEKGGRKLKNDYRDAKMIAECLAYGGYSAVHVPTELDNSVKEFIRMRDDIKENLKSIKQQIIAFLTRNGKQFNGKSYWTKKHIDWINTISFSEPLLQDTLKEYMIEYNHLCDRVETLDRQIEEVSLKEEYVEKVQQLQCLIGIKTHTALSLIVETSDFNRFKKGNMYSAYLGLIPGDDSSGGHEKKLGITKAGNSHLRKLLVEAAQGYTRGRVGFKSKDLKARQEKCSSEVVAYADRANERLRRKYYRMILRGKKYNVAKTAIARELACFVWGIMTNHMDLCS

SEQ ID NO: 69479 - protein, 337 aa, unidentified
MNNSVIGLDIAKNIFHMYTFVDNKPKKKKLKRAELLAFFANYPASLIGIEACGGAHHWARELIKLGHEVILLNARYVKSFVVGNKNDFNDAEGIFDAVTRPNKRTVMIKTIEQQDIQLVHKVRQGLVSKRTALVNQIRGLLSERGVIIPQGINQVRKELPLILEDAENDLTVMAREVFAEQYEKFAALDKEIKTQDQRISALCNSNALSRRFLDVPGVGPMTASIVASDIGDGKGYLSSRDYAASLGVVPGQHSSGGKQVYLGISKRGNRYIRTLLIHGARAVLKNCHNKKDKLSLWLQALIERRGFNKAAVALANKNARILWAMATRDKEYDGCLV

SEQ ID NO: 69480 - protein, 318 aa, unidentified
MDPAPLFVGIDVAKAHLDVALGPDGPVRRHPNDEAGIAATLALLAASPPALVVLEATGSLEVPLAAALAAAGVPTAVVNPLQARRFAQATGRTAKTDALDARLLALFAERVRPEPRPLPDAAARDLAELLARRRQLIAMRTAEANRLGTAAAAAVRADLEAHVAYLTGQVDAMDRRPAEAIQASPAWRAKDELLRGIPGVGPVASRTLLADLPELGTLGRRKAAALVGLAPMNRDSGALRGKRMIVGGRSAVRTTLYMAALSAVRYNPALRAFYRRLVAAGKPRKLALTAAAPALLRIADAILRTRRPWDPAFAGTRA

SEQ ID NO: 69481 - protein, 432 aa, unidentified
MRVLYERCGGLDIHKASIAACAVTTKNGKSEQETRRFGTMTADLLELAVWLKTRGIQQIAMESTGVYWKPVWNILEAQGFDLLLANAQDVKIVPGRKTDQKDSQWIADLHQHGLLRKSFVPPRQIRDLRDLTRTRAILTQEHSSICNRIQKVLEDANLKLGCVASDVFGASGRAILQALMQGESDARALAELSKGRLRNKIPELRRALEGRATGHHRFLIERHWRQMESVERQVRLFEDEIAQRMQPTPPEITRMRESLPAGAPLPPSPREEAIALWMELPGVGLTTACSMVAELGVNMDQFPSAAHLASWAALCPGNNESAGKRMSGKTRKGNVWLRRAMCEAAWAAAHTKDSYFAAQFARIASRRGKKRALVAVAHSLLVTAYHMLKDKQHYQELGADFFDALNKDQVKRRLVQRLAKLGFQVTLTPTAQ

SEQ ID NO: 69482 - protein, 355 aa, unidentified
MSQTSNTAIAVIGIDIGKNSFHVVGHDARGAIVLRQKWSRGQVEARLANIPPCLIGMEACVGAHHLSRKLASLGHDARLMPAKYVRPYSKGQKNDFNDAEAIAEAVQRPTMKFVATKTAEQLDLQALHRVRERLVSQRTGIINQIRAFMLERGIAVRQGIGFLRTELPTILATRTDALSPRMLRVIEELAVDWRRLDQRIDGLSGEIEALARQDQACSRLMTVPGIGPIISSAMVAAIGTGEVFSKGRDFGAWLGLVPKQISTGDRTILGKISRRGNRYLRVLFVQAAWVVLVRIKTWERYGLKSWIEAAKRRLHHNVLAIALANKLARIAWAVLAKGRAFELTRTDDAGVVQPA

SEQ ID NO: 69483 - protein, 501 aa, unidentified
MHLRYIQIITDLTVGKKSEVHEVHTMNAKAKFNKNQVNQVNIFMQDEIAKQAELIGQGLKAYSWKELETVGKFAKNEKISFISDNILVAGCDIGSETHYLRAIDTRGREISKKAFAFSNDAEGFASAKDWLLKLAVANGKDQIVVGLEPTGHYWFCLAAWLVTNGISVVQVNPYAVKQTKEVEDNSQLKDDRKDPKLIANLVKDGNYGMPYLPEGVYADLRHFSLLRDQLTEDRIRAVNRLHRVLTFCFPEYKDALGKIDGAFTLELLKVAPFPEDLKALGVDGIKDIWHAARLRGCGYNRAKTLVEYAEKSVGLTDGITASREAVIWYAEEILRLDMKLEQVEAQLEASCRDIPYAENLLEISGIGDKILSGIASEIGDIARFDDVKEIQKLSGMSLVACSSGKHQGKTKISHRGRKRLRYWLFQAAKSSVAHAVEFKELHEYYTTRDVNPLKKKQSLVVIACKLLRIIFTILRNGTRYDPAKMLRDIRRQEPQTVPTAA

SEQ ID NO: 69484 - protein, 325 aa, unidentified
MEKLYCGIDLHKENLAGCIMDKDGKTIRKHIFPSSKEAIERFLCNIPNSEITIAIEACGLWRGAHKVLTELGYEVKLANPKKTHDIACKKKTDKVDAKILADLLRTNYLPEVWIPDEKTMRLRDLTRHKSNLTRLRVSVQQKIKGYLLLKGRKYGKLWNEKSLSKLAEDEPNIRNLINVYWCLKNEEKEVLNRIRKTARSMRETNLLMSMIGVGDLSSLMILAEIGDIKRFKTPKELISYAGLCPGIYQTGSTERNVKNNAVNKWLKWIIYECSGRAIMLDPRFQEYFYRVQQRKGYQTGRRAAARKMITIIWYMLTNEEPYRAS

SEQ ID NO: 69485 - protein, 309 aa, unidentified
MEHCIGIDVAKDRLDVHVRPSGASFVVARDGEGLAALVDRLHALAPTLVVVEATGGYETVVASAVGAAHLPLAVVNPRQIRDFARATGKLAKTDKIDAAAIAHFAEAIRPPVRPIAEAEAQALGELVARRRQVIEMIVAERNRRRMATQRRVIRAIERHLALLQAELSELEHDIDGAIRNSPAWQADADLLASVPGIGKATLRTLIAELPELGRLTRRKIAALVGVAPINRDSGSRRGRRTIAGGRPAVRAGLYMAALVASRANPVIAPYYAKLRATGKTGKQALVACMRKLVVILNAILRDRKPWQPA

SEQ ID NO: 69486 - protein, 596 aa, unidentified
MLPQHASTPQSPRRIGVGIDTSRYGHYAVFLRDDLQPAADELAFAESAAGYALLQQRLQGIVVRYGPLTFAVRLDVAGPYADNLLHFLHQLATPRTDRPDAQPPLALTISCGDPQRNKNYRAAFFGSQKSDPVEAHAAARFAMSEKPRGDKPVSLELRILRQVASRLQAVVRQRTRLLNQFHHLLALTFPELALLTQDVAAGWVLELLHRYPTAARLAQARPTTLAAIAYLPDDLVTPLLQQAQTSIASLTDAAVEELVRDQVRQLRDSGARQKRLESSLVSAYRALPQANHLDTIPGIGPVSAAILTAFLVDIDRFATPGKLVAYFGVLPLEASSGVDRDGHTRTPRRFVMSRRGNDLVRRYLWMAALSAIRCNPAVRALYARVVAKHPRHKAVAVGHAMRKLLHLVFAICKSRRPFDRNHYPWQTPAHVETSDNGMSAELSSRDNGMSVTSQAAGHKPEAEPAEQVVTAACADSVAQRVAVGESTAVDFAHVKTQLSLAQVLDQLGLSTRLRGSGPQRRGPCPLHRGDGRGRSFSVNLEAHVFQCFDKQCGQKGDLIDLWAAVHGLSLREAALDLVRTFGLEACARPATEKRNG

SEQ ID NO: 69487 - protein, 348 aa, unidentified
MRGAVQMQVSTIGLDIAKNVFQVHGIDANEKVVVRKQLRRSQVLAFFKALPPCLVGMEACGTAHYWARELTKLGHTVRLMPAKDVKAYIKRNKNDAADAEAICEAVRRPTMRFVQVKSAEQQSQLMLHRTRDLLMRQRTQVINALRAHMAELGITAAQGTAGLKELLKIIAGDADGRLPVDAHASLVVLAAELQAMQTLIGSLEKRIMAQHRTSDESKRVATIPGIAVIGATAITATVTDPKVFRSGRDFAAWIGLVPRQDSTGGKQKLGPISKQGDRYLRRILVVGAHAVLKQAKQKPEKYPWLTQLLARKPFKVVAVALANKMARTAWALLAHGGTYRAPLLAAAA

SEQ ID NO: 69488 - protein, 359 aa, unidentified
MNKNSMYFVGLDLGDKYSYIANLDQEGELIEESRLPTTKESFQRKFSTLQPCRVAMEVGTHSRWASHLLTGLGHDVLVANARKLRAIYHNPRKDDRADAETLARLARLDPGLLSPIHHRSPQAQADLDVLRSRDAIVRSRTLLVNHTRSIVKSSGARLPSCSANCFASKAAPAVPAALHPALSPILETIASLTQQTREYDRHIEQLCQDQYPETKLLRNVSGVGPITALAYVLTLEDPKRFLKSRDVGPAIGLVPRRDQSGDRDPQLRITKTGDAFLRRLLVSSAQYILGPFGPDCDLRRWGLKLAERGGKNAKKRAVVAVARKLAVLLHHLWKTAEVYDPFYQSQKEEAGSAALPTVA

SEQ ID NO: 69489 - protein, 370 aa, unidentified
MGKRSMFVGMDVHKESIDVSLAEEGRDGEVRHYGVINGDLEAVAKMVRALRGPQRRLRFVYEAGPCGFGIHRYLTAQGEDCVVVNPSSMPKRSGDRIKTDRRDGDALARLHRAGELTAIYIPTPDDEALRDLVRAREDAVGLSTQAKHRLKAFLLRQGRRYPGRAGWTRPYRRWLADLSFPLAPQHIALQEYRDTIDETERRVERITEQLRQLTPPWRWAPVVDALQALRGVSFVTAVGLVTEMGDIRRFTHPRQLMAYLGLVPSEYSSGPSVRRGGVTKAGNPHARRLLAEAAWAYQGVPRLGRQMLYRQEALSPAVRNIAWNAQLRLTGRFRRLVARGKAKPKVATAIARELTGFIWAIAREVPTPPA

SEQ ID NO: 69490 - protein, 310 aa, unidentified
MNEVFVGVDVSKDRLDIHVRPSGETFACERTPAGIEALVARIAPLGPELVVLEATGGLERVVVAALAGAQLPVIAVNPRQIRDFARAMGRLAKTDALDAEAIARFGETVKPAPRQLPDAAAQALAELVARRRQVVEMKTAEGNRLRLARAKTIRQRIERVIRLLERELADLDRDIGDKVEQSPAWREKEELLTSVPGVGKTTARSLIADLPELGALDRRKIAALVGVAPMNRDSGKMRGRRSIAGGRANVRSALYMAALSASRFNPKLRAFHQRLRAAGKPPKAALVAVMRKLLTILNAMLKTGKSWIEA

SEQ ID NO: 69491 - protein, 410 aa, unidentified
MNAVGIDVSKGYSTVAVMRSLGEVVASPYEVKHIDSDLSELARKLRKLKGETKVVMESTGSYHLPIADTLHKAGLYVAVVNPQLTHDYGNNSIRRSHNDRTDSVKIANYGLSNWLELPRYVPEEETRHMLKSYSRQYGKYCNVKTMLTNNLISLLDQAFPGVNELFTSPPRKSDGHEKWLDFTEHFWHRECVSSLSEKAFAQRYRKWCRREGYNFSQDKADAIHAQASSHVSVLPQSDATKLLITQAVCQANAVSETIAVIAAEMNRLASLLPEYPIARAFYGVGDILCPQLIAEVGDIRRYPKKSSIVRFFGLEPVERQSGKFRGQESISKQGSPHLRKTLFQIMDSILENAPTDDPVFQFLDRKRAEGKNYYSYMCAGAAKFLRIYYARVKQFLDDRDDAPEEAAARG

SEQ ID NO: 69492 - protein, 358 aa, unidentified
MVQRKELNFEGQNIYIGIDVHLKTWHVSILTESGCLKKHSQQSSAQALFEHLKKHYPNGNYLSAYEAGFSGFSTYYSLLDFGIECLPVHAADIPTGQYESVMKTDAIDSTKIARALKSGLLRGIYIPKKEVLDDRNVMRLRITLKRQLSGYKSRVKHLLYNNGVIYPECFQNSKSHWSKRYLKWVHEDVQLLSESRNSLDLLLRQVELFRKSLLEITRLVRTLSRNGRYGEAYENIVSIPGIGMITGMCLLTEIGDIHRFRNERQFASYLGLVPTSHSSGEKTSHGEMTFRGNKRLGPLLVESALLAIRQDRALAAAYGEYCKRMLPQEAIIRITRKLSNRILIILKSGKKYEHDRCY

SEQ ID NO: 69493 - protein, 315 aa, unidentified
MKYHIGIDISKREFHVCFEKGGTIEKFSTDLAGIDAFLNRLQERKMTKGKTLIGMESTGSYHLPVAYQCMKAGYIVHVINPLITKTQNQTNLRRVKTDSADAVLVRNCLLNGAGYPFQETAETIKLKTLVRQRARFSMLRHRTRLRDEEVVNRERYLDVKITALDKELYDFLDEKIRRLDAQLRTYESPTQKLLKSIPGVGPQTAVTCLSEVGNIHRFPDGQKLTAWLGLDPRVHQSGTSINGKGYITKRGNKLLRTRLFNAASVAVLHENMFQKFFLQKRSEGKAYRVALCAVMRKMVHVIHAVWSRGTPFINS

SEQ ID NO: 69494 - protein, 341 aa, unidentified
MGEVSTIGLDIAKSVFQVHGVDAAGAALIRKRVSRAKVLEYFCELPPCLVGIEACPSAHYWGRELQAIGHTVRLIPPSYVKAYLKRGKNDANDAAAICEAVTRPSMRFVPIKTKEQQTVLMLHRTRQLLVRQRTMLSNALRGHLAELGIVSAKGRNGTAELLRIIADGRVPPAVCGILEVLARQYGAIGTEIASIDKNIMVLHRACEASRRLAEIPGIGPIGATALVAEIGDWKAFSSGRSLAAWIGLVPKQHTTGGKDRLGSITKQGNRYLRWLLVVGAMAVIRYAQKHGTKKHPWLGRLMERRPTKVAAVALANKIARMAWAIMVGGERYREPELLLAA

SEQ ID NO: 69495 - protein, 341 aa, unidentified
MGQVSTIGLDLAKSIFQAHGADASGAVVFRKRLRRSQVRPFLAAQPPCTVAMEACGSAHYWAREIGMLGHAVRLIPPAYVKPFVKRQKNNATDAEAICEAAQRPTMRFVAPKSEQTQAAALVFRARDLLVRQRTQVINALRGHLAEFGIVVAKGPAHVPQLVQAVANPDEPLPEIARPVLQILIDTLHRLDEQIAHLDREVAQRAKADETAHRLMTIPGIGPVTAVALTALAPPAQTFRRGRDFAAWMGLTPLQHSTGSKQKLGATSKMGERTLRRLLIIGASAVLRWAARHGAPAGSWIARMLACKPPMLVRVALANKMARIVWALMAKGGTYQAPVARA

SEQ ID NO: 69496 - protein, 352 aa, unidentified
MDLYAGLDVGLNETSICLVDREGKTIREWKIATDPAGAAEALAPYAAELRRVGVEASSLGLWLYRGLHAEGLPMVMAEARHMSVSLSTMRNKTDRNDARGIAQMMRLGWFRAVHVKNVETQKLATLLTQRKFLKRKLIDLENHIRGALRAYGMLVGPVGRKDYDRRVRELIAHTDYVFIRLIEAMLDVRAGVLEGYDRLHKILLLVVQHDTVCRRLMTVPGVGPVTALAFKVGVDDPHRFRRSRTVAAHFGLTPRRIQSGTIDIEGRISKRGDRMVREALCEAAASLLNRVRRYSALRAWGQRIAKRKGAMCAIVAMARKLAGILHRMWIAEADFEPLRGAKITQKLKLKPA

SEQ ID NO: 69497 - protein, 402 aa, unidentified
MNAVGIDVSKGKSMVAIMRPFGEIVSAPFEIKHTASDINSLVELINSVEGESRIVMEHTGRYYEVLAHQLSKANLFVSAINPKLIKDFDNDSLRKVKSDKADSVKIARYALDKWQNLKQYNVMDELRNQLKTMNRQFGFYMKHKTAMKNNLIGILDQTYPGVNTYFDSPARSDGSQKWVDFASTYWHVDCVRKMSLNAFIDHYQNWCKRKKYNFSQSKAEEIYGKAKELVPVLPKDDITKLIIKQAVNQLNSASTTVESLRTLMNETASKLPEYPIVMAMKGVGASLGPQLMAEIGDVSRFTHKGAITAFAGVDPGVNESGSYEQKSVPTSKRGSSDLRKTLFQVMDVLIKTHPQDDPVYQFLDKKRAQGKPYYVYMTAGANKFLRIYYGRVKEYLSSLPES

SEQ ID NO: 69498 - protein, 329 aa, unidentified
MQAILHNCCGMDVHKDSVVACILKTRKPAAIEREREAVDKEIRVFGTFPDDLAQMRDWLETENCHHVAMESTGVYWQPIYEALEDAAGGEMEILVVNARHMKNVPGKKTDMKDAEWIARLLRSGLLSGSFIPPQEVRELRQLTRYRKNVVQDINTQKNRIEKTLQQAGFKLSTFLSDVFGVSGRNLIRVLIKSGRLSPSDVENETKRISKEKKTEIKRAITGQLTEKQRRFLKLQITLLDGLLEHLESIETSITELSAKWEDDIERLSTIPGIGLTSATAIIGEIGSDVSRFPTAEHFCSWAGLAPGDNMSAGKKKVQESLSATHISKA

SEQ ID NO: 69499 - protein, 346 aa, unidentified
MNEVSTIGMDTAKSVFQLHGIDASGDCKLVRRLKRREVLAFFAKQPACTVVLEACGASHYWGREIEALGHTVKLVPPPFVKRFAEGRRKTDARDAKALALAGRSADLRPVPVKSAARQAALLVVKARSLLVRQHTQLGNALRGHFAEFGLTARTGDKGLESLIGRVESGEAQLPETCLAAFAVLIGQWRRLAAEIAALTATLLAQARGNETVRRLMGVPGVGPVIASVFALKIDDPSRFACGRNCAAWLGLTPNEHSTAGKRRLGAITKAGDEDLRSLLVLGAATLLIRAKRNPQSAGAWVEGIRKRRPFKVAAVALAARMARTLWALLKHGATYEPRHAMAARTG

SEQ ID NO: 69500 - protein, 336 aa, unidentified
MPHKLNSGIAVIGIDIGKNSFHVVGHDKRGAIVLRQKWSRGQVETRLANLRPCLIGMEACVGAHHLRRKLQMLGHDARLMPAKYVRPYSKGQKNDFRDAEAIAEAVQRPTMKFVATKTAEQLDLQAMHRVRERLVSQRTGIINQIRAFLLERGVAVRQGLRFLRTELPRILAAPCDALSPRMLRVIEDLAGDWRRLDERIEGLSSEIEVLARRDVGCERLMTVPGIGPIISSAMVAAVGTGDAFTKGRDFAAWLGLVPKQISTGDRTILGKISKRGNRYLRVLFVQAAWVVLIKPKSWDRHGLKPWLETAKKRLHHNVLAIALANKQCGRACWRAR

SEQ ID NO: 69501 - protein, 339 aa, unidentified
MRYYCGIDLHAKQCFLCVIDEEEKILLKKALPNSLELILQLLGAFASKPSVAVESTLNWYWLVDGLQEAGYEVKLAHTLGLHMITGAKVKTDRRDALSLARLLRLGAIPQAYIYPKEKRPIRDLLRTRSRMVSLRANAYGTLRRILMQYGHSSAVIKKFAEEQICRHFDHPAIQASCQLELERVRLYSREIAILEDYILHTVADQPVFDLLQTIPGVGKILALTIYYEVGDIGRFEDPRSFCSYSRVVPGAANSAGVVSRGKGSKQGNPYLKWAFTQAALYAVRFNAGIRKFRQAHLARRRSKSRKIVSLSIVAHKLAIAAYYVIKGQEPFKQELMFGQ

SEQ ID NO: 69502 - protein, 454 aa, unidentified
MKRKISTKNKAKRIKKHLEEINLYAAGIDIGSREHFVSVPESLDDQPVRNFSCFTIDLENMADWLVRIGITTVAMESTGVYWIPVFEVLEARGLQVILVNAHHVKNVSGRKTDVKDCQWLQQLHTYGLLAGAFRPEDEFCVLRAYMRQRGTLVSSLSTHIQHMQKALRQMNILLDNVVSDITSKTGMLILRAILSGERDVEKLASYRDRRCKNSVEVIAKSLMGNYRKEHLFSLKQSIELYDFYHEKLRDCDQEIEQQLAQFEKQPDLIEEQKPTKKRNKKHERNAMQFDVANYLYDLCGTDLTDIDGLDEGSVLKVLSETGIDMTKWKTASHFVSWMGLSPNNKISGGKVLSSKTVKTRNRAKQAFKLAAWGLSNSKSGLAAHYRRLRARIGAPKAINATARKIAVIFYNMLKNKTAYITQSQEEYDKAHQQRILKQLQQKAVQFGLELVPIA

SEQ ID NO: 69503 - protein, 351 aa, unidentified
MKTNTPPKTETQDRIQQLKLGVDWHADHFRVVRMCDGQSPQPAQRFTPASFLLFVQKQLTLANQVFVVYEAGPGGFHLYRQLSALGVTTFVVHPQKLDPNHKGVVTDKTDARELALNLDRYLRGNQRALSVVRVPTAAEEQRRALSRQREQLRRERQRLAAQGRSLCLTQGIRLRGEWWSQKLSLPEWLEPRLNVWRKLITAVEEQLTALTKQVEALAPKARPKGLGPLTLGTLLAELCDWSRFKNRKQIGSYTGLCGGVSSSGQSHCDLSITKAGNARVRWSLIELAWRMVLYQPQSKAVQRWKHVLLNPKAAARQKKRALVALARQLAVDLWRWQTGKITPEQLGWVMV

SEQ ID NO: 69504 - protein, 379 aa, unidentified
MKAITLYIGLDVHKDSITIAIAEPGSKGEIRIFGTITNDLQALEKALSRIRKAHPGTTLEIAYEAGPCGFGIARRLTQLKVSCLVAAPSLIPKQPGSPFKTDKRDARALARLLRAGELVAVYIPESTDEAIRDLCRARTDAVDDLRRCRHRLKGFLLRHGFRYQGKANWSQPHMRYLRELVLPHPAMKTILEEYLQGIDAAHARVERIEASMLHLLETWRLKPAVQALMAFRGFQLVAAMITVSELGDIHRFQHPRQLMTYLGLVPTESTSGPHQRLGRISRCGNSHQRWLLSECAEHYALPPKISKELSRRQEGQSQEVRALSWKAQNRLHLRFMKLLGRRLQRNKAKIAIARELCGFVWAVLRTQSCYQQSSAPATQ

SEQ ID NO: 69505 - protein, 340 aa, unidentified
MEIVYVGLDLGSSNFQQVALNHEGVSRVNRDYSTSEANLVKAFSDLKGEIHVHLEAGELAPWAASVIAPLVTRVVCSHPKDNAWIAKDADKCDRIDAYKLAELLRLNRFKEVHYAPDQRRRNFKQLVQHYDELTGQQARLKTKIKARLRMQGVIVTGERLFSSKGRQEVLARVESRDLRTAISQLYEVLDQSVAAQEQARLLMLRAAQAFPEIRIFRTAPGVGPIGACRFSAYIHTPSRFTRKLWKYCRLSVSHRSSNGKPLRRPRLDRSGCGRLKDVSRKAFEVAMRSQKDNGFKRAYQRALETTHDKTHARLTVQRKIVSTLRAMWLTMTPYGDELMR

SEQ ID NO: 69506 - protein, 364 aa, unidentified
MDVHKETFSLCCYTNEKEKAEYNQKVEGHYSKVLNYLEAMRFHYGNDATFICGYEAGCLGFTLYHQLTEHNVKCEILAPTTMLKPQGKKKVKTDKRDAELIARCLAHHDYSAVHIPTEKDEQTKEYIRMRSDHKLALKKIKQQILSFCLRHNYRYEDGVNYWTQTHIAWLRALKPAGLYQEILDEYLLTFDNLTDKIERLDKRIEELASDEEYKEKVHNLTCFLGIKTQTALSLVAETGDFNRFATAQHYASFLGLTPGEDSSGEDQTHLGITKAGNRHLRTLLIEAAQAFSRGQVGYKSKALKERQQGCAPKTIAYADKANERLRRRYYKLTLSKGKKMNIAKTAIARELACFIWGMMTEDIA

SEQ ID NO: 69507 - protein, 413 aa, unidentified
MTVFCGIDWAERHHDIALVDEAGGLVAKRRIGDDAAGYRMLLDLLAEHGDSPESPIPVAIETSRGLLVAALRTGSRKVFAINPLAASRYRDRHGVSRKKSDPGDAFVLANILRTDIAMHRPLPADSEQVQAIAVLARAQQDAVWNRQQIGNQIRSLLREYYPAALDAFLPKQGGLAREEARIILAKAPTPTQGSRLSLSQLRSALKHAGRVRSVEEEAARLRGVLRAEYAHQPVAVEDAFGKQLLALLKQFEAACQASEDLADAVDSSFREHPDAEILLSFPGLGVQLAARVLAETGDDRNRFTDARGLKAYAGSAPITRASGKKHYVGRRMVKNNRLHHAGYLWAFSSLRSSPGAQAHYRHRRDVGDWHAQAQRHLFNRLLGQLFHCLQKRALFDEKLAFNQPASSPVAVAA

SEQ ID NO: 69508 - protein, 400 aa, unidentified
MPFHGGLDWGGTAHAVCVVDGAGQVVARIEVRHDAAGLADMLARLRKIAVPAELPIAIERPSGLVVDALIQAGHPVIPIHPNVVRACRPRYRAAGGKSDPGDAYMIADILRTDGHRFRPLMPMSDDIKALRALVRGRDDLVAQRVALANQLRSLLEGFWPGAAAIFAAIDSPIALAFVARYPTPDSASRLGEKRLASFMAQHAYCGRRSPAELLARLRAAPKGLASDAEADACGELVRALAAVLDRLVPEIAKLSSRIEHAVAELPDGQIVMSFPRAGRICAAQILAELGNVRERFLTDDQLAAEAGVTPVTHASGKSRGVVFRWACNKNLRQAITCFADNSRHASGWAAGVYTRAKDRGCKHAHAVRILARAWVRVLWRAWQDRKAYDPANHKAAARIA

SEQ ID NO: 69509 - protein, 353 aa, unidentified
MNQAITFRIGIDVAKGVFQAHAVTMNEPGEPVAFKKRLKRSQMQDFFAKLPPSLIGMEACSSAHYWARVARRYGHEVRLMPPAYVKAYVKRNKTDAIDAEAICEALGRPTMRFVPVKSEADQAKVALHRIRASFVEKRTAAANQLRAELSEFGIVAGVGARGLSELLGLVETEAEGFAVLPAELRLVLTELARQWRGCDEVVRRMDREIALGLRKNERAMRLTLVPCIGPIGASVIDAMLPNPHVFKSGRHFAAFLGLTPREDSSGKTVRRGAISKKGDSYLRRILVLGATAFLARVRRGQVKGVSPWVLRMAAHPKRKLAAVALANKTARIAWAMLAKGEDYRAPTAALAAA

SEQ ID NO: 69510 - protein, 384 aa, unidentified
MICVGIDVAKDKHDCVILNSEGKILAGVFTIPNNADGFDTLLQKIRSCTSSDDKIKVGLEATGHYSYNILGFLINQGLPTYVINPLHTNLYRKSMSLRKTKTDRVDAKTIATMLMSTAYHNEELKSLTRYRFDKVRERAQLKQSVSRLVTILFPELEKLVPTLHMSSIYALLIEFPGAKQITEAHLTHLKSLLKDASKGRYGRDMATEIRDAAKHSIGSVMPAKSLELRHTIRLIRELDSEIEDIEAAIEAIMEELQSPITTIPGMGFRMGAMILAEIGDFARFDSPDKILAYAGMSPSTYQSGQLSLAGTYSHMEKRGSRYLRYALYNATKYVCHWDPGFAAYLAKKRAEGKHYNVALSHAAKKLVRLIYAMEKSRQPYKRAA

SEQ ID NO: 69511 - protein, 453 aa, unidentified
MASKKKKRNSDKMITMPVVNPNAAGVDCGSRSHFVCVAQDNVKEFRTHTKGLNEIAEHLKSFGVKTVVMESTGFYWQQLFIILQSEGFEVFLVNARHVKNVKGHKTDVVDSKWLQLLHSIGILENSFQPDIFVKELRQYARHRRSLIQSSTRYVNKMNKSLTLMNIGLKTVLSDLSGVSGLEVIKAIVSGERSAKELKKLISNRVKASREEILLALEGDWRDEHLFELNQNYQGYLFTQNQIRETDEQIGILLKKWEDQNGDENLKKEYSETKHRSRQKNDVNPDIRPFAFQMAAGVDLSQIEGVSSNTIFTLMTETGFNLKSKFKTAKHFASWLGFAPNRKITGGKTISSHTAQVQNPLSYAIKQAANAAGNGKGRLGDFFRRIAFKNGRQAAIIATARKIAVIIYNMLSRKEPYTYDYADSELERIRKRQITNIQKKINTLNLKKEDLAFS

SEQ ID NO: 69512 - protein, 379 aa, unidentified
MTQPMCLRPSEIIRLPPHLKVWGSIFVTTQKILKRVLNMYRTKVGVDLAKNIIQVCTLNGKKVTSNVEMSVDEFSAWLAKSNPLTVAFEACSTSNYWYQQAIKAGHDARLISAKLVKAVRQNQKTDKNDALAIAQTLFLPEVSFINGKSIEQQQLQSIQRLRELAIKSQNASQKQIVSLLLELNIRLPNTQDGILRGLEGVLEDGEINLSDTFRATLSVAKVQLENMISAIREYDKYLEQSIQSLPDCKKLLKLESVGPVNAVNLYIALGANQSQPFKSGKNASACIGLTPIQHSSGGKEVMGTIGKYCKNGSLRSQLITGAMSVVIKVIKYGAKTKKELWLQGLMQRRGNRCAAVALANKTVRTAYSMLQNNTEYHAA

SEQ ID NO: 69513 - protein, 409 aa, unidentified
MIQSITYKAVPVKNASLRFVKHAARRAVIHIGIDIGKNKLFVVARWMPSRTKQVVYENPWLVKNPDEIPELIRKFRSLVKQNKILIGLESTGTYGDLLRQALADAGFTVHQLRAKVTHDYAEIFDGVPSQHDGKDAAVIAELLAQGKSTPWSFSVPTEIEAEMKYLITQLIDSHQTNNRLLGKLEGLVARYWPELTQHMLLSSKTLLKLLKHYGGPAGFRVDRDAKTVMGKFSSWQFSQEKSQKIIDLIRKSNGVRQTDWDVQYVKEIATKMLNEHQLVGKCKKRLKELTDISCNELQRLAKVLGVGTASVIWCNIGDPGRYHSADAWIKAMGLNLTERSSGEYQSEMHISKRGDSETRRWLYMSTLRWTQKEPVKQWYLRKKQRTGKKIPGQDDKRTGGKAVVAVMRN

SEQ ID NO: 69514 - protein, 313 aa, unidentified
METHPFVGIDVSKVRLDIGVGADGEFWQAGNDETGIQTIVERLTMLSPALVVVESTGGLEWPVVSELAAQQVPVALVNPGRVREFAKSLGLLAKTDKLDAHLLARFGEAAKLSPTILPNEAVQKLSALMARRRQLLEMLVMEKNHLLSTRLSLRSNVQAHVAWLEQEIDQLTEQIHKDVQDTPGFRDKDRILRSAKGVGPITSSILLSDLPELGQLDRKKIAALVGVAPFNDDSGRHRGLRRIKGGRASVRQVLYMAAVAASRFNPTIRTFYQRLLASGKKKKVALVACMRKLLTILNAMIRDMTPWKSPVTA

SEQ ID NO: 69515 - protein, 341 aa, unidentified
MQITTIGLDIAKNVFQVHGIDAAEKVVIRKQLRRGQVMKFFEALPRCLVGMEACATAHYWARELTKLGHEVRLMPAKDVKAYLKRNKNDAADAGATCEAVRRPTMRFVRVKSAEQQGQLMQHRTRDLLIRQRTQAINALRAHMAELGIVAAQGHDGLKKLLAIIADEKDERLPVDARASLIVLAAQLQALQTMIGSIEKRIIAQHRAREESKRVATIPGIGPLGASAITATVTDPSAFRSGRDFAAWIGLVPRQDSTGGKQKLGPISKQGDRYLRRLLVVGAHAVLKRARLHPQKYPWLTQLLARRPFKVVAIALANKMARVAWALLARGQTYRVPRLAAA

SEQ ID NO: 69516 - protein, 426 aa, unidentified
MRVLYERVAGIDVHKDMIKVGIRAPGHRAWARTSEVLEYRTFYGVLQQMAATLRERGVTHVVMEASGVYTEPVFYALAERDFEQVAVINPAHAKALKGHKTDAKDALRLAELFECGLLRGSYIPPQALKDLRDLTRYRTKTVQARTSEIQRLAKALESAGIKLDSVVSQLTGKSATAMIEALIDGERRGQVLADLAIGRLRTAGKLADLSQALAGRFTDHHAMLCRLHLDRIALFDTAVAGLEAKIAVKVTPYRRELGLLTSVPGFGDAVSQAWLAEIGPAPHEYFASHEKLASWVTLCPGNHTSAGKRRHGRTGDAGTYIKPMLVQAAWSAIKTQGRLQARYHKLVRRFGGPKNPAAVKKAILAIAHTLLKIAYQVLKSGKPYEDLGADFYTKRESPDQRRAYLLRQLEKLSPGCTITITPAEAA

SEQ ID NO: 69517 - protein, 351 aa, unidentified
MNDHMDLALVAGVDTHRDSHAAALCDGLGRVLAERQAPATPDGYAGLLAWALDAAAGRPLTWALEGSRSYGLGLARHLAGHGQQVTEIDRTTRAGHRRAGKSDPIDAIRAARELLARPHPAQPRADGDREALRLLMIDRAHAVQSAKTARAALAAIVVTAPAPLREQLRHLPPARRTRACAALTCPPDADRQTRVLHQTLNRLGQRIACLAGTAAELETQITGIVEDMTPGLVAAEPGLGALTAAQILLSWSHPGRIRSEAAFAMLSGTAPLPVSSGRTDRHRLNRLGDRQLNRALHTIAITRMRSHPATLAYIARRRAEGKTDKAIRRCLKRYLARHIYRTLNNHTPPTT

SEQ ID NO: 69518 - protein, 366 aa, unidentified
MRKVMAGMDLHGNNVMVGIVDDQGARLQHRRLACELPEIIEFLAPYKAELESIAVESTFNWYWLVDGLRAAGFPVVLANPAKIDQYSGIKHADDKNDAYFLAELQRLKILPTGYVYDPELRPVRDLLRRRMSLMRQRTTLFLSAKSLHQRTTGRGLELRRLKAMGPEEAAALYTHPANQLIAQIQKEHIDSLDQSIRQIEKAVLKVALQQPYYQRLQTMPGVGIILGLTISMEVGNIDRFAGPGQFASYCRTVDAKRISNGKTKGDNNQKCGNKYLAWAFVEAAHGARRFDATCRRWYDRKAGKKCTTVATKALACKLAKAAWYVMAKGTEYQAGKIFPGLTEPKAEEISGEQASASKGVGPNPED

SEQ ID NO: 69519 - protein, 337 aa, unidentified
MEQQRQYVGIDLHRRRSVIVRMNEDGQVLGVDQVMNDPVEFAVAVAKAGADPEVALEATYGWYWAADLLEANGARVHLVHPLGLHWDTRRVKNDVRDSTELANRLRRGDLPEAFIAPAEQRELRELVRYRAKLTSLRTSAKAQIHAVMAKEGILPTLDDMFGPGGRALIDQMPFEGAYRLRVDSLLKLLDHYAGELVVVEAELAARLAGHKGYEAIQAIKGIGPIMAAIFVAEIGDTSRFPTARHLCSWAGLTPSHRESDTKVQRGHITKQGNHLVRWAAIEAVARYHGGDPIAPTYQRVARRRGRNIGRVAAARKLLSLVYYGLRDGNIRCLAETT

SEQ ID NO: 69520 - protein, 421 aa, unidentified
MKGTAARKLRQVPQGYLVMGVDPHKKKHAAVAITQDFTTLVKFKFDNSREGFEMLLQRSRVEMAKTGCRGVIFAIETGGHYWRNLAYFLDERGIPFRFINQFTLKRRREGKDLNRRKNDYRDSEVAAQLLCTGEFTDSKLPQGVYAELRAAHNAYRRLVKERTRITNLVKGLLDALFPEFTHVFKGPFGLTALSILSTCPIPGVISGMTEEEFVATIKARHQGRLMRNKLRALHYAARTSIGIEASAWPVSMEISFLVEKFSLIKQHMRTIEGTLVRLVDKTEEGKYLLSIRGINYIAVAGLLAELGSFKQYRSAKQLIKMAGSNPTESESAGKRRNHTPMSKKGRPVLRYCAWTSVIPMLRLNSDFRAWSKKIRERPVHANPLNGREVVGAGLNRLLRLSFALVKKQTFYRVPEPARTTW

SEQ ID NO: 69521 - protein, 319 aa, unidentified
MAQNDLVVVGIDVAKDKVDACIRSLSQRQTFPNTAQGHRKLVAWLRKHEVSKAVMEASGGYERAWARVLREAGIEVRIVDPKRVRSFALSAGRLAKNDVIDAEMIAWFAETFSDAPGQKYDAAREELQTLVKARLSLIDLRMRLVSQSEHAAPGLVQKAHAHILKSLANEIAKLEAAICAKIKSMADFAERAEIIESVPGFAETSSANLVAGMPELGQVSDEIAAALIGVAPYDDDSGKRRGERHIKGGRRWVRNAIYMPCVGAATLNNPVLKAYYQRLLAKGKEPKVAIIACMRKLIIILNTMIARRQKWDPSHYALS

SEQ ID NO: 69522 - protein, 412 aa, unidentified
MEGETVIAGVDTHKDVHVLCLLDGLGRKIWSGSFGADPEGYDRLAEAIGDPGSCMVVGVEGTASYGAGLTRRLVELGYNVVEVLRPKRDKVRPGEGKSDPLDAERAARKAASGKGCSVPKSQDGWVEAVRQPYVARRLAVATSTSCVACAKSMLTTAPSALRERFRGRERPKDLMPLLARGRKAGDALEESVLASLRSVAAVWKEARSQVESLDERIRALLEANAPALLGVEGCGTTTAAALVVAAGDNPGRLKGEAAFSMMCGASPIPASSGKTDRHRLNRGGNRQANWALYEIAIKRMAYDERTRRYVARRTSEGKSRREAVRCLKRYIAREVYHVLMDPNPDGAAPEGPELARMRKAMRVTQKKAAAELGLSAATLGHLERGKRRSTKLERRYYELLCELERALPQTAS

SEQ ID NO: 69523 - protein, 405 aa, unidentified
MKQPTRLHYAGVDWATRTHAVCVVDQHGAIRARFEVPNTGKSFTGLCRRLVKLKVAGVAIERPDGPLVEAMLEGGLKVVVVAPRQVKALRSRYRASGAKSDPADAYLLADVLRTDGHRLTPLTPDSDPTKILRALTRTRKDLQAARVALVNQLTSQLERCFPGAIGLFAELHSPIAVAFLRRYPTSHAAATLTQAKLAAFLRRLHYPGRTPTATLLSRIQTAPLSGISPAEAAGRAVCVAALLDAIQACARQERELEAEITERLEVHADAHVFTSLPKAGHGVRAAALLGELGDVRARFPDNDCLAALAGAAPVTITSGKRRVVKFRWACDKKLRNALIDFADDSRHASPWAAKVYADALARTGRHPHAVRILARAWIRVIWRLWQDGVAYDPAKHRGAVRLLAA

SEQ ID NO: 69524 - protein, 320 aa, unidentified
MASRESLFIGIDVSKQTLDVAFGADPHAPRETIPSTDEGVQLLVTRLQRLQPTLIVLEATGGLERMVFAQLLQAGVPTARVQPRRVRALAHAEGRQAKTDRLDARLLARFAERVRPPHHQATDEQRASLRDLLVRREQVIQMRTAEINRLTAAAPNLRPGIQQHIDWLDQEIRALEQERDNEAERTDEVRRKRELRDSVPGIGAITALNLLLRLPELGTINRKEAAAVVGVAPYANQSGAQHKPRHISGGRRDVRSVLYMATLAATRRRLVRRAFDQRLCQAGKPRKVAIVAAMRKLLTILGAILRQQKPWDPAVHTSAP

SEQ ID NO: 69525 - protein, 373 aa, unidentified
MDEDRTVCVGLDTHKAKIAVAVAEPGRLGEVRFWGEIANEPEAVRRLIERLGTKHGTLSICYEAGPCGYGLHRQISALGHDCMVVAPSLVPVRAGDRVKTNRRDALTLARLHRAGELTAVWVPDAAHEAMRDLIRARTAAMEAVRRARQQLQGFLLRHGRVFTGRKTWSAAHRRWLAGLSFAHPAQQIVLQEQIDAISEAEDRRDRLSEQIKELARDWSLAPVVAALQALRGVAFLSAVVLVAEIGDFRRFANPRQLMAWLGLVPSEHSSGSKVERGGITKAGNGRARRVLIEGAWSYRFPARVTSLIQVRLDNVPEGVRAIAWKAQLRLCARFRRLVAAGKNVNLVTTAIAREMAAFAWAIARQVQPTAVAA

SEQ ID NO: 69526 - protein, 351 aa, unidentified
MNATTVGVDLAKSRFEVAVADGEFRIQRRARLTRLQFARFFGNHPHSLILMEACGSAHHWARTLQAQGHEVQLLPAQHVRAYVKRNKTDAADAGALIEAARCAEIRPVPVKSIDQQTIQQLHRLRSQCMGTRTARINFLRGCLREFGISVPVGARRGIDAVRQALASADNGLPDLLRPLIEEALAEIACLEQRSAHLERELARLTRADPIVHALMNIPGIGLLTATALRAAIVDIQRFASGRHLASWLGLTAREYSSGEKRRLGRISKRGDVYLRTLLIHGARAVLNASLGAARRGRTLDRLRTWALATEQRCGYNKATVALANKLARIVWATWKYQRPFDGNWTLRTVAA

SEQ ID NO: 69527 - protein, 339 aa, unidentified
MAILFVGIDLAKNVFAVHGVDERGKAVLVRPTVQRAKLHELVASLPECTIGMEACSGAHHWARLFKQHGHAVRLMAPKFVSPYRISGMRGKNDAADAAAICEAVQRPNMHFVPVKSEDEQARLCVHRVRQGFVEQRTATINRLRGLLSEFGIVLPQKAATVRREATAHLEHLPGWANTAVGDSLSEVHRLDERLAEYDRHVSQMAADDERSRRLMQLQGVGCTTASALVSTIGDAHDFKNGRQLAAWLGLVPGQYSSGGKARLGSITKAGDRYLRTLLVLGAKSVLAAAKNKDDRLSRWAMALQARRGYWRAVVAIAAKNARTAWAVLAKGESFRPIQT

SEQ ID NO: 69528 - protein, 318 aa, unidentified
MGIDRWLGIDVSQAVLDAHLLPSCETWSVSNDARGIKKLVEHLKAARDVLVVLEATGGYQHEAAVALSRAGASVAVVNPRQVRDFGRATGQLAKTDRISAEILAMFGERLRPEARFVADEELELLAALIQRRRQLLEMLVAEKNRLRVTRAAEVRSELKAHIRWLEQRLKDTDKKLDGAVRKSPMWRAKDEILQSTPGVGSVVSRTLIGELPELGKLNRKEIGALAGVAPFARDSGTMRGKRTVWGGRASVRSALYMAALVGVRHNPVLREMYQRLLGRGKLPKVALVACMRKLLVTLNAMLRDGTRWQELGNYPTTP

SEQ ID NO: 69529 - protein, 382 aa, unidentified
MSGKTQNSKAVVTPAQLYLSFELGEQDWTLGFTIGLGQEPRKRKVAARDLKALEQEIARAKQRFGLPESAPVRSCYEAGRDGFWLHRYLLAHHIENLVVDSSSIEVNRRAKHAKTDRIDAGKLAMMLVRYTLGEHKLWSVVHVPSVEAEDARHLHRELLALKHDQTRHINRLKGLLAGQGVSLPVGAHFLEQLDTVRLWDGTALPPGVRARLEREHTCFQFIHQHILELEGKRAELLRTAKDASVDKVRRLLRLCGIGENSAWLYVMEFFGWREFHNRREVGGLAGLAATPFDSGEQSRDQGISKAGNSPIRAMAIEIAWCWLRYQPDSDLARWYNARFGKGGKRLRKIGIVALARKLLIALWRYLEDGIIPAGAQLKPVSA

SEQ ID NO: 69530 - protein, 416 aa, unidentified
MTRAGIDAHKKSCTTCVFADNDILASSPSETFVFRTTPQGVNEFMEKVPEGSTVVIESSTTGKAISRRLSGRYEVHMIAPSERKPAVKTDKRDAERIVKEDMLGYVRRSYVPSQQIEELRLIVSKQMEIGAKISAAKNQVHALLERNLLQSEFEDLSDVFGVEGLDRLVSIELPDHEKLTLAMYLEELSLYASQHKQIETEIAKIAEADTDCLNLMSHPGIGSFVAVAIKARAGDASRFPTKKHFCSYAGVVPKADNSGERVSEHNRVKHGDDVLKYALTCGVNAAARARASSAVKRFYLRQIAKGKSPQDAQVAAARKLACIVWKILTSKERYVEEDRYLTSRKMSRLSQIAKRPLEHTTKPEDVSTLVSDLKSGTDALEKSPEEMDRTPGHRRGRGRSNSSRRRTSEAGGVVAK

SEQ ID NO: 69531 - protein, 414 aa, unidentified
MEDAVEVLHQRCAGLDVHKKTVVAAVRLIEGNKVITEVRTFDTTTAGLLALADWLTKNGCTHVAMEATGVYWKPVWHVLSDGEIELVLANAAHVKNVPGRKTDVNDAAWLAELLAHGLIRASFVPDGQTQELRALLRTRKQLVRERSRHIQRIHKTLEDANIKIDAELSDMLGKSGRAMLDAIAAGETDPVRLAALAHPNVKSPQAKLAEALRGRVTRHHRFLLQLHLQQIDGLDTALGTMDGEIEANLAPFRIAVDIVSTHPGIGKLSAHAIVSEIGTDMSRFATAGHLLSWAGLCPRNDESAGRRRSNRLRKGAQWLKTTVVQCAQAAKNKKGSYYQAQYLRLRSRRGPQKAICAVAASILTAIYHMLKNGTVYQDLGADHFNRRSKITQTQRLVKRLEHLGYAVEIQPLAA

SEQ ID NO: 69532 - protein, 378 aa, unidentified
MSSEKYIGLDVHQATISVAVLDSRGKLVMESIVETKAATILDFFAGLRGTLSVTFEEGTWAAWLYDLLKPHVDKLVVCNPRKNALLKDGNKSDRIDARKLAELLRLDNLKPVYHGETGVRMLRELARSYLTIVKDLSRVMNRLKALYRSWAIPCAGRDVYYTRHRAEWLGKIREAGVRRRAEQLYQQLDMLQHLRQQTRGELLAESRKHTITVRLRQIPSLGPIRSALAVALIQTPHRFRTKRQLWAYSGLALETRTTGEHRYVKGQLRRSKKQISIRGLNKDHNHDLKGLFKAAATRASVQPGPFQDFYQRSLAKGIKPTMVRLTPGAQDCSHYADSMEEGRKLRRCETEVASRLSVSGEEPLPSPAIFFWWWSVGS

SEQ ID NO: 69533 - protein, 403 aa, unidentified
MRHVIAFDISMGKSYMVIYNAQKQCIFEKEIQHLKPDFKELQKKIYELTEKTGKSPEIVFEATGIYSRQLERFMQDNQYTYCLLNPLEAKLQCDSLRIHKTDRSDAHRLVLTHFTATRRVSHGTNHIFHQLKSLSRFYSELDGELSVIRSRMHKVIQLTFPELEKMFTSKSELFLNFVQLFPHPDCVLSLSKTIIKNRIRANTNKKISNIMAEKKAIQILEIAKNSYPAVSQNDVLCDQLKAYAKRYQELLQQKECCINKMVFIAEQRAEYSIILSLPGIGPNTAVRLMAEIGDITRFANNKQLNTYAGIDIRRFQSGKTFYKDKINKRGNKHLRKLLFLIIQNMIKLRRYGRNHIIEYYDKLKTQPYNKCHKVASIACVNKLLKLLLHLITHNIHYDYRLAA

SEQ ID NO: 69534 - protein, 409 aa, unidentified
MDVFHDCCAGLDVHKEWVYVCVLSGKGSRPRKFQFKFSTFHHQLIAMRQKLLELHVTHVLMESTGVYWMPIYDVLDGFVEVIVANAQHVMNVPGRKTDESDAEWLAKLLRFGLVKPSFVPPRQIRELRHLTRYRRALVQARASEQNRIEKHLQITGVKLSSVTSKVFGVSGTDMLHHIADGKTDPTDLAALARGRLRKKIEPLREAFASPISEQTQQLIGIQLDQIKRLTTTIEEVEAKIRAKAEPHRAVIERLDQIPGVNQLAAIDIIAEIGTDMSPWKTHRQIAAMAGVCPGNYISAGKRLKNRSRQGNPYLKSILVQVATSAVNTNGSFFQARYKQLKHRRGHKRAILAIAHSMLIAIYYMLSRDQDYREFHPQPAAVVNPISKANALVRQLQSLGYSVALENHHA

SEQ ID NO: 69535 - protein, 408 aa, unidentified
METLHRRCAGLDVHQKEIVACRRIVSGRKVRSELARFATTTQGLLALSAWLAEAKVTHVAMEATGVYWKPVWHVLCHDFELILANASHIRNVPGRKSDANDAAWIADLLAHGLIRASFVPPQPIQELRDLTRTRRELTREIVRHTQRIQAALEEANIKLASVISDILGLSGRRILKTIVAGESDPRRLAELGHPKLACTREDLAAALEGRLRDHHRFLIGQHLKTIEQVEATIGEFDARIEAALAPFRDAAGRLKDIPGVSDNVAQTVIAEIGADMNAFPTADHLVSWAGMCPRLDESAGRKRSRRLRKGAPWLKPVLVQAALAAIKVKNSSLRARYFSLKPRLGHKKAIIAVAAAMLRIIYHMLKDGTFYQDLGPDYRRPRNPQRAARNLANRIRSLGYVVDIKKAA

SEQ ID NO: 69536 - protein, 402 aa, unidentified
MNAVGIDVSKGKSMVAIMRPFGEIVSAPFEIKHTAGDIHSLVELINSVEGESRIVMEHTGRYYEVLAHQLSEANLFVSAINPKLIKDFDNDSLRKVKSDKADAVKIARYALDKWQNLKQYNVMDELRNQLKTMNRQFGFYMKHKTAMKNNLIGILDQTYPGVNTYFDSPARSDGSQKWVDFASTYWHVDCVRKMSLNAFIDHYQNWCKRKKYNFSQSKAEEIYGKAKELVPVLPKDDITKLIIKQAVDQLNSASITVESLRTLMNETASKLPEYPVVMAMKGVGTSLGPQLMAEIGDVSRFTHKGAITAFAGVDPGVNESGSYEQKSVPTSKRGSSDLRKTLFQVMDVLIKTHPQDDPVYQFLDKKRAQKKPYYVYMTAGANKFLRIYYGRVKEYLASLPES

SEQ ID NO: 69537 - protein, 341 aa, unidentified
MMRTIYVGMDIHKNFIQAAAMDEQGNILKEKKFKTTDSEIKQFIESLKAQKIQAAIESTCTWYHVYQALDALNVETTLVNVRRTKVIAESKIKTDPLDAKNIAHCLRTGFIATSYIPPKTVIEQRNILRHRLSIRKELTRYKNKIHAILLMNGIHQPYSDVFGIGGKQFLKTVKLPESARYNLDSYLNIVETLTHEKTQITQKIETLCKNNQQAMLLTSIPGISYYSAMTIITEIGDIKRFPNTKKLCNYAGLVPRTIQSGNHVYRGRILKECNQHLKWILNQDVHSHIRHCPNSSITKLYHRVGQKKGANKATVAASRKLLTCIWHMLMRNETFKYSNDN

SEQ ID NO: 69538 - protein, 349 aa, unidentified
MSQIIRIGMDTSKHIFQLHGVNAWEQVALRKRLGRNAMLAFFAKLPPTIVVIEACGAAHYLARELGKLGHTVKLIAPQLVKPYVSRNKNDGRDAEGLCEAASRPRMRYVPVKTAEQQAALMLLGIRDQLVARRTQLSNTIRGHAAEFGLIEAKGLDKLASFLAAIEQNEGVPVPARELFAMLARQYAQVQVELKAIEAKLLAWHRADGLSRRLAQIPGVGPVTAAALVMKAPDPHAFRSGRLFAAWLGLTPKDHSTAGKTRLGKITRAGDERLRQLLVVGATSVVKQAKARGRGPRWLIELLKRKAPKLAAVALANKMARIAWKLMTTGESYDSERLETRIDAEVAVAA

SEQ ID NO: 69539 - protein, 364 aa, unidentified
MQKISTMRTSERIIFKGLTIGLDLGDRSSFYCVLDEAGEILLEQRLPTTPEAMKQTFGRMLRTRIAMETGTHSPWVSRLLTALGHEVIVAHAQNVRLIVKSRRKDDRLDARTLARLARIDPQLLSPVQHRSAQAQLHLTEIRARAGLVSARTALVNAARGLVKSYGERLHKCGTQQFRRETTSGLSTGLREALEPLLREVESLNERIKEYDRRIERMAKETYPETVLLKQVKGVGDLIALGYVLTIEDPHRFRKSRDAGCFVGLQPGRRNSGESEPQLHISKQGNEYLRTLLVQGAHYILGPFGEDSDLRRWGQKLAARGGKNAKKRAVVAVARKLAVLLHRLWVSGEVYEPLHNSQNEVRAVA

SEQ ID NO: 69540 - protein, 331 aa, unidentified
MNYSHFVGLDVGKKTFDASLMSADEKELSHKSFDNTPEGIQSLLDWIAGYHLSLSKLLFCAENMGSYVTELSVSSVSMGFSLALVCPLTIKKSIGLQRGKNDRIDAKRIANYAALHYRKLELYKLPDKDLVRLRGWIIIRDNLVKQKVSSIKLLETFSQMAKLANVTEAISFLEEQLKSIKEKILEVEKDMEQLIAVSTSLYTNYRLLRSIKGIGIINAIVLLCVTDNFQRFDNPRKFACYCGVAPFEHTSGISIRGKTQTSSLANKEVKVYLTRAAITTISWNPQMKAYYKRKIAEGKHKASVINAVRAKIIARSFAVIRRQTPFVTLAV

SEQ ID NO: 69541 - protein, 343 aa, unidentified
MKDTIYDHYIAIDWSIENMAIARMTKNSNKITAIDVPSDIEDLQAYLKNLRGTKILAIEETTTSQWLYTELKEYVDRLFICDPNRNKLLNEGPKTDKIDATKLVQLLKAGLMKAVYHSTDKFLYLRRVVSGYEDLVKAGVRLKNQRYALLRACGKRGKEKAGSSIDSRGEQFVLDCLDRQIEAYEEEKGCYEKEFERLARKNPEIKHQKSLPGIGTINAVKIVARVVTPHRFPDKGHYLSYTGLIKLEKTSGGKSYGKRSPRYSRQLKSVYKSGVLAAIAGNNPIHDYYQHLIQENGYPERNARQKACRWLAILSLGVFKSGKKYQPFRRNHVKDNKEGRSGL

SEQ ID NO: 69542 - protein, 368 aa, unidentified
MKKLITFVGLDVHKNSIDVALADAGRNAEVRHYGTIGGGLDDLDRLVKKLSTANRELHFVYEAGPCGYDIFRSLTSKCLDCAVVSPAHIPKKPADRIKTDRRDAMMLARLHRAGELTYVFVPRADDEAMRDLTRAREDAKKAQRVAQQQLNCLLLRLGFRYPRDNWTRQHFLWLADQKMPMPAQQVVFQEYINAINEATARLERLTKQIEALVPAWRLAPVVMALQALRGVSLVVAVTTIAELGDLTRFEHPKKLMTYLGLVPSEHSSGEKTQRGKITKTGNGHVRRVLVEAAQAYSHPARVTRPLLKRQEGLSQDVLDIAWKCQVRLCTRFRRLMAKGKNRNAVITATARELAAFIWAIAKQTLIAA

SEQ ID NO: 69543 - protein, 337 aa, unidentified
MNATTYGVDIAKNVFQVHWVEPASGEICRRKLTRAKFIEFFARREAGAVVMEACGGAHHWARELSALGHQVQLLPPHEVRKFVSGNKDDAADARAIWLAAQHQDIRRVTPKSAQQQAELSVHRVRTHWMSVRTATINALRGLLYEFGVALPKGRGAALRWLGEHRLRLEEQLPPVMVRLLDAQLQALHELDDRLSALEVEIGQVQRSSEAARRLRQVPGIGLLGATALAATLGDGSAWRNAREFACCIGLTPRHSGSGGKVRMGGISKRGDAYLRTLLIHGARNLVRCAEPAPWVAQLLQRRPFNVVATAVAHKLARTAWAMTAHGTAYEERLKAAA

SEQ ID NO: 69544 - protein, 345 aa, unidentified
MDKISVIGLDLAKNVFQVHGIDYDGEVVVRKQLTRSQLRRLFAKLAPCLIGMEACGGSHYWSRELTRLGHTVRMMAPVFVKAYLKSNKNDRNDAETICEAVQRPSMRFVQPKTPEQQAVLHLHHGRRLLVRQRIALSNHMRGVLSEYGIVLPQGAKAISQRLPELLEDADNAQPMLARHLLAELKEGHDQLIERIERIEVWIKAWYANNSVSQRLASIPGIGVLTATALAATVGEGQDFRNGRQLAAYLGLVPRQISSGGKERLLCISKRGDSYLRGLLIHGARAVIYHIQRRLKASQPGGNPWVEQLLLRCHPNEVAVALANKMARIAWVLMARNETWRAVHPV

SEQ ID NO: 69545 - protein, 311 aa, unidentified
MDGVFIGIDIAKHYCDLAVIPDGTQKRFMNDEEGQQAILAFILLLKPARIVIEASGGYEMWVARALAEGRLPVVAVNPRQVRDFARATGRLAKTDTIDAGILAQFAKAIQPDIRPLPEKEAEALRALVARRRQLIQMLTMEKNRLEKSPSAGSEDIRNHIYYLTEALEKIDKDISRNIRKGPLWKEKETILTSTPGSGPVISCTLVAALPELGTLNRKAIAALVGLAPFNRDSGAYRGRRTIWGGRSHVRAALYMGTVSAIKFNPAIRSFYKRLVDAGKAKKLAITACMRKLLTILNTMMKNKATWIEVAS

SEQ ID NO: 69546 - protein, 343 aa, unidentified
MQAVKTIGLDIAKSGFQVHGVDADGQVVFRRQLKRRNVLAFFQKVPSCLVGMEACATSHQWSRELQALGHTVRLMPPAYVKPYVKRQKNDATDAEAICEAVTRANMRFVATKTPEQQSGLMLHRTRHLFIRQQTAVINAIRAHLAEFGIVAPVGRNGLEQLLNVVADAGDKRLPEVARTCLMALGTQLRALKAKLLELDRMITAWHRSNETSKRLDAIPGVGHVLATALVASIADPKVFRSGRDFSAWIGLVPKQHSSGGKDKLGSISKQGDRYLRSLFTAGALAVIRYAKIYGTKHRPWLTALLARRPTKVAAIALANKLARMAWAMMSRGERYKEPVALAA

SEQ ID NO: 69547 - protein, 352 aa, unidentified
MNETSTYRIGFDVAKGVFQVHGVKNEAGEPVAIKRRLKRGSVEEFFAKLPASLIGMEACGSAHHWARLARKHGHEVRLMPPAYVKAYVKRNKTDAHDAAAICEAVARPSMRFVAVKSEMDQATLMLHRTRASFVGKRTAAANQLRAAFAEFGIVAPVGVRGFKELLESIESAAESFARLPQALRLVLAELAWQWQSCERAVRRMDVEIAAGVKTSERARRLRAVPCIGPVGASAIDALLPDPQLFRSGRDFAAWVGLTPREDSSGKTIRRGPITKKGDGYLRRLLVLGATAHLARVRRGQTRGASPWVIRMAAHPKRKLAAVALANKTARIAWAMLAKGEDYRAPAAALQAA

SEQ ID NO: 69548 - protein, 345 aa, unidentified
MGVIIGVDPHKASCTAAVLDERGELVDQQRFASTRTGSRALGRWAKRWPERRWAVEGASGLGRRLTQQLVGDGEPVVDVPAKLAARVRLLSAGHGRKSDAHDAVSVAMAALGTTRLGQVRLEDHTAVLRLLSDRRDDLVRQRTRTLNRLHVLLCDLLPGGAKRSLDADTAAALLRRLRPATAPARTRRQLAVDLVADLRALDRRITAVEERLRHAVTQSATTLIELFGVGPILAAKLLGEVGDVRRFATKHRFAAHNGTAPIEASSGEVVRHRLSRAGNRKLNHALHLIAIVQIRHPTAGQAYYRRKLAEGKSRKEALRCLKRRLSDAVYRQLLADQHQPVQAQA

SEQ ID NO: 69549 - protein, 418 aa, unidentified
MAEVMIGIDPHKSSHTAVAIGSGEEPLSELQVAACPSQAGTLLAWAAAWPERTWAVEGAAGLGHLLAQQLVAAGEQVVDVPPKLAARVRLLQAGNTNKNDPNDAFSVAVAALRSPAKRPVLAEDHAAVLKVWAKRHRDLARLRNQAVCRLHAVLCDLVPGGVPKEITAGQAARILEQVTPAGAVARARCELAAEFLTDIRRLDAQRREAGTKLAAAVKASGTSLTGIFGVGPVIAGTVIGDVRQVFRFGSRGHFAAYNGTAPAEVSSGGRKVFRLSLRGNRRVNHAIHMAAVTQIRHKHSQGRAYYERKLAEGKTHKEALRALKRRISDAIYAALVADARHAAAICSKGPGGQPGNHSVSRAASSHPARQLFGQATPGPVTTLRPSATAGPLLTQPSRAPRRRSGHPPAASKKPQTTT

SEQ ID NO: 69550 - protein, 353 aa, unidentified
MNDTSSIAWLGLDAHSKNCVLAQLDDQGNEINDWRFPTDPQQLLKHVQAIPATVKRLMLEESNLARWLCRLLKPVVQQVIVCDARRNRLISHDANKHDRRDAFALARLLRLNEFKPVWQPTDDQRVLFKRAAQAYENSVLRQTRLKLQLKSLFQHWGLFPSGATVYSQSGRRAWLQKLPYDPLRSQARLLYELLDQALAGQTQARRLMCQSGRIFPEVQRLRTAPGVGLVGAHLFVAYVQDPHRFAKFSRLTKYCRLSIRDRSSDNKPLGFKQLDRQGNGVLKAVSYRAFLQAAKRRSGPVWDFYQASLRHTGSTTHARLNTQRKILLVLWTLWLNGKDFDPIQFSRSQPIDV

SEQ ID NO: 69551 - protein, 389 aa, unidentified
MPSVANRTEASTTIRTDLAAIFISLELSRSIWLVTSVSPGSGEKMSKHSVRAGDVAALLARFSELKHKALARTGKSFAIVAIQEAGLDGFWLHRALEQEGIESHVVDPASIATSRRRRRAKTDRIDGEALLRALLAYKRGEPRVCTMVRAPTPEDEDRRRLCRERKTLIAERVEHVNRIKGLLFSQGISSYEPLRRDRRQRLEDLRTGDGRSLPTHLKTQISRELDRLELLLDQIKLAEAERDALLAEDQAAAPEPPGRMLLEFKGIGAEFAATLWLEGLFRRFDNRRQLASYAGLAPTPWQSGSVDREQGVSKAGNPRLRAILIELAWLWLRHQPQSALALWFKERVKRNGGRMKKTTIVALARKLLVALWKYVTAGVLIEGAVMKVA

SEQ ID NO: 69552 - protein, 332 aa, unidentified
MSKRIIAQNEEIVIGVDVSDWRHNAAVVRTKGGELIEDNEVKPDYESWRKYLDKFPGCAVTVVYESGPQGYNLYDAIRKLGREAVVIAPVKHAGVKTDKRDARAIAHDYLAGRAKAVTVPDAWKREARQVLRLRAQYMKALVRTRNRTSALIRFHGLTNRLAPWRKSAVSGHLKFCLESLNTTEKFFTEMIRMLDNKMEQIATEPQLRPTVRKLTLIKGIGTLTALEIALEVADISKFKSSAEFASYTGLCPGEWSSGNTRRQGHITRRGPGRLRGALVRSSWTLVRCNAEEKKRFETLAARAGKKRAIVATARRLAVTIWWTLRESNEKAA

SEQ ID NO: 69553 - protein, 344 aa, unidentified
MDYHLTVGLDLAKQVFQVHGTDSQGATIFTRKIRRHDLLAFFEKLDPCLVGMEACGSSHYWAREISSLGHEVRILPAQRVKPFVIRGKTDATDAAAINTALRQPGIRAVPIKTAGPQAYAMLMRTRSLFVRQKANAVNALRGHLAEFGLVAETGVTNVGKLAAALKAETDRNIPPSARFVLDEIFSEIDLLTARIKTIDARIASEAKKDDDVQRLTSIPGIGTLIASTIKAHVPDPNSFKSARHFASSLGLTPRSNSTGGKSKQTRISKMGNRELRSLLYIAAVSVLIAVRRYGKGSPWQLRLLERRPFKVAAVALANKTARVVWALLTKGGCYRKASELAQAS

SEQ ID NO: 69554 - protein, 380 aa, unidentified
MKKACGLDVHKESVFACILDEKGEKIFEKRYGTLTPDLIALRDTLVEYGCGRVAMESTSIYWMPIWHILCSDFELTLVNPYFVKQLPGRKSDVKDAHWIAECLYKHSLKSSFVAGSVQQQMRQYSRQYRRLRKNRVRLNQQMDNQLQRCNIRFSNYICNQGRNISLRKIIDAIILGERDPTKLCQLVHGSTRKKHGEQVITNSLSGVIQQSDIDMLIQCMEQLHLIEKQQATCLNHLEELANTHFAEEISLLCTIPGISTLSALCILAEIGNDMSAFQKATHLVGWAGLRPRNDETAQKIKSRNILHGNKYLREILVEISWAAIHSKKSFLSKKFYILSKRKVSQKAIIAITRKILVIIYNVLKTKQPFDWNRNMQATKA

SEQ ID NO: 69555 - protein, 318 aa, unidentified
MARIICGVDISSRTLDVCLGGMGLQAQFANSSEGIAQLGALCLQNDVELVAMEVTGGYEQKALHGLSSMGLPVAILNPRAVRQFAQSMGRLEKTDAIDAAIIAQYAAVRKSKPVLVAPARQQQLRALVTRLRQLTGLRTAQRNPARLVEDELVRRCFLELLSLVDAQIGELEQQIAARIASDPLWRQLDPVLRTIKGVADRTVARLFAELPELGTLPNKTVAKLAGLAPLARDAGQFQGKRHVRGGRAPVREILFIVGSVVARYEPDFVAFQDRLRQAGKPPKEVRIAVAHKLLTRLNAKARDLRQGQPSAAQQAEAA

SEQ ID NO: 69556 - protein, 385 aa, unidentified
MVRTEAKLTIIFGSGQTHHHFRISVGLDVHARSVLGCALDGDTGEVFQQRLSPDHGEIVAWLGDLPGPVAVAYEAGPTGFGLARALAAAGITCEVAAPSKLIRPTGDRVKTDARDAAHLARLLHLGQITAVTIPSASQEAARDLVRAREDCRGDLMTARHRVSKLLLRQGIVYSGGTTWNRDHERWLRAQRFDNPALQLTFEAAFDAMLARRDRRTRLDDAITAMAADSEFTPVVHRLGCIRGIATLTAFGLAVEVGDWHRLTGRSIGAYVGLVPCEYSSGDSRSQGGVTKTGNGHARRLLVEAAWHHRSPYRPSEQLRGRWGLACPAARARGQAANRRLHARWRSFDARKKRSVVANVAIARELAGWCWSLAAPVQKEHPWTDD

SEQ ID NO: 69557 - protein, 378 aa, unidentified
MNRIIKIGMDVHTTNYTLCIFEPSFEHDGTVHCITQVKPEVKNIIHVIETFKKKHENEELNIVCGYEAGCLGYSLYHELKEKGIECVILAPTTMKTEKGGRKLKNDYRDAKMIAECLAYGGYSAVHVPTELDNSVKEFIRMRDDIKENLKSIKQQIIAFLTRNGKQFDGKSYWTQKHIDWINTISFSEPLLQDTLKEYMIEYNHLCDRVETLDKQIEEVSLKEEYVEKVQQLQCLIGIKTHTALSLIVETSDFNRFKKGNMYSAYLGLIPGDDSSGGHENKLGITKAGNSHLRKLLVEAAQGYTRGRVGFKSKDLKSRQEKCSSEVVAYADRANERLRRKYYRMTLRGKRYNVAKTAVARELACFVWGIMTDHMDLCR

SEQ ID NO: 69558 - protein, 310 aa, unidentified
MTKSIGIDVSKETLDAHRTDDGAHAQFQNDSKGRRALLRWIGDKVSLVVFEATGAYHRGLELDLAGASVPFAKVNPKQARRFAQAIGKLAKTDRVDAAMLAKMGAVLDLSPQTPATPELHDMRELLAARRALIKNQTAARTRLATASVGSVQTILKRRLKQIVKDIDQIDDALRNLSGRDMTFARKVAILASIPGIGQLTAITLLIDMPEIGGMDNKQAASLAGLAPVSQSSGKWQGKERIQGGRAQLRKALYMPALVATRVNPDMTRKYNQLIEAGKEKKVALTAIMRKLLVMANALLRSNRMWTKARP

SEQ ID NO: 69559 - protein, 458 aa, unidentified
MRRNKSTDRDRRAMAVVHPNAAAIDVGATMHMAAVNADRTPEPVRSFGTFTTDLHRLVDWFSECGVDTVVMESTSVYWIPIFELLDARGFAVSLVNARDAKHVPGRKTDVSDAQWLQRLHSFGLLRASFRPKGQIAELRAYLRQRERLLEYGASHIQHMQKALTEMNVQLHHVVTDITGATGLRIIRAILGGERNPAVLARMRDSRCHASVETIEKALAGNYRAEHLFALEQALALYDTYQQKASACDTRIEAVLKELSNRRGRQVGPLPSPRWYRSRQQNSLLFDVRAALFALLGKDLTQINGLGPYLALKLIAECGDDLSAWPSAKHLTSWLCLAPSNKISGGKVLSSRTRPSGSRAAALLRLAAATVGRTDTALGAFYRRLSARIGKAKAVTATARKIAVLFYNAVQHGMEYVDPGASSYETRYRARVIDNLHRRAKAFGFVLQPIDPTPSMAVS

SEQ ID NO: 69560 - protein, 427 aa, unidentified
MPYNMAGIDVHKRMLHVVVSDVEVDGEYDFTRQVFGSSPEGLRSLAAWLMEHQVEEVVMESTAQYWKPVWGALERYWRPICQKREGALQTSGTLHLAHALSNRGRRGRKKDFRDAERLVKRLVANELILSFVPDAKQRLWRTVMRTKYQLTRNRVQLQNRLEALLEEAHIKLSSFVSDLLGVSARRMLKAIAEGETDPAALAALADGRLRAKPEQIRDALGVCAELHPVYRRLIQMALEESASIDKRMEQLEQQMADLLRPNQGQVQRLAEVPGLGLDSAQQILAEVGATAATFPSEKHLASWVGACPGNEESAEVNYSRRSPQGNHHMRRILNQAANAAVKLKGSIFEILYRRHAPRLGHKHTIGIIAHKLCRLVWKILHLGVRYEERGPAVSKISKQKRTQKMIRELRRLGYRIELSTSQLATSA

SEQ ID NO: 69561 - protein, 350 aa, unidentified
MRFYTGQHSFHCGIDLHAHTMAVCVLDAAGEIVLERNLATTPEAFLEAIAPYREGLVVACECIFTWYWLADLCAKEEIAFVLGHALYMKAIHGGKAKNDRIDAHKIAVLLRGGMLPQAYVYPPGMRETRDLLRRRLHLVRKRGQLLAHLQNLRHAYNRGAFAKRIAYPSHRDGVVAHFAGEPMVQANAALDLSLLDHYDKLLVDLELRLVRQAKKEAPHGFHLLRSIPGIGKVLAMTIVYELHDVHRFERVQQFASYARLVKCAKESAGKRKETSGAKMGNVHLKWAFSEAAVLFVRHSAEAKTLLARLTQRHGKGKALSILAHKIGRAAYYVLVREKPFDAAKFFAHAR

SEQ ID NO: 69562 - protein, 426 aa, unidentified
MNRLALVAGALPGICPFGRETGADPAHHDGLIRSLPDPEGRGPLQACLVVISTRADADRSNVTPERRSVAMAIVANTYAYVIGVDAHARTHTFVAVASRTAAVLATSTFPATAAGIRRALAWVGRRTGGDLATLVVIEGIGSYGAKAARAATEAGYAVAEPGPVAPALRRGAGKSDELDAELIAKSVLGVEAALLRWPRREEGIRAAVRVLVVARDELNVERTRAINALTALVRTVDLGVDARGPLSKKQIATIAAWRARREELATATARREAIRLARRIGTCDEELQDNRRELTALVEASEAAHLLKEPGIGAINAAVVLTAWSHRGRIHSEAAFAAITGTCPIPASSGNTTRHRLNRGGDRRLNRALSSIALTRMSHDPATRHYVTRRRAEGRTTKEIRRSLKRYIARQLYRRLTSPPAQASRA

SEQ ID NO: 69563 - protein, 340 aa, unidentified
MERYFVGLDVSKNETAICVRREDGFVVRSTKVSTEPEEICAALKGLENGLVRVVLETGRMSNWLHGELEERGLPAICVDARQAHAVLGQMHNKTDANDAAMLAELARTGFYRKVAVKSRRSQERRALLTARTAAIDARRNAENTIRGLFASFGIRLPLQPRIYEARVRTALEGQEVLARIVLPLLAVRTEALRQAATLTKELVRQTKGCDACVRLMTIPGVGTVTAATFVATIDAPERFAKSRSVGAYAGLTSRRHQSGAIDYGGRISKRGDQMLRTMLYEAANSLLCRVRPGRGQELKDWAMALKRRTSHKKGRHSALGYLSPINYERAAKERLQSVSP

SEQ ID NO: 69564 - protein, 409 aa, unidentified
MLFVGDDWAEDHHDVEVMDGSGRRLAKARLPEGMAGMARLHAMIAQALGDDIEDDAVQVKIGIETDRGPWVQALVAAGYTVYPVNPLQAARYRERLAVSGAKSDAADAHMLADIVRTDSHQLRPIAGDSAQAEAVKVVTRMHKTLIWERTRAAQRLRHALREYFPAALAAFEDLDAGDTLELLTKAPDPVSAAQLGFSQISAALKRARRRDIAVKAAAIQAVLRADEYLGQPAVVTAAYAATVRALVALLGTLNEQVKALQGQVEAHFGRHPDAEIILSQPGLGAILGARVLGEFGDDHHRYASAKARKNYAATSPITRASGKKKTIMARFVHNDRLIDALMTQAFTSLRFSPGARAYYDRQRARGANHNAALRQLANRLVGILHGCLKTSTPYDETTAWSHHLTKATT

SEQ ID NO: 69565 - protein, 320 aa, unidentified
MQTPTEVLNIGADVAKDEIVVACSQGRFPARKLANQRTALLAFLKGLPAGSRIGMESTGIYHELFASAAHKLGFVVFVLNPKDARHYAKAVGLRGKTDRVDAELIARMIAHEHTKLHAWIPPTPEQREIARLIKRRAKLSSLRQALAMSLKGLDGFAADLKGLRARFDQLIARIDQQVKALVEANPDRKQHVTHLRTINGVGPVVSAALVNALERAPLKSADAFVAFTGLDPRPDDSGQHRGKRRLSKRGPAELRRLLYVAAMSAKKTKAWKPLFEHYRAKGLSSTAALVILARRIARTAWSMYTYNTEFDPARLTKSLT

SEQ ID NO: 69566 - protein, 343 aa, unidentified
MKSQKVTTWHELAGCPAVGVDVCKQHLDIMGLCGTIGYSRRISNTAQAIGAFIKALVGHHFKGTILCEATSHYHLVLTVMLCEAGLDIRVVNPLLSSKHAKSAIRKTKTDRVDAQILAVMVLTEPNLPPPLKLTRQHCLVRHTLGLIHSQEKHLQGMKRALASYRERLCQLSLETGKAYKETVEAFNQLQCSHKQLLSELESYLLENQPDRQETIACVNEVPGITRRNAALFTFVLDPQATSSKSWIAYCGLDVAIKESGTWRGHGKITKRGPAWMRKRLIQAAWGAAMTCSQGRLYYDALKAKGRKHKEALVIMAKKLLSIMYTLIVHHKKFDYSKAFQIAA

SEQ ID NO: 69567 - protein, 412 aa, unidentified
MDVMSSCCCGLDVHKKTVAACLLTSTEGPEPVKEIRTFRTMTADLLALADWLQEAGCTHVAMESTGVYWRPVYNLLEGQFELLVVNAQHIKAVPGRKTDVKDAAWIAELLRHGLLRGSFIPSKPQRQLRELTRYRSTLVQDHARALNRLQAVLEDANLKLASVVSDINGVSARAMLAAILAGQRDVETLADLARGRLRAKRDQLREALEGRVTAHHSFLLTEHLSTLEYLDEAIARISAELDQRLTAEQEAIALLDTIPGVGPRAAEILIAEIGTDMSRFPSAKHLASWAGMCPGNHESGGKRLSGKTRKGSRWLRQILVEIAHVASKTKNTYLAAQYRRIAARRGKKRALIAVGHTVLTIVYTMLTRKQPYQDLGAAYFDQRERHRVERRLVQRLERLGYEVALQPKALAS

SEQ ID NO: 69568 - protein, 455 aa, unidentified
MHKRTTGDRPELNPVNVGAAAIEIGSKMHMAAVDPTCTDAPMRAFGTFTQDLHDLADWFMACGVTSVAMESTGVYWIPAYEILEQRGFEVILVNARYAKNVPGRKTDVSDAAWLRQLHSYGLLRGSFRPDGEIATLRAFLRQRERLVEYAAAHIQHMQKALMEMNLQLHHVVSDITGATGMRIIRAIVAGERNPDVLATYRDVRCHSSVETIRAALVGNDRDEHVFALTQSLELYDTYQAKMLDCDRKLESLIAALTDRGAKPVGKLSRPRVKTKQVNTPSFDVRAALYGVLGVDLTEIHGLGPSLALKLIGECGTDLRAWPTAKHFTSWLCLAPGNKISGGKVLSSRTRRSSSRAAALLRLAATTIGRSDTALGAFYRRLSSRAGKAKAVTATARKIAVLFYNTLRHGMTYRDPGADHYEEQYRSRVLANLKRRAKSLGFVLQAVPCDAEVAVS

SEQ ID NO: 69569 - protein, 416 aa, unidentified
MNAAGIDVSSRKSTVAVLRPFGEVVRLPFDVSHSSEDLAGLARQLKALDGETRVVMEHTGRYYEPVANVLHEAGLHVSAVNPLLIREYGGNSLRRVKTDKADAVKIARYALDNWADLRDYTPMDTIRYDLKTLNRQFQLASKQKTAIANNLIALQEQSFPGIRKCFDSPVRQDGTQKWVDFTYTFWHADCVRKHSLNAFAERYRKWCKRHGYIFKQSNAEEVYALAKSAVTLVSSSEVTKLLVQEAANQLTGISHSVETYRAEMNRLASMLPEYPVVMEMYGVGESFGPQLMAEIGDIRRFEHKKSLVAFAGVDPMPNQSGEKNVRSNRSSKRGSPYLRKTLFNIMGIYLRCSPADEPVYQFLDRKRVEGKPFYIYMTAGANKFLRRYYAKVRDYLATLDGLPPVDMDSTGLSQPD

SEQ ID NO: 69570 - protein, 344 aa, unidentified
MDNHTQYLGFAGVDLAKKVMQIHFVTEDGEITDKSAKRAEFLDFFRNRGKCLIGMEACGSSQDWARKLEAMGHEVHLLPPKAVKPFVSGQKNDHNDAIGIYKAMFNGVRRVPVKSTEIRDLQTLRRIRSQVTKDKVKEINHVRGLLAEYGIVMGKSLNAFNKDISSALGILTERGDVSPLVAEELRTTVEAIKAKIERQKKLDQEIEQLARGCKNYENFLKTPGVGPFTAAMLCVLLCDPSIFANGRQFAAYIGLAPRSRGSGGKNYVTGIPSKFNCDSESRAVLVECAQAIARCKNKSLWVEEILRRKPKKVALIAIANKLARQVWAMANKGESFKQMAVLTA

SEQ ID NO: 69571 - protein, 321 aa, unidentified
MSTFHLGIDVAKAKLDCALRLKDGKIHSKVIANTAEGFEQLHAWLIKQQATDSHICMEATGIYWEEVAQFFASREFKVSVVNPVQIKAYGTSRLTRSKTDAVDAKLIADFCFERQPALWQARSEQEIILRALVLRLESLQTMRIQESNRLEVARDAVYDNIQTHLDWLDEQIKQLINRINTHIDQHPNLKQQRDLLDSIPGIGERTIAVILAFYADTSRFDNSRQAAAFAGLDPRQYQSGSSVKGKPRISKVGHAFLRKALYMPAMVTLYKTAWGKQFKDRLAQAGKPPKLIIVAMMRKLIHVAFGVLKSEKIFDSSLHAA

SEQ ID NO: 69572 - protein, 312 aa, unidentified
MHGLFLGIDVAKDKVDVHVRPSGERLTVGTDETGLGELVTWVRERAPALVVLEATGGYEVVVAATLGSAGLPVAVVNPRQIRDFARATGQLAKTDALDAAAIARFAEAVQPPGRPLATAAAQARGALVARRRQLLDMLGAERNRQAQARDPQLHRQIGAHVKWLTKALAAIDRELHDTIRATPLWREQDALLKSVPAVGPVTAHTLIAEVPELGQLGRRQIAALIGVAPLNRDSGTLRGRRMIGGGRAPVRRVLYMTTLVAVRYNPVIAAFYARLTAAGRPKKVALVAAMRKLLTILNAILREKRPWQPELA

SEQ ID NO: 69573 - protein, 343 aa, unidentified
MSIVTMRIVFVGLDYHASSVQVCVMDKDGNMLVNRKCANDWRAVMAAVHERCGKEVQVQAAIESCCGAADLADELISRGWMVQLAHPGYVARMKHNPDKTDYGDARMLADLQRLGYLPRVWLAPEEVRELRRLVRYRQDLTKDRKNLKLRIGATLREARQKAPANVNAWTKAWLAWLDASAELSPNARHVTNRRLRRLQEVQEELRRVDKRLERQTREDPLVQKLLTIKGIGLVTATTLRAEIGRFDRFRTGKQLARFCGLSPRNASSGKRQADAGLIKAGNNELRALLIETAHRLIRRDERWTALAARLSARGKPTGVVVAAVANRWVRWLYHQAQPSCLAA

SEQ ID NO: 69574 - protein, 361 aa, unidentified
MKRVQSNTLDFSGQNIYVGIDVHLKSWSVAILSEHSVLKRFSQIPEPEALHKYLVSNYPGANYFSVYEAGFCGFWIHEKLMDLGITNIVVNPADVPTMSKEKLRKTDAVDCNKLARELRSGSLVGIYVPKADVLEMRSLIRMRNLIVKDSTRAKNRIKSLLRFHGVDIPEEFTRCSIGCWSKRFLTWLHSLELSTEYGKKTLELHLEQFVRLRKMLLQETRAIREISRNAPFERPIRLLTSVPGIGVTTAATLMVELDGIVRFRNEDHLASFIGLVPMCHSSGESNGTGDITVRRHFMLRCLLVEAAWIAIRKDPAMTVAYTEYRKRMNPQKSIIKIARRLVNRIYYVLKHEKEYIPCVVK

SEQ ID NO: 69575 - protein, 371 aa, unidentified
MKNYSTYIGMDVHKNSIDIAIAEEGRKGRVRHYGKIDGTLTALDKVIRKLVSRGSRLHFVYEAGPCGYKIYRHLIGQGFDCDVVAPSRIPKASGKQIKNDRRDALMLARLHRSGELTPVYVPMAEDEAIRDLTRAREDAKCDEKRSKQRLLSFLLRSGIRYTGGSPWSKAYMRWLSDIKMPHRSQQVVLQEYIGTVNQCKERVQRLTEQIQQFLPEWHLFPVVRALQSMRGVSTIVSATTVAEIGDLKRFQKPSELMSYLGLVPSEHSSGAKTKRGSITKTGNGHVRRVLTEAAWSYRLPARISRALLKRQEGLPKSVCDIAWKAQLRLCSRYHHLWNKGKAKQVIVTAIARELCGFMWAIANEIDVSANT

SEQ ID NO: 69576 - protein, 381 aa, unidentified
MSRRRGPGPSSVLLTPDHAGNVVGVDPHKRSLSATVVDPRGGLLAGEHFRVSGDGHRALEAWARQFGPIARWGVEGASSWGRHTAVFLVRRGYDVRDVCANRTPRSDRARQRGKSDALDSERIARETLAHALLPRAFKRAGQDSGPDECHELLALWHNQRRSILASRQHLVNEAENMLCELPLELREQLPDSKAVRPRLAALAGRNRRRRYDRPTALRLRLLDEYRARIVKLDADEKAVCRELSGLVRASGSTLDQLCGLSTRSVAELLIEVGDPRRFTEGGFARFNASAPLAASTAEGPGEPVRHRYNPGGNRRINRILHVMAITQLRCEPRAQAIYSNARANGHTKKEARRILKRHLSDVIYRRMIRDLAAHAQPLLAA

SEQ ID NO: 69577 - protein, 321 aa, unidentified
MNESDGYWGIDVAQATLVVAQAGHGPSTTYPNTTDGHETLLALLTAAPVQRIILEATGGYERGIVATLGAADLPVVVVNPRQVRDFARATGQLAKTDAIDAQVLAVFGAKVQPELRPLPTTEQVVLRELLTRYSQVQQMLGAEQTRLLQALGRQAQRPLRKQLKRHIAFLERELHELDADLDDQLRQSPLWREQDDLLQSVPGIGNKTARTMLAFLPELGTVTAGEIARLAGLAPLNRDSGTRRGHRRTGGGRPRIRAVLYMATLAAIRCNPLIRTTYQRFLKAGKPKMVAIVACMRKLLVILNAMLKTKTRWQSLVTTTT

SEQ ID NO: 69578 - protein, 443 aa, unidentified
MKRRAYRATDVKDLALEEVSKRAPQGAATAGLDIGKYEVRAVVRWKDGSFERPWKAQNPSQIGVLVGLLRKVADRGSLIVAMESTGTYGDAVRTQLDQAGLAVHRVGGKAAHDYAEVFDGVPSQHDGKDAAVIAELAAFGKASPWPYRQKKDADAAMAYWADWLDVQQGIQQLWTGRLESLLARHWPEATRLLELSSVTLLEALAHYGGPAELAEDASASTRLATWGRRGQETAKIEKFLASAGQTVGVFQGVWDRKRMRQVATMALAAYRETQKARRELERLAKDNEVVQRQAKVVGMATACVLWVALGDPRDYPCGEAYRKAMGLNLKERSSGKHQGQLKITKRGPSLVRRWLYFAAMRTVQSVFVQPWFEAKKAKDKDRGKGALIAVARKLALALYAVGARGQPFAPWRLFSQRECQRKVQRAERSARQGAGKTAETRSF

SEQ ID NO: 69579 - protein, 316 aa, unidentified
MKTQVFVGLDVSKQKLDVALRPQGRHFVTPNNDRGIKQLVKRLAALKPQLIVLEASGGYEFLVTAALAEAHLPVALINPQAVRKFAGAAGKLAKTDKIDAQVLAHFAEALRPEPRPLPDQDQQVLKAALQRRQQVVKMIGQEENRLEKTFIPAPRQDIEAHLIWLRRRLKELDRELDDQIRRSPLWRDRDQLLQTLTGIGPIVSRAVIAQMPEIGTLPGKKAVALVGVAPYNRDSGRFRGKRMIRGGRSHLRHMLYMAAVVASRFNPVIRAFYQRLLAAGKPKKLALTACMRKIVLIINAMVKNNQPWNPFATQVP

SEQ ID NO: 69580 - protein, 390 aa, unidentified
MNDVNAHLDSGLGRMSNEYAGYVGLDVHKDTIAVAVALPGREAAYDHGEIANNLKAIKKLVNRLSKQFEGQVVLFAYEAGPCGYDLYWQLTALGHDCQVVAPGLIPKKPSERIKTDRRDARKLAVNARSGELTPVWVPDAEQEAMRDLTRTRDDFKGQERKARQQLNAFLLRHSKVWPTGKSRWTKTHWRWLEELRFEQDWQQIVLQSYIDAVREATARVTAITTQMERALPQWSLAPVVHSLVALRGVDKITAMVLMAELGDISRFDHPRQLMAFLGLVPSEHSSGDKRQRGAITRTGNRHARRVLVESAWCYRFPPRQTAHLRRKAANASKEAQAIAWKAQKRLCCRYSDMIRSGKNTKVVTVAVARELVGFIWDIVCQEMPKVRTAA

SEQ ID NO: 69581 - protein, 339 aa, unidentified
MRVYAGFDLHANNNYLGVVDANGKRLFRKKLPNDPDMILGALDPVRERLAGAVVESTFNWYWLVDLLMEAGYQVHLANPTAIQKYSGLKYSDDTNDAFWLAEMLRLGILPTGHIYPKKERAVRDLLRKRGHLVRIRTSLILSLQSTIARNCGKRIKNNDIKRLRKDMIAPILEYNEDLALIGEVSKEMIDYLTRKIRTIELFIERKLEKKETYRYLHTMPGVGRVLALTISLETGDIRCFEKVGNYSSYCRKVPSEWISNGKKKGKGNKKNGNKYLAWAFSEASECARRDNDTVRAYYDRKLNRTDRMTAHTALAHKLARAAYYIMRDHVPFDPEKLFA

SEQ ID NO: 69582 - protein, 355 aa, unidentified
MKSKNPENIDEVVVIGVDIGKDTFHLVGFDHAGHRVLRKKIKRLALKATFEALPRCVIGMEACMSAHFVSRMLRELGFEPRIIPAVYVKPFNKGQKNDYNDAEAIAEAAMRPNLRTVTEKSQDQLDLQAMHRVRSRLVARRTATINQIRAFLIEQGITVRAGRHRLQSSFEAILENRRDEISPRMRSILMGLYGDWLWVDERIKAISSEIEEISQSEENSANIMTIPGIGPLISTAIVAAIGKGEVFDRGRDFAAWVGLVPRQFSTGGRTILGRISKRGNSYLRMLLVQAANVILMRPHRWDAIGLGPWLRGVVSRMPHNKAAVALANKLARTAWSVLRHGKIYTVVGDETLAAI

SEQ ID NO: 69583 - protein, 369 aa, unidentified
MKHCTEVVFGIDVSKARNAIALADGERGGEVRYLGEIDASVENMRRFVKRLAAKHERLYFCYEAGPTGYGLHRLITEMGYDCIVVAPSLIPKKPGDRVKTNRRDAVSLAKLLRADELTAVWVPDAGHEAMRDLVRARTAAVECLRVHRQQVSAFMLKHGRIYPQKTGWTMRYLRWLQEQRFDHPAHQIALQEMVDAVRVAKGRMIRLEEAIAEFVASWSLGPLVVALQALRGVNLIVAVTFVAEIGDVSRFDNPRQLMGYLGLVPGERSTGDTIRKGGITKAGNSRVRSLLVESAWTYRHPPKIGKTKLYRLEAAPPKVREIAWKAQTRLTARYRALSARGKKTTVVCTAIARELAGFMWSVAREIKAA

SEQ ID NO: 69584 - protein, 411 aa, unidentified
MQVLHSCCCGLDVHKRFVVACLIRGGEDGKPQKELRRFDTLTPQLLSLIDWLQSAQCTHVALESTGVYWKPIFNLMEGLFEIVLVNAQHMKAVPGRKTDTKNAEWIADLLQHGLLKASFIPPQPQRDLRDLTRYRSSLKQERTQHVNRVHKLLEETNIKLSSIFADMMCKTGRAILQALARGEENPEVLADLALFWAPHKRDALVPALQERMRAHHRFLLQELLAMIETLERAIGRLDREIEERLAEHKETLERLDEITGVSQRVLETLFAEIGWELDTFPDAAHLASWVGICPGQKESGGKQMSGRTRKGNRYAKTILVQAAHAAGKTKHTYLGAQYRRLSKGRGIKRAAVAVGHSILVIYYHMLTTSQPYQEKGEDYFVHHDQQEKQRRLVKQLERLGYTVKLTQEHAG

SEQ ID NO: 69585 - protein, 407 aa, unidentified
MRLFAGDDWAEDHHDIEVMDEAGKVLVKRRLPEGAAGMTQVHALIGRLLPEDADDAEVVIGIETDRGPWVAALIAAGYTVFPVNPLQASRYRERHGVSGAKSDGGDAHMLADMVRTGSHQLRPAAGDSPESQGIKVVARAHKTMIWDRTRATQRLRHQLREYFPAALAAFEDLDAPDALELLGKAPDPARAAKLTRAQVAAALKRARRRNIADKTGAILAALRGEHLGQPAALTAAYAATARSLIAVITTLNAQVKILEEQVRDHFGRHPDAEIYQSQPGLAAILGARVLGEFGDDPRRYVSAKARKNYGGTSPITRASGKKKVVAARFIHNDRLVDALMSWAFASLNASPGARAFYDEQRAKGHDHNDALRRLANRLVGILHGCLKTRTPYDEATAWSHRESSLAA

SEQ ID NO: 69586 - protein, 387 aa, unidentified
MAKQNDLSRCLVTLEQDATVIAVIEMGQSSWLVAGTVPGLERNPLKKLSPDPDALLRLLHRWQKESVQAGRAIKRIVVAYEAGRDGFWLARWLRAREIEAYVIHPSSVPVSREHRRAKTDRLDTELLKRAFLGWLRGEPKHCSMAAIPTVADEDMKRPGRERQSLVGERTRIINRVKANLARLGIRGFRPNLAQASSRLEALRTPEGTAVPVNTLAELRRDMDRLRFVKQQIKEIETTRAKRLAEAPNEQGHAMVRLLARVVGVGTETADMLAQEVFSRNIRDRKALARYAGLTGAPDESGKKRRERGLAKAGNARVRRGMIELAWGHLVHQKASALTAWYRKRTSDARGGTRKTMIVALARKLLIALWRLVTTGETPAGLLLRPAA

SEQ ID NO: 69587 - protein, 355 aa, unidentified
MCAKKTGRLEDLAVVGIDIGKEAFHLVGFDRSGQLVIRKQIKRLALNTTFEQLPRCIVGMEACLSAHFVSRTLRRMGFEPRIIPAIYVKPFNKGQKNDYNDAEAIAEAALRPNLRTVSEKNQDQLDLQALHRVRARLVSRRTASINQIRAFLIEQGITVRSGLRALKNSFETILEQRRDEISPRMRGILIGLYGEWMWLDKRIEDVSGEIEEISRTEENCVNIMTIAGIGPMISTAMVAAVGKGEAFDRGRDFAAWVGLVPRQFSTGGRTILGRITKRGSRYLRMLFVQAAKVIMMRPHRWSDFSFGPWLTEVVGRMPRNKAAVALANKLARTAWSVLRHGTRFDAPQDAAMEAI

SEQ ID NO: 69588 - protein, 343 aa, unidentified
MQDVATVGLDIAKQIFQAHGADASGETLFNTQIKREKVLEFFSKLKPCLIGMEACATSYYWARQLLEFGHDVRLIHTSYVKPFVKRGKTDANDAEAINVALTQKTMRFVPVKTLNQQAAITIFRTRSLFVSQRTQLVNALRGHLAEAGLVAAKGIQNYSKLVKLMESAADTVLPTVMKQALTDICDQIHRLNDLVTKLDKEIERRVQHDGNACRLLTIPGVGPKTAMCVIATIPDIHRFPSGRHFSSWLGLTPRTHSSGGRSVLRRITKMGNSELRTMLYLGGTVIMMRDSKTPIGRWAARLRARRPYKVAVIAVANRIARIIWALLTNGGVYDPTYGREASA

SEQ ID NO: 69589 - protein, 407 aa, unidentified
MTIWYAGIDWADQHHDAVVIDEVGKRVGTTHVAHSAEGLDTLVTFLKGLGDVADHPDHLACIVETNRGLLITALLDAGLPVYPVNPKTVDRHRKPAGAKTDAIDAYLLARTGRSDLADLRRLTPDSPLIAELKVLTRDQDTLIQSQTRLVNQLTACLKAYYPVAVDLFGKLQQPTTLAFLQAFPTLEQARAASVEQITTVLKGAGHPTAEAKARQMGDRLRQPQLAADPIVTRTKARLMLTLVGQLRVLLPEIAAYDEEITRLFRLHSDSRAFASLPRAGTRLAPRLLAEWGDDRGRYTDAASVQALAGTSPVPFQSGNFAKAHRRYACNKPLRNALQQFAWQSTQKEAWALAYYQRKRRDGKSHSMAVRALANQWVRLIYALWAKHETYDPATFLAAQQAHAPRAA

SEQ ID NO: 69590 - protein, 431 aa, unidentified
MSHRLHVGIDFSQKRADVCLLLPNGQPIERHQAFDNSRSGYALAKRLMLDALDSYAFDGVDISGEATGFYWLPFFLQLAADPELEPHDLQLFLLNPRWVAWYKKCFARDDKSDAADPFYIADRTRTHRPPISWSPQLDSLPLRFYTRLRFHLAQDLAREKCYFSAFLFLKASAYGCLKPFSDAFGATSRLVLTQVPSLDELAALPIEGLTTYLYQLSGHHLPDPAKNARQLQRVARESFPLDARLALPVQRILDLTLEHIRFLEGQVHQVDDWIAAELSSHPAIRCLTTISGLGPVFSSGIGSEIGDIHRFLQGAKWDQRRKRYRPRNLRDAEDAVAKCAGLWWPRSASGDFEAEDRRMAKTGNRYLRYYLIEAANTMRQHLPDYADFYARKFQEASKHKHKRALVLTARKSIGLVVGLLHRNEPYRSKEA

SEQ ID NO: 69591 - protein, 352 aa, unidentified
MEQPRQHWLNEQLYLGLDLHKHKWVVTVRTQDVHLKTFVSTADKEILLKSLTNNWPGAKMRAVYEAGCFGYHLAEFLNGHGIETIIVAPHTIPIEPGRFVKTDTIDSKKLALELAKGSLRGIYQRSPDELYDRSLIRKRQQLVKRRVQIQLQVKSDLTFYGIALSFPLARYWSKQVLARLRTLTIGTTDFQKVLQLSLQEYEALCDQIRTVDKLLLELSQSEKYQRQMSILQRVPGIGRLAGLTLLLELGNIRRFRNAEQFDSYLGLTPSEHSSGDSVKKGSLTGMGHTRLRTLLIEAAWTAIRQDPVLLQKFQRLSVGKSKCKAIVAVAKSLANRIRRVLLNQEPYVIGVG

SEQ ID NO: 69592 - protein, 351 aa, unidentified
MEHTTIAVDLAKSVFQVAVSHRAGRVDAERRLSRDRFLAYLAQQPPATVLLEACGSSHHWARQLEQFGHVVRLLPAHDVHRYVRRNKTDRTDAKALLEAARNEEIHPVPVKTVEHQAITSLHRLRSTWVATRTARLNTLRGLLREFGIFIPVGAQHVVPRVRELLGDPTGALPVAVRSTLANACAEIDVLETNRRDVERQLAAIARQLPDVALLQTVPGVDLMTATALIAFVGDIGRFGSGRHFASFLGLTPKEDSSASRRRLGAISKQGDVYLRMLLIHGARSVLWHAKSCAHPSGFQTWARCIEQRRGHNVAAVAVANKLARIVWAVWTQQRPFAANHRHAETTSVSSN

SEQ ID NO: 69593 - protein, 400 aa, unidentified
MMTPDDIDVWVGLDVGKSAHHAHALDHDGNTLYDKPLKQDEKAIRTMLGKLSKHGRVLLVVDQPNTIGSLPLTVARNMGIAVAYLPGTAMRRTAQLLPGDAKTDRRDAHVIAWAALKLPETLRDAGPDDETLAALKLLAGHDEDLAHESTRHVNRLRSLLLQTHPAFERALKGERITRDATLALLERYGGPMGVKRAGIEDVKDWAKSNGLRAGRIIDDMFKAIGEQTVTVPGTLMAETIIPSIAHDIKTIGDRRREVGRQVEKLLEDHPLLTVLTSMPGIGVRTASNILLGIGGDIANFKSSAHLAAYAGISPVTGQSGTSIKGERPSRRGNKRLKNALWQTAFVASTKHPPSVAYYKRKREQGKHHNAAIICLARRRCDVIYSMLKNGTLYQEPALVA

SEQ ID NO: 69594 - protein, 402 aa, unidentified
MNPVVGLDISKEESHGQAFLARGKPFRGTFHFEHTRDGLANLHQVLKDVETASKLRPLLILEATGHYQSPVVQFLEEHQYIYIIINPLISNRLRKSQLRKVKTDAADAYLLGELYYKEEFEPFKKRGVQLLNLRYLTRQYESLSKMCVQTKLQFQAVLDQVFPAYKGVFGAMYSRISLRFLSKFPTSYSVLQTDEITLKAKMKELLSSKRGRSEGWINQRIQRLLDAAKQNPFQQTMYASHLINLKVLITLILQYQEHLTELEQNIDALAEEIEEYELIQSIPGIGHKIAATILSEIGEVDRFDHPKKLVAFAGIDPSVFASGKFTATRNRITKRGSRQLRYALVMAVQCGLIRSRNMRLKAFYDRKRAEGKPHKVALIACANKLIHWLYAILKNKKEFRPI

SEQ ID NO: 69595 - protein, 343 aa, unidentified
MHGVTTIGLDIAKSVFQVHGIDAIGKVVIRRQLKRRYVLAFFQKLVPCLVGIEACASSHHWSRALTALGHTVRLMPPAYVKPYVKRQKNDAADAEAICEAVTRANMRFVDTKTAEQQGCLMLHRTRHLLIRQQTAVINAIRAHLAEFGVVAPVGRRGVEELLDIATASSEERVPEVARACVGALGVQLRLLKAQILEFDRQIMAWHRSNETSKRLDEIPGVGPALATALVASVADPKAFRSGRNFSAWIGLVPKQYSSGGKDRLGSISKQGDRYLRSLFTAGALAVIRYAKIHGTRHRPWLAALLARRPTKVAAIALANKIARMAWAMMVKGERYKEPATLAV

SEQ ID NO: 69596 - protein, 363 aa, unidentified
MRQNKDLYSNKEESPMNNINVLAIDIAKTVFELCGVTQSGKTVLKKQLKRNKLLEYTSNLPSCIIAMEACGGSNYWARCFKKQGHQVKLISPQFVKPFVRGNKNDKNDAQAIAMAAQQPSIPQVEIKEIWQQDIQSIHRMRSRLIAQRTALVNQIRGLLAEYGVVIKKGVNSVRSELPFILEDAENELTFLTRDIFQKLYEELGILDKSIDWYDQKIETIFKHNELAQRLEKIPGIGKLGATAILCVLRDTSVFKNGRHFAAFLGLVPKQYSSGGRQKLLGISKRGDRYIRVLLIHGARAVIRFVEKRTDSKSQWIKKLISTRGKNKAAVALANKNARIIWALLAYGEPYRAEHCVAQGAISC

SEQ ID NO: 69597 - protein, 338 aa, unidentified
MKVYGGIDLHSNNNVIALLDEEDKVVYRRRLPNDLHIVLSELAPYGEAIEGLVVESTYNWYWLVDGLMEAGYRLHLANTAAIVQYEGLKYADDDSDACWLAKLLRLGLLPEGYIYPKAERPVRDLLRKRSQLVHQRTSNLQSVQNLMARNRGRSLSANSIKRMTYEEVDRLLPDADLALAVKGTLAVMRTLDGVIALLEKTVKGRIRLRPQFKPLLSVSGIGEILGLTIMLETGEIGRFAKVGNYASYCRCVGSEHLSNGKRKGRGNTKNGNKYLAWAYIEAANFAVRYNPQIKRYYQRKSARTKGIVAIKSVAHKLARACYYILRNQVTFDVNKAFT

SEQ ID NO: 69598 - protein, 324 aa, unidentified
MFFVGIDLAKSKFDVALIADSPEPQNPKRKVLQNDKSGFAKLLTWMDRRATGEVHVCMEATGTYFEDLATFLVSHNIKVSVVNPSCIASYARSCSLRNKTDAADAYVIADYARAKHPAPWTPPSPASKELRELMRRLSALEQSRQDEQNRLTAGVSSAVVRGSIKKSIQFLDKQIKQLQELIRHHIDSDPGLREDLELLISIVGIGEKTAATILGELPDHSNFRSAKQVSAFVGVCPRQYQSGSSVRGRTHMCKIGNGRLRRALYFPAMVAAQHNPIVKDLYERLIAAGKNKKCALGAAMRKLLHIIFGVLRTRRAFDPCFRAA

SEQ ID NO: 69599 - protein, 408 aa, unidentified
MARYYLGVDWADQSHQLYVSDESGRKIRELEVQQTADGLAELGRWLEESRGQGIELWAAIEKPEGRVVDFLLDHGVVVYPVNPKALDRARDRFRMSPSKSDGFDAYVLAAFLRTDHAHLRVLEPNSAEGQELKMLTRDHQRLGRQKTRLLNQIGITLKEYYPVPLEVFESLDTKIALDFLKAYPTPQALSKLTRRGWKRFSKRDHHLSEARCSELWDKLNKPQLAVPTHVVRAKAKLLAALVMQLEASVKAVDSYSQEVQSFFAAMPAAEIAKTLPGGKSGTTVASIWAELGDAPKRWNSFRHLQAEGGAVPVTKASGKSRMVQFRFACNKHLRQAMYWFSFNSLQRSEWAKKYYRNQRAKGHSKHESLRALGAKWLKIIFVMWRDHKPYDENYHLANIARQMMRQAA

SEQ ID NO: 69600 - protein, 352 aa, unidentified
MNTLKYIGMDVHKATTVIVVLNRAGKVTAEAIVETKSNTILDFIRSQRGTIHIALEESTQASWIYDLIHPFVAEILVCDPRRIPKQGNKGDKIDAHRLAELLRTKALVPIYHSPQSTRSVKEFVRSYNALVRDSTRIKNRIKALFLGRGIHCAGDAVYDPEERTLWLKKINLPAARVRAERLMEELECVQRLVSQAELDLIRETRKHASTKILKTIPGIGPLRAAVILGNGVTPHRFRTKRQFWNYSGLAVLQEISAEFEMHAGKIRRSNKRPLVRGLNHNYNRALKEAFKGAARTAVSGPWKEYFQSLVANGKVESLALLTVARKIAAITLALWKKGESYNPHKLKCLHTA

SEQ ID NO: 69601 - protein, 412 aa, unidentified
MEIIHHCCCGLDVHAKTVVACLIKQGKKQTRTFSTMTDDLLALADWLASEGCTHVAIESTGVYWRPVFNLLEGVLEVILVNARHVKALPGRKTDVKDCEWLADLLRHGLLKASFIPPAHIRELREVVRYRQSVVKEQAAVANRVQKLIESANIKLGQVASDVLGASGRAMLQALVQGERDAQQLAELARGTLKQKRPALRRALQGHLTPSQRWVLGELLGRYQELEAALDRVNEQIRTEVAQSPDPFVAEAVPLLDSIPGVGEQVAQTIIAEIGVDMSRFPSAGHLASWAGMCPGNNESAGKRRSGKTRKGSPYLRAMLVQAAWAASHTKGTYLAAQFRRLVRRMGKKKALVAVGHSILVMVYQVLWRRVSYAELGGDYFDRRDVEAQRRRLVRRLESLGLRVTIEELGRTA

SEQ ID NO: 69602 - protein, 423 aa, unidentified
MVSIRSKVCGIDVHKKILVATVLDRFGNKQTNNFTNNISGIYLLRNWIYQEKCEIVAFESTGDYWVQLYESLEPIVPIEVANAFHIKHFPGKKTDVEDSEWIAQLALNSQITPSRIFQGEQRDLRSLTRYRELLIQQRTLLKNKIHHILDASNVRLSHVLTDIFGKTGNLVINALINGTCIDEVLKHIPKNLNKRKDEIREAISCSLSQRELLMLKSSLNLINGINSEIKEIETMIDYYITANHQDKMKILLSIPGVGHTGACVLISEIGNASDFSSGEKLAAWAGIVPSVYQSAGTLRMGSITKRGNSHLRTILVEIAHACARKKGTKLWEFFERIKNHSGYKKAIVALARKLITIIWHLLMNKETYADENYTQKQKTTIPEFLKMVSKIGIDEAIELIENAKKEVNNQLETGSLFKSGEGI

SEQ ID NO: 69603 - protein, 411 aa, unidentified
MKVVHEVCCGIDVHAKMLVACLILANGEKKTRTFSTMTADLLQLRDWLVGAHCTHVALESTGVYWKPVFNILEDALTVILINPEHARALRGRKTDVKDAEWLADLLRHGLLKASFIPPAEIRELRELTRYRESLVREQGAVANRIQKLLESGNIKLGQVASDALGVSGRAIVRALAKGENDPRKLAALARGKLKEKSLSLERSLEGRLTVNQRYVLGELLDRWEELERADARVTGEIDKYVQARPKLARAREILDGIPGIGLRVAEVIIAELGITMAVFGDAAHLASWAGICPGNKATGGKRLSGRTRKGNTYLRAALVQAAWGVTMKKNCYLSSQYFRLLKRLGRKKALVAVAHSLLVIIFHVLQSDQTYTELGGDYFDRNHVEQQREYYLRRLQMLGLKVTVEELPAAA

SEQ ID NO: 69604 - protein, 395 aa, unidentified
MFIVGIDIAKRSHEAIIIAEDGQVVRKAFSFRNNCTGYNLLLEQVRRLTLVKSQIVFAMESTAHYWLALYARLLKDGYAVMVLNPIQSHSLRELYIRKAKTDARDSVIIADLVRFGRCKASNVPQDKILALRELCRSRAYLVDMAADLKRKLIALLDRIFPEYESLFDSVFSKASIAVLSKYSTPQKVKNANLRKLTDILMESSNGHFGEWKAHQLKEAACSSFGIDDSGGVYSTLLGMFLEQILSLTAQADSLEKQISVFFQEFNNPLTSIPGVGTVLAATILSEIGDITRFSSADKLLAYAGLDPSVKQSGEFKSNQNRMSKRGSPYLRRAIWLASTVAVHRDPMFQTYYEKKISEGLHYMNVIGHVSRKMTAVIFAVLRDGQPYQPILQSAG

SEQ ID NO: 69605 - protein, 358 aa, unidentified
MIGNTDIIIANVGVDIGKNAFHICAMNAKGTIVLRERLTRTALPKRLANILPCLIGMEACAGAHHIGRKLASLGHDVRLMPAKYVKPFLKGHKNDYRDAEAIAEAVQRPTMRFVPFKSDEQLDLQALHRVRSRLVGQRTAVINQIRAFLLEHGVPVRQGPGALRQALPSILAQRTDTLSSRIIRLIEGLIDDWRRFDQRIADVTSEVEQLAKQSENCKGLMSVPGIGPITASAMVAAIGDGSAFSKGRDFAAWLGLVPKQISTGDRTILGGISRRGNSYLRTLFIQGARSVLQRFEGWEKKSFGRWLIAASKRLHKNVLAVALANKLARIAWSVLYNARGYDTTYANSGMTTVAASQK

SEQ ID NO: 69606 - protein, 378 aa, unidentified
MIVQGTSVGLDVHALSVVAHAVDEETGKVARARLCPDHGEILGWLHQLRAPVRVAYEAGPTGFGLARAITGAGMECVVAAPSKLQRPAGDRVKTDARDAAHLARLLRLGEITEVRVPEREIEAVRDLVRAREDARADLMRVRHRLSKLLLRQGIVYSGGTPWTYAHEEWLRRHRFDDIHLKAAFDHGFDAVLAATAARDRLDEQIMVVATSPRFADPVNRLGCLRGISALTGLALTVEIGDWSRFTGSSIGAYVGLVPSEYSSGNSRVQGSITKAGNTHVRRLLIESAWHHRKSYSTSGLTLRARWAKVDPALRARGHAGNRRLNKRWRSFTERGKNPLVANVAIARELAGWCWSLATMQKTGRRPNLADPGDQTSAR

SEQ ID NO: 69607 - protein, 345 aa, unidentified
MQITTVGLDLAKRIFQVHAVDASGDVVMRKALRRTQVLPFFTKLPPCLIGMEACGTSHHWARALTELGHEVRLMPPAYVKPYVKRGKNDAVDAEAICEAVTRPTMRFVVMKSAEQQAALSLHRTRNLLVKQRTQLANMIRGLLAEFGIDIPEGLERALRLARQIAAKKSTLDVPAMAMQILCLLCDQVLDTHARLQTIDRSILVQQRTNEVARRLSTIPGIGPIGATALAASVADPGQFRSGREFAAWLGLTPSQNSSGGKDRLGRITKMGDRYLRKLLVVGATSLIRQARYKPETADPRLVALLARKPLRVASVAMANKMARVVWAIMARGETYQSRHAPTLAL

SEQ ID NO: 69608 - protein, 363 aa, unidentified
MSVYVGIDVHRKRSQVAVVGEDGRVALNRNVVNGSQPMLGLLGGLPSGTPVAFEAAFGWGWLAGLLEDYGFEAHLVHPLRCKAIASARLKNDKVDAATLAQLLRADLLPEAWIAPPEVRALRALLRHRIQLVRLRTLLGNRIHAVAADHGYDRPAGYWSGPGRAWLASLDLPPAFRQVIGDDLALIDALAAPIAALDEQVHQRAKADPAVKVLTGLPGAGEFTALVILAETGDIARFGSARKLAAWAGLTPIVRSSDRTIRHGHISKQGSAWLRWALGQAAQTAKRSPEFAATYQAIAARRGKQIATTAIARKLLTRAWHLLTDAGLTGPQTSPLPRLSPGGAQAPGELAKVHEPAPPPRTSC

SEQ ID NO: 69609 - protein, 371 aa, unidentified
MKGFCISLDVSKGSSFYQWFKGFDEPITKLKKIEHNLEGFKELLKLKETIRKEYNEDYVVVFESTGIYHRSLQTYLDEHNFKYTIINQLLSAKVSKSDIRGTKTDAKDCASIAKVFFLKELRIYSKIDEIYDDLKEKSRYYDFLMDEMKRWKIEFRRLFDIIYPGFDRVYDDLYGDFIQTFLLEYSHPEIIRKRRLDTIAKFLEKHTCHKEAYCIRQAQTLKEYVENCASGCSSKSYLVRQFDTVIHNLNAQIKHLEIVLEEIVELAKTLPNYDSIRSIPGIGNNLAGRILAEIGDVNRFNNASQLVAYAGIDPQIYQSGQISGLHLKISKKGNKKLRCLLYLVVTCMIKTSRNTVIVDFYKKEKGRWISV

SEQ ID NO: 69610 - protein, 403 aa, unidentified
MNNVAGIDVSKGKSMVSVLRPFGEVVAKPFSIGHTGSELKELADYLKSLDGETRVVMEHTGRYYEPVARFLHDEGVFVSAVNPKLIKDYGNNTLRKVKTDKADSRKIARYGIDNWAELRQHTPMDTIRMQLKTLNRQQSLYAKTKTMMKNNLIALLDQTYPGVNALFDSPVREDGSQKWVDFATTFWHVDCVRNMSLTAFAERYRKWCKRHGYNFSQSKAVEVHAGAQDLIAMLPRDALTKTMVRQAIDALNAISASMERLKAEMQALAAQLPEYPVVMAMHGVGDSLGPQLMAELGDVTRFTHRNAITAFAGVDPGADQSGTHEAKSTRVSKSGPPELRRALFLVMDCLLKTQPQDDPVYRFMDKKRAEGKPYLVYMTAGANKFLRIYYGRVKEYLAQLENS

SEQ ID NO: 69611 - protein, 340 aa, unidentified
MTITVLGIDLAKNVFQLHGVDEQGHVVVRKKLTRPKLLPFVAQLAPCCIGMEACQGAHYWAREMRKLGHDVRLISPQFVTPYRKSHKNDPNDAAAICEAVSRPHMRFVPIKEVEHQDVQALHRARQLLIKQRTALCNQVRGLLSEYGIVVAKGVQRLRASLPSLLEEAENGLTFTSRELFQELYQQLVWLDERIDGMDVKIYQVCTSTEACQRLAAIEGVGPMIATALYAAVPQPHLFHNGRHLAAWLGLVPRQHSTGGKARLLGISKRGDRYLRALLIHGARAVVYRWKDKLNPSPRARWLQQLIARRGINCATVALANKIARVAWVLLSQDVQYQPAR

SEQ ID NO: 69612 - protein, 341 aa, unidentified
MIFARLLQQISFLLEETGECGQRRLMHTAEAEQYYRALSGSKVRVGIEATGSYGWFRRLLSELGHELLVGDATQIRASNPRRQKTDKRDAEHILGLLVEGRFPAIWQPPAENEQLRQLLLHRSRLVRLRTRVTNQLEGMAKNEGLLIPGGWSVKRRKAIEALPLPGWYGERRKDLLGLLDRLEERIAPLDKAVSQAAASNAEACLLMTHPGVGPVVSLAYVLTIGNWQRFARGKQVGSYLGLIPAEESSGEKRRLGHISKQGNTLVRWLLVEAAATAQRYDASWHRQYVRLSMTKHHGVAKVAIAHKLAVRLYWMLRSGEDYQHVRERGSHARQSECPGGR

SEQ ID NO: 69613 - protein, 339 aa, unidentified
MNEISMIGLDLAKGVFQVHGIDAAGDAVVQRQLRRGQMIDFFTKLPPCLVGMEACATSHYWARELAALGHEVRLLPPAYVKPYVKRGRKNDAVDAAAICEAMASKGMTFVPVKTPEQQAGLMLHRARRLLVTQRTMLANAVRSHLAEFGIVEAAGEAGLSRLIPLAVDAADPSLPAAAREALAMLATQLKDAEAKIEALDREILVWHRADEACRRLATIPGIGPVIASTIVATIGDPSRFRTGRDFAAWLGLVPSQHSSGGKTMLGRITKMGDRYLRSLLVLGATAMLRRKTSGYGPWLAHLLARKPARQASVALANKMARIAWAILAHGGVYRKPAAA

SEQ ID NO: 69614 - protein, 340 aa, unidentified
MRQLYVASDLHGNNNLLGIIDGEGKRIFKKKLPNDPLLINDILKPFKEEIVGIVVESTYNWYWLVDALMEEGYKVHLANPAAIQQYSGLKHADDKHDAFWLAEMLRLGILPEGYIYPKEERPVRDLLRKRGHLVKLRTSLIVSLENIISRNFGRKLPVNKVKGLREDHVTPLFEGKEDLGLAGRVSKETIDFLTYQIRQIEGVVEKRITLKEQYRNLLTIHGVGKILGLTIMLETGPIGRFETVGDYTSYCRKVPSQWISNGKRKGSGNRKNGNKYLSWAYAEASDFARRLHPESRAYYNRKMQQSNPAVAHSALSHKLARAAYYIMRDQVTFRPEKLFG

SEQ ID NO: 69615 - protein, 327 aa, unidentified
MPGTIAQSVGVDIAKDTLDVHLHPAGRGRRFANCARGWAALIAWLGGFAIVRVAFEPTGAYHHAFERRLAEAGLPLVKVNPRQARRFAEAIGRYAKLVLGPAKGGTRGTDAVDAAMLARFAALLEPPVRPVVSATLDTMKELDVARRALVKNRVAARDRDHTHRSPLLKRQARARLAQIDRQIAAIDAALHAQLAADPALQARFAILVSIPGVGEGTALAMLIEMPELGAIEHKGAASLAGLAPIARDSGQRSGQRFIRGGRAHLRQALYMPALVATRFNAAMKAKYDALLAAGKPPKVALTAIMRKLLILANALLRDGRTWTPRPA

SEQ ID NO: 69616 - protein, 433 aa, unidentified
MKVLYERVAGIDVHKDMIKVAIRSPGEKPWTRKTEILEYRTFYGVLQAMAAELRRRGVTHVVMEASGVYTEPVYYALGEQDFTEVAVINPAHAKALKGHKTDAKDCARLAELFECGLLRGSYIPPAELKEVRDLTRYRMKTVQARTSEIQRLGKALESAGIKLGSVASSITGASATAMIEALIDGERRGGVLADLARGRMREAGKLADLSMALTGRFTGHHALLCRLHQDRIAGFDAAVAGLDERIAGKAARWQREAGLLTSVPGFGDVVAQAWLGEIGPAPHRHFTTHEKLASWVTLCPGNNISARKRKHGRTGDAGTYIKPMLVQAAWNAIRVRGRLQARYNRLVRRFGGDKNPGAKKKAIIAIAHTLLKIAYQVLKSGTPYQDLGTDFYTRRESPEQKQAWLERQLQKLHPDCTITITISPPQAASTPSA

SEQ ID NO: 69617 - protein, 354 aa, unidentified
MKHYVGLDVSLKETSICIVNSEGNIVYQGQETTNPSKIAKHLRGINLSLEKVAIESGSLSHWLICGLQELRIPAICVDARHISSVLSMKINKTDQNDAHGIADALRCGYYREVSIKPQSLVETGTLLQSRAILVQERTKIKNAIRGLLKSYGIKISITGKKAFSVRVKELIQNRVETVKAGIDALLLTFDLLDEQVKKLEKQIQELAKDNEDVQILTTIPGVGVITALSFLISLGDFRRFEDSRNVGAYMGLTPRQYSSGDVQRQGKISKCGPRQTRSLLVEAAVVMLTRTRSWNKPKAWAMKLQKKKGFKKAAVALARKLTVIMHRMLITREAFRLGDSIEKQEKPVLEKKTA

SEQ ID NO: 69618 - protein, 337 aa, unidentified
MSYLGVDLHTNSFTVCYRSSKGKERIATFEVRRIGQFCKTLRKQDELAVEATGNTAWFVEQISDRVSKVVVVNPHQFKVIRKSVKKTDKHDAKTLAFFLSKDMLPEARMKSKENAQLHSLAGTRDKLVKQRTALINKTHNILNGHGMKYKKESLSTEKHLKIVLSFDWDVIVRVELEVLAEQIRSLTKSIKKLDEQMSEHGKNLKGHKNLASIKGIGERSATVLLSVIDDVNDFADENKLAAYFGMVPRVSDSNETVRHGRITKNGSKIGRTTLVQCTLVAKRYSPYLRKYYERIKRYRGSGKAIIATARKFLGIIYQTLKNDWIFEDFPNFVIANT

SEQ ID NO: 69619 - protein, 530 aa, unidentified
MVTETKKRKSRGSRRRFIGKPTGLIQERVQAVGPEHFGIVAVDCAKRRSKWMLCNFYGKVLVEPTTVEHTSGGLRTMTQRVAEVCRAEGLTDTIVAVEMTGIYHKPVFRAFRKAGFDTRVVHPFASNHYRRPLHPAEKTDDCDLEAIFHAAVKGYGLAAFPVGEDYQSLQAISRHRHNLVKQRSRLMVQIRRLLHQTMPGFADLFEDDKLFHKSIALPIAQQFSSAAAIRLAGVAGIASYLTKTKVRFQTRTIERIVAWAGTAADSSELAEMHTRQWQQLNEVRRLFDEQIVAAEREVAGFLVKTPYVLLLSVTGINVVSAARLAGEAGPIEHYASARAINGRAGLYPSRYQSDEVDHPDGSLVRQCNRQLRGAAMLVAENPIKCHPYYRGLSELWKQQKVDPRDRRCRIANRAMRMVYQLVAGRQVWRGRGVDREYLLAKLQEFHRVHHTPIAEAIRELNEALTFLPKSAYAAEAQPLADLARKKHRGPQRIGDLMIPLLIRLGLTREELGVPSEETVQSKASEARSSD

SEQ ID NO: 69620 - protein, 326 aa, unidentified
MVEHFRAPCDRDGLYGLTRRVAVYEEPIRGVVESMNGARYVHDELVRYGWEVLVADAVRVKGLAPLACKTDKVDARVLAELSFRDLVPAIWLPTPELRAERERSRWRLHLVKHRAILKNRVHSSLIAYGHQVPMADLFGVAGRRLLASLDFPEPWLGHVKASLELIDDLDRRIGEIENWLRRSGADHRYLPLLLTCPGIGWITGYTIAAEIGDITRFASPVKLTGYTGLCPRVSQSGEIDCRGPISKHGPRYLRWGLMEAAIAASSHPLYRERYQRTRRRLGRQRGPKIAQIELARKLTEAIWYMLTRNQPFKPFVPAGAVLPLTA

SEQ ID NO: 69621 - protein, 319 aa, unidentified
MAQNDQIVVGIDVAKDKVDACIRSLSQRHTFPNTAQGHRKMIAWLHKHKVNKAVMEASGGYERDWARVLRLAGIGVRIVDPKRVRSFALSAGRLAKNDTIDAEMIAWFAETFSAAPGQPHDAAREELRALVKARKHLLDLQTRLKSQNEHAAPEAVQKAHARILKSLATEIARLEAAISAKVKATPNFAERAEIIESVPGFAETTSANLIAGMPELGQVSDEIAAALIGLAPYDDDSGKRRGERHIKGGRRWVRNAIYMPCLGAATQNNPVLKVFYQRLIAKGKEPKVALVACMRKLIIILNTMIARRQKWDASRYAPN

SEQ ID NO: 69622 - protein, 484 aa, unidentified
MADRKKSTYDRLTNGGLNRKQRRELGRKLSVEDPGLEIVNRNVAGIDVGNESHYVAVAPGRDAQPVREFGSWTADLEQMADWLKACGIETVVMQSTGVYWIALFDVLEARGFKICLANARHTKNLPGRKSDVQESQWLLKLHTYGLLRDSFRPPDEIRALRSLWRLRDRHVKEAARTVQHMQKSMITMNVQLANAISDISGVTGQAIIRAILAGERNPAQLAKLRDRRIAATEEEVARSLQGNWREDMLFELRQAVDSYDFIQKQMAECDKRLRELMGALPARETKAAVVTIEAAEKPVGKKKKKSGGTRKNVPRFDLQAELERVCGVDLTSIDGIDIMTAQTIVAELGTDFSRWKDEAHFASWLGLSPRRDISGGRVLNQGSLKVKNRVATALRIAANTLSHSDSYLGARFRSLQTRRGTPKAIKAMARYLACLIHRMFTYGQAWVDRGARAFENRRAERELAALHRKAAAHGFTLVSRQASA

SEQ ID NO: 69623 - protein, 363 aa, unidentified
MTVYIGVDFHPYEQSVAYASDEDGEIGYRRFLHSDKQSIKAFYRKCGADAVIGVEATGCLWWFEKMLAGGGQQLKIGDPRMIRRAALSRHKNDFRDAETILDLLMRGAFPSIVPRSEESREVLDLLHYRQTLVQKRTSIANQLQAFARGKGLARFRMPAVKGRRKLVDAPVTEIETLLVTSRLVLFDEITAQMKALESRLEKLAAEDERARLLMTHPGIGVINALALVHTLGEVRRFRRKEEVVAFVGLDPLEKSSGQTKRIGQISKHGSRLARHLLGQAAQACRDQRIRKFYLEVSRRRGRPKAKVAAARKLLINCYVMLRDGISYEEFQRRGEVDLCEGSGEVRAKASVSGSLMARPAISI

SEQ ID NO: 69624 - protein, 392 aa, unidentified
MRFAGIDIASEKHVVAVVDERSEVVVKPKAFSEDADGYRKLVELLGAPGELLVAMEATGHYWKNLFAALVAGGYTVSLVNPLRTHRFAGEDLQRTKTDAIDALGIARFAAQKRPVATKLPDSATEELRELVRLRDRLVQDFGDRVRQLHRLVDLGFPELTRYVRRLDSELATSILKDYPTAEAFVGVRPRALSNLKYDGVHFVGLELATQLIEAAKTSVGRHHGYAYRIQVKFYCEDLDILRRRLKELDRDIETKLGEHEVGTLLTTIDGIGTQTAAKLVAVLGNPADFRNERALAAYIGAVPGLKLSGKATSMRASLTPIGNAALRKALYMPTLTAVKRSPWLRAFYQRLISTGKPPKVALLASMRKLITAIYSVAKNRKPFVSRPVEGTA

SEQ ID NO: 69625 - protein, 337 aa, unidentified
MLATEVPSDPASIAAALACYRDQLKRVGHEAGALSPWLHPGLVQLGIPAVCLETRHVRSALAAQRNKTDAADALGIAHIMRTGWFRAAHIKTEACYRIRLLLVQRRNLKRKFLDLENTIRHSLKAFGVKLGAVGRGKFDAAVRQAVADDALSAKLMDCMLCARAALWTEYVKLHKLVLQIVARDELCRRFLVIPGVGPVTALTFATAIDDPHRFRRSRDVAAYFGLTSKRWQSGTSIDVKGRISKAGDPDVRRTLYSAAHVMLTRFKGTDRLKEWGDKLMKTKCRAKASVAVARKLAVIMHAMWKDGTSYAGAPEDSSPRARGKLYLHEPQSLDAAA

SEQ ID NO: 69626 - protein, 308 aa, unidentified
MTLWIGIDVAKATLAVHFHPDGQSLSLLNTPDDVARLIALIDGRPVGNVLLEASGGYERGLMRALAHAQVPVTRINPRRAKAFAQALGRIAKTDPIDAVVLARMAEVVVQTRTTPSAEQETLRALVQRREQLVQQRDDERRRLKQATLPTVRESLIAHIGYLRAQITAIAREIVRARADIDSDLCRRLLAVEGIGEVTAASLLAYLPELGRLDRRQIAALAGLAPYNADSGQHSGKRRIRGGRASIRRVLYMACWSVIRKQPDFTARYQRLRQQGKCAKLAVTACMRVLLIRLNAMARDGTEWRTLPG

SEQ ID NO: 69627 - protein, 330 aa, unidentified
MSDVAGIDVAARKLDVARLSETGSVQLRQFEQSPAGHQKLVAYLRKHKVEAVVMEATGIYYLDAAVALYNAGIPISVINPRAAHHFAKVMLQSSKTDRIDAQLLAEYARRMTLKPWRAPNEDWLALRDIARRINQLTGMRTAEKNRLHALQAQQHTRKTMIDELLAHIEQLEHSIERLTKAAVDVIGQDPVLARYDACLTSATGIARASAVALLGELCLLPTQLRSSQVSRQAGLDVRLTESGSSIDQPGRLSKAGNTYLRAGLYMPSLSLVRHDPRAKAHYNALVARGKKKMQALCAVQRKMLTGLWACMHANEPFDSAKLFAIEPDQA

SEQ ID NO: 69628 - protein, 339 aa, unidentified
MRYFIGLDVHSNNTVIAVLDKKGKRIYSRRVKNFIKLVLEELEPFKDKIQALALESTFNWYWLADGLRDQGYEVHLANPSANKQYEGIKHTNDFSDAFFLAELLRLGILEEGYIYPRRERAIRDLLRKRLMLVRQRTAHILSFQSLYNRVKGCSFGGGNYVKRLKEDEMDDYFEEEDFALAAKTNIASIRFLTQQIEKLEKTVLKKIEILPEFEKLKTVTGIGDILALTIMLETGDIRRFPKVGNYASYCRCVPSERSSNKKKKGENNRKNGNKYLAWAYVEAANFATRYCSKAKRFYQRKSAKTNNIVATKALAHKLARASYFVMRDRVDYEPERLFG

SEQ ID NO: 69629 - protein, 355 aa, unidentified
MSSEKYIGLDVHQATISAAVTDSQGKVIMESILETKASTLLEFLAGLRGSLFVTFEEGTWAAWLYDLLKPHVTEVLVCNPRKIPLHKQGNKSDQIDARKLAERLRLHDLKPVYHGENGIRMLRELARSYLTVVKDLSRVMNRLKALYRSWAIPCAGRDVYYRRHRSEWLDKIQEPGVRCRAERLYQQLDMLQHLRQQARRELLVESRKHTITAKLRQIPSLGPIRSALAVALMQTPNRFRSKRQLWTYSGLGLETRDSGEYYVVKGQVRRRKKQATIRGLNKDHNHDPKGLFKGAATRASVKPGPFQEFYQRSLAKGIKPTMVRLTLARKIAAITLTLWKKGEDFDINKLNSQAA

SEQ ID NO: 69630 - protein, 338 aa, unidentified
MRWYSGIDLHSNNSVVVVIDEADRVVCRRRVPNELAKVLEALEPYRAELAGVAVESTYNWYWLVDGLQAAGYKVHLANPARMKRYEGLKRSNDDTDALQLAHLLRLGILPTGYIYPAAERALRDLGRRRLQLVRHRTMHVLAVENVQARETGARMTGDRVKRLSAQQVRALGFSEDVTLGLQANVAVIGTLNAEIAKLERRLLQCLKPRPEYALLSTAPGIGRILGPIILLETGSIERFAAVGNYASYARCVDSVRLSNNKKKGEGNVRNGNKYLAWAFIEAANMARRWCPEAKRFHDRKRARTNAIVATKALAHKLARACYHMLKTGQPFDMKRCFG

SEQ ID NO: 69631 - protein, 417 aa, unidentified
MDDIRWFAGVDWASEKHKVCLLNASGQVVGERDVDHSGTGLSELCDWLLAKTGATPGQIAVAIETPHGPVVEVLLERGFAVHAINPKQLDRFRDRFTVAGAKDDSRDAHVLGDALRTDRHALRRLTLQDPVLIELREWSRMTEDLEQERTRLANRVREQLWRYYPQALKITDDLAADWFLDVWQQVPTPAKAARISEKTIARILKARRIRRIDAAEVLRILRKAPLMVAPGTPEAASAHIDTVAVRIRLLNQQIKQAHHKLDELCTKLETPSENAPGQACEQRDVTILRSSPGIGRIVLATLLAEASEPLQRRDYHALRTLSGQAPVTRRSGKQCLVIRRRACNKRLENALYHWARVAMQHDPVSRCRYSELRRRGHSHGRALRGVGDRLLYVLCKLLERQVLYDPGHARPQMTAAA

SEQ ID NO: 69632 - protein, 376 aa, unidentified
MQAVQRQGYEQEAVLYMAMELSNSSWKLGFSNGQRTRRRSIEARDRFQLIEEVQLARQKLGLEPDTQVVVCFEAGRDGHWIYRWLSAEGFRVLEIDSSSIETPRGRKHVKTDRIDVEKLLDMLIRYCLGFRKAFRVVRVPSKEAEAEQRLHREDEYLIRQRARVSNRLKGLLVNQGIVEVPLKRGFEGWLEAAQTWDGSGLSEALKTEIRRLYVQYQLMNAQIAEVEQVYQQELLSDTAVADKRRQLERLKCIGPKTSRILSAEVFSWRVFSNGKQVGGMAGLTPTPSQSGDVSREQGISKAGNRRVRRVMIELAWFWLRWQPESHLSQWFNQRFAHGGKRMRRIGIVALARKLLIALWRYVEDGVIPKGAILKVA

SEQ ID NO: 69633 - protein, 348 aa, unidentified
MLIIGCDYHPGFQQIALVDTETGDFGERRLTHREEAEQFYGTLKERRVRVGMEASGHARWFERLLRDLQFELWIGDAAEIRTKRVRKQKTDRQDAQLLLRLMVEDRFPRIWVADAENRDLRQLLWHRHRLVQMRTRVMNQLHVVALNEGLRRKKALWRPAGRNELESLILAPWASRRRQDLLDLFDQLTPKIQELTRALEEEVEKRPVTRRLMTHPGVGPLTALAFELVIGTPERFHCGKQIASYVGLVPSEESSGDRRRLGHISKQGNSLLRYLLVEAAQVTVRSHPQWRSKFFHLAMRRGRKIAKVAMARKLAVRLYWMWRQGWDYGQFEKLGSHAGAPGNRHGAQ

SEQ ID NO: 69634 - protein, 413 aa, unidentified
MKKHSSVLKSGKVSAKEAKPMRRESQQVMTELVSKLRKRLEGERIVEPDDQSAAEWERPNLDRLTVGVDVGDPWSNYCILGLGGETLAEGQFRSQPEEVAGFFHGLAQSRVAMEVGTHSAWMREVIAELGHEVLVANARRMQGSKRRRRKNDRIDAARLARLGRIDPKSLYPIQHRSTEVREDLLVLRAREVLVESRTKLISAVRSMVKTVGARVPSSSSDAFSRKAAAEIPQQIRDTAQPLLNLIAQLSEEIKSFDQQIEQMSEEKYQHTKLLRQVTGVGPVTALAYALTLETPLRFKKSRDVGPYIGLVPKQEDSGDIQPQLGISKAGDRMLRKLLVGSAHYILGPFGPDCDLRRFGNKLFEHGGKNAKRRATVAVARKLAVLLHRLWISGEAYEPLGYASSRNIAQTVAA

SEQ ID NO: 69635 - protein, 431 aa, unidentified
MKGGDFMKNNFLSTLFVGIDVSSKTNVLCALDFQGNKLLNLKALNNQPGAESVLKSVLDCLNSNSFKFVVIALESTSFYSTHIANFLSSNEVLLAYSPMVYCLNPKTISNYRKSFVDMDKTDPLDAYIIADFARCGRIKSQPWRGAQFLALQRLTRHRLHLVEAIAREKTYMVSNIYLKFSQLTVLEKADRPFSNTYGATSEAVLTEFLSLEDIAYSSIEDLVAFIKDKGKNRFSNPVGTAELLQKAARDSYRLDKVLYEPLNIAIASSFNVIKALQIEIKEIDKAIEKNIKGINTTEYQSLISIPGIGPVFASGILAEIGSITSFSSNDALAKYAGLTWRIKESGDYSASDTNMTKTGNKYLRYYLIEAANSVRNNIPEFNVYYRKKFNEVPKHQHKRALALTSRKLVRLIFGLLTKNQIYSSSKVGEVQ

SEQ ID NO: 69636 - protein, 422 aa, unidentified
MKSANTPTHEQTLCLPEEPPGDVTAGLDWARDDHAVSVVDHRGREIDRCMIEHTAEGLRALLTFLARNNATEVAIERPDGPVIDTLLDAGITVVVISPNQVKNIRRRYGSSGNKDDRFDAFVLADTLRTDRARLRPLVPDRDDTIALRRACRARKDLIAHRIATGNQLRAHLRNALPATIGLFKDIDSDIALSFLERFDTQDKLDWLTPTRLGTWLANRDTPDAPATVLHTKILAAPRGPEGDFATALATITASHVAVLRTLQAQTRTLEKHIDQQLTTHPDAHIFTSLPRSGRVRAARLLAEIGDCRSRFPTPEALICLAGAAPSTRQSGRIRVVGFRWSCDKQLRDAVTDFAADSIKANPWAAHLYQQARTRGHDHPHAVRILARAWLTIIWHCWQDHVPYNPSKHRALQPYLTPENKAA

SEQ ID NO: 69637 - protein, 306 aa, unidentified
MKLYGAIDLHSNNNVTVLMDEKDKVVYQKRLTNDLPLILEQLSPYASSMEGLVVVSTYNWYWLVDGLMEKGHRVHLANTAAIQQYEGLKYTDDDSDARWLAHLFRLRVLPEGYIYPKEERAVRDLLQKRSQLVRQKTANLLSIQNLYSRNTGQSISANRIKQLTSEKLNALFTNSDVALAVKANLTVMRSLETEIAVLERVVKERIKLRPAYRYLLTVNGIGQTLALTMMLETGDIRRFAKVENFASYCRCVGSEKLSNGKRKGSGNTKNGNKYLCWAFVEAANFAIRFEPLIARFYQRKKAKTHV

SEQ ID NO: 69638 - protein, 316 aa, unidentified
MHVTTVGLDLAKNVLQVHGVTTDGDVAVNRALRRGQVRGFFESLPPCRVGIEACGTSHYWAREIARLGHEVRLIPPAYVKPYEKRGKSDAIDAEAICEAVTRPSMRFVAVKSPEQQSVLALHRVRDLLVRQRTQIVNMLRGVLAEFGIVIRQGAGHAIAFARRCLEGAEQDLPDLARDVVTNLGHQLVALHRRVLWYGRRLNRVAAQDARVARLRTIPGVGPVTASAIVATIGDGHQFRNARSFAAWLGLTPLNRSSGGKERLGRISKMGDRYIRRLLVLGMTSRIKQIQHRPDHTRLLSLDFDHCKDAPPTVRLS

SEQ ID NO: 69639 - protein, 344 aa, unidentified
MKFTRCGLDIAKQVFQVHGVNEHGVMKGRRRLPRAKVLEFFAQLPPCLIGIEACGSAHYWGRELTKFGHTVKLMAAQYVRAYRKRGKNDVNDAEAICEAVGRPNMRFVAIKSEEQQAVLMVHRARALTVANRTAQVNQIRGLLGEFGLVVPRGLWHLRRELPDVLEDAENGVPALAREVLAGLLEQLRAADMRIGAYDRQIRALAEASEPARRLMRVESIGAQTATALVATVGDPHVFKNGRGFAAWLGITPRQHSSGGKEQLGQITRQGDGYLRTLLVHGARSYLRVVDKKTDAKSDWARRLKERRHVNVAAVALAAKHARIAWAILAHGTEYRPAGPQSAVA

SEQ ID NO: 69640 - protein, 346 aa, unidentified
MEQIIRIGMDTSKHIFQLHGVDAAERPVFRKRLSRKQVLEFFAKLPPTVIGMEACGASQHWARELCKLGHEVKLMAPQLVKPYVARNKNDWRDAEALCEAMSRPTMRFVRVKTAEQQAALMLTGIRDGLIARRTQLDNTIRGHAAEFGVIVPKGLDKLKALLAKIAQDETLPALARDLVTVLGREYARLQGELKEIEARLMAWHRADALGRRLAQIPSVGPIIATTLVMKTPDPHAFRSGRHFAAWLGLTPKDHSTAGKTRLGKITRAGDEDLRRLLVIGATAVIQQARHGRGQHSRWLLALIKRKPPKLAAVALANKVARIAWKLMATGESYDAARMNADPALAA

SEQ ID NO: 69641 - protein, 510 aa, unidentified
MVKPNFLGESIRAMANNKKTKLTSIYKNQSVRIRAIFDEAKSAQKVLCIAMDFAKAKHVALICDGEGSVLKKSFPVENNVEGVQFLCDQIQSTARRRKIPRKHIFIGGEDEASYVENFTSALLKKKYLVVRINARKAKESRENDLASTDDLDLLGIAKTMISRRAIVVRDPNEQPPKIYREIRDLSRARRKLVREKTASSNRIHAHVDRLFPGFLTDSKSGITAFGRASLELMSKNFSCTQIAKRKQSSLCNTLRRLGVHYPEETAGKLITLAREALAPDPARINSQQRTLSATVDLHRCIQRNADELKIEAAELLASTPYAFLTTLPGIGFVLASGIAGELGDPEKLRRLNSLCAYSGIVPATWQTGGPDSPPTTTYTSVRCNHTLKDWVVQSSQKLRQYGPLEWKERHARWEANGQHSLFAGGRRYLRLMRTLVLNQIPYMSPEARMRDASKEIRALDAEETWTVLVKKWRTIPNWQEVAFAEDKPLGFWRRVSIEVHGAHLPFPKER

SEQ ID NO: 69642 - protein, 407 aa, unidentified
MEIVREYVSGLDVHKKSVVAAVITPQGRRVKTFSTTTRALLELVDWLKAEGVRHVAMESTGIYWRPIFNLLEQTEMEVLVVNAGHMKQVPGRKTDVKDAEWIAELLQYGLLKGSFVPHRGQRELRDLLRYRRTLIEQRADEVKRVQKLLEGANIKLANVAADVLGVSGRAMLEGLIEGQQGTAELAHLARGRMKSKQRQLEEALEGSFGPHQRWMLRRHLDLIDFHDGKLKELDAEVAERMRPFLAALNHIDAIPGLGQQTAQEIVGEIGTDMSQFPTDRQIASWAKLSPGSNESGGKKRPGRTGKGGPIRHIMIRAALNVSRNPNSYYGAMYRRLCKRGCKERALVAVAHALLVAIYHMLRDGTVHQDLGANYFDERRREQSARNAVRALRLQGHDREGTRAVSGG

SEQ ID NO: 69643 - protein, 371 aa, unidentified
MNEFSKYIGLDVHKETIAVSVAEANSGEVRYVGEISNTEEALDKLVKQFRKGGANLSFCYEAGPCGYGIHRQLTDLGWDCQVVAPSLIPKKAGDRVKTDRRDSLMLARLHRAGELTAVWVPDGAQEALRDLTRAREDIKHLQLQARQRLLAFLLRHGRRYDGKSKWTLTYYRWMETVKFEHPVQQIVFQEYIDTVKAMTKRIEALDKQIESAATESVFWPVIEGLMALRGVSMLTATTIVAEIGDLRRFASAPQLMAYLGVVPSEHSSGGTKSRGGITKTGNGHVRRLLVEAAWTYRHPARKTAFLQRRAEQTSEAVQEIAWKAQTRLCGRYRRLEARGKLSVQTCTAIARELTGFIWAIGQALPQPTARA

SEQ ID NO: 69644 - protein, 473 aa, unidentified
MPAGQQVEVDEHEQIVERVAAIDVAKASGMVCVRVPHATKAGRRVTTVWQVPSTTNQLLELAEQLAGQGIERVVVESTSDYWRPFVYLLEARGLVVWLVNARDVKHLPGRPKTDKLDAVWLCKLNERGMLRPSFIPPAEIRRLRDYTRLRADLTADRTRHKQRLEKLLEDALIKLSTVATDIFGVSGRAMIEALIAGQRDPKVLAELARGRLRVKHAALVEALTGRFDDHHAELARMLLDQIDALGGQIDQLTARIEQAITTICAAQPPASGPGGGAAATTNAGIESARSVPGHPDSDRVDPHTGELLAAPLPVLDRLDEVAGIGRHAAQVIIAEVGLDMGQFPTPAQLVSWARLSPRTIQSGAKHRAGTTGKGNPYLKGVLGEAAAAAAKTDTFLGERYRRLVRRIGKLKALVAIARSILVIAWHLLADPTARFHDLGAGYHTSRVDKDRKTRNHVRQLQALGYSVTLTPAA

SEQ ID NO: 69645 - protein, 289 aa, unidentified
MKYHCFSAGNSLSYLMINKYLFNQKGVSTMKYREINSEFYWGVDVHSKRSYICVLDNTGKKYLNRSTVNNFQDFKEPLHPFLPNVVVGCESTYSYYWLADGCHEHRIPFYLGHALYMKAISANKQKNDKLDARTIAELLRTNFFPEAYPYPREMRPTRDLLRRRHRLVRIRAEAYSHIQYETHNIKRFPRHQNYASYCRVVRPQQMSNGKVTGRKNMNMGNPYLKWAFNSIIISAQQSSERINRYYQKLESRYGRSNARARIVHKFNTAIYYMLKNSQPFDEKRFVQWC

SEQ ID NO: 69646 - protein, 375 aa, unidentified
MQSKVRFLGLDVHADTIAVAIAEPNGEVRSLGTIANRAESIRKMVKKLGTVDQLRACYEAGPTGYVLYWQLAELGVNCEVIAPTLVPVKAGDRVKTDRRDAERLARSHRSGDLTAVWVPDAGSEALRDLVRAREAAKQDQLRARHRLSKFLLRSGQRPAQGMKAWTQPYMIWVKQIRFAQVAQESTRLDYLTEVEHMGERVLRLEKAITEAVKLASPELQEVVKDLQALRGIAQISAVTIAAELGNISRFEGARQLMGYSGAVPSEDSSGKRLKRGSITKTGNAHLRRIAVEAAWSYRLRPGVGPALRKRQEGVPEEIKGIAWKAQHRLHKRYIKLSAAGKDQRKIITAVGRELLGFIWAIGTKAEAAVKQQKAA

SEQ ID NO: 69647 - protein, 419 aa, unidentified
MTLNHPLRNPLIAGMDTHRTTNVVHLEDGRGEPLGKPLRVSNNRPGIASLAAQLDATAQAGGYDGIVLASEATGWYWLGAFYTLRATCALPTQLYALNPRLTANYKKVMMNDDHADVSDAAVIAERVRMGRDLPPPFAPAAVYAPLRLLTRHRFHLAQTAVREKAYAANWVYLKASAYTAPQPAAFSDVFGPTSRAVLTEFATCEELLAMPVADLAAWLDEHGRHHFADPTATAQRVQAVARDSFVLPPAFAPAINECLAVALEQLVALERQIHRLDAAIAPRLQAIPNTLTTLPGIGPVFAAGLIAEIGDIRRFGADDDKVAKYAGLKWRRHQSGEFEAEETPLTLHCNHYLRYYFVEAAESLRNNEPEYAAYYAKKYAEVSKHQHKRAVVLTARKLVRLVTALLTTNQPYRAGRADG

SEQ ID NO: 69648 - protein, 367 aa, unidentified
MTKVRTWVGLDVHAAKVVACVVDAESGEMSVRRLPGDTTKVVSFCAGLPGPTRVAYEAGPTGFGLSRALHAAGIGCVIAAPGKIERPAQDKVKTDRRDAERLVRLLMIDGLYGVQVPTSEEEALRDLVRAREDLRGDLMRARHRMGKLLLRHDVRYDGTSDTWSHRHRQWLSMVRLPERGAQATLLDYLGAIDALIIRRDQLEATIAELAPLSPWAEAIARLRCMRGIDTLSAVGLCAEIHGFERFEHPKQLMSYVGLVPSEHSSGQTRRQGAITKSGSQHARRLLVEAAWHYRHPPRLGTRLKARQVDQPATVIAIAWKAQQRLHQTWRRLDTKRRKRKTIVAAAVARQLAGFCWAIVTTETEHTT

SEQ ID NO: 69649 - protein, 353 aa, unidentified
MGDQSLKGEVILGVDTHLDVHVGVVISDSGRLLGTLAVPTDKAGYFKLLSWASSLGSVRRAGVEGTGTYGAGLARLLRDHDVEVLEVNRPDRAKRRLHGKSDPTDAEAAARAVLSGNATAIPKTQAGAAEAMRAVSVARRSAVKAKTQAINQLRALLVSAPQEIRERLWKANPADCVDGCARLRSLGTTPLLQALTGTLRLLAKRWLMLAEELKELDANLDRLTNQHAKRLREQFGVGPQTAAVLLAVAGDNPERLRSEAALAALCGASPLQASSGKTTRHRLNRGGDRSANNALWTIAMVRMRSDPRTRAYVERRTAEGMSNKEIHRCLKRYLVRALYPLILADLADSARLS

SEQ ID NO: 69650 - protein, 402 aa, unidentified
MITCGIDIGKGKHAVAVIDESGRQLVRTRFYDNTKAGAERMLAELLRHAEPSQIHVGMESTGNYWRAYYDFLKGRGCVVDVINPIVTSASSAGDIRGRKTDKRDAESIAEVVLRGKYACRRDEGLQERKLRALTRQRGFIVEERSAAKLHLASLVAEAFAEFESLFEDPYGALALAVLSKYPTASHLARARKSSLAKIVRANTRGKDADAEALRLIGGAKDSISLSCEITDALARCVTSSIRTIMDLDERVKDVEEAIKGFDPPDLASKLMAIKGSGKVMPMVVAAEFGDISRFRNNPKDGSEAGMHKRLLAYAGCEPRIRESGKWKGRKFISKRGSRQLRTALYLLANNIRQWDPYFKAVYERKIGSGKHHNVAVFYVVAKLIEVLCALYKSGRNYAAIQP

SEQ ID NO: 69651 - protein, 402 aa, unidentified
MNCVGIDVSKGKSMIAVMRPFGEVVVSPFEVLHTDSELSELARLLKSLDGETRVVMEATGNYHAPVAWLLHDAGLYVSVVNAMLVHDYGNNSLRRAKTDKKDAVKLANYGLDHWLTLPRYVPDEDTRLMLKTCYRQYQQYSKVQTMLKNNLISLLDTTFPDANRLFASPPRADGSEKWVDFVDAFWHCECVCGLSEKTFITRYQKWCRKHGYNFNENKALDIYASACGHFGVMPKTDTTKLLVEQAISQLQATSAALAALKQEMQSLAASLPEYPVVMGMFGVGPTLGPQLIAEIGDVRRFHSKKALVAFAGIDAPPYQSGQIDVRSRSISKRGSASLRRTLFLVMGVLLQCAPMDEPVYQFMNKKRSEGKPYRVYMMASANKFLRIYYASVKTYLDSLEHN

SEQ ID NO: 69652 - protein, 353 aa, unidentified
MQQYVGLDWGYGRARWCAKASDGAVLAEDWTPADEDGLSRLAARLGPDVKACVEMMSGAAWVRERLEGAGWTVEIADARKVKALAPLAAKTDKVDARVLAELVRRDLVPALWVPSLDERALKERLLRRMHLVRLRTSAKNRSHGVLSQFGVKLPLSRLRQADALELLERRGVPEVWRRSVAEAIAVVDLLDERLAPLERELGPLARDDRRVVLLTTIPGVGDLLGLTIAVVIGDIERFADARKLVGYSGLTPRVKQSGQSSRTGKLSKSGSKLLRWAAIEAAQQAWRPSNPWHQLYLDVKARNGDEGNPAKAAVARKVLIAAWHVLALEQPFKPSRPRGANPVPANSGCVLAD

SEQ ID NO: 69653 - protein, 364 aa, unidentified
MLQSAIKLSAGYRLECGFNNRRHLGHLPIFFHRLNSRKGITPVHNLKHRRKPMSYLYYIGIDVGKDDFYVAMHNSKAKPKSYPNSNRGFALLLKDFGDKITDCFIVMEATGGYETALIRFLAKAGANLHKAQPFKTASYMRSLRAGSKTDNLDAIGLARYGAERHEELRIFTPNDQTMEQLQCLHTRRNDLVEMRTAEIQRLKHPLYDDIKDDLEEHYRFLEQKISEIETKIQSLIDENSELKAKSEVMKNFKGIGEKTTMCLIACMPELGTMTRKECASLAGLAPHPRDSGKTQGYRATRGGRRDVRNALFMAALSARRYNPQLKTFFDRLVENGKKPIVALVAVMRKIIVILNAQIRDQCYN

SEQ ID NO: 69654 - protein, 340 aa, unidentified
MTPIRIGLDIAKNVFQVHGVDDKGTVVIRKRLRRPDMLRFFASLPPCLIGIEACSASHHWARELIRLGHEVRLMPARYVKPYVQRGKSDALDAEAICEAVGRPTMRFATIKTAEQQAVLTLHRARELLVKQQTMLANLIRGCLGEFGIVAPLGIRRVSELIAVINDDADTRILPEARIAMRAVAGQLCDLQTRIKQIEQAIRAWHRSNEASRRLATIPGVGSITASAIVATVANATEFKSARHFAAFLGLTPKQYSTGGRQRLGRISKQGDVYIRRLLILGGTSLVRYARGAGGSIWAKQLLARRPTRIVTVALANKAARIIWALLTRGEVYRAPQPQTA

SEQ ID NO: 69655 - protein, 393 aa, unidentified
MRFVGIDVASETHTVAAVRGDGEAVLKPSSFAEDAEGYERLFEKLGSSEDTLVAMEATGHYWKNLFAALVARGFAVALLNPLRTRRFAEEDLERTKTDAIDALGIARFAAQKRPAVTRLPDAATEELRELVRLRDRIVQEIGDRVRQLHRLVDLGFPEFTRYVRTLDSSLATALLHEYPTARAFERVGPTRVSKLVYDGQHRVGKELATQLVESARRSVGAHHGPAYQVQVRYLCEDLDVLRQRLRDVDGDLEQHLDAHEVGTLLTTIDGIGPLTAARLVAELGDPTTFESPAALAAYVGVIPALRQSGKRTSQRAGLTPHGHIRLRHALWMPTLTAVRRNPWLRAHYQRLRGNGKPTKVALVACMRKLLIAVYAVARDRKPFVPHLPAQAKT

SEQ ID NO: 69656 - protein, 481 aa, unidentified
MSQADRYGKTKKMADAYRKRRARAEAKRTAQQQEQVRRVEGLSVVNPHAAGIDIGSRSHWVCVAASAEPGAGLIREFSAYTEGLHEIVAYLRQHGVTTVAMESTGVYWIPLYELLETLGFEVLLVDPSYTKQVKGRPKTDRLDCQWIYRLHSVGLLAAAFRPDPKTCELRAYLRQRGNAVRYAGQHVQHMEKALEQMNLKLTETISDITGVTGQAIVKAIGRGVRDPYQLAKLRDVRVKASEEQIAAALTGTYRDEHLCELKLAFEAWQFYQKQLDELDTRIARCLSEMKQDRALPPLKPRRRTSGRKPNHPRFDVRAALYYVVGIDLTEIEGIDEMTALTVISELGSDLSQFASVQHFCSWLGLCPQVKQTGGRVRSSRTRPGVNRVAASLRLAANSLHASRGALGAFLRRKKAHLGAPKAVTATAHKLARIVYLALTKGMTYVRQTQEEYEARVREQQVKALKRKARDLGFEVMQKQTA

SEQ ID NO: 69657 - protein, 378 aa, unidentified
MHSMTQENTLVVGGVDAHADTHHAAALDQRGALLSTKSFPTTTSGYRQLLDWLSSHGQIDVVAVESTGSYAAALVRYLREHDVRVVEVNQPHAHTRRRIGKSDPIDAEMAARLFQAGKARAVPKRTDGIVESIRLLRVARNSAVKSRSAALLQVRDLIITAPHEIRDQLSSRKTLRGKVTVCARFRPSGRELRSPSQAAKFALRSTAQRIEALDQEIAALDRQLEQLVAAAAPRTVQLLGISTGHAGQLLVTAGQNIERLRSESSFSMLCGASPLPASSGKTTRHRLNYGGDRQANRALHLIAVCRLRYCERTRAYAKRRTAEGKTQRDIMRCLKRYIAREVFNSLRADLADTAQPRPAVSTTIMCGNPGFGINRIRT

SEQ ID NO: 69658 - protein, 371 aa, unidentified
MTSIVQIGMDVHKNNFTVCCFDIESEQVKYTVTLEPDYRQIIKYIQNVRKRYPEGTEFECGYEAGCLGYSLYNDLTSHGVKCTILAPTTMSEHDNKIIKTDKRDAANIAKCLAYHTYKKVYVLDDEDNSVKEYIRMRDDHSKEWKRIKHQILALCLRNGSVYRDGDHWTLKHITWLNHLTFKNAVLQETFEEYLSTFNYLKDKLERLDKRIEEFSQKEKYIEKVKRLSCLLGIKEHTALSLVVEVGDYNRFPKAKSFSAFLGLVPGEHTSDKNRNILSITKAGNTHLRRLLVEAAQCYPKGKIGYKSASLKKRQQGNPPKVIAYADKANERLRRKAYHLILGENKKRNIAVVAIARELACFVWGMMTDHVD

SEQ ID NO: 69659 - protein, 346 aa, unidentified
MNAVGIDVSKGKSMVAIMRPFGEIVSTPFEIKHTSSDINSLVKLIKSIEGESRIVMEHTGRYYEVLAHQLSEANLFVSAINPKLIKDFDNDSLRIVKTDKADSVKIARYALDKWQNLKQYSVMDELRNQLKTMNRQFGFYMKHKTAMKNNLIGILDQTYPGVNTYFDSPARSDGSQKWVDFASTYWHVDCVRKMSINAFIDHYENWCKRKKYNFSKSKAEEIYGKAKELVPVLPKDDITKLIIKQAVDQLNSASITVESLRTLMNETASKLPEYPVVMAMKGVGTSLGPQLMAEIGDVSRFTHKGAITAFAGVDPGVNESGSYEQKSVPTSKRGSDRKSTRLNSSH

SEQ ID NO: 69660 - protein, 420 aa, unidentified
MRNAGIHANSLLEVHRMYNAVGIDVSKGKSTVAVLQPGGTVIRKPFDVSHTSQNLNELADYLSSLDGTTKIVMECTGRYHEPMVKALSEAGLFVSIVNPHLIKNFGNNSLRKVKSDPADARKIARYTLDNWTDLRQYSGMDNTRTQLKTLNSQFSFFMKQKVAAKANLIALLDNTYPGVNKLFDSPTREDGSEKWVDYSYSFWHADCVRKIGLKAFTERYMSFCKKHHYIFQQDKPEKLFNASKELVAVFPKEKTYKLLIQQSIQQLNLASEHVERLRREMNELASTLPEYSTVMGIYGVGKTYGPQLIAEIGDVSRFTHREALTAFAGVDPGVDESGQHKSKSNRASKVGSARLRKTLFQIMTTLLQNAPEADPVYCFLNKKRSQGKPYYVYMTAGANKFLRIYYGKVKECLRNLEQTE

SEQ ID NO: 69661 - protein, 453 aa, unidentified
MLRANTARLLYNLVARVIPNILYLVTPPRKEVLNVNKLFVGLDLSLKDYKVSIIDQNGVEVVKPFSVTNDQNGADILIDTILRCCKALAVDTLFIGLESTSVYGWHIQHLLADSPQLKPYHPHIICFNPKLIENFKKSLGNLPKNDWVDANTIAERLRFGRLPKSCSVDFRYLALQRLTRYRYHLVENLAREKSYYLSNLFLKFSAICQDKVFSNNFGASATELFHEFLTVEDIATRSLDELIDFIMEHGKKHFECPQATAKALKETAAKSYRLNASVDNSLSFVLKSCLENIKALEKQIKAVDKAIEKELPLFKNEFLCLTSVKGIGPVLAAGLISEIGGISRFENDNALAKFSGLYWSEYQSGDFTADDTFIRKTGNHYLRYYFIQAAEQLRKYLPEFADYYSRKYNESKTHHHKRALVLTARKAVRLVFALLRDEKLYNPSARKGDISIS

SEQ ID NO: 69662 - protein, 419 aa, unidentified
MNRIETKKQRIVNAKTLIVAIDVSKTTDMGYCRCPSGKELKSFEFGNNIEGFTKLWDRICWMKMSHHLDEVVVGFESTGSYGEPLVHYLRQKPVKLVQVNPMHTKRIKELQGNSPGKTDRKDPRVIADIIALGHALSVVVPEGAAAELRRLTLARERSIGRRTALYNQLQDLVSLLFPEFLQVIKDVKSKTAHYLLRHYPTPQDITKCGLAPLSSILKRVSRGKLGSTQAQALYEAAVESVGLREGTQGIVLEIEEILSSLEACNRFIDKLEAEMLAHLEQIPYHDSLLSVKGIGVITVAGLVGEVGDFRHFHTLREVMKLAGLDLFEISSGNHTGNRHISKRGRPLLRKLLYFAAINTVRKGGVMHTSYQRYLERGMPKMKALIAIARKLLRVLFALVRDHSQYVENYSKKEALKLAA

SEQ ID NO: 69663 - protein, 378 aa, unidentified
MIVIGADTHKHTHALAAVDAGTGRVSGAREIKAEEPGHLAAVRWARGLDDERVWAIEDCRHVSRRLEQALIAAGERVVRVPPQRMGASRRAEREPGKSDQIDALAIARAVVKDGVENFPAAHLDERAMEIRLLSDHRKDLVAERTRAQNRLRWHLLELSPELERSLKRGSLDKPRQLNRIDRRLRRMVSCARVRVARDEVRQIRALTGQVDALQQELLVLVEAHRPQLLAEIGCGALTAALLIGRTAGAERFTSDASFARQAGTAPIPCSSGQRQQHRLDRGGDRQLNSALHIIAITRARHDPATRAYLARKEAEGKTKKGALRCLKRHLARRFHHLLSLPAETPQADQSSIDQIPARPQSEATTITARAPTPMPCMT

SEQ ID NO: 69664 - protein, 460 aa, unidentified
MFEEAKKMVKLFKEVGFEKVLIAGIDVSKNKFTIAAVNGMYESKVKVKDIKLDKDSLNDLYREIDLIIKKEGIKQLIFGCEPSGIYYKPIVKDLMRKYPDAMFKLINPSSTKSNREQRMEREKTDPIDTYAITDLLIRGECYDLEIEDNTFNIIKEYVRELDHIVKERVRYKNKIHALTDEIYPGLESSSTSFLDSIYGKRFLKVLPKPETINNLSAEDWIRILSTSDYRLPLHQAKKLKNRSLSIVSNRHNNFKTTKEYIVFLVEGYEHLEERKEKIENKLDKLIDSLEFGKNLKEIDGIQTLTVARIIAYMGNPYRFKSGKEVASFAGLTPKSNQSGKKDKRKKLSKKGHSKLRATLVQAAQQVITSTAYFTAYYNRLVIENRKDPMVAIVATANKLTRVIMKMIHSGEKFNPPTARDKDKAKGKIKRLTSKELKIINKNKRSDSLTQDIKKLYLVRV

SEQ ID NO: 69665 - protein, 388 aa, unidentified
MSKKTAAASTIEITSPARTLMLAFELGEGSWLLGFSAGFGEPVLRRKISSRDTRALLGEIEKAKEKLDLPPDASVKSCYEAGRDGFWLHRFLDSRGIENFVIDSASIEVNRRSKRAKTDRLDVNGLVDLLARHLAGSRKPVFSVLTIPSPEAEDLRQLGRELKLVKKDRTRVSNRIKGLLANQGLLIDRNKDMARQLAGLRLWNGTKLPGHLRARLERYASDYGYYSQRIQELERERKAVLRANEGEATEKVWRLLWLRGVGIETAWCYGMEFFGWREFKNRKQVGSLAGLTPTPHDSGTQVREKGIGKDGNRWVRGVAIEQAWAWLRFQPESELSQWYQERFGKGSKRLRKIGIVALARKLLIALWRYVETGLLPEGAVIASAVRLP

SEQ ID NO: 69666 - protein, 373 aa, unidentified
MIAGIDTHKDTLAVAVVDDSGRLVAGGDVPNTERGFAQLVDMFTAHHVQRVGIEGSGSFGRAVAVHLALCWQSGQPVAVVEVPTLMTSRERHGQLGKGKTDPVDALAIARITTREQQLPPVRLTVGAAADLRALLDYREDLVRERGALVNRAHAELGGLRPGYQQQIPILTTRARVRAAVDLLGDDSSIRATLCRRRLERVIAIDAETAELKRQITGLVAAADTTLTELYGVGPLVAARFLAEVVDIRRYPNRNAFASANGTAPLPASSGRTVRHRFNPGGNRQLNRSLYTIALTQIRGDTEGRAYYERKRAAGKSKREALRCLKRRLSDIVFTTMRHDAAGADAPPDQASPPAWPVLVGVGAVDANEARLTA

SEQ ID NO: 69667 - protein, 368 aa, unidentified
MMGWMAPLRHLGAKLLADANQRANREPSMGEVTTIGLDLAKHVFQVHGVDVDGVTVLRKQLRRSQLLAFFSRLPHCVVGMEACATAHYWARELGALGHEVRLMPAQYVKAYVKRNKNDAADAEAICEAVVRPTMRFVPVKTAEQQAALLLHRGRERLVRQRTGLVNALRAHLAEFGVIAPQGLRNVGQLIAIVRDESDARLPALARQVLQVLATQVEQIAAAVTELEKQLMAWHKSNPVSQRLATIPGIGPIIATAIAATVVEPSGFRSGREFAAWLGLVPRQNSTGGKTRLGGISKRGNQYLRRLLINGASANLLRSKATNADPWVIGLRRRRPSLVVAVALANKTARIAFAVMQRKEDYRRMAAAA

SEQ ID NO: 69668 - protein, 412 aa, unidentified
MEVVHGRCAGLDISKKDAKVCVRVAGAGRRKTVETVTTWGSMTSQILALRDHLATQQVTCVVMEATSDYWKPFYYLLEDLPGVEVLLVNARHVKTVPGRKTDVADATWLAQLGAHGLVRGSFVPPAEIRQLRDLTRARTAITRERAREAQRLEKLLEDAGIKLSAVASDILGVAGRAMLEALIAGDRDPAALADLAKRRLRAKIPELTEALNGRFGEHHAFLARVHLDLIDRHTAAINQLTARIEQVIEPFQAFRALSCTIPGIATLTADVIIAETGADMSRFPTAKHLAAWAGTTPGNNESAGKVKSSKTRPGNPYLQGALGAAAMACAQNPRTYYGARYRRIASRRGPKKANVAIQHSMLIAIWHMATTGTLYTDPGADYYTRLNPERTRTRAIRQLQAMGYRVTLDHAS

SEQ ID NO: 69669 - protein, 415 aa, unidentified
MLASSTRLSSRSSGVVLEDLIAVPIDVGKHTAAASVSDFTGRELVKTFEFRLDRAGIAEFVGRVRAGSPPTAQLVRVGLEAAGHYHLPVAGPGVLPADWELRILNPGHVAMQRKANGQRGVKTDKIDLVAIRDLLLVDAGHAPAATVDPVRELEAWASHRRRRSLVRRRTIQQLTTQVDRCFPGLGAVMWSVVLSKAGRLIITELADPARIVKLGPARLRSFAANRDVRMTRPLAEKIVDAARQSLPVHGAEIARTILAADLRLLADIETQIADADAAIEAVLPATPFDVLRSAPGWGPVRVASYGAAVGEPSRWPSHRQLYRAAGLTPRLYESAGRRRDGAITREGSVQLRVALVDLGMGLWHQDPASKTYAATMRDRGKPGGIITIAMAHRANKIAYAMVRDQQPWEPSRWAA

SEQ ID NO: 69670 - protein, 445 aa, unidentified
MAHANRLSRGDVRRNARLDRLRRVVSRDHAVLAVDLADDTQVVVVCDHDSRVLARRTWRCRPWQLDRALRWGLAVACRHGFAGVVVACEPTGHRWRVVVEQASRLGLEAVCVQPLLVRRAREAEDFTRDKSDDKDALLIARLTTQLHCYLPERPTAAWARLRHLGNRRVEQLTLATAAQQRLRDLLECGWPAALEVTRHPLDSSTWRAAMTVGRCDPARIRRLGFTRFARAVARELPRWGGRRRNLRILRALYAATGDDRGVTSQRAGSLERSALVLTDFKQALAALAEVEGRMAKVLAELGLAELVTSIRGVSVVGAAAILAETGDPTRFDDAKAVVKHAGLCPRDNASGAFAGKTTISGRGRPLLRLAAWRAVWGALPHNPVFAARYTHLTSRQRNRLSDGQARTAVAAALLRQLWVVCVNRTPWEPAVAGGTIRKEVTDPAA

SEQ ID NO: 69671 - protein, 405 aa, unidentified
MPYILALDVSMGHSYSVLYKDDTCLFEDEIEHTQRGFHALLEEIQHLPERPLIVFEATGIYSRPVEKFFQDHHFSYCLLNPLEAKKQMGESTLRSWKTDKSDAHRLAQTHLKNQRQPKEVQSNFYLEMRDLARFYQEIEKKITRLRMDLHNCLQLTFPELEQFFSNRLTPYALTLIRLFPHPDFVLASTRTKIKNKLINETRKKISANRAEQKADQIIHYAQCAYPAVEKDSIHCQKTIYYAELLQDLLEQKEALATQMIKKAEGSPCFLLYQTFPGIGALTAALLLGELGDITRFETHKQLNAFVGIDIRRYHSGKYTGQDRINKRGNPKARKIIFFTIRNMIRQQRAAPNHIVDYYYKLKKQPIPKKDKVATVACMNKLLKCMHAMVRAHTEYDYAYAVSVDH

SEQ ID NO: 69672 - protein, 343 aa, unidentified
MRTVTTIGLDIAKSVFQVHGIDADGNVLIRRKLKRRYVLAFFEKLPPCLVGIEACATSHHWSRELKALGHTVRLMPPVYVKPYVKRQKNDATDAEAICEAVTRATMRFVETKTPEQQSCLMLHRTRQLFIRQQTSVINAIRAHMAEFGIVAPVGRKGVEQLLAVVTDNRDQRVPELTRACVAALGAQLGMLKAQILEFDRRIMAWHRSSETSRRLDAIPGIGPALATALVASVADPKTFRSARNFSAWIGLVPKQRSSGGKDKLGSISKQGDRYLRSLFTAGALAVIRYAKIHGTKHRPWLTALLARRPTKVAAIALANKLARMAWAMMAKGERYKEPVALAA

SEQ ID NO: 69673 - protein, 341 aa, unidentified
MAWTVAIGVDTHKEAHVAVACDRLGRQLDACELPAGAGGYARLLEWAEGLGSPAFAIEGCGSYGAGLARFLQASGAAVFECERPRRRERRRGKSDLIDAALAARRLVAGEGLARPRGGGRREELRLLLLERRGLVQARTAALNQLQAVLVSAPERLRVRLGSLRGTRLARAAQALRAGSDEERVLVGVLRRLARRVQQLEAELAELEAELEAIVSELVPELLAECGVGPVCAAQLVASSGDPARMRSEAAFAALAGTSPVDASSGRQRRHRLNRGGDRQLNRTLHVIALARVRHDRETAAYHERLLGSGKTDREARRCIKRALARHFYRRLRELPTLPLTT

SEQ ID NO: 69674 - protein, 408 aa, unidentified
MQVVHSCCAGLDVHKKSVYCVLMFGSDGRKQKQVRSFSTMTKDLLALGDWLKEAGVTHVAMEATGVYWRPVWAVLSGQFELLLVNPQHMKAVPGRKTDVRDCEWIADLLQHGLLRGSFVPPTEIQDLRDLTRYRAELTQAQNRVGNRIQKLLEQANIKLSSVVSETLGLSGRRMIEAMIAGEEDPQRLADLAQRALRKKIPELQLALNGKVRDHHRFLLREYMSEWNTLSERITRIEKEIRRRIVPFERAVTLWQSIPGIEWVTACNLVAEIGANMGQFPSAQHLASWAGLCPGNHESAGKRMSGKTRDGNKWLRRALCQAAWAATRKKDCYLSTQFRRLAVRRGMKRAVMAVAHSMLVIAYTMLKTDRRYHELGGTYLEQINKDQLQRYYVKRLQRRGLTVTVQPAA

SEQ ID NO: 69675 - protein, 347 aa, unidentified
MRFYTNQHKYYCGIDLHARRMYVCIIDEKGEIREHHNMKTDSDAFLKTIAPYREDVVVAVECIFTWYWIADLCQNEGIPFVLGHALYMKAIHGGKAKNDRIDSRKIAALLRGGMMPMAYVYPARMRATRDLMRRRNHLMRMRSELYVHIQNTNIQYNLSDSFGPISRPQNRVGIAEQFEHPCVQKSIAADLEMIKTYDSILSQLESSIVKMANNHDPASYALLQTIPGVGRILALIMLYEIENIQRFDTVQDFVSYSRLVKCARESNGKKCGSGGAKIGNVHLKWAFSEAAVFFTKGNDPAKKCLDRLIKKHGKSKALSILAHKLGRTVYFMLRNGEVFDQKKFLNT

SEQ ID NO: 69676 - protein, 291 aa, unidentified
MRRNALNKAGELVGKNIWCGRVSIRDGLDNFIKALLPYCQDFDHVAVVESTYNWYCLADVFEERGWLLRIADPSTVSQANLKAADDRTDAQYLAERLRVGSLKHYLPLNYSSRALRDLCRYRMAMVQDCASLKIKLINLYRNQLSKNLRVADLLDRCRNHMQSNYRFDPDILEEFKDPNIRLRVAFEVSRIAMLEEMIEECNAEIQKQCKDQELVKLCKTIPGCGPVLSAVICTEIGTMQRFKSAGDFVSYCRLCSTSKLSNGKSKGLGNAKNGNAYLSWAFTEIENAYPE

SEQ ID NO: 69677 - protein, 339 aa, unidentified
MENQVFVGIDVSKARLDVALRPGAESFSVANNQRGLATMVKRLKKLCVSRIVLEASGGYEIAAASELAAAGLPVAVVNPRRVRDFARATGRLAKTDAIDARVMAHFAELIQPQTRPLPDAQSRELMALVVRRFLVIDMVTAESNRRGRAVGCVNRAIAAHVRWLRKQLAELDVALEQAIRHSPLWSEKARLLRSVPAVGSVTVTTLLAHLPELGTLSRRKIAALVGVAPFNHDSGKLRGTRTIWGGRAQVRAVFYMCTLVATRRNPVLRAFYARLLAAGKKPKVALTACMRKFIIMLNAVLRHQTPWNPEYSVALPSPFSAALAGAAGAVVIPRAIGTA

SEQ ID NO: 69678 - protein, 456 aa, unidentified
MMAKQKTERPPTIETVNIGAAAVDIGSREHMAAVNPDVTDAPVRAFGTFTHDLHDLAYWFKSHGVTSVAMESTGVYWIPAYEILEQHGFEVILVNARYAKNVPGRKTDVSDASWLRQLHSYGLLRGSFRPTAEIATLRAYLRQRERLVEYAAAHIQHMQKALMEMNLQLHHVVSDITGVTGMKIIRAIVAGERDLDVLAAYRDVRCKASTETIKAALNGNDRPEHIFALTQSLELYDFYQAKMLECDRHLEATLAALCADTEHDPSQLPRPRTKTKQVSTPSFDVRAALFGVLGVDLTQIHGMGPSLSLKLVGECGTDLRAWPSAKHFTSWLCLAPGNKISGGKVLSSRTRRSSSRAAALLRLAAVTIGRSDTALGAFYRRLAARAGKAKAVTATARKIAVLFYNTLRHGMTYKDPGASHYEERYRNRVLGNLKRRAKSFGYDLQELPLEADMAVS

SEQ ID NO: 69679 - protein, 338 aa, unidentified
MNIVFPGIDLAKNVFQLCGLNQAGKPVYTKRTGRKELLQTLANIPACLIGIEASTGAFYWQREFEKLGHKVKVISPQYVKPFVRGQKNDGNDAQAIAVALMQPTMQFVPPKSPEQQDIQALHRARQRIVNHRTATVCQIRGLLLDRGIPIGSAVSRARRAIPLILEDAENGLSSRMRRTIAELYDLFNDPERRIHFFDKEIETVFRQSEACQRIAKVKGIGPKTATAVVAAIGKGTEFKNGRHFAAWLGLVPRQHSSGDRQVLMNMTKKGDKHLRTLFIHGARAVVRVATNNNDGHMNQWVNQLKERRGFNKTTVAVANKNARIIWSMLRNETEYQVV

SEQ ID NO: 69680 - protein, 430 aa, unidentified
MTKRSSTPADAVLVAIDMSKHRQEVLIERPEGGRRRRMTVMATKADYDRLVTDLADIGRPVTVGFEATGNYHRTLAHRLLQAGFELRLISSVALARTREALHNGWDKNDSKDAQVILHMLRIGVTQRYVDPLAAGINDLQEMSKTHEAISKAKTQTWHRILTHYLPLYFPEIERFADNSRSDWFLALIERFPTPGSITSIGREAFTEQAWPLIGRKVSKVQVVNDIYETACASMALPINEDSTAVTMFRMVVAQARTLIQQRNEIERIAHDALSPNRDYQLLRMIPGIGPINALTILAEAGDLRRFSHHRQFLKFCGLDLATCQSGMFRGRTKLSKYGNARLRRTFWMAAQVAIRQRDNSFRDKLGRYVAGHPNDPDRRRKAMTALTAKMARVAHAVIKTGTEYRPFLERADTRWKDPSLCSREGAAATL

SEQ ID NO: 69681 - protein, 345 aa, unidentified
MKLSRVGVDLAKNVYQLHGVDRYGKTVWKRRLRRGQWLQVLTDTVEPGCEIGMEACTGAHHWARDLQARGYAVKLIAPQFVKPFVKSNKNDANDAEAICEAISRPHMRFVTVKSVEQQDIQATHRVREELKAHRNAKANQIRGLVAEYGLVAPKGLLALRRTIPEWLEDAENGLTGNFRSLLHGLWNDLLALEDRLKELDKEIEKLARSFEVTKRLQQLRGVGPIVSTALVATVGDGGQYSKGRQMASALGLTPRQNSSGDKYRLQGISKRGDVYLRTQMIHGARAVVSQAKHRDDPLSRWVTDISKRRHPNVAAVALANKTARMAWAMLQNETNYDASLAVGQA

SEQ ID NO: 69682 - protein, 349 aa, unidentified
MRFYNGTHQHWCGIDLHARTMYVCILDHDGQILVHRNLRTSPADFLAVIEPYREGLVVAVECIFTWYWLADLCAREEIPFVLGHALYMKAIHGGKAKNDRIDSLKIATLLRGGMLPQAYAYPAGMRATRDLLRRRLHLVRKRGQLLAHIQMTSHQYNLPPLGKRIAYPANREGVAEHFADRVVRKSISVDLALLERYDEILRGLELDLVRQAKQHDPQGFALLRSVPGIGKVLALTILYEIRDVHRFDRVQEFASYARLVKCAKESAGKKHGTSGAKMGNVHLKWAFSEAAVLFVRHSAEGKRLLARLEKRFGKGKALSILAHKLGRAVYFMLRRGKAFDRQRFAATVT

SEQ ID NO: 69683 - protein, 350 aa, unidentified
MIVLGADTHKSSHTIAAVDTSTGQVLGDKTVAVGARGFAALVLWARGLDGERVWALEDCRHVSGALERFLICRGERVVRVSTRLMAGTRRSSRERGKSDQIDAVSVARAALAAGIETLPTAALAGPELDIRLLVDHRERLVRTRVALNNTLQWNLHDLWPELTLPGGALFSKKWTTKIARRLARAEQTMRVRIARDELRRMRELTQAIKALQAEITVLVTEIAPQLVAEPGCGPLTAAKLVGEIAGAERFTSDAKLARAAGIAPIPASSGRTDRHRLDRGGNRQINAAIHRMAVTRARCDPETQDYIARKKTEGKTQRDAIRCLKRHLARRIWHLLQPPPPTETSLNLLT

SEQ ID NO: 69684 - protein, 365 aa, unidentified
MQKAELSCEADSENYLGGSSETMYFIGLDVHKRTISYCVKDAAGKVHQEGKIGSTRRELDAWVKTLPQPRTIAMEATIFTGWIYDHLLPHAEKVKVAHPLMLRAITAAKRKNDKIDASKIADCLRCDFLPECHMASTEIRDRRRTLRYRGLLVKQMVQMKNRVSGLLLEKGVTHTRQRLHKVGYFAELMSSSEEIDQSIRPLLKLSREHIVRAQKLDYALVSSLERDPMLAERLKRLRTVPGVGPITALTWALEIGDVSRFRSIKQAISYCGLCGAERSSADKVARMPISKQRNKHIQHVLVEAAKLAPRQCHELALLYEKEMQRGNRNRATLAVARKLVCWILAVERRKQDFVPAEKFGGTAAA

SEQ ID NO: 69685 - protein, 373 aa, unidentified
MFNLPVFIGLDYHTKTIQVCVMDQKGKILANQSVGNDPHAVFRVVAPYGNNIHAAIESSTGSAAFAEELITKYQWSVSLSHPGYASRMKQTPDKSDWTDAKLLADLIRVGYLPRVWLAPPYIRELRDSVRHRHGYVQQRTQTKLRLRALLRQHRINCPESPWTIKGKKWLLDATNITSLHVRTLLQDYYETIEFLNKKIVNAEERMAAATADDPIVKQLLCQPGIGLITAITMRAIIGHFDRFRTGKQLAHFCAVCPRNNSSAGKTTTGGLIKAGDDLLRQVLIEAAHRLIRYNPEWKAMSDRLRANGKKTCVIIAAVANRWIRKLFHQMREPTPTGCVDVRFLRHGQESTPALETPSDARRSVSHGTGRLST

SEQ ID NO: 69686 - protein, 310 aa, unidentified
MAAVNAAIEVGKHELYIALGSAGELFAERNEPRAVKRLATRLAQTGCARVLIEGGSYQNLLVAALRAAELPVVIINPRRVREFAKSIGRLAKTDRLDARVLALYGERVEPPVRELPDEQIQALRALWVRREQLIEMLVMEQNRLEHAPKALHHRLRAHIDYLRKELKHADDDLDSAVRNSPLWDKYQLLSSVPGVGRVLSAALLADLPELGRLNRREIAALAGVAPFNQDSGSLHGARTIAGGRARLRRVLFVAALAAVRCNPVLKPFFQRLRAAGKPHKVALVAAMRRLLLILNAMLKSKTAWRPPCPA

SEQ ID NO: 69687 - protein, 412 aa, unidentified
MEVVYPCCCGLDVHKKSITACVLWAEARGKSRKEKKRFATFTHDLLQLADWLAQCGVTHVAMESTGVYWKPVWNILAEQFEVLLVNAQHIKAVPGRKTDQKDSEWIADLLQHGLLRGSFVPPQPTRELRDLTRYRVSLVQEINRIANRIQKVLEDANIKLASVATDALGASGRAILEAMLAGEQDAARLAEMSKGLLRNKIPELQLALEGRMTEHHRFLLRQLYDHLRFTESKLREIEQEIEKRMRPFEDKVTRLCTIPGVERVTAWGLLAEIGLDMNQFPSSGHLASWACLCPGSFESAGKRLSGKMRKGNVSLRRCLSQAAWAISMMKNNYLSALYRRIAARRGAKRAVMAVAHALLEIAYHMLKRKEDYRELGADHFDRIDVNRIRRTLVRRLERLGHKVTLEPLAQIA

SEQ ID NO: 69688 - protein, 426 aa, unidentified
MLNSQINKIQAITSDTLIVGVDIAKNIQWAQFINFRGIEVFKHICFENNYSGFNSIMEKIEEIKSKNNFLSVIVGMEPTGHYWKTFATFLHNNGIKVVQVNPYHTKKAKELDDNSQTKSDKKDALVIAKLVKDGRYSAIYFPEGEYANLRNLSNTRLEVSRLLNICKNRIHACVDEYFPEFETVFKSFIKGKVALHILKRIPFPTDILELTLEDIISVIREAAKKSVGKKKAEELIRAAKVSIGVKVGLEGARIRLNNLLEEYELYHNQLEKIEKEMAQELEKTGYKDILTSIPGIGIISAASFIGEIGDPKRFSNPQQIIRLAGYNLVEDSSGKHKSKTMISKRGRKILRTILYKISLIVVCKNQEIKLLYKYLITRKENPLKKKQALIVISGKMVKIMYSLIKKEEVYDKEKVLGIYRKQQIVA

SEQ ID NO: 69689 - protein, 343 aa, unidentified
MQTTTTIGLDIAKSVFQVHGVDAAGQVVIRRQLKRRYVLSFFQKLPQCLVGIEACASSHHWSRELQALGHTVRLMPPAYVKPYVKRQKNDATDAEAICEAVTRANMRFVPTKTPEQQSGLVLHRTRHLFIRQQTSVINAIRAHLAEFGIVAPVGRRGVEELLTVVADPNDKRVPEIARACLSAFGAQLHSIKEQVLEFDRLITAWHRSNEMSMRLDEAPGVGPVLATAVVATVADPKVFRSGRNFSAWIGLVPKQHSSGGKDRLGSISKQGDRYLRGLFVAGALAVIRYAKIHGTKHRPWLTALLARRPTKIAAIALANKIARMVWAMMAKGERYKEPIALAA

SEQ ID NO: 69690 - protein, 375 aa, unidentified
MHNQKHFCIKPLEFDLFCGMDVDKKSISVTFVCHEGFLKSFKIPYDASNLITYVRKRYPDKRIAFVYEAGPTGFGLYDDLVAAGFVCLVIAPTQISHSAADRVKTNRLDSRKLAEDLRGGKVKGIHVPDRTYRDLRHLVHLREIHVRNQAATKVRIKLLLLLEGIKFPAFTPKERWSIAVLSRLQSLQAGSEIRFKLDQYLVTLQFYQDQLRTINKELARFCKETSDLWHCLKLLCTIPGIGPVVSIYVLARVGDWRYLTHSRQIAHLLGMVPVEHSTGDRIRKGAISRMGDATTRSKLVESAWMAIRKDPELMEFYQRIKARNPVQFASQKAAVAVARKLTTRIYAVLKYQRPYVIKTVLASGVDPALNSTPGK

SEQ ID NO: 69691 - protein, 355 aa, unidentified
MDSKKYIGMDVHKESISIAVMNSAGKIVMECVIETKGSMILQFINGLRGDVQVTFEEGTSAAWLYDLLKPHVTKLLVCDPRKNASMREGHQSDKIDARRLAELLRLNHLSPVYHGEHGLRSLKELVRSYLSIIKDLGRVMSRVKAIYRSWAIPCTGKQVYAPRHRAQWLGKIGEPGVRRRAEFYYQQLDALRSLRQEVRRELLAESKKHQAWKLLCQIPSIGPIRAAVLLGILQTPHRFRTKRQLWAYGGVGIETSSSADHQVMKGQLERKKKQVEIRGLNRNYNHDLKNLFKGAAIVAATKPGPFAEFYAELLAKGMRPEMARLTLARKIATIVLIVWKRGVRFDAQHLKPQTA

SEQ ID NO: 69692 - protein, 409 aa, unidentified
MRIISKRCLGLDLHKKQITAHLRVQRRSNQLPLGEDLQFGTMPDDLQQLRQWIIDQKVEEVVMESTSVYWMHLYELIEDVTKPLVANASHVKKVPGRKTDVGDAQWLAELGAHGLLRPSFVPPKEIRELRSVARYRTRCVATQTAIRNRTIKLIEMAGIKLSSVVSDCFGVTGRAILDALTKDEPVDVVKLAKMSLRKKTDELARCLGKGLLSALQRRLLKMHLEAYEAMDAQIAQTELVLTTLAKPYAKAIAALDAIPGINALGAITLIAEIGVDMSAYRSDAHLTALAGLAPGNSISADKRRRISVRKGNHQLKRICVQIAWAAARKKGSFLRVRFLRLQNRIGRNKAIVALARQMLVLVYHVLCGKPYTDLGQTFYDERDKTRAVDRYTQKLVALGYAVQLVKKPA

SEQ ID NO: 69693 - protein, 315 aa, unidentified
MTNPVFVGVDVAKEQVDVAVRPSGDRWSAVNDEVGITALVARLRPLAPALIVCEATGGFERAAIAALAAAGLPVVVANPRQVRDFARATGQLAKTDALDAGMLALFAERVRPTPRPLPDAAAQLLDAVLTRRRQLLEMLVAEKNRLGFAPNPLHLGIQAHIRWLERQLDEVTKELAGLIEASPVWRAKADLLQSVPGVGPIVSYTLLGELPELGTLSHKQIAALVGVAPLARDSGTRRGQRLVWGGRASVRTALFMAALCGRRWNPALKQFYERLKAAGKPTKVALIACARKLLTILNAMVRDQSHWASPVQYSC

SEQ ID NO: 69694 - protein, 358 aa, unidentified
MTTYYIGVDVHNNSTELAIEKRNKIVARYTVPTTIPAISNVLDSLQGKKYLAMEEGPMAGWLYRNLNKKVDKFIASDPRRNKLISSDGDSDDRIDATKLASLLRGDYLRAVYHSEDDQRCQLKNWVALYHDRVRDAVRNINKIRARCRMYGIQIPRLVLRDPSRRSQWLSKIKLPALAKQLNMLWIGYDATAKQTRVAKQQLIELSKKYPIVHFWKELPGIGLIRATTLFAFMDTPWRFKQKNRLWKYCGVGLQRSASGTDKKGRPKPARLQLPGAGNRTLKNPVLGAALSKINQKSNAFRDYYERMVKDGVIASNARHAVARKLLTVMWGMWKSNSRFDENLLCIELSRTTASALSR

SEQ ID NO: 69695 - protein, 394 aa, unidentified
MKLVGIDVGKNSHHFCVMDKETGELNVTPSSFSNNKEGFDFLINSLKPYSKKSILLGMEDTGHYHVALLKFLLSNGYTVALINPKTTDLTRKMEGGITKNDKLDTITICDVLDTPERKKQYRITKVDRFDLYEQRQLTRHHHNLKEELNIYCNRLQKSIDLVFPEFNTLFGSKYGVVYMNLLKTFGSAEAIASTDIRTIRKFFEIKGKGNRISLTPEKLKECAKNSIGISSEVETIQIKHLVSQIMLIKEQIAEIDKKIEEFSIKNNSPILSIPGISHFSGTSILAELGDIGNYSKPSQIIKFAGVAPYHYESSQYNAQHTAITKKGSKYLRKTLYQIILPVINNNPVFKKYYLLKISQGKGHRCAQGHCIRKLLRIIYHLLETGQSFDPALLR

SEQ ID NO: 69696 - protein, 414 aa, unidentified
MRIVIVKDYRPGMLVLADGRAVVGIDIGKRKHAATALSPQGEILAQLASFPNTREGVDRLEKEVLRPAGGPGKVLVAMEATGHYWMCLRAELERRGYATVVLNPIQTNARAKTQIRKTRNDRIDSASIARLILSGQAKASRVPDEPTAELRLLTRHRRRLRAAVSDMERYAHTLIDRIFPEYAEVFSDPFLPSGERLIRELGLAPRNLVQQTTQVRDLLRAASRNRLAPETVKQLLQAAQTSIGVPQAEDLVQRQLVSILDFRNTLRQQIEHIEQELEQRIKKLQSPLLSLGISSTLAATIHAETDPIGDFRTPDQYVAYAGLDPSLHESGDSVHWRGKISKRGSPVLRQALYLAAFVVYRQHEYFHRLYRKHRRQGKHHCSVMVIIARHLARVIWRLLKDDRPFTKRPPKKTA

SEQ ID NO: 69697 - protein, 314 aa, unidentified
MSIQDVKIYVGVDVASKHLDLFFPDTGKVERIKNDVEAISSLCARMKGKSEYMFVMEASGGYEGIFCAQLGDKSISYAVVNARRVREFARGMGIDAKTDSIDAKVISKFASVLKPIPTASQTDDERKHSALVTRRSQLVDLITQEKNRLKQTWDEDAKKSVQKTLKHLENELKSIDSKLVKMLKSDAMDKRKIEILQSAKGIGDVATSVLLAHLPELGKLNREQIAKLVGVAPMNRDSGGTIGKRFIMGGRGNVRAVLYMATLVAIRFNTKIKTYYAHLKSKGKESKVAIVACMRKFITILNYLIKSDQLWNAN

SEQ ID NO: 69698 - protein, 338 aa, unidentified
MSKYIGVDLHKKTCYITVMDKEGVIDKQIEIANTPKTINTFFKDHVDDYIAVESTMNWIPFYEKLETLGCNVVLSNPLQTKAVAFARIKNDKVDSRVLADLLRTNFLPTAYIQPRSVRDLKELVRQRAEYVVIRTKIKNKIHAVLFKADISHSFSSIYGKAGMEFLRSVKVRKIYRDELNRYLDTLDFLNKQIDEISFEIKAIANNDYDCKLLMTIPGISYYTALMIKSEIGDISRFPSAKKLCAYAGLIPSTYASAEKIRTGRITKRGSKWLRKSLVDAITSGCRNENKLSVYYFKLKKNKGVGKAKVATARKLCSVIFAMLTDKQPFNEFVPVKQR

SEQ ID NO: 69699 - protein, 353 aa, unidentified
MSQDIILTVDYHDRMCVIRRLDRATKRQQLLPEVPTTPESLNPVVDQARRDAGRRGRVVWIQESITGWARMKQLLGQRVEFHLANVLQMPRAPKSHKRKTDKVDTARIQREYLNGELPLAFQPSPECRQLRRVVAYRESLVNRRTALRNWINRFLAHETWYDTTGMWSAKGQRRLRSFLKTVPRTDAWVIGQKLDELARLEDQLKLAIDELLLVYQSSSEAQRVDAIKGIGVVSAVSIVARIGPVERFRSAEDLIGFAGLSPGVAQSNQTRRDGQIGGGGTDIHLRHYLIEATVWARDLPRYKQSYERVAKRRGPKIGRLVVARMLLRSIYKILKEGVTFDAGKTSAAQATAG

SEQ ID NO: 69700 - protein, 530 aa, unidentified
MSTATLKRRRGKAKRSAKFSQAVLGKPSGVIQPRVQEVGPQHFGVVAIDCAKARSKWLLTDFFGNVLIPPTEVEHRATSFKLMVSSIRSAIKHHQLKDLIVCVEMTGTYHKPVFRAMKKAGFETRLVHPFASSHYRLPQHGDVKTDDNDLAAIFRAAVNGFGLIQKEVPAIHRELQILCRHRRDLVQKKSKLQSQIRHHLEQCLPGFCDLFEGDKLWQQTTPIPLLKALAARGGTAHQLVQAGFEGVCQWFVDAGIKFRKPAVERVILWAADAASHDAMAPIHTLVWQSLIDDWTAKQSQITELEIKIANVLVHTPYILLLSHPGINVVSAAELAGELGPIENYASAKSISGRAGLFPSRYQSDGVDRGGQLSRFRNGRLRAAWMLVADNMIKCNQYWQLKSAAWKMQGHDPRDIRCRIANRMTRVVFQMISGKKLFSHPSQLSRGYVLEKLMVFLQRHQVPPHLIVRDLNLATKQVPQSARAEEAKPLQQAHEKSKRSRRANPASVGSLVVGVLAKLGIGGEDDDSVES

SEQ ID NO: 69701 - protein, 465 aa, unidentified
MSKNKGRQRRAKGQARLDTLGIVHANAAGIDIGSREIWVALPPDREGETVRCFGTFTPDLHALADWLVENRIDTVAMESTGVYWIPLFELLEARGIRVFLVNARHVKHVPGRKSDVLDCQWLQKLHSLGLLTGSFRPDAEMVTLRTYLRHRAELIQHRAPHILHLQKALQQMNLQLHHVLSDLTGVTGLQILRAIVAGERDPQVLAAFRQPGCKADEATIVKALTGSWRDEYLFTLQQSLELFDFFTSQINACDAHIERHFAAVKPRWDAPTPLPDLPPIKPNSRTKNKPAQSTRQHLFRLLGLDLVAVEGISASLAQTILSEIGSDMSKWPGVKHFASWLGLAPHNDVSGGKVLRSRTLKTDNRAGQAFRQAAASVTRSHSAFGAFYRRKRAQLGPAQALVATAHKIARTVYFMLKYKVPFQDIGAEGYESQQRERELAYLQRKAAKLGFDLAPREQAPEPTAA

SEQ ID NO: 69702 - protein, 341 aa, unidentified
MNIITVGIDLAKNVFAVHGVDDNGKAVLVKPKVSREHLLPLLVQLPPCVIGMEACSGAHHWARLFRQHGHTIKLMAPKFVTPYRMSGKRGKNDAADAAAICEAVTRPNMRFVPIKEEHQQIILCLHRTRQGFVEERTATYNRLRGLISEFGVILPQKVACLRRDIGARLEDLPGYANQCIGDLLAHADALDARIDEYDRIIAKAARDDARSKRLMERPGIGPISASALLASIGGGHDFKNGRQVAAWMGLTPGQYSSGGKPRLGRITKAGDPYLRSLLVMGARAVLAGLGDKQDSFSRWARSLQERRGYWKAVIAIAAKNARLAWAVLKYGEDFRLNPSAA

SEQ ID NO: 69703 - protein, 312 aa, unidentified
MKNDTIGVDVSKDQLDVYRLTDGAARRFANDKRGHKALVKWLAETPLYRVVFEPTGPYHRAVERALGASGVPFVKVNPRQARRFAEATGRLAKTDRLDAAILARMGALLELEARPARSEILLELKELYVAREALVKDRTAAKNRGKVLTLSLLKRQSAQRLEQIDRQIATVEAAILQIIEADASLADRFAILTSIPGISNITAFALLIAMPELGAMEAGQAANLAGLAPIARQSGRWTGRSFIRGGRADVRQALYMPALVAARFNPDMKAKYAQLIETGKPAKIALTAIMRKLVVLANALLKAKRLWTPKTA

SEQ ID NO: 69704 - protein, 410 aa, unidentified
MELLHPHCAGLDLHKETVVACIRHMADGKVTTDVKSFQTTTQQLMDLSDWLSSQGVTHIAMEATGVYWKPVWHILSDGEFELVLANAAHVKNVPGRKTDVNDATWLADLMAHGLIRASFVPDEPTQQMRDLLRTRKQFVRERSSHTQRIQKTLEDANIKLDSVITDIVGLSGRRMIEALIGGETDPEALAALAHGRIRATKAELEAALRGRVTAHHRFMLRIHLNHLDALNTTIADIDKEVDANVEPFRAAVEMLTTIPGVSSLAAEVMVSEIGIDMSRFKTEGHLISWAGLCPKNDESAGKRRTNRMKKGAPWLKTTLIQCAWAASRTKGSYLQAQFLRIRSRRGPKKAIGAVAASMLTAAYHMLKDGTLYQDLGTNHFDNRDKAKQALRLVNRLQSLGFTVQITSMAA

SEQ ID NO: 69705 - protein, 358 aa, unidentified
MRGGTELFPKITVGLDLGDRVSEVCEVDWRGREVRRGRVVTTRAGLREYFGGRERCRVVLEAGTHSPWVSRELEALGHEVVVGDPSRLYGGRRKKKSDRLDARYLARQGRADVELVYPIRHRGEQAQRDLAVIRARDQVVRTRTKLINHVRGAVKSVGGRIGRCSAEAFAKRAVRELPEGVGEALLPLLELIEELTARIRAYDRQIERLVERYPEAVRLRQIKGVGPVTAVAYVLLVEDARRFLRSRQVGAFFGLVPRLAESGGSEPQLRISKAGDELGRRLLISAAHYILGPHGPECDLRRYGERICARGGKNAKKRAVVAVARKLAVLMHRLWVSGSVYDPDYQRRRRERRRLQLA

SEQ ID NO: 69706 - protein, 340 aa, unidentified
MNHYAGIDVSLEASSVCVIDGSGKIVREAKVGSEPEALIAWFGSLGLSLTRIGLEAGPLSQWLYAALRDAGLAVELLETRHVRNAFKIMPVKTDRKDAQGIAELMRLGWFRPVHCKSMEAQETRAMLTARKLVQKMLHEVEMSLRGVLRGFGLKVGKTTPVQFEARIKELVAGHQNLEVIAHSLLAARATLRREFNGFEKRLRAMARVDTRARLLMSTPGVGTIVALTYASAIDDPSRFKSSKVVGAHFGLTPTRYQSGETDRTGRISKIGDGAVRAALYESAHIILTKPIKGCTGLKSWAMRIAKRAGMNKAKVALARKLAVIMHRMLADGTTFTTQPA

SEQ ID NO: 69707 - protein, 415 aa, unidentified
MTAAGYGCFLERCAGLDVHQASVVCCVLIGAPGRKPQKLLRSFGTTTRELEALRAWLAEHGVTHVGMESTGVYWKPVYAVLEGHFDLIVGNAHHIKTVPGRKTDVKDAEWIAQLVRHGLVAKSFVPPPAIRDLRELVRHRRTLIETRTAVRNRVLKLLEGANIKLSGVASDVFGVSGMAMLEALAAGTNNATEMAGLARGRMRRKHAALEATLDGRRREHQCFLLGMQLRTLGTIDQDLEALDARIGAQLEPYQAQHRLLMQIPGVDWVTAAAIIAEIGTDMDVFATAHRLAAWAGVAPGNYESAGKQKGAGTRRGNVFLKSALFAAASAAVRTKGSYDRDKYNRLRARRGPVRAIMAIAHKLLIAAFHMLSTGEDFRDLGEGYLDQVARKRSTTKLVQRLSNLGYDVMLVPKAA

SEQ ID NO: 69708 - protein, 348 aa, unidentified
MAHFVGLDVSVKETSVCVVDDAGKVILEQKVPTEPADIIALLASLGVTFGRIGIEAGPLSQWLVNALTAAALPVICVETRHMKALLTAQQINKTDRNDARGIAQMMRVGLFKPVHVKTLVAQEQRMLLTSRKLLQRKLLDVESDLRGTLRNFGLKVGIVGGSRYEARVRELVAGFPRLAAIAEPLLSVRRVMRQQLAILHKMLLNTVRDDPVCRRLMTAPGVGAVVALTYRATVDQPQRFVHSRAVGAHVGLTPKRYQSGETDYDGRVSKTGDALLRTMLYEAAHSLLTQSRKWSWLKAWGIRVAQRRGMRRAIVAVARRLAVVLHRMWVDGSEFHWGKNSAAVPTVA

SEQ ID NO: 69709 - protein, 334 aa, unidentified
MSKIAVSVGLDYHPGSVQICVLDEHGKVLTNGTRENSSQELNRVARLYGEQIQAAIEVSPGAANLADELVTRFGWSVDLAHPGYVARIKQSPDKTDFGDARLLADLTRVGYLPKVWLAPLDVRELRELVRYRQQLVRERRSTKLRVRALLRNQRLNGPGNAWSKAWLEWVRNEAALPDHSRWVMTQQLSNLERLQREIRQVEQRLEAVTKEDVIFQKLLEQEEVGLVTAVTLRAEIGRFDRFRSGKQLCRFCGLSPRNASSGARQADAGLIKASNPELRCVLIELGQRLMNHSDKWSERSAEMRARGKPRSLIAAAVANRWLRKLYHEMKSTHE

SEQ ID NO: 69710 - protein, 325 aa, unidentified
MDIVGIDIAKAKFDVALLVGERIRQSAFTNTEAGFQQFLLWLAKHRSEPSLLLHACMEATGNWGLDLADALHANGVRVSVINPARVKAYGASELARNKTDRLDAALIARFCRAQTPTAWTPPAPHLRELRELIRRCDALKATRVQELNRQKAGFASAAVAASIAAHLDWLDRQIEAVFTEVRRLVEADPALSKNLGLVRSITGFGETSAAILLAELPNIAAFTPKALAAFAGLSPSEHSSGSSRRGTAGISRIGSERLRRTLFMCALSAKRSNKMLAGFVQRMTAAGKPPKVILVAVARKLLVYAYAVIRTQKPFISSSDAASPA

SEQ ID NO: 69711 - protein, 343 aa, unidentified
MQTITTIGLDIAKSVFQVHGVDAGGQVVIRRQLKRRSVLAFFQKLSPCLVGIEACASSHHWSRELQAVGHTVRLMPPAYVKPYVKRQKNDMADAEAICEAVTRANMRFVPTKTPEQQSCMMLHRTRHLFIRQQTAVINSIRAHLAEFGIVAPVGRKGVAELLHVVADPSDKRVPEVARACLAALGTQLLSLKEQILEFDRMIIAWHRSNQTSKRLHYIPGIGPMLATALVGSVAEPRAFRSGRNFSAWIGLVPKQHSSGGKERLGRISKQGDRYLRSLFVAGALAVIRYAKIHGTKHRPWLTALLGRRPTKVAAIALANKIARMAWAMMAKGERYRDPVALAR

SEQ ID NO: 69712 - protein, 412 aa, unidentified
MEVLHPRCAGLDVHKETVVACVRIVSGGEVSRAVRTFETTTVGLIELAEWLEASGCTHVAMEATGVYWKPVWQVLAGGGFELVLANASHVKNVPGRKTDVNDAMWIADLVACGLIKASFVPEQEIQELQGLLRTRKQLVREKASHVQRLQKTLEEANIKLESVLSDVMGRSGRAMLQALIAGETDPAKLAALAHPKVRAPQARLREALRGRVKRHHRFLLGLHLQQVDTLDAAITAIDREVDAGLASFRDAGKQLSTIPGVSELSAQVILSEIGTDMSRFATAAHLRSWAGLCPRNDESAGKRRSTRLRAGAPWLKATLVQCGWAAARTKATYLNAQFVRLRTRRGPKKAVCAVAASILTAAYHMLKDGTCYEDLGAAHFDRRRPDAQARRLVRRLAELGFSVELKSPVAVS

SEQ ID NO: 69713 - protein, 345 aa, unidentified
MVILGADLHKRWHTVVAVSDTGRRLAEKTVRATPEGHLELRRWVAQWPERHWALEDCRHLSRRLEVDLLRSGEAVVRVPPKLMAGVRRSVREPGKSDPIDALAVARAALANPDLPVATLDGPERELRLLVDHREDLVAERTRHVQRLRWHLLDLGIPEPGPRSLDRVVVQADLEGRLDGRTEPAARLARDILGRVRDLTAAIHPLEREIEALVAALAPTLLALPGCGPLTAAKIVGETAGMTRFRSKEAFARHNGSAPVPVWSGNVTRFRLSRGGNRQINLALHRIAITQMRIDERGRAYLEHRRAAGDTKTEAIRALRRRISDEVFRRLRADEAARVTPLAVAA

SEQ ID NO: 69714 - protein, 423 aa, unidentified
MEVIHPRSGGLDVHKETVVACVRLAVGGKVTREVRTFETTTSGLLLLLAWLTEMGCTHVAMEATGVYWKPVWNILSDGDFELVLANAAHIKNVPGRKTDVSDAVWIADLLAHGLIRSSFVPEQEIQELRELMRTRKQLTRQQSSHTQRLQKTLEVANIKLDSVITDIVGKSGRAMIQALIAGETDPIKLAALADRRIKASPQQLREALHGRVTAHHRFLLRLHLQQIDLTDAAIQEIDRNVAALITRMDQEVVAGEAPFQSLILLLMTIPGIDVLSARAILAEIGRDMSRFPTAGHLLSWAGLCPRNDESAGKRRSTRLRKGDLWLKTLLVQCAWAARRKKDSYFNAQFLRLRGRRGPKKAACAVAASLLTTIYHMLKDGTQFQDLGATHFDRRSNELKAKRLITQLANLGFEAKLTPLAQAA

SEQ ID NO: 69715 - protein, 391 aa, unidentified
MIYVGIDVAKDKHDCFITNFDGEVLFKAFTIANNLDGFNDLYQKIVSVTEDITKVKVGLEATGHYSYNLLGYLIDKSLPTYVINPLHTNLYRKSLSLRQTKTDKVDARTIASMLMSDVNLKSYSDTSYHNEELKSLTRYRFDKVKERAKLKTSVSRLVCILFPELEKLVPTLHMASVYALLSEFPSAKHVATAHLTRLTNLLSKSSKGRYGKDTAITFRDSARASIGSNMPAKSLELKHTIKLIQELDSEIDEIENEIKIIMDEINSPILSIPGINYRMGAMIIAEIGDFNRFDSPDKILAYAGFSPSTYQSGQLDGAYAHMEKRGSRYLRYALYNATKYVCHWDPTFAAYLAKKRAEGKHYNVAISHAVKKLVRVIYHLEKTKQQYIKAA

SEQ ID NO: 69716 - protein, 427 aa, unidentified
MQSASTTSTRNPAHAHATLPADPPGDVTAGLDWARDDHAVAIVDHRGTQIGRHTIDHTAAGLRELVALLRRAGAAEVAIERPDGPVVDTLLQAGITVVVISPNQVKNLRGRYGSAGNKDDRFDAYVLADTLRTDRARLAPLTPDRPETATLRRACRTRKDLVGHRVAVANQLRAHLRTVLPGVVGLFAHIDSAISLTFLRSFATQDHIDALTTAGLAAWLSEVGYCGRTAPAVLHARLRTAPRGLTGHDAEINTEITHALTNVLTTLNTQIATVSAQIERQLAEHADAHVFTNLPRAGRVRAARLLAEIGDCRARFPTPEALTCLAGVAPSTRQSGKHRSVGFRWACDKQLRDAVCDFAGDSRRANPWADDLYQRARDRGHDHAHAVRILGRAWLFVIWHCWQDNLAYDPTRHRALQRLLEDQQAAG

SEQ ID NO: 69717 - protein, 352 aa, unidentified
MIIIGVDFHPEFQQIASVDTDTGEVQEKRLAHREEAEKFYRALAGQKVRVGMEASGHGRWFERLVAELQFELWIGDAADIRTRRVRKQKTDRQDAQLILRLLLEDRFPKIWVPSWENRDLRQLLWHRHRMVQARTRIMNQLQAVALNEGLRCKKRLWRIHGREQLESFRLAPWASRRRRDLLELMDRLNPAIAELSQAIEQEVEKCPEARRLMTHPGVGPLTALAFVLIIGEADRFQCGKQVASYLGLVPLEDSSGNRRRLGHITKQGSSMLRFLLVEAAQVTVRSLPEWRSKYLHLMMRRGRKIAKVAMARKLAVRLYWLMRQGWDYQQWVKFGSHAGQPGNRHGVQSNTE

SEQ ID NO: 69718 - protein, 432 aa, unidentified
MNPFSVSPEPSPVAAWVGLDWADQQHVICLYEVATGQRTVSRLEQKPEALQDWLSQLRQRFGGSPVAIVLEQARGAVIYALLSADFVRLYPVNPQSLASYRKAYAPSGAKSDPADAVLLMEMVRNSPERFRAWKPDDADTRSLQLLTQNRRQLVDQKTALTNQLTSLLKTYYPQALELPGVLDSLQACDFLTQWPTLEALQHARPGQIRQLYREHGHPSPEQLDRRLEQIREARPLTTDPAALLSGSMMVQALVQQLRPLLGAIERFDRQIAVLFRKHPDRPLFDSLPGAGAVLAPRLVAAFGTDRDRFQSAQQAQQLFGIAPVTEQSGRQRWVHWRWACPKFLRQTFHEFAGHSRHWCGWAKALYQRLRRIGKGHHAALRVLAFKWIRILFHCWKTRTGYDESIYLKSLQKRNPTLWAEIQLLPPRKKKAA

SEQ ID NO: 69719 - protein, 422 aa, unidentified
MEGTESNYQWYVGIDWGAERYEVCVLDRQAQVVARRSIAHSGTGIAEFVDWLVKLCEGKPERVAISIETPRGAMVESLVERTFAVFAINPKQVDRFRDRYTVAGAKDDSRDAFVLGDSLRTDEHCFHRVGLDEAAILRMRELSRLEENLQQESNRLSNQLWEQLHRYYPQMLALSKAADEPWLWELIEWAPRPVEAGKLELARVQQLLGSHRIRRIRAEQVLEALKKEPLRLAPGAEEAASEHALLLLPRLRLAHEQRTQVAKRIQRMLREMSAAEPTEKADKREHSDVKILLSLPGVGRVVPATVLAEASGPLRERDYHRLRNYGGVAPVTRQSGKKKVVSMRYGCNMRLRNALYHWARTSVQKDAAAKKHYAALRQAGHSHGRATRGVADRWLAVLMAMLKAGTLYDPERRGKGQATKVS

SEQ ID NO: 69720 - protein, 343 aa, unidentified
MNSTTIAVDVAKAVFEVAVSEHAGQVRERHRFSRERFRRYLGEQPPATILMEACGSAHYWGREAQTRGHRVVLLPPHAVRPYVVRNKTDRTDAKALLEATRNDEVRPVPVKSETQQALAALHRLRSTWLATRTARINTVRGLLREFGVVIPIGARHVVPALGSLEDDDGGVPSLLRPALAEAAREIRELEGRIRTVEHQLDAVAEQTPVVSRLCSIPGVGLLTATALVAAVGDVQRFPSGRHFASYLGLTPRERSTGQRRQLGAISKRGDAYLRMLLIHGARAVLCHAKTKTAPAPDRLRAWALHLERFRGHNKAAVALANKLARIAWAVWKYDTDFAAAPAA

SEQ ID NO: 69721 - protein, 338 aa, unidentified
MKVHVGVDLHQRFCYLTAVDASGKLLRQGQVVNQAAALQQWLGSLEGPRQVVVEASGFWPAFHRSVHSHAERMVMVHPHRVKAIASAKLKNDRVDSSTLAHLSRCDLLPEAWMADEATRQLRLRVRLRINLGRQRARAKNQLQAVLHQEGFIKPVTDVFGRRGRAWLQSIELSGAGRMVVETWLREVDRLDAEIAVQTRELERLAAGDARARWLQTVPGIGAYSAMVMLAEMGDVARFSNKQALASYAGLVPVVRESAGRKKRGGITHQGSNTLRWIMLQVAQVACRCSPAVRTWYAQLRRRKPAQVARIALARKLLCVAWALLRHGVCFDEQVFARS

SEQ ID NO: 69722 - protein, 370 aa, unidentified
MSVRRILAKTIDTDLEYEAIGIDLAKNCVSAALLTTDGEVVCIDRLDYSELEKSAQALSSTTFAMEPCTEMNYLVQKLEAWGHRCLVIGGKNVQNYVENHFSGQKTDLNDAQALAFLAQDTQLRTIKAKDVEQQKYASLTTLREQYIKQYRQTIVSLKGICQAWGLNISKGISGKARLKDLIENHAAFPEELKESLVDMVTHAQTTQKVLNKITKTLEVLAKNDKVCQLIQTIPGLGTICSCRLRVTIGDIKRFKNPKDFPAYYGLVPRSIATGHNEKKGKITHRGDRTMRSLMVQGAGCVIRLATCGKLKSKQLTKWILKKQKEKMPWGKLVCAVAAKLLRIVRAVLISNKPYNSKIAGVAKCSLPKGS

SEQ ID NO: 69723 - protein, 344 aa, unidentified
MYLCILNQDGEILVHRNMPAGPEPFLKAVAPYREDLVVCVECIFPWDWLADLCAREGIPFVLGHALSMKAIHGGKAKNDQIDSQKMAVLLRGGMLPQADVYPAAMRATRDLLRRRMHLMRKRAELLAHVQNTNSQYNLPGMGKNIAYKANRDGIAERFPDPAVQKSIAVDLALIGHYDPLLNDVEFSIVHTAKQPDPQTLSRLQSVPGIGKILSLVLLYEIHPIDRFPRVQDFVSYCRLVKGAKESAGKRYGTSGAKIGNAYLKWAFSEAAGLLLRTNPAGQKSLARLEKKHGQGKALTVLAQKLARAVYSMLKRKTAFDMPMFLQSSSGAERVSPTSHWTLSG

SEQ ID NO: 69724 - protein, 354 aa, unidentified
MSVYVGIDVHRKRSQVAVVGDDGGVQLNRNVVNGSEPMLGLLGGLPPGTPVAFEAAFGWGWLAGLLEDYGFEAHLVHPLRCKAIASARLKNDKVDAATLAQLLRADLLPEAWIAPPEVRALRALLRHRIQLVRLRTLLGNRIHAVAADHGYDRPAGYWSGPGRAWLACLDLPPASRQVIDDDLTLIDALAGRITGLDEQVHQRAKADPAVKVLTQLPGVGEFTALVILAETGDITRFGSARKLAAWAGLTPIVRSSDRTVRHGHITKQGSAWLRWALGQAAQTAKRSPDFAATYQAIAARRGKQIATTAIARKLLTRAWHLLTDAGLTGPQTSPPPRLSPGNGAASPGRARQST

SEQ ID NO: 69725 - protein, 360 aa, unidentified
MKVQRTSIGLDVHARSVVACGLDGDIGEVSQRRLCPDHREILQWIAGLPAPVAVTYEAGPTGFGLARALTDAGIDCRVAAPSKLQRPAGDRVKTDARDAAHLARLLHLGQIVEVTVPSVAQEAARDLARAREDCRGDLMTARHRISKMLLRQGIVYYGGQAWTGKHELWLRAQDFNDPALRLTYETVLDAMTSCVHRRDRLDEAITELAADSEFTPIIRRLCCLRGVSTLTAFALAVEIGDWHRLSGRSIGAYLGLVPCEYSSGESRTRGGLTKTGNTHARRLLIEAAWHHRPHYRPSRDLRRRWDAAPAGARERGHAANHRLHTRWAAFDQRKKRPVIANAAIARELAGWCWSLAVMTT

SEQ ID NO: 69726 - protein, 375 aa, unidentified
MNNNNTLYVGLDVHKESITVAYAINSEPVELMGKIGTSPTDIQNLCKRLRSKSSQVSIVYEAGPCGYGFYRRLVKSGFDCMVCAPSLIPKKPGERVKTDRRDAIRLVRSLRAGDLSAVYVPGIEDEAFRDLARAWASARDDLRHARQRLKSFLLVHGVHYVGRADWGPAHRRWLSKYSFESPWRQLAFDEHRRTIEDRQAQCERLESALKEAVTEWRLYPVVEALQAMRGIQFITAVGLISELGDLTRFEHPRQLMSWFGITPSEYSSGGSRHQGSITKAGNSYARKLLVEAAWSYRHPARISPAIQKRQENLPRPVIDRAWDAQLRLCKRYRKLQAKGKNVNITIVAVARELAGFIWDMGRIAMSVAQQPQCHK

SEQ ID NO: 69727 - protein, 363 aa, unidentified
MYYIGLDVHKKTISYCVKDVSGQVHTEGAILATRAELDRWMTTLPQPWTAAMEATIFTGWIYDHVLPQAAGLKVAHPLMLRAIAASKKKNDRIDASKIADCLRCDFLPECYMASSETRERRRTLRYRNLLVRQSVQLKNKIAGLLMESGVSYNKRRLHKVGYFKELLTTNQDISEGLRPLLGLCRETLVRQQKIEGALVRALARDPFLADRVQRLMTIPAVGPITALTWALEVDDVKRFRSVKHAISYCGLCGAEKSSADVVKRTPLSKQRNKHLQSVLVEAAKLAPRRNPDLALVYDKEKQKGNANRATLAVARKLVAYLLAVDRGQRDFVVAEEQNPTAAHTAAAGERNRILQRAACQVSP

SEQ ID NO: 69728 - protein, 348 aa, unidentified
MKHYAGLDVSVKETSVCIVDESGKLCRERKVASHPEDLVAILSDPAFSLERVGIEAGPLSQWLFEGLAKAGLPAFCIETRHTKAFLDALQQNKSDRNDARGIAHMMRVGLFKDVHVKTLTSQKRRALLTARSLLQEKAIDLENEMRGLLRNFGLKVGHASGGTFERRILELVENDTELREIMEPLLAGRRKLREGLTNLEKRVLAEAKQDEVCRRLMTVPGVGPIVSLAYVSTIDIPSRFRHSRSVGAILGLTPVLKQSGEMSRVGHVSLRGDAMMRRLLYEAAQSMMTRVAKWCWLKAWAMNIAKRHGSKKAKVALARRLAVVMHRMWVDGSEFRWTRENTVSTVAA

SEQ ID NO: 69729 - protein, 415 aa, unidentified
MKDKKVKKGHCVNEKTLLVSIDLGKGTHYGYLRGPKGEEIGVFPIKNRLREYNEFYRKMVKYMELWGLEEIVVGYESSGPYGEPLVQYLFGKGVGVVQVNPLHTKRVKELTGNSPNKTDMKDPRVIADVMILGHALSVIIPTGPSAELRRLTQARERAVEKQTATVNQLRQVVYVIFPEWEDIFQDINCKSSRELLKHYPTPEEVAQLGVRKLANFLHQGSRGRIGKERSEALYVAARESVGIREGLEAMKCEIGFLVKELEQFEEYIAQLEKRMEVCLQKIPYSRSILSVKGIKTVTAAGLIGEVGDFQAFHSSKELLKLAGLNLYEVSSGIHRGEKHITKRGRSLLRKILYCVLLNMVKPGGTMHDTYQAALDRGKSRTSALVMISRKLLKILFALVHNHSVYQVQYSVRQAA

SEQ ID NO: 69730 - protein, 376 aa, unidentified
MGNRRGCFPPEMNANQVGVVANPGRLVVNQYVALDQYVALDVSLRKTAVCVLNSWGHVVTEADVPSEPGALISFIRTRAPHASRIGLESGPTSTWLWHALKAAGLPVICMDARHAHAALSVRPIKSDRNDARGLAEMVRVGWFKEVQVKSLGAHERMALLGVRRRLVDIRVEIDGQIRGILKTFGLVVGSGNKGAFAQRARMMAQDHPILSALVEKLLDVREVAAAKVAVLDKEIRRFVRDDPTLRRFLTVPGVGPVTALAFRATVDEPSRFRRARDVGPYLGLTPRRYQSGETDRQGHISKCGDRFTRTCLYEAANVLLTKVQRWSPLKAWGTRLAKRIGSKKARVALARKIAVILHCIWTDGTEFWWTKEMAAA

SEQ ID NO: 69731 - protein, 449 aa, unidentified
MSDRSGVSRGDRNRNARLARLREAVPLSNAIAGIDLADSKQMVVVTDHESRVLARRTFRRRAWELGMALDWAAARAAAAGFAGVTVAVEPTGHRWQVVGQLAGERGMSFVCVQPLMSAWARRAEDLTFDKTDDKDAVLIARLAGQLRCYLPEPADAIWGRLRHLGIRRARLVADQVAQVQQMRDLLECVWPAVLDAARQPFKSTTWHAALTVALARADGGDLGRVTRLGRRRFDAAVRRQVARWDAVHPWQKIINAVLAACADPAGVTEMRHGALERVLLLLADWRDTRARLADTEQRMVAVLGELGLTELVTSITGLSAVGAASILAETGDPARFTSGRALVKHAGLAPRQKSSGNYTGRTRTTGQGRPALRLAAWRAVWGALKSNPVYAARFAYLTSREHNPLSTGQAHAAIAAALLRHLHAVITTGQRWDPAIAAGGKPNQTLIAA

SEQ ID NO: 69732 - protein, 338 aa, unidentified
MKSNIGTPVSVGIDVAKATLSVSICDHDGHEQALAIRNTDTDITTKVLPYLRHYSGKVVMESTGHYHWTPALVLREAGIDIRIVNPLLAKQYTSGTIRKVKTDPADARGLARMAMVCDNLPETFTVSRARLIIRKKLATISTMSRHLQALKANITSLREGQALLNEPDTTVVMELAESIKQLGLSIKHLENECVRLTTSDTNSRETMERLETIPGVSEFCAALATNWFDINTATSAKSFIGYAGLDVSSRESGTWRGHCRLTKRGNPFLRKRLYSAAWGAAMNYPEYRLYYDQLKASGRGHREAVVIIARKLVRTMYCLLRDGVSYDSVKVSFPNRII

SEQ ID NO: 69733 - protein, 382 aa, unidentified
MDRESSTLFVGLDVHKDSIDIAVADAPRDAEIRHIGSIRGDLASLDRSLRKLVSRGQPPHIVYEAGPCGFVIWRHLTAQGLHCEVVAPSSIPRAPGDRVKTDRRDAMLLAKLARSGDLSGVRVPDGVDEAVRDLVRAREDAVREQRNGRHRLKALLLRNGIPYTGKTSWTAAHLRWLAKVKLAYAAQQIAFQEYLHSITESGARIARLEQALRDTLPDWGLLPVVQALQAMRGVQLIAAMTLVAELQDFLRFESARQMMAYVGLVPSEHSSGPKRRQGSITKAGNSAARRMLVEAAWHYRFEPRVSPIIATRQDGLPSAVTDIAWKAQLRLTAKYKRLSARRVMKTKAVVAVARELAGFVWAIGREVQTSGWRGIKQPAAAA

SEQ ID NO: 69734 - protein, 337 aa, unidentified
MKKAPSIKLFSQSLGIGIDISKANLAIAGLTNNDWLYKSIANKKQSLRRFAKILSEAGYENKIICESTGHYHLKLAVVCEEFGLNLLVLNPLQASKHSKAKIRKVKTDPEDSYTLATMCLTERNLPEPAHITLPKALIRLKMGQLASLEKQLQKMSQSLNQYEETYRELGLELSETQQALREQQCTLKGLQKQFRKELDALLIEAIPDKKDFENLCSVPGFSNNVSGLVGNLRRDVKSADSWVAFIGYDVSIRESGIWKGRGKLTKRGNAYLRKRMFQAAWGACLSYDYMRTYYDKLKEDGRNHVEAVCMIARKLLRIAYHVVMNKTPFDKNKSVFG

SEQ ID NO: 69735 - protein, 374 aa, unidentified
MIVIGVDPHKSSHTAVAVDARTGKLIGAKTVRARDHGHDELVRWSRSLGTERVFAIEDCRHVSGGLERFLLGRAERVVRVSPKLMAGERGVTRQRGKSDEIDALSVARAAVREGLESLPCARLDQPTLEIKLLLDHREDLVGERTRAQNRLRWHLHDLIPELEVPAGALDRLCWLDKVARKLARSEQTTRVRVSRSLVRRLRELARECSALESDIARLVREHTPELLSVQGCGALTAAKLLAETAGVDRFASEARFARHAGVAPVPVSSGRRQRHRLDRGGNRQLNCALHRIAVVQARTPGHFGAAYLAARQAEGKSQLDALRCLKRHIARTIWKLLRATEPAPPAKPRPTIQSLPPAVSPVTGAAPGLMRCLT

SEQ ID NO: 69736 - protein, 414 aa, unidentified
MAAQTVQDVGIDVAKRWLDVAVFQTQEQARFDNDKEGWAKLIKWLKGRNVRAIGMEPSGGYERGVAKALRKAGLPARNVNPHKLRHYARALGRLAKNDRIDALLIARYTAELPTRPVRCDPIAEQLADLVVARRQLSDDKVSLANQLEQLREPTVKRIFTQRLRRIELDIALLAKRMADLVASQPALAATDRLIQSFHGAGPVFSHTVLALAPEIGQASRREIAALAGLAPYDFDSGTFKGRRMIWGGRHPLRRVVYMAALTASRSNPILKAFYQRLIANGKEPKVALVAVARKILTILSAMIRNNETLESKQGLTNTVAHPSRRWRADPPPPQGEKGKAVPPALYNGGRKKYERANRLWLGAVPALCSTTSTELRIPKEQDVQFRNHRACARRGAAKSRLCRADAGAESGAGA

SEQ ID NO: 69737 - protein, 340 aa, unidentified
MRVLYAGSDLHGNNNYLGIIDERGQRIFKKSLPNDRQLILDVLRPYREEMAGIVVESTYNWYWLVDTLMDEGYRVHLANPSAIQQYTGLKHGDDKHDAFWLAEMLRLGILPEGYIYPKEERPLRDLLRKRGHLVRLRTSLVISLQNILSRNLGRKVNVNDVKALREDRITPLLEMSEDLALAGRVSKEVIDDLTRQIHKIEEWVEKRLALKKAYRYLLTIPGVGKILSLTIMLETGPISRFATVGDYVSYGRKVPSQWMSNGKRKGSGNRKNGNRYLAWAYSEASDFARRFYPEPRAYYHRKMQKTNSVVAHSALAHKLARAAYYVMRDQVPFLPEKLFG

SEQ ID NO: 69738 - protein, 315 aa, unidentified
MTQTSITTAGIDTSKAKLDIAVHNRTERWQVANTLPGWRALASRLAEAGVTRVGIEATGGYERGVVEHLRAAGLTVLMLQPLQVKAFGRVHLRRAKNDALDAVLIAACAAALNPPEIAPDPRLTELADYLTFLEQIEEDIKRFKTRLEHIKEAALRRIVNGDIVRLKARKAAQIRDIAKRLRAYDDLAKRLKLVLSVPGIGERTALALVIRMPELGRVSREEASALAGLAPFDADSGQHRGQRKIAGGRSRLRRSLFAAALPAAFRWNKALIALYARLMARGKAHNAALIACARKLLIYANTVVQRGTPWTEKVA

SEQ ID NO: 69739 - protein, 343 aa, unidentified
MLAITTIGLDIAKSVFQVHGVDARGGAVVRRQLKRRYVLAFFKKLPPCLVGIEACATSHHWSRELQALGHTVRLIPPAYVKPYVKRQKNDAADAEAICEAVQRPSMRFVPIKTPEQQSCLMLHRTRHLFIRQQTAVINTIRAHLAEFGIVAPVGRNGVEDLLYAVADQRDERIPEVARACLEALGALLGKLKAQILEFDRQINAWHRSNETCRRLDELPGVGPVLATALVASVADPKAFRSGRDFSAWIGLVPKQNSSGGRDKLGSITKQGDRYLRSLFTAGALAVIRYAKIHGTKHRPWLARLLERRPTKVAAIALANKIARMAWAMMAKGERYREPLALAR

SEQ ID NO: 69740 - protein, 419 aa, unidentified
MIEAVWERCAGIDIGKKYVVCCVTVGAAGAKATEEIRQYNTTVAELEKLRDWLQENQCTHVAMESTGPYWKPVFNLLEAHFTVILANALQVKSLPGKKTDRKDGRRLAHFLRHNLLEASFIPPLAIRQLRDLTRRRRKLMGAGASERNRVQNVLEDANVKLGNVLSDVFGVSGQAMLEALLANNGTPQQIAEFARGALRRKVPEIVAALEEHRMTDHHRFLIRQSLDHMAFLEEQVVGLDSEILRQLKPFQKEFENLQTIPGVKATAAASILAEVGVDMKQFPTGHHLASWAGICPGNNESAGKHKSTRARKGDTWLRGTLTESAWAASRQKGSSFAARFRRLAPHRGQKRALVALGHNLLIVVYQVLLTGQPYQELGSTYWEERTHQARVRHHLRCLRALGALAPGANFTEVPVNPAA

SEQ ID NO: 69741 - protein, 342 aa, unidentified
MRYIGIDVSKATLMVAYPQDNKKYKTREFQNTSNGIHTLISTLQADDHCVMEATGNYSYLLLYLLDKAGICTSMENPLKVKNFARTMLSVTKTDKADAQLLSLYGERMKPEPYKIPSEALLLLKQKRAVLRQFKKQLLANNNLKKALEAMPEQDQKAITAIEKVTITLEEQIKAVEKELNTLTQVEFNQQMSRLTTIKGVGTALAAALIITTGGFTYFDNAKQVSRYLGLCPTYQQSGTSIHVKGHINRNGDPYLRAQLYTASWSMIKYNTACRELFTRLKERGKSGKLALVAVMNKVIRQSFAVVKHNTDYQDGFVSKNPQPLPAGSACRQGSVGTLPTRQ

SEQ ID NO: 69742 - protein, 432 aa, unidentified
MTGAKPLQVHADAVLVAIDMSKNRQEVLIERPEGGRRRRMTVMATKEDYDGFAEQLAAIGRPIVVGFEATGNYHRTLAHRLLTAGFELRLISSVALARTREALHNGWDKNDSKDAQVILHMLRIGATQRYVDPLAAGINDLQELSKTHEVVSKMNTQTWHRILTHYLRLYFPEIARFAGNIRSDWFLALIERFPTPSSITALDREAFSAEAWPLIGRKVSKARLINDLYETACSSAALPVPEDSVAITMFRMVIAQGRSFIHQRDEIEQLAHARLAEHVDYQLLRNIPGIGPINALTILAEAGDLRRFSHHRQFLKFCGLDLATCQSGTFRGRTKLSKYGNARLRRTFWMAAQVAARQRDNSFRDKLGRYTAGHADDADRRRKAMTALTAKMARVAHAVIKMGTEYRPFLERSDARWKDPSLMCREGARATL

SEQ ID NO: 69743 - protein, 338 aa, unidentified
MKLYGGIDLHSNNQVIALLDEQDKAVYQRRLANDLALVLAELSPYQSKLKGLVVESTFNWYWLVDGLMDAGYRVHLANTAAIQQYEGLKYTDDPYDARWLAHLLRLGILPEGYIYPKEERPLRDLARKRSQLVRQRTTQVLSMQNLMVRNTGSKPSGNRIKQWTEGDVDELLSHPDLALAVKSNLRVEHCLDEQIAILERRILEQAKLKPAFKPLLTVYGVGRILALTVMLETGDIGRFEKVGNFASYGRCVDSKKLSNGKRKGSGNTKNGNKYLAWAFVEAANFAVRYYPQVNRYYQRKRAKTNGAVAIKAVAHKLARACYYVLRDQVEFDVNKAFA

SEQ ID NO: 69744 - protein, 331 aa, unidentified
MNFSQFVGVDISKNTLDAAIYPAKDKKLDFLHFDNTQKGLGEMMKWLKRRGVKTSEMVICAEHTGVYTNPLIAFADKNGLALSLNSPLDIKRSMGIARGKNDVVDAGRIAEYAHDHRDKLRLYEKPSDAILKLQYLLTERRQYMRQRTALINLNSAMGKYETPEARSRNESAIRHCEKLVKKVEEQMMEVLSIEPDVKRNFDLVRSVKGIGLINAISTVVYTNNFKAFETPRRYACYVGVAPFDHTSGTSVKGKTQVSKICRTQQKAELSMAARSAIIHDPGLRRYYQRKMKEKGGGKDAHGVVLNAVKFKLILRMFAVVKSGQPYKILNY

SEQ ID NO: 69745 - protein, 394 aa, unidentified
MKLVGIDVGKNSHHFCVMDKETGEFNVTPTSFSNNKEGFDFLINSLKPYSKKSILIGMEDTGHYHVALLKFLLSNGYTVALINPKTTDLTRKMEGGITKNDKLDTITICDVLDTPERKKQYRITKVDRFDLYEQRQLTRHHHNLKEELNVYCNRLQKSIDLVFPEFNTLFSSKYSIVYMNLLKTFGSAEAIASTDIRTIRKCFEIKGRGNRISLTPEKLKECAKNSIGISSEVETIQIKHLVSQITLIKEQIAEIDKKIEEFSITNNSPILSIPGISHFSGTSILAELGDIGNYSKPSQIIKFAGVAPYHYESSQYNAQHTGITKKGSKYLRKTLYQIILPVINNNPVFKKYYRLKISQGKGHRCAQGHCIRKLLRIIYHLLETGQSFDPALLR

SEQ ID NO: 69746 - protein, 360 aa, unidentified
MNKNKYVGLDVDQATTVVAIEDARGNFLMESFLPTRAVELREFFKGLKGRIHVAFEEGTQATWLYDLIEPLVKKVVVCDPRRNKLIQSGNKGDRVDARKLARLLRLDELHSVYHGERGTRGLKEMVHAYDQLVGDTTRTKNRLKGAFRSRAIGCRGEKVYGETERKDWLAKVDMPAVRARISSLYEQLDCLKKLRDQAYKEMIKEASKHPAYKLIMSVSGLGSIRTSQIIATVGSPHRFRTKRQFWPYCGLAVVTHMSSEYEVVDGKRRRRNKPLQTRGLNKNFNRTMKVVFKGASETAIKKAPFQQYYQRMIDNKMRPEMARLTVARKLSAITLAVWKKGEKFDPEKVNQAARDSDDQR

SEQ ID NO: 69747 - protein, 345 aa, unidentified
MQIASIGIDLGKTTFHLVALGERNKILLRTKFSRSQLLAYTANLPGSLIGLEACAAAHFMGAALREQGHQVRLIPAQFVKPYRKSNKNDFIDAEAIAEAVTKQNMRFVQIKTQEQLDWQAMHRVRDRLMQRRTALINEIRGFLLERGITFAAQPIHLRKNLPTVIEDAEQNLSPGLRWLLDRLWLEWKQTEIDIKAITDEIERIGNDDARCRRLRQIPGFGPLVSTATVAAIGNGAAFRRGRDFAAWVGVVPRQYSTGGKQKLYRISKRGNIYLRRMLIHGARAVLFRVKYDTAGFGQWVHRLAQRAPRNKVVVAIANKLARIAWAVLSSGKDYRHQPLLQLAVA

SEQ ID NO: 69748 - protein, 345 aa, unidentified
MEVSMIGVDLAKNVFAVHGVDANGAVVIRRELRRAQLLRFFEKLKPCVVGMEASSGAHHWARALRALGHEPRLMPASYVKAYVKRGKTDAADAAAICEAMTRPTMRFVPVKSVEQQAVLALHRARDLMVRQRTQASNALRSLCAEFGVVAAKGRMPLEELFALIGGAADARLPSPARAAMLPLIAQHELLCRNIAALEREIAAKHKTDDAYRRLTTIPGVGPLIASTFVTVVGNVERFGSGRELAAWIGLTPKANSSGGKHKQSSISKQGDRYLRKLLVQGANSLLRHVQTSKTAIAAWARELLTRKPKKVVALALANKLARIVWALLAKGGTYGQPLKAMELAA

SEQ ID NO: 69749 - protein, 340 aa, unidentified
MKLYGAIDLHSTNNVTVVIDEQDRVVYQKRLPNDLALILKELSVYQSELQGIVVESTYNWYWLVDGLMAEGYQVHLANTAAIQQYEGLKYTDDNSDARWLAHLLRLGVLPEGYIYPRADRPVRDLLRKRSQMVRQRTTNLLSIQNLLTRNTGESLSANRVKGLDVQQVDELLPDGDLALAVKANLSVMSSADEQVELLEQTVTQRVKLRPQFSFLKTVPGIGEILALTIMLETGDIGRFASVGNFASYCRCVGSQKISNGKKKGQGNTKNGNKYLSWAFVEAAHFAIRFNSKIKSFYQRKKAKTKVVVAIKAVAHKLCRACYYIMRDRVAFNITKAFGQN

SEQ ID NO: 69750 - protein, 314 aa, unidentified
MDETKHFVGIDVSKAALDVHVLPVGKSQRFPNDGDGHAALEGWLSSHPVERVVLEATGGYERKAVQALQQQGYHVCVVNPARPRDFAKAGSRLAKTDRLDAAVLAHYAQVFDPPSAPRPGDVEAKLARYASARDSFVAEKTRLRNQLGLNDDADLERMHRDILETIEAKLAELDRMIQSCIREKAELSQRYDQLRAVPGIGPVAAVSLLAFLPELGQVSRRAIAALVGVAPFARDSGMMRGQRRIAGGRAKVRKMLFMASLSAARHNPIIKTFYERLIKGGTGKKQAIIACSRKLLTILNAMVRDNKEWQPMST

SEQ ID NO: 69751 - protein, 408 aa, unidentified
MNPLYVGIDVSSKSNVVYFMLPDGSKHCNFSVANSHTGSSQLVKRILSAMTSCSLDTVLIGLEATSVYGDNLVYFLREDAALARFNSKIHVLNPKQVSKFKEAYNDLPKNDLIDSFVIADCLRFGRINKEVYIGDYRYKALQNLTRARYFAVSNLIKEKQRFMNILFKKYSTMTQEKVFSDTFSTTALAVYDEFESAEALADMDLHELTAFIMEKGKNRFPNPNAVAKAIQKAARSSYRLPKTVNDSVNQVLSISITSIKALEAQIKEFDKAIATQMELLPNVLISIPGIGPVFSAGIMAEIGDINRFHNQAQLAKYAGLAWKQHQSGDFEAQTTRLINSGNRFLKYYLCEAAFSLVRCDKEYSDFYHLKYKEVNRCQHKRALALTARKFVRLVFRLLKDNRLYCPAK

SEQ ID NO: 69752 - protein, 467 aa, unidentified
MAARKQKQRRMSAQVVEDEDYQLRYEIVAGIDVAKESAVVCVRMPPAGGKKHRTSHLQTVPATVPVIGELAAELQALGVQMVSMEATSDYWRVWFAVLEEAGLAVQLASSSQARDLPGRPKTDKEDARWIARLTGMGMLRSSFVPPPEIRALRVYTRHIWDPTADRTRYWQRLEKLLEDAQCKLPAVVPELAGHQTARAIAEAMIAGERDPRVLAALGRGKMRNEKLPAPAGALSGMRFGPQHAHAAASLLHAIDLLDAELRELQERVTEHLAAIPRSWGVDAGGVTGPQAGRSAGAAALPAAERLDEIPGLGREAAAALIAEIGLDMSRFPTPQALVSWAGLTPAARQSGPRKGRGKKGHGNTYAKRIVVLAAYAAANTGTFLGGRFRRLASRPGGGGRKKAGCAVGRPILIIVWHLLNDRAARYHDLGSGWHARHTDRSRKARSARRQLEALGYDVIITLREDAA

SEQ ID NO: 69753 - protein, 446 aa, unidentified
MEVNTELADILGGEVTVGDLVDRPHNFFGVCVMVRGVRRGSLSLWLPSCAVAVWHMCGPVGRVGTVRRDLIGAWSIPNRRMSTERSLRLTNPREPGGTLMMMTIGGDSHKRTHTFVAVDDRGRRVAEKTVPATTDGHLDAVAWGAQWPKRRWALEDCRQVTRRLEGDLLRAGETVIRVPTKLMADLRRGAREPGKSDPIDALAVARAALREPDLPVARLDGEERRLKLLVDHREDLISERTRMQSRLRWHLHELMPEHIVELRTLRRFHVLDDLARRFGAIDGLVAAIASELIARIRELTIRINELEREITGIVTDLAPTLLGLEGCGALSAAKIVAETAGVDRFRSRAAFARWNGTAPIPVWTGNERFRLNRGGNRQVNAAIHRIAITQWRGHGRGHDYVQGRIERGDTKRSAIRALKRRLSDEVFRRLHTDAATTQTRPLDQVA

SEQ ID NO: 69754 - protein, 344 aa, unidentified
MHIASIGIDLGKTTFHLVALGEHNKVLLRKKFSRPQLLAYTANLPASLIGLEACTGSHFIGSVLREQGHQVRLIPAQFVKPYRKSNKNDFIDAEAIAEAVAKQNMRFVQIKTQEQLDWQAMHRVRDRLVQRRTALINEIRGFLLERGITFPAQPIHLRKNLPTVIEDAEQNLSPRLRWLLSRLWQEWKQTEIDIQTITEEIERISNEDARCQRLRQIPGFGPLVSTATVAAIGNGAAFRRGRDFAAWVGVVPRQYSTGGKQKLFGISKRGNLYLRRMLIHGARAVLFRVKYDTAGFGQWVHRLAQRAPRNKVVVAIANKLARIAWAVLSGGRDYRHQPLQSAAA

SEQ ID NO: 69755 - protein, 342 aa, unidentified
MEKIATVGLDIAKSVFQVHGVDASGELVVRKRLSRARVIPYFAKLPRCLVGIEACSTSHHWARELIALGHDVRLMPAQYVKPYVKRGKNDASDAEAICEAVTRPTMRFVAVKTPEQQSVMMLHRVRLMLNRQRTQLSNATRAHMSEFGIVAPVGRIGLERLLAIIADKDDESIPPDARICLEMLGAQLTVVKEQILENDRRIRASARDTEVGRRLMEIPGVGPLLASAFVASVADPQAFKTGRDLAAWIGLVPRQNSSGGKERLGGISRAGNQYLRQMLVVGAMAVIRHAERHGTKRAWLIELMKRRAKKVAAVALANKTARMVWALMTNGEHYREPQVAHA

SEQ ID NO: 69756 - protein, 379 aa, unidentified
MRTVCGLDVHKDSIFVCILNENGILFQDKIGVLTPDLERLVDVLHEHNATEVCMESTSIYWMPVWRILEPYFSLKLVNPYFIKQLPGKKSDVKDAEWIATCLLKDLIRGSYVPEDRIQQLRQYDRRIFDLNKDIVYKLTKLDAALQRCNIRISNYVSTTDGKSYQKVVEKISEGTTDPKVLTGLIHGRTLNRVGKDVIAASLTGVITQTDIDVIRQIRDEVTLAQKHRKECLDKMKELCNKWFPDQMKNLQTVPGVSLRSATSVIAELGTDMSSFEDAAHLVSWSGLKPRNDESAGKIKSRKITHGNKFLRKTLIECTWAASKTRGCFYNKFSYHQTVVRRKNKMKVQVAIARKMLTAIWFILHDNVPYRDYTTDIAAE

SEQ ID NO: 69757 - protein, 408 aa, unidentified
MKTLHRRCAGLDVHSDSVVACARLTVRTKVSHEVRRFSTTTRDLLELGDWLAAQGITHVAMEATGVYWKPIWHVLEGRFELVLANAAHIRNVPGRKSDVNDAVWVSDLLAHGLIRASFVPPAQIQDVRDLTRTRTQLVREIAQHTQRIQKTLENANIKLTSVISDIVGTSGRRILKAMIAGETNPAKLAELGSTRLKCPRAELIAALDGRVTAHHRFLIAHHLGLVEDLERHIALFDARIDELLTPSRDAIARLITIPGVSTVSAQVILAEIGTDMTRFPTAGHLLSWAGLVPRLDESAGKRRSTRVRKGAPWLKPVLVQCAWGAARTKGTYYQAQFFRLKARRGPKKAAIAVAASLLTAVYHMLKDGTFHQDLGADYLVRRDKARIAARLAKRIKDLGYDVSFTATA

SEQ ID NO: 69758 - protein, 355 aa, unidentified
MSIVGGLDIHRKQLTFDWVDEQNGKWERGRITPADREHLADWLTRFDGVGTVAFAMEGCTGWRYIAEEMAKVGVTAHLAEPADTSALRGPKRRAKTDKADAKLLRELLAAGRLPECYIPPAQVLEWRALLELYQDLRTQHTGWAQRIQSVCFHQGTTAPGQAGIVRGDRARLRAIVDEQLSISGRLQVNTALALMDTLAEHLDRLRRRLLSTARGVKGARALMHDIYGVGPLSSLALCAWLGGPDRFTSSRKAVRFVGLDITVHSSDGKRSPGRLSRQGPEVLRWLLFEAAKTSARACAPGYNYYTQVKDRYDANRACLSQARRIVRQATHVLTGLGDDAFTVVAQPAAPTTIAR

SEQ ID NO: 69759 - protein, 343 aa, unidentified
MQTVTTIGLDIAKSVFQVHGVDAAGQAIIRRQLKRRYVLPFFQKLPPCLVGIEACASSHHWSRELQALGHTVRLMPPAYVKPYVKRQKNDATDAEAICEAVTRANMRFVPTKTPEQQSGLVLHRTRYLFIRQQTSVINAIRAHLAEFGIVAPVGRRGVEELLTVVSDPNDKRVPEIARACLSAFGAQLRRIKEQILEFDRLITGWHRSNEMSMRLDEAPGVGPVLATAVVATVADPKVFRSGRNFSAWIGLVPKQHSSGGKDRLGGITKQGDRYLRGLFVAGALAVIRYAKIHGTKHRPWLTALLARRSTKVAAIALANKIARMVWAMMAKGERYNEPVALAA

SEQ ID NO: 69760 - protein, 412 aa, unidentified
MQVVHPVCCGIDVHAKMLVACLILANGEKKKRTFSTMTADLLQLRDWLVAVQCTHVAIESTGVYWKPVFNILEDALTVILINPEHAHALRGRKTDVKDAEWLADLLRHGLLQPSFIPPPVIRELRELTRYRESVVREQSSVANRIQKLLESGNLKLGQVASDALGVSGRMILKALAKGESDPRKLAALARGKLKEKRLSLEQALQGRLTVNQRFVLGELLSRWEQLEAADARVTSEIDKYVQANPKLARARQLLDSIPGIGPRVAEVIMAEIGIEMASVFADAAHLASWAGICPGNKATGGKRLSGRTRKGNTYLRSALVQAAWGASLKKHCYLSSQFHRLVKRLGRKKALVAVAHSLLVIIFHVLQNDQTYTELGGDYFDRRHVEQQRDYYVRRLQMLGLKVTLEELPQAA

SEQ ID NO: 69761 - protein, 328 aa, unidentified
MDKQVICVGVDISKATLDICVLENEKPEQFTILNDCKAIRKFVKKYLPKKGALIGMENTGRYTWPLLSALEDFEHTVFVIPPLHLSKSLGLVRGKSDRIDAERICRFTLKNRDELRKHVPQRAVIKELGVLLTERKRLIRIKGQITRGLKELGQMDGSIMKSKVCAVNRSLIKTLVTQITKVEKMIKELVGSDSALCEQDTLLRSVPGLGPVLSWNIIYRTNEFLSVSDPRKLACYAGVVPFEHSSGTSVKGRNRVSPYADRQFKSILHMAEMRAVRLEGELNHYYIRKVEEGKNKMSILNAVRNKIIHRAFAVIREKRPYENRLVLS

SEQ ID NO: 69762 - protein, 456 aa, unidentified
MPRFVGLDLARATVQVAILDEHGHQLRNQKLPLRREELERFIPATLDPTDEVAVEATGNTWAVVDLLTPHVTRVVVSNPLRTRAIASAKIKTDKVDARVLAELLRCRYLPEVWQPDATTRHLRGLTHHRAALVGQRTAIKNRIHAQLAHRLLHVPTSDLFGTKGLAWLHDLSLDAAGRAMVDAELRLLTAVDAEIAREDAALAGHGWKDDQVRLLMTLPGVSLVVAIGLLAAWGDLARFPSGAKAAAYLGLVPSTHQSGNVCYHGRITKQGASRTRWLLVQAAQHLDRHPGPLGHFFRRLSRKKNRNVAVVATARKLAVIAYHMLRASEPYRWAQPLATATKLAALRVAATGARRRGGSPKGKPRPTSYGSGERTRAVPSLAGVCKAEGLPAPRTLDDLPAGEIRVIKLTHSLTHARAIQNPTTRPRPTAKHLEEKTQPTKGPSQIIDSQRHAQGT

SEQ ID NO: 69763 - protein, 411 aa, unidentified
MLEVKVERCAGIDVGKKFLAVCVLIGLANQKPVGEVRRFGTSVKELERLRTWLLESGCTEAVMESTGSYWKPVFNILEGSLKIILANPEQVKALRGKKTDPKDSRWLASLLRHGLVQGSFIPPRDIRELRDLTRRRRTLVGDGAAEKNRVQKILEDANVKLGNVLTDVFGTSGQAMLEALLENKHSAAEIAELGHWSLAAKIPQIVEALEGHRMTDHHRLLIRQCLRHMRTIEEMIEELDKEIAVRLKPYQEQVKLACTVPGIKPTAAASILAETGMDMSPEGPFPNCHHLASWATICPGNNESAGKRRSGRTRQGNRWLRGTLTQTGWAGAADKKSLFQLRYQRVKLRRGGQRAVLAIAHAQLIAIYWALRNGTPYPEQVQRMEQDRREAQIRYHLQRLTKLGYEPDVHG

SEQ ID NO: 69764 - protein, 337 aa, unidentified
MQKFIGVDLHKKTIVICVVNQAYRVLERRRFACGETEAIAAWFAGQGSFEVVVEATANYEWFVQLVEGHARRVVLAHPGKLRVIAESTRKNDQIDAHVLADFLARGMIPAAYRPTPRQREHRRLVRHRYQMQGRITSLKCRIRHILSDYNADRRDVFTREGRAYAAGLKLLAADRFVLEELWLSLEHYEQRLAAADKALREFARRDPPAEKRTRRLLNSISGVGVVTSDVFLAETADVRRFGSQKKLTAYAGLAPGQRESAGKRKDLGITHRGSRLLRWVLVQAAWQLVRRDGHWQRIFEALVKRRGKKKAIVAVARRLLCLMMALVVSDRPYQQAA

SEQ ID NO: 69765 - protein, 350 aa, unidentified
MDTTIPPLASIGIDIGKEVFHIVGFSTDGRIAFRRKIKRLALVETFKKLPPSVVGMEACLSAHFVSRALRQLGHEPRIIPAIYVKPFVKGQKNDYNDAEAIAEASLRPNLRTVREKTQDQLDLQACHRVRSRLVSRRTATINQIRAFLIEQGIAVRTGARALRNSLMAVLKNRHDEISPRMRGLISGLYEDWILLDERIDTIASEIEKISEKEANCQRLMSVPGIGPLISTAVVAAIGAGEAFERGRDFGAWLGLVPRQYSTGGRSILGRISKRGSKYLRTLFIQAANVILMRPHNWERFSFGAWLLNAAPRLHRNKLATALANKLARISWSILRNEKVFDTPRHEVMAI

SEQ ID NO: 69766 - protein, 335 aa, unidentified
MQVYGIDLSKEKFDVNFIDAKGKEKNREVKNAVVSISRFLSSVSEDSILCAEHTGVYGDILVYLCNQMNISIALVPGYTIKHSLGLLKGKSDPLDSKRIREYGERFSDKLEYAEYAEENFAELKQLYTLRNQLVKQRRALRTVDTGRGHLPMQSISVHNHIHAVFSSLDNEITSIEVEIEALIKANQDLNENYELAKSVFGIGPVIATDLLIKTGNFKTIDTHRKAASYAGVCPFPNTSGKMVGKSRTSPHADKKLKSLLYMGAKAVVKNNKEFRLYYQKKQLEGKPHYLIMNNVSNKLLRIVFSVVRNKTPYTSDHVCLDPREKNNNSSTKKVA

SEQ ID NO: 69767 - protein, 365 aa, unidentified
MASVAHLAPIHLGLDVHKDTISAGILRADEQVPDVERITHDEPSVRRLVGRLGDPRMLRACYEAGPTGFELARLLHSMDVRCEVIAPSLIPRAPGDKVKTDRRDCRRLARLHRAGELVAVRVPTVGEEAVRDLCRTRADMVQDLTRARNRLGKFLLRHGRPWRGGSTRTHTYQAWLRSQRFDQPAMTQTFGHYLAVVEVRNSQLDAVEADLVGWCTRPPFDWQVARLAAYRGVTRLGALTLAAEVADWRRFATANAFMGFCGLVPSEYSSGNTVHRGRLTKAGNAHLRAQLVESAWSYQHRPSVGVELARRQHGLDPAVIARAWAAQQRLAARFRRLAARKPTKSIVAAAIARELAGFLWAEMTA

SEQ ID NO: 69768 - protein, 442 aa, unidentified
MRGCLISECAGGILKSPVPEFLKKGGIHLKLFVGIDVSVKELEICLMNSDGDTLETFKVNNDLVGAQFLRDRIILAADKLGTEEIRIGLEATSVYSWHPAMYLHEEPLLKERKVKVFTINPKLVRKFKEAYADMEKTDRIDAWLIAERLRFGRLNMTAMMQEQYIALQRLTRMRFHLVQNLTREKQYFLQNLFYKCNAFLTEVESSVFGHAILEMLSEKYSLDEIAAMDISELADYLKEKGKNRFPDPERVANCIQKAARASYRLSKAIEDSIDLILGTSIQAIRSIQNQLKELDKAIERILAGIPEATCLRSIPGIGQVYAAGILAEVGDIDRFSDQAALAKYAGLAWNKHQSGSFLAEDTKRIRSGNRFLRYYLIEAANSVRLREPEFGDYYRKKYNEVPKHQHKRALVLTARKLVRLVDALLRNDQLYTPQRKVNNAKA

SEQ ID NO: 69769 - protein, 414 aa, unidentified
MELLHERCAALDIGKKDLKACVRTPSPTRKRSRRQEIRTFATTTNALLELRDWLLGERVSLVVMEATGDYWRGAFYLLEDDLNVILVNAAHAKGLPGRKTDVSDAAWLCQLGECGLLRASFVPPEPIRQLRDLTRYRTTLTTERTREAQRLEKELEDAGIKLSSVATDILGVSGRAMLTALIDGERDPRVLAELARARMRPKIPHLVQALTGNFGDHHAFLCRLHLQRIDSLSAAIGELSARIEEQMRPFARQLQQLATIPGVGQSIAEVIVAETGADMSRFPSAAHLASWAGVCPGHHESAGKRRSGKTRHGNRWLVGALGTAAMAAARTKDTTYLGARYQRLAHRLGKKKAIVAVEHSILTAVWHMLTNDADYTDLGGDYFARLDPQRAMRRIVRQANILGFTVRFDPIQAA

SEQ ID NO: 69770 - protein, 381 aa, unidentified
MEGETVIAGVDTHKDVHVLCLLDGLGRKIWSGSFGADPEGYDRLAEAIGDPGSCMVVGVEGTASYGAGLTRRLVELGYNVVEVLRPKRDKVRPGEGKSDPLDAERAARKAASGRGCSVPKSQDGWVEAVRQLYVARRLAVATSTSCVACAKSMLTTAPSALRERFRGRERPRDLMPLLARGRKAGDALEESVLASLRSVAAVWKEARSQVESLDERIRALLEANAPALLGVEGCGTTTAAALVVAAGDNPGRLKGEAAFSMMCGASPIPASSGKTDRHRLNRGGNRQANWALYEIAIKRMAYDERTRRYVARRTSEGKSRREAVRCLKRYIAREVYRVLMDPNPDGAAPEGPELARMRKAMRVTQKKAAAELGLSAATLGH

SEQ ID NO: 69771 - protein, 345 aa, unidentified
MEITTVGLDIAKRVFQLHGVDAAGKAVLRRKLQRSEVLAFFKALPSCLVGIEACGTAHYWAREIRELGHEVRLMPPSYVAPYVKRGKTDAADAAAICEAVTRPTMRFVPIKTAEQQAVLMLHRTRDLLVRQRTMLVNALRGHMAELGIIAPQGIARVADLMAVLLGEETTNVPALAREALRGLAAELEALDRRVKEIEVAIVRWHKDNEASRRLATIPGVGPITASAIVATITDPFQFHSARHLAAWIGLVPRQHSSGGKQRQGGISKQGDRYLRRLLVLGATAVIRHSRSKSTAEAGWLKSLLERRPARLVSVAQANKTARIVWALLVHGEAYRMPAAVPSGAA

SEQ ID NO: 69772 - protein, 497 aa, unidentified
MRQQSKKTNPKVRSSDSPITLAERQARRAKDPTRGLQVTNPHAAGIDIGGAEHWVAVPPGCPAPTVRQFGCFTADLEALADWLVECHVDTVVMEATGNYWMVLYDVLEERQLRPVVVNPRYAKNMSGKKGDLSDAQWMQKLHSYGLFANSFRPSGPLRTLRAYLRQRENLVGAASQCIQHMQKALTEMNVQLANVISDISGDTGLRMIDAILAGERDPRRLAELKDGRIHASTTELALALAGHWKDDQLFVLEQARLSYAHYQEQILQCEERIQRQMRAVESRLPEGLPPAGAPGPDPVGDPAAPPSPCAPLANPAANPATAPSAAPSPRPSFNLASELRRIVGVDLTAIDGIGPLTAQIVLSEVGTDMRPWRTEKHFSSWLGVSPDHRISGGKILGRSTRPVVNRARNALRMAAYTLDHSHSALGAKYRRLKRRLGAPKAIIAMAHHLACLIYRMIKFGKAYVDKGMEAYEARYREQRVRWLEKQAKELNLKVIPA

SEQ ID NO: 69773 - protein, 331 aa, unidentified
MKFKEIIGIDISKLKFDVRIHSNQIAAVFENNHTGFTKTINWVVKHTASEKEEFLFALEHTGIYSLPISVFLSENNYHFVLLPGLEIKRSLGIQRGKDDTIDAKRIAEYAYQKQDKIKPSTIPCKQILKIRRLLSLRERLVKQRAGFLKDKKENNHFLNRSENPLLFNIIDKMLMTFDKQIKNIEKELDNIIKMDELINKQFQLITSIKGVGKQTALHVIVFTNCFSNFDNWRKFASYSGTAPFPYQSGTSIKGKNKVSHLANKKIKTLLNMCARSAIICNPEMKLYFQNRKDKGGNGMSALNIIRNKLISRIFAVVKRGTPYVDTFKFAA

SEQ ID NO: 69774 - protein, 433 aa, unidentified
MLKLNYMSTLFVGIDVSSKTNAVYAMDFEENKYISSSFGNNQPGADKLVNMIAECMHKHKNLDTVLIVLESTSVYSVHISNFLSTSEVLMPYKPYVFCVNPKATSNYRKSYIGMEKTDPTDAYLIADFGRVGRTKKLEPWRGGQFISLKRLTRHRMHLSECITREKTYMVSNLYLKFSELQLLEGDDKPFGSLYGATSSAVLTEFLSPQEIIDMPEEDLLTFLAGKSRNRISDLSKTSELLRKAARDSYRLDKCMYEPLSISLASSFNCIHAYQKEIKLIEQAIEKCINGMNPNALLILQSIPGIGPIWASGILSEIGDITVFHSSDALAKYAGLYWPKGDSGDFTSEDNKMSKAGNPYLRCYLGEAANSVRKHIPEYADFYARKYAEVTKHQHKRALALTSRKLVRLVFGLLVKNQLYTGEKLDTEYNIESN

SEQ ID NO: 69775 - protein, 352 aa, unidentified
MRRLNRQKVTGEDFFVGIDLHKARWHVTICSTDVEVFCGSIPGEWEALRRLLDRYEGNRIQAVYEAGCFGFWLYDRLIEHGVECLVTPPSLVLQEYGNRVKTDRRDSRKLSSLLAKGLLKRVWVPSQEERYHRQVVRRRRQLVRDRVRTQNRIKSELQFYGISLPAPKGKWTQIYFDNLRRIRFGNRWMQESFNRLLEQYELLGKLIDKQTKVLRDLAKTASYRERVEILSSIPGIGVITAMEILLELQDVARFRRADQLAAYVGLTPSQYTSADKVRMGRITGIGKDSVRTTLVESSWWLIRKDRDMRIKYEKIKARAGAKRAIVAVARILILRIRRMILDGQGYTFAEAC

SEQ ID NO: 69776 - protein, 339 aa, unidentified
MNAVGIDVSKGKSMVAIMRPFGEIVSAPFEIKHTASDIHSLVELINSVEGESRIVMEHTGRYYEVLAHQLSEANLFVSAINPKLIKDFDNDSLRKIKSDKADAVKIARYALDKWQNLKQYSVMDELRNQLKTMNRQFGFYMKHKTAMKNNLIGILDQTYPGVNTYFDSPARSDGSQKWVDFASTYWHVDCVRKMSQNAFIDHYQNWCKRKKYNFSQSKAEEIYGKAKDLVPVLPKDDITKLIIKQAVNQLNSAAATVESLRTLMNETASQLPEYPVVMAMKGVGASLGPQLMAEIGDVSRFTHKGAITAFAGVDPGVNESGSYEQKSVPTSKRGSSDRS

SEQ ID NO: 69777 - protein, 427 aa, unidentified
MNEGEVIRHENFCQFKAEVRSSRDYLIVGIDVAKERHHAFFGTASGRTLLKRLIFDNNQAGFKQLITRASQLQIAHGLSRVVYGLEPTGNYHKPLSSWLLAKDQMLVLVSSKAISDNRQTLDGRWDKNDTKDSANVADLIAQGKCQFFEMPDTRLVELRNLLSLRRRLKKGEHSVRMQIRNGLVCKYFPELDRHWGSSLTENLAIVRWCLDPRKITAMGFEEFVRQVTRRDRGLRQQKRLERIFVAAAVSIGCPMDEAAHFEAKLLVERLEKISEKIGQTESEIRNLCDSFPAYQRLLTIPGFGPYVSSIVLARIGDPYRFIGRRQVIRLGGLDLNANRSGKRSHAAVPVISKRGNSELRYALYQAAQIATYHNDRFRALFTRCLEGRENERGIKTKMRVKLAAKMLVIAWTMMKTDTDFDPLLIKA

SEQ ID NO: 69778 - protein, 468 aa, unidentified
MTSQTRTSITVEIVSPGPSRATIEARPERAADRAPAHGRMSLPPRGPVGCCRRGTRRPRRLIGKCRAGAAAGNVSAEGEAIRSNDYRKDTTVKAPSTRPAAVLGLDVGKSSHWACLIDRDGEVLSSAPVRNREAELDALFASVPAGTLVVVDQFRNIGSLAVRRARAAGLGVAHLPGLAASRAAGLFAGEAKTDERDAAVIARTALGVPDSLSGVPGRGEALEAARALSSQRDHVVACATRDKNRLRAVLLESCPALEAAVDLSDRRWLELLAGFGGAWGIARSGAEGPQAEAAGEAAAASTAPPPALIEAENRQVRFLAARISEALDEAGALEAETAALLEGDETYACLLTVPGIGPRTAAQLAVSVDIGRFPDHDHLASYCGIAPRVRSSGTSVRSVRASRRGDARLKSLLIFSCNSLVRSSGRYGEYYRACRARGMGHGRALKAVARKRLRAIYAVMRDRVPYRE

SEQ ID NO: 69779 - protein, 320 aa, unidentified
MLSFCGIDVSKDRLDVMVLPEGHRSWVPNDVAGWAELVEQLRDCSIAAIGIEASGGYERGAMRALLAADLPVRQVNPFKLRQFARASGVLAKSDPLDARMIASFVATMPTRPAPRQAPAAERLTEMLAVRRQLSAEKVAAENASRLLEDAMLQRLSRRRIARLAADIDVLDQRLVEIVATDVAFAHRYRLLTSMPGVGSVLACTLIALLPELGRLSRKQVAALVGVAPYAFDSGALKGRRCIWGGRANVRQVLYMAAMSASNWNPVLKAFHDRLAAAGKLPKVVIVAVMRKMITMLNAMVRDDVLWADRLSGRHIVPTTR

SEQ ID NO: 69780 - protein, 348 aa, unidentified
MHYIGMDCHITTLDFAVVNDAGRLIKANRVATSVNNFMGFVKEVTPPRIVYMEEGTLAAWALETCVRYGEKLVITDPKENHWIGSSSQKDDSIDALKLAQLARGGYIKEIHHPVGQRRRFRELMTAYHDTVRSEIRIKNKIKAKFRQNGIQCTGDTVYSKTHKEEWKIKLPPDSTLLLILDGLWLQLEQLEQTEKKILAAAKAHAKQYPEIKLFSALPGIGFINAATVSAMLETPHRFADKRKVWMYAGLGLMRHSSGGKLYSERLTTEYNRLLKYTIKQAAEAAIRAKDNPFRQKYLDMTLLRGIAPHRAKLTIARDMLATMLAMWKKGEKYNPELGEKTIHKQGWA

SEQ ID NO: 69781 - protein, 350 aa, unidentified
MTIIARGVTGGVDTHLDTHVAAALDERGALLGVQSFAATGTGYKELQHWLESFGTVELVGIEGTGSYGAGLTRHLLGQEVAVVEVDRPNRQRRRRTGKSDPEDAVAAARAAQGGDATGSAKTRDGNVEAMRVLRVARSSARRSRTQALNQMRSLISTAPEELRAELRDLSIYKILTVTSAYRHTGRTDVSGVTKLTLRTLARRAISLEEEVKEIDRMLNTLVAETAPELSAIDGVGTDVASALLVAAGDNPERLKSESTFAKLCGVSPLDASSGKQHRHRLNRGGDRQANAALWHIVFTRMVKDPRTKHYIERRMKDGRTKKEAIRCLKRYVAREVFAALPRSEFALDSL

SEQ ID NO: 69782 - protein, 326 aa, unidentified
MQGKEASEQETELKSSVGIDVSKHWLDIHVLPSNERLRVCNNCHGIRQLKRWVKRFDPTLVAVEATGKWHRDVQRSLAASGIPVALVDPFRVRMFAKADGILAKTDRLDAKVLASFAAIMAPSVRPPAPQALAELAEFMAARMSAVKIQTMLKNERSAATFKVVQRHLDRRIERGDKEIAALDAAMLERIQADEGLARRYAILTSIPSFGFVTAAVLIACLAELGSICAKTSAMLAGLAPIADQSGTRDGVRVIFGGRARVRRALYLAALSAVRFNADMRAFYRRLRASGKPPKVALIAVARKLVVLANALIGENRLWRPKTQIYA

SEQ ID NO: 69783 - protein, 463 aa, unidentified
MQTRPLEAVAGFASVSGSSAHLWVERRDEVPTRPAMPQGSGMQGATLAHVTTSTIDPTLTEAAATEVFAGIDWGGSFHQICLIDEDGKVLRQQRVPHDAAGFDELDRLLTCHRARLRVAIERAEGLLVEHLHLLGVEIFCVSPKISARARERCRMAAAKSDAFDAFVLADTLRHEHRHWRALTPPSPVLAELRAISRDRDRIVIAQQATENRLRAVLEAYHPAPLHLFSTLDRDITLDFITDYPTPEQAGRVGTARMDGFCRRHGYSGRTQPEVLVERLRPHLLSAGEGTVAGKAFSASLFTEQLRMLNTHLRAYDKRLDELLERHPDTPIFTSFPGVGPVVAATLISEMGDDRHRFPAPGALLAEAGLSPVTRASGRTRQVRFRYASNRRMRHMIDWWMFTAIREDDWTRQAYDHARARGQGKYRALRGLGSRWTRILWRCWTDHTRYDPAIHHRNPEPTTA

SEQ ID NO: 69784 - protein, 416 aa, unidentified
MKIYPRTRPIRRYIALDIHKEYVLAGGMDVRQEWLLPPCRIEISKLGEWAEKNLCETDAVVIETTTNVWDIYDVVQAWAGYTVVAHAGGVRQIAEARVKTDKEDVKRLIRLLIADILPEVWVPPQPVRELRGLISYRQRLVKTGAILRNRLQSLLHSHNLVLPEEGLLNQTWWDRQEKISELEKLQIRQELSLLEQIEKHKAEVDRELGRQSLGNGWGTQALHLLQLPGIGVVIAMTILSAIGDIHRFESADKLVGYSGLGAGVHDSGQEHIDKRITKSGRKELRWALVEAAWRAVRMSPYWKEQYEKYLQRMRRPSQAIVVVARKLLVAVWHVLSKEETDVHASAEDLAYKMLVLSWDMDESVRQGLTYKQFAKYALMKLGVENDITRFVRKNVPRRIASREEVLVRLAELGLNG

SEQ ID NO: 69785 - protein, 348 aa, unidentified
MTLTIVETRAVTGGVDTHADTHVAAALDSIGGMLGVREFPATPVGYAGLLGWLGGFGTVHLVGVEGTGSYGAGLARHLGAAGVRVVEVDRCDRQDRRRQGKSDPLDAVSAARAALSGRALGVPKGRDGAVEAIRALMVAKRSARGERTQTINQARALIVTGPDELRARFARHSPAALVAELAALRPRAGDVPGYATQIALRELARRVEFFDAQLQRLDALIVPLVTTHAPGLLAVYGVGPDTAAMLLVAAGDEPARLRSEAAWAHLCAVAPIPASSGKVTRRRFNPGGDRQANHALWRIVITRMSAHPPTRAYVARRTAEGLSKKEIIRCLKRYIAREVYPHLRPAGG

SEQ ID NO: 69786 - protein, 356 aa, unidentified
MSEITRVGVDLAKSVIQVYAVDAAGKLLTNRQLSRDKFLTWCAQLPVGCVVAMEGCGGAHHWARKLITLGLNAKIIAAHLVAPYRLQGKGGKNDANDAAAVCEAASRPNMHFVPVKTTVQQGLLCVHRLREGLKEERTACVNRIRGMLTEFGLVVSKSPEKLREKLTDMLEDASNDLSGVARLVIEEAYSHWKEIEERIKWCDQRISAHVKDDAQAKAAKELMGVGPVTASAVVATVGDFNQFKNGAQLGAWLGLTPRQNSSGGKNSLGGITKRGDMYLRMLLIQGAKSAVMTAHKRDDPISKWLHQLREKSGWQKAAVAMANKNARILWAMMTKGCRFDAQHVSVKPAGLAPAMA

SEQ ID NO: 69787 - protein, 323 aa, unidentified
MNKDIKYFGIDISHLVFDVTDSSGNYYQFKNNPAGFKKFLKLLGIDSHCVMEATGYYHYQLAYFLLESVIKVSVENPLSVKRFIQMKLTKNKTDKSDSKLICEYAKQVELKLWKGNSKHQTECLQMTRLLSVYTKQSTMLKNKLHGEAVLGNPSKTVVSSLKRSLKQVQKEMKTLEEKLIVLVKEVHQDVLTRLKSIPGIGNKTSLMLVVLTDGFERFTSGSELCSYAGLTPIIRKSGSSVSGRSKISKMGNQKLRNLLFMCSFNACKYNKACREIYERIVAKGKSKKLALIAVCNKLLKQAFAIAKSGLIYDDSYRSTLVKS

SEQ ID NO: 69788 - protein, 315 aa, unidentified
MVEQVVVGIDVSKAKLDVALLPGGEQFTVSNDRHGIGELLRRVSPLAPSRVVLEATGKLEQLAVSELAAAGLPVVVINPAQVRHYAKARGKWAKTDPIDARLIAEFARDLEPELRPLPDAETQALAALCQRRNQLLEMEQMEKSRLQRAPRANQKSIKAMLRFVRRQVEQVEQQIEHSIRHSPLWQAKRELLESMPAIGKVNSSTLLARLPELGQFTRQKICALVGVAPYNDDSGQWHGRRHIAGGRAGVRQVLYMATLSAVRCNPALRDYYQRLLGRGVEPKAALIAVLRKMLTILNAMVRDNTPWRPPCPTPA

SEQ ID NO: 69789 - protein, 314 aa, unidentified
MSNETCVGIDVSKEKLDVAVGSSGEVWQVANDEAGHGQLRARLAAASPRLVVLEASGGYEAIVAGALWEAGFHVAVVNPRQVRDFARGMGKLAKTDQIDARVLALFGEKVPLEVRAPLDAEAKELQGMVLRRRQLVEMLTMEKNRRGLVAAGRARKSLDKHIAWLEEAVRRANDDIDRTVRKSPLWREQEDLLRSFKGIGPVSARTILVELPELGRLNRKKIAALVGVAPFNRDSGNFRGKRMIAGGRSHVRTVLYMAAVTAARSNPVIRALYQRLLAAGKAKKVALIACLRKLLTILSAMMRDNVRFAPGTRS

SEQ ID NO: 69790 - protein, 392 aa, unidentified
MSQHFRFDASRSHTALDQDSTIIAVIEMSQTKWLVAALVPGVERQPLKKFDANEETLLKLLHRWRREAGQAGRNIKRIVVAYEAGRDGFWLARWLRARDAEVYVIHPTSIAVSREHRRAKTDRLDTELLMRVFLGWLRGEKRHCSMVAIPTIEEEDARRPNREHQNLVTEQTRIINQIKAILTRFGIRLLQPTMRKVAERLDDLSTAEGVPLPQNTLAELRRHLTRLRFVRDQIRAVEQERLRNLAAVPAAEKKSPQAMVRLIARVIGVGVETADMLVNEVFSRQWRDRKAVARYAGLTGSPDESGKRRRERGLARAGNARVRCGMIQFAWRFVRFQKDSALAQWFAARTADGRAGTRKAMIVALGRKLLIALWRLVTRGEVPQGVVLRPAS

SEQ ID NO: 69791 - protein, 349 aa, unidentified
MNNSNNSVLAFHPCGIEVSQLILVLRLRSHDHDEPLREFPNTREGHQAVLRVLERSTRPVRVVLESTGLYGLDLALALHQAGVAVMVANPRAVRHFAHALLQRSKNDRLDAQVLCEYAARMPFQAWRPPSAAALKLVAVARRLEALTDMMAAEKNRLHAACLSEALPAIIRRDIERSIQTQQRAIHRLTRATLEFILSDAELARRYQLLLSIPGFGVTSAVHTLAELTLLPADMDVRQWVAYAGLDPREYTSGTSVHKKVRISKAGNKHLRRALYMPALVVVRHDPHVRAYYEHLLARGKTKMQALVATMRKLLHAIFGMFKHDQLFDGQKVYAALDVSVPTPQEVLCP

SEQ ID NO: 69792 - protein, 334 aa, unidentified
MTMVTLSVGLDYHPGCVQVCVMDPQGKVLANGTRANCAEELDRVVRTFGERIRAAVEVSPGAAHLAHELVTRFGWSVEMAHPGYVARIKQSPDKTDFGDAKLLADLTRVGYLPKVWLAPPEIQDLRTLTRHRVELAAQKRATKLRVRALLRNYRLVGPANAWTKAWLAWLRDEAPLPEHARWVMERHVCEIARLTAEIKLVEQRMADVTKDDPFVQFLMSQDGIGLVTAVTLRAELGRVDRFRNAKQMSRFCGVSPRNASSGARQADAGLIKASNPELRRVLIEAAQRLIRFDAHWVAFYKRMRERGKPYCVIVAAVANRWLRRMYHELKTLAA

SEQ ID NO: 69793 - protein, 338 aa, unidentified
MKFKRIAIDTSKHVFTLHGVDEQERVALRRELKRSQVEEFFRKQEATEVVLEACGGSHHWARLLQRLGHTVRLIPPQYVKPFVKRAKNDRNDAEAINEAASRPSMRSVAVKTVDQQADGIILKHREMLVGQRTQAINALRGHAAEFGVVAAKGTGKVSVLMAALAADTAIPAAAWAMFEQMAAHIEALDQRIAAADAKLAALHEANPLSQLLAEIPGVGPLGAITMALTVEPQNFASARHFAAWLGLTPKEHSTGGKQRLGKISKAGNERLRQLLVVGAMAVIRFAKPGSKSASAWLLKLLERKPRKLCAVALANKMARIIWAMMASGEAYRRKPVVA

SEQ ID NO: 69794 - protein, 359 aa, unidentified
MRIIGCDLHTRQQTLAMLDTTTGEVVKTTLKHEDNNVREFYSNLPRPVRVGIEATGSMQWFVNLMEELGIECLVGHPAKIRAAEPRKQKHDRRDADLILTLLAENRFPAIWLPSRELQDMRALLRHRHQWVRMRTRVQNALQGIALANGLRRGPALWTQAGQQAIAALPLSPHATYRRNELQAMYRKFETEIEKLNQRVEQQAGERSGARLLMTHPGVGPITALATDVFLGDPTRFADSKDLASYVGMIPGEYSSGKRQRLGGLTKQGNPLLRFLWGEAGIHAVRRDPELKHFYHRKLIQKGLGKARAAVARKLGIRMWIMLRDRIEYHEFCRRGQKQQTSGDACAGMPAARYGAKVTG

SEQ ID NO: 69795 - protein, 420 aa, unidentified
MSFKIFRKNCCGLDVHKTWIYACIGITDTNGRTDYKQTRFSSFSKGLKELSDWLAKYHCTEVCMESTGKYWIPVFNVLEKAYVSVILSHPKYTKPQKGNKTDRKDAKWICDLFMCDMVKPSFIPPADIRHLRDLVRYRFKLICMITGEKNRAQNCLTVSNLKLDDVFSDVFGKSSRSITEYILEHPGDLFDVTPFVDRRCKTPIEEIQAAVDGAISPEQAVKLRQCLNHIDELEKHLEEIEQEILRLSDKYQAALDLIRTIPGFDKNPMTAIQVLSEIGGDMSVFPSAKHLVSWAGCCPRNDQSNKKIKSTRISRAGSYFKPVLVQVANGLLRSKKHPEITDRYKRIKARRGHKKAIIAICRMLLTAIWHILSDLKPYTAEGFRESRPVNESKVLTTSQALNLLKQRGYIIKDDLTPAMN

SEQ ID NO: 69796 - protein, 340 aa, unidentified
MYYIGLDVHKKTISYCTKRVDGTVQAEGKLDSTRLALDAWLPGLPQPWTGALEATLFTGWIYDYLKPHAHALKVANPAMLQAIAVAKKKNDQVDARMIADLLRCNLLPQCYMAPSEFRERRRTLRYRNLLVRQNVQMKNRTAGLLMETGVAYNKQKLHGKAYFAQLRKSPEVPECIQPLLKIGRESIERIAKLDRALMKALKSDPLLVARVERLLTIPCVGEVTALTWVLEVGEVSRFSSVKDAVSYCGLCSAERSSAGVAKRSPISKQRNKHLQTVLVEAAKLSQHFNDDLTRLHEKALEKGNRNRATIAVARKLVAYLLAVDRREKPFLEGEESAEAA

SEQ ID NO: 69797 - protein, 339 aa, unidentified
MDHVAIDLGAKKSQICVRGADGRIVEEKRWPTGDLEAYLAGRPTSRVIVETCAEAFCVADAARKLGHETRVVPATLVKTLGVGARRQKIDQRDTRALSEVSCRIDLPTVHIPKAESRDRKTMCGMRDALVGARTKIVNNVRGWLRSRGRRIERGARASFRQRVEAAWQGQVPSYVERQLQVLDVLNVQIKAADAEVKSWAEADETCERLMTVPGVGPLTALRFVAALDEVKRFENAHQVESYLGLVPGESSSSERQQRLSITKAGPRSLRWVLVQAAWALHLRCRKSEAIPLQLWAHRIEQRRGRRTAIIALARKLAGILYALWRDGSVYDGRRGAKMI

SEQ ID NO: 69798 - protein, 407 aa, unidentified
MEKIVIGVDPHKLSATIEVVDHRETLLGSGRFSTDKAGYAAMCRYVAAWPQRTWAVEGSNGAGRSLAQRLLADGEHVVDVPAKLAARARMLDTGHGRKTDAHDAHSVAVAAVRAKQLRVLALDPELETLRILADRRGELARQRTQTANRLQRLLAELTPGHVKKDITSLQAKAILASVRPRDLVGKTRRRLAAEQLADLVAVEKRMKSLTKELKAMVADSDSTVTDLPGVGPIVAARTLADVGDVTRFADRNRFASWTGTAPIEASSGEHVRHRLSRAGNRRMNHMIHIAATTQIRLDTDGRRYYRRKLAQGKTRMEAMRCLKRRISDAIYRQLIADARRARLVAASDASGADPGGHCGATLKSSAVDLPPHIDTSDQPLPGPAQPTLQRPQQPRKTTAKGRLKTAG

SEQ ID NO: 69799 - protein, 428 aa, unidentified
MDKEDVTRVKEFRQLREEIRGSEEYLIVGIDVAKERHHAFLGTATGKTLLKRLVFENTREGFERLLRQAEAIKVSHGFKRVVFGLEPTANYHKPLGEYLIKGGHPVVLVSGVSVKRNRELLDGRWDKHDTKDSANVADLISQGKCLYYEYPSQELRDLRALLSLRKRLKKQEHGLRMRIRNHLVAQYFPEMDRYWGQRDSENFAIVRWCLNPSVIAGLGYERFLQMVTKRQVGHVQGDRLRSIWEEAISSMGCDVGEAVEFEAEVLVESLNTTRQAIKVTDERIKNMACRLPEFQYLLTIPGFGPDISAKVIDAIGNPFRFDTGKQVLKMAGFDLCADRSGKRSEGVTPVISKRGRADLRYALYQAAFIASTRNRYFIVYFTNKLRGREKERGIRTKTRVKLAAKMLILAWTLMKRKEPFDPKYLHLE

SEQ ID NO: 69800 - protein, 378 aa, unidentified
MKNNTTTLHDEIKFNDREPGSKAVKEPEVWKLGLDVDLRHVVVGMQCSRSTIGPAWKFRREQLIEWVKQKRAQGEVVHAVYESCGFGYTLHEQLIEAGAHCIVTTPMRLNLERRRKNDRMDARELCVRLSRYLDGHRDELKPIRIPSRSEQQRRELGRQREFWKKEVRRLENHGRALRIEHEHESLSAGWAGPRKWKIIGPQCSEFVRAQLEPLVKQIRATKVQLDRLTQEIEALVGEEKIPVGLGALTVSLLDGEVCDWTRFAHRKAVGSYTGCCPSEYSSGGVQRFGAIDRHGNKHVRVLLVEAVWRLLRWQPNWHARKRYLEKLRVGASLKKKMAVALARQLAIDLWRWRTGRATAAELGWIAASGTRSMSGTDH

SEQ ID NO: 69801 - protein, 322 aa, unidentified
MAMLSFCGIDVSKDRLDVVVLPEQQCSSVRNDVPGWAELVERLRGFSISAIGLEASGGYERGVMRALLAEGMSVRQINPFKLRQFAKASGVLAKNDRLDARMIASFVAVMPTRPAQRQAPAVERLAEMVTVRRHLSDEKIAAENASRLLEDAMLQRLSRRRIARLAADIAQLDERLVEIVAADAVLAHRYRLLSSMPGVGPVLACTLIALLPELGRLSRIRIAALVGVAPYDFDSGKLKGKRCIWGGRAPVRNVLYMAALSASNWNPALKVFHDRLAATGKKPKVVIVAVMRKMITMLNAMLRDDVVWADRLSGRHTVPTAR

SEQ ID NO: 69802 - protein, 391 aa, unidentified
MVCVGIDVAKDKHDCCILDSDGMVRADCFTIPNNMDGFKQLLQTIRNCTKKSDKIKVGLEATGHYSYNILGFLLDNDLAVYVMNPLHTNLYRKSLSLRKTKTDRVDARTIATMLLSDVDLKSYTDTAYHNEELKSLTRYRFDKVRERAKLKQSVSRLVTILFPELEKLVPSLHSVSVYALFSEYPGAKQISEAHLTKLTNLLSIASKGHYGKEKAIQIREAAKSSIGSVMPAKSLELKHTIKLIKELTSEIDEIEDSIQQIMDELHPPILSIPGVGIQSAAMILAEIGDFSNFESPDKILAYAGCSPSTYQSGKLTNCYAHMEKRGSRYLRYALYNATKYVCHWNPVFAKYLAKKRAEGKHYNVALSHATKKLVRLIYALQKSGKAYLTAA

SEQ ID NO: 69803 - protein, 410 aa, unidentified
MLFVGDDWAEDHHDVYLMDEAGTQVAARRLPEGLAGVGQLHDLVDGHADDPGQVVVGIEKDHGLWVGALVASGYQVYAINPMAVARYRDRHRVSGAKSDAADAKLLADLVRTDRHNHRPLDGDSDDAEAIKVLARAHQNLIWLRARQVATLRAGLLEYYPAALLAFPNLGDRDRDRDALAVLGRAPTPGQGARLSLSKIGAALKAGGRKRNIKEKAQEIQAVLRAQQLAAPAAVTAAYGAATRATVNILLELTDQIGAVETELAQHFRAHPDADIYLSLPGLGVILSARVLGEFGDDPNRFTTAKCRKNYAGTSPLTVASGRKHAVLARYVRNQRLYDALDRWAFATLKCSPGARAFYDQHRAAGDTHHQALRALANRLVGILHGCLRHHTLYNEDTAWAHRTPAPAAAA

SEQ ID NO: 69804 - protein, 430 aa, unidentified
MKSNTQNTKIEAITETTLVLGIDVGSETHYARAFDYRGIEYSKKPFKFSNDEAGFVTFKAWILDIKEKHGKDKVVPGMEPTGHYWFNLGKFLQDNEMKPVLVNPHHVKKSKELDDNNPTKNDRKDPKVIAGLVREGRYMIPYLPEGVYADLRTASNMRFQLQAELTRIQNRISRWFNIYFPEYKTVYGQPDAKSGMLILKVAPLPEDIMTLGIDGVNQIWRDAKVRAVGKARAKTLIEAAEHSVGSKEGEISARMEIRMLLEDYESRNTRLQEVVALIEELVKKIPMAEKLLEIKGVGIKTVSGFLAEVGDISRFNNPKELQKLAGLALVENSSGKHKGETTISRRGRKRLRYLLFEVAMSLVSKNPEFRELHSYYTTRKLNPLKKMQSLMAVAAKLLRVFFAMLTKGVDYDPKKLVGDIKRPAVYLQVA

SEQ ID NO: 69805 - protein, 349 aa, unidentified
MLADEVDYVVGVDTHRDQHVLAVVVASSGGVIAQRSVRSNARGYAEALRFTGDHAPGTRIWAVEGAGHYGAGFARYLSSRGETVHEVSRTARGERRLQGKDDLLDAIRVARSALASTARTLPRSGERQEALRLLLLARRSAVDVRRVAIVQLRSVIVTAPESLRDELRRLPLGELLRRCSRFRRSSSRTPDELAIILVLRSLARRIEAATEEARELEREILGHVRALVPELLNEAGVGPIVAAQLIVTWSHRDRVRNEAAFARLAGVAPLPASSGQTIRHRLSRGGDRQLNRALHTVILHRRHHDPTTRDYIARRVAEGKSTRDATRILKRYLARHLYRVMQNASPTMT

SEQ ID NO: 69806 - protein, 344 aa, unidentified
MEQIIRIGIDTSKSVFQLHGVNAAEQPVLRKKLSRKEMMKFFEKAAPTTIALEACGGSHHWARLLSSLGHEVKLIAPQLAKPYVKRGKNDAADAEALCEAMSRPTMRFVPVKTAEQQAALMLVGMRERLIRNRTQLANAIRGFAMEFGVVAARGMCRIEPLLERIATDQSLPELARELFVMHGDEYRDLLAEIKAVEEKLTALHRCDECSKRLAEIPGVGPIGASLLLMKAPDPRMFKSGRDFAAWIGLTPKDHSTAGKVRLGVITRAGDEMLRSVLVVGATALLQHTRVGRSRHASPWLLGLLQRKKPKLVAVALANKIARIAWKLMVSGEAYRGTQDRPQAA

SEQ ID NO: 69807 - protein, 339 aa, unidentified
MFYVGLDIHAKRIAICVLNETGQIVRRVQVRTVDQMMRILEGLPDRFEVCYEASCGYGHYHDYLHPLAARVLVAHPGQLRLIYRSKNKNDRKDAERLAKLLYLGEVPTVHVPSLEVRTWRELINCRSQVIAKRTRAKNAVRSLLRSAGQLAPRHPGLWTKAGSAWLRRLALPTLSQQLRRDLLLEEIETLTRQMRRIEQELNHRAQQTSAVVQLRSIPGVGVRTAEAVVAFVDDPHRFHSAKAVGRYFGLVPGQDQSGDKNRLGHITREGAPVVRRLLAEAAWQARRRSPTVRAYFERSQRDDPQRKKIALVATAHYLVRVMWAMLKQGTFWEEGILAS

SEQ ID NO: 69808 - protein, 339 aa, unidentified
MKLTPVGIDIAKNVIQVHHVDAKTGEVVNKPIRRAKFLEYFANRAPCLIGMEACGGAHHWARQLTRMGHEVRLMAAEFVKAFNIRNKNDAADARAIWLAVQQPGRPVAVKTEMQQAVLALHRMREQLVKFRTMQINCLRGLLTEYGEVMGKGRTALDRAIPAILDRVSERLPTVLIDTMREQWNGLTQRDGQIARIEQRIRAWKKEDKAVRAISEIPGVGMLTATAAVAMMGDPRAFSSGREFAAWAGLVPKQTGSGGKINLLGISRRGDTYLRTMLIHGARSVVTNAKEPGPWIEQMKKRRPLNVVIVALANKMARTIWAVLAHDRPYQKEYVSVRPA

SEQ ID NO: 69809 - protein, 350 aa, unidentified
MDKELYIGVDVSKQTLDLAYYDGESIDWKKAHIKVSNNNAGFKKIGSWVAKVSKGFDIVLFCMEYTGLYTQNFRLWLEEKHYIYRMVEPRKMHRFEPDLDDGLRSLDRIKTDELDSFRIAIYCEQNHRKILRNPSKLPSPVYFKLKRLLAERKQTVKQSVLYKQQLHDICAYDTDLSVERKNGQLKTLNDALKGIDNEIDMYIKEDADISKNFSLLTSIPGIGRVVALETIVLTENFMAIDNPRKYACYIGVAPFKKESGTSVRKGSSVSKKGFKQAKADLSIACLVCMQHIPNIRDYWERKRKEKCSGIVFNAIKFKMILRMFAVIKRGTPYVETDNYRNGKNKQPGVN

SEQ ID NO: 69810 - protein, 328 aa, unidentified
MQGKVSSERTAMATVYVGIDVCKEWLDIHLHPLGRSFRVTNDTAGLRRLKRELDALDQMPRSALHIVMEATGKWHRAVQRSLHADGFYVSVVDPLRARLFAKACGFLAKTDRLDARLLAIMGEALKPAQTPPQDQALEALQELVNARSAANGERTALSNRMKTAVTAFLRKELTRRLAALDTHIARLDAEIERSIGAEPEMRRRLDILISIPGIGAVTAASLIAGLCELGACSGKQAAMLAGLAPLACESGERAGHRAIRGGRPAPRNAIYMAALSASRHNPDLANFAERLKKAGKPNKVVLVAVMRKLIVLANTLITKNRIWTPNQP

SEQ ID NO: 69811 - protein, 312 aa, unidentified
MDTNGAVIGIDVSKDRLDVHVRPSGEAFWVGREAEGLDELVARLKRLSPLVIAVEATGGFETTVAAALAGAGLPLVIVNPAQVRAFAQALGRRAKTDPIDAEVIARFAEAVNPEVRPLPDEAEQLLAELVTRRRQIVQMIVAEKQREKRQAQPRLRRSIARLVEALQKELSELDRQIDDEIRGSPAWRQKEDLLRSVPGVGRIVSRTLLAELPELGSLDRRQIAALAGLAPWTRQSGKWKGKSFIGGGRASVRTALFMAALVAARHNPVLRDFHQRLITAGKPKLVALTATARKLLTILNAMVKAQQHWRTA

SEQ ID NO: 69812 - protein, 412 aa, unidentified
MEVLHPHCAGLDVHKASVVACVRHMMGGAVKREVRSFQTTTKGLIALSQWLSAEDCTHIVMEATGVYWKPVWHILSDGEFALVLANAAHVKNVPGRKTDVNDATWLAELLAHGLVRGSFVPDEPTQEMRNLLRTRKQLVRERSRHIQRLQKTLEDANIKLDSVISDILGLSGRRMIEALIAGETDPNALAALAHRRIKASPAELEAALRGRVTRHHRFLLGLHLQQIDAIDAAIDQIDPEVDALVEPFHAAVQLLTTIPGIDALSACVILAEIGRDMSRFPTAGHLISWAGLCPKNDESAGKRRSTRMRKGAPWLKTTLVQCASAAARKKASYLQAQFHRLRARRGAKKAIGAVAASILTAAYHMLKNGTLYEDLGPAHFDKRAQAKQVHRLIDRLRNLGFAVQITPMEAAA

SEQ ID NO: 69813 - protein, 351 aa, unidentified
MKYYKSLTEFNCGVDLHGQQMYICVVDREGKILVHCNIKGNDLEYFWKKVEPWKHSLTVCCECIFNWYFLADACQVKGIPFVLAHALYLKLIHGGKNKNDRVDSEKLAHLLRANLIPPSYVYPAEKRPVRGLLRQRMTYVWRRAELMMRVQINQIAEGREPVAKGGKNRDVWEGRLKELARHPLHQITAEVDLHMIRQYDLMILRLERELLRITKRDSWKEFNLLQTIPGIGRSLALTILYEMDRAERFPTVKNFLSYARLVKGSVASAGKIKGLRGGKLGNPYLRWAFGEAAVIAKRSHEMIKQYAQKLEQRHGKFKANSVLAAKLGRAVYFMLRNGTGFDLEKLVATSA

SEQ ID NO: 69814 - protein, 341 aa, unidentified
MDHYVGLDVSVRSTSICILSASGQVVREGKVESEPEAIVAFLGGRGLAYGRVGIEAGPLCQWLYAGLAKAGLPVVCIETRHAKAVLSAQVNKTDRNDARGIAQMMRVGLYKPVHVKTLASQEIRALLGGRRTLQAKLMDIENSIRGLLRNFGLRVGTVTRARYEERIRELTDGRAGLIAVIEPMLTVRRVVREQYVLLHKRMLALARADEPCRLLMSAPGVGPFVALTYRAAVDEPARFRQSRAVGAHFGLAPRTHQSGELDRRGPITKNGDETLRAALFEAALVLLRPGSKPSPLKAWGLKLAKRRGTAKAMVAVARRLAVILHRMWVDGTPFRIEAAMA

SEQ ID NO: 69815 - protein, 320 aa, unidentified
MMAQNDQIVVGIDVAKDKVDACIRSLSLRQTFPSTAQGHRKLVAWLRKHKVNKAAMEASGGYERDWAKVLRQAGIEVRIVDPKRVRSFALSAGRLAKNDAIDAEMIAWFAETFDEAPSQTHDAAHEELAALVKARKGLIDLKTRLQSQDEHVAPGPVQKAHARVLKSLAAEIAKLEAAISAKVKATPEFAERAEIIESVPGFAETTSATLIAGMPELGKVSKEIAAALLGAAPYDDDSGKRRGERHIKGGRRWVRNAIYMPCLGAATQNNPVLKAFYQRLIAKGKEPKVALVACMRKLIVILNTLIARRQKWDPSRYALS

SEQ ID NO: 69816 - protein, 397 aa, unidentified
MSECAAARTWKSANAMEPELADKWDEQVFRIGETIPMKKPAHQLIAEVPVRRSKVEMTIGIDLGDVWSHYCTLNEEGEVVDRGRFRTTLSGVEKWFTDLPRARVAMETGTHSIWISEQLRELGHEVIVANVRELRAISHSDRKSDTVDAEKIARYARLDPKILRPISHRTVAQQEALTLIRARNLIVRLRTAAVNSVRGLAKPCGYRLPTSSTLCFAKRCMAVLPPGLALALGPVLEQIATMTVKIKHYDRLIQQLTETEYPETQALIKVYGVGQLTALTYVLTLGSKKRFERSRDVGCYLGLRPRRSQSGDHDPQLGITKAGNIYLRSLLVECANHVLGPQGRDSTLRQWGLHLASRGGKQSRNRAIVAVARKLAVLLHRIWVTQEPYIPFYAVAA

SEQ ID NO: 69817 - protein, 343 aa, unidentified
MDHFAGLDVSVKETSLCIVDDAGRIVREVKVASEPEALLAVLTNPACHFKRIGLEAGPLSQWLFKALAEAGLPVICVETRHMRAALKAQINKTDRNDARGIAQMMRAGLYRPVHVKTLRSQKLRMLLTYRKLLQSKAIAIENDLRATLRNFGLKVGVVGTVKFEARIKGLVDNTPDLVVLVEPLLIVRRVLREQIGILHRRLLAIVRNDAVCRRLMTVPGVGPVVALTYRATVDVPYRFRNSKAVGAVFGLTPSKHQSGESNRTGGISRCGDEMMRMMLYEAAHIMLVRSAKWSWLKAWAMKIARHRGLKKAIVALARRLAVIMHRIWVDGTEFRWTREVAAA

SEQ ID NO: 69818 - protein, 400 aa, unidentified
MISVGIDVSKGKSTVCLLKPYGEIVCKPFEVQHTEIDLEDLANLLQKLDGEIKIVMEATGIYHLPILTFLLEKGFFVSVINPLMMKRFSKDNSLRGAKNDRLDSVMIASYGIEKWYKLKKYEVNDRIYTELRLLGRQYYRFMQTHVKLVQELTHLLDYTAPGLKAMFNSWNEHSNRDKLSDFVERFWHFDLITSLSREEFVEQYLLWAKEKKYHQSRSKAEKVYDLASNGIPTLSSHTPSTQLMIQGAINVLRIVNNSLYHILSRMKELAKSLPEYATVRSMGGVGDSLAPRLIAEIGNVKRLRNGHSLVALAGIDPPPYESGQFVGTHRRISKRGSPILRKIGFEVMRMLKSHKEPEDNAVYNYILKKEAEGKNKKLSKIAGLNKFLRIYYVRVMEVYQ

SEQ ID NO: 69819 - protein, 416 aa, unidentified
MDTMYERCCGLDIHKKTIEACFRSGKKKTHMSFGTTSAELRKLTMWLVENDCQSVAMESTGSYWKPIFNILELSGTDMKIIVVNARHMKNVPGRKTDVNDAEWIAELLQYGLLRPSFIPDREQRELRELSRYRKSLVGERAREINRLQKMLEGGNIKLTSVVSEVTGYSSRRLLDRLLRNDEPMTEDVISGLVHTSLAGKSKELETALDGLLSELQKELLIKVLDHIDDMSRRIADLDDFCRKQMKKYEDALDKLDEIPGIARRTAETILIETGLDMSRFPTAKHFARWAGLAPGNNESAGKRSSGRTTKGNPTLKSTLIQSAKVAARKKNSFFKARYQKIAAKRGANRASVAVAHSMLIAIYHILKSGEKFKDLGEDYYNQFNREKKKNYYLKKLTKLGVNLKEATLSISIQTAT

SEQ ID NO: 69820 - protein, 371 aa, unidentified
MPDVSSNAPVDVRLWIALDAHKLSIVAAILPPSGGQPEVCQIETTRVALRRFIDRLGGPEGLAVCYEAGPGGFDLLRVLAGLGVACDVIAPSLIPVRAGDRIKTDRRDAKQLVRLYRAGQLSYVQPPTPETEGLRDLMRCREDLRRARTSARHRVSKQLLRYGRIYRDGRSQWTRMHRAWIARQRLDDPLAQAALSQMLVHLDGLDRQLDALDRDLEEIARGARWQAVVEILTRFKGISTRTALGLIAEIGDFSRFSHPRELSAWLGIVPCEYSSGEQRHRGHITKTGNDHARRLLIEAAWSYRHHPRRPDRGPQPDARAWQAQVRLHRRYRHLTEHGKRSTVATVAVARELAGFLWAAATDQPLALQAGA

SEQ ID NO: 69821 - protein, 354 aa, unidentified
MLIIGCDFHTRYQQIAMAREETGESLVERRLDHQSGEAQTFYRSLQNLQEPVRVGIEATGPIHWFERLLTELGHELWIGDSAKIRASEVRKQKTDERDARLILDLLLAKRFPKIWVPTPAERDLRQLLWHRHKLVSMRTMLGNQLHALAMSQGLCRKKKLFTQKGRVELQHLGLAPWASRRREELLRLLDQLEPPLAELDRAVLEEARRREDAVCLMTHPGIGPVTSLAFVLAIGPVTRFPGSKKIASYLGLNPTEASSGGTRRLGGISKQGNTMVRWLLIEAVYPAVRKDPALRQDYQRLKFRRGHAVAKVAIARKLAVRMYWMLRSGADYAQLVRRQGSPGGTLMDASSSLA

SEQ ID NO: 69822 - protein, 355 aa, unidentified
MTPFSYVPNNYDIFLGIDVDKKNFAMTIKDQLQFQKTLTMPSNPNGLRQYIQKHFPKKRVLCGYEAGPTGYHLYRYLTEHNQDCCVIAPASIPKASSDRVKNNRIDSEKIATHLKSGELNFVRVPSSAYQELRHLTEMYECYAQARQKAKQRIKSLLLFEHLPEEPEDPTRAWSQRYLQHLKELDCSLIVRERLNMLLKDLDYAREQILLVIKKLKSFTKEHKNIQEDIGYLRSIPGIGFITASLLLGRLGDPQNLRNVREIAAFLGLVPSEHSSGDRTYRGRITHLGDPFVRSRLVECSWVAIRYDKELEQFYHRIKSRHHPSLAASKAIVAVARKLTQRIYRVLKARRAYIVH

SEQ ID NO: 69823 - protein, 423 aa, unidentified
MNRLHYELHVGIDLGQWLHQACVVDANGELLEERGFEHSVDGLGTTLAWLLSLAGKDAERIAVAIEKPHGAVVETLLESGVAVFAINPKQVDRFRDRHSMSGAKDDRRDAFVLADALRTDGHRFQRLQLPPPEMVALRELLRTRDQLVKNHVALSSQIRDLLARCWPHLVTLAPKDKALDAFFCELLQLFFDHHPTAELSLQNIQKLVHQHHIRRLQPEHILEVLRKTPLRVAPGTTEATSAHLNLLLHQLLLVRQHRRDSDQHLERWFKQLQPTSDQPYSDAAILASLPGVGAVVLASVLSYAHDPVRLRNLDAFRSLGGIAPVTKKSGKRGQQRPQILMRRARSLPLNNALHHWARIAVLTDPHFKEHYGRLRDRGHSHARALRGVMDRILAIAVAMLRDQTLYDPSKRANFNKGAKKVSS

SEQ ID NO: 69824 - protein, 345 aa, unidentified
MRVLIGIDPHKATNAIAAIDERGELLEYAVFPTNRSGLRSLERWGKRFPERRWAVEGVGGLGRSVALRLVAAGETVVDVPAKLCSRARLLATGNARKNDRVDAFHVALAALRGERLAEVGDEEHAEVLRMLSERREDLIKERTRTLNRLHGLLRDLLPGGAPKNLSAEKAARVLRGVRPRSGPTRTRRRLAADLLRDVRRLDRQLCELGCRIREALKEASTGLTRMFGVGPILAAKIIGRVGNVARFPTKAHFASYTGTAPIEASSGEVVRHRLSRAGNRKLNHVLHMIAICQARHDTEGRAYYRRKLAEGKSEKEALRCLKRRISDAVYKQLRADLVAAIPAAA

SEQ ID NO: 69825 - protein, 417 aa, unidentified
MTHYAALMGIDWADTKHDICLIDLTTGEQETSILRHSSRTIDEWAAAVRVRFGGQPVAVCLEQSRGPLIFALMKYDFLTLYPINPTTLAKYREAFSPSRHKDDASDAAYLAELLLHHREHLRAWHPDSEPARCLRYLVEHRRRLVDDRTRISNRLTALLKSYFPHVLEWFPDLRTELVGDFLLRWPSLETLHKVRRETLLKFFRHHHSVRAETLEKRVAAIKASQPLVTDVAVINSAVVMCKALVSQMQATLRAIAEFDAEIAALCAVNEDFALFKSLPGAGAVYASRLVVALGSDRERWSSADEVARFSGIAPVIERSGKSCRVRWRYFCPKFLRQSFHEYAGESVRHSFWARAYYEQQRGKGKSHQAAVRALAYKWIRIIYRCWKTRTVYDEVKYLEGLRKKGSTLLNYAANNPA

SEQ ID NO: 69826 - protein, 341 aa, unidentified
MSIITVGIDLAKNVFAVHGVDDNGKSALVKPKVSREHLLPLVAQLPPCVIGMEACSGAHHWARLFRGYGHSVKLMAPKFVTPYRMGGKRGKNDAADAAAICEAVTRPNMRFVPIKEEHQQIILCLHRTRQGFVEERTATYNRLRGLIAEFGIVLPQKVANLRRHIGARLEDLPGYANRCVGDLLSHADQLDVRIAEYDRLIAKAAREDARSRRLMQRPGIGPVTASALLASIGGGHDFKNGRQVAAWIGLTPGQHSSGGKDRLGRITKAGDHYLRTLLVLGARTILNTLGDKQDHFSRWARNLVVRRGYGRAAVAIAAKNARLAWAVLRYGEDFRLSASAA

SEQ ID NO: 69827 - protein, 493 aa, unidentified
MNSKTNTPKRQAGNCGGRIGRHSGKQKKENMKALSPEQEAELKQKAEEISKGLQSYTWRDLETGGKFTHNDKLTFIRDDMLIVGCDIGSERHYARAIDAKGRELSKGAYSFENNAEGFQSAKDWALHLAAQHGKNQIVLGVEPTGHYWFSLAAWMIAKGISVVQVNPYAVKQTKELADNSQAKNDAKDPKLIADLVKNGNYGVPYLPEDVYAELRVLCTLRDQLMEDRVRNMNRLHREMKIVFPEYREAFGKIDGIFTLSVLANAPLPSELAALGEDGVKDIWHTEKLRGGGYKRAKEIVRLASVSAGLTQGAEARKIAIVSFVGKVMELAAELEEIEAQIALKCREIPRADSILEINGLGAATVSGILAEMGDIDRFDAAKEIQKLSGLGLVACRSGKHQGQTKISHRGRKRLRYWLFQGALSVVSHNEAFRQIHEYYTTRAENPLKKMQSITVIACKLLRIIFTILKKGVRFDPDKMLSDIMRPAPLEAAA

SEQ ID NO: 69828 - protein, 280 aa, unidentified
MHIVGCDFHPSWQQVAWCDNETAEVGERKLVNGNGEAERWYRQLPAPALIGLEATGNSQWFVDLLQQLGHEVWIGDAAQIRASYIRKQKNDKRDAAHVLKLLLEGRFPRLWVPSREQRDLRQLLIHRHKLVQIRSRVKNGLQHLAMNQGMQKKARLWSAAGQKAFRDLPLQGWAARRRQDLLHLLAQLDEQIAPLDQAAQQAAEQNPEARLLLTQPGVGPITALAFVLTIGDVSRFLRGKQVASYLGLIPREHSSGGRQRLGAISKQGNSACCWWKRHRM

SEQ ID NO: 69829 - protein, 417 aa, unidentified
MTETDSTKRQRVIGLDAHPDTFTAAILEGQTPAQALVEKVFNKVPLSGLVSWADKHTTTDDVLVLEASGNSFQVVRTLAAIHRRALVLESCQLGKLKEAHANNDKISAVRIAKAYLAGTAKEVWVPDPKTQERRDCFHAHRKAVNQTTRARNRLLSYLSNNGVRLKKGIRLTQSSQSSETLRKAKAWSVCQWQIIEGLLLELEHAEQRRKHWRSLIAQEVTQDPVLLSLVRLCGIKELIAFAIGALINVERFARPGSLVKYIGLNPAFDDSGQGCWSGGIGGHGRKDLRALLIQGAQAILRSKNPLASWGKRLMARKGSYKLAVAAVARRLAVDIWYLLKGRWTTLQEVDARLKIKLGTIVTGIGTEGLTKIGKTRELLLKDVYQSLKSGRTYVLDPNKKFVPKPESLSLAAEYGIV

SEQ ID NO: 69830 - protein, 407 aa, unidentified
MTTETRQEREALVHGLDAHPYGLTLAVMSSRDPRQSVASKRITFALSQLANILRQHTHPADTIVLEASGNSFHLARRIATYGRRAIVLESQSVSLRTRGTPKTDPLDAEHIARAYLGGQAKEVWTPRLEAAEWREIYFAYRDAVRDSVRARNRIWAMLNANGKLGDRRRRECERHGGVNLVEPGALDALQRRLHGTTTQAIRMEDEFENYRQAEARRQRLESEIARLVMSHPLALRLVRLCGIRHLVAFALLAFIDDIRRFQNPKSLVRYLGLDPSVSTSGIGGGTSGLHGAGRADLRALLVEGAKSVLRSTSGGALKRWGVALKMRRGANIAACAVARKMAVAVWHLLVGNYTPLFETDVSQALRRKLATIATRVGSKFIRAKGYATNTAYIADVLKTIVTPVNAT

SEQ ID NO: 69831 - protein, 353 aa, unidentified
MIHLGIDQHKKYSQVHAMNDNGEVVFKGRLNNNMDEFIKLRNQLGDDQIQSVVEASRTWVVYDLLEKLQFNPKVANPLKTKAIAEAQIKTDSIDAQILSCLLKGDLIPEVKVAPYEVRRVKNIIRQRMWLVKFQTAMKNRIHHILDRNHISFGTGISDLFGVQGRKWMKTVSKELPKSEGELLNENLELLEGVELHVKNIKGLLREHLNMKREVEICKSLPGVGDVFGPLIALEIWDINRFSSESKLVAYAGLTPTTYSSGGKTFHGKLLPQSNKLLRYAFCEAAWAAIKSSPYFGSYYQRLRERLNPQKAIVGVARKMCEITWYCLQEQRVYEERVYKRWEGKEKSKVCQTR

SEQ ID NO: 69832 - protein, 467 aa, unidentified
MFCFQNEYSDEVWSNKQDSYYKGFAGAKPACTIVKEGKEGVMSESKVLREEPEFAALVGIDWADQKHAWCVQAAGTTQRESGEVEHTPEAVEAWVGQLCQRFGNRPIAVAVEQVKGALVFMLSKYEPLHLFPVPPAMSANLRAALYPSGAKDDPRDADLLVDLLLKHRDKLRRLSPDSEETRRVQNLVEERRQLVEEKTAQCNRLTNHLKIYFPQMLDWFDRLDTELVCALLEQWPTLEELQKVPPARLRAFFRKQRCHYPELVERRLVGIRQAMPAIRDRAVIEAKSAVVKVSARVIRSLIRGVADLDRKIEEAAAAHPDFFIFESLPGAGSVLAPRLLAAFGSQRERYANAKEVQAYSGIAPVTEQSGKKKWVHFRWACPKFLRQSFHEWAGHSIAHSQWARSYYQQQRERGKGHHAAVRGLAFKWIRIVFRCWKDRVAYDESRYLAALTKRNSPLAAVAGGTIL

SEQ ID NO: 69833 - protein, 400 aa, unidentified
MRAVFGIDVSKTSSEVAILVNGEKVHGYTILNDAIGFNRLLGDLKTVHNPEIIFEATGVYSRRLQAFLEEYSYAYTRLNPLEAKKQLDSLRVRKTDKIDAEKLAKSQLVHNRKPTYVQEEVYQHLRDLSRFYQNMTEDLVRNKNRLHKVLQVTFPELENLLSTPTGEQYWNLVMAFPCKEFVLSLSQSNLCEIIRQSTSKRISEKRVTYLVDKLTKLANQSYCAVKKTSPMLEEVRYYAQELLRLSERRQVVLSDMVALAQPLPEYDILRSIPGIAETTATSIIGELGNIRRFQSTNQINAFIGIDLKHYESGNFLAKEHITKRGNPYARKILFKCIHNIASASHTNPCHIADFYEKRKRQSQVTSTKPHTIASIHRLIRTMYYLITHNKLYDYTSTQNR

SEQ ID NO: 69834 - protein, 319 aa, unidentified
MSEVVLGIDVSKKTLDAALISGNRTFSKQFQNSAEGFQSLAAWLTSLQIKQVHACLEATGIYGEAVALFLHECGHQVSVVNPLRIKGYAQSNMQRNKTDRLDARLIADFCLTQKPDAWQPPSAAVKHLQSLVRRVEVLEEMRQAEDNRLANASAEIKPSVERMMTLIKEEINQLERQIKQHIDCHPDLKEQSELLQTIPGIGAKTAHLLLSEIEFERYNSGRAIAAQAGVVPRQKQSGTSLKQTGLSKLGNARLRKALYFPAITAKRHNEIIKEFAERLHKRGKTPMQIVCAAMRKLLHIAFGVLKHKRAFDASLAFSA

SEQ ID NO: 69835 - protein, 338 aa, unidentified
MTSFVGVDLHRNNFTYCIRENGEEKKIGKCEISELKGFASLLGKDTAMAVEATGNTFMFCRFLKAHVGRLVVVNPSQFKVISTSTKKTDKHDAKILAEFLEKDMLPEVRMKDDLQAKISSLTQTREKLVQLRTVLKNKVNNLLAANFIVLKREELSTETGLRKALSFHFDPITDTELFVVVEQIRSLNQSIEKLDKTIEDHGSKMDGFKNLKSIKGIGSKGAATLLSTIGNIHDFRSSKQLAAYIGIVPRVSNSNDTVCHGRITKNGSKIARTTLVQCALIAKRYSPYLHAFHESVKSRRGGAKANIALARKFLDIVYRTLKNNWMFEDFTQFKLVKN

SEQ ID NO: 69836 - protein, 460 aa, unidentified
MMYYLVEGIDKGRLWFVSSAWSARPSRRMKSHSRNIQWSTRPNRRMEQIYRAGPLAETKREEDMVNIGIDLHKTQFTVCVRSRSGDKFFEYPTTSEGYAAFLKKAKEWQRKGEEVRVGVESTGNTRYFKNQMEEAGIGVTVINTSKLKVVTESVKKTDKHDAATIAEFLEKDMLPESQLCSHESEQLRRLLKVRTTLVKTEVVMKNQIHALLTAEGMEDVKGSLQSKKGRQRVLDALNQCKNGLVAQPLFEMIEGIEENIKTIEEQLRERTKDDRMVKLLMTIPGCGEVCSWTIRAYTDDIQRFASSKKYSSYAGLAPWVQNSNETERHGRITKRGPKELRTALVQVVMGLRRMKAKTFSWRIMQRYETMKAAKGSGKSIIAAARKMSTIIWHMLSKDVEFDIGLMADWKLTKKAEAMSKTARLAEKALIDKQEKPAEKKVEGKSIKKIGVARRTIKKAG

SEQ ID NO: 69837 - protein, 418 aa, unidentified
MCVMTHSSPQSPLDPSVYRFIVAIDIGSEQCSFCVFRPDKSLLVKATEMANASAGFAQLHERLSRLGGSPEQVLVGMEATSRYGENLFQFLVQRGYHLCLLHPAQTHWFAKRRGLRAKTDRLDAQTIGHVLLSGEARVGYVPNDLITSYRELVRLHGQLSEDLTRHKNEIHALLQVLFPEFSQVFADPYRQTAIAVLTRYPSAQAIRAAGVETLTQLLRRFAPRNYGRETAERLVYLAQHSVSSPMALEARQLSLQILCQQLTQIQSHLAQLDEELEKLRVRDPESQLLQAIPEFGPQTVAVLRAELGDVARFHRTDQAVAYAGLDIAIKESGKWQGQAKLSKRGSGLLRQMLYLAAVRSVRFEGSAFGIYYRRLVARGMPKGAALVAVMRKMLIVAVHVLKTKEVYDPSKVAAACAG

SEQ ID NO: 69838 - protein, 341 aa, unidentified
MSVMIGIDPHKLLHAACAIDRSEEELGQLQVRSGPRQLSELLSWATRFEQRTWAIESAGGLGYLLAQQLLGHGETVLDVPPTLSARVRVLGSGRSNKNDANDARAVAIAALRSRSVAAVRAEDHVSVLRLLAKAQLDASRARSRACSRLHALVRELVPGGIRKEIVAGQALQVLDAIETVNATQRQRLELARETLEEIELLDVRMKRSKQRITEAVKASGTTLIDVYGIGPIIAATIIGYTGDITRFPTSGHYAAYNGTAPIEFSSSGRTVHRLSRRGNRTLNHAIHMIAVTQIRHLDSEGRAYFDRKVAEGRTKREAMRSLKRQISDRVHKHLVADARNK

SEQ ID NO: 69839 - protein, 343 aa, unidentified
MKIIRVGVDLAKNVFQVHGVDRNEKSVWQRKLKRDEWIKVLLEKIEPGCEIGMEACGGAHHWARLLQAKGYIVKLIAPQFVKPYVKSNKNDANDAEAICEAMSRPNMRFVSIKAVEQQDVQAVHRIRAELMGQRKAKVNQIRGLVSEYGLVAPREVLNLRAAIPCWLEDAENGLTGRFRRLLNGLWDDLMLLEQRVKELDHEISAIAAADPVAQRLQQLRGVGPMTATALLATVGNASQFGNGRQMAASLGLTPKQNSSGGKEKLLGISKRGDCYVLCLLVHGARSMINASKGKDDRLSQWVMRISTTRHPNVASVAMANKTARIAWAMIRNGSDYQPELAAA

SEQ ID NO: 69840 - protein, 346 aa, unidentified
MKITTIGIDLAKAVFQIHGVDEHGKVAVRKQLKRAEMSKYFANLEPCLIGMEACGSAHHWARKLEGYGHTVKLMAPQFVKPYVKTNKNDVADAEAICEAVSRPNMRFVAMKAVEQQAILSVHRARQGFVKARTAQGNQIRGLLSEFGIVISQGIRSIMKQVPEILEDGENGLPGIMRTLIERRTENLREMDRQAKELEAQIHLWHRENEASRKLADIPGLGPITASAIVATVGDAREFENGRQLAAWMGLVPRQHASGGKQNLLGISKRGDTYLRTLMIHGARAVVRFAENKAEPQSWLRQLMARRNKNVAAVALANKNARIVWALLANDRTFRPDYTAAAVVAGK

SEQ ID NO: 69841 - protein, 366 aa, unidentified
MDKVKLYVGLDVHKDSIAIAFATARSRSDPQFVGTTRYSVISLTKALSKLGTPSDISICHEAGPCGYGLVRALREQGYQCEVVAPSRVARRPADRIKTDRRDALLLARLHRAGELVPVTVPEPQDEAIRDLVRAREDAVSDLRRVRQRLKSFLLRHGHAYTGSRWGPKHELFLSKITFEDSAQHIVFTEYRMAVRFASELVERLTQSLRAHAETWRWLPIVKGLMTLRSIDLISALTIVAELGDLRRFPHPREFMSYLGLVPSEHSSGNTKQRGGLTKTGNTHVRRILVEAAWNYRLPARIGESLQPRLEGQPRYITDIAWKAQVRLCHRFRRLRARGLHQNKTCAAIARELCGFIWDIGTRLQPA

SEQ ID NO: 69842 - protein, 315 aa, unidentified
MDREKLTVGIDVSKEQLEVAFDETHQTQCIENSTTQIAELTQKLLPLQPKLIVVEATGGLERLLVLHLAEAQLPVVVVNPRQVRHFAKAVGILAKTDSIDARLLVRFGISVNPPVRIIKAEEQQQLADQVSRRRQIVTMITQEKNRSKRATGQVLRDIQEHLAYLEKRLSRLDDQIQEALEASPIYKATAALLISVPGVGQGTASVLISHLPELGHISGKQASALVGAAPFNRDSGGRRGPRLVWGGRKMVRCQLYMATVAATRCNPVIRSFYRRLIESGKKPKVAMTACMRKLVVILNAMLRDNRSWDAQLLKT

SEQ ID NO: 69843 - protein, 387 aa, unidentified
MQKPHDDSKMCPAAFQQDSTLVVVVEMSLSSWLVAGLIPGVSREPLKKIDPDPERLLRLLYRWRDEAVAAGSKINRIAVAYETGRDGFWLARWLRNRGIDAHVIHATSVAISREHRRAKTDRIDTAMLRRGFLGWLRGEPGHCSMAIVPSIAEEDAKRPHRERDTLIHERTSIVNRMKSILIQFGVRNFNPVLRKANEKLDAVRTPEGIPLPANAVAALHRLMDRLRVIKEQVKAIEQTRLQRMQRNPADRMNAMVFLLVRIIGMGVETAEQLVREMLFRNFHDRKAVARYAGLTGSPDESGSKRREKGLSRSGNGRVRNILIQLSWRMLQFQPDSGLVIWYKKRTESARGSRKPMIVALARKLIISLWRYVNTGVVPEGFELRSAA

SEQ ID NO: 69844 - protein, 369 aa, unidentified
MAQVTTIGLDLAKRVFQVHGVDATGTVVVRRSLRRRQVLAFFAKLPSCLVGIEACATAHCWAREITKLGHDVRLIPPAYAKAYVRRNKNDPADAAAIWEAVSRPSMRFVAIKTEAQQAAAGIHKVRAMLVKQRTMLINTLRGLMAEFGIVVADGRQHVEELIAVLTDPAEARIAAPLHDGLMAIVDSLRSLEQRIERIEKQILGWGRSNPTCRHLTTIPGYGPILSSAMAAMVVEPTAFASARHFAASLGLVPRQDGTGGKVKLGPISKRGNGYLRRLLVNGAMSVLCSKRAKEDPWLMKLLASKPRKVAACALANKLARIGWGVMMRQEDFRSRRMISRTPDPSQPDAVLTSLKTASRAPLAVTCGQS

SEQ ID NO: 69845 - protein, 354 aa, unidentified
MTSTKYIGLDVHKESLSIAVLNSAGKVVMECVIETKASTILQFIHGLRGDVHLTFEEGTWAGWLYDLLKAHVTELVVCNPRKNALLKEGSKSDRIDARKLAELLYMSKLSSVYHGEHGLRMLKELSRSYLTITKDLGRVMNRLKALYRGWAIPCAGTQVYAPHYRSEWLAKIHEAGVRRRAELYYQQLDALRLVRQQARKELLAEARKHRATKLLRQIPGIGPLRAAHLVALMQTPHRFRTKRQLWSYSGLGLESHDSAQYRVVEGQLQRSKKPVTLRGLNDNHNHDLKDIFKGAAMRASTAAGPLRDFYEALLAKGRKPTMARLTLARKIAAITLIVWKKEVRFDANYLKQAA

SEQ ID NO: 69846 - protein, 348 aa, unidentified
MNHYAGIDVSLECSSVCVVDASGQIVREDRIESEPEALIGWFASVGFEIARIGLEAGPLSQWLYAQMQEAGLAVELLETRHVHDAFKAMPVKTDRKDARGIAQLMRLGWFRPVHCKSIEAQDIRVLLTVRKLVQSKLYDVEMSLRGTLRGFGLKVGRTTPKRFEGRIRELVAGHPSLQVIADALLAVRAVLLREFNGFEKRVRTLARANTQARLLMSTPAVGPIVALTYAAAIDDPARFKSSKTAGAHFGLTPRKYQSGETDHSGRISKIGDAAVREALYQAAHVMLTKPVRGCSELKSWAMRLAKRAGMNKAKVALARKLAVIMHRMLADGRPFNPTSRTQPAVATA

SEQ ID NO: 69847 - protein, 364 aa, unidentified
MKKSSKKQQGSAVVESKPEQVVGLDLGDRHSHYCILTSSGEVMEEGRIQTTAASLEKHFGSEARMRIALEAGTHSPWVSRLLKGYGHQVIVANPRKIPSLTRSKSKNDRNDARQLARMAAFDPELLHPIEHRSAERQQDLNLIHTRSVLVRARTMLINSMRGLVKSTGGRLPACSSEAFPEKVPAAVPPALKAACAPLLEQIAQINQTIAAMDKQIDGLDKKYPEIAILRTVPGVGPVVAACYALTLDSPQTMPTNRQAGAYLGLRPGQQQSGDSNPQCGITRTGNTYLRSLLVQSAQYILGRLGPNSELRCWGLKLAASGGKRGKKRAIVAVARKLAVILLSMWRNRKKFEPFPQSATQLATA

SEQ ID NO: 69848 - protein, 321 aa, unidentified
MSDNAVMVGIDVASQHVDVVALEATLPAERFSNDLEGHSALAEILARLPAALVVMEATGGYEAALACALQASGLRVVVINPRQSRDFARAMGRLAKTDRVDARVLAELAGTLFRRRDLQSFLRPPPDELQKQLAALVTRRRQLVAMLHSERQRLRLALALVRPSLEAVIELLRKQLDDIDAQMIGHVNSHYAAFDALLQSAGGIGPTAAASLIADLPELGRLNRRQIAALVGVAPYARDSGQQRGRRRIAGGRFELRRALYMATLTATRYNPAIRAFYERLLAAGKLKKIALIACMRKLLTILNAMARDRIAFDPARTALD

SEQ ID NO: 69849 - protein, 385 aa, unidentified
MQKLNDLSRSLTALEPDGTLITVIEMSLSSWLVAGIVPGVERQPLKKLAVDESALLKLLHRWREEAEKAGRRIERIAVAFEAGRDGFWLARWLKARGIEAYVIHASSVAVSREHRRAKTDRLDTELLKRSFLGWLRGERDHCKMVEIPTMKDEDAKRPNREHDSLVGERSRIVNRMKAALVRLGIRGFNPKLKRATTRLDSLRTPEGEPIPPNALAELRRDMERRRLVNNQIRQIEEERLERIEQAPCDGPHVMVRLLARVLGVGIETADMLVHEVLSRNMRDRRAVARYAGLTGSPDESGRKRREKGLARSGNVRVRRGMIQLAWRFLLHQKDSALTKWFRSRTENARGTRKPMIVALARKLLIALWRLVREGIVPDGVVLRAA

SEQ ID NO: 69850 - protein, 273 aa, unidentified
MQTVTTIGLDIAKSVFQVHGVDAAGQVVIRRRLKRRTVLVFFQKLPPCLVGIEACASSHHWSRELQALGHTVRLMPPAYVKPYVKRHKNDATDAEAICEAVTRANMRFVATKTPEQQSCLTLHRTRHLLIRQQTSVINAIRAHLAEFGIVAPIGRNGVEQLLGVVADANDKRLPEVARACVAALGVQLRMLKAQILEFDRMISAWHRSNETSRRLDKAPGIGPVLATALVATVADPKAFRSGRNFSAWIGLVPKQHSSGGKDRLGHISKQGDR

SEQ ID NO: 69851 - protein, 390 aa, unidentified
MNFLKFAVGLDVAMETFDACLSVINDQQQVTVKARFNFPNNQKGFQSLLAWVSKNAKLSLPVIYLMEATGIYYENLAWYLHHNGCNVSVVLPNKAKKYKAALGLKSKTDRIDARGLAQMACEQSFTAWKPLSNNLYTLRLISRQIQSICEQSTALSNQLHALQYGMLRDKAIEKMLASQIALLQKHNAKLKLRLRSMIASDQVLSSKFEKICKIKGLGWESLAVIVAETNGFASFENSPQLVSYAGYDVVANESGKHKGKTKISKKGNSRIRRCLHFPAFNVVKYNVGSFKELYDRVYEKRKIKMVAYTAVQKKLLIIIYALWKNNQDFIDKNEKNKSGDAELAPSFAAAPKELEKINPGSTRVKQDRHPSKPRRMPSFAENKVRKKSTK

SEQ ID NO: 69852 - protein, 351 aa, unidentified
MLIVGCDYHPSFQQIAWVDTESGECGERPLMHSTGEAERFYRNLKEQGVKVRVGIEATGHSRWFERLLMELEYELWVGDAAEIKAKRVRKQKNDREDARLLRTLLVENRFPRVWLADQLNRDLRQLLWHRHRLVQMRTRVMNQLQAVALNEGVQRKKGLWSQAGRAQLEAFQLLPWAARRREDLLKLLDGLTPRIQALTAEVNKQAEQYPEAQRLMTHPGVGPLTALAYVLIIGSPDRFRCGKQIGCYVGLIPSEESSANRQRLGHITKEGNSLLRFLLLEAAQAAVRSDADWRREFLHLTMRRGRQIAVVALARKLAVRLYWMWRNGRDYQKSLKFSSHVGQPGTGYGVK

SEQ ID NO: 69853 - protein, 383 aa, unidentified
MGVIIGMDPHKRPATIEVIDERAVVLAAGRYGTDKAGYTQMLAAARTFAGRVWAVEGCNGIGRHLAHRLVHDGEVVVDVPPELSAQVRVFAAGNGRKTDEVDAHAVTLVALRTPGLVQVQVEEDLVVTGMLADRRDELGRARTQVVNRLHRLLPELLPGGAEKFLSARQARALIASVRPRDLAGKTRRRLAVELEMIDKKTRALDKELTGLAAARGSALMDLHGIGPSGAARLLADAGDIHRFASRDRFASWNGTAPLDASSGSQARHRLSRAGNRRINRVLHIMAVVQLRNQTKGRAYYDARRAGGMPSMMAMRALKRRLSNVVFSRMLADQKRREAGPGGQSGTPADSSVAGPDPRTPALRTSHVPGPPHSLNAGHNTALT

SEQ ID NO: 69854 - protein, 312 aa, unidentified
MNTITYLGLDIAKRTLDLSPHPALPKRNYSNDPTGLRLLLATLQRLPNPVHIICEATGGYEHLLLKTLHQAQVNVTLLNPRHVRDFARAKGLLAKTDRLDAAVLAEYGQMFHPAPTPPASPAQQRLAALVTRRQELVTLHTQEQHRAEHHHDRFVQRQARSLLRILAGHLTKLETEIKALLQNQTRLRTQVERLTSIQGVGARTAWQLLAALPELGTLARGQTAALAGLAPYNHDSGPQRGQRHIAHGRPLARTALYMAALVAARYNPVLRPLYQRLRAAGKPAKVALVALMRKLAELANLLLKNPQLAITQ

SEQ ID NO: 69855 - protein, 369 aa, unidentified
MAKGSKLSEVEDLKRSFEMAADEITVGIDLGDRYSQCCFLGDHGELIAEGRIRTTPEGFRDHFQRLPRRRIAIEVGGHSRWVSQLLTEWGHEVFVANARMVPLISSGGRKSDIVDARLLARLARTDPRLLSPITHVAHKGYPDMAVLRARALLVRTRVRLINAIRGITKSTGVRLPTAGSANFATKIAPLLPAELIPSLSPLIDTLRLLSDKIHEYDMALENIARTQYPETLRLRQVYGVGPVTALQFVLTIGDPHRFRKSRDVGPFLGLVPKRRQSGETEMQLRISKAGNSQLRYLLVQCAHYLLGRFGPDSDLRRWGTAIAVRGGKNGKKRAAVAVARKLSVLLHRLWVSGEAYDPLRNAASALNSV

SEQ ID NO: 69856 - protein, 474 aa, unidentified
MKEHKKAKAKTKSQGTKSIREHQPNAAGIDLGAEEIWVAVAAEGDQNPVRRFEAFTQDLKAIAKWLVNCGVQSVAMEATNVYWIPLYQLLEEAGLKVCLVNARHVKNVPGRKSDLSDCQWLQYLHSVGLLSGSFRPAQVICATRCIYRYRQNLLSLAGQHLQHMQAALDQMNIKLHHVIDDLSGLTGQSIIEAILKGQRDPVQLAKLRDKRIQASEEKIVKSLEGDWRKEHLFVLAKAWAQHQEVQKQIQDCDRELLEYTQQLEACTTLSKPLKVMHLKAELLGAQALSTPVAKKRARKKTSKNQPLGPWQQELERFFGVDLTLIPGISVLTGLTLMTELGNDLSAFKTQHHFASWLCLCPANETSASKILRRHTRRSQNRVRQALRMAASSLHHDKSFLGDKYRRLRARLGPPKAITAMAHQLARLIWTLITRRVPFDLSFFAHQQKLNEQRRLKRLAASARQMVYQLTPVAA

SEQ ID NO: 69857 - protein, 312 aa, unidentified
MPDVFIGIDVSKDHLDVAARPSGESWQVANTELGIATLVKRLVKLQPALVVLEASGRLESAAVSALAVAGIPLAIVNPRQVRDFARSTGKLAKTDKLDAQMLARFADAVRPEPRPLPDETQQRIDALLVRRRQLLGMITAERNRRRRAPTMTRAEIDEHVAWLQVRVEAIEDELNKTIRSSPLWRDKVALLRSVPGVGPMLAATIVAQLPELGVLTHKEIASLVGVAPLNRDSGHWRGKRTIWGGRSQVRAALYMSALVATQFNPRIRPFYQRLLATGKPKKLALTACMRKLDTRDSCYATSFSSSARTRSV

SEQ ID NO: 69858 - protein, 322 aa, unidentified
MAMLSFAGIDVSKDRLDVMVLPEEQFSSVSNDPTGWAKLVEQLRGSSIAAIGLEASGGYERGVMRSLLAAGMSVRQVNPFKLRQFAKASGVLAKNDPLDARMIASFVAIMPTRPAQPRAPALERLVEMLTVRRQLSAEKVAAENASRLLENAMLERLSRRRIARLAADIDMLDERLVEIVVADAALAHRYRLLTSMPGVGPVLACTLIALLPELGRMSRKQVAALVGVAPYAFESGKLKGKRCVWGGRAPIRHVLFMAAMSASNWNPLLKRFHDRLAATGKLPKVVIVAVMRKMITTLNAMVRDDVVWADRHRGRHIAPTAR

SEQ ID NO: 69859 - protein, 415 aa, unidentified
MSKRNRRGRIIGSDVLVVGIDVAKRCHVAVCRRPNGLKEKAFSFINLRTGFERLLEFSDRSRQRSGCRSVLFALEATGHYGHALRQFLDDRGFALMGVNPAHTKRAKELEDNSPEKSDPKDAGLIADLAAQGRARPLMIPRGEFADLRRLGKLRQRLVVERIRYLNRYHGLVDLLLPELVAIVRDVACRTMRRMFEKWPTAADVAGVDYEAFEDQLWRWSRGHIDRAKITLIHRASWHSVGLHEGLDAAKLEMKQLLAALIQVEQNLADVERAQEATLLRVPYAKLLLSVPGLGPVSVAMILGETGDLRSFPSAEAVIKLAGYNLYRLASGSFKGKTRITKRGRPLLRHQLFLASLRLSKSGNPLENFRNRLRERKTGPEVAVAGSRKLLRLLFALVRDGQSYEPGRLGVHQPAA

SEQ ID NO: 69860 - protein, 454 aa, unidentified
MLKEQKEKQPRGLVPTPVLEPNAAGIDIGATEIYIAVPSDRGAQPVRRFATFTEDLVAAADWLQRCGIETAAMESTGVYWIPLFQMLEARGIKVCLVNARYVKNVPGRKSDVSDCQWLQYLHAVGLLRASFRPEQQICAVRSLMRYRESLVQMAAVHLQHMQKALDQMNLQLHHVISDLSGTTGMAILDAILAGERDPLKLAQLRDGRIKASETTIAKSLMGDYRREHLFTLRQSMVAYRNYQKQMSEIDVEIEQMLVEFSDGAGPDAPALPQPKDRHKPRRNDLRFDLRTQLYRIFGVDLTAIPGINAMTAYVLLSEVGRDLSGFRNAAAFASWLGLCPGNRVSGGKVLSSRTRSVNHRLAHALRMAAQSLFRSQSWLGQYFRRMRAKLGAPKSITAAAHKLARILFHILTTGQAYDETVFAQQEAQNHQRMQQKLRKQARLFGFQLVEIKAQ

SEQ ID NO: 69861 - protein, 339 aa, unidentified
MNPIPVGVDIGKNVFQIHYIAPASGEIVNKSLKRANFLEYFANLAPCMIGMKACGGSQHWARSLSKLGHQVRLMAPRFAKAFNIGNKNDAADARAIWLAVQQPGNKVAVKSEAQQAVLALHRLRQQLVKFRTSQINCIRGFLGEYGEVMPASRRAFDANIAAVLERVSEHVAAPLIDTLREQWAALAHLNEQIARIEQRLVQWMSTDSSVQAIAAIPGVGLLTATAAVATIGDAKAFKSGREFAASIGLVPRQVGSGGRTTLLGISKRGDAYLRTLLVHCARVISVQLRSKHPWVEQLLKRRPYNVAIVALANKLARVIWAVLARGKPYQQDFVSTKPA

SEQ ID NO: 69862 - protein, 403 aa, unidentified
MKHVIAFDISMGKSYMVIYNAQKQCVFESEIKHSKPDFKKLQEKIHKLTDETGESPEIVFEATGIYSRQLERFMQNNQYTYCLLNPLEAKIQCDSLRIHKTDRSDAHRLALTHFTVTRRVSTGTDNLFYQLRSLSRLYSELDDELSIIRGRMHKVIQLTFPELERIFTSKSDLFLNFVQLFPHPDCVLGLSKTIIKNRIRANTNKKISNITAEKKAIQILEIAKICYPAVSQNDVLCDQLKLYARRYQELLHQKEICISKMVYVAEQRAEYDIIRSLPGIGPNTAVRLMAEIGDITRFNNNKQLNAFAGIDIRRFQSGKTFFKDKINKRGNKHLRKLLFLIIQNMIKQRRYGQNHIVEYYDKLKTQPYNKCHKVASIACVNKLLKLLFYLITHNMHYDYRLAA

SEQ ID NO: 69863 - protein, 384 aa, unidentified
MVNNSITFIGLDTHKEFFEVAYLEDSRDAKPVSLGRINGTKPALQKLVRQFESKYPGSTLHFVYEAGPCGYWIYRFLTSLGHCCYVVAPSLIPKKAGERVKTDKRDALKLALLMRSGDIEPIYVPEPEDEAMRDLSRARETAMKDLKDAKYQLKAMLLRNNIRCEVQDNWSAKHLRWLTELILPHPSQQIVLQEAIQTITERIRRLERLDNELRYHVKNWRYYPVVKAIQAMRGVRLLVAVGVIAELGDLSRFDHPRKLMSYLGLVPSEHSSGGKRKQGGITRTGNTRARRLLVEGAHTYRYAANVSTELQKRQESLSKEIVDIAWQAQLRLCRRYQRLMKRGKHYNLVVTAIAREMIAYIWAIAREVVLAPINPAKRLSRVPA

SEQ ID NO: 69864 - protein, 410 aa, unidentified
MRIVGMDIHRVAAEAVALLDGKLVKLGRIPMLRERLAEFARTQLTHDDHVIVEATGNAAAVVEVLAPHVDRVVIANPKQVRLIAHAKVKTDAIDAAVLAKLYASGFLPEVWVPDGATLALRRQVARRTQLIRQRVRLKNLIQSILHAHLIPPCPHGNLTGISGRKWIAAQRLPEDERAAVQRHLAQIDLIEGSLKDVEADIAKVAMADPAIRRLMTLPGVDMTVASGVAAAIGDVRRFNDPTKLVGYLGLNPSTRQSGEGPAYHGRITKQGRGQARGMLVEAAWAAARSPGPLRAFFQRVAAKRGKPIAAVATARKLAMIIWHMLTKGEDYIWVRPAPLARKFRSIELKAGLPPEHSKRGAAYDYNIPERRAAERVRVEEAEEEYAGFTSRWRAKPRNRPQREKKMPAPA

SEQ ID NO: 69865 - protein, 341 aa, unidentified
MLKFTIGADISKDKINFALRFLNDYLLEKEVENTTSALNKFIKEVQSIVKSIVKEKKAKYSVEFIMEHTGIYGNLLIECLAGQKMTMFVVAGLEIKNSTGISRGKNDKIDAQRIADYGVRFADKLKPYTLCDQTLTALKALNTKRAQLVRIKAQLTQANDDNKKFIGKETQKTLEQINKPVVTELDKAIEKIEAQMLELIKSDASIYENYKIAQSVPGVGKVIAVAFICATNNFTKFASAKALGSYCGVVPFGKESGRYKGKDKVSPIANKALKTLLHLGAVASISGKNPFAVYYQRKVAVDKKNKMLALNNVRNKIVKTMFACIKNKTKYTADYSFSFAA

SEQ ID NO: 69866 - protein, 451 aa, unidentified
MPQPILAVGVDPAKRLHRAVAVLFPDEVVLDVELPNAFDAVANLDLRLCELANQHGADLVYGLEDHRRYGRLFCQVLTERGRDVRVVNPLWTNRQRAFYGQDKDDAIDGRSIAAVVLRRHHQLPLASDFGEVAQAIREAERSLQDLSKVGTQLVNRLHLQLSDTYTAAYEEYFGKLKSPLALRFFRRFPLPQDLVGHNVEMLASLLLDLAGGKVGPHKGGNRLIAMRSKAQAILETSGAMRASPRTLALELKAELIRQLCDELLANHDRIIRLERMLREQLLPATKQTITTITGISTILAATIIGETGSISRFRSPAAFAVYNGTAPARNSTGGRDRHKARRDCNHRLKRAFYLAARAAVLHDPIAKAYHQSCKSRGLSYVEALKRVARRMSDVVYALLKSGKAYDRSIIEHAIERRLEQAAHAARSHAKQSLVHSRPRKSNSPLSQRQVM

SEQ ID NO: 69867 - protein, 414 aa, unidentified
MRGGLQKGSTFSIGVNFRGYNEELWNGLRKILGQFGPADVVFAVETSCNLWKTLVVYLSKKGYTVLLVSPLVTYQSRPIMNNDYSKTDPKDALLIGENAQRGYYADYHEYSSEVNRLHSLCIAYDKLVKDRSRNKMRLRSLMEEIFPEYLECLNVDIDTSLYLLGKYYLPEHFAGMDIKREAEHVYRLSRGNHGLETLHQLKESAQRSIGVDKRGEEDSVRLILDVWIGEIRQLDRSIEAVSARMIEIARGSEYFEIIASVPGISDISAARFIGECYGLNLFTHYKQIEKLGGLNLRLCDSGQYKGTKRINKLGNKRLSKLQYQMTTQTARFVPEVRIKFIKRQKKRECYRKNIIAASSVLLRILMALIKDKRRYEYRDDKVKELAALELTYKPQKKKRKARRTGRKSAGKEAA

SEQ ID NO: 69868 - protein, 467 aa, unidentified
MIDFQRLSRKDKKRLLRNIATEDPGLDVVHPKAAGIDVGNSCHYVAVSPKLDKQPVREFGCFTQDLKRLAEWLVDRGIETVAMQSTGVYWIPLYDVLEEYGIRVFLVNAKHTRNLPGRKTDVQESQWLLKLHTYGLLNNSFRPPSQILKMRTYWRLRAQHVAEVSTTIQRMQKVLTEMNVQLSNVISDISGVSGMAILRAIVAGQRDPQQLAALCDPRIRASHDQIAKSLEGNWRAELVFALAQQLRNYDHYLKQIELCDQQLEAHIQTLPTRTDPVSAVAEPSPAKQRAKRSKSKGHAPRFELAAHLNRIAGVDLTLIDGIDLMTAQTIASETGFDMSSWNTEGHFASWLGLCPDNRISGGRILAKGTRHVVNRVATALRMAASTLLKSQSYLGSQYRRLRTRLGAPKAITAMAHRLARLVYRMLKYGRGYVDKGADFYEQKYREQQILILQKKAAKLGLQLMATS

SEQ ID NO: 69869 - protein, 340 aa, unidentified
MGITTIGLDLAKNVFQVHGVNERGKAVLRKQLKRDQVAPFFANLPPCLIGIEACASAHHWARKLQALGHTVRLMAPQFVKPYVKSNKNDAADAEAICEAVSRPSMRFVPVKNVEQQSVLSLHRVRQGFVKARTAQANQIRGLLGEYGLVVPRGVAYIAQRVPALIEDAENELPGSFRLLIQRLLEHLKVLQQQVDEIEAQIKAWHRASEASQRLEKVPGIGPLTATALVASVGDAKNFDNGRQFAAWLGVVPRQHSSGGKPTQLGMSKRGDAYLRTMLIHGARSVIYRATQRADADSWLVKLTTRRNKNVAAVAMANKTARTVWALLAHGREFKPGYAVA

SEQ ID NO: 69870 - protein, 352 aa, unidentified
MTEITTIGLDLAKTVFQVHGADQDGRPVVRKKLRRGQVLGFFAGLSPCLIGLEACASAHFWARELQALGHAVRLIPPQYVKPFVKRNKNDASDAEAICEALIRPTMRFAPLKSAEQQSVLMLHRARELLVRQKPKLINALRGHCGEFGIVVAQGASRVAELIVMIEYRQDERLAALAREALGSLVGQLRMVQAQIVGLEKKLMTWHRANEASRRLATIPGVGPGCRHYHSPLLRPWALVATIGDASQFHSGRQLAAWLGLVPRQYSSGGKDRLGRISKRGDGYLRKLLVHGARTVLLWSRRKKETRTAWLEALLARRPTNVVVVAMANKTARVVWALLSRGETFRVKTRAAA

SEQ ID NO: 69871 - protein, 339 aa, unidentified
MPLYAASDLHANNNFLAIIEENGKRVFKGKLPNDPERILAALHPHQKDLVGIVVESTYNWYWLADALIGEGYQVHLANPSAIQKYSGLKHADDQHDAFWLAELLRLGILPEGYIYPKEERPIRDLLRKRGHLVRLRTSLIISLQNIVSRNCGVAIQVNDVKRLKEDRISPLLEGNEDLALAGRVSKETIDFLTRQIRAIESVVERKVELKAPYRHLLTMPGIGKILALTIMLETGPISRFAKVGNYVSYCRKVSSQWESNGKAKGKGNKKNGNRYLAWAFSEGAELARRFDATARAYYDRKKQKSNFMIAHSALAHKLARAAYYIIRDQVPFRPEKLFA

SEQ ID NO: 69872 - protein, 336 aa, unidentified
MIKYIGLDAHSSTCTFNVTDERGREVDTTTIESNGRLLVKYVRGIEGVKKLTFEECELSNWLYEILRPEVDELIVCNPVANKDYKKIKTDKMDARKLSKLLRGGFLISVYHDGSKREQFRSIMSGYQDFIEEGVRLKNRYKSLFRKSGKKVKGEALYNDESFLEGLERTDFKFIGTQIYRLLENMEGSRQEYVKEILRCSKGFKETKYLKSIPGIGNIQAAKIVSQVIDPERFSSKYKYYSYCGLVRHKRISDGRGYGSEKIWGNRILKCVYKMAGHSVLKGESGLRNYYDTLRLKGISHDNAYNAVCRKIAAISLSVWRKSEKYNDRLITGNLIK

SEQ ID NO: 69873 - protein, 389 aa, unidentified
MNGQTDFTVKAEPGDFKNTLFVAMELSRATWLVATFAPRLGDKISVHAIPGGDTKRLLELIDRLQAKLRGKSVSRVRTVCCYEAGYDGFWLHRVLVNHGVENHVLDAASLPIDRRAKHIKTDNIDAKRLLRAIVGFVQGDPQSCRVVRAPTPEEEDARRLHRERQRLVRERTGHLNRIKALLITHGIRALRITDAKWCERLDQMRTGDGRPIPARLRIEIEREWKRLKVVAEQVREVEAERDRLVKGSEPAGDACTEKMRRLVKLHGIGAEFATVLTREVFYRPFQNRRQVASYVGLTPAPYDSGESKHDQGINKAGNTRARVTAVQMAWLWLRYQSKSELSLWYYKRVGDLKGRVRRIMIIALARKLVIALWRYVETGKVPTGAIVTA

SEQ ID NO: 69874 - protein, 346 aa, unidentified
MTIVEAARAVTGGIDTHGEVHVAAVLDEVGGLLGTESFRADPDGYSALLTWLQAFGDIGKVGVEGTGSYGAGITRFLARAGVHVVEVDRQNRQARRQSGKSDPLDAVEAARAAQSGRAHGAAKTRDGSVEAIRVLVVAKRSARGARIKALGQMRQLTFSAPDQLQSRLKGLPIAAFVAVAQGLRPTRSPDVVTAATKAALSSLAHRVADLEDEISDLDAMITPLLKDAAPDLLGVYGVGIDTAAALLVAAGDNPERLHSEAAWAHLCGVSPLEASSGKVTRHRLNRGGDRQANRALWHIVITRLASDPRTQSYMERRVKDGRSKSEAIRMLKRYVAREVYRYLPRV

SEQ ID NO: 69875 - protein, 361 aa, unidentified
MKRVQSNKLDFSGQNIYVGIDVHLKSWSVAILSEYSALKRFSQSPEPEALHKYLVSNYPGANYFSVYEAGFCGFWIHEKLTGLGITNIVVHPADVPTMSKEKLRKTDAVDCNKLARELRSGSLEGIYVPKASVLEIRSLIRTRSMIVKDSTRTKNRIKSLLRFHGVDIPEEFTRSPIGRWSKRFLAWLHSIELSTEYGKKTLELHIEQFVRLRNMLLQETRAIREISRKAPFEKPMRLLTSVPGIGVTTAATLMVELDDIVRFKNADRLASFIGLVPMCHSSGESNGTGDITVRRHFMLRCLLVEAAWIAIRRDPAMTVAYTEYRRRMNPQKSIIKIARRLVNRIYYVLKHEKEYIPCVVE

SEQ ID NO: 69876 - protein, 415 aa, unidentified
MKKRTYRARKVNQINWNQVKERLSGEAAVFAIDVAKEKQYALLTNDDNSVSELFWWNHPQQTPGLLHDLHELACPMTVVMESTGTYGDALRYQFRQIGCDIYQASAKRVADAREVYDGVPSMHDAKAATIITWLHRQELTHPWQELTAQERQLNALRREYDMHQSQYQRNQGRLEANLNRHWPEVCYLLALDSVTLEHLLREYGSAERIAADAEAVAKKMKCWGKSRLTEEKIAQVIDSAAHTLGQPCTEAERYYLQALAEEMRHNRCQRKQAKRALEEIIRSDDELHEMALLIGLVTTAVLLSCHLDPRRFICARSYQKAMGLNLKERSSGRHIGQLKLTKRGSSIARRYLYFAALRLIRDDPVVKQWYQNKVDPRARNKAVIAVMRKLAKALWHVGRGEAFDVNKLLTVARAS

SEQ ID NO: 69877 - protein, 344 aa, unidentified
MYHYAGIDVSLESSTICVVDGTGKILRETKVASEPEALIGWFRSLGLALERIGLEAGPLSQWLYAALREAGFAVELLETRHVRDAFKAMPVKSDRNDARGIAQLMRLGWFRPVHCKSVEAQETRAVLTARKLLQSKLRDIENSLRGVLRGFGLKVGKTTECTFAERIRELVAGHPGLELVAKALLEAHAVLRREFNGLDKHTQKLARAHPQARLLMTTPSVGPIVALTYASAIDDPNRFRSSKATGAHFGLTPKKYQSGQTDYTGRISKIGDASVREALYQAAHVMLTKPIKNCSALKSWAMRIAKRAGMRKAKVALARKLAVILHRMLADAKPFNPTARTAVT

SEQ ID NO: 69878 - protein, 370 aa, unidentified
MQNIVHRPEGRAAIRTDLGAIFVSLELSRATWLITSLSPGAGEKMSKDVVQGGDIVSLLRRLVHLQEKTRGRRRKEFPPVVIQEAGLDGFWIHRVLEHEGIESHIVDSASIMTSRRRRRPKTDRIDGEALVRALLAYHRGEPRVCAMVRVPTPEAEDRRRVSRELKTLTAERVGHVNRIKGLLFAQGVSGYAPLRRDRRARLEELRTGDGRLLPYHLKRQIGRELDRLELLLEQMNTVAAERDALLVPAEEQAVPTPAKMLLGLRGIGPDFASILWQEGLFRNFDNRRQVAAYAGLAPTPWQSGAVDHEQGVSKSGNPRLRTTMLQLAWLWLRDQPSSALSQWFHQRVGDNGRIRKVMITALARKLLVAL

SEQ ID NO: 69879 - protein, 351 aa, unidentified
MIHIGMDLHHRNSVVCALSAETGELYTARRIHHDRIEELWQYLDQFGDQPIRVVFEAISNARWMYRLLGQRPNVEAVAVTPHKVKIIAETVSKTDKIDAAKLAWLSSVNMLPRAWLPDERVERLRELTRHRADLLCIRTRCKNQVNGILVRMGLQRPYDNIFGTLGRRWLVGLEFPKIMQLQVDHWMALLDMTSDRIVRVEGRIRRIIDSDPIWARAWALLDTIPGVGKVTICTILAELGDWQRFRNRSEVASFAGLVPVSKRSANSKRYGHISKRGSKELRRVLTEVAQLAARKVPRYGHLYARVKSQKCANVAKTAVARRLIEDAWTILMKDEPFRLMPVQAGSLMQVG

SEQ ID NO: 69880 - protein, 344 aa, unidentified
MDNHTQYSGFAGVDLAKKVMQIHFVTGDGEITDKQVKRAEFLDFFRNRTKCLIGMEACGASQDWARKLEAMGHEVHLMSPKAVKPFVSGQKNDYNDAIGIYKAMFNGVRRVPVKSTEIRDLQTLRRIRSQVTKDKVKEINHVRGLLAEYGIVMGKSITAFNKGISSALESLKERGDVSPLVAEELQTTVESIKTKIERQKRLDREIEQLARGCKNYENFLKTPGVGPFTAAMLCVLLCDPAIFANGRQFAAYIGLAPRSRGSGGKNFIIGIPSKFNCDSESRAVFVECAQALARYKNKSPWVDGILRRKPKKVAVIAIANKLARQVWAMANKGESFKQMTVLTA

SEQ ID NO: 69881 - protein, 316 aa, unidentified
MVISREGRSGKPREFKNMPQGHTALSNVLRKAQVTRVCLEATGSYHLDLAVALDDAGLEVMVINPKAAKEFAGAMQTRSKTDAVDATLLAEFAQRMPFKPWQRPDDLALGIRACARRITALGKQRTQTKNQLHAARQTALTPDFLLANLQHNIEYLDAQIEHLRQRVLDLIAADAHLQQSFDLLTSITGIAAASAIQLLGELLVLPPDMKAKQWVALAGLDPQVHDSGSSVHKKPRLSKAGNRYLRIALYMPALSAASHNPHVRGYYRHLIADRGLKKIQAVCAVMRKLLMAIHAMLKTRSTFDSRRFYSLTETPA

SEQ ID NO: 69882 - protein, 339 aa, unidentified
MKYTPVGVDIAKHLIQVHFIDEHTGEVIDKQLRRQDFLMFFCNREPCLIGMEACGGSQHWARELTKLGHKVRLLQARFVKAFVMGNKNDVMDARAIWMAVQQPGKEISVKTEEQQAVLVLHRSRRQLVKFRTAQINALHGTLLEFGETIHKGRAAMEREFPEALERMKERLPPYLITVLENQYNRLNELDSLIEDIEKQLTSVAKQNETCKRLLDIPGVGPLIATAAVATMGEASAFKSGREFAAYVGLVPKQTGSGGKIRLLGISKRGDTYLRALFIHGARAAALLTKEPGPWITELKKRRPASVAIVAMANKLARTVWAIAAHGSKYDKNHVSIRPY

SEQ ID NO: 69883 - protein, 344 aa, unidentified
MNSTTIAVDVAKSVFEVAVSSQPGHVRDRHRLSREGFARWLSEQPPATVLMEACGSAHHWARHAQRHGHRVVLIPPHVVRPYVHGNKTDRTDAKGLLEAFRNDEVRPVPVKSETQQALAALHRLRSTWQAPRTARLNTVRGLLREFGVVIPVGARQVVPHVRALLEDADASVPGLLRPALAEAVQEIGELEARLRAVEHQLEAAAAASLVVGHLRTIPGIGMLTATALVATVGDVQRFPSARHFASYLGLTPREHSSGARRHLGAISKRGDTYLRMLLIHGARAVLWHAKRPRALPLDRLRTWALELERLRGHNKAAVALANKLARIAWAVWKHGTGFTTVPAA

SEQ ID NO: 69884 - protein, 361 aa, unidentified
MHDHIPLAGLDVHANQSHAAVLDRASGELTTKRVVGPPSNALEFLESLGPGVRAVYEAGPTGFGLARDARERGIDLSVCSPSSIPRRNNRIKTDRRDAERLVRLFAAGELKLCRVPTVDEERFRDLVRAREDIRADLMRARHRMSKFLLRRDLRFGDRAGAWSTKHMNWLRRLRLEDPCSRAVHADYLTSIEALLQRRSALDQALEELWPESPFAETVARLRCFRGINTLTACGIAAEVGDFDRFRHPRKLSSYLGLVPSEWTSDERRRLGRITKARPRHARWLLVEAAHHYRHPPTVRDGLKARQVGQDPRVCAVAWRAQKRLYARYLKLSERRRRKAGVVMVALARELSSFIWEAATLV

SEQ ID NO: 69885 - protein, 359 aa, unidentified
MDAQEGTVRCIIGGVDTHKDLHVAAVVDEQDRVLGTQSFASTRQGYRQMLAWMRSFGEVQRVGVESTGSYGAGLLRFLQQAGVTVLEVTTPDRQDRRRRGKNDDFDAQNAAHAAFAGIRTVTPKSRDGMIEALRVLSACRKTAVTARRIALQMIQNTIVCAPESLREMLRRMTRMQLVRTLAAWRPDLRAYRDMEVAYRISLKSLARRYLELHDEIADLDTMIAAFVDELAPNLVARNSIGYVGAAQLLLTAGDNPERLRSEAGFAALCGVSPVPASSGKTARHRLNRGGDRAANSALHIIAIGRLRTDARTQAYVAKRIGEGHSKLEAIRCLKRYIAREVFTLIKQRQREINQTRIAA

SEQ ID NO: 69886 - protein, 345 aa, unidentified
MELHTIGIDLGKTVFHLVGLNQRGEVVVRKKFSRKQLLHFTANLQVKLIGMEACGGSHFLGRALREQGHEVRLMPAQYVKPYVKTNKSDYIDAEAIAEAVERPKMRFVPIKSDDQLDLQSLHRVRERWVMRRTAVINQIRGVLLERGITLRQGRRHIDAALPGILEDASAQLSGVLRLLLAQLRQELDHLQMRIDEADAVINKIAGDNEACRRLVAIPGIGPVTATAIIAAIGNGAAFKKGRGFSAWLGIVPGEYTTGGKQKLLGISKRGNSYLRRLFVQGARAVLQQSAKQSSGLSAWLAQLTTRTHSNVAAVALANKLARMAWAVLAKNEPYRPPMLAGAATE

SEQ ID NO: 69887 - protein, 344 aa, unidentified
MTLTAGLEIGKRELVLCAGDRTIQFSNDAAGHRKLLQYLSKSGADVRVCMEATGYYHYDVAIALHAHPRVQVQVLNPFVARRFAEAWLQRAKTDRVDAAGLQEYAARMPHQEWEPPSPALLALRSITRRMRQLADLKSSEGNRLHAATIAEALPAIVAESVREDLAHLDGQLKRLQREARALVKQDPTLARLLQLLVSIPGIGERSGLYLLGELAPLARDLSARQLVAHAGLDPRPVESGSSIHKPRHISKRGSSRLRQILYMTALVAARTNPAFAAFYDKLQKQHKAKKLALVAIMRKQLHAIRGTWASDTPFDAKKLFPKLDVSKSAVPTPALQEVPLTIPA

SEQ ID NO: 69888 - protein, 325 aa, unidentified
MFYLGIDVSKAKLDCALRNADSGKVKTKVVPNTAEGFQKLLDWLKKNDAPSPHIIMEPTGVYHELAAFFFVDAGLTISLVNPVQLRQYAGGINVKTKTDKMDSQVLARFGAEQKPAPWEPPSAAARTLKALLARRDAVADDLLREKNRQEKLEATETPQLVTESVEGSIKFIEAELKRLQKCIDDVIDNDPDMRGKKELLNSIPGVGERVSNHMTCLLAGRDFKSGEQLAAYLGLIPVSWESGTSVRVAPRMSKAGPAHLRKLLYMPAIVAVKRNPHIKVLYERLLGRGKSKMSAIGAAMRKLAHLCFGVVKTGRAYDENFTVQP

SEQ ID NO: 69889 - protein, 403 aa, unidentified
MNVNCVGIDVSKGKSMIAVMRPLGEMVIPPFEVGHTGIELCELSSRLRELGGETRVVMEATGNYHLPVASFLYDSGFYVSVVNAMLVHGYGNNSLRRAKTDKKDALKLANYGLDHWLTLPRYIPEDEVRLMLKTTYRQYQQCAKVQTMLKNNLISLLDTAFPDANRLFASPARADGSGKWVDFVAAFPHCECVCGLSEKAFAAKYQKWCKKHGYNFSQDKALDIYASACGHFSVMPKTDTAKFLVEQAVSQLRAASAALTALRNEMQSLAASLPEYPVVMGMFGVGPALGPQLMAEIGDVRRFHSKKALVAFAGIDAPPYQSGQIEVRSRSISKRGSSALRRTLFLVMSVILQRSPADEPVYQFMDRKRAEGKPYRVYMMASANKFLRIYYATVKQYLDSLEA

SEQ ID NO: 69890 - protein, 390 aa, unidentified
MSKVFFGIDVSKDSFNYCLIDESMKTIESGRFNMDREGFEPFKEIIDRYPDSIIGLESTGGYHTNLLSFLISFKKEVCLINPVLIKRFASSVTLRKTKTDVIDASVIAHFILKNKDYIHYFILDTTDEIKTLARMREDIARDVAKAKTRLKQHLAITFPELVSRYNPFTDTILTILKAFPTVEDIRRAKVPDIKAVMEGIRGRDACISPEGLKDLAEGSIGKSSDRYRVIIRHDVDMLFFLTGKLKEITDAFMEEIERTSKKDMDILTSIKGIGDITASHFMVEVGDVNRFKSKGSLIAYAGTDPSIVHSGTTINRKGRISKRGSTSLRRCLYLMAYGVMKFNSYFREYYLKKRGEGMQHRKAMIALCNKLLRVIYALLKKGEYFCCPVH

SEQ ID NO: 69891 - protein, 414 aa, unidentified
MEKVYDICCGVDVHKKLIVACLRSGRKNEIRQYGATTRELLEMASWLYEARCEMVAMESTASYWKPLYNVLETWELPVMVVNAHHMKAVPGRKTDEQDAEWIADLLQHGLLKASYIPGKEQRELRELVQYRKSLIEDRGRELNRLQKMLEGGNIKLSGTVTQINGKSARNILNFITDGGYFDDAKYDEMLANKEIASNLKASKEQIIDDLNGVLSPIQRRVMKELLSHLDELNEHIRNLDDDIDRFMKQEDKNAADAIQEIPGIAATSAQVIISVIGNDMSRFPSDRHLSKWAGLCPGNNESASKRKSGKTTKGNKMLRTTLVNCAHSAAKVKSSYFSALFARISAHRGKKRAYVAVAHSMLIAIYHVLNDVAFRDLGADYYNQFNRERKANGMLKKLKALGYEVTIAAVPELA

SEQ ID NO: 69892 - protein, 362 aa, unidentified
MTQVRSWAGLDVHAAKVLAVTVDAVSGELCSRTLTGRTSEVVEFCSSLPGPTRVAYEAGPTGFGLARALAAAGVGCVVAAPGKIERPAQDRVKTDRRDAERLVRLLMVGSLYPVRVPSTEEEALRDLVRAREDVRGDLMRARHRMSKLLLRHEIVFEGPGSNWTTRHREWLGRLELSDRGAQVTLLDYLGAIDALIVRRDALEGTIGELVPSSPWAQSVARLRCLRGMDTLSAVGLCAEIGDWRRFARAGQLMSYVGLVPSEDSSGERRRQGSITKTGSRHARRLLVECAWHYRRAPAKGAALKRRQDGQDARVIALSWKTQQRLHRTWRRLDAERGKRRTIVAVAVARELAGFCWAIANAD

SEQ ID NO: 69893 - protein, 351 aa, unidentified
MYTLGIDLHKKSSVWVLIDEQRTELWKENVLCHPNHVSIAVEKIPVSPKEIQVAIEPVAGWRWVSQQLEDIGMKVHIAHPRKIQLIAKSTKKNDDEDSRTLANLLHSGFFPEAHRTKEEIYQLRLLLRERTFIVRQRTSVKNQLHGIATTQGLHLITGGNPLFKKGKAGIMTGENFVLKELHFLEEDLGKRIKPFDEKLLEEAKKFPEANILQTMPGVGVITALTIIAEVDDFKRFKNGRKLTSFAGLVPRQRSSGETVRYGSITHAGSAPLRTALVETAMRIREGNAPELFSFIKRLTPICGAKKARVALARKLLVIMWKMVTTNTAYNPKFLFSSCTMKVSDLDTGSDV

SEQ ID NO: 69894 - protein, 373 aa, unidentified
MKTTITHVAMDTHKKEHVVASVDPDTGEIKVFRVRNTVREITRMVHRLQRNAPGEVRFCYEAGVCGFTLKRRIEALGSACMVIAPSLVPVKRGDRIKTDRRDARKLLGQFLAGQLTEVFAPSVAQEAARERTRCRQAAQENLRRTRQQLNTFLTRHGYVYSEGRHWTQRHVRWLLSLEFDSPDLQEVFECHYSELEHCRQRLATLDKEVAALAARPAYREIVGVLRCLRGVDTLTAITLVTELFEFGRFDSPRKLMAYLGLVPSEDSSGEKRRPGAITKTGNGRVRRLLIESAWHYRHRPSVGETLKRRRNGQPSWAIDTADRAMFRLHKRYRRLMERGKSANIVVVAVARELAGFLWALLRSHQVRASEPGT

SEQ ID NO: 69895 - protein, 355 aa, unidentified
MNDAKYIGLDVHQATISAAVLDSTGKLVMECILETNAATILQFIHGLRGSLHVTLEEGTCAAWLHDLLKPHVTQVLVCDPRKNTPMKTGNKNDRSDARKLAELLYLDKLHPVYHGETGIRALKELARSYLALTRDTTRVMNRLKALYRSWAIPCAGQCVYAPRYRSQWLGKITEAGVRRRAKIYYQQLDALRSLREQVRRDLLTEGRKHSAMKLLRQIPSVGPIRAVLLIALMQTPHRFRTKRQLWAYCGLALKTSTSGEYRFVEGQLRRSKKFLAIRGLNANHNHDLKNIFKGAATRAAAVPGPFQEFHAALVAKGMKPTMARLTLARKIAAITLIVWKKGVGFDAEHLKQQAA

SEQ ID NO: 69896 - protein, 444 aa, unidentified
MQIEVSDEAVELVDRVAAIDIAKASGMVCVRLPHPAVPGRRTQEVFAVAADSGAILELGERLTGYGVQQVVMEATGAYWRPFFYLLEAAGLSCVLVNARDVKNVPGRPKTDKLDAVWLAKLAERGMLRASFVPPKPVRQLRDLTRTARVLTQERTRHKQRVEKVLEDAQIKLSTVASDIFGVSGRAMLDALCAGQRDPQILAALARGRMLIKQPALVKALTGCFEEHHAFLIRTLLDTIDHLSGQIDALGERIEQLLAKIEPPAPSGPDQRPGTGPGGGGLLPLAARLDEIPGIGPSTARVILAEVGPDIRVFPTAGHLVSWAKLSPRTIQSGAKSTHGPTGKGNPWLRGALGEAAAAAARTDTFLGARYRRLVKRRGHMKALVAVARSILVIVWQLINDPAARYHDLGADHYQRHTDPERKTRDLVRQLHALGHQVTLAPAPA

SEQ ID NO: 69897 - protein, 313 aa, unidentified
MIIALRYVGIDVSKKHLDIFDEADGVPRRIANATQAITQQVARWQCDALVVFEATGIYDLALREALRQAGIQFARINPARARDFARASGLLAKTDPIDARMLAAFARAMQPAPEQVADPARGALARLAKRRDQLVLMRAQEKNRRSEADDRAMAERIGRLIEVLDSEIAEIEADISALIKAEAQIADDAKLMRSLPGVGPVACMQLIAQMPELGRVGPKQLAALAGLAPFNVDSGAFRGKRKIAGGRKRVRDALYMAALNAVRRADPFKAFYARLRQAGKPAKLALIAVARKLLTVLNAMMRDRKPYLQTKPT
